United States Patent Application Publication US 2017/0009304 A1 - sequence listing, part 32

SEQ ID NO: 669079 - DNA, 50 bp, Homo sapiens
gggcggtccgggctccacacttagcttcggcactgaaggctttgtggaac

SEQ ID NO: 669080 - DNA, 74 bp, Homo sapiens
tctgagaagggagacgacgctgctgggtccgctgagcggggcgacccgagcacacagcatgcctctgcaatgcc

SEQ ID NO: 669081 - DNA, 75 bp, Homo sapiens
ctgattgggacaacattcagacccatttccagtcatgatttaaaattggtggtgaatggtggacatggatcgatt

SEQ ID NO: 669082 - DNA, 75 bp, Homo sapiens
cggggttcgggtgtctcgtgtgtgaacatcacaggttaacacagaaatctgcctcctgggccatgccgcttctaa

SEQ ID NO: 669083 - DNA, 75 bp, Homo sapiens
ggcctcactgggacccccaggaggtgaccctgcagggctccatgaagaaggagttcccgcagaacctgggaggca

SEQ ID NO: 669084 - DNA, 75 bp, Homo sapiens
tcgacagcattatccaacggctgctggaaggagctcattgacatgaaccagcaccatctgaatgccctcggcgtg

SEQ ID NO: 669085 - DNA, 83 bp, Homo sapiens
gcgagtttccgatttaaagctgagctgcgaggaaaatggcggcgggagtctgcagatctccaggggagcccaccagcctagtc

SEQ ID NO: 669086 - DNA, 100 bp, Homo sapiens
aaaacgcaagccaggctaaacagttggcaggatgtggagccacccaaaatttcaagcacaaaaaacatttccattaagcaagagcccaaaatatcatcca

SEQ ID NO: 669087 - DNA, 99 bp, Homo sapiens
ggcggcgccaggacatggagctcgagaacatcgtggccaactcgctgctgctgaaagcgcgtcaagcatactggagcatagtgaaagagtctattttga

SEQ ID NO: 669088 - DNA, 50 bp, Homo sapiens
gttcagctaaagagctgctacagatatcctggctatcctgctgaccgacg

SEQ ID NO: 669089 - DNA, 100 bp, Homo sapiens
cggaagtgtaacgttgaggcccttcttgtgtatctggagaaaatagaggttacaggaggttccagtggcatcgggaagtgcattgctatcgagtgctata

SEQ ID NO: 669090 - DNA, 99 bp, Homo sapiens
gaatagacacggcagcgcagtgcagatccgcaggcgcaaggcttcaggcgacccgtactgggcctactctggaggaaggctgaacaaggacctgcgaca

SEQ ID NO: 669091 - DNA, 95 bp, Homo sapiens
ccaggatcatccgttcttccgaagatcctaatgaggacattgtggagagaaacatccgaattatgcttgaagtagaaaatgccatgatgagaaaa

SEQ ID NO: 669092 - DNA, 100 bp, Homo sapiens
aaactcgcctgctgcaattgcagatcttcagcggggagatcgacttatcgccattggaggaatcttttgggtgagttgtgaggctggcacctacattcgg

SEQ ID NO: 669093 - DNA, 100 bp, Homo sapiens
accgccagaaaaccctgtcagtgctggtgtctcaagcagtcacgtgtatccgggtactggatggacctctcacagacagcatggaggcagtggcgttcaa

SEQ ID NO: 669094 - DNA, 105 bp, Homo sapiens
tgaccgagagcgtgaccgagagcgcgaatatcgtcatcgttagaagttagttgaatccatggacatgaaacccacagatatagagggttggcccggtgcagtggc

SEQ ID NO: 669095 - DNA, 107 bp, Homo sapiens
cacatggatgaggagaatgaggattttgcgccggctgctcagaagataccgtgaatctaagaagatcgatcgccacatatggagtcttgctgtgtcacccaggctgg

SEQ ID NO: 669096 - DNA, 100 bp, Homo sapiens
tcggcaagggcaacttcgcggtggtcaagcgggccacgcacctcgtcaccaaggccaaggtcatggcaaaaccccaaaagatgccgcgtcagttcgagcc

SEQ ID NO: 669097 - DNA, 82 bp, Homo sapiens
caggagtttattggagcgcagactgatggcgcaaaggcattttgaaagcgaagcagaagccgtagaatcagcggcgagcctg

SEQ ID NO: 669098 - DNA, 75 bp, Homo sapiens
tatcgcaacgacaagaggatcaagctgcagatctgggtgtgtccagcatcatggcctcctcccagtaacttcagg

SEQ ID NO: 669099 - DNA, 83 bp, Homo sapiens
gtggccacgaggacgtcaccatgcaagagtgagccatggagctacgtgtggggaacaagtaccgcctgggacggaagatcggg

SEQ ID NO: 669100 - DNA, 83 bp, Homo sapiens
attttttttcccagattgaccccaaagttgcatttcctcgtcgagcgcaacccaagacaatgcagatcttcgtgaagactctg

SEQ ID NO: 669101 - DNA, 100 bp, Homo sapiens
aacgagcagtgatggctgaaaaggatgctttagaaaaacacgatcagctcttagacaggtcccaaaggcaagcagttagaaggaactgaatgtccactcc

SEQ ID NO: 669102 - DNA, 83 bp, Homo sapiens
cccctgctatccccaacaagaggaaagacacacctaccaagaagccagtcaagcggccaggcctgtttaaagaagaaaacccg

SEQ ID NO: 669103 - DNA, 99 bp, Homo sapiens
tgatggcaataatttgcttgatggcttagaactctccacagccatcactcatgtccataaggaggacagtcattttgtttactcattcagccctgttgc

SEQ ID NO: 669104 - DNA, 83 bp, Homo sapiens
cggcgggacaacgcctcctcacttgctcctctacgtggttcagcactgagtcatgcttgcttctgctacgcactgatttgttc

SEQ ID NO: 669105 - DNA, 100 bp, Homo sapiens
cctcatcatcccgtcagagctgaggtacttcgtgaagacaagaagctccgccacgcccgcagtggggcccccgctggagggcccagagcaccaggcaccc

SEQ ID NO: 669106 - DNA, 121 bp, Homo sapiens
ggcattgtgggtgtcctggttctccatcattgtcaccctggccctcgcggtggctgcctttaacacgatgaggcgagtggtacgacagagcaagtttcggcatgtatttgggcaagcggtg

SEQ ID NO: 669107 - DNA, 100 bp, Homo sapiens
cccacaggagtcatgcccagtgtgtgaagattgcagagggaatggcatacatcgagcggaagaactacattcaccgggacctgcgagcagctaatgttct

SEQ ID NO: 669108 - DNA, 83 bp, Homo sapiens
aatctaacgtgtcgttaatagaaagaagaacaggcaagaagtggtccagccggcgaagcttcaggatgagttagagaaaggtg

SEQ ID NO: 669109 - DNA, 75 bp, Homo sapiens
gctgttaccccttcagacagttctgaaattatggccaagtgtgatggttgtaaacgacagggtaaactaagcgag

SEQ ID NO: 669110 - DNA, 53 bp, Homo sapiens
ggccgaccttgtccacacagtccatgtaccataacctcttgggtagtgatttt

SEQ ID NO: 669111 - DNA, 100 bp, Homo sapiens
cccacacccactctggtgaggcctcttctcaagctggtccacagtccttcacctgaagtcagtggggcagacactggcctcagatacctgacctggtacc

SEQ ID NO: 669112 - DNA, 99 bp, Homo sapiens
cgcggagacccttcgagaaatctcgtctcgaccaagagctgaagctgatcggatgaccgagtgggagacagcagcaccagcggtggcagagaccccaga

SEQ ID NO: 669113 - DNA, 100 bp, Homo sapiens
ctgggcagccccgcacgccgtgcgcgtcccgagcccgcggggcagctaccgctcggtcatcatcagatttgaaatatttaaagtggatacaaaactattt

SEQ ID NO: 669114 - DNA, 75 bp, Homo sapiens
cgaaaacatgaccgctgagcccatgagcaattaccagctctggctgggtcgccacaacttgtttgacgacgaaaa

SEQ ID NO: 669115 - DNA, 50 bp, Homo sapiens
ctcctggctccaaagctgcagttccaggagaatggtgttgaacgcgtgtg

SEQ ID NO: 669116 - DNA, 100 bp, Homo sapiens
aggccggagaaggccgccgggcccgggcatggtggtctggggcaacgcggaaggcctcattgctacgatttcagagtaccctggtaatagctgagcatgc

SEQ ID NO: 669117 - DNA, 73 bp, Homo sapiens
tgattgccacctggatgctgttctctctcttcacggtatttcaggacagccaggagggggcgcacatccgccg

SEQ ID NO: 669118 - DNA, 82 bp, Homo sapiens
gagggcttttactcctacctgtgtaccgagccaggattttttatcaagcagaaatgcatcgaacaacgagaatcaagatcac

SEQ ID NO: 669119 - DNA, 75 bp, Homo sapiens
ccgaaggctccgctcacgcccgggctgctttgctggctctgcaagaaaatggactagacgcaactacagtgaaac

SEQ ID NO: 669120 - DNA, 80 bp, Homo sapiens
ctcaggcctttagtgatgatgataccagcgggcaagcagaaaacaagaggctcaagaggggcagcccccgcatagaggag

SEQ ID NO: 669121 - DNA, 76 bp, Homo sapiens
agttcgtctcttacgtctgcggaagtgcagctgcctcagttcttagcgcagatggagttttaacattgaatgcgga

SEQ ID NO: 669122 - DNA, 116 bp, Homo sapiens
aggcaacgtgttggaccttccggagcttctcagaagacagagggttttcttttgagtggccacagatgtctttaattccaaaaacctggccgttcaggcacaaaagaagatcttgg

SEQ ID NO: 669123 - DNA, 82 bp, Homo sapiens
cgaagagttggatactcagcgtcgctggcagccgctgtacttgcctcttctgaaacagtctccctggagcaaccatcagagc

SEQ ID NO: 669124 - DNA, 100 bp, Homo sapiens
ctcgtgggcagcctcccctcggaactcgggcatcatggcctcagctggagaagaagcaggcgctccctccattccagccacagatcacagacgactacgg

SEQ ID NO: 669125 - DNA, 75 bp, Homo sapiens
ctttggtgccctcaacatctctcagagacgaaagcagagagagatcatcattgcctgaatttagctttgtgactg

SEQ ID NO: 669126 - DNA, 90 bp, Homo sapiens
gcagagtccccgtacgcctacagtaacggtaaaatgtcggttccaggaccttaccaggcggccactgggccttcctcagcaccatccgca

SEQ ID NO: 669127 - DNA, 100 bp, Homo sapiens
tctgacgcgacatctggacacggcgcggcgctggcgctgccggagctgtcgacccggcctggcgccggactagccctgcctctttcttgtcgcagtcagt

SEQ ID NO: 669128 - DNA, 98 bp, Homo sapiens
aggaccaagaccaaccatggccaagttaatgacttaattcagtgcacaaatgagatgaatgtgaacatcccacagttggcagacagtttatttgaaag

SEQ ID NO: 669129 - DNA, 75 bp, Homo sapiens
tcagcctcctgaatagctgggactacagtcagttcatcagttacttcctcccacttaccgagatgtttggctgga

SEQ ID NO: 669130 - DNA, 90 bp, Homo sapiens
catacttcttgtagtaaccctgtcaccgtctgctttttgaagctaaactagagaaagagatgacttgatgtctgcactagtttccgtaag

SEQ ID NO: 669131 - DNA, 100 bp, Homo sapiens
gaggacctgcaccgccaagccaagctcaacctcaaatcagtactgagggattccaggagggcttcgtgtatggacctcaagcgttggaggtagcagactt

SEQ ID NO: 669132 - DNA, 101 bp, Homo sapiens
ggatctgcagccatttatattgcttaggctactggtatcctccatgaaatgtgggatccttccaatttctcaagagtctcttcttctgggagatgttgcct

SEQ ID NO: 669133 - DNA, 101 bp, Homo sapiens
atcatggtgcagaaataccagtccccagtgagggtgtacaaatacccctttgaattaattatggctgcatgtgggcacattccatgacagtacaggattat

SEQ ID NO: 669134 - DNA, 75 bp, Homo sapiens
gggtgtccctaaactagcagtttagggtgtcagcttatgttcctgaggaagaattgaaggcagcagaaatagatg

SEQ ID NO: 669135 - DNA, 98 bp, Homo sapiens
ggctgctccccaggacctgagcaggaacctggagttttcagatgtctttggtggacttgggaaagaggttgctagaagcagcaagaaaaggccaagat

SEQ ID NO: 669136 - DNA, 90 bp, Homo sapiens
agcagtcagttgaacaagacaacttatttgatatttcttcagaggccccacagtatcaaatatccgcctggctggattagagtatgttct

SEQ ID NO: 669137 - DNA, 98 bp, Homo sapiens
agttgcggagcccgcccgccggcagcgccgctccccagggagggagtccgcagcctgagattgggaaaatgaggtacgttagtgttcgcgattttaaa

SEQ ID NO: 669138 - DNA, 50 bp, Homo sapiens
tatccccttggcattgatccttttgacaacttaaatgctgcgcatgaaac

SEQ ID NO: 669139 - DNA, 82 bp, Homo sapiens
aaatgcgctcagcttcaattgccgcggcgagtcctttgcacatgttggcaacacacgcatccgcatcggcctccctgcccac

SEQ ID NO: 669140 - DNA, 98 bp, Homo sapiens
tcgctcggccgcctgctcgaccgtttgcccagcttccagcagagctgcagaacccagcaagcgtagtcgaggagccctggggtccatcgccctcctgg

SEQ ID NO: 669141 - DNA, 100 bp, Homo sapiens
cccctggatcttcacacagctgcttccattggccagtatgaagtggtgaaggagtgtgtgcagcgagcccacaggcggttttgtgagctgcttccccagg

SEQ ID NO: 669142 - DNA, 101 bp, Homo sapiens
cagccagtactacctggtttcatggggcataaggaaatggtggcaggcacttcctcctaacaagaaggaagtagttaaagaaaatataaggaagaataaat

SEQ ID NO: 669143 - DNA, 82 bp, Homo sapiens
atgaagaagcagtcaaaaagatgcttgtggaagccacccgggagtttgaggaggttgtgtgtcagagatggctttggattcc

SEQ ID NO: 669144 - DNA, 100 bp, Homo sapiens
gtcgaagcgagggtctgaagttcacgactactagaaggggaggggagtggaaaggctctcagtgaaaaagactcggggtctaaatgtgagaccaagaagt

SEQ ID NO: 669145 - DNA, 82 bp, Homo sapiens
aagtttgagatcgccctgcccgtcgccaatgacagtgatcccggccgctgatctgtcgcagcagatctccactgcaggcacc

SEQ ID NO: 669146 - DNA, 50 bp, Homo sapiens
gccgccgccccggagccgccctaaagctgttgatggatacgtgaagccac

SEQ ID NO: 669147 - DNA, 82 bp, Homo sapiens
ccaggaatacagctttgcattagggtcggctcgtgctcatcatcctgtgctccgtggtcttctctgccgtctacatcctcct

SEQ ID NO: 669148 - DNA, 75 bp, Homo sapiens
ccaaatatcctcggaagagcgctcccaggagaaacaagttagtactccagtagttaagcaaggaccagtgtcaca

SEQ ID NO: 669149 - DNA, 100 bp, Homo sapiens
agaagatccttcaaaattaaaagaggagcagcatggcatttcagtcactggtttgcagagtccagaaacaggaccttgccctgtcactcaggatggagtt

SEQ ID NO: 669150 - DNA, 96 bp, Homo sapiens
tggcgaggatgcaccttcccctgccttggaaaggtgtcatggagaaactccagctgggcccagagattctgcagcgggaaaatccaaggcttattt

SEQ ID NO: 669151 - DNA, 126 bp, Homo sapiens
caggacccacttgcagcatggagtcgcccgcctcgagccagcccgccagcatgccccagtccaaagacaatgcagatcttcgtgaagactctgactggtaagaccatcaccctcgaggttgagccc

SEQ ID NO: 669152 - DNA, 74 bp, Homo sapiens
tgtacaccctcgtcagcggctccctgcccttcgacgggcacaacctcaaggtggacccaagtggagagattgtg

SEQ ID NO: 669153 - DNA, 100 bp, Homo sapiens
accatgcccgccgtggacaagctcctgctagaggaggcgttgcaggacagcccccaggaaacttggatttaactggccagaagcaggtattcaaagcaga

SEQ ID NO: 669154 - DNA, 100 bp, Homo sapiens
ggccgacaggctgttccccggatccagcttcctggacttgggggatctgaacgagtcggacttcctcaacaatgcggtgaaaggtgtagcagtcactcgg

SEQ ID NO: 669155 - DNA, 83 bp, Homo sapiens
ttccgctgtgttgattgaggacgttcccttcacggagaaagattttgagaattgcattttgtgaaaaaagaacaagaattttc

SEQ ID NO: 669156 - DNA, 100 bp, Homo sapiens
atgcttctggctgcaaatttacaggaatgtatcctgtcaggtataatgtcagtgaatggcaagaaagttcttcatatggatcgaaacccttactacggag

SEQ ID NO: 669157 - DNA, 82 bp, Homo sapiens
agaagtagagtatttcaaccataaagacatcttaattgggcacgaaagaggtctctaattaacagaagatggcaaagcccag

SEQ ID NO: 669158 - DNA, 100 bp, Homo sapiens
tattaaaagccacagaagtccagttccctgtaaaaccggttgtaagcagtgaagccaagtttgccaacccagactttatggagtccatctcagatgttgt

SEQ ID NO: 669159 - DNA, 100 bp, Homo sapiens
gcagttcgccgaggcggccggcaagtactcggcggcaatcgcgctcctggagccagcaggaagtggtgttgtggcggaagggtgacatcgtacggaagag

SEQ ID NO: 669160 - DNA, 75 bp, Homo sapiens
ctgattgtttgcaggttgtcagagaagtacaggatgcctttgtggaactgtacggccccagcatgcggcctctgt

SEQ ID NO: 669161 - DNA, 83 bp, Homo sapiens
atcatcctgggctccaaggagaggattcctgtctgactaaagggacctcaaaaaggagggaaaatggcttctgagtctgaaac

SEQ ID NO: 669162 - DNA, 90 bp, Homo sapiens
gcttcacggccagcttccagggcatcgtggatgcctacggcgtgggccgctaccaggaggtcaaccccgccagacgaggacagccggctg

SEQ ID NO: 669163 - DNA, 102 bp, Homo sapiens
gtcaacagtctagcagatcagccagtctctttcatcatcaagcagacatactcaagagcattagtttggatgaattcaagtcattttgccattttacaaccc

SEQ ID NO: 669164 - DNA, 82 bp, Homo sapiens
cgcacctgcagctctgctgagagagtgcaagccgtggggttgctgctgactcagccattctagaagttcttcagtccaacat

SEQ ID NO: 669165 - DNA, 100 bp, Homo sapiens
cagtatgcaaggccacgacccacgagatcatggggcccaagaaaaagcacctggactgcatgctgcagacagacctttccgtccttcatgaacacacgtg

SEQ ID NO: 669166 - DNA, 100 bp, Homo sapiens
cggaacccagagactgcatcagagccactgtctgagattttggggaatgtctcagaattccaaagagtggttgaagtgctccaggacagcgtggactttg

SEQ ID NO: 669167 - DNA, 100 bp, Homo sapiens
aagacactgcttcaaacgagaataaagaaaaaaatcctataaaagagaatttccctttcaacaacccctggcagacagagtttcactcttgttgcacaga

SEQ ID NO: 669168 - DNA, 83 bp, Homo sapiens
aatactggtggaaccagaaccattatttggtgttcctgcggatggtggatgcctgtgccagcttcctcactgaagccttgaac

SEQ ID NO: 669169 - DNA, 98 bp, Homo sapiens
ttagatcttgtggccaagagttcagaccgtggcgaagtggagagtgacatgcagttggatggcggtgactgcgtggaaagatgaatgggagggctgat

SEQ ID NO: 669170 - DNA, 90 bp, Homo sapiens
gctgggcagaggcttgggccgccgagctggacccggaccggttttggatgacctactccctgactcggttcgccatctacgagactgtgc

SEQ ID NO: 669171 - DNA, 100 bp, Homo sapiens
ctcgtaaagatgaaaagctgctgtcgtttctaaaagatgtgtatgttgattccaaagatcctgtgtcttccttgcaggacaaccctccatatgataaggg

SEQ ID NO: 669172 - DNA, 100 bp, Homo sapiens
tgggcatggagcaccaggcggtggtgggcgccgtgaagagccttcaggcgctgggcgagcctacaccgatttcttcctcccgctgctaagccgctgtccc

SEQ ID NO: 669173 - DNA, 100 bp, Homo sapiens
caagaagatgagaccgggggaggcgacgctaagttgctgatcgtggcgtacctggagtagaacagaaaaattattatgtctgtgttcccttgggactcat

SEQ ID NO: 669174 - DNA, 96 bp, Homo sapiens
acaaggtgcagccctcctctatgagtactgtcagcaaaagggaatttcctacaagcagtgtggcaaggccagaaatgtacacacaggagagctggc

SEQ ID NO: 669175 - DNA, 90 bp, Homo sapiens
gttgacgtcgtccgagagtcttaaaatcctgctctggccggattccagactcgtgggggaaaggctggttgatggacggatggctacatg

SEQ ID NO: 669176 - DNA, 80 bp, Homo sapiens
cctcagcgactcttctgacctccgcgcgacgtacccgccgccgccgttggctggaggcataatcaccagcaacacccggg

SEQ ID NO: 669177 - DNA, 100 bp, Homo sapiens
ctgcagaggacacgaggcggcgggctggagacatggaccgcggcgagcaagagacagatgggaccgtgttcagaattcacacaaaagctgaaggatttat

SEQ ID NO: 669178 - DNA, 101 bp, Homo sapiens
gggaaacaggcttcacatgtttcttgtacagttgagatgtgcagtgttacaactcctttgcagtgtgccctgaaccgccctgccttctttgctgagaggct

SEQ ID NO: 669179 - DNA, 50 bp, Homo sapiens
ctcaatgagattggtttcattccagatgaggcaggtggaagtcatcataa

SEQ ID NO: 669180 - DNA, 96 bp, Homo sapiens
gaacctgcaatttaccaagacctgtacacacattacataccagttaaagaccctgcagaggaattacggcaggctgcagcaggatgtcctccagtt

SEQ ID NO: 669181 - DNA, 98 bp, Homo sapiens
agaagttcttccagttcgcagtcaagatctcgttccagttccagagaacgttcgagatctcgtgggtcgaaatcaagacttcacagagaatgcagttg

SEQ ID NO: 669182 - DNA, 87 bp, Homo sapiens
gcgtccgaggctcgcgggcggcgggcccggtactatactggcaattgctggagaagattttgcaattgttgcttctgatactcgatt

SEQ ID NO: 669183 - DNA, 100 bp, Homo sapiens
tcaaaaacaaaattctgaactcaggacttggcaagtcgtttggactgggagactcttgtgcacgaaaatctgcccgggctaatggaaatggatcaggatg

SEQ ID NO: 669184 - DNA, 75 bp, Homo sapiens
actacagaaacctggtctccctaggtcagcccaaggctgccccctcggtcactctgttcccgccctcctctgagg

SEQ ID NO: 669185 - DNA, 80 bp, Homo sapiens
cgaaggagcggaagaatggcagtgctcaaactcaccgaccaggccaaccaagccctcgagcagttattcccatgtcctgt

SEQ ID NO: 669186 - DNA, 100 bp, Homo sapiens
agggacgtgttggacacgctgactttgtaggctccgccaagaggcgccgcaggaggtgaaagaactcttttcttctttgggagtcgaatgtaatgtcttg

SEQ ID NO: 669187 - DNA, 82 bp, Homo sapiens
acgaaagcaggtgactctctagtcaacttccgacttggactccgaagatcgagccaaatctcctcagccacctgttgaagaa

SEQ ID NO: 669188 - DNA, 100 bp, Homo sapiens
tcttctgggagctcaactatgacttcctgcccaactactgctacaacggctctaccaaccgacctgcgaccgcatcaagcagtccgccagcggaaccaag

SEQ ID NO: 669189 - DNA, 82 bp, Homo sapiens
tggcaaggccttctccaggccctggttactgcagggccatgtccgcacccacacaggatggatggcaagcggcggccaggcc

SEQ ID NO: 669190 - DNA, 75 bp, Homo sapiens
cttctatgtttccacatcggtcagaaaaagatgaaaggccattgctgctctggagctgtgtgtgtgtgtgatgac

SEQ ID NO: 669191 - DNA, 96 bp, Homo sapiens
ctggtgagcctcatcacacaggatccgcccctggacatggaggagaaggtccgcttcaatgggcatccccaccatcagatggtgcggggcagaggg

SEQ ID NO: 669192 - DNA, 96 bp, Homo sapiens
ggctcctcccttcagctttggtccctcggggcgtctgggcagcctacgctttccgagggagacgatggactgagctgatccgcaccatggagtctc

SEQ ID NO: 669193 - DNA, 75 bp, Homo sapiens
ttgttaaggattccaagtaactcttatttgatgaagcagatgatgatgatgatccagaatataatttcctggaag

SEQ ID NO: 669194 - DNA, 83 bp, Homo sapiens
agtcctaccactgacttctcttatggaatacctgctgcagagatttcatgataaacaggggtcacatgacgacagaagccaag

SEQ ID NO: 669195 - DNA, 100 bp, Homo sapiens
tctatggcaccgtgcgccgcttcctctcggtggtgcagctcaatcctttcccttcaggtgcgcgtggaattcatggacgacacgagccgatccatcatcc

SEQ ID NO: 669196 - DNA, 100 bp, Homo sapiens
ggcggctcagttgtccatgaccctgaaggtccaggagtacccgaccctcaagggacacagcaggtcaggagagattcaacagcattacctcagcttatta

SEQ ID NO: 669197 - DNA, 101 bp, Homo sapiens
tgtgcaatgctacatgtacgtggacttatatcagaccagtgtggatcttcaagaatcattgtaaggttgataacggcaaaacaaaggatctatatcgcgac

SEQ ID NO: 669198 - DNA, 100 bp, Homo sapiens
ctgcacccacgaatctgcccacccctcctgtaacccagcctgtttcacttcttggtatatttgcttacttaaactaccatgttcctcgaacgagacgaga

SEQ ID NO: 669199 - DNA, 75 bp, Homo sapiens
ccggtccccatcaccggcacacattgtcgttgttgactatatactgccacccttggtgtccttggttcaaagcca

SEQ ID NO: 669200 - DNA, 100 bp, Homo sapiens
gatgcttcaaatcaccaatgcctccttggggctgcgcttccggagacagctgctctactggttcttatttaacaacctgggtgtcctgcatgtgactaag

SEQ ID NO: 669201 - DNA, 90 bp, Homo sapiens
cccacgacttccagtttgtgcagaagacggatgagtctgggccccactcccaccgcctctactacctggcttcgcagaatcaagaacggc

SEQ ID NO: 669202 - DNA, 80 bp, Homo sapiens
tcctctgaggcgacggccgcggctgcacaggatattaatgcacacgcctgtgttactggtaaacccatcagccaaggggg

SEQ ID NO: 669203 - DNA, 100 bp, Homo sapiens
attgccgtcctgcagaacaatataatgctgggcatttatcaactgctttccacttagattcagacctggtggccagcatcgaaatgttcagccttttagt

SEQ ID NO: 669204 - DNA, 75 bp, Homo sapiens
tctcaccccgtcgttgcctccacttggcccgtccatagagccaggggacagagcacaggaaagggacccccacag

SEQ ID NO: 669205 - DNA, 100 bp, Homo sapiens
gcagttgtctgatgaagagaaggatgttggttcctgcaaacaagaactgaccctatcacctctgcctcacagtgggtaaatatatcatacatctcttgaa

SEQ ID NO: 669206 - DNA, 90 bp, Homo sapiens
gaagagacacagtatggtagccacacccccagaaatttctgaataaattggcagaagaacgcagacagaagaaggaaacttaagatgtgc

SEQ ID NO: 669207 - DNA, 74 bp, Homo sapiens
ccacggtagcgcagccgctctgagcacaaacgtgcagatatctgatagccctttccgttgcactcaagaggaag

SEQ ID NO: 669208 - DNA, 90 bp, Homo sapiens
ttggaggggctgctggacctcagctacccccgcacccacgcggccctgctgaaagtggcgcaaatgaattcagaaggagctggcggacat

SEQ ID NO: 669209 - DNA, 74 bp, Homo sapiens
ccgaacggcccccaaggggcgggcgctgtgctatgacacttaaaacactagatgaacaccgtgacaaagctgtc

SEQ ID NO: 669210 - DNA, 98 bp, Homo sapiens
tcatcctcggcggcggtggccgctagctccaaggaaggaaattggatacactcacatgaaaatagcggaaggagtgaactctcttttgcagatggcag

SEQ ID NO: 669211 - DNA, 82 bp, Homo sapiens
gggagctcatcttcgtggggcgtgaggagtgtgagctcatgctacagctggtactcctggttaatcaacagcttcgtcaacg

SEQ ID NO: 669212 - DNA, 100 bp, Homo sapiens
ctggcactcaatgtacctgtctttgtggtagtcaccaagattgacatgtgtcctgccaacatcctgcaagatttggagcaagaggtggtggtggccttcc

SEQ ID NO: 669213 - DNA, 100 bp, Homo sapiens
ccaagacatgcagcaccaaggaccagcaattcaagacctgagctccttcgccatgccgctcctggacggagacctggagggttccggaaagcattcctct

SEQ ID NO: 669214 - DNA, 83 bp, Homo sapiens
gctgggcttcgtccagatcgggaagggtagtgaagcgcgcagtggcgagccagccagactctgtggatgcagccgagagggcg

SEQ ID NO: 669215 - DNA, 82 bp, Homo sapiens
cagttcatcttcctccctgtgtactttccatttgccttcctggggctgaaaagacagaagttttgagtgaagaccttcttca

SEQ ID NO: 669216 - DNA, 87 bp, Homo sapiens
agtggtctgccgagaagccagtcacgccgggagctggtacacagcctcagatttattgctaaacatgggtgcatttttggataaacc

SEQ ID NO: 669217 - DNA, 82 bp, Homo sapiens
tcgctctcgcccaccgcccgaaccctgctggcagaggactggccatttggagctgagatgtgtaagctggtgcctttcatac

SEQ ID NO: 669218 - DNA, 91 bp, Homo sapiens
gttttggggttgccatcggcccgtagtatgtgaaaagtgatgatgaacagtctacacagatggctgcaagttgggaagatgataaagttac

SEQ ID NO: 669219 - DNA, 100 bp, Homo sapiens
taaatgcagcatctgcgatgtgaggaaaggcacctccaccagtagccggatcgagctgggagatgtgacaccacacaatattaaacagttgaaaagattg

SEQ ID NO: 669220 - DNA, 100 bp, Homo sapiens
ggaaaaagttggaaattggaattttgatatctttctatttgatagactaacaaatgtactatactggcaattgctggagaagattttgcaattgttgctt

SEQ ID NO: 669221 - DNA, 100 bp, Homo sapiens
agtttaatgagaggaatatactcatcatcagtctatttagaagaggctcttcgtcagattgggcagaggacgataagcactgcttcccgcaggcatttta

SEQ ID NO: 669222 - DNA, 100 bp, Homo sapiens
ggaccccactggcaaagacacgctggctgctgtggccgtggtttctgtcccagccgtctgtttccatagaaaaagacgttacatccaagaggaaataatc

SEQ ID NO: 669223 - DNA, 90 bp, Homo sapiens
gcgcgctcgctccggcgccggcctcgcctcctcgcagcagcgccatgctgggagtgtccactcgccttccaccagcatggcaacgtcttc

SEQ ID NO: 669224 - DNA, 83 bp, Homo sapiens
ggccagttttgaaatcgacacacaaagaatagagttgagcctgtgggacacttcgggtcaccgacgatgagggcgcacctgct

SEQ ID NO: 669225 - DNA, 100 bp, Homo sapiens
tgagaggattacctttccaagccaatgcccaagacattataaacctttcaccaacaatcaccagtggtttacacaacattgcaaggagcattgaaactcg

SEQ ID NO: 669226 - DNA, 51 bp, Homo sapiens
taccaaaaacgtcaacaacagttttacggaccgtataatagacgctggccc

SEQ ID NO: 669227 - DNA, 100 bp, Homo sapiens
aggtccatattggttatcttcctaacaagcaagtccttggcctcagcaaacttgcgagttcacttcttcaactgagatggacatgatataatctccattg

SEQ ID NO: 669228 - DNA, 100 bp, Homo sapiens
tgtccatgggggattggattcaaatggaaagccagcagatgcagtctacggacagaaagtttacttttggacatcaagcccatcactgccagccagtgaa

SEQ ID NO: 669229 - DNA, 103 bp, Homo sapiens
gctgttgctgcccaaaaaccacatagcaacaccagaaaactgggaagcattttgaatgaatttggacatcacaagagaatgtaactggtcactacatttcccc

SEQ ID NO: 669230 - DNA, 100 bp, Homo sapiens
atatgaatatgaaagaattccgagagaacgagcacctcctcgaagtcatcccagtgcccaaactcgtgtaaaattgaatttcttggaccagattgcaaag

SEQ ID NO: 669231 - DNA, 100 bp, Homo sapiens
ccgggtttcggcttcggccacagctttaccaacagggacgcttatgtcaactgggcagtgaattttgtgaattggaagtttttgctaaagtactgagagc

SEQ ID NO: 669232 - DNA, 100 bp, Homo sapiens
aaatcgagactcatgactcccagagaggatggcatctagaagttttgctgctgcagcccattgagagtgacgacatggagcacaagaccctgaagatcac

SEQ ID NO: 669233 - DNA, 90 bp, Homo sapiens
gggagcaggaaagccagtgttgtggaccctagcacagaggctgaccggttccctgatgtgttacctgcttctgctactgatccaaactgc

SEQ ID NO: 669234 - DNA, 50 bp, Homo sapiens
gaaccctggtcaccgtctcctcaggtgagccagtggtacgagctggtggt

SEQ ID NO: 669235 - DNA, 83 bp, Homo sapiens
ctctgggatcccggccaccagcaattgtccggaggcaagtgaggcctatctggttggcctttttgaagacaccaacctgtgtg

SEQ ID NO: 669236 - DNA, 98 bp, Homo sapiens
gggactggaaccatctcagaagccatgcccctcaggctggaacttgccctgtctcctcgcagatgagcttgccaattctgtaactccttgggatatct

SEQ ID NO: 669237 - DNA, 75 bp, Homo sapiens
atggaaagttccagccggttcgagagctaggttgtccttctattcaggccactcttcgttttccatgtactgcat

SEQ ID NO: 669238 - DNA, 76 bp, Homo sapiens
ctctactccaggaagtgaaaatgtgctgcctcgagagccgctgattctttcttgtggagaagttattcatgtgaag

SEQ ID NO: 669239 - DNA, 100 bp, Homo sapiens
cagctcatttccggcaggaggagcagagcctgccaaggcctcgagctgggcaagtctgtggtggccaaagtgaaaattccggaaggcaccattctaacaa

SEQ ID NO: 669240 - DNA, 90 bp, Homo sapiens
tggtcggtcccaggtcccggcctccgtaatgagagcccggaaccactctttgtgccgcagcttcgcagtgcacgatctgattttctggag

SEQ ID NO: 669241 - DNA, 100 bp, Homo sapiens
ggtcctcatctacgagcaagtcaggctgaagtggagacctttggcgacttggcctttggcgacatcttcctccacctgctcacgggcaaccttgcgctgc

SEQ ID NO: 669242 - DNA, 83 bp, Homo sapiens
agagaaactgttttatccccaaaaggcctattcctaccatcaagggaaattcacctcttctatagaagagtttgttttgaact

SEQ ID NO: 669243 - DNA, 102 bp, Homo sapiens
tgacctcatgatccaccggcctcggcctcccaaagtgctgggattataggcgtgagccaccgtgcctggctgaagatggagtctcgctgtcgcccaggctgg

SEQ ID NO: 669244 - DNA, 100 bp, Homo sapiens
aggagctggaggccctgtcgaggagcatggtgctccacctgcggaggctcatcgaccagcgggacgagtgcaccgaggagacatatactgcctggactgc

SEQ ID NO: 669245 - DNA, 101 bp, Homo sapiens
ccgcgctgttggtcttgctgctagttgcgcttagcgccctctttctaggccggtaaagaattctccggaaatcctatcaaggtctcatttgctactcgccg

SEQ ID NO: 669246 - DNA, 101 bp, Homo sapiens
cctccctcttctcccgactatttggcaagaagcagatgcgcattttgatgggctttgaagacaagattcccaaaaggagattctctgagatgcaaaatgaa

SEQ ID NO: 669247 - DNA, 101 bp, Homo sapiens
gcataggtcaaagctgtttggagaaaatcagaagtacagttttatctagccacatcttggaggtatcatgatattagctggtttgacatcaagtcatttgt

SEQ ID NO: 669248 - DNA, 74 bp, Homo sapiens
tttcacattcctcatggttggttcaaagggcggcgactggcggcgcgatggacctgaccgggctcctgctggac

SEQ ID NO: 669249 - DNA, 75 bp, Homo sapiens
caaacactcagagtggaaaaagtaccatcatttgaaacagacttaattcagtgcacaaatgagatgaatgtgaac

SEQ ID NO: 669250 - DNA, 90 bp, Homo sapiens
tgtagtcacaggaggtgtagagaggaccccgggacatctgaaagccaggaaatgtaatctatgccagcaattatgacaatgttagcagac

SEQ ID NO: 669251 - DNA, 100 bp, Homo sapiens
ataaacttggcttcctcgcttctgctcctcagctatgaaacccacgtagtcgaacaccgtgatgcttctcctgcagggcgtgtgatgaggaggcgagctt

SEQ ID NO: 669252 - DNA, 75 bp, Homo sapiens
ggacaaaggaacaggtatctcagctgaagaaatcaggggagaaacccctgcttggtggaagcctgatggaatatg

SEQ ID NO: 669253 - DNA, 75 bp, Homo sapiens
cgagaggatgcggagcccgcagaacctccacagtcaagaggacggccaagactaaggggctgcagagcggggtgg

SEQ ID NO: 669254 - DNA, 95 bp, Homo sapiens
gactgcactcacacgacgtgcgctatgggtcagtgcgatgtatgatgtatggctttggggatgaccagaatccttatactgagtcagtggatatt

SEQ ID NO: 669255 - DNA, 98 bp, Homo sapiens
ccattaagcttgtgcgtcaagtcatggcatccgtgtacaagatttgcagagaaatgtatgacgatggagtgggtttaccctttcaaagtcagcctgat

SEQ ID NO: 669256 - DNA, 100 bp, Homo sapiens
tcacatgcctggagtctctccgagtgtctttgaccagcaatcctgtgagattgcaaatagaagagtcttccaaaccagtgaggctatcacaacagctgga

SEQ ID NO: 669257 - DNA, 100 bp, Homo sapiens
tttcgcttttttacctgccaatcaaactgctacaagacaacaccctgatctggcatggacatgtgttatttggaagatggagcttcaaagggtgcctggc

SEQ ID NO: 669258 - DNA, 100 bp, Homo sapiens
acggatgccagaacagaaccctgggaggggaattccagcaccgcagcaaccactccagaaactttccctccttcagatagttttgaggcagctgtgccat

SEQ ID NO: 669259 - DNA, 100 bp, Homo sapiens
accaaatccaacgcacccagagtcaaagccaaggcgctggtgactgacctgggcactgcggagctggcgcgctgtggaggccgtgaggcgctgctgttcc

SEQ ID NO: 669260 - DNA, 75 bp, Homo sapiens
ataacaaggtccctgttgagaaacgagaaggctttgtgatacctgatgaagggggcccacaggaggagcaagaag

SEQ ID NO: 669261 - DNA, 115 bp, Homo sapiens
ccggtgtgaagacagggagacgctgctgcagctccgggacacctggggccgccgaggcaaaggtgctggagaatctggtaaaagcaccattgtgaagcagatgaggatcctgcat

SEQ ID NO: 669262 - DNA, 100 bp, Homo sapiens
cagaaaataaatttaagacagtaattaccaacaagagcaaaccaaacctaccaaacttggaagatgtacctttaagagaagggactaacaaattccctgg

SEQ ID NO: 669263 - DNA, 75 bp, Homo sapiens
accaacccggccttcaccaaactcccttttcttgcagaacataaattattaggaaacattaaaaatgtggccaag

SEQ ID NO: 669264 - DNA, 100 bp, Homo sapiens
cacagtggccgctatgaagagctggctcggatgctgatggggctggacctgctggtgttcgcccacgaccatggagaaagttctgccactaatgaaccca

SEQ ID NO: 669265 - DNA, 73 bp, Homo sapiens
gcacagctgcagtctgacgagagggggacccaaccagagcctggcctgggagccaggatggccatccacaaag

SEQ ID NO: 669266 - DNA, 50 bp, Homo sapiens
gtgaagtcagtgcctcagttgctgggaatgaaagctactggttgatttta

SEQ ID NO: 669267 - DNA, 100 bp, Homo sapiens
ttattctcagtagccgttgtgaagtggataggacatcatcttttgaccttgtctgtgtcaatgcgtggatgctggacctcacccaagccatcctgaacct

SEQ ID NO: 669268 - DNA, 80 bp, Homo sapiens
ctgaggctcattttgcagttgttgaaattgtccccgcagttttcaatcatgagatatagatcagctatcaggaagggact

SEQ ID NO: 669269 - DNA, 90 bp, Homo sapiens
ctctctctaattaaatggatcctgattgtcagggaggacccagacagcgtgccccccatcgatgtcctctggatcaaaggggcccaggga

SEQ ID NO: 669270 - DNA, 75 bp, Homo sapiens
ggagtggtttgtctgtgatggctggaagttcctctgtaccaggttagcactctacgtatatgaatatctgctcca

SEQ ID NO: 669271 - DNA, 95 bp, Homo sapiens
tttgttccatggtcacctcagtgagaccttccttggctatttaaaatggcagtagtcaaatcagcctagcagaaacaaagtacgttaaccaatgg

SEQ ID NO: 669272 - DNA, 85 bp, Homo sapiens
aactccaaatgcttggatgtctgattcaggaacagaacacagttctctggctttttggaaaactgatgcatccgatgtaaagcca

SEQ ID NO: 669273 - DNA, 75 bp, Homo sapiens
agcgaataaagtttatcacgccggggagcagtgaggagaatgaataccttccaagaccagagtggcagctccagt

SEQ ID NO: 669274 - DNA, 75 bp, Homo sapiens
cagcgctcggacccccctacccacgctgaacgagagggacacggagcagtattctaccttgtaaatactgttatt

SEQ ID NO: 669275 - DNA, 75 bp, Homo sapiens
ccgattcctcctccttggtcgccgcgtccttggctggcgtttatgcaaagggtgacctggacatatcttacatca

SEQ ID NO: 669276 - DNA, 75 bp, Homo sapiens
tcttctactgacagcctctgaaaggggctgctccttcctctccaagactcgggtggtccaggagcacggcgggcg

SEQ ID NO: 669277 - DNA, 75 bp, Homo sapiens
ggaataggagctggggagcccttctgcgccacagagatgaacgaaatcagtccatcatcgtaagtggagagtctg

SEQ ID NO: 669278 - DNA, 74 bp, Homo sapiens
aacttgtgagggcgaaggtcgtattgaatggtgttgtaggaaagtggagaatgaggacatgaataaagaccaga

SEQ ID NO: 669279 - DNA, 96 bp, Homo sapiens
ttgaccccccacatttaccaggatctggagaatcatccatctgttcttaagtatgagaagattaagaagatggcagtgaacgtatactcaacgtca

SEQ ID NO: 669280 - DNA, 95 bp, Homo sapiens
tttggcatgtttaaaagttcccgaagcaaattcttcttggatggacacagttataagacaggtgggattaaaaactcagcctgaatcaaaatgcc

SEQ ID NO: 669281 - DNA, 74 bp, Homo sapiens
ccgccgccgccgctgccgctgccgctgccgcacctccgtagctgactcggacctcagcagccatgtcgaagccc

SEQ ID NO: 669282 - DNA, 98 bp, Homo sapiens
ggatacagtgatggactcgcagccagtcagatgtacagtccgcagggcatcagtatacgatgaatggattaaagcagataaaatagtaagacctgctg

SEQ ID NO: 669283 - DNA, 100 bp, Homo sapiens
cccgcaggcagcgcgcgaacgtgggcgtggggatggccaccagtttccggacagcttcgtgctgggttctcagctgctgcgggagttgaaaaagatggac

SEQ ID NO: 669284 - DNA, 83 bp, Homo sapiens
tcgtggctgcgtcaccgccgcccccccagacaagatggacaccgcggaggaaggttggatttggtctagggagtcccagaaag

SEQ ID NO: 669285 - DNA, 100 bp, Homo sapiens
gcctttctggacacagaagtatttgtgacagatgcagatggaaacctgtgtcgaagtaaccaactgttgcaagtcatgctgaccatgcaccgaattgtca

SEQ ID NO: 669286 - DNA, 75 bp, Homo sapiens
ctcttctgcctcttgatctccgccaccgtcttcaggccagtgagtgacctgcaggaagaaggcaagaatgccatc

SEQ ID NO: 669287 - DNA, 100 bp, Homo sapiens
atcattttcacctcgcgtcgcgcccgggaggaaggaacgaggcaaggagctaaagcagcgtgcgttcagccctgggctggttttcccatgggctatgcag

SEQ ID NO: 669288 - DNA, 100 bp, Homo sapiens
gatgagcagaaatgctattcttgtggagaattcggacacattcaaaaagactgcaccaaagtgaagtgctataggagtgaagcctagagctatatttctt

SEQ ID NO: 669289 - DNA, 146 bp, Homo sapiens
aaagaagcagaaatgagcagaaaggagttggggcttgatgaaggcgtggatagcctgaaggcagccattcaggtttctaagcatgaattgaggaacagaagaagcagagcagatgatcggagcagcatttgtttctccccaaatct

SEQ ID NO: 669290 - DNA, 73 bp, Homo sapiens
ggaagtgcagctgcctcagttcttagcgcagttgtcacaggtagtactgatggaattggaaaatcatatgcag

SEQ ID NO: 669291 - DNA, 100 bp, Homo sapiens
gacccgagttatgcccaccctccaactttgcgacggaaatgtgtcatcgaaagccaggttggtcaaagaaaaagtgatgtatgaaaaagaggcaaaacaa

SEQ ID NO: 669292 - DNA, 100 bp, Homo sapiens
tgtcagaaacacaaagcagcccaaccaaaggggcgatgccagtccctccactccagaggagaacgaaaccacgacaaccagcgccttcaccatccaggag

SEQ ID NO: 669293 - DNA, 50 bp, Homo sapiens
gtcacctctcaactgtgtgccaaagttaatcagctgtgttcagcgaatac

SEQ ID NO: 669294 - DNA, 101 bp, Homo sapiens
gtaagaggatttatagatcagaatctcagtccaacaaaagtttgaaggatgacctctaggaagaaagtgttgctgaaggttatcatcctgggagattctgg

SEQ ID NO: 669295 - DNA, 74 bp, Homo sapiens
ttgaagtacagaatgaggagatggcagctttttgtcgatccattacaaaaattaaacaaccaccatgtcgagca

SEQ ID NO: 669296 - DNA, 98 bp, Homo sapiens
gcgagcagatgagaccgctactcacccgggtaacgagcagggtgccaagtcctgccctgccaacttcttggcagctgccgacgacaaactcagtgggt

SEQ ID NO: 669297 - DNA, 74 bp, Homo sapiens
cagtgtatgctcgaaatcctggatactgcagggacactcttagcttctgccagctatgatgacacagtgaagct

SEQ ID NO: 669298 - DNA, 76 bp, Homo sapiens
tctgtgccggccgtgagctgcggcaggacggctggagcggtttgctgtgtttcaaagaagggtgctgaccacagta

SEQ ID NO: 669299 - DNA, 76 bp, Homo sapiens
cttggttacgccctgattctaaaactcaaagatgcccgagtggtaaaagacatggcaacaggaaagtctaagggat

SEQ ID NO: 669300 - DNA, 100 bp, Homo sapiens
cgcctggtgtgcttcaccatggaggagaacctaattcatctctccagcaaaggacacatctctccagcaaaggacacctctctccagcaaaggacacctg

SEQ ID NO: 669301 - DNA, 75 bp, Homo sapiens
aacagggttcctggggcatcgacgatctccatatttcattgcaaggtatatgagtagaccagtgatgagtggccc

SEQ ID NO: 669302 - DNA, 102 bp, Homo sapiens
gatgatgaaagtccaagcaaaatttttatgggtcgtaagagtgaggctgaaaagctcttcttgaaggctattgagctggatcccaccaaaggaaactgttac

SEQ ID NO: 669303 - DNA, 100 bp, Homo sapiens
gaaaaagttcagtgggaagcatgtcgtctttatcgctcaggaatctacttatgggacccatatccatgagaaacgtgaagagcgagaagcaagattctgt

SEQ ID NO: 669304 - DNA, 100 bp, Homo sapiens
atgaatggacaccttgaagcagaggagcagcaggaccagacttcacagagaatgcagttgtcttgacttcaggtctgtctgttctgttggcaagtaaatg

SEQ ID NO: 669305 - DNA, 98 bp, Homo sapiens
tgaagagcgggctttcctcccccatctacatcgatctgcggggcatcgtgtctcgaccgcgtcttctgagtcaggtatgagaaagtgccagtcatctt

SEQ ID NO: 669306 - DNA, 98 bp, Homo sapiens
gggcatgccttgctcattttgcgcccagaagaattgggttttcttcgctacttgaaacaatccaagcagtctgagctatcagctgaagaaagtccaga

SEQ ID NO: 669307 - DNA, 97 bp, Homo sapiens
tgaacccagaggtcgtggaggtggccgtggaggcagaggtggcatgggtctgcgctcctcagaccaccggcaggtgaacagcctgatgcagaccgag

SEQ ID NO: 669308 - DNA, 50 bp, Homo sapiens
tcgctggaatgtgtgtctcacgaggtactgaacgacacctgggtctcctt

SEQ ID NO: 669309 - DNA, 73 bp, Homo sapiens
cacctaaaaattgtataccgcagattcaggttacaattcaacaaacatggtgtgttgcgggtagaaggcttct

SEQ ID NO: 669310 - DNA, 100 bp, Homo sapiens
caccaagtcagactcggcatctgattcccaggagattaaaattcagcagccttcgaaatgaacagagtatctgtcaggcaagagctgctgtgatggttta

SEQ ID NO: 669311 - DNA, 50 bp, Homo sapiens
aggagatgatggcggggaatggcacgcgctcatcaagaagctgaatcagc

SEQ ID NO: 669312 - DNA, 100 bp, Homo sapiens
attttgctcagcgactgtttgatgacgtcccgcaggaaaccactatcagcggcctgaccccggagaccacctactccgttactgttgctgcctataccac

SEQ ID NO: 669313 - DNA, 83 bp, Homo sapiens
cggcgagcgcgagcggcgcgagaaaactacatgaggaaataattgacttttataacttcatgtccccttgtcctgaagaagca

SEQ ID NO: 669314 - DNA, 80 bp, Homo sapiens
caccatttgccgtggccaggctagagcagccatggcaatgacaggctcaacaccttgctcatccatgagtaaccacacaa

SEQ ID NO: 669315 - DNA, 74 bp, Homo sapiens
gcccagaggactttcttccagcttctgctgtccttctttgtggagagcaaggttatcaatactctggctgacca

SEQ ID NO: 669316 - DNA, 100 bp, Homo sapiens
gacaagggcgactccaaggaaacgcggctgaccctgatggaggaagtgctcctgctgggcctcaaggaccgcgagctcttggataagcacaagaatacag

SEQ ID NO: 669317 - DNA, 95 bp, Homo sapiens
gacaatttgtagctaagactcccggataccctgaagtcgggaaatggtgccctacgagacgctgaacaaacgctttcgcgccgctcagaagaaca

SEQ ID NO: 669318 - DNA, 98 bp, Homo sapiens
gcggaactcgagaggaccaacaagttcatcaaagagctcattaaggacgggaagaacctcatcgctgcgacgaaaaggtgttttgaatgctgtatcaa

SEQ ID NO: 669319 - DNA, 95 bp, Homo sapiens
aaagagccctgcaatttgaagatacatgagacagcagccaaacccccaggcctggagctgctgaagactgctattgggaaagctggctacactga

SEQ ID NO: 669320 - DNA, 82 bp, Homo sapiens
gccgtggctcgacggagaccagctaggatggtcagtaggacagaaggtaacattgatgactcgctcattggtggaaatgcct

SEQ ID NO: 669321 - DNA, 50 bp, Homo sapiens
tgctggtaaataacactgaaatgactactcaccaggggattctccaccag

SEQ ID NO: 669322 - DNA, 100 bp, Homo sapiens
tacgacctgcgctacctgtcggaggaggtgaagcgtgacattcaggaaaacgatgaagaggcagtgcaagtcaaagagcagagcatcctggaactgggat

SEQ ID NO: 669323 - DNA, 90 bp, Homo sapiens
gccaacagtgcaaggaagcctggttcagcaggtggccctaaggttggaggccattaagtgctgtttagcagatcttccacaatctattgg

SEQ ID NO: 669324 - DNA, 100 bp, Homo sapiens
cggcggcggtggggactgcacgtagcccggcgctcggcatggctctcctggtgctcggtcatcatcagatttgaaatatttaaagtggatacaaaactat

SEQ ID NO: 669325 - DNA, 82 bp, Homo sapiens
gctgagcttgccgcacaaaaagctagagagaggcagctcagatcacgggcaaaaaagcgtgtgagcggatgaaagatgccat

SEQ ID NO: 669326 - DNA, 74 bp, Homo sapiens
gctcctttttgcacccttaaatgtaagacaggggcaagtgtccgagtggtgaatcagctacttacagagatgga

SEQ ID NO: 669327 - DNA, 96 bp, Homo sapiens
cccaccagatcccggagatcgcccgccatggctttacttactgcggccgcccggctcttgggaaccaagggggggccctcagcctcttggccttga

SEQ ID NO: 669328 - DNA, 100 bp, Homo sapiens
gctagcaggctgtcataacaatgaccacctggtagagaaataccgcattcttatcacaaagcttacaaaacactacacagcaaaataatgatctgctaga

SEQ ID NO: 669329 - DNA, 100 bp, Homo sapiens
aactcgctgattttaaaagatctggaacatcgaaaggaccaagtaacacagctttcacaagagattctggctacattggagattggttgctttctaaaac

SEQ ID NO: 669330 - DNA, 95 bp, Homo sapiens
agacagtcacacagcagccctcaccgatgatggccgtgtcttcctctggggctccttccggaccccatgccacagctggatgtgactgaggccaa

SEQ ID NO: 669331 - DNA, 50 bp, Homo sapiens
acagtgctcaccacccaccaccactggaatcagagatcattgatttcttc

SEQ ID NO: 669332 - DNA, 74 bp, Homo sapiens
cttaaggagcgattaggcatgtcagctgatccagataatgaggatgcaacagatcctccaggtcctattgacaa

SEQ ID NO: 669333 - DNA, 74 bp, Homo sapiens
cggctctgcgggcgccgccaggcccagaccaaggcaaactaggcgtggcaactgctggctgcgtgaatgaagtt

SEQ ID NO: 669334 - DNA, 100 bp, Homo sapiens
gccctaccggactacgagtatctgggtacagcagggaagaactggaaactcagagaaagaaactgcccttccatctacaaaagctgagtttacttctcct

SEQ ID NO: 669335 - DNA, 100 bp, Homo sapiens
ctctcgaattctaggaatcttgagaagaggcctggattaaggattcagacgtgggccctcagatggagttgtggaaagtaaaaatgtagccctaccaaaa

SEQ ID NO: 669336 - DNA, 102 bp, Homo sapiens
ttacagaaagagtcaacagcagtggcaacagatattgatgatgttaagaagttcaaaccgggttacctggaagctactcttaattggtttagattatataag

SEQ ID NO: 669337 - DNA, 75 bp, Homo sapiens
ctggtctattatatcatttaaaccacatggctatctaaagagaagtgacacagccctagaggaggcagtagcaga

SEQ ID NO: 669338 - DNA, 116 bp, Homo sapiens
gagtgaagtcctacagagttatcaggttccagaccctgccttctcttctgaaagatttcgccagaagtttgagtatcactactcctgaagagatgattgaaaaagccaaaggggaa

SEQ ID NO: 669339 - DNA, 75 bp, Homo sapiens
ggtggaagtccaagtcaaacgcagaaggactgcctcactgagcaaccaagaagttttgattcatcatggataatc

SEQ ID NO: 669340 - DNA, 75 bp, Homo sapiens
ctgcgatctctgtggtaggcccaggagccctctggcacaaatggaagaagaaagaagggagcaagtagctaaaat

SEQ ID NO: 669341 - DNA, 75 bp, Homo sapiens
ggaactgcggcagtctctccctgccaggctcttcatccaaggtgtgactgcacagaaaagttacaaaacaaattt

SEQ ID NO: 669342 - DNA, 75 bp, Homo sapiens
gtcagttggcagtgatgcaccttgtgttgtaaaagtggaaacctggacaagcatgaagaactagaggagcttgta

SEQ ID NO: 669343 - DNA, 105 bp, Homo sapiens
gctgaagcgactgagtccgcgatggaggctgacaaaccaagaggatttgccagaggtcttgatcctgaaagaataattggtgccacagacagcagtggagaattg

SEQ ID NO: 669344 - DNA, 82 bp, Homo sapiens
tggggactgcgggcggcgctgtgtccgtcgccatgacaggtgaatgaaaactttgccattgatttgatagcagagcagcccg

SEQ ID NO: 669345 - DNA, 82 bp, Homo sapiens
gacaagttcaagcagctgcttgccggccccaacacggaccttggtggctattatcatggaaaactaatttttcccagagaat

SEQ ID NO: 669346 - DNA, 101 bp, Homo sapiens
gacacctccacaacgtcgctggagctcgattcacggacagagcgggatgccaccagcttgtccaaagggaagttccaggagctcctggtgggcatcgttgt

SEQ ID NO: 669347 - DNA, 100 bp, Homo sapiens
caaaggaacaccaggcagattcatttatacagcacttcagaatccagaggtggtggcccttcgaggtggactaaacaccatcttgaaaaatgtgatcgat

SEQ ID NO: 669348 - DNA, 73 bp, Homo sapiens
aaaccttcccaacacattggaacaggaaaatgctgctatttgtgatgaaattgctcgtcttgaggaaaaattt

SEQ ID NO: 669349 - DNA, 100 bp, Homo sapiens
caggacttcctcaagcgcagggactatgtcttaaggcgctttgcagagccaagctcatttctggcacataagagggccaactctgtgacgtggaatccac

SEQ ID NO: 669350 - DNA, 83 bp, Homo sapiens
gaacaattggaggagacctggtggaaaaggttgatctcatagacaagtttgtacatccaaagcgggatccacagcaccattgt

SEQ ID NO: 669351 - DNA, 100 bp, Homo sapiens
gagcggtcggtgacagcctcaagggcttcagcaccgcgcccatggcagagccagaccggactgctgagatgtcctctattcttgaagagcgtattcttgg

SEQ ID NO: 669352 - DNA, 82 bp, Homo sapiens
cagcagattcaaagccaggcaccattcgtggggacttctgcattcaggttggcaggaacgcaacgccgagagtgccatcgag

SEQ ID NO: 669353 - DNA, 75 bp, Homo sapiens
caatggatgtgtggcacaactctgcaaataaatgtgcataacattctagtatgccagtagaaaaaaatatcactt

SEQ ID NO: 669354 - DNA, 100 bp, Homo sapiens
gtcgtgaggatcgtgtgcattacaggagtcctccacttgccactggggaatggttgtatctcttgtcacatgaaatgttgaatccatactatggcctctt

SEQ ID NO: 669355 - DNA, 50 bp, Homo sapiens
gcgcgaccacagctatgcgaccgaagcaccaatgttgttatgaattattc

SEQ ID NO: 669356 - DNA, 87 bp, Homo sapiens
acaagctcctggaggcttctacagattctaaagggaaagatttcctgggagcaaaagcggcgccaggaaattgaacaaaaacttgaa

SEQ ID NO: 669357 - DNA, 101 bp, Homo sapiens
ttgactcagcttgacatctgcagatcgtcagtatttaaacagatcacatcatgcgtgagtacaagctagtggtccttggttcaggaggcgttgggaagtct

SEQ ID NO: 669358 - DNA, 51 bp, Homo sapiens
cctctcaaagcgctgggattacaggtattagaaaactactcggatgctcca

SEQ ID NO: 669359 - DNA, 100 bp, Homo sapiens
tttgggaacatccaacagatcaacgacgatggctccaggaggatcaccattgtggaaattttccgacagctcaacacggccatcgccgtatcccagatgt

SEQ ID NO: 669360 - DNA, 83 bp, Homo sapiens
cccagatatagccgttggtacaaagcctcccggcatggtgctcaaggccttcttccccacgtgctgcgtctcgacggacagcg

SEQ ID NO: 669361 - DNA, 75 bp, Homo sapiens
cagctcgggggccaactctgaggagtccactgcagcaggtctcttgtggctcagagcataatttggcaataattg

SEQ ID NO: 669362 - DNA, 88 bp, Homo sapiens
caagaagaactctgaagatgattcagccttctgcatctggatctcttgttggaagagaaaatgaggctcacggaatttgaagacaccc

SEQ ID NO: 669363 - DNA, 83 bp, Homo sapiens
cacattgatcgcaacccaggcgatggtttgcggtgagggacattccatacaccaagcttgggtgatgaggaatttgaaatccc

SEQ ID NO: 669364 - DNA, 98 bp, Homo sapiens
tggaaagtacgaggagaatcctgggtttagccattgagtactgtaagattgatgttaaaggcatggtgttcaccccacttcatcagcgtacataagtt

SEQ ID NO: 669365 - DNA, 100 bp, Homo sapiens
tgattaaagacattcgggagaatgggatgaagtgtggacgtagtcaacttattcttcaaaaaattcaaacgttacttgagagagcttttagtttaaaccc

SEQ ID NO: 669366 - DNA, 95 bp, Homo sapiens
accgcgccgagcaggccgaagccgacaagaagcaagctgaggaccgctgcaagcaggcctccggtgtggctgtctctgatggtgtcatcaaggtg

SEQ ID NO: 669367 - DNA, 100 bp, Homo sapiens
tgataattgaagatgtcctaagcccagatacctgtgtatgtcggacagatgaaggccgagtcctggaaggacctgggctatcccttggagcttggctatc

SEQ ID NO: 669368 - DNA, 75 bp, Homo sapiens
gctgctggcgctctggctgtgctgcgcgacccccgcgcatggatgataatgaagataattcaaatgatgggaccc

SEQ ID NO: 669369 - DNA, 83 bp, Homo sapiens
aatgtttttgaccagaaaaccgacaaccttcccagaaagtccaagctcgtgttgaactgctggcttataaagtagagcaggag

SEQ ID NO: 669370 - DNA, 100 bp, Homo sapiens
tgcgcgttttccgatttcttgctggttgaatacctccctctccactcccatcttcagggtggggaagctgaggcaggaagccctttagtcacttgccgaa

SEQ ID NO: 669371 - DNA, 95 bp, Homo sapiens
agggactgctatcttctccatccgaggacagttttctccttctgccttccaggcagcgtaaggaggataagatcaatgccctcattaaagcagcc

SEQ ID NO: 669372 - DNA, 100 bp, Homo sapiens
gctcctttgggaacccattcgagggcagccggcgggaggaacgctcactgtcagcgcctggaaacttgctcactccgtagttcgtggtccttcgccggtg

SEQ ID NO: 669373 - DNA, 100 bp, Homo sapiens
tataagtcgtaaggacttagtggattatataaccacacattataaggggccaagaatagtgcttgctgctgctggagaaaatgacagatggcgagacctg

SEQ ID NO: 669374 - DNA, 80 bp, Homo sapiens
cctcccgagtagctggggctacagaccctatcagatttggatatgtccttcatatttgattggatttacagtggtttcag

SEQ ID NO: 669375 - DNA, 98 bp, Homo sapiens
aagaagtttgtccttctgctattgatcctgaagccctggagaaagcttctggattgactgtgagaagcttggcagaaggtgctgcggcctggtggctg

SEQ ID NO: 669376 - DNA, 74 bp, Homo sapiens
cagaaattccatgctgccttcagcttcctttgccgctctgcatcatgttgcatctacttgtttccaaagttatt

SEQ ID NO: 669377 - DNA, 100 bp, Homo sapiens
cggaggagcccatctacatcgtgaccgagttcatgtgtcacgctttcagaaaaccaacgccaagatccctcccagcgtccacatcgtcctctggcaggag

SEQ ID NO: 669378 - DNA, 100 bp, Homo sapiens
cttggagctgccgccgccgggactcccgtcccagcagatacaaactggactctcaggacaaaacgacaccagccaaaccagcagcccctcagcatccagc

SEQ ID NO: 669379 - DNA, 121 bp, Homo sapiens
atcccagcaagcagtacgcgacgcgaggacgcaggaggaggagcccggagctgcagccaccggggagccaggggagcatgtaacttcaaggtttaaaaacgaggtggagaggatgggtttt

SEQ ID NO: 669380 - DNA, 100 bp, Homo sapiens
tgcgctcgcgcccggatccctcagattgacgagatgcctgaggctgccgtgaaatcaacagccaacaaataccaagtcttttttttcgggacccacgaga

SEQ ID NO: 669381 - DNA, 75 bp, Homo sapiens
tggacaggtctacgccacatcacttagctccttcgagaactcatagaacggaagaccagctccttggatcccaac

SEQ ID NO: 669382 - DNA, 100 bp, Homo sapiens
ctgaacttctctcatggaactcatgaggactctatgctggtatcaagttcttcctcattgatttcatctttaaacgctgcccgaggctgcgcgccaagta

SEQ ID NO: 669383 - DNA, 100 bp, Homo sapiens
gaacttcaatgcagattctagccaacataaagttttggatacagcaggacaagaagagtttggagccatgagagaacagtatatgaggactggcgaaggc

SEQ ID NO: 669384 - DNA, 75 bp, Homo sapiens
tggcgaagtgagcatcttgattagaagcaggactgcttttcaggaagccttggacgctgcaggtgataaacttgt

SEQ ID NO: 669385 - DNA, 100 bp, Homo sapiens
ccaccctgcccctgccgaggcaggcgcccaccgccggcggtgatgcggctgtgaagccctagtcgaaccaaaaacttttgctagaaaatcagcttttacg

SEQ ID NO: 669386 - DNA, 100 bp, Homo sapiens
actcagtgcgcgatcttaagcgcgcatctgtggaaacaattaaaatcagcatgattcttcagaggctcttcaggttctcctctgtcattcggtcagccgt

SEQ ID NO: 669387 - DNA, 90 bp, Homo sapiens
acggacctcagaggttgtctgaaggccgaggccaagatggcggtgctgtcaggaagctcttcgtgggcggtcttgactggagcacgaccc

SEQ ID NO: 669388 - DNA, 100 bp, Homo sapiens
aagaagctggacaagctggggatgaggggctctaacacctgtgagctaatctttgaagactgcaagattcctgaggaaaggagcagtggcttccggttga

SEQ ID NO: 669389 - DNA, 106 bp, Homo sapiens
gccgaaacctggaggcccggggggcccagctcccgtagggagccgtgggcgctcggtgcccgggccgggcaggatgatcacggacgtgcagctcgccatcttcgcc

SEQ ID NO: 669390 - DNA, 111 bp, Homo sapiens
ggggacccagaccctggagcctcagttggaagcagccgatccagcctgcggagcctgtggggcagtttcaccagtgatcattaaagaatgggcagcttacaaaggaaagtc

SEQ ID NO: 669391 - DNA, 75 bp, Homo sapiens
cggtggtgcgagtcttcggagcgaccccggcagctcctcagagaaattttgaaattgccttcaagatgtttgatt

SEQ ID NO: 669392 - DNA, 71 bp, Homo sapiens
tgaacaagacagacaaccgccccctaaagaaactggaggcccaaggtcttgagagctgatgacaataacat

SEQ ID NO: 669393 - DNA, 74 bp, Homo sapiens
tttgactactggggccagggaaccctggtcaccgtctcctcaggtgttgatcctattatctgggaacaggccaa

SEQ ID NO: 669394 - DNA, 51 bp, Homo sapiens
tgcatggagtatgaaatgggaaaggtgggctacgaactgaaggatgagatc

SEQ ID NO: 669395 - DNA, 74 bp, Homo sapiens
gggtgatgaatggtcacacaccgatgcacttggagcctgctgtcggaaaaggtaacagaagatggaactcgaaa

SEQ ID NO: 669396 - DNA, 100 bp, Homo sapiens
gggaaaatgctggcgtcagcatcggaagatcattttattgacattgctgaagtggagacaggtcagaagacatgtcttcatctacatggcatctttcctt

SEQ ID NO: 669397 - DNA, 100 bp, Homo sapiens
cgccactttccggggtgcacagcaagtgggaatgacagaggaagaggaagacaaacttctggcactgaaagacttcatgatgaaatctaataaagcaaag

SEQ ID NO: 669398 - DNA, 90 bp, Homo sapiens
tttcaatgtccattccgctgtgttgattgaggacgttcccttcacggagaaagattttgaacctcagaaagtactactacagtaaaaagc

SEQ ID NO: 669399 - DNA, 100 bp, Homo sapiens
gccagtaatggagcttctgactatggcaacaagtttggggaaccagtgctggctggcttcaccgctgacctgaggtccaacacgggcggccaggcgttcc

SEQ ID NO: 669400 - DNA, 100 bp, Homo sapiens
agacccaaggaacagtgccaagttagatgccgattacccacttcgagtcctttattgtggaggctgctgtggtgccatctgcccagacccttaaaattac

SEQ ID NO: 669401 - DNA, 96 bp, Homo sapiens
gtagtgtatcacggagtgaatttggaccaaactgtaaaggaatttatcgtatttctaaagcaagcattcctctgaatattgatttgctgaatagcc

SEQ ID NO: 669402 - DNA, 90 bp, Homo sapiens
cgaacttcaaaggggaaagcaaggccaaagacagggagaagtttccaaccggaggccctatcggcagtactacgtggaggcttttggaga

SEQ ID NO: 669403 - DNA, 50 bp, Homo sapiens
caaactgactttgcagccacggagagtgagggccccaaggctgttgcagc

SEQ ID NO: 669404 - DNA, 75 bp, Homo sapiens
cattggaacttcctgttctgatagcgtggaagagattttcctaggattcttaaaagcttatgttgagaagttttc

SEQ ID NO: 669405 - DNA, 51 bp, Homo sapiens
gaaacattcgtttatgagatgtgtgtgaaggctctggtttactacgacgtg

SEQ ID NO: 669406 - DNA, 101 bp, Homo sapiens
ctgttgagtatgctccatgtagatcacgtcacggtctagatcacattctcgatccagaggaaggcgatactctcgctcacgcagcaggagcaggggacgaa

SEQ ID NO: 669407 - DNA, 83 bp, Homo sapiens
ggacaaacctcagccctaacggtggtggagaacccaaagatcccaccaaatattttggttgtgagctgggagcacagacccag

SEQ ID NO: 669408 - DNA, 101 bp, Homo sapiens
gatatcttcggggacctgaagaagatgaacaagcgccagacaatgcagatcttcgtgaagactctgactggtaagaccatcaccctcgaggttgagcccag

SEQ ID NO: 669409 - DNA, 75 bp, Homo sapiens
gctacatttggaatacagattctataagcagttaggatctggagctccttgtgaaggcaacacattcttctgcca

SEQ ID NO: 669410 - DNA, 73 bp, Homo sapiens
aggagcctggtgagaagacaggctggctcattaacatgcatcctgcagtgtgtgaagaaaccctgaaggtcgg

SEQ ID NO: 669411 - DNA, 110 bp, Homo sapiens
ccgcccgcggcaggcggtgcagcccccccaccccttggagccaggcgccggggtctgagtgataacaatccatattcctcatttggagcaactctggtgagggatgatga

SEQ ID NO: 669412 - DNA, 98 bp, Homo sapiens
ctccgctctcttcggctgccccaatccccggcagctctctcaggagacccggtgagcctccattgataaaaggttggcttccttatcttggagtggtc

SEQ ID NO: 669413 - DNA, 75 bp, Homo sapiens
gtggagttcgaggagtgcgtcaaggactccccgcgcttcagtgctggcctgtgggcggccccaagcaacagcagt

SEQ ID NO: 669414 - DNA, 97 bp, Homo sapiens
gcgctgtaccctgcgctggctccgtgaaccttagggacaacaccgggacacccgcgaggccggaaaatggctgtggatgagatgaacggaaaggagc

SEQ ID NO: 669415 - DNA, 83 bp, Homo sapiens
ctccagcagccaagatggtgaagcagatcgagagcaaggttcgagaacttgtcttggacaattgcaaatcaaatgatggaaaa

SEQ ID NO: 669416 - DNA, 75 bp, Homo sapiens
gaccgatatagctcgccaggtgcacttgcaaacattccatctggcaatctgagagaagctactgagagaatcctg

SEQ ID NO: 669417 - DNA, 100 bp, Homo sapiens
caagtgttggcggatggaagggaggagactcctgaccctcagaatggacatgatccacatcgcggacaccaaggtcgccaggcgttatggggatttcttc

SEQ ID NO: 669418 - DNA, 98 bp, Homo sapiens
aggacatccataaaaattcatcagagagcattttactactgagctgcaaagcagatataatttctacagtagaatttaatcattctggagaattacta

SEQ ID NO: 669419 - DNA, 75 bp, Homo sapiens
acaacagagggacaacaaaagcctcctacaagagtcctaccaaaagttcctacctgatcccgctcccagcagcag

SEQ ID NO: 669420 - DNA, 90 bp, Homo sapiens
tttctctgtgagagaaacttccactccattggaaggattaatggagcctggaggtggtggtatcatggatacagaaatgtctgaagatat

SEQ ID NO: 669421 - DNA, 96 bp, Homo sapiens
cgtgctgggggatgacggctccctgctgttcgagtacctgcccagaggggcccactcgctgtcccgactgaattcggagaaggtagctgctctgat

SEQ ID NO: 669422 - DNA, 100 bp, Homo sapiens
ctggtgcagagcttgagtctggccagcgggtcaggctcttgctagatcagcaccggaggtggaagactggtatcagtttttggaagaagcttttcaaaat

SEQ ID NO: 669423 - DNA, 100 bp, Homo sapiens
agaaaggaaggaacctgggatggttgtgagggaagggacaagaagatactgccctgggtcatctagtagcaggcacccaaatcaggcaactcccaagaaa

SEQ ID NO: 669424 - DNA, 81 bp, Homo sapiens
cttatactcctcccagtgacgggtctggagtgcgtgggggaccggctgttggcgggcgtccgagctgggccacagcctgaa

SEQ ID NO: 669425 - DNA, 96 bp, Homo sapiens
gcaccatggcggagctaggagctggcggcgacggccacaggggcggcgacggcgcagtgcgaagcgaaacagagtgggaaaccacccatcaatgat

SEQ ID NO: 669426 - DNA, 100 bp, Homo sapiens
tctgaatcttgatgatataattggaactcttcagccaagccatatctaacagaactatcttcaacttttcaggtgtcagttgtacccgaggcgttctcag

SEQ ID NO: 669427 - DNA, 99 bp, Homo sapiens
tctacccgacacttacatgccatggccttctacgttgtgaaaatggtgcagcggaactgctgcctgacgctctgcaacttcagcatccccgaggagctg

SEQ ID NO: 669428 - DNA, 75 bp, Homo sapiens
agtcccgtgggcaatagagtcactgtatttgaccttaaaaaagctctggtggacattctgagacatcaggcgggg

SEQ ID NO: 669429 - DNA, 60 bp, Homo sapiens
atatggattacaggttgatgtgggaggttctcagaggcactgtgactgacttccctggat

SEQ ID NO: 669430 - DNA, 98 bp, Homo sapiens
ctttatcatcggttattaaggagcttcgcaaggctactgaagcactgaagacagacaattttcccgcagagcccaattacatgggcagcaggcagcag

SEQ ID NO: 669431 - DNA, 83 bp, Homo sapiens
cggcgctgagcgggtcccccccgcagactgagaagccgacccactacagggagtgcatccgccccaacccttttccccctcgt

SEQ ID NO: 669432 - DNA, 100 bp, Homo sapiens
gcagattgcgaatcaagcgagcccacgagaacagtgtaactaatttttatatgttaactgttaccaagttttttgctccactcaagcctgttagaatcac

SEQ ID NO: 669433 - DNA, 100 bp, Homo sapiens
tctgcaaggggtaaatgagggtgttgatttctccaaggatctgctgaaaatctcagtggttcaatagcatccccagatgtcaaattaaatcttggtggag

SEQ ID NO: 669434 - DNA, 50 bp, Homo sapiens
acacatccatacccaccaggacctggggaacttacgttactggcttgaag

SEQ ID NO: 669435 - DNA, 90 bp, Homo sapiens
aagagagcggcgcgcccggcgtgccgagcggcaacggggctccgggccctaagggatactcctgggcatggaagtggatgggctgagact

SEQ ID NO: 669436 - DNA, 106 bp, Homo sapiens
tcattttccccccttgctcgggatggtgccacaggaggctgtgcgggccccgctccgcttcgaatggttccagaaagctgagtctgatctggattacattcaatac

SEQ ID NO: 669437 - DNA, 75 bp, Homo sapiens
gcaggatctcacagctgcagtctaatagtaacacagaggaaatccccttacccaggatatattgaacctttatca

SEQ ID NO: 669438 - DNA, 75 bp, Homo sapiens
cttttcatgagtgttcctgtggtctctgcacctcctttctgggatagggtctccctctgtctcccaggctggagt

SEQ ID NO: 669439 - DNA, 100 bp, Homo sapiens
ctcgagagctcgccccgaacgggggtcttcctcctccgccgttgacagctctgaacagcaacatggggtgcaaagtcctgctcaacattgggcagcagat

SEQ ID NO: 669440 - DNA, 75 bp, Homo sapiens
cagaaattgaaaagtactgcccagagaattttgtagacatcaagggtgaaattgatgcccatgaagacagcttca

SEQ ID NO: 669441 - DNA, 82 bp, Homo sapiens
aaaaaattcaaacttgagccacatgatgatcaggtttttctggatggaaatgagttgcacgtgcattatttaatcacataga

SEQ ID NO: 669442 - DNA, 123 bp, Homo sapiens
ctggagatcctttcctgcttttggtttccctggcaggggttgaactgtggagtgtgtggttcaccactgacatacggcactcccagctctcgggtagagggaaccccaagaagtggtgttagg

SEQ ID NO: 669443 - DNA, 96 bp, Homo sapiens
gccttgatagcatggatttctgtgagctcacttctctcgttccacctgaggagaaatgcccacagctgtggaggcgcaggccactccatctggtgc

SEQ ID NO: 669444 - DNA, 74 bp, Homo sapiens
gctcaaggatcccagttttctctggatgacgtgatatgtgcagcgggggctacagcgagtggggctagatcccc

SEQ ID NO: 669445 - DNA, 100 bp, Homo sapiens
gactttgtctctgatgagctgagaaacaaagccacccagccaatgaaggttatcaatagtctggctgtctatcgtcatcgtgagactgactttggtgtag

SEQ ID NO: 669446 - DNA, 75 bp, Homo sapiens
ttgagaatggagatcctcagagagtttttaatctttcagaaactgtcagagatggctttggattccccgttctgt

SEQ ID NO: 669447 - DNA, 88 bp, Homo sapiens
acctgctccgggacaacatgctgcggggcacagctccaaatcttaacttggtgtcaagtttcctggctgggagacaagcttttaccga

SEQ ID NO: 669448 - DNA, 80 bp, Homo sapiens
cagtgacagtgattcatcttgtggttggactgtcatcagtcatgagattccagcagagggaacgctatccaaaaagttgg

SEQ ID NO: 669449 - DNA, 100 bp, Homo sapiens
aactgaaaagactgatggtacagaagagaaacataagaaggaggaggaggatgaagaacttgacctcaataaagcggcaacctttggcactgcatccatg

SEQ ID NO: 669450 - DNA, 90 bp, Homo sapiens
gcagcatctctcccaagctccgctccatcgctgtctactatgacaacccccacatggtggatgaagactacatccaggacaaatttaatc

SEQ ID NO: 669451 - DNA, 100 bp, Homo sapiens
taaaaatcacagaccaggatggagataaaggaactcaaagaatttgggaagggaaaaggccgaggcatcagcgtgtgaagaccgcaaagacgatcccgag

SEQ ID NO: 669452 - DNA, 80 bp, Homo sapiens
gaaggcaaatgattgtggcagtaaagaagtgtatgtgatgatgataattccgaagaaggcttccacactattcattcagg

SEQ ID NO: 669453 - DNA, 75 bp, Homo sapiens
cggcaacaccatggctgggtagttcgaggggtttttgcggaggtgttccggcagcaccgggggccacagctcctg

SEQ ID NO: 669454 - DNA, 100 bp, Homo sapiens
gtccccaccacccaccctgtctcagaacctgtcgggctctccactcattacggtccacctcaagcacagattggttcaggaagatttgactgaagagaaa

SEQ ID NO: 669455 - DNA, 82 bp, Homo sapiens
catcaacatgttacgcaggaaacacagatttgactgatgaattagctcagaagttatttgatgtttcagaaataacttcagc

SEQ ID NO: 669456 - DNA, 75 bp, Homo sapiens
ctgaagaacagtgtcatggagctgattgcaaataatcctcactatggatgggctcattgaggacattaagcatcg

SEQ ID NO: 669457 - DNA, 75 bp, Homo sapiens
agtgtaatttagagagcagcgtggagagtatcatctcaccaaagctcctcagtgggtagtgcacttccacgaaga

SEQ ID NO: 669458 - DNA, 100 bp, Homo sapiens
cagcaatgtcgcttcaaaaagtgtctgtctgttggaatgtcaagagatggttacgttatatataggattcgtgttcgccgtggtggccgaaaacgcccag

SEQ ID NO: 669459 - DNA, 100 bp, Homo sapiens
acatcgtcgtgggcggggtggcccacgggcggccctacctccagaatgttctgaaggatctggaaaagagaaaagctgatttaaataccatcacagagag

SEQ ID NO: 669460 - DNA, 101 bp, Homo sapiens
gttagcgtgagtgatcactctcaatcccggaaatgaaaattggacatttgacatttgaacctctctcctgtgtttggaaaactctccatcaatgtgataca

SEQ ID NO: 669461 - DNA, 100 bp, Homo sapiens
agagggtggcccatgagccggttgcgccacccgaggacaaggttgaaatcacaaagattagacacctttttagataggtgttcttcagcaccactgacaa

SEQ ID NO: 669462 - DNA, 51 bp, Homo sapiens
tgggcgtttcgcagactcctaagttgttgacctcctgtactggagagacat

SEQ ID NO: 669463 - DNA, 82 bp, Homo sapiens
caggaggggcaaggtggaacagagtgttctgccagttctggataatccactgtccaagaaggttcgaggcctcattgatagc

SEQ ID NO: 669464 - DNA, 96 bp, Homo sapiens
gaggaactaaggcggaggaactgagacgtttcgaattccaggagtagatctgctccggagttggtgctacaaagggttccacatgggagttgtctc

SEQ ID NO: 669465 - DNA, 50 bp, Homo sapiens
attccagcttcggaacaagagaccctggtggccagcatcgaaatgttcag

SEQ ID NO: 669466 - DNA, 75 bp, Homo sapiens
agagccgcctgccatgccccagccagtccccacagcataacagatctttaatctcatgaagtacgacagctacag

SEQ ID NO: 669467 - DNA, 82 bp, Homo sapiens
ctgagacgcagagtgtaccaggggatgctggactgcatgggtgttgaaagcagcaggggcctagaagacattaaaccgatac

SEQ ID NO: 669468 - DNA, 143 bp, Homo sapiens
aagagaaggatgatggtgaagctaaagaaatttctacacctacccattggtctaaacttgatccaaagacaatgaaggaaggatggcttcctggccttccaaactagccgttacaaactccattactacgagacgcccactgg

SEQ ID NO: 669469 - DNA, 74 bp, Homo sapiens
accgacctcgacgtcttgcctgtgtcccacttgttcgcggcctatagaaaccaggtctccttatgttgcccagg

SEQ ID NO: 669470 - DNA, 76 bp, Homo sapiens
aggaaatgtgcccaacatcatcattgcggcgtcgacattccagatggctatcctgcttcagtacaacacggaagat

SEQ ID NO: 669471 - DNA, 82 bp, Homo sapiens
cgagttcaacatcctcctggccaccgactcctacaagcccagcagagctccccctgacagaccgcgaggtagagatcctaaa

SEQ ID NO: 669472 - DNA, 84 bp, Homo sapiens
aaggggcagatcgccggcaccacgagagcccggcccgcctgtgtggacggaagctcttcgtgggcggtcttgactggagcacga

SEQ ID NO: 669473 - DNA, 100 bp, Homo sapiens
actcaatgttctcgatgccaatctctgcttgaaaggagaagacttggattctcagttcagggcgacagctcagtgaagtcttcattcagttaccttcaag

SEQ ID NO: 669474 - DNA, 100 bp, Homo sapiens
atcatatggatctgaaaagggtgctcctggagaccctggcctgcagggcctatctctgagcggtggggaccaggaggacgcggggaggatcctgatcgag

SEQ ID NO: 669475 - DNA, 98 bp, Homo sapiens
gaatcccctgtttgagaaaaggcctaagaattttggcattgattttggggaacttagtaaaaaactggctgaggtgtggaagcaattaccagaaaaag

SEQ ID NO: 669476 - DNA, 131 bp, Homo sapiens
gcactgctgagagcaagatgggtcaccagcagctgtactggagccacccgcgaaaattcggccagggttctcgctcttgacaatgcagatcttcgtgaagactctgactggtaagaccatcaccctcgagg

SEQ ID NO: 669477 - DNA, 100 bp, Homo sapiens
cagcccaagccttcagctgtctcgagaagattgtttaaatcctcccagtgaaatggctcaacggaagatccgagacatcctggcccaggttaagcagcag

SEQ ID NO: 669478 - DNA, 98 bp, Homo sapiens
gtgaattacatcttctttaaagagtcttgctcagtcaaggctggagtgcattggcatgatctcagcttactgcaacctccgcctcccaggttcaagtg

SEQ ID NO: 669479 - DNA, 100 bp, Homo sapiens
aatgataaaacatttagaacgatgtgaacatcgaatcatggaatcccttgcatggctctcattcccattctgtgatggggctcacacaaaacataacgaa

SEQ ID NO: 669480 - DNA, 50 bp, Homo sapiens
gggatagcgggcttcttcaccgaggtcactcccacggaagagggcatgaa

SEQ ID NO: 669481 - DNA, 100 bp, Homo sapiens
aggctgtgagccacaatgcatcgctggaagtagccagaaagaccacagcaagattctttcattcgtctcctcctagcctgggggaccaggctcgaactga

SEQ ID NO: 669482 - DNA, 83 bp, Homo sapiens
caaaaggaccatccccatgtttgtcccagaatctacgtctaaactgcagaagtttacaaggagctggaagctatcaaagctcg

SEQ ID NO: 669483 - DNA, 95 bp, Homo sapiens
ctaatcccaatgctgaagtaagattgtcttggaaatactaagttggctgcagaaccttggcctgaaaatgctacattatatcagcaattgaaagg

SEQ ID NO: 669484 - DNA, 75 bp, Homo sapiens
gggtagatattaacacctgtaaccagatttatcatagaatccccgactcagacccatcttctagcaaaacaaggc

SEQ ID NO: 669485 - DNA, 82 bp, Homo sapiens
gtagcaaaggcaagaaggcaacgacgttccatctgtggaaggacctaccaaccagacgcaggaggagggagacgcactgatg

SEQ ID NO: 669486 - DNA, 50 bp, Homo sapiens
gttcaagcggtggcgggagcctgtcaggtggtattaaagataatcaaaca

SEQ ID NO: 669487 - DNA, 75 bp, Homo sapiens
aaaggtacagatgattttgactttgctggctcatttcaagatgacctcttggtacttcatctctctgacctcatt

SEQ ID NO: 669488 - DNA, 100 bp, Homo sapiens
ctttgtgattgttagtggaacttctacccgacacttacatgccatggccttctacgttgtgaaaatgcagaaaaagtcctacctggagcgaagcgttaag

SEQ ID NO: 669489 - DNA, 75 bp, Homo sapiens
tctgaagggaggaaatagtggcaggtgacagtctgcatgtgcagttttcagactccatcaagaatgctggaggaa

SEQ ID NO: 669490 - DNA, 100 bp, Homo sapiens
atggcattcatctagaaacatttacacaagccacaccagtgcctttggaatttgtacagcaggaaaaaccatatggcatagttgaaaagaagtccagaat

SEQ ID NO: 669491 - DNA, 100 bp, Homo sapiens
caggagtcatttctgttccgcacaggcctgctgaactgggtgctttatatagggtgtcgactgcaatggccgaggagatcaggcgcctctctgtactggt

SEQ ID NO: 669492 - DNA, 75 bp, Homo sapiens
agagcccattatccctgtcactcagccccggcacctgcggaactcgagtcatgcaggagcttttgtgatcgtgac

SEQ ID NO: 669493 - DNA, 100 bp, Homo sapiens
atagttcaaacttctatatcacagaaaagttggaaaatggatataccttatttgattatgatgttggactgaatgatataattcagctgctagttcgccc

SEQ ID NO: 669494 - DNA, 99 bp, Homo sapiens
tagatgacatgggctatatcgtggagaatgatgtcatcatgcatgctctcactaagcagttggaggctgtgtctgctctacaagtttcacgctgtttaa

SEQ ID NO: 669495 - DNA, 82 bp, Homo sapiens
gagccgagcacgcgggtctgtcatcatgtcgcgttacgggcggtacggaggagacctcctgccccccgaggtctgcagtctc

SEQ ID NO: 669496 - DNA, 100 bp, Homo sapiens
gaaataaggaaagttgactgaaaatggggcggaagaaaatacaaatcacacgcataatggatgaaaggaaccgacagcattttctgcattagcaaatatc

SEQ ID NO: 669497 - DNA, 100 bp, Homo sapiens
gagaaaatggcagacgatattgatattgaagcaatgcttgaggctccttacaagaagaaactaatctggattcactccctctggttgatacccactcaaa

SEQ ID NO: 669498 - DNA, 50 bp, Homo sapiens
cgggagttacaccgccaccgccaggaatcatttccagcaatggaaagaga

SEQ ID NO: 669499 - DNA, 82 bp, Homo sapiens
cttggtcgccgcgtccttggctggcgtatctggtggctggacccagagctgacctatggctgcgccaagcccttcgtcttca

SEQ ID NO: 669500 - DNA, 75 bp, Homo sapiens
ggaacttgcagaaatcacattggaccctcctcccaactgtaggcagcctgcttctgcaaagtggtacgatcgaag

SEQ ID NO: 669501 - DNA, 90 bp, Homo sapiens
tctgtcaattcgattcaaagctggaggcagctgatgagaaaaatgttatggaattcctggcacccctgaaaccagtggccattcgaattg

SEQ ID NO: 669502 - DNA, 74 bp, Homo sapiens
tttacttttacctacgttggcggccccagaaggtacaccaggggttggaaaaaccacactaggcaaagaacttg

SEQ ID NO: 669503 - DNA, 77 bp, Homo sapiens
agttggacaagtacctggaatgcagagtagaaggctggtgcagtggtgtcatcttggctcagtgcagcctcgacttc

SEQ ID NO: 669504 - DNA, 75 bp, Homo sapiens
ggagcctcaggagccggcggggacgccatgcgagccagagtcatgtgctgttcctggggcttggatgatgtaggg

SEQ ID NO: 669505 - DNA, 100 bp, Homo sapiens
agccaatagctccgtcaggtcagaacgccacttgcacaagatacagaataagaccacagcttgccaaagagaagattgaaggatgccatatttgtacatc

SEQ ID NO: 669506 - DNA, 100 bp, Homo sapiens
agacctattatcagatcaaccaccaaagtgggaaacattgaaatcaagtttcacgctatggatacattgtatagacacagctatgatttgagcagtgcca

SEQ ID NO: 669507 - DNA, 101 bp, Homo sapiens
ctcttacgtctgcggaagtgcagctgcctcagttcttagcgcagattgagaacgggctctgcatctgtgcagccatgcccagcaaagtcgtcattctccgc

SEQ ID NO: 669508 - DNA, 88 bp, Homo sapiens
acatgctgctcaacaacggcttcagggagtcggaccagcttttcaaacaatacaggtcacagaagatgtgaattcaagtatcaagaca

SEQ ID NO: 669509 - DNA, 75 bp, Homo sapiens
agagaggggaaaccccgtaaagtggttggttgcagttgtgtagtagttaaggtgtaacgtggagaaggtgcccag

SEQ ID NO: 669510 - DNA, 100 bp, Homo sapiens
tcggcgtgtacgtgggcagcggcggctggcgcttcctgcgcatcgtctgcaagaccgcgaggcgagacctcttctagttcttctggagctcaacttcttg

SEQ ID NO: 669511 - DNA, 100 bp, Homo sapiens
cgctgccgccggtgatctacaccatggagaacaagcccatcgtcacctgttttgggatttgagattgacgcggtgaactctgtccagttttcaaaccaca

SEQ ID NO: 669512 - DNA, 74 bp, Homo sapiens
cgccctggatgtcttcgcgctctggctggtctcccctctgctggagtgtgaacatggctacgcctcttcattcc

SEQ ID NO: 669513 - DNA, 49 bp, Homo sapiens
ccccgtacggccacccggcggacgggaggcgtgggcagcttcgacatcg

SEQ ID NO: 669514 - DNA, 74 bp, Homo sapiens
ggaagtatccacattgaaacgtaaattggaccagagattgccttgcaacaggtttccatgttcttccgatcaga

SEQ ID NO: 669515 - DNA, 112 bp, Homo sapiens
gtctgtgtttttagaacaagatgtcatttaaacttaaggaagattgctttggaaggagcaaatgtaatttataaacgtgatgttggaatgaccttgaatgatgccatgagga

SEQ ID NO: 669516 - DNA, 100 bp, Homo sapiens
cctgcgcccggggcgcgcccaccgcgccgcatccatgttcgagtacagcagggaagaactggaaactcagagaaagaaactgcccttccatctacaaaag

SEQ ID NO: 669517 - DNA, 96 bp, Homo sapiens
catgaggaaggagcagcgcaaggaggatccaaacccactcttgggggacatgaggccgcgctgcatgacttgctgaacggcacagggacccctcga

SEQ ID NO: 669518 - DNA, 98 bp, Homo sapiens
cgacccctgctccccagtcctccgccccctcgcgtcgcggccctgggcgggcgccgcgagccgggttaccttgaggatagttttgtaaaatctggagt

SEQ ID NO: 669519 - DNA, 88 bp, Homo sapiens
aagaggttggggctggtctggggccgggtaccttcaggcctcagagctgcctgagaactggacagacacgcgggagacgctgctggag

SEQ ID NO: 669520 - DNA, 75 bp, Homo sapiens
accggcggcgctggaggagcgaggcagctgtactaggactgggaacgggcactattatcaaaagtcaaaatatga

SEQ ID NO: 669521 - DNA, 75 bp, Homo sapiens
gttcgggccggctgtcctggcgcgcgcaatgtccctgctcttctctcgatgcaactctatcgtcacagtcaagaa

SEQ ID NO: 669522 - DNA, 100 bp, Homo sapiens
cgcgggtcttgcgagatatctggccgcctctgccgcagctggagcatatgtaagtggaactcagaaggcaacattccctgaacatactcttccaccagaa

SEQ ID NO: 669523 - DNA, 100 bp, Homo sapiens
gagcttatgacatacattaatgaaaactgggatagattgcaccctggagagctctcctacaagcttgtgtgccctgtaaccagtatgtatggtacaatat

SEQ ID NO: 669524 - DNA, 75 bp, Homo sapiens
gggccctacgcgcggcttgcgcattgtaaaccatggctgtgtggatacaagctcagcagctccaaggagaagccc

SEQ ID NO: 669525 - DNA, 75 bp, Homo sapiens
gccacgccgcccaggagacccctctgctgcaccacttcatgtcttccaccaagagcctgcggaccactatcggcg

SEQ ID NO: 669526 - DNA, 83 bp, Homo sapiens
cgcgtctctctgctgcggcgcggggaccgctgtgctctcgcccggaagcaggagatcattaagaccacggagcagctcatcga

SEQ ID NO: 669527 - DNA, 75 bp, Homo sapiens
ccgtggaataggtgtatcaagtaatggtgcaaagcctgaagctgcctctaagaatcaaacttcactcttgggaga

SEQ ID NO: 669528 - DNA, 100 bp, Homo sapiens
cttcagaaagcctccggaatctaaaaagccctcagtaccagagacagaagcagatggattcgtccttttagcaactactctaaaatcttatgattcaaac

SEQ ID NO: 669529 - DNA, 83 bp, Homo sapiens
gccaagggacaatggtcaccgtctcttcagcagcccctgtcaaagggaacaggaagcagtccacggagggtgacgccctagac

SEQ ID NO: 669530 - DNA, 82 bp, Homo sapiens
tcagtcttttgaatgatttccactctggaaaacttcaagcatttgatcaatgtccgagttaccaccatggatgcagagctgg

SEQ ID NO: 669531 - DNA, 98 bp, Homo sapiens
caatgatggctttgtacggcttagaggacttccctttggatgtagcaaggaagaaattgttcagttcttctcagatgttttctcccagatgtcagatt

SEQ ID NO: 669532 - DNA, 74 bp, Homo sapiens
cctggcttcttactcagtccatcttctgcttagtatgtgtattcagacaggcactatgtcgtccgaggcccaga

SEQ ID NO: 669533 - DNA, 90 bp, Homo sapiens
gtccgcctcctacctccttctgcttcgggatttacaagaccagctagaggatatgatggaagatgcaaatgaaatccaagaagcactgag

SEQ ID NO: 669534 - DNA, 75 bp, Homo sapiens
cgaagatgatgaggatgacgatgacgatgaggaagatggtaactcagcagttgaaggcgcgattcttaccaagtc

SEQ ID NO: 669535 - DNA, 75 bp, Homo sapiens
ttcggaagtcatatggaaatttttacaagctcaaattgaaattattccatgcaagatctgtggagacaaatcatc

SEQ ID NO: 669536 - DNA, 51 bp, Homo sapiens
ggagaagcagcaattatcgtccgagcagtcttactactttgaccgcgatga

SEQ ID NO: 669537 - DNA, 75 bp, Homo sapiens
cagacggattcatttagagctgcggaacaggacgccctctgatggaaagcaggcaggatgggagagtcgccgata

SEQ ID NO: 669538 - DNA, 101 bp, Homo sapiens
ccaccatgtctcaggaaggtgtggaggacgcaaagtaccacatgcagcgctgcattgactctggcctctgggtccccaactctaaggccagcgaggccaag

SEQ ID NO: 669539 - DNA, 74 bp, Homo sapiens
gagggcacggaggaagtggaaggcatcagtgtcattccaggacgtgactgtggaattcagccaggaggagtggc

SEQ ID NO: 669540 - DNA, 100 bp, Homo sapiens
cggcgctcccttgtcacgcctcgggaagcgcgcacctgccaagcaggtttgtcctggttgtggtcaagactggatgatgtaactggctctctaggaagcc

SEQ ID NO: 669541 - DNA, 123 bp, Homo sapiens
aaagacaggccagatctacgagctagagttgccatttcgctgggatttttgggtggtgcaaaggataccatacttgcagagctccttcagatacataaagaacacattgtaggataccatgaa

SEQ ID NO: 669542 - DNA, 80 bp, Homo sapiens
actggaaactggatgcagcaaggaaataggatttaaccgctctctgcctcccagttgcagagtgggcaggatcttaagac

SEQ ID NO: 669543 - DNA, 51 bp, Homo sapiens
accttctgaacaaggccaacacctatgcagatgcagacagacatgctgaac

SEQ ID NO: 669544 - DNA, 122 bp, Homo sapiens
cagccgcaccatgccgctcctaagcctgcacagccgcggcggcagcagcagtgagaggccctgtttgtgctcttcgtcctggcctacatccacatcgtcttctcccgctcgcccatcaactg

SEQ ID NO: 669545 - DNA, 51 bp, Homo sapiens
gcgggccccgagtccccagctgtgagtctccgggaccattatggcagtcaa

SEQ ID NO: 669546 - DNA, 75 bp, Homo sapiens
ccctggtgctgatcctccagctgctgaccctctgtgtctactatgaaccatcctgtactcagaatgtgaatcatg

SEQ ID NO: 669547 - DNA, 101 bp, Homo sapiens
gctgccacaatgggacatgtgcaacggcctcccagccaacatccagctggacattgatggggaccgtgagacggagcgtatctactccctcttcaacttgt

SEQ ID NO: 669548 - DNA, 75 bp, Homo sapiens
gttcatggatgctgtcaacaagaagagcagttcccaggatctgcataaagtgcacagccagagaacaacacatca

SEQ ID NO: 669549 - DNA, 78 bp, Homo sapiens
agaagagggtgggcttcgcagcgagcccctgtgcagagaatagtgacagtggtacaggaaagaaagaaaaagaaaaga

SEQ ID NO: 669550 - DNA, 83 bp, Homo sapiens
tcctggccaccgactcctacaagtgtactaatggtcacttgatgtgcgctggctgttttatccacctactagcagatgcccgg

SEQ ID NO: 669551 - DNA, 100 bp, Homo sapiens
gacaaaggtcttttatattggcctgagaggagagtggactgagggcaaacactgtatccttgatgtgtctggaaatgccataaagagattacagattgca

SEQ ID NO: 669552 - DNA, 75 bp, Homo sapiens
cggagcgccagctcaatgaaaatgtgacagtgatgataacatgggtgccaaaaatacttcaataggagaagaatt

SEQ ID NO: 669553 - DNA, 83 bp, Homo sapiens
gcgctggctccgtgaaccttagggacaacaccgggacacccgcgaggccggaaaatgacctctgtgagtgaaagccttcagag

SEQ ID NO: 669554 - DNA, 75 bp, Homo sapiens
gagtacaatgacatcaaggatgtggggcagatgctgatgggcaaactagagtctcgctctttcgcccaggctgga

SEQ ID NO: 669555 - DNA, 75 bp, Homo sapiens
gagaccgcaccacccgcctctgggccccagacagctattgacctgaaaagtggttctggaaaagtgtaccaaggc

SEQ ID NO: 669556 - DNA, 88 bp, Homo sapiens
aggatagccaattgcagtttgaggctatgtggaattagaagaagctattagaagaagtcttgaggaaatgtaattaaagatattacca

SEQ ID NO: 669557 - DNA, 75 bp, Homo sapiens
cttccagctgtttgaccgaacaggtgtgggcaagagcagtttactgttgcgttttgcagacaacactttctcagg

SEQ ID NO: 669558 - DNA, 73 bp, Homo sapiens
aaccctttaaagaagatgatggaagaatttgtaccccatagcaaggacttctgccatgggcaagtgatgtggc

SEQ ID NO: 669559 - DNA, 83 bp, Homo sapiens
gcaaaatcgagcgggccattggttcaggcgtgaacggcctggaggagcccagcatcgccaagcgactgaggggcaccccagag

SEQ ID NO: 669560 - DNA, 48 bp, Homo sapiens
ctgcttcccgtaaccgcaggcatggtgccttggaatttgtgtcgctga

SEQ ID NO: 669561 - DNA, 76 bp, Homo sapiens
ggggaggagagaagaggaggtggagaaggcttgggctcgcgccgctgaaggtaagaatgattgatgttggctgata

SEQ ID NO: 669562 - DNA, 100 bp, Homo sapiens
tgcatgtgatctgggccgcactggcatttgcagctattcaggaggaagaaatagaatttctctacaatgagaacacggttagagaaagccccaacattac

SEQ ID NO: 669563 - DNA, 80 bp, Homo sapiens
acccccagttcataaccaagctgctccgcaactacagggcactccacagaaggatgttattatcaagtcagatgcaccgg

SEQ ID NO: 669564 - DNA, 100 bp, Homo sapiens
ctccaatgggcctttccagcccgtggtccttctccatattcgagtgattcgcctttgccagtctcatctcgtgtctgctttgttaagttccatgatccag

SEQ ID NO: 669565 - DNA, 83 bp, Homo sapiens
cgccgagtcgaacggggagccgagctggagctgccgcggcgcagccagatgtgtatatctcatgattgatatggagaaactag

SEQ ID NO: 669566 - DNA, 90 bp, Homo sapiens
atatctcatgaggctgtaggctccttcaacccgtggctgatagctgaaagcggcaacctttggcactgcatccatgagcatgcccacagg

SEQ ID NO: 669567 - DNA, 100 bp, Homo sapiens
ctcctcaccctctgccgagtctcaatatctgtcttcggtggactccttcggcagtccacccaccgccgccgcctcccagactgtgaagcatcctgtgtgt

SEQ ID NO: 669568 - DNA, 76 bp, Homo sapiens
gcatccctcctgaccagcagaggttgatgacaacaagaaactaggagaatgggtaggcctttgtaaaattgacaga

SEQ ID NO: 669569 - DNA, 75 bp, Homo sapiens
ctatacagggacgtgatgctggagaattataggaacctggtctccctgggcctgttacatgaacagaatatggca

SEQ ID NO: 669570 - DNA, 75 bp, Homo sapiens
aggaaggaatatatcctgactgattgcgagtgttgtgtataaaggaagttgaaatcctgggccttatgtgtgtag

SEQ ID NO: 669571 - DNA, 75 bp, Homo sapiens
tattaaagcagttacaaatttcaagcaggaaatgaagtgtctgatgaagagtgcttgaagagagtgggcctaagt

SEQ ID NO: 669572 - DNA, 99 bp, Homo sapiens
aggagcttctgggagaaaggacctcccctggggtggcagaagcgctcgcctgttcacagccaacggaggagggtctcgctgttggagttggatttgggg

SEQ ID NO: 669573 - DNA, 75 bp, Homo sapiens
caagcatggagcctggggaaattctgcagtgagagttggtggttccaggattttactcagaatgacgttaggaag

SEQ ID NO: 669574 - DNA, 87 bp, Homo sapiens
caacaagatcccctatgagagtcccatcttcagcagagctcatggtgataaacaagacaaagtcaagcagaaagcgtttgtggagcc

SEQ ID NO: 669575 - DNA, 90 bp, Homo sapiens
cttcactcccgctgtctcagcagtctacagcacggtcaatgagctgaaggagaaaggcaacaaggccctgagcgtgggtaacatcgatga

SEQ ID NO: 669576 - DNA, 50 bp, Homo sapiens
ctgaaatgagaatgaagagagctcagacgctagagcggtcttatttgttg

SEQ ID NO: 669577 - DNA, 75 bp, Homo sapiens
caccttcgatgttgagaaatcggagattcagactttccacctgcaggacaggctgcgggaggagctgcaggactg

SEQ ID NO: 669578 - DNA, 98 bp, Homo sapiens
cgccctcagccccggcgcagacatggacccctcgcgagccatccagaacgagatcagctccctcaaagaggtggggctggtgtccgagcacttctcgc

SEQ ID NO: 669579 - DNA, 82 bp, Homo sapiens
atctcgctcggctgcgggaaatcgggctgaagcgactgagtccgcgatggagttcaaatctgaacatcaatgatgtactagg

SEQ ID NO: 669580 - DNA, 100 bp, Homo sapiens
cctcctggcatctgccggctgctccgcaccccggggtcccaggaagggcggcccagctgcccaacatgttcggcgaccttcggtccacgtttattgcctt

SEQ ID NO: 669581 - DNA, 83 bp, Homo sapiens
tccattgtccaattcttcagaaactccaggttaaaaatctgtaagagcctgattttagaattcaccagctcctcagaagtttg

SEQ ID NO: 669582 - DNA, 100 bp, Homo sapiens
agttgagaagcagaacccagctgaaggactggactcgctgattcttgagaagagtcaaaactggagctctcaaaaaatggaccatattctgatttgctgt

SEQ ID NO: 669583 - DNA, 100 bp, Homo sapiens
ctcaattcccatgcaggcaaaggaggggagcttcacactcagcagacctcatagctgttacaccaagtgccaagtcctgccctgccaacttcttggcagc

SEQ ID NO: 669584 - DNA, 75 bp, Homo sapiens
gccgcagtcggcaaggagagacgtcgctgaggggcttgcctgaagcgagggcagggaggagagagcgatggcttt

SEQ ID NO: 669585 - DNA, 100 bp, Homo sapiens
agctggaggccgtgggtctcattgccctcaccatcgccctcttcaccatctatgtcctctggacgctgacaagaaatcgctttgaaggcactagatcaga

SEQ ID NO: 669586 - DNA, 50 bp, Homo sapiens
ctgggcctcccggtccgcaagcagcgccagcagccctgtggtggcgacga

SEQ ID NO: 669587 - DNA, 90 bp, Homo sapiens
tcttgttctcaccatagttatatcaggtcatttcttcattttccaaggacagacactactggatgataatgaagataattcaaatgatgg

SEQ ID NO: 669588 - DNA, 82 bp, Homo sapiens
gtctacttcgaagactggcaagcacggccacgccaagggatttgttcctgggctgtttggaacatcgcatggtgcccttcag

SEQ ID NO: 669589 - DNA, 106 bp, Homo sapiens
ctcagcggtgttggaacttcgttgcttgcttgcctgtgcgcgcgtgcgcggacatggcctcaaacgggggggccctcagcctcttggccttgaacgggctgttcat

SEQ ID NO: 669590 - DNA, 100 bp, Homo sapiens
ggctccgtggctggttcccggcgagctacgtgcagttgctggaggcgttcctgttttaaatcctgccttggtccctcacctggcacaaggacaagtgcta

SEQ ID NO: 669591 - DNA, 100 bp, Homo sapiens
aataaattcttttgaactagatcgagctgatagagaccctagtaacatgcttataaaagacttactgaatgcattaccaaacatgttcaccaatacaaga

SEQ ID NO: 669592 - DNA, 83 bp, Homo sapiens
ctatttttttttctattccacatgtaccaaagatattagaaatggctactccccagtcaattttcatctttgcaatctgcatt

SEQ ID NO: 669593 - DNA, 73 bp, Homo sapiens
acagccctgtgtgacaccaagataagtaacgttcctcgtctatggccgctactgcagccaggtggagtcagcc

SEQ ID NO: 669594 - DNA, 83 bp, Homo sapiens
ccgttgacaaggcactgctttttcatgacggagccttcacgtaaatgggtccagtcatgcctcccagtaagaagccagaaagc

SEQ ID NO: 669595 - DNA, 75 bp, Homo sapiens
gccccctttggtaaaatatcatatgagatcctgactccaaactccattcccaagggtttcatggacgggaagcag

SEQ ID NO: 669596 - DNA, 75 bp, Homo sapiens
atttgagcctctgctgaattggatgaaagataaagcccttaaggacaagctattcaaagtgtgattagagctggg

SEQ ID NO: 669597 - DNA, 75 bp, Homo sapiens
cagaacatgagaaaattcatttttgagataactgttcccaatgcaggacacttgacattcagggacgtggccata

SEQ ID NO: 669598 - DNA, 100 bp, Homo sapiens
aagccagcaacgacatgtaccacagccgcgcgctgcaggtggtgcgcgcccgcaagcaggttggtgaccgttgttatgatgaaaaaatgtatgatgctgc

SEQ ID NO: 669599 - DNA, 74 bp, Homo sapiens
tcatcctggatgaagccaccagcgctttggatgccgagagcgagtatctggtacgcaggccccatggagcgggc

SEQ ID NO: 669600 - DNA, 99 bp, Homo sapiens
ctgcattcaagctctatgcctctcttggagcaaatgatgaagacatccggaagaagtgtcccgagcaagagaagcagtcctggatgcccactttcttgt

SEQ ID NO: 669601 - DNA, 115 bp, Homo sapiens
tccagttgctggatatccaagcctctcagcttcggagaatggagtcttccatcaatcatatctcacagctggtagcagtgtttgatgagcaggatccacatcacggaggtgatgg

SEQ ID NO: 669602 - DNA, 75 bp, Homo sapiens
gctgctgaagatctggaagacgcgctcctgcgccggacttgcaattgtgaccaaatatattacaaagggctggaa

SEQ ID NO: 669603 - DNA, 80 bp, Homo sapiens
actgtctgccgagttctcacgtgcccatcagtgacagcaagtccattcagaagatttctctgcctcttccaaacttttcc

SEQ ID NO: 669604 - DNA, 75 bp, Homo sapiens
ccctgcagccttctggtataccatcgtcaccatgacaacactaggtccccacagagaccacctatcacacgctgg

SEQ ID NO: 669605 - DNA, 75 bp, Homo sapiens
ctagccaaggaaaaaaagcagagaggagcggggagcaatgcagatgcttgcacataccacccaggtgttccggtc

SEQ ID NO: 669606 - DNA, 100 bp, Homo sapiens
gaggctcggcctctatggctgcccatacactaaaccatttacacagctggtgaaagaaatgcagcttcatcgagaagactttgaaataattaaagtaatt

SEQ ID NO: 669607 - DNA, 100 bp, Homo sapiens
aaaagctgtggcaaccgaaatgagactccctcagatccagtgataattgacagacttggaagaaacctccatcctcagggatttgaagaaggttatactg

SEQ ID NO: 669608 - DNA, 100 bp, Homo sapiens
ctcgtctgcagagggagcactatgtctgcggaagtccccgaggcagcctccgcggaggagcagaagcgcaaatctgtccaaggctgcctggggagcattg

SEQ ID NO: 669609 - DNA, 135 bp, Homo sapiens
gtggaagtggtccccgaaggctatttcgccgctggcgtcaggactattttcacgttttaatgccgagagttccgccatggagtcatagttgcagctgactccagggctacagcgggtgcttacattgcctcccag

SEQ ID NO: 669610 - DNA, 90 bp, Homo sapiens
gagaaatctggtcaagacatcagagacttttatgaaatgttagccgaaagaaggtgcagaggacgtggtgatggcgttttccaggtcgga

SEQ ID NO: 669611 - DNA, 75 bp, Homo sapiens
cctatgtacctgttaccactttcaaaaaatttatccagttggcgaaggactttgaggatttccgtaaaaagtggc

SEQ ID NO: 669612 - DNA, 75 bp, Homo sapiens
tgaggccaaaggcagttgtattgtgtcgagttatagcagtgctggattgggagctgtcaaccattggtcatcctt

SEQ ID NO: 669613 - DNA, 73 bp, Homo sapiens
ctcaagagcaaaagcaaatgttgggtgaaagaaaatggcccgaaccaagcagactgctcgtaagtccaccggt

SEQ ID NO: 669614 - DNA, 75 bp, Homo sapiens
ctggagctggccatggtgccccactatggtggcatcaaccgagttcggatccgctttatcctcatccagaaccgg

SEQ ID NO: 669615 - DNA, 73 bp, Homo sapiens
ggataagagatattgatctgaaaagaggctttggttttgtgggtcgctgcagacgctttcagtgggttgacgg

SEQ ID NO: 669616 - DNA, 90 bp, Homo sapiens
gaactctccagtgtcttcctcccaccctgtgcccaactgcttcatgagcgtcaccatggtgatggcaagtgtgtgatttgtgactcctat

SEQ ID NO: 669617 - DNA, 100 bp, Homo sapiens
ccaaagttcttccagtcctcctaggcatcttattgatcctccagtcgagagcctgttgttttgtccaaaatcaaaactgcacatccacagagcagagatc

SEQ ID NO: 669618 - DNA, 100 bp, Homo sapiens
tgctcatcgcagtcctggacacgggggtcgacccgggggctccgggcatgcagtgtctttctcgagaagcaggtggaaacatgagcattcagtttcttgg

SEQ ID NO: 669619 - DNA, 98 bp, Homo sapiens
cgagcagcagcggctcctcaacacccctcgaaggttctgtcatatgttgaagaatccatacaccattaagaaacagcctctgcatcagtttgtacaaa

SEQ ID NO: 669620 - DNA, 75 bp, Homo sapiens
ctgctctggcctcgcttgttgctcttcggggactccatcacccagtggccacaagtaatcatcctgagactgact

SEQ ID NO: 669621 - DNA, 98 bp, Homo sapiens
aactcgtcagattcttgcctgcaggttggatggcaagcatgtggtgtttggcaaagtgaaagaaggcatgaatattgtggaggccatggagcgctttg

SEQ ID NO: 669622 - DNA, 90 bp, Homo sapiens
gctgagaaaagcgagaccgcgtgcgaggaccgggcacactacaaagagtatcttgtgagcctcatcaatgcccactcgctggacccagcc

SEQ ID NO: 669623 - DNA, 75 bp, Homo sapiens
caaagtatcttataacttctggctggaattaagggtggcatgatcgctctgctgctgtccatcttgtgcctggtg

SEQ ID NO: 669624 - DNA, 100 bp, Homo sapiens
cggatgttcatgggcagcaccatcgagccagaagcagtatttgtcctgaaatgcctaaaacaactctttgtaacccagaacgtggttcagcaggctaatg

SEQ ID NO: 669625 - DNA, 50 bp, Homo sapiens
tggattttgaggaaactttggtctttatttgctggccgttggttaatgtc

SEQ ID NO: 669626 - DNA, 100 bp, Homo sapiens
ctccagtgatgtcattgaccagaaggtgtatgagatccaggacatctatgagaacaggttcaagggcagcaggaaagacgagatcctgggcatcgccaac

SEQ ID NO: 669627 - DNA, 96 bp, Homo sapiens
caaaatgcataggacagtccaaaatgaggaagaacgatcatgtttcaggcatatggagacaaacagggaccactgcatggaatgttaatcaatact

SEQ ID NO: 669628 - DNA, 100 bp, Homo sapiens
atggacaagcccatgctgaagcaggccggctctggcgtccacgagagcgcctgctcgctgtgcccccgggttatgacgacccccaataaaggaaacaagg

SEQ ID NO: 669629 - DNA, 76 bp, Homo sapiens
ggcgagcatcagagacgcgcagttctttggcctctgtgtggtcagaaacagccagctaaaggtgtggatgagcaaa

SEQ ID NO: 669630 - DNA, 82 bp, Homo sapiens
tgagatgggcaccgcggatctggggccgtcctcagcagaaaaatatggctcaggagactaaccagaccccggggcccatgct

SEQ ID NO: 669631 - DNA, 90 bp, Homo sapiens
cctcaatctccttttccttggctacccgtacaaacccgtagtgctgatgaaccaatgacaacatttgttgtctgtaatgaatgtggaaat

SEQ ID NO: 669632 - DNA, 82 bp, Homo sapiens
gaagaaaacacaggagccggagcagaagcaaagagcttagcagtgtctgcaaaaacgaatcttttcctacaacctgttaact

SEQ ID NO: 669633 - DNA, 100 bp, Homo sapiens
cggcgggaacgattgggctgagcagaggacgacatgttgcttttcgtggaggaccagctgaagcagtgtttctcccggcagcccactgaacccaaggaca

SEQ ID NO: 669634 - DNA, 100 bp, Homo sapiens
gaatgacgtctgctgatgatttcttccaaggaaccaaggcggccctggctgggggaaccactatgatcagagttattcctgatgaagctaaagctttgtc

SEQ ID NO: 669635 - DNA, 75 bp, Homo sapiens
tccgcaccaggggccctcagggaagagaccctgcaaagatcctgggagaccaagatgcttcctgaaacttggaga

SEQ ID NO: 669636 - DNA, 100 bp, Homo sapiens
tgctgacgctctgggtgaagaatggaaggagtgtcatgggccggcagacatgcctggagtgcagcttcgagatcccagacttccctaatcatttccctac

SEQ ID NO: 669637 - DNA, 100 bp, Homo sapiens
agagggagagcaagaccatcatgctgcgcggccttcccatcaccatcacagagagcgatacagaaagaatttactttcaggttttcttacctaaagggag

SEQ ID NO: 669638 - DNA, 90 bp, Homo sapiens
aattccccccagtgattcttggctggcagcagttgagtctctactaccttttgcattgtaaatgaggttggtcttgaactcctggcctca

SEQ ID NO: 669639 - DNA, 100 bp, Homo sapiens
agaagagggcagagccgtgcatggggctgctccccaggacctgagcaggaacctggagttttcaggtatctgagcccagagaggaaggctctgcccacct

SEQ ID NO: 669640 - DNA, 75 bp, Homo sapiens
ccgaaatgcacaacatcctgaagaaataccaccagatattgggcagttgcattacctgtctacctccttattgct

SEQ ID NO: 669641 - DNA, 88 bp, Homo sapiens
attatatttctagggacaaacctatcacatttactcaggcaattaagttggaatatgcaaggttggttaagttggcccaagaagacac

SEQ ID NO: 669642 - DNA, 96 bp, Homo sapiens
ttggacgatgaccaggcggcttgggagaatgagctgcagaagatgacccgggggcaggaagatctgctaccaggaagtgtcccagtgtttcggggt

SEQ ID NO: 669643 - DNA, 74 bp, Homo sapiens
agggaaccctggtcaccgtctcctcagccaaaactggacaagccaaggcatctgtagccaaagtaaacaaatct

SEQ ID NO: 669644 - DNA, 100 bp, Homo sapiens
gaagaagtctttgagcagaagcacgttaagaagcccgaagggcttttcagaaatcggtttgaagttagaaatgacttaattcagtgcacaaatgagatga

SEQ ID NO: 669645 - DNA, 76 bp, Homo sapiens
gagctgaatctggtgatagccttggttctgaagatcgtgatcttctttacagcattcgttcagtcagagagcataa

SEQ ID NO: 669646 - DNA, 82 bp, Homo sapiens
atttggatgtgggatccggttccttggtgtcatccagccttagcaaaccagagcactgccagtgaaagatgtagaagataaa

SEQ ID NO: 669647 - DNA, 90 bp, Homo sapiens
cgggttttcccttgggccagctccctacagaggcacatgctcacacacactggaacctagaaagattgtacaatgaatggtgattctcgt

SEQ ID NO: 669648 - DNA, 100 bp, Homo sapiens
gcaagaacagctaaaatgaaagccatcattcatcttactcttcttgctctcctttctgtaaacacagaggccatgtggaagtgttacatcaccttttgct

SEQ ID NO: 669649 - DNA, 50 bp, Homo sapiens
aagcatctgggccatcttcaatgtgccgtgagcgatgtggagatgcagga

SEQ ID NO: 669650 - DNA, 111 bp, Homo sapiens
ttacaacagggaagcagccctcaaggccagcggagtcttcagcacccccacaagcatgcagacacgatgaggcgagtggtacgacagagcaagtttcggcatgtatttggg

SEQ ID NO: 669651 - DNA, 96 bp, Homo sapiens
acatcaggaatttcatggcaagggtgatccatgctctagggcaatcatggcatcctgagcattttgtctgtactcattgcaaagaagagattggct

SEQ ID NO: 669652 - DNA, 89 bp, Homo sapiens
tgatcctgcctaagatgcccgacttcaacttgcctgatcaactttctagcgggagaacgatcatggaggtggtgccagctgaggtgaat

SEQ ID NO: 669653 - DNA, 75 bp, Homo sapiens
cgatgtccctgatccctggagcgacgacggccgctgcctaagctggaaagattaggaggccagaaggagatccct

SEQ ID NO: 669654 - DNA, 95 bp, Homo sapiens
ttatagaaaatatggatctttacatgttgaatccttgcagcactaaaatttgggacaaccatccccagcagagatggcccaggactgtggctcct

SEQ ID NO: 669655 - DNA, 97 bp, Homo sapiens
gcgtttgtggccgtccggcctccctgacatgcagaccacctggtggcccatggtagaatggcagaaaaggaggcacgtcggaagttcaaacagatcg

SEQ ID NO: 669656 - DNA, 100 bp, Homo sapiens
aagtcacttatcaagtcatttgacttgggacgcccagaaatgggcaagttcatgaaacctgggaaggtggtgcttgtcctggctggacgctactccggac

SEQ ID NO: 669657 - DNA, 97 bp, Homo sapiens
gccaaatcaaaatcgctgcatagtaatattgcgtgaaatatctgaatctacccccgtggaagttcctccagaagaaattaattatttaacacgaatt

SEQ ID NO: 669658 - DNA, 100 bp, Homo sapiens
gaaggtttacacttgtcaacttcctcttcagtcatcagtccaggcccacaactcctctttctgtaggcaccattgtcccacctccgaggcctgcttccag

SEQ ID NO: 669659 - DNA, 100 bp, Homo sapiens
tctactccaaccgagcagcatgtcacttgaaggatggaaactgcagagactgcatcaaagattgcacttcgtcctatggcagcgtatacaaagctattca

SEQ ID NO: 669660 - DNA, 74 bp, Homo sapiens
ccgccgctcaccgcagccccctcctggcgacccgcaaatccctcatccacctacatcaggcaactggagagcaa

SEQ ID NO: 669661 - DNA, 100 bp, Homo sapiens
caaagatgaagatgaaaccaagcccttgtgatgtcttggcattgcccattttcaagcaggaagattccagccttccattggatggtgaaacagagcaccc

SEQ ID NO: 669662 - DNA, 96 bp, Homo sapiens
cccgggcggcgctcgtacttctggccactgggcgagcgtctggcaggtgctggagaatctggtaaaagcaccattgtgaagcagatgaggatcctg

SEQ ID NO: 669663 - DNA, 83 bp, Homo sapiens
ggatcctcatgagttaagaaacatatttctacaggacagagcgggatgccaccagcttgtccaaagggaagttccaggagctc

SEQ ID NO: 669664 - DNA, 80 bp, Homo sapiens
gcatatggtgactgttgtaaagactgtcgggaaacaggtgagcagattgccatcaagcagtgccggcaggagctcagccc

SEQ ID NO: 669665 - DNA, 114 bp, Homo sapiens
gatgtcatcacgcagaaggggtgaaagagactcggtgacagatacagggagagtcccgtattctcagagtaaaagttgtttctggaattgatctcgccaaaaaggacatctttg

SEQ ID NO: 669666 - DNA, 83 bp, Homo sapiens
atttcttcggcattctgcaacagacagcccacctgaggatattgaccataaggactcatatctcattacaagaagcatcatgg

SEQ ID NO: 669667 - DNA, 88 bp, Homo sapiens
cacacaccagagaccagaatgaaagtcggggaagtccttatgcgaatcgtcagggcattagaactggtggagtctctttcattgcagg

SEQ ID NO: 669668 - DNA, 100 bp, Homo sapiens
ggttcgtgaagctgttaaacacattggatatgatgattcttccaaagatgtcatcgcaacagataaagaagacgttgccttcaaagacctggatgtggcc

SEQ ID NO: 669669 - DNA, 98 bp, Homo sapiens
ttgaggttcatttaaccccaaaatcagtgattctacatctcaagctcatattttgaagtgtttacgggctctgctgaccgagatgatggaaaggtgta

SEQ ID NO: 669670 - DNA, 82 bp, Homo sapiens
ttttggatagtgatgggaaaaggtgcaggtgatggtcctaccagtgtgtctgttgaggtcacccgtcctaaagtgacctccc

SEQ ID NO: 669671 - DNA, 95 bp, Homo sapiens
agacgctgccagcatcgccgccgccaggtgatctgcaactctttcaccatctgtaatgcggagatgcaggaagttggtgttggcctatatcccag

SEQ ID NO: 669672 - DNA, 107 bp, Homo sapiens
tggcaccattgacttcacacccggctcggagctgctcatcaccaaggccaagaacgggcacctggctgtggtcggtgagctggtaaaggttacgaagattaatgtga

SEQ ID NO: 669673 - DNA, 80 bp, Homo sapiens
cagtgaagtggtgagcctttttgtcactgattgtgtcaaaatctcaattgccatctgagaatagagaaggtaaagtgctg

SEQ ID NO: 669674 - DNA, 88 bp, Homo sapiens
aggcctgcacggacggtgttggttgggaaaaatggctacaaacttcctagcacatgagaagatctggttcgacaagttcaaatatgac

SEQ ID NO: 669675 - DNA, 98 bp, Homo sapiens
tccagttgcagcccatggagatccagttcaattatgaatctcaggaacaccaccttctgtcaggatcaaaaccattcaagtgcaagatatgccatttt

SEQ ID NO: 669676 - DNA, 74 bp, Homo sapiens
ctctctcctgatacagcaggcgctcaccatgttccctggaggagaaaagccttacagatgctcatgggaagggt

SEQ ID NO: 669677 - DNA, 50 bp, Homo sapiens
gcacaccctaccgaattacaagatcaggtctctaattaacagaagatggc

SEQ ID NO: 669678 - DNA, 97 bp, Homo sapiens
aagttgagcagatgacaaaacttcaagccaaacatcaagcagaatgtgatttgcttgaagatatgaggtagttgtgtcaactaacatagcagagacg

SEQ ID NO: 669679 - DNA, 90 bp, Homo sapiens
catcaggcaacatcttcctcaacgtcatggcactattcctgatcagagaactccagttgcttcaacacacagtatcagtagtgcagccac

SEQ ID NO: 669680 - DNA, 76 bp, Homo sapiens
caggtctggagctcgaccgggccaggaaggattcttcaaaattaacagaaaccaattcgggccagctgaagagaaa

SEQ ID NO: 669681 - DNA, 100 bp, Homo sapiens
caaaaaacaaaaatgaagcttggtgtacaggtggtcattacagaccctgaaaaactggaccaaattagacagaggtacacatccaagcctaaagaaaaat

SEQ ID NO: 669682 - DNA, 83 bp, Homo sapiens
ctctatttgccaaaggaaacttgccttatcaccttcttgcttgcaggggttattatcgtccccagtgctggtgttggtattgt

SEQ ID NO: 669683 - DNA, 76 bp, Homo sapiens
atttggaaatgtcatccgatggcacaatcaggctaaagtaaataatgccagcctgattggactgggttatactcag

SEQ ID NO: 669684 - DNA, 100 bp, Homo sapiens
gtcctttcaggaaggagccattatttatgtcatcaagaagaatgacgatgtacaaaattggacagctgtacatgatcagcaaacacagccatgaacagag

SEQ ID NO: 669685 - DNA, 106 bp, Homo sapiens
tgggcagacggattcatttagagctgcggaacaggacgccctctgatataacgaaggaggcccaacttcattcaataaggagcctgacggatttatcccagacggt

SEQ ID NO: 669686 - DNA, 98 bp, Homo sapiens
agggagacgacgctgctgggtccgctgagcggggcgacccgaggctgtaaggaggcaaaagttgcttgaacagagcatccagtctgcccaggagactg

SEQ ID NO: 669687 - DNA, 75 bp, Homo sapiens
gaatggaacctcgcagtcatttatcatcagacctcagaaaggacctgatcccaaccttgaagaaagtcctaaaag

SEQ ID NO: 669688 - DNA, 101 bp, Homo sapiens
gcgccgccaccgtctgaactaggatgtcccgacatgaaggagtttgctataaaatgggagttctggttgtactcactgttctgtggctgttctcctcagta

SEQ ID NO: 669689 - DNA, 75 bp, Homo sapiens
gaaatcctggatactgcagggacacctccttctgaagaaataaaaacaggtgaggatgaagatgaggaagataat

SEQ ID NO: 669690 - DNA, 50 bp, Homo sapiens
gtttcttaggacttcagaaaaagcaggccctcgggaccaaggatcacgtc

SEQ ID NO: 669691 - DNA, 74 bp, Homo sapiens
cttcccagaaagtccaagctcgtggtggccagcatcgaaatgttcagccttttagtgatgaagatgcatcaatt

SEQ ID NO: 669692 - DNA, 101 bp, Homo sapiens
ctgcctttgacctttttgaagcctttgcaaaagttcaaaccttgtactactcagctgatcacaagctgcttgatgggaacctactagatggacaggctgag

SEQ ID NO: 669693 - DNA, 98 bp, Homo sapiens
tgcagccttcccatgctatctgttgacatggaaaacaaggaaaatggctctgtcggtgtaaaaaagatttgggggttctttcatggcgccttccccat

SEQ ID NO: 669694 - DNA, 100 bp, Homo sapiens
tgtggagactgactcatgatccaaagtacaggaaatgggcctgggaagccgtagagataccatgtttgtgtggaagtgccccgtgtttgctatgccgatg

SEQ ID NO: 669695 - DNA, 100 bp, Homo sapiens
cgtagtgttttcaaaactggatatggccaggatgctatagcattgtcagttcaggtcaattcagtgaagatatgatacccacagtgggcttcaacatgag

SEQ ID NO: 669696 - DNA, 82 bp, Homo sapiens
gtcacggcgtacgccctcatggggaaaatctccccggtgactttcagaaagggagtttcgtgctccaactttggcatcccta

SEQ ID NO: 669697 - DNA, 98 bp, Homo sapiens
cctggctgatggcagctttgtgcgatgcactccggaagaggagttgtacgcatgtcagagaggttgcaggctgttttcaatttgtcagtttgtggatg

SEQ ID NO: 669698 - DNA, 90 bp, Homo sapiens
catcaatgttactcaggtagagtagttcggtgtagcactgtttgcggcgaggagaaaggaaggagaggagaaaactgcactggatcaagg

SEQ ID NO: 669699 - DNA, 48 bp, Homo sapiens
gagaccgggctggccatgatctatgaaatgagccgtcagactgctaca

SEQ ID NO: 669700 - DNA, 75 bp, Homo sapiens
ctcgtcgacatgagtgatgtggaggaaaacaacttcgagggcagagattggtccaaaggaagattttttccattg

SEQ ID NO: 669701 - DNA, 105 bp, Homo sapiens
agccggatcgcaggctccctgcctactcccccaccggggatttcagaagatggctgtgccacccacgtatgccgatcttggcaaatctgccagggatgtcttcac

SEQ ID NO: 669702 - DNA, 100 bp, Homo sapiens
gcgtgtttctggaggtgcggggacagctgcagagcgcgcttctgatcctggggtcactgcagccagaggggtccagaagagagaggaggcactgcctcca

SEQ ID NO: 669703 - DNA, 96 bp, Homo sapiens
tggacgtgaacgggggtcctgagcctgccccagccagtaccagcgccgtgacttcccaagtaagaagcggaagaggagccgctggaaccaagacac

SEQ ID NO: 669704 - DNA, 100 bp, Homo sapiens
cgaaaagcgcaatattcgggtgggagtgacctgattttccaggcgaccatggccttgctgggtaagcgctgtgacgtccccaccaacggctgcggacccg

SEQ ID NO: 669705 - DNA, 105 bp, Homo sapiens
ggcggcggcggaagatggtgccgggggtcgctggctctgctgctgccgccggcgaaggaggaggcgttgccggtccacaagaatcggaatgtcagttaatgctat

SEQ ID NO: 669706 - DNA, 90 bp, Homo sapiens
agccagatcccggacccaaaccatgttccctgtgaaggtgaaagtggagaaatcagatgaatgaagttacttattctaccctgaactttg

SEQ ID NO: 669707 - DNA, 99 bp, Homo sapiens
cttcaaagacaggagcgtcccggtgcggctgcacgtctcgcggatcatgctgaaggacttttgactagatctgctcaggaaacagtcaagcattctgat

SEQ ID NO: 669708 - DNA, 74 bp, Homo sapiens
agagggatactcccatgctgccaaagtcaagctgcagtttcagctcaggccacatcaaatgtcaacccaaccca

SEQ ID NO: 669709 - DNA, 50 bp, Homo sapiens
cgagaccagcctgactaacatggtgatccgcccaccttggcctcccaaag

SEQ ID NO: 669710 - DNA, 75 bp, Homo sapiens
gcgatcgcgacggctacagctacggaagccgcaacctcctgacagtgagtgagactgccaatgagccccctcaag

SEQ ID NO: 669711 - DNA, 90 bp, Homo sapiens
cgcggctgggcgttcatctaccacgctttcgtggtgcaaatagctatgggcaacttggcctcggccataaggaagatgtgctgttgcccc

SEQ ID NO: 669712 - DNA, 75 bp, Homo sapiens
gtgctctacgaaatctttcgctccctacacaccctggttggacagggtgttggaactcgccataaggcattgatc

SEQ ID NO: 669713 - DNA, 74 bp, Homo sapiens
gaagaattcagaagaaacaaaagtgccaccgaagaggtgagaacaaaatcatgacggagtcttgctctgtcacc

SEQ ID NO: 669714 - DNA, 100 bp, Homo sapiens
ggcagcgcgagctgggaccagcgtctcggaggcgccgcagatatcaatgagtgtttgagtatcagtgccccgtgccctatcgggcatacatgcatcaaca

SEQ ID NO: 669715 - DNA, 83 bp, Homo sapiens
cctgctgatgtcagtgggacccattcagataaccatgatgactacacagacttctactatgacatttgctccttttgaggata

SEQ ID NO: 669716 - DNA, 82 bp, Homo sapiens
gaaaattatgcatgcgttagggaagctctgagagaatggctgtggaaggctgcaagaaagcgtaagattgccattcgaaaag

SEQ ID NO: 669717 - DNA, 96 bp, Homo sapiens
aagaaagaagagaaagaagatgaaatttcattagaagatctaattgagagagagataacacttacttgtgcctggctgtgctggatggtatattct

SEQ ID NO: 669718 - DNA, 100 bp, Homo sapiens
ttgaagttctattccagggctcccaggcagcagaatctgcccacagagttcggggaaatgatcttcattggttagcatgtgccttatatgtggcttgcag

SEQ ID NO: 669719 - DNA, 75 bp, Homo sapiens
cagcctgcggagcctgtggggcagacacttggcatttcacctgaagaaaaatttgttattacaacaacaagtagg

SEQ ID NO: 669720 - DNA, 104 bp, Homo sapiens
gagatgtctcgctccgtggccttagctgtgctcgcgctactctctctttctggcctggaggctatccagctgaaaatgcctcgtgtaaaagcagctcaagctgg

SEQ ID NO: 669721 - DNA, 96 bp, Homo sapiens
ccattcggaacaatgtttttcacttggaggatggtgaaccctactgtgagactgaggacagaaaaatggttcgtattgttcttacaaagacaaaga

SEQ ID NO: 669722 - DNA, 100 bp, Homo sapiens
agtcatggcggcagcagccgctctgagggcgcctgctcagtggacatttgggagcaataaaaataagaagaaaggaaaagccagaaaaatagagaagaaa

SEQ ID NO: 669723 - DNA, 83 bp, Homo sapiens
cgccaggcagtgggaagtcaggttcttccgccacctcccagccaggtcgcctgcgaggccgctggccaggcctgagcctctgc

SEQ ID NO: 669724 - DNA, 100 bp, Homo sapiens
gcccgccggcagcgccgctccccagggagggagtccgcagcctgagccacagtcccacaagcctcagcctacccgtaaactgccacccaagaaggacatg

SEQ ID NO: 669725 - DNA, 74 bp, Homo sapiens
ttttggtggaagaagctcgggcagtccctatggtggcaagaagttatgaaatggaatggatggggatataatga

SEQ ID NO: 669726 - DNA, 100 bp, Homo sapiens
tccatgcagatgggagcagtggatctcctaggaggaggactagatagtctggatgacatctgaactggagagcagcctaacgtctatggactggttacca

SEQ ID NO: 669727 - DNA, 82 bp, Homo sapiens
ctccactccgtcccccgcgggtctgctctgtgtgccatggacggtggtgctcatcggggactcaggcgtgggcaagagcaac

SEQ ID NO: 669728 - DNA, 75 bp, Homo sapiens
cttcaagtttgtcgtcgtcggggtcctgctgcagagcagcccgacggccatggaggctgaagagacgatggaatg

SEQ ID NO: 669729 - DNA, 83 bp, Homo sapiens
cctcatcccctggatgggggaccacaagatcctcatcgacagaaaccaaggtgtatgttggtaacctgggaactggcgctggc

SEQ ID NO: 669730 - DNA, 100 bp, Homo sapiens
tctggcagattctggaaactgtacattgaagcagagattctgaaatatgtggagtgcttcactggacctaatattatggccatgcacacaatgttgataa

SEQ ID NO: 669731 - DNA, 100 bp, Homo sapiens
ctggtgtcgtctactggctgtacatgaagaagtcaaaaataactgaagtgaagtgatggactccgatttggagagtagtaagacgtgaaaggaatacact

SEQ ID NO: 669732 - DNA, 75 bp, Homo sapiens
cttcattgctctgtgtgccaccggagcccagttgaagaccatgcataatttgagattgctgagagcagatatgct

SEQ ID NO: 669733 - DNA, 110 bp, Homo sapiens
aaaaagtggtgcagtttttgatgaaattgtagagaactgtgcaggctgccccatggatgccacacgtggcagcggggagaaaagaagtgattcggtccctgccgagggtt

SEQ ID NO: 669734 - DNA, 100 bp, Homo sapiens
gcaggcgctggcagtcagtcggaactacctctcccagcctcgcctcacggaaatccgaacgccagcagatctgaatggaatgttctggattgaagaaagt

SEQ ID NO: 669735 - DNA, 80 bp, Homo sapiens
gacagagtggagccatggctagaggtatggctttgtaattgctgtcaccaccattgacaatattggtgctggtgtgatcc

SEQ ID NO: 669736 - DNA, 98 bp, Homo sapiens
ttaggtggaagactagtctattggttaccggtgtatacgccagagttaggtcttctgaatcattaatgagtgaccagtgtccatgtttatgcattaaa

SEQ ID NO: 669737 - DNA, 75 bp, Homo sapiens
agctcttacagtgcgtggaccacagcacccatcctgactgtgccttaaagtcgctgctttgactctcccgcgaag

SEQ ID NO: 669738 - DNA, 90 bp, Homo sapiens
ttcgctcctcggccgcgcaatgggcacccgcgacgacgagtacgactacctctttaaaggttgtgaccgagattcccgacgagagagact

SEQ ID NO: 669739 - DNA, 90 bp, Homo sapiens
ggcgcccagacaggcctggagcacgagagattaaacagattctagaaaatgaacttcagatacctgtgtccaaaatgctgttaaaaggct

SEQ ID NO: 669740 - DNA, 101 bp, Homo sapiens
gaggtggccccggatgctgcggcgcccgctggccgggctggctgcggccgccctgggccgggccccaccggacggttaatttggagtggcccctggagtca

SEQ ID NO: 669741 - DNA, 100 bp, Homo sapiens
aggaaacagtgaccctgagcgaagccaagccgggcggcaggtctccagaaatgctttgggttcatctttcattgctgcaaggaacttccatgcctctaac

SEQ ID NO: 669742 - DNA, 101 bp, Homo sapiens
tgcacccacccagccccgccgtcgccccgccgcgccgcgctccaaccgcctcctcctcctcagtaacgcgggtgagcgagtgctgtgctttcatgggcctc

SEQ ID NO: 669743 - DNA, 75 bp, Homo sapiens
ggaacttcatcatcatctacttcacaggaattgccatttcatttctggggaccaacagctggccgaggctcaggg

SEQ ID NO: 669744 - DNA, 100 bp, Homo sapiens
ccatcgcgttttgccagcgataatacgcctcaggtctcccctgccaaatccaccctagcccactgaagcgctccatgtcactcatccctacaagccccca

SEQ ID NO: 669745 - DNA, 90 bp, Homo sapiens
tggaacagggactcactggggattgcagatgaagaggcaaagaaaggaagtaaacctttacgtgtcaagaagctctatgtactgtcagcc

SEQ ID NO: 669746 - DNA, 75 bp, Homo sapiens
gccgggcggcctgccccgccggagcagcatcatcaaggagcctagtaataaacgggtcaaacccctttcccgagt

SEQ ID NO: 669747 - DNA, 100 bp, Homo sapiens
gtccaacagcaggcctatggaatgatggagtcccctgtttccacaccagcagtgctgccaatacaccttttggtgccagtggtcaacaatgacatctcat

SEQ ID NO: 669748 - DNA, 74 bp, Homo sapiens
aagctggaggtggacgccatcgtcaacgccggtcaaaatgcagatcttcgtgaaaacccttaccggcaagacca

SEQ ID NO: 669749 - DNA, 75 bp, Homo sapiens
caggccccggcagcgcctgggacaaggtaaaaagaacgtattctcatggtacttacagagctggcccaatgagac

SEQ ID NO: 669750 - DNA, 75 bp, Homo sapiens
caaatatcctcggaagagcgctcccaggagaaacaaggactatgttcggagtgaactggagtttgcctatgaggg

SEQ ID NO: 669751 - DNA, 97 bp, Homo sapiens
ttttgcaatcccgggtccttccttccagcctgatgctaccaaaggtggaaagtcctgaagaaatccagtgggttgcaatgaatgtgtatgagttatc

SEQ ID NO: 669752 - DNA, 75 bp, Homo sapiens
gccacaagacatttcctgctcggaaccttgtttactaatttatagctctgggagcaggatccttacttcttgtca

SEQ ID NO: 669753 - DNA, 83 bp, Homo sapiens
ggcctggatgggccccatctgccagctggccttcccggaacttgatactaaatttgggactctttgctgcgggagtttggctg

SEQ ID NO: 669754 - DNA, 101 bp, Homo sapiens
gcggacggggagctgaacgtggacagcctcatcacccggctgctggaggggctgacaaagaagagaaccaaagtccagaagaagtcactgcttctcaagaa

SEQ ID NO: 669755 - DNA, 83 bp, Homo sapiens
cagcgaggcctagccaagagcgggcagaagagtgccctggtcaagcggctcaaaggggttcaggtgtggtcagggtctctggg

SEQ ID NO: 669756 - DNA, 90 bp, Homo sapiens
agcaacaaagagagaaacagcagcaacatttttgaaaaagctgacagtgaagatagtactgtgtccatccagataaaattagaaaatgaa

SEQ ID NO: 669757 - DNA, 96 bp, Homo sapiens
ggtgaatgtcggaatccattatctttcgggaaagctctctggggcagggaaattcacagtatggccaacagcaagatgcataccagggaccacctc

SEQ ID NO: 669758 - DNA, 80 bp, Homo sapiens
ccaagctcggatccctgaatttgatccagcaaaagctggcaggctgacagaggcggcctcaggacggaccttctggctac

SEQ ID NO: 669759 - DNA, 88 bp, Homo sapiens
cggttggggcgggaagagccggggccgtggctgacatggagcaggacctgaaggagaagaaggagaaggtggaggagaaggcaagccg

SEQ ID NO: 669760 - DNA, 115 bp, Homo sapiens
gctgagccgtcgcggagccgcgcagccctcggagcacggggacggcaaaacagaacagaaaggcggagataaaaagaggggtgttaaaagaccacgagaagatcatggccgtgga

SEQ ID NO: 669761 - DNA, 98 bp, Homo sapiens
agaaatatgaatatgttttacatccaagaactacaggctttacttttgtggtagaccgtctaagagaagatgaggtggaaagtgagaaatggtacctg

SEQ ID NO: 669762 - DNA, 50 bp, Homo sapiens
aggatctcacagctgaacttagtcggcatcaacacctttgactatctggg

SEQ ID NO: 669763 - DNA, 83 bp, Homo sapiens
ctggcgccttcaagaacagcctaaaggtgaatgaaaactttgccattgatttgatagcagagcagcccgtgagcgaggtggag

SEQ ID NO: 669764 - DNA, 75 bp, Homo sapiens
cggccgcgacgcccgggacccagattgcgggttcaggtaatgagaggccctaagatcccagaggatgccataaga

SEQ ID NO: 669765 - DNA, 89 bp, Homo sapiens
tgtgatgatgcctgagttcagccctcagcagtttggaaattttagcattcaggtgccaggaatgcagatgggacagccagtgccagaaa

SEQ ID NO: 669766 - DNA, 83 bp, Homo sapiens
ctgctcagctcctggggctgctaatgctctgggtctctggttcatcatgcctagtggcgtataagaagaccccgccaccggtc

SEQ ID NO: 669767 - DNA, 75 bp, Homo sapiens
ccgatgcttgccgatgttgtcttcgaaattcaagtactatactggcaattgctggagaagattttgcaattgttg

SEQ ID NO: 669768 - DNA, 74 bp, Homo sapiens
aattctgaactcaggacttggcaaagccgaagagattcctctgaaaatcttggcacacaatggcttggttggaa

SEQ ID NO: 669769 - DNA, 75 bp, Homo sapiens
aaaagattccatttatagacacccttcattgcaagttcttatttgtaaggctggttggaaggaaaatcatgcaac

SEQ ID NO: 669770 - DNA, 80 bp, Homo sapiens
cttccccctgtacccaggggaggtgctggaaaagaacatgcctcaaaactactcttttgccactcgttaaccacttccgt

SEQ ID NO: 669771 - DNA, 83 bp, Homo sapiens
catcactgtaattcttgctgtagaaagcttaaacttccaggtgaaaggtgtagcagtcactcggcctacacccacagcatcga

SEQ ID NO: 669772 - DNA, 75 bp, Homo sapiens
gccccatcgatgtgcggcgtccgctgtataagcttaacaaacaacagttgcagttactgaaagaacggttccagg

SEQ ID NO: 669773 - DNA, 100 bp, Homo sapiens
tgacttcagagacactgccaagcagccttagccctagtgtagaggtggtggtatcatggatacagaaatgtctgaagatatagaccacaacttaactcct

SEQ ID NO: 669774 - DNA, 100 bp, Homo sapiens
tggaagacaacataggttccaacaccgaggacatcacggctgcagccctggctacgggtgcctgcatcgtaggaatcctctgcctccccctcatcctgct

SEQ ID NO: 669775 - DNA, 100 bp, Homo sapiens
aaagtgaactttgtcgcttatggactgaaagtttattgcattccaacagctcattttatgttggagtctttgttgctggctatgaaagcctgaaaaagaa

SEQ ID NO: 669776 - DNA, 107 bp, Homo sapiens
ccaacctagtgggtgtaatacatcatgaactgcaggtggtctggaactgaaagtgatgcgtatttctgagttatgcctgtatttaagaagctgagtgaaacccaaag

SEQ ID NO: 669777 - DNA, 83 bp, Homo sapiens
cgctacacagcaatgcatcgagattaacgtcttcaaggacccagttgctgatcccaacaaaaggtccaaaaagggccgattat

SEQ ID NO: 669778 - DNA, 96 bp, Homo sapiens
gcgggaccttggcggcgcccggagccggcgtggcgctcatcgagggacgcccggcccaagtgctccgccgcatgcaagagatgattgcaaggatgc

SEQ ID NO: 669779 - DNA, 100 bp, Homo sapiens
gtacttgcactcgcgggacgtggtataccgcgacatcaaggaacaggcctttgagagcagccagaagtacaaagaggggaagtacatcattgaactcaac

SEQ ID NO: 669780 - DNA, 75 bp, Homo sapiens
gttgtacaggctctttgaatatgactctgcaaagggggattttggcaattgcttggagcatggcagatcctgaat

SEQ ID NO: 669781 - DNA, 88 bp, Homo sapiens
tcgggtgtctcgtgtgtgaacatcacagggatacccacccaccatcccagggtctacaacatccacagccggaccgtcacccgctatc

SEQ ID NO: 669782 - DNA, 83 bp, Homo sapiens
tcggagcttatactcctcccagtgacgggtctggagtgcgtgggggaccggctgttggcggttgggccggtgcacaaacagcg

SEQ ID NO: 669783 - DNA, 75 bp, Homo sapiens
gaaaaaacaaaaggactgtgggattccattaaaagttacatccagagcattccagttgttaatgaagaacacaga

SEQ ID NO: 669784 - DNA, 75 bp, Homo sapiens
tgccaaggaaaaactggagagcttcatcaaaaatagtgatagctttgataagcataagatgcacatttttctgct

SEQ ID NO: 669785 - DNA, 74 bp, Homo sapiens
gcccctcatcgagctcttcgtcaagtgatcctgccatgaagcagtttctgctgtacttggatgagtccaatgcc

SEQ ID NO: 669786 - DNA, 80 bp, Homo sapiens
ggatggctccgcaagtcccccccggagaaaaagttgaagcgttatacagtgagaccgtgcactaccactatggccctaag

SEQ ID NO: 669787 - DNA, 99 bp, Homo sapiens
gagtcggagaaccagagcagcagctcggactcggaggtcacgagaagagaatgccttctagatgcaaaatcacctccaaaccagaccacttttcttgac

SEQ ID NO: 669788 - DNA, 100 bp, Homo sapiens
ctggagagagacgagacccgggcctggcagcctgtcacagctctgtgaggaggactgcttctccaatgccagtgtcaaagtcagctaccagctccagacc

SEQ ID NO: 669789 - DNA, 97 bp, Homo sapiens
tactagtttgttgcaaaataatgtaaacgtcaatgcacaaaatggatttggaaggactgcgctgcaggtactactgagcgagtgtgcttgatccagg

SEQ ID NO: 669790 - DNA, 82 bp, Homo sapiens
gaccaacctctcctctggatgctctagtggttggaataaaaacagggttgaatgagttccagaaagcagggttctcaacctc

SEQ ID NO: 669791 - DNA, 100 bp, Homo sapiens
ccgccggttcgcgtctctctgctgcggcgcggggaccgctgtgctctcgccgcttacaaacacgcagatggcaagaagattgatggcaggagggtccttg

SEQ ID NO: 669792 - DNA, 100 bp, Homo sapiens
gagaagacgatctgcacttcgcattttggcattgacatttaattttagggtcctttatatagaagggagagtagaataattgtgtgcccaagaagatgct

SEQ ID NO: 669793 - DNA, 75 bp, Homo sapiens
cgcgcgcagggcctgcagcgggagctggacggcgagcgcgagcggcgcgagaaatgttgttacagatcttataac

SEQ ID NO: 669794 - DNA, 75 bp, Homo sapiens
acagcctgctgaagaagcagcacgaaagagagaggtccgtctaatgaagaacagagtgatgacagacctaatgct

SEQ ID NO: 669795 - DNA, 100 bp, Homo sapiens
aaaagctggcccgtgacctgaaggctgtcaagtatgtggagtgttctgcacttacacaggttaatttggagtggcccctggagtcagtttcctacaccat

SEQ ID NO: 669796 - DNA, 100 bp, Homo sapiens
ttcagcctgaccccgcctcaccaatacacggaactgactcttttttggagtaaactgcaaagaagaattgacccttctttagatacttttttggagcgct

SEQ ID NO: 669797 - DNA, 98 bp, Homo sapiens
tggacgtgctggtgtctgagtggatggggacctgcctgctggacttcagggccacaggtgctgccaagatgctccagggcacctgctccgtgctcctg

SEQ ID NO: 669798 - DNA, 82 bp, Homo sapiens
gccagtcagcgtcagagactgaggaggacacagtgtccgtatctaaaaaggagcgtcaaaaggaacggaagcgacaggagcg

SEQ ID NO: 669799 - DNA, 100 bp, Homo sapiens
gggaccctggactttggtgctgacgcagatacttcgttgaaagttgccaccctgatgtaatccagcatcttctccaggaccccgtgatccgagaatgccg

SEQ ID NO: 669800 - DNA, 100 bp, Homo sapiens
tgacagctgtaaagcacgaacaggaatacatggaagtccgggagagaatacacagagccaggttacattttgccatctgcctttccagagtaagtggctc

SEQ ID NO: 669801 - DNA, 80 bp, Homo sapiens
atggcctcctccgaggtggcgcggcacctggagaatgacatcttcctgggctgggaaaaaggagcttataagaaatgggg

SEQ ID NO: 669802 - DNA, 75 bp, Homo sapiens
acgccatcaggctcaacgaggaactcaaagtggatgaggaaagtcccgagcagccccgcccaacatggacccaga

SEQ ID NO: 669803 - DNA, 75 bp, Homo sapiens
tgcctcggactcgccgggcgctgcggtggctccctgggccgaggtgctgttgtcaagaccaatgccaatgcagag

SEQ ID NO: 669804 - DNA, 74 bp, Homo sapiens
cgacctcagatgctcccttctgctcctgacccaacatgagtgaagtttcctgcaagaaacgggacgactatttg

SEQ ID NO: 669805 - DNA, 98 bp, Homo sapiens
tcctgttcacggtgaccttcgcttggtgtcctcctggcctcagcaacctgacaattctgtcgtgtcccggaaatgcttccagactgcacacttttact

SEQ ID NO: 669806 - DNA, 88 bp, Homo sapiens
gatcacttgagccagggagttgaaggctgcagtgagccctgtttttgccaccacactccagcttgggccatcatgcagaagggggata

SEQ ID NO: 669807 - DNA, 82 bp, Homo sapiens
gaacactatattaaacatcccctacagaacaggattattgcatcgagcttttagtgtcttcttattcaacaccgaaaataag

SEQ ID NO: 669808 - DNA, 114 bp, Homo sapiens
gaatgtacacgataattaaagagtaaagttgtgctcaacggtcgcagaaccctagctgtaatcactaaacttgatctcatggatgcgggtactgatgccatggatgtattgatg

SEQ ID NO: 669809 - DNA, 90 bp, Homo sapiens
tccatgggtccggcagagggcagtgaccggcaccttctgtgcgtcctggactcctctgagaaacaggtatggctttgtaattgctgtcac

SEQ ID NO: 669810 - DNA, 100 bp, Homo sapiens
gggaactttgcgatacatgagcccagaacagatctttgtgaccatgccctgcacatatcgcatgatgagctatgaaccactggagcagcccacactggct

SEQ ID NO: 669811 - DNA, 100 bp, Homo sapiens
cagaatcctgtcggagttgtagccatgccctaggtggcatccttagctgggcctggagggcaagtggaaatagaacagaacttccttaacaacaaattga

SEQ ID NO: 669812 - DNA, 98 bp, Homo sapiens
agaaacccagcttgatatgttgaaatcaaccagactattatgaagtggtttctcagcccattgacttgatgaaaatccaacagaaactaaaaatggaa

SEQ ID NO: 669813 - DNA, 80 bp, Homo sapiens
gagaagaagcagcgcaagtttgaccaggtatcagaacaaggtttaatagaaatccttaaaaaagtaagccaacaaacaga

SEQ ID NO: 669814 - DNA, 82 bp, Homo sapiens
ctggaggctgaagaggccggcttgcctctgcagttccggaactttaagatcatttaccgccgctatgctggcctctacttct

SEQ ID NO: 669815 - DNA, 75 bp, Homo sapiens
cgtcgctgttgctgccgccatacgcgctctccctgtttagcgcccgattgaccgccagcgatacgacgagaacga

SEQ ID NO: 669816 - DNA, 90 bp, Homo sapiens
cttgaattttctaaggtgtcattaggtgaaaacgctagaatacatcaagaagcaaagcaaacaaccagacatgactcatctgacggagct

SEQ ID NO: 669817 - DNA, 100 bp, Homo sapiens
ccgtgggtgccctgcaccatgaccctgagcactggccaagcccggagaccttcaaccctgaaagtaagcggcgggctcgccagcctcgagcgaaagtgtg

SEQ ID NO: 669818 - DNA, 75 bp, Homo sapiens
acggaggctccctttggatgccagtgtcagttgtcaggagagcgaagacctggagaaacagaacgcggctctacg

SEQ ID NO: 669819 - DNA, 101 bp, Homo sapiens
acgactttgatcctgggaagaaggtggaggtggagccgcccccagatcggccagtccgagcgtgccggacacagccagctgagcttcagtcattgtctatt

SEQ ID NO: 669820 - DNA, 90 bp, Homo sapiens
ggcaggaatcccatctggagagtggaggcaactgaaagagagcttttcatgcaacacccaacacttataagcggaagaacacagaaacag

SEQ ID NO: 669821 - DNA, 75 bp, Homo sapiens
ggaattcatgtggaggtcagagtggaagcagtcactggaggaggatccatggccaagggtgaattctaaggacca

SEQ ID NO: 669822 - DNA, 98 bp, Homo sapiens
gtcatgaccactagacccacagctgttaaagcaacaggaggtgtcattaacttgtcagtacctatagttctgactgcgactcatgaagataaagagag

SEQ ID NO: 669823 - DNA, 50 bp, Homo sapiens
gtgcaacatggggcttgagaaaggagttgatctctctaatgtattagatc

SEQ ID NO: 669824 - DNA, 96 bp, Homo sapiens
agaggctgggccgagaacccgctggtttattgcgacgggcacggctgcagcgtcgcggtgcatcaaggacaatagcagaagccttttgtcatatat

SEQ ID NO: 669825 - DNA, 100 bp, Homo sapiens
agattgaagctattcctttggccttacaaggatgttgagaaagagaaggaaacccacagttacctcagcaaagaggagatcaaagagaaagttcataaat

SEQ ID NO: 669826 - DNA, 100 bp, Homo sapiens
agagaggcggccgggccccgcgctccgccccggcctagggccttgccccgggagcccgcgaggcattgcagtgtcgagatggctatgaaccctgtgtaaa

SEQ ID NO: 669827 - DNA, 98 bp, Homo sapiens
gtgtcgcttctgcccaagatgaggagcccctggcctgcccggacgagttcgatgacttcgtcacctatgaggcagcagacacgtcccagtctggaacc

SEQ ID NO: 669828 - DNA, 75 bp, Homo sapiens
tagagaaaaattatccgactcctcggaccagcaggacaggaactgtggctgcaccatctgtcttcatcttcccgc

SEQ ID NO: 669829 - DNA, 88 bp, Homo sapiens
cttggtttcgggatctcggtgctgcagacggcgagacctcctgcacagactacgtctactttgagaactcctccagcaacccatacct

SEQ ID NO: 669830 - DNA, 50 bp, Homo sapiens
cagcagctcaccgaggacggggactcgtccgcgggagagctgtggggctt

SEQ ID NO: 669831 - DNA, 100 bp, Homo sapiens
tgcgcagcagaaagcatttaaccagcatggctacttcatattttggaaagcagtttttaagacaagaaactgttaaggcagcaataatagaagagcagaa

SEQ ID NO: 669832 - DNA, 100 bp, Homo sapiens
tgctggctgcggccaacaacaaggagacactgctcgccggccgcctggtcgtgggactcggcatcggctgaagagatcactttaacaattggccaagcat

SEQ ID NO: 669833 - DNA, 51 bp, Homo sapiens
ccggaatcatgtacataaagcaggaaccagcacctatgacagaagatctgc

SEQ ID NO: 669834 - DNA, 80 bp, Homo sapiens
aagagtctggagtttatctggagtgaggtggccggttcttggtgggatctgagcagggagtgcatccgccccaacccttt

SEQ ID NO: 669835 - DNA, 100 bp, Homo sapiens
tcaaggttataagaaaggtgcagaagtcattttaaactatggacgactccgaggaacattgagccacctgtctttaccagtttccaagactatgttactg

SEQ ID NO: 669836 - DNA, 82 bp, Homo sapiens
gtacgccaaaatatgttaccttcaattcaaagaggctgaggggatctggcggtggagcgctaggatcagacgcccccgcgat

SEQ ID NO: 669837 - DNA, 100 bp, Homo sapiens
caaaatagttgtctcaagttgcaaatgtaaacctgttccacttttagagcttgctgaagggaaagctgacttcatgagaccgaggatctcgttcgttgat

SEQ ID NO: 669838 - DNA, 73 bp, Homo sapiens
gaagataaagctcaaagattactcaaagcaaagaaacttaccagtgatgagtggaatctctagcgttgtcact

SEQ ID NO: 669839 - DNA, 75 bp, Homo sapiens
tacgggcaagcgggcagctgaagatgatgaggaattgacagaagaaggactgccttttctcatactctttcacat

SEQ ID NO: 669840 - DNA, 82 bp, Homo sapiens
ggctgatggcggaggcttcgagtgacccgggtgccgaggagcgggaagagttgctgggcagaaagatgaaggtcttagaatc

SEQ ID NO: 669841 - DNA, 100 bp, Homo sapiens
cctggtgttgtccttgccgctggtacaccaggggttggaaaaaccacactaggcaaagaacttgcgtcaaaatcaggactgaaatacattaatgtgggtg

SEQ ID NO: 669842 - DNA, 82 bp, Homo sapiens
catcactggggtccctgtggtgacttggccaaagaagactccaaagacaatgcagatcttcgtgaagactctgactggtaag

SEQ ID NO: 669843 - DNA, 100 bp, Homo sapiens
gcctttgtgggctgctggagagatgttggctgcaccatgacccaggttaatgttcgtgaagaaattgaagagttttttccaagaatgtggaagataaatc

SEQ ID NO: 669844 - DNA, 89 bp, Homo sapiens
cgccgcgtgtcctcggagcgcggtccctgtattggtctcctgctcctagaggtaaatattgcagattttcaagagaatcagtgggtgac

SEQ ID NO: 669845 - DNA, 100 bp, Homo sapiens
tctggcaaacagtgtttgcctctggttcagctcatacaacagcttcttaggtacaggtttgcagattccgccagcagcacagcaagctctacagatgagt

SEQ ID NO: 669846 - DNA, 100 bp, Homo sapiens
acttttttttttgcggaacctgaaaaattcaagaagttgaaaaacgcttttcacgtcacctggagagatgcacagagaacgtttgtctgcctgatgagag

SEQ ID NO: 669847 - DNA, 100 bp, Homo sapiens
tgtgctttggaagagtatgcctgggtcccgccgggtctgaagcctgaacagctgaccctctggtgggcagcatcgccacacagtacatgaccaacagagc

SEQ ID NO: 669848 - DNA, 82 bp, Homo sapiens
agctggacggcgagcgcgagcggcgcgagaaaagtgctgcagccgcccccagccccgttatggggagtatggccccaggtga

SEQ ID NO: 669849 - DNA, 50 bp, Homo sapiens
gaagggagggaggctggtggagaagggctcggtgaaagaccagttgaagg

SEQ ID NO: 669850 - DNA, 80 bp, Homo sapiens
ccagagaggcccgcccaccagttcgcccgtccccctgccccgttcacaatattcccactggaaattcgttgtatgaatct

SEQ ID NO: 669851 - DNA, 80 bp, Homo sapiens
ctgtataaaggcgagggcctcaacaagacagccattggtacctacctgggggagagatgaggctgctgtcatttgtggtg

SEQ ID NO: 669852 - DNA, 112 bp, Homo sapiens
agcagttctgtgaggcagcctagtttgcatatgagtgctgctgcagcttcccgagacatcaccttgatcctttctctgctactgtagatgctgttgatgatgccattccaag

SEQ ID NO: 669853 - DNA, 89 bp, Homo sapiens
cgggcctgcaccatgagcgtcccggccttcatcgacatcagtgaagaagatcagataagctccgaagaagtatgcctaacctagcccgg

SEQ ID NO: 669854 - DNA, 101 bp, Homo sapiens
agaacacaggaccagtttgccatcccaaggccgaagagacctgtcggccatggagcctaatgatagtaccagtaccgctgtggaggagcctgacagcttgg

SEQ ID NO: 669855 - DNA, 50 bp, Homo sapiens
ctccaatgcagataaaagcttgataacaatgaagatggtgccaaaactgc

SEQ ID NO: 669856 - DNA, 100 bp, Homo sapiens
gactgcattggtcgtgctcgcttaggtggcagcacccagcccagtgccaggcatacattgggcgctcgggatcaagcatgaattgcaagcaaactgctac

SEQ ID NO: 669857 - DNA, 83 bp, Homo sapiens
cagggttgtggttgctgccacccggacccgaaaaatcctgtctgcctgtgagaagaatcccacagatgcctaccagctcaatt

SEQ ID NO: 669858 - DNA, 96 bp, Homo sapiens
agcgggtccgggtgctgcagggtgtccggaggtcattttcttctgaggaagtcattcttaaggactgttctgtccccaaccccagctggaacaagg

SEQ ID NO: 669859 - DNA, 99 bp, Homo sapiens
tcggacaccgagaacaggagccggagggagttccactctattggcgtgcaggtggaagaggacaagagcaacatggctgacaaggccaagcctgccaaa

SEQ ID NO: 669860 - DNA, 90 bp, Homo sapiens
tacccggagaagcaggagccctactcggcagctggagatggagctgaagatgctgaagtctcagtccagctctgccgaacagagcttcct

SEQ ID NO: 669861 - DNA, 75 bp, Homo sapiens
tgggtcttccggtaggagctgtaatcaattgtgctgacaacacaggggccaccttatcttagttccagaatttag

SEQ ID NO: 669862 - DNA, 87 bp, Homo sapiens
atccccgacgaccggatcctgaggaggcagctgcggtggcagctgctgagttctcggtgaaggtatcgagaaccttccctgcgaact

SEQ ID NO: 669863 - DNA, 122 bp, Homo sapiens
gaattccaccaaaggcggtcagagatcatacagattactactggctccaaagagcttgacaaactacttcaagacagagaaacggaggcacagagaaggaagcggcagttaaagctgcgaag

SEQ ID NO: 669864 - DNA, 100 bp, Homo sapiens
ctgctccctcgcttgtcttctcgggcttctcgccccggccgcggccgggtcctcaggccaagcagatagaacttcagttcactattggcgaagccattac

SEQ ID NO: 669865 - DNA, 75 bp, Homo sapiens
cttttatagaccaccagaatattgaagaggaagtgctcttcagaaaaggttgcgtgatagagaaaaggaaatgga

SEQ ID NO: 669866 - DNA, 83 bp, Homo sapiens
ctagggctcacgttgttattctgcattgcacttgcagccagattgtcctgggtcacataatgccagctgagcgtaaaaagcca

SEQ ID NO: 669867 - DNA, 82 bp, Homo sapiens
ggggacactgtgccgaatgaaatatgcagcagcctatgaatgtgatgactcaaagttttggagctgtgaacctcagttctcc

SEQ ID NO: 669868 - DNA, 111 bp, Homo sapiens
gtctgccgtcaaccgcaggaggatgaagctgctgctgggcatcgccttgctggcctacgtcgcctacatcaactagtcaggcagtcttccgtctccagtctggcatctgcc

SEQ ID NO: 669869 - DNA, 88 bp, Homo sapiens
tcttgcagcccttcaagaaagacttgatggtctggtagaaacaccaacaggatacattgaaaggaaaccacccctactcctaatcccc

SEQ ID NO: 669870 - DNA, 98 bp, Homo sapiens
gcggcggagtgtaggaagaggcactgctgagggggcgcgaggggaacggaggccagagctgcggcctttccgttccgaacgtccacggcgccctggcc

SEQ ID NO: 669871 - DNA, 85 bp, Homo sapiens
atgtcgggttattcgagtgaccgagaccgcggccgggaccgaggtgggtaattccagaattgattggccataccattgtcactgt

SEQ ID NO: 669872 - DNA, 100 bp, Homo sapiens
gagctggtgcaggggcagagcgctcctgtggggatgaaggccgagggcttcgtggatgccctgcaccgggtccggcaggcgcggatcaagaagatcatgc

SEQ ID NO: 669873 - DNA, 100 bp, Homo sapiens
ctgaggtaaagttgggagcgcagcggcgttggcggcggcggcggcggcagcggcagcgcggcggggccggataacgaaggaggcccaacttcattcaata

SEQ ID NO: 669874 - DNA, 75 bp, Homo sapiens
tttcaccacaagaagggctgccaggtccatattcaagcctttcatctttgttgatgacgtaaaacttgtccccaa

SEQ ID NO: 669875 - DNA, 82 bp, Homo sapiens
cccactggaagcctccaccttggaatgaatcctcactatggatgggctcattgaggacattaagcatcggcggtattatgag

SEQ ID NO: 669876 - DNA, 100 bp, Homo sapiens
ttgacgccgagagctacacgttcacggtgccccggcgccacctggagagaggccgcgtcctgggcagagttacatgggaataggactctcggctcaaggc

SEQ ID NO: 669877 - DNA, 100 bp, Homo sapiens
ctgcctcccgagactctccttgcttggaattctgcccactctgcggagttagcagtcacgacctccagcacagatagaaaactacctgctacgaaatcac

SEQ ID NO: 669878 - DNA, 80 bp, Homo sapiens
gccgcaccatgccgctcctaagcctgcacagccgcggcggcagcagcagtgagagaccaggtgataggtttgatcgagac

SEQ ID NO: 669879 - DNA, 137 bp, Homo sapiens
agtaactcagagacgtaaacatgcctctagtatcaaggatctcaccaaacaacttcagcaagcaactcttctgacctctgggactactgcaacagtagccctattgcgagatggtattgaactggttgtagccagtg

SEQ ID NO: 669880 - DNA, 82 bp, Homo sapiens
ctacagagcggcctgcgccagcgactgctgatgcaaggaatcccctgggctcccgtccactccactgctgaccagcccattc

SEQ ID NO: 669881 - DNA, 100 bp, Homo sapiens
ggtagctctcagaaggcgcgagaagagaaggcactactgccattagaactacaagatgacggctctgacaagatcccatttcattctgaaggccggcatc

SEQ ID NO: 669882 - DNA, 90 bp, Homo sapiens
gttccaccttcagagcgtcacggcgtacgccctcatggggaaaatctccccggtgactttcaggatggatagaatgacagaagatgctct

SEQ ID NO: 669883 - DNA, 98 bp, Homo sapiens
aaaaggtggaaagacttgaagaacagagttgttgaacatgtggagccgccaccaaaatgcagattttcgtgaaaacccttacggggaagaccatcacc

SEQ ID NO: 669884 - DNA, 100 bp, Homo sapiens
cagctgcaaacccccgaaaaaggggtgatgattttgaaattgccctttctgaagagaagaggagggggtatagacccaactgttaaagagcgcctttggt

SEQ ID NO: 669885 - DNA, 100 bp, Homo sapiens
gacccttctctgctctacctggaggtctccactctggtcagcaagtatccagacatcagcactctcgagtggaccctgaggagctcttcaccaagctcga

SEQ ID NO: 669886 - DNA, 100 bp, Homo sapiens
tcaaccttctgataacctgcttcattattgttatgtacactgctatcttaaggatgaagatgagctggattcccacaccatggtgaagactagtgtggag

SEQ ID NO: 669887 - DNA, 100 bp, Homo sapiens
cttgagccattgtgcagtgtatgctgatgactgggtaacagatccccgttttctaatagacctttccaaagtgaaactgatgagatttgatgatccactg

SEQ ID NO: 669888 - DNA, 100 bp, Homo sapiens
agatgcaagcggtttgggaccttgaacaaggcaaatatggttttggcaattaagttggaatatgcaaggttggttaagttggcccaagaagacaccccac

SEQ ID NO: 669889 - DNA, 101 bp, Homo sapiens
tgtccgagtggccggaacgggagccaacatggcagcggggttcgggcgatgctgcagggaatgaatctgaagtctgctgcagtaaaacacagaaggcttta

SEQ ID NO: 669890 - DNA, 100 bp, Homo sapiens
aggctctggcccacccatatctggagcagtattacgacccgagtgacgagcattagtgccagcagtagttcccaagggctgtctcagccatccacccaga

SEQ ID NO: 669891 - DNA, 100 bp, Homo sapiens
gctgcagaggacacgaggcggcgggctggagacatggaccgcggcgagcaaggtatttgggaataagatgatcattccttccctggatggagccctcttc

SEQ ID NO: 669892 - DNA, 80 bp, Homo sapiens
tccacccatctggccgggcagtaccttcttcaagagaaatggagcccttctccaagaattttctcccaaactggttggct

SEQ ID NO: 669893 - DNA, 100 bp, Homo sapiens
gtacagcatcaactacctgcactttggggagcctaagtcctgtcatctgcaagcagcagaccccggagctggagccagccgccaccatgccacccctgcc

SEQ ID NO: 669894 - DNA, 100 bp, Homo sapiens
ccttccattttgccctgaaagtcccagatttttgctcattaacagaaaagaagaggagaatgctaagcagaggttacttgattagctgtgtttggaactg

SEQ ID NO: 669895 - DNA, 50 bp, Homo sapiens
catcacacacctacctttaaccacagataatgatctacgtactacttcga

SEQ ID NO: 669896 - DNA, 101 bp, Homo sapiens
agagattcttcagatccataccaagaacatgaagctggcagatgatgtggacctggaacaggtgaaagaacttgtcctggacaacagtcggtcgaatgaag

SEQ ID NO: 669897 - DNA, 87 bp, Homo sapiens
gccgcgaagtctttcgcaagtcaggggccacctgtggacgctcagacacctattaccagagatcttcttggaaacagaattgttcta

SEQ ID NO: 669898 - DNA, 100 bp, Homo sapiens
cacctgcctcctccgcagagcaatggcggtgtctgccgggtccgcgcggacctcgcccagctcaggggactgtgaccctcctgggaatccagttcatggc

SEQ ID NO: 669899 - DNA, 75 bp, Homo sapiens
tgggtctcagccgccaaagaccccgtccggtaggcataatggttatgaaagcttctgtagatgatgacgattcag

SEQ ID NO: 669900 - DNA, 101 bp, Homo sapiens
gtgagccccgggaggccaaaaaggccctggaggtggaggagtccaactcagaggacgaggcctccttcaagtccgaggaggcaacgcacgggccacaggca

SEQ ID NO: 669901 - DNA, 83 bp, Homo sapiens
actgtttgtagccctcgtccagacgccccaaacaaacagatgactcactggttgtgtggaaggaagtcgatttgacccggctg

SEQ ID NO: 669902 - DNA, 75 bp, Homo sapiens
ccagaggcgagccctggtggaggaagaggatccgtggcctcctatgagctgactcagccaccctcagtgtccgtg

SEQ ID NO: 669903 - DNA, 100 bp, Homo sapiens
cactagtttggcttgcgaaattcatgatgctgaagtgagtagtgaatatagtatggacaaggcaatggttgaatttgctacattggatcggcaactaaac

SEQ ID NO: 669904 - DNA, 83 bp, Homo sapiens
ccccccgggaccccctggagcccccatgatccctaagaagacagcttgaacctaggtctctctcctcctgggcgagccgttct

SEQ ID NO: 669905 - DNA, 118 bp, Homo sapiens
gaccgagaccgtgaccgagagcgtgaccgagagcgcgaatatcgtcatcgttagaaggattttttatcaagcagaaatgcatcgaacaacgagaatcaagatcactgagctaaatccc

SEQ ID NO: 669906 - DNA, 83 bp, Homo sapiens
ggggaccttgccaaccctcccaagaagttcagaggaaactgttaaggcagcaataatagaagagcagaaacgaagtgaaaagg

SEQ ID NO: 669907 - DNA, 97 bp, Homo sapiens
cacacttcctgctaatgaaaaaaagccaaattgtgattgccgcctggtacaggagatatgcgatgcttgctttaaatcgagtaacagcatcgcaccc

SEQ ID NO: 669908 - DNA, 80 bp, Homo sapiens
gcctactcccccaccggggatttcagggaattcggcaccggttgagaggtagtgccaatgctgtgaggatccgagccccc

SEQ ID NO: 669909 - DNA, 95 bp, Homo sapiens
taggctgccagcaaacagtcttccgcaggaaggagatgtgccattccacagattttgaagtacaccgaaactggcttgctatcactcacagtttg

SEQ ID NO: 669910 - DNA, 101 bp, Homo sapiens
accaacaaacttgcatctggaggcaaaccctgacactggagtgctcacagtctcctgggagaggagcaccaccccaggggtatactctagttgaatatgaa

SEQ ID NO: 669911 - DNA, 100 bp, Homo sapiens
cgccccgcgcctgccgctgccctacggcttctccgccatgcaaggctggcgcgtctccatggaggttatttccagaaagaagagaatggcaaagtatgag

SEQ ID NO: 669912 - DNA, 100 bp, Homo sapiens
ctgaagtgccgcaggcagctccgtgtggaggagctggagatgtcaaataattggagtctggaagatgtgaccgcaagtgataaaaattatgtggcgggat

SEQ ID NO: 669913 - DNA, 75 bp, Homo sapiens
gacttctcagcctccataattgagtgagccaattccctgagccaaggattgtcaccagtgaagaggtcattattc

SEQ ID NO: 669914 - DNA, 75 bp, Homo sapiens
ctggccaggccaggcccggagcctgccccagccacaggtcctgaacgaggctgtgggggccctgatgtaccacac

SEQ ID NO: 669915 - DNA, 90 bp, Homo sapiens
aggacaagggaccatctgctgggtggactgtgggagccgggtgtgggctgagccctgcctgattgatgctgccaaggaggagtacaacgg

SEQ ID NO: 669916 - DNA, 74 bp, Homo sapiens
aggagtcagaaactcagccactggttgccttggtaggcaataaaacattagtgccagcagtagttcccaagggc

SEQ ID NO: 669917 - DNA, 98 bp, Homo sapiens
ctgcagctcccaccatgctggactcatcagcagcagagcaagtgacccgactgacgctgaagctcttgggacagaaagtagagggtcgagtttcatca

SEQ ID NO: 669918 - DNA, 90 bp, Homo sapiens
aagatagacattgaccccgaggagacgttgggacccctgattttagcaggatggcccaatggaatcagctacagcagcttgacacacggt

SEQ ID NO: 669919 - DNA, 100 bp, Homo sapiens
acgagctcgcttctatgctgcagaaatcatttcggctctcatgttcctccatgataaaggaatcatctataggaaacaaaccatcaggcctcccagaaag

SEQ ID NO: 669920 - DNA, 90 bp, Homo sapiens
ggctggaggcggtggctgcggttgcgggaccggtgcacagcgacttcaccgcggcagccaccaggggcgccatggccgtcattgacggca

SEQ ID NO: 669921 - DNA, 85 bp, Homo sapiens
aaaaaagaactggaagctgctggaaagaacacattggaaggaaatgtcacatttggtgaagttgtattcaactatcccacccgac

SEQ ID NO: 669922 - DNA, 76 bp, Homo sapiens
aaacgcaataagatcttcatggagttccgcaaattgcaaagacagcggtggcctacccgagcgcagtgtgtccttg

SEQ ID NO: 669923 - DNA, 100 bp, Homo sapiens
tcgctccgtggccttagctgtgctcgcgctactctctctttctggcctggaggctatccagctgaagttattgccagtggactgtgagagaaaaacagat

SEQ ID NO: 669924 - DNA, 100 bp, Homo sapiens
gttggcggaagcacttggaactcctttataagtgtcagctgtgaggccaaaatagaatctgatcgagtcattggatctgtaggcaaaaaagtagtacagg

SEQ ID NO: 669925 - DNA, 110 bp, Homo sapiens
tgaatgataaagagccaacaccactatctgaggttcttgctcatcgtggtggctattggactctgcttcagaactgctgtcgggccttatggaactttactcaggaacta

SEQ ID NO: 669926 - DNA, 83 bp, Homo sapiens
ctcaaggacacggtctacaccgacttcgacggtaaggctggcctctctgcagtcagaggtctgagctctgccatggggatagg

SEQ ID NO: 669927 - DNA, 88 bp, Homo sapiens
tggggagcagttgggaatcaggtctggaatactcctaaccaagaagttgcccagcttcctgcctgacacagctcacttcaagaagtgc

SEQ ID NO: 669928 - DNA, 100 bp, Homo sapiens
agaaagctaccaatcttcaaagagtctcttaccttgtgtttgatgaagcagatcgaatgtttgacatgggatttggtgatgtggaaacagctgtaaaatt

SEQ ID NO: 669929 - DNA, 100 bp, Homo sapiens
gcatttgtgcagctgtcctctgcaatgtgctactatatcggggccacagatgatgcagccaccaaaatcatcaatgaggtatcaaagcctctggcccacc

SEQ ID NO: 669930 - DNA, 100 bp, Homo sapiens
ggatggtgaactcattagaaaaaaatatgtcgtaactgcaagtgtggccaagaagagcatgatgtcctcttgagcaatgaagaggatcgaaaagtgggaa

SEQ ID NO: 669931 - DNA, 98 bp, Homo sapiens
tccaccggcggctccgcaagaagtaccgagaaggtggccagcatcgaaatgttcagccttttagtgatgaagatgcatcaattgaaacaatgagccat

SEQ ID NO: 669932 - DNA, 51 bp, Homo sapiens
ggaagcgtcgggattaggtgaaaatccagacatttaatgtggatgcaccat

SEQ ID NO: 669933 - DNA, 88 bp, Homo sapiens
agaagctcatggtgcacaactgtgatttagaatctagaagagaagtaaaaaaagaagaaggtgaagcttttgcacgagaacatggact

SEQ ID NO: 669934 - DNA, 99 bp, Homo sapiens
gctgagaggggctgcggccggagcgggcggctgagacaaaggcgacgactgctctggcccatttagagtctcttgcagtggatgttgaggtggccaatc

SEQ ID NO: 669935 - DNA, 90 bp, Homo sapiens
ctgagctcagacctgccaatttaccagagataattgataacaccctgtaacagctgagaagctgaatatggtgggcatgatcagatagat

SEQ ID NO: 669936 - DNA, 74 bp, Homo sapiens
cagtgagtgtcaacgaaggctataaagtctgtgagaggcggccttctgatctgtttaccacgtgagcaagcagc

SEQ ID NO: 669937 - DNA, 95 bp, Homo sapiens
tctccccacaaagagaagtctcaagatcccagattgatgaactcccagagggcgctgtgaagcctccagcaaacaagtatcctatcttctttttt

SEQ ID NO: 669938 - DNA, 75 bp, Homo sapiens
agcgcttgatgtgcgcggagagcaatcgccgggacagctgcaaggcattcctagagaagtacggatacctcaatg

SEQ ID NO: 669939 - DNA, 98 bp, Homo sapiens
aagggtgcaaagtgggacgcggcacctacggtcacgtctacaaggcgaggcggaaagatgggcagcacaacaagattcgcagcgtggaggggagccag

SEQ ID NO: 669940 - DNA, 83 bp, Homo sapiens
aggaggtcctgccgtccatgcggaagatcgtcgccacctggatgctggaggtggtcaagtaccccctgcacgccatcatggag

SEQ ID NO: 669941 - DNA, 82 bp, Homo sapiens
tgggctgtgacgctgctgctggggtcagagaaactccagaaaatcttgccaaacttctgaccaggatgtatttaaaatcaga

SEQ ID NO: 669942 - DNA, 75 bp, Homo sapiens
cggtgctgcgagggcagaacctggcccttagagatttgtttgattccatggataaaacttcttccagtattccac

SEQ ID NO: 669943 - DNA, 75 bp, Homo sapiens
ttccagcggtggccacacgtcacacagtggggacaacagcagtgagcaaggtatccagggtgtgagcaagcagaa

SEQ ID NO: 669944 - DNA, 100 bp, Homo sapiens
gtggatctggattctaaggcaacacttccttgaagaaacaagcttacagatggtcagtaggacagaaggtaacattgatgactcgctcattggtggaaat

SEQ ID NO: 669945 - DNA, 100 bp, Homo sapiens
cagccccggctctgggctacggactatgggcgaatagctctgaccacccggcgaagactgaggctgatgtgaatccaaaggcctatccccttgccgatgc

SEQ ID NO: 669946 - DNA, 100 bp, Homo sapiens
catcgttcaagggatagacgtcgaggaggcagccgttctcgctctcgttcccgttccaaatctgcagaaagggaaatcctcattgacgattcaatttgtt

SEQ ID NO: 669947 - DNA, 115 bp, Homo sapiens
ctgaatgatgaatacttttactactgtgacaacattaacgtgtggtggaaaaggaagagagagctgaggcagacgatgtaagatctgctgttacttcttgctgtgtgaccttggg

SEQ ID NO: 669948 - DNA, 51 bp, Homo sapiens
tacctgtcctttgcccagtgttctgtcattgccctaaagtacatgccccac

SEQ ID NO: 669949 - DNA, 95 bp, Homo sapiens
cgagagcgcgaatatcgtcatcgttagaagtagagatgaggtttctccatgttggtcaggctggtctcgaactcctgacctcaggtgatccaccc

SEQ ID NO: 669950 - DNA, 75 bp, Homo sapiens
ttcgagcagctgatggcccccagaagcttttgaagattgaggtggtgccttctgcctctgccctgatcatcaaag

SEQ ID NO: 669951 - DNA, 78 bp, Homo sapiens
attaaaggtgttaaatctccttggtgtgatgtttttgacatagatgatgcaaaggcccagaataaagagaccagtgtt

SEQ ID NO: 669952 - DNA, 109 bp, Homo sapiens
caaaagctgacactctcaccctgaaggaacgggagcggctgaagaaaaggtcgggaacatgccctgtgtgccgccgtcatttcccacctgcggttattgaagcatctgc

SEQ ID NO: 669953 - DNA, 90 bp, Homo sapiens
ggcaaagacctggacttctacgacttcgagccgctgcccaccctccccgaggacgaggacctctttgtttttagacatgaattggccata

SEQ ID NO: 669954 - DNA, 75 bp, Homo sapiens
acttggatacgaacatgttatatgtgatgccggaccagatctctgtctcggagttcatcgccgagaccaccgagg

SEQ ID NO: 669955 - DNA, 100 bp, Homo sapiens
ccttcccagagcccgaggagcctcctgaaggtggaagctatgctgggcccccgagtctgcgccccttaagagcaaaatgatttatgccagctccaaggac

SEQ ID NO: 669956 - DNA, 75 bp, Homo sapiens
tgctgagcccgtccgtccgccgccaccacccactccggacacaggttcgagaacttgtcttggacaattgcaaat

SEQ ID NO: 669957 - DNA, 100 bp, Homo sapiens
ggtggccatggcccgcaagctccagcatcatggcagaacaggatgtggaaaacgatcttttggattacgatgaagaggaagagccccaggctcctcaaga

SEQ ID NO: 669958 - DNA, 100 bp, Homo sapiens
gggaggataattgggatgatgacaatgtagaggatgacttctctaatcagttacggcctgtgattggaattgaaacagtacaactgcctccaccagagga

SEQ ID NO: 669959 - DNA, 90 bp, Homo sapiens
ggaaaaagaagtctttacaccgccaatccacttcctgtggcaactacaggggtgaaaagccatacaagtgtacctgggaaggctgcgact

SEQ ID NO: 669960 - DNA, 76 bp, Homo sapiens
gattcgcagtggtcgcttcttctccttggaagtgaaagtacttagcattgatcaaagaaatttcaaattacgatca

SEQ ID NO: 669961 - DNA, 75 bp, Homo sapiens
tcgtggtgactggctccaaggaccactacgttaagggaaagagaagaaggcgccgcccttgctggagggggcccc

SEQ ID NO: 669962 - DNA, 80 bp, Homo sapiens
gcctgaggcggcggcgcgaggcaggtcaaaatgcagatcttcgtgaaaacccttaccggcaagaccatcacccttgaggt

SEQ ID NO: 669963 - DNA, 75 bp, Homo sapiens
cccatctcagcctcctgagtagctaaggactacaggtcaagtttacccatgggggaactggttccagccaaaccg

SEQ ID NO: 669964 - DNA, 101 bp, Homo sapiens
gctgctgtgtgggaagaagatttgtaaagaaaactcttagagggccccattgtgctgtcccgaccccaggatggggactctccactgtccgactcaccccc

SEQ ID NO: 669965 - DNA, 90 bp, Homo sapiens
ctgtactgcaacgactgctatctcagattcaaatagccctatgagtttgtctctctggaatggctgcaaaagtggttggatgaatcaaca

SEQ ID NO: 669966 - DNA, 100 bp, Homo sapiens
agaagctcccgcggtactacaagaacatcggtctgggcttcaagacacccaaggagcggaagccctgaccaggcatggagtatctcacaaagtagacgat

SEQ ID NO: 669967 - DNA, 97 bp, Homo sapiens
cactgagaagtattttgctctgcgaaacatcatccagaaggttcagcgaaatgaggacaaatctactaccttgaaattggctgattttggacttgca

SEQ ID NO: 669968 - DNA, 74 bp, Homo sapiens
tgctgcctgagcccgccagcgacgtgcgcctcgggagtcggcctgtgaggataccatacttgcagagctccttc

SEQ ID NO: 669969 - DNA, 100 bp, Homo sapiens
gaccaattacctcttttttgctctccctcgagaagctccagatggcgtcttccgtgggcaacgtggccgacagcacagggagtgatgatgaatacagtga

SEQ ID NO: 669970 - DNA, 98 bp, Homo sapiens
cctggcattgccttttgttgagatattggcgtgccacttttgaagaaggaaaatacttagctacattaaaagatttgcattgaagaagcaattgtgat

SEQ ID NO: 669971 - DNA, 90 bp, Homo sapiens
agatccagttgcaagcagtttgtgaccggagggaagaaggcaatggtggcttgctatccgggaaatggaacaggttatgttcgccacgtg

SEQ ID NO: 669972 - DNA, 100 bp, Homo sapiens
agcggatcccagacgtggctgcattgtccatgggcttctctgtgaaagaagtatatgatgatggaaagtatgtgtatgtagtaacagaacttatgaaagg

SEQ ID NO: 669973 - DNA, 76 bp, Homo sapiens
aatggtctatagtctctttaagattgcttatgcccgtatagagggggatatgatagtctgcgcagcgtatgcacac

SEQ ID NO: 669974 - DNA, 100 bp, Homo sapiens
tagcagacactgcaaatgaagctctcgaggctgctaagagactaaatatagccagtaccaacgtatgctgagcacgctgtctcaatgtgaattttcaatg

SEQ ID NO: 669975 - DNA, 75 bp, Homo sapiens
ctttcagcgatatgaagttaaaaccagctgcagacattcaatactgcctcaccttgtcaagatgtcaaacagctg

SEQ ID NO: 669976 - DNA, 100 bp, Homo sapiens
ctgagacctttattcgtctgtgtgagcggtttaatgaaagaaatccacctgaacttataggtgagcagtaggtcatccagtcccagtgtcagaatgatta

SEQ ID NO: 669977 - DNA, 100 bp, Homo sapiens
tctgctgttcagcaggagaaaatttcagagctgcaaaattatcaggatgaatctggttatagatggacaagagacgatcattctgcaagcaggcaacctg

SEQ ID NO: 669978 - DNA, 75 bp, Homo sapiens
gtgttttctgagcgagccttgaaagagataaaagcggaagtttgccacacggctgcagaagatgtcaatgttact

SEQ ID NO: 669979 - DNA, 101 bp, Homo sapiens
gtggtcaagtgcctcacccctttctacaaggagggcaagtttgcttccaaggactcaggtacttctgccctccctttggtctccctgttcttctatgtggt

SEQ ID NO: 669980 - DNA, 50 bp, Homo sapiens
caacagcatccagtttgtcatcaagagtggtttatcagatactatcattt

SEQ ID NO: 669981 - DNA, 82 bp, Homo sapiens
gcctcacatcaacttccagtgagagtgacacaggtcaggaagcagaatattccttatatgcttgaaatccatggcccaaaat

SEQ ID NO: 669982 - DNA, 83 bp, Homo sapiens
acctactacgagggcggctacttcaagttcttcgaagggaaggagctgcggctgaagcaggagtatttcgtggtggctgccac

SEQ ID NO: 669983 - DNA, 100 bp, Homo sapiens
tgtgatcgccagcgccggcctcctccgtgcggagaagaagctgcggccgcacctggccaaggatctcgaggacctggaagaagcagaggagccagacatg

SEQ ID NO: 669984 - DNA, 100 bp, Homo sapiens
ctcgccgctgctgccgccgccgccgcccagagactgctgagcccgtccgtccgccgccaccacccactccggacacagctgggagtgtccactcgccttc

SEQ ID NO: 669985 - DNA, 100 bp, Homo sapiens
cgcggactgcggtgtcagccgcccgagccgttccccggacacctggccagagtatcctgagctccagctggaccctaaattggatcctcttcctgctgag

SEQ ID NO: 669986 - DNA, 100 bp, Homo sapiens
ggggacgaaacaataaagaccggaagctgagtttttatccgtactcatgagaagcaagagatgaaaaagaagaaagttgaaaaaggagtgcttaatgtac

SEQ ID NO: 669987 - DNA, 101 bp, Homo sapiens
ccggtgctgaggagagagcgatccgagggactgcgccgcccggacggcctgcagagcgctgccatcatgaggcaatctgaatatggcggtgtagtgtttgg

SEQ ID NO: 669988 - DNA, 50 bp, Homo sapiens
cttacaacatggcagacattgacaaattctgaaaaagagttccacgtcct

SEQ ID NO: 669989 - DNA, 100 bp, Homo sapiens
cacctcgtggtaaaggttatagcagcaattatagaaggggcatatgatattttcctgaatgcaaaagagcaaaacattgtgtttaatgctgaaacctaca

SEQ ID NO: 669990 - DNA, 98 bp, Homo sapiens
agatgaaggtctggctgctgcttggtcttctgctggtgcacgaagcgctggaggatgaactccatccggcacaacctgtcactgcatagtcgattcat

SEQ ID NO: 669991 - DNA, 101 bp, Homo sapiens
aattcctggaaaaagaagtccaagaagcaaaaaagggactgctaagaagataccaccagctagaacgagtaaatctgtctgcagcccagacactgagagcc

SEQ ID NO: 669992 - DNA, 75 bp, Homo sapiens
tttgtacctgcaggcctcctacacctacctctctctgctgtcaccactgactaaagaagagaaaactgcggcaga

SEQ ID NO: 669993 - DNA, 99 bp, Homo sapiens
gtcagctgtgtgtccagaacgtgccatggagacgcttaacgaacatggtccaagacaattcctgggaaagttcagttcttctcaagtgagggttctgac

SEQ ID NO: 669994 - DNA, 95 bp, Homo sapiens
tacttcgggcagaaggactctgtgtgtgggcggcgactggcggcgcgatggacctgaccgggctcctgctggacgaagaaggcaccttctccctc

SEQ ID NO: 669995 - DNA, 50 bp, Homo sapiens
cgacagaagcgactttggtgagactctggaaatgaaggaccatatggtca

SEQ ID NO: 669996 - DNA, 98 bp, Homo sapiens
caggcccctgtcaagaaggtgccggtggtgcgagtcttcggagcgaccccggcagaaaggagatgaagttgctggagcaggcaggttctctgaaaggc

SEQ ID NO: 669997 - DNA, 74 bp, Homo sapiens
cactgcagaggtgctggagctggcaggtcattcctgtcccaatcagctgctctactactgatgacattaaagat

SEQ ID NO: 669998 - DNA, 99 bp, Homo sapiens
ccgggctcccgtggccgcgtgctgggaggagactggagcccggttaggaagaatggagttggcgactcgctaccaggaaatttatcagtggtgtggttc

SEQ ID NO: 669999 - DNA, 75 bp, Homo sapiens
cgattgcgtggtcagtgattgcgaggaatctggtggacagtaacaaactttggtgaaatttcaggaaccatagcc

SEQ ID NO: 670000 - DNA, 98 bp, Homo sapiens
ttagaggctcccggagtgtatgtctttggagaacttctggagctggccaacgtgcaggagaaagggctattgcaagacacgaagtccgagaaattgag

SEQ ID NO: 670001 - DNA, 100 bp, Homo sapiens
ctattggattcataacctgctccatgcttgaaaacatggggattggaattcggacctcagcagccatgtcgaagccccatagtgaagccgggactgcctt

SEQ ID NO: 670002 - DNA, 82 bp, Homo sapiens
gcagctcaacttctaccagttcctcggggtgcagcagacaagttggatggcttgaggactggtactaaaaggaaacgtgact

SEQ ID NO: 670003 - DNA, 74 bp, Homo sapiens
tactcagcaagctcgagttaaagttggatgtgctggaacaggccatagccacgcgggaggagctgcacgcacag

SEQ ID NO: 670004 - DNA, 99 bp, Homo sapiens
gttcaggaaccaccagtgacagaaggctgtgcccaggtgggcgttctcaaggccttggcggagtgcggcatccctgtggacatggtgggaggcacgtcc

SEQ ID NO: 670005 - DNA, 108 bp, Homo sapiens
gacagtacaaagaagactcttgtcacactaattgccaacaacaatggtgcgttccatggatgaactgaatcatgattttcaagcacttgctctggagggaagagcgat

SEQ ID NO: 670006 - DNA, 75 bp, Homo sapiens
cctggagggaaagtgccgctttaaggagaactgcaggtatagctgtggaccaactgtatatgatcatgcgcacct

SEQ ID NO: 670007 - DNA, 100 bp, Homo sapiens
acggacaagagcggaggcctggatggattaattgcctctgaaggagccataagtcccgatttcttcaatgattaccaccttcaaaatggagatgttgttg

SEQ ID NO: 670008 - DNA, 100 bp, Homo sapiens
ggtggggaggaagaggaggaggaagaagaaggtgatgatggccgccctgctcccccaatgaaaggccagcttcgaagaaaagctgaaagggagacgtttg

SEQ ID NO: 670009 - DNA, 100 bp, Homo sapiens
ggcgcagacgcgggcgagctgcggctcggacgccagcggacacgcgggcgaggtatggctctgtgggggcagcatggaggtccttccttgctcacgggtg

SEQ ID NO: 670010 - DNA, 82 bp, Homo sapiens
atcccccactctttccgccctaatggaggtctccagtttcgagctagagccggtgcaggccacgcagaacaagacagggaag

SEQ ID NO: 670011 - DNA, 83 bp, Homo sapiens
ctgagcttcctggagaagaggaagtcccacccccagcctggggcctctgggagccttggtcctgagcagccaacacaccagcc

SEQ ID NO: 670012 - DNA, 74 bp, Homo sapiens
tttgctcaaggatcccagttttctctggatgacgtgattttgcaagaacgaggctcaaggatgtgagggacaca

SEQ ID NO: 670013 - DNA, 82 bp, Homo sapiens
gggcgagacacgcctgggcccaggtgtggcgtctctgtccccatctggttttaggtgctgccttcacctgcctggagactgc

SEQ ID NO: 670014 - DNA, 50 bp, Homo sapiens
gtttgacatgacggcaaaaaatatgcctgtcttagatgtcaagctgaaaa

SEQ ID NO: 670015 - DNA, 100 bp, Homo sapiens
gaaaccagtggatctgccaactactcccagtgattgccccagaggccgtttcttggccgccatctgccaaggtgagatcctaaaactcagaaccctctcc

SEQ ID NO: 670016 - DNA, 87 bp, Homo sapiens
gaacggattccagcatggacgtcttccacctggagggcatgactacatctgtcatgagtctctctgtcacctaagctggagtgcagt

SEQ ID NO: 670017 - DNA, 90 bp, Homo sapiens
cgggccagcatgtctgggggcaaatacgtagactcggaggtgctggagaatctggtaaaagcaccattgtgaagcagatgaggatcctgc

SEQ ID NO: 670018 - DNA, 75 bp, Homo sapiens
ccgacagcacagacagaatccctgctaccagtatggcctcacaagtcttggtctacccaccatatgtttatcaaa

SEQ ID NO: 670019 - DNA, 75 bp, Homo sapiens
gagggagtggacatcagccccaaacaggacgaaggcgtgctgaagacccgaccgcatgtctgtcatggacctcgc

SEQ ID NO: 670020 - DNA, 100 bp, Homo sapiens
gagcagcgctctggggctcgccttgtatctcaacaccctgagtgcggatttctgctatgatgacagtgccagaacagataaagcccagtgtaagccagcc

SEQ ID NO: 670021 - DNA, 100 bp, Homo sapiens
ttgcaccacgcccggggggacgctcttctccaccacaccgggagattgacaagtatctctatgccatgcggctctccgatgaaactctcatagatatcat

SEQ ID NO: 670022 - DNA, 74 bp, Homo sapiens
ccgacaccgagcccgcccgacccgggctcccacctgctcctccagcgcaccagctctattaccaggttttaaac

SEQ ID NO: 670023 - DNA, 90 bp, Homo sapiens
gacgaacaagataaggagcaatccaatccatctatggtattggacatagatgtagagtgatgcgagacctcaaaggagttcatgggaaca

SEQ ID NO: 670024 - DNA, 75 bp, Homo sapiens
actacctcctggctgccgtgaataggcagcctaaaggtacctggcaaagaattctgcaactttgttcagtgccag

SEQ ID NO: 670025 - DNA, 75 bp, Homo sapiens
ttgtcatggactgttaaaacgtttgaagttccaattctgtggatgattcaacagccacacaaagcagcaacattt

SEQ ID NO: 670026 - DNA, 90 bp, Homo sapiens
gtggcggtgctgaggcacctggagaccttcgagcaccccaacgtggtcaggtatcagaatggcaaagcaacttaaccttccagaaaatac

SEQ ID NO: 670027 - DNA, 98 bp, Homo sapiens
ctgtgtcgcgctcagcggctatgaccaggtgctccacgaagacgaaaccacgcctcctctattggcccaggaagcccacccagccccgccacgcagag

SEQ ID NO: 670028 - DNA, 75 bp, Homo sapiens
tcagtttgtgcctgagaaaatgagacgcgagctgaacaagttattaaagagggtgtacgggagtttcttggtaaa

SEQ ID NO: 670029 - DNA, 74 bp, Homo sapiens
gggagctgaagctgctgcttttgggcaccgtctgcgtcctgctgtccttccccttcatcttcagcccctgcctg

SEQ ID NO: 670030 - DNA, 97 bp, Homo sapiens
gttggagggagctacctaccaggtgccagatgccctcgagtgggaacagcagaatcaaggcctggatgtaaaaaaagattggtctgaccatgctctc

SEQ ID NO: 670031 - DNA, 50 bp, Homo sapiens
gaagaaattgagggttcttgccatggtaaaagtgcagttttaaagtgtct

SEQ ID NO: 670032 - DNA, 75 bp, Homo sapiens
tgcgggttgcaaggagcgtgcgtgcgtctgactacagtgactatggtgggaagcttctctccaagacactcaaag

SEQ ID NO: 670033 - DNA, 74 bp, Homo sapiens
ttgccgccctgcactgccgcttcggtcactaaacctcaagaaggcatgaagccagcccctgcagtgccgtccac

SEQ ID NO: 670034 - DNA, 75 bp, Homo sapiens
gccaaggctggcttggtggatgactttgagaagaagggacaagaatccttcaagaaacaggaaaaaactcctaaa

SEQ ID NO: 670035 - DNA, 100 bp, Homo sapiens
gaaatacagactgttggggaacaagaggaaacgtaaatattttcaccacgatcgattagactgggatgaacacagttctgccggcagatatgtttcaaga

SEQ ID NO: 670036 - DNA, 83 bp, Homo sapiens
tgttggtggaagaaggcgggctgtaaccttttccaactggaattttcttgagccagcaatggctgccatccggaagaaactgg

SEQ ID NO: 670037 - DNA, 75 bp, Homo sapiens
ccggaggctctggatggaagccatggatggccgggaaccttactatactggcaattgctggagaagattttgcaa

SEQ ID NO: 670038 - DNA, 96 bp, Homo sapiens
atgagtctggaaaactgggccaaagcagtgaaacgctccatgaattgacattgagacaaattgtttagaagaaaaaagcaagagagactattttac

SEQ ID NO: 670039 - DNA, 100 bp, Homo sapiens
accttcaggctgaagagcgaagagaagactgcaaaatgggttctggctggagtggctctgcttctagaagcgtaagaatctgtgtttgtggatatcctcg

SEQ ID NO: 670040 - DNA, 83 bp, Homo sapiens
gctcttcggccgcatccccatgcgcttctcggtgctgaaaagattcaagttcagctgtgcttcaagacgtgttctcctgaaag

SEQ ID NO: 670041 - DNA, 82 bp, Homo sapiens
ggagaagacactgcgtcaagcaggtgccccgaataacgacttctgcacggacctggccgtctccagtgccaacttcattccc

SEQ ID NO: 670042 - DNA, 83 bp, Homo sapiens
aatatctgtcttcggtggactccttcggcagtccacccaccgccgccgcctcccaggacctgcaagcgcaggaccgagcccac

SEQ ID NO: 670043 - DNA, 118 bp, Homo sapiens
tgaacgtgattgagcgccaccctgtggacatcagcgccatccccgagcagcggtggaagctgtgtactaatggtcacttgatgtgcgctggctgttttatccacctactagcagatgc

SEQ ID NO: 670044 - DNA, 82 bp, Homo sapiens
tggcctgggcgctccggtggcggcggaggccatgtagggcaggaccgggtggactttggccagactgagccgcacacggtgc

SEQ ID NO: 670045 - DNA, 74 bp, Homo sapiens
tggttaacttgggagaaagtttcatctgtggatggagtattgccaagacaatgcaaactccagtgaacattccc

SEQ ID NO: 670046 - DNA, 75 bp, Homo sapiens
ccgcagcgctcgccccacgggccgcgcgtggagggtcccggaaatttggtgagcggcctccacctaaacgactta

SEQ ID NO: 670047 - DNA, 100 bp, Homo sapiens
ggggagaggcctggaggacaccaacatgcagtcctatgcaccagctccccaccccatggctcctcccagccccagcacaaacagcagcagcaacaacagc

SEQ ID NO: 670048 - DNA, 82 bp, Homo sapiens
tgggtcacgggctggggacacacccagtatggagcacatgattaagtaccggtacatcccgttcacacatgggaagagaagg

SEQ ID NO: 670049 - DNA, 89 bp, Homo sapiens
ggggaccccgcacagggtgtttgaggtgcagaaggtcaaacaagccagcatggaggaagagagaagggcacagttacctaagtatcaac

SEQ ID NO: 670050 - DNA, 100 bp, Homo sapiens
ctctgatgtcaatcttgagggctaggtggtaataagctgcagtcaacaggaaataaagcagaagacataaaaggaaccgaatgtgttaaaagtactcctg

SEQ ID NO: 670051 - DNA, 75 bp, Homo sapiens
aggggtcccgaagccccctgcaggaactctacaacccaatccagagctaatgtcaaaccccgaaattccacacca

SEQ ID NO: 670052 - DNA, 100 bp, Homo sapiens
ctggtgtaccaggcgaagctggccgagcaggctgagcgatacgacgtttcttaaacaattaggtctacatcctaactggcaattcgttgatgtatatgga

SEQ ID NO: 670053 - DNA, 97 bp, Homo sapiens
tggaaaaagtaccatcatttgaaacaggcccagctgtggtccctcaccagtattatggagttactccctggggagtctaccctgccagtcttttcca

SEQ ID NO: 670054 - DNA, 87 bp, Homo sapiens
aatacgtgataacattgtggaaggaataattcggtctccagatttagtgagaaacattgctgaggctcttgtcagcaaaggtctagc

SEQ ID NO: 670055 - DNA, 90 bp, Homo sapiens
gactacaggcacgcgccactacactcggttatggctgattgtcctcacacaattggtgttgaatttggtacaagaataatcgaagttagt

SEQ ID NO: 670056 - DNA, 75 bp, Homo sapiens
cggccgcggggcccgagcgcagttcttatcaggagaggatcaatggaagtgaaagcaaatgattttcattcacct

SEQ ID NO: 670057 - DNA, 101 bp, Homo sapiens
gccaccagtccaactcgggtcgcccccaccattatttcggtacgagtgcttccatatccatttacccaccattggcaatttgaaaggaccatccagacccc

SEQ ID NO: 670058 - DNA, 104 bp, Homo sapiens
ccgggcgcagccggagccggtgccgcagctgcgatggccgtggccgtggggagaccgtctcatttgacattgtgcagcaaagaaatggttatggagaagcccag

SEQ ID NO: 670059 - DNA, 82 bp, Homo sapiens
agatctctaaaaaagtggctcagattcagaatggatctcccagccatccagccccggctagtggcggtcagcaaaaccaaac

SEQ ID NO: 670060 - DNA, 100 bp, Homo sapiens
ctggcagtcatcgtgcctgaaggagtacatgccctttatgaagatattcttgagggaggagatgaccgccgggttctgctatggcacatggaacaagcca

SEQ ID NO: 670061 - DNA, 100 bp, Homo sapiens
gagacgtgattatgagggagtttcgttctggctctagcagagttttgattaccactgacctgctggcaaaattccactgaaggagcctctgtgccctgca

SEQ ID NO: 670062 - DNA, 75 bp, Homo sapiens
tccatatgtaaccaaatattatggatcctatctgaaggctatcagctgtactctgaactgtagttgccaaagttt

SEQ ID NO: 670063 - DNA, 98 bp, Homo sapiens
gaagctgaggcacatggagctgaaaaacttgatccaggccagaaatcatgaccaccccaggaaaagagaactttcgcctgaaaagttacaagaacaaa

SEQ ID NO: 670064 - DNA, 100 bp, Homo sapiens
tgtgattatcatcaataccgagataaattttccaaacacctgactctgtgtgtttttaccaaccatacagggaaaaaatgcatttttcaaagacctaact

SEQ ID NO: 670065 - DNA, 100 bp, Homo sapiens
ggccaccgactactgtcagcagctgtgccagtttgcagtgttgatgtgggtatttacctatgttggtgccttgtttaatggtctgacactactgattttg

SEQ ID NO: 670066 - DNA, 136 bp, Homo sapiens
gactctgcgactatttcaggccttgcggaacccgggccaggacagtggcggccaggccgggacacgggaacagtcactgaggataagaacaatgcctcccatgttgtgtatcctgtcccggggaatctagaagaag

SEQ ID NO: 670067 - DNA, 75 bp, Homo sapiens
ggcaaaacgattcgagaatggatgagagagatctggcagaggacggaaattaagtggagaccaaataactttgcc

SEQ ID NO: 670068 - DNA, 75 bp, Homo sapiens
ccagcgctcgccgacaggggcctgggctgtcccgagccgtggccatcaacctcatcgtgcagcacatccaggaca

SEQ ID NO: 670069 - DNA, 75 bp, Homo sapiens
tctggttcttgccaatcctgaatctgcaacaactttcaaggctttgggggaccagatactatttgtaaatcgtcc

SEQ ID NO: 670070 - DNA, 96 bp, Homo sapiens
ctttgcctcatttgaggagtgggaacaggcttcggcgaacacaaagccaggcgggcaccacggcaggggctgagctaccctcatggaagggagagg

SEQ ID NO: 670071 - DNA, 90 bp, Homo sapiens
gcagccctggtgtcacctatcagtaaaagacccgtttgatggagctgcaccgccagtgggaattacttttggagaagatgcgagaaaaag

SEQ ID NO: 670072 - DNA, 100 bp, Homo sapiens
agctgctgaggaggagccgaagcccaaaaagctgaaggtggaggcgccgcaagcgctgaggaagatgagaatgtgcctactgctcctgatcctccaagtc

SEQ ID NO: 670073 - DNA, 53 bp, Homo sapiens
aaaaggagggagttacactcaggctgcaagcagcgacagtgcccagggctctg

SEQ ID NO: 670074 - DNA, 100 bp, Homo sapiens
gctgaagctgtaacctccatttcaaacttgtggttctgcagccagcccctgggcaacaaagtggaaatggagattgtgagcatgttggaaaaaaacgcaa

SEQ ID NO: 670075 - DNA, 75 bp, Homo sapiens
gctgtccgagtcccaggtcaagagcctctgcgagaagcctccagggtcgtatagacctccccctcctatgggcaa

SEQ ID NO: 670076 - DNA, 98 bp, Homo sapiens
ttcagcatctacgggaggcaaacttgtaaaacctggaacagcagcatcattgtcaaagtgggctcgggatgagtttgaaggcctcttcaagcagccag

SEQ ID NO: 670077 - DNA, 97 bp, Homo sapiens
gcggcctcggctcttccagccaccccctctccagtctgctcaggtatgaggatacatgggctgcacttcacagaagagccaaagactgtgcaagtgc

SEQ ID NO: 670078 - DNA, 98 bp, Homo sapiens
ctgggacttatttttgtatagctgataatggaaatgagacaattgaagctcaagcagagcttacagtgcaaggccctcgggaccaaggatcacgtcat

SEQ ID NO: 670079 - DNA, 100 bp, Homo sapiens
ctggatgctgacagaaacaagggtacaggtttgcagattccgccagcagcacagcaagctctacagatgagtggctctttggcatttggtgctgtggcag

SEQ ID NO: 670080 - DNA, 75 bp, Homo sapiens
acctcgagcggctgctggacgaagctgccgcagcgggaaccgcaagagcttggtggtaggaacgccctccccgac

SEQ ID NO: 670081 - DNA, 50 bp, Homo sapiens
gcctccagcttctgctcctgagctgcggtctgaatgactgggatgatgat

SEQ ID NO: 670082 - DNA, 123 bp, Homo sapiens
ctctgattttgtttcattttcagctggagacttaaatgacaccaagcaaagcctacttagtttagatctccaggtgctggagaatctggtaaaagcaccattgtgaagcagatgaggatcctg

SEQ ID NO: 670083 - DNA, 98 bp, Homo sapiens
tcacagtttaggtctcaaggcaagcctattgagttaacacctctgccgctgctaaaagcacccctgcagtggaccatgagtcggtaatgcccactgag

SEQ ID NO: 670084 - DNA, 51 bp, Homo sapiens
gcctgctatccctccagtatttgtcccctgaagtcatgggttgctggctcc

SEQ ID NO: 670085 - DNA, 75 bp, Homo sapiens
gtactcgcacagaagcattagaagccttacagagtgaaaaatcacgctatcatggtgaacttacttcagattgtg

SEQ ID NO: 670086 - DNA, 96 bp, Homo sapiens
ctcggcgatggagctgttatttttagatacttttaaacacccgagcgctgagtgcaaagaaaggaggtacaggcccgagctgtgttctaccccctc

SEQ ID NO: 670087 - DNA, 83 bp, Homo sapiens
cacgggggtcagaccaggatccacccgaggaaggcatggaagaggagatggttcgtgttacgcagtggccgtttaactggaga

SEQ ID NO: 670088 - DNA, 50 bp, Homo sapiens
ataaaatgtcagcttttaaggaaatgcactcggtgatggaaagagagcca

SEQ ID NO: 670089 - DNA, 83 bp, Homo sapiens
ggtccgcgagccaccgaggcccagggagtgcatccgccccaacccttttccccctcgtctcctgtgagaattccccgtcggat

SEQ ID NO: 670090 - DNA, 90 bp, Homo sapiens
cgtggatccaagatggcgacggcgatgaatttcagaaactgtggaggagtgtcactgtagattccatggacgaggagaaaattgaagaat

SEQ ID NO: 670091 - DNA, 90 bp, Homo sapiens
ttcaaccagaggggtgtagatgatgcattgctctccctgaaaacaggtgtggctggtaaagaggataatacagacactgaccaagagaag

SEQ ID NO: 670092 - DNA, 100 bp, Homo sapiens
gggttggctggagttcattgcggagcatgaggacgtgtggggaagtggagcttcccctgaagaaggatgggttcacctcagagagcaccacgctggaagc

SEQ ID NO: 670093 - DNA, 90 bp, Homo sapiens
gtttatgccaaatcaactgccttacagtcctggtacctgggctagcttggttcctttccaagtgtcaaataggacacccatcttaccggc

SEQ ID NO: 670094 - DNA, 82 bp, Homo sapiens
ttggaagcagccgatccagcctgcggagcctgtggggcaggatgcctaaatcaaaggaacttgtttcttcaagctcttctgg

SEQ ID NO: 670095 - DNA, 50 bp, Homo sapiens
aaagtgcaggcaaagctctcagagtacaggggctcaggtccaggtggcag

SEQ ID NO: 670096 - DNA, 75 bp, Homo sapiens
gagaatgcatctagacagagcttttcgtgctgctgagcttccagggaaaaagacaactaaactttgggttccaga

SEQ ID NO: 670097 - DNA, 83 bp, Homo sapiens
gagtcggcggctcagttgtccatgaccctgaaggtccaggagtacccgaccctcaagctaccaagatgaatgaactaatggag

SEQ ID NO: 670098 - DNA, 128 bp, Homo sapiens
tggctgagtttcggacgtggttaagaaccaactggttgaggttcaatgcagacaagacggatgtgatgctgtttcagagactcctccactctctgggaatgacacggactccctctcctgcgacagtg

SEQ ID NO: 670099 - DNA, 75 bp, Homo sapiens
ggactgaccgctgccgcccagcacgtccagcctttctgagaaaagtctacagcattctttctctgcaggttctct

SEQ ID NO: 670100 - DNA, 98 bp, Homo sapiens
ctggacacagaagtatttgtgacaggtgaacatgtcaaaccttttaagccagagaaagcaaaagaaattatcatgtctttacaacaacctgcaatctt

SEQ ID NO: 670101 - DNA, 80 bp, Homo sapiens
aaaggcaaaggattcggatttattaagcttggatcatagacggtatttctatgtaaacgaacagtcgggcgagtctcagt

SEQ ID NO: 670102 - DNA, 100 bp, Homo sapiens
agcctcctaagtagctgggaccacagggatggagctagccaagggctgggctcctgtcattgggacttccggaaccggccacaccccttcagagcacgga

SEQ ID NO: 670103 - DNA, 80 bp, Homo sapiens
gtcgccgccactgccgcaggaggcgtgagccacataaagaagatccctaatagtcatttctcaacaattatatagtcaac

SEQ ID NO: 670104 - DNA, 50 bp, Homo sapiens
caagcactgtgatcttcaaatgtgaaagcccagcctccgtggttcttaat

SEQ ID NO: 670105 - DNA, 75 bp, Homo sapiens
cgttgatgagagcattcgaagtgacctcagcagggcatccaggtggaaccgtcccaaaatgtcccttgctcagaa

SEQ ID NO: 670106 - DNA, 100 bp, Homo sapiens
gccctcctgtgacctgcatgtactgggggattcgcagggaggatgtcgggacaccccggaagctgggaaatgggaccagttactctccacaagaaaattc

SEQ ID NO: 670107 - DNA, 97 bp, Homo sapiens
ggctgcgaaggcggcggctcctgccctctcgctttccctctcgcgtctctggctgcaggtactccaaagattcaggtttactcacgtcatccagcag

SEQ ID NO: 670108 - DNA, 100 bp, Homo sapiens
acaaagagagactttttgtacttacaaagtccatgctaacctactatgagggtcgagcagagataacaccatccagtcggttttctgttgctgctgttgc

SEQ ID NO: 670109 - DNA, 50 bp, Homo sapiens
tctggagagaagcagcggatcagcagagaatccagggcctgaaaacccag

SEQ ID NO: 670110 - DNA, 75 bp, Homo sapiens
gacaactcaagagcaatcagtaccatctgttgtggacatcggatacccaaggagacgaagctgaagcaggagaag

SEQ ID NO: 670111 - DNA, 100 bp, Homo sapiens
atccgcccgccgccgccgccgctgtccggcccccgagcacgccggccccgcgcgcgcctcgaggccgagtcaagatattaatgaatgtcagctacaaggt

SEQ ID NO: 670112 - DNA, 88 bp, Homo sapiens
aatatcatcttcaacttgtagacacagccgggcaagaccttgctaagcagtactctgacagactagaatgctgtgaaaatgaagtaga

SEQ ID NO: 670113 - DNA, 50 bp, Homo sapiens
tgcatctcctgtatctgcctaccagaaagacgagaatccaggacttgaat

SEQ ID NO: 670114 - DNA, 83 bp, Homo sapiens
ccaaagatgatgttcatccatgctccagttctccctggatccagaacccattgctatcaactgtacagccttcaatcacaacg

SEQ ID NO: 670115 - DNA, 75 bp, Homo sapiens
aacagagcttttggaatctgaacaagggccctttctaaggcacaaaatgatgtgatggaaatgaagatgcagtca

SEQ ID NO: 670116 - DNA, 50 bp, Homo sapiens
ggcttcaatcaggctgaggagagcacagacggagtctcactctgtcgccc

SEQ ID NO: 670117 - DNA, 100 bp, Homo sapiens
ccagttccttaatgggagcattggattctctccactgcagctgccccctgtgtcagtggcagcttcacaagtaacaaattccaaagcccttaaataaacg

SEQ ID NO: 670118 - DNA, 50 bp, Homo sapiens
agacattcaacatgattgcatttgaagtggacttagtagttttaagcaga

SEQ ID NO: 670119 - DNA, 50 bp, Homo sapiens
ccaaactctccatcacccaggggttctctccccttgccaccatgagcgag

SEQ ID NO: 670120 - DNA, 98 bp, Homo sapiens
tcgcggctctaacggggctttctacaaggtgtccttcttcacatcattatggaatcacccatttttcaccattagctgtatcactctaataggcttgt

SEQ ID NO: 670121 - DNA, 98 bp, Homo sapiens
cagccacgcgggcgagcggctgtgtggatgtcggcgaagccgcgggcgaggctcttgtcaggatggtgaagctgttcatcggaaacctgccccgggag

SEQ ID NO: 670122 - DNA, 100 bp, Homo sapiens
ttttcatgttgctggtggaccagattggtaactcccatgtgcattctactgacgacaagttggatggcttgaggactggtactaaaaggaaacgtgactg

SEQ ID NO: 670123 - DNA, 76 bp, Homo sapiens
atcctcagctccagctgcactgctcagacgaggatggcatagtcaatccaacaataagaaaagatttgaaaactgg

SEQ ID NO: 670124 - DNA, 82 bp, Homo sapiens
caggcagaaggcctctctcctgatacagcaggcgctcaccatgttccctggaggtgcagagcattgtagaccaaggagccat

SEQ ID NO: 670125 - DNA, 101 bp, Homo sapiens
gatcagacgaactacgaacccctggacgggagagtctgccggcggagaatataaggaattacatgaatgacagtcttcgaaccaatgtgtttgttcgattt

SEQ ID NO: 670126 - DNA, 50 bp, Homo sapiens
cacggagtcgccgcggagcgcaggtaagaatgattgatgttggctgatat

SEQ ID NO: 670127 - DNA, 83 bp, Homo sapiens
gtggactaagaacgcattgccgccggtcctgaccaccgtgaacggacagtcccccccaggtgcgcgcggagccatggttatca

SEQ ID NO: 670128 - DNA, 96 bp, Homo sapiens
ggcagtcggatagacaataccacaacaacacattttgcagagtacaaggcgagtggataattccaacacaagactggcagtccaaattgaaagaga

SEQ ID NO: 670129 - DNA, 75 bp, Homo sapiens
gcacgttcgtttacagctcaacagccagctcttcattgccacataaagaagatccctaatagtcatttctcaaca

SEQ ID NO: 670130 - DNA, 76 bp, Homo sapiens
ccggcgagcagggagcggagtaccagcacttcatccagcagtgcacagccaactgggtacatggaaaactcagtct

SEQ ID NO: 670131 - DNA, 100 bp, Homo sapiens
catcggtgttcgagaagtacacggccagcgtgaccgttggcagcaaggaggtgaccctgaacctctacgacacggccggaggccccgtgtgggccgcggc

SEQ ID NO: 670132 - DNA, 73 bp, Homo sapiens
ggcctataagcttcgtggatggttggatggcaagcatgtggtgtttggcaaagtgaaagaaggcatgaatatt

SEQ ID NO: 670133 - DNA, 98 bp, Homo sapiens
gcgactcgggctgagggagctcgggccaatcagagggacggccccagaatggcatggtacccgggctccacattcatggatcatgtgttacgctatca

SEQ ID NO: 670134 - DNA, 97 bp, Homo sapiens
ccccggaggcagagcggctgccatggacaaattgatggccaggagatcactgccaccgccgtgctggccccctggcctaggccaccccccaggagat

SEQ ID NO: 670135 - DNA, 100 bp, Homo sapiens
tgcggaagtgcagctgcctcagttcttagcgcagagaggccaatgagacttgaaccctgagcctaagttgtcaccagcaggactgatgtgcacacagaag

SEQ ID NO: 670136 - DNA, 90 bp, Homo sapiens
gatcggagctgcgcgcggaaccgtgctgccccgccccgctccacccgtgagggccgccgctgcccagcagatcccgatctcccttcacac

SEQ ID NO: 670137 - DNA, 75 bp, Homo sapiens
cgcacagatgggccgggtgggcgagattcccccgccgcccccggaagacttaattcagtgcacaaatgagatgaa

SEQ ID NO: 670138 - DNA, 50 bp, Homo sapiens
aagcttcacaaaagatgtctaaggcttcctttctgtctgaccagcctgag

SEQ ID NO: 670139 - DNA, 100 bp, Homo sapiens
tggtcatgatggaaacgtgatagtgtgggatctggcaagaggagtcaaaatacgatcttatttcaatatgatcggacagctggcttttaaaggaatgaag

SEQ ID NO: 670140 - DNA, 107 bp, Homo sapiens
tgcagaagtcattttaaactatggacgactccgaggaacattgaggaatttgctcgccctgatacatcgaatgatagagtttgttgtacgtgaagggccaatgtttg

SEQ ID NO: 670141 - DNA, 100 bp, Homo sapiens
cagaactgtgttcgcaattcttacgatgtcttctctttgctacgctccaggggagctggaaatgcacaggaggagtcagaagacctgggttcgagtcctg

SEQ ID NO: 670142 - DNA, 98 bp, Homo sapiens
gggaggacacacccctcgtcatactcggtgttgacccaagaaactcgagagatcttacatttccactataccacatggcctgactttggagtccctga

SEQ ID NO: 670143 - DNA, 89 bp, Homo sapiens
atttaaagctgagctgcgaggaaaatggcggcgggaggaaaatgtttataggaggccttagctgggacactacaaagaaagatctgaag

SEQ ID NO: 670144 - DNA, 98 bp, Homo sapiens
gctggaccacaaaccgctgccagaaaagtttggtgcacctcgatttggaggaagtagggcagggcccttatctggaaagaagtttggaaaccctgggg

SEQ ID NO: 670145 - DNA, 75 bp, Homo sapiens
cgggagcgggtaccgggcgcgggcagagcgcggcggcgcgggtgactccccggacagctcaacaccaaagctttc

SEQ ID NO: 670146 - DNA, 50 bp, Homo sapiens
acaaaacaattattccccgacttacagggccatgatccaaaggaaccaga

SEQ ID NO: 670147 - DNA, 50 bp, Homo sapiens
gggagattgagattgcagagcaaggtgctggacgtcattgctcctcctta

SEQ ID NO: 670148 - DNA, 98 bp, Homo sapiens
ctatgatctgcagggagacgcacagccaggacatcctggaacctgggaaagggtcctggtccagtggcgggaagctgtgtcagtgcagatgtattacc

SEQ ID NO: 670149 - DNA, 99 bp, Homo sapiens
ttaaagagacccgttcagagtcctacagtggcagcctgctgttcatgtacaaggtcaggaacctttgactgcttccatgttggcatctgcccctcctca

SEQ ID NO: 670150 - DNA, 76 bp, Homo sapiens
aggctttcctgctggtggcaaccgcctacgagacactcaagaaccttgtgaaacatcttcctgagcagaagatact

SEQ ID NO: 670151 - DNA, 100 bp, Homo sapiens
gctcactttcgtccaggacagtatgtggatgtcacagccaaaacacgaaatctcacaaaactgtcccttatcttcagtcacatgctggcagaaatcaaag

SEQ ID NO: 670152 - DNA, 90 bp, Homo sapiens
ctgtgcgactattctccgggagccgtccgtgtcaccgccggaacctggcgcaggtaagaatgattgatgttggctgatattggagtgctc

SEQ ID NO: 670153 - DNA, 100 bp, Homo sapiens
cccggctctgcggaggcctctaggcagccgcgcagcttccgtgtttgctgcgcccgcactgcgtctcttgcatggcaccaagaatgttaccaattcaagc

SEQ ID NO: 670154 - DNA, 83 bp, Homo sapiens
ggagcctcagttggaagcagccgatccagcctgcggagcctgtggggcaggaggctactcacagtcgaactacaactccccgg

SEQ ID NO: 670155 - DNA, 76 bp, Homo sapiens
atgcaaggatattcctcatatatcatgaacctgtgaaatttgtagatttgcttggtgaccatgggaaacatgtcag

SEQ ID NO: 670156 - DNA, 98 bp, Homo sapiens
gtgtaaggagaagcccacaaccgccctcctggacaaggtggccgacaacctggccatccagcttgctgacactgcccatctctaagataagaacctgg

SEQ ID NO: 670157 - DNA, 96 bp, Homo sapiens
gtatacatggtgctgtctttggaaaaggtgaatctgtctctgtcatcaagcacactgatcccgtccctgacccacgagctgtcaaccaagataaaa

SEQ ID NO: 670158 - DNA, 74 bp, Homo sapiens
cagacttcgctcgtactcgtgcgcctcgcttcgtaaaggcatgacttcctggcaccacagggaaaatcgggtgc

SEQ ID NO: 670159 - DNA, 82 bp, Homo sapiens
ctcagttggaagcagccgatccagcctgcggagcctgtggggcaggatcgcggaggccatgcatcaccaggactgcctgctg

SEQ ID NO: 670160 - DNA, 90 bp, Homo sapiens
gcgcggaacagtcgccgaggcgattcccgcccaggtccggacaggccgagatgacgccgagccccctgttgctgctcctgctgccgccgc

SEQ ID NO: 670161 - DNA, 100 bp, Homo sapiens
tccgaccacggggtctgtggagtggctggaggaggatgaacactatgattaccaccaggagattgcaaggcggctgagtgacagcccatcaatgaaaaag

SEQ ID NO: 670162 - DNA, 96 bp, Homo sapiens
ctggtggtgggcacaactgtggtgggatacttgccaaatgggaggtggggaagctgaggcaggaagccctttagtcacttgccgaaggccacgctg

SEQ ID NO: 670163 - DNA, 100 bp, Homo sapiens
ctgctgggatttttgagctggtggaagtggttggaaatggcacctatggacaagtctataagtaagactttgaccccgacgcaggcttcagtgattgccg

SEQ ID NO: 670164 - DNA, 98 bp, Homo sapiens
tttctcctctcacttatctcatggccacaactgccttggactatcttccggggctactggtaattcttgttctccactaaatgccacctcaggaagtg

SEQ ID NO: 670165 - DNA, 83 bp, Homo sapiens
gaccaatgggtccccagctcttcatcccatcatcttcgtttcggacagagcaaacagcaacaaggagctgggtgtggaccagg

SEQ ID NO: 670166 - DNA, 100 bp, Homo sapiens
taccagaggtactacagtttacagtctgactactggaagggagagataatgcatgtgagaaaacttcatatatgtttctacgaaaggaacttcctgtgcg

SEQ ID NO: 670167 - DNA, 83 bp, Homo sapiens
tctgctagtgaatctgacccgactggattcctccatgactcaaggcacagactctccagatgtggacgagtgctcactagcag

SEQ ID NO: 670168 - DNA, 81 bp, Homo sapiens
cggctgcagacttggccaaatggacgggactattaagagacggtaaagaacaggtccaagaaaagctcaaagaaagcaaat

SEQ ID NO: 670169 - DNA, 90 bp, Homo sapiens
ctttactgagaattttccacctcctgacacaacaccactcagttgaaatcacaaagattagacacctttttagataggtgttcttcagca

SEQ ID NO: 670170 - DNA, 73 bp, Homo sapiens
ctggcctcagcaacctgacaattctgtcgtgtcccggttttgcagatgtgaatggttggcaccttcgtttccg

SEQ ID NO: 670171 - DNA, 51 bp, Homo sapiens
gaaagagttgctgaactacaaagaaagatcacaaaatttgtccaggataga

SEQ ID NO: 670172 - DNA, 100 bp, Homo sapiens
tggagtggctggatttggatggagatctcgctgcctcccggctgggtctctcccctttgctttggaaggaaagggatgccattattacttgcaatcctga

SEQ ID NO: 670173 - DNA, 51 bp, Homo sapiens
acctctcaactgtgtgccaaaggtttatcttgcagattatggactttccta

SEQ ID NO: 670174 - DNA, 75 bp, Homo sapiens
gcggccgggcgcggcgagcccagttttcggctttgtgagaaaccttaccatcaaacacgatggccagcaacgtta

SEQ ID NO: 670175 - DNA, 100 bp, Homo sapiens
caacgagtacctcaaccctgagctgcgtgagaacccgcccatgaagccagatttctcccaggaaccactcgttttgactattattttatcactctttgtg

SEQ ID NO: 670176 - DNA, 100 bp, Homo sapiens
caggatgtgagcaacacgggaccgagcgatatctgaagtggctctgatgcctttgccacactcctcgcatctctgggacatcccttccgcactctctccc

SEQ ID NO: 670177 - DNA, 90 bp, Homo sapiens
ctggtctgcaaagaagtcctttcaagtctctaggactggactcttcctaagcaagtccgttgaggagctcaagcttgggaaaatggtgtg

SEQ ID NO: 670178 - DNA, 48 bp, Homo sapiens
aggccaggaggaaagaatgggagaaccagtgaccttccgggatgtggc

SEQ ID NO: 670179 - DNA, 90 bp, Homo sapiens
atgcccatctgggtggtcctcctgtcccggatcattatgaaggagaagcagagcaccaaggttgggggccgtcccgctcctaaggcagga

SEQ ID NO: 670180 - DNA, 100 bp, Homo sapiens
cagccctggatctattaaagggagcattccgatcatctgaggaacagcagggtcctaacctgattataaaacaaccagatgagttgctggacagcatgtc

SEQ ID NO: 670181 - DNA, 50 bp, Homo sapiens
gaaccgtcagtttgagccagatgttcgagataagttgcgggagatagtag

SEQ ID NO: 670182 - DNA, 80 bp, Homo sapiens
ccatgtcagacgcagccgtagacaccagctccgaaatcaccaccaagttcaaatctgaacatcaatgatgtactagggaa

SEQ ID NO: 670183 - DNA, 100 bp, Homo sapiens
ttgcttactaggccaacaccagctttaaatagtggaggcggaaagtgactattatatggttaaaaagattttggaggaaaacagttcaggtgacttgaac

SEQ ID NO: 670184 - DNA, 75 bp, Homo sapiens
aaaccaaccgcacccctgaatttctccgcaaatttcctgccggcaagatgctgttcatgcaatattagcatacag

SEQ ID NO: 670185 - DNA, 75 bp, Homo sapiens
ccgttatgtgggaagcgaatccaatgctactatcattcacgatggccatgaggagaagatggaaaatggtcagat

SEQ ID NO: 670186 - DNA, 100 bp, Homo sapiens
ctcctccccctgcgtctctggcctcgccggtcttggggggatggttccatcatggcgtcaatgcaggtagaaaatctggtgtattaactgtgaaaatttt

SEQ ID NO: 670187 - DNA, 75 bp, Homo sapiens
tgtcagagctgtgtggacgcggtgcgcaaatccctgcaaggggtggcaggtgcaggtgatggtcctaccagtgtg

SEQ ID NO: 670188 - DNA, 101 bp, Homo sapiens
cctgagaacttcctgatctctctcgctgtgagacatgtctgagactcctgctcagtgtagcattaaggctgaagccgacgtagcttctctgaacagacgca

SEQ ID NO: 670189 - DNA, 83 bp, Homo sapiens
tttggagcttccatcctggttcttccaaagtgcccggacccaaaacaggaagagcatcagatccatgctgctgctgactcgga

SEQ ID NO: 670190 - DNA, 101 bp, Homo sapiens
cttggatggaggagcagctgtcctacttctgtgacaagtgccaaaaatggataccagccaattcatgatgttgctatcaaaagttgagaaattgtcagaag

SEQ ID NO: 670191 - DNA, 75 bp, Homo sapiens
ggagacgcagactacttggaagagaggcaccgccaccgatttgagatcacccggaagttcaggctgaattctgaa

SEQ ID NO: 670192 - DNA, 50 bp, Homo sapiens
atctctgagcccaagacctagtcttgagagctgatgacaataacatgggc

SEQ ID NO: 670193 - DNA, 98 bp, Homo sapiens
agcagtatgatgaactggaggctgagtacgacagcctcaaacaggagctggagcagctcaaagagctcacccgacgactgccacccatcaaagaagct

SEQ ID NO: 670194 - DNA, 74 bp, Homo sapiens
gacatcaagattaaaagagcgaataaagtttatcacgccgggagtcttgctgtgtggcccaggctggagtgccc

SEQ ID NO: 670195 - DNA, 75 bp, Homo sapiens
cagaggactttcttccagcttctgctgtccttctttgtggagagcaaggtgcagcggaactgctgcctgacgctc

SEQ ID NO: 670196 - DNA, 90 bp, Homo sapiens
ttatacctagaagtctactaatggacagttagtcacccacctacatgttgagggacattccagctacatcacacaccttgactggtcccc

SEQ ID NO: 670197 - DNA, 89 bp, Homo sapiens
gaaaatgtttgaagcaacaagattgcttgcaacaattgttatgctttcccatgaagctgaggtcttgaagcagctggctgagaaacgag

SEQ ID NO: 670198 - DNA, 100 bp, Homo sapiens
ctgacaccagcacagcaaacccgccgggatcaaagtgtaccagtcggcagcatgggtacggttcctggagcagcagaacaagatgctggagaccaagtgg

SEQ ID NO: 670199 - DNA, 51 bp, Homo sapiens
ccgggggagaccaggactcgcacagttacagaatgtctgaaggggacagtg

SEQ ID NO: 670200 - DNA, 98 bp, Homo sapiens
atatgatggtggttggacagtcagcatttgcagactttggtatgagaaagtgccagtcatcttggttgggaacaaagtggacctggaaagtgagagag

SEQ ID NO: 670201 - DNA, 51 bp, Homo sapiens
cagctttccctaaggcagccatcaaaagggcttaactggcatgggctgagc

SEQ ID NO: 670202 - DNA, 100 bp, Homo sapiens
caacacaatgtttccaactctctaacatgtttaaccctcaaacgcagcccctggaagagatcatcacctactacccagccatgaaggctgtgaacgagca

SEQ ID NO: 670203 - DNA, 90 bp, Homo sapiens
attattgcgcgtggaacggctgcttttggaagcttttaccctacgaaaggaaaacctggaaatgtttgaagcgattggttttttagctat

SEQ ID NO: 670204 - DNA, 101 bp, Homo sapiens
agttaaccctcctggaaggcaagaacacggatgaggagatagtggaatgctggcacaaaggacaaccgtgctgaaggccgagcaggcggcggtgttcaagt

SEQ ID NO: 670205 - DNA, 75 bp, Homo sapiens
aaacctagaacatctcagacagcagctcttggagcagcaacagcctcaaaagggcattgagcaagtgcagcaaag

SEQ ID NO: 670206 - DNA, 96 bp, Homo sapiens
gacgaagatgaccacctgctctcacccacgaaaggcatctgtcccaagcaggagaacattgcagaggtcattttcttctgaggaagtcattcttaa

SEQ ID NO: 670207 - DNA, 100 bp, Homo sapiens
gggagcctctgacggcgtctgatgacaacggcaacacgacaagaagtccttggcctctaccgcagcattttcaggcttgcgaggaaatggcaggcgacat

SEQ ID NO: 670208 - DNA, 75 bp, Homo sapiens
atgtgccttagaggattatggctgaactaccagcagaaagtaggcatcatgtactgcaaagctggacagagcact

SEQ ID NO: 670209 - DNA, 78 bp, Homo sapiens
attctcctatggtatcaccacctccagactatcctggagaattttttaaagtggtggacttgctttgtgaagagacag

SEQ ID NO: 670210 - DNA, 75 bp, Homo sapiens
tcagtgacacacacaactcgggcctccccagcgacattgctgcaatagtattattctgctccacttctagcccac

SEQ ID NO: 670211 - DNA, 100 bp, Homo sapiens
gaccaggtgtacaactaggaagcccagataagaaaaagcgcaaggcaaatacacagttaattggccttggtcctcacagctccaaaaagaaacaggatct

SEQ ID NO: 670212 - DNA, 100 bp, Homo sapiens
gtcaccgcaccgctcccgggatcatggtgttctacttcaccagcagcagcgagtgttgccagggacggcagtatctctttgtgtgaccctggcggcttat

SEQ ID NO: 670213 - DNA, 74 bp, Homo sapiens
agagagggaagagattcagccagcacactcctcgcgagcaaggtggtttgaagtgtcctgtttgcagctttgta

SEQ ID NO: 670214 - DNA, 75 bp, Homo sapiens
atctgcgccgggtcgccacatactggggagtacatcaagacctggcggccacgctacttcctcctcaagaatgat

SEQ ID NO: 670215 - DNA, 90 bp, Homo sapiens
acgctatcaggaggccctgagtgagctggccactgcaacatgtttgggttgtggaagcctatggtattcttggctattgcagctgtggct

SEQ ID NO: 670216 - DNA, 51 bp, Homo sapiens
ccctactccaccatcatcaacaaaggtcatactccctgtcacaaactccag

SEQ ID NO: 670217 - DNA, 101 bp, Homo sapiens
ggccacctgagtggcgcggcggtgtcagacaaggcgcctctgtcgaagagccttctgctggtccccagtgccctctccctcctgctcgccctcctcctgcc

SEQ ID NO: 670218 - DNA, 100 bp, Homo sapiens
agcttgctggactatttcaaatattactgctggcaacagggctcaaatacagaatcaggaaacccaggcccaacggcaggtggatgcaagaagaaatgtt

SEQ ID NO: 670219 - DNA, 98 bp, Homo sapiens
agcatgtgaaaattgtggggccatgacacacaaaaagaaagactgctttgaggatccatcaattaagggaacctttcactggtctggcaatgaacaga

SEQ ID NO: 670220 - DNA, 109 bp, Homo sapiens
cctagaggccaggcccatgagtgatgaagatcccgaggatgaagacgccttgccagccaggtgcagaggccaagaccgttttgcccaagaaggagaaaatgaagctgag

SEQ ID NO: 670221 - DNA, 101 bp, Homo sapiens
actttttctatctggttgaatgctatcttgtggatcttctgagtaacggaggacaattcaccatagttttctttaaggccccctcccaccacctcctccag

SEQ ID NO: 670222 - DNA, 85 bp, Homo sapiens
gaggattccggcgggaactcgactcttggcgccaccgcctcatgcactgtgtaggtgagaagccctaccactgcaactgggacgg

SEQ ID NO: 670223 - DNA, 98 bp, Homo sapiens
ctggtttcgtggcctgaccaaggacctccaaggcgtgatgggaaggctctggagaggttcctgcaggattactttgatggcaatctgaagagatacct

SEQ ID NO: 670224 - DNA, 74 bp, Homo sapiens
gggcccccaccctcctgggcaccatggccctcctccaatgggtcaaaatgcagatcttcgtgaaaacccttacc

SEQ ID NO: 670225 - DNA, 50 bp, Homo sapiens
cgtcatcgagcagcagcctgtcttgtggtgccagatgtgacatccagatg

SEQ ID NO: 670226 - DNA, 82 bp, Homo sapiens
ccgcggccgagagtgcagcgacctcccgcgacgatgcccctcaacgttagcttcaccaacaggaactatgacctcgactacg

SEQ ID NO: 670227 - DNA, 100 bp, Homo sapiens
agaaccggtacctggatggcatgggcgagctgaggatcagtgtcctgcctgcctacctgtcctatgatgccccatggcctgtcaggaagatcccgctgcg

SEQ ID NO: 670228 - DNA, 100 bp, Homo sapiens
aaaccattggtccttcgccgtcagtatttgaggagaaagcatttgccacaccatgttaccatatgtgcctcttccaggcatggaagctacatataacacc

SEQ ID NO: 670229 - DNA, 74 bp, Homo sapiens
acaatgctgaggacaaagtagatggcctccagaaacaaacgccatgaagactttgaatttatttcaggaacacg

SEQ ID NO: 670230 - DNA, 75 bp, Homo sapiens
cgaagcccagcttgctcgggtctgcacaacaggcccagctgagagccagcctggaggttacccagcagcaggcca

SEQ ID NO: 670231 - DNA, 100 bp, Homo sapiens
gtccaattagccgggatagagaggagaaacaggatgtggacgttgatctctcagccaaagcagagatcctacaagaatccaggatgatgatcccagattg

SEQ ID NO: 670232 - DNA, 100 bp, Homo sapiens
caaggatatagagaaagaaactgcaaaggatgaagaggaagagcctcccagcatgactcagctacttcgaggagtatatgttgctgcagtacgggaattt

SEQ ID NO: 670233 - DNA, 96 bp, Homo sapiens
tgtgggccgacatgaagagctgccagatccaacaggcccagctgtggtccctcaccagtattatggagttactccctggggagtctaccctgccag

SEQ ID NO: 670234 - DNA, 100 bp, Homo sapiens
cggattaccccgacattctccacctcctgggaggccagccattcccaaatgccccaaggatgaagaacggagacgagatggggtcttgccaggtcttggc

SEQ ID NO: 670235 - DNA, 90 bp, Homo sapiens
gaaactgactaaagctatatgtggactgaaacccatagggccagatgatgctatagacgccttgtcatctgacttcacctgtgggtcgcc

SEQ ID NO: 670236 - DNA, 82 bp, Homo sapiens
cgcaccggcaccatcctgctcggcgtctggtatctgccccatggctgggggttatggagtgatgggtgacgatggttctatt

SEQ ID NO: 670237 - DNA, 83 bp, Homo sapiens
ctccttcggcagtccacccaccgccgccgcctcccaggtcttgagtcaccacgtccgaatataattcttgggttagtaatctg

SEQ ID NO: 670238 - DNA, 98 bp, Homo sapiens
tgtaaaaactcagttactcaaactgaaacgtctcctgcatcaggatgcacgctgctgttttatgagacctatgggaagaattccatggatcagagcag

SEQ ID NO: 670239 - DNA, 100 bp, Homo sapiens
ggaatataatcctgaggtgtttgacaaaacataccaattcttgaatgacatccgagcgaaagagaaagaggccttttcagatattaatggcaaagttcag

SEQ ID NO: 670240 - DNA, 82 bp, Homo sapiens
tgcagcggggcatcatcaagatgcaaagtgaaaaggagagcttgttgaaggaaagagatcacattttgtcaactctgggtga

SEQ ID NO: 670241 - DNA, 98 bp, Homo sapiens
aaggtggagagagggattacagaaaggagaacaccttatttcaggaaccatctctttttgctgttgccaaattgttagaaactggtttagttaatatg

SEQ ID NO: 670242 - DNA, 49 bp, Homo sapiens
ccctcactctctctgtcagaaaaataactctgtacttactgctccgtca

SEQ ID NO: 670243 - DNA, 98 bp, Homo sapiens
gcgacgcctttggcggtaaattcgggaccctgatgctcccataagacagaaaatgccccttgatgatctggatagagaagatgaagttagattactca

SEQ ID NO: 670244 - DNA, 95 bp, Homo sapiens
gaactcgtcatgctctttgtagcgtggtgcttctgttgctcacaggacaaggtggagcagacacctcgcagtcaacaagacccggcaggaccagg

SEQ ID NO: 670245 - DNA, 74 bp, Homo sapiens
cgccctggccacggggactctcttctggatgctggctggaggcgtgatcctgggtgtggccctgtggctccgcc

SEQ ID NO: 670246 - DNA, 100 bp, Homo sapiens
gaataagagtcaaaacaaataagttatgctatgaggatgacaaactctggagtaattggagccaagaaatgagtatagaatcccaaggactgcagcaaag

SEQ ID NO: 670247 - DNA, 100 bp, Homo sapiens
gcgaacagtggcagcgcgacctggccagctgccgcgactgggaggagcgccggaacgccgaggcccagcccgtggaccgggagcccgtggaccgggagcc

SEQ ID NO: 670248 - DNA, 100 bp, Homo sapiens
gacatcagctggatattgagatggaaggatgactatgagtatgagctattatagaaaccatggagcataaggagaattattttttactcccttataaagc

SEQ ID NO: 670249 - DNA, 75 bp, Homo sapiens
ttgctagttaggattttattactggcagcatgtatatcttttaatctgaattatccagaacagaaagttgtgact

SEQ ID NO: 670250 - DNA, 73 bp, Homo sapiens
cggtggccgtgctcgtcgggcccccttcgggagccactgaggcggctcccagctgcgttggcgacatggccga

SEQ ID NO: 670251 - DNA, 98 bp, Homo sapiens
tagcacttggtagttcttcctctgctctgcttcccttcggaggaaaatttcaggctgaaggtttagcgggtgccgatgtccagggtgctgcagaagga

SEQ ID NO: 670252 - DNA, 82 bp, Homo sapiens
tctcaccacaagctactgtgagttgctgcaaaataaagtccctttgctcgcatatcctgctcctctaacaagcatcagaggc

SEQ ID NO: 670253 - DNA, 83 bp, Homo sapiens
acctttctggctccagagagacgccctcctccattctcttaggctccaaccaaggctctggttggacgtgataagtatgagcc

SEQ ID NO: 670254 - DNA, 100 bp, Homo sapiens
cttccacagccaagtgcgggagtccacgcgagtaaccagctcataaatcacatcgaacagtttttggatactaatgaaacaccgtattttatgaagagca

SEQ ID NO: 670255 - DNA, 74 bp, Homo sapiens
agggaccacggtcaccgtctcctcaggatgcttggatattaattcatctgtgaaaggggctcgttttgtcagat

SEQ ID NO: 670256 - DNA, 89 bp, Homo sapiens
cttggacttgctcaaaattgtactatctctattcaggattatgaagtttttcgatgcgaaggctgcctctaagaatcaaacttcactct

SEQ ID NO: 670257 - DNA, 100 bp, Homo sapiens
gtctgatttacaaagagtgtacagctgaccctctggtgggcagcatcgccacacagtacatgaccaacagagcagagcatgaccggatggccagacagtg

SEQ ID NO: 670258 - DNA, 75 bp, Homo sapiens
acacggcccgcagagtgcgaaaggcagcggaggaggagaaagagatggacctcccggactcggcctcgagggtct

SEQ ID NO: 670259 - DNA, 74 bp, Homo sapiens
gttatccgaaaatataattacgttgctatggtagcaatgtacagataaagagtactttaacgcccatgcgtgtt

SEQ ID NO: 670260 - DNA, 95 bp, Homo sapiens
cgagaactacagccgggccctggaaggggaaggaatcgtggagcaggttatcaagactctgattctgccccggctgcagcaggaaggggagcgga

SEQ ID NO: 670261 - DNA, 100 bp, Homo sapiens
ctcagcccttctgagctctgtgctgaacaagccatggcactgaagagggacagcaaatcttgaagcagccggtgtcagagagactggactttgtgtgcag

SEQ ID NO: 670262 - DNA, 75 bp, Homo sapiens
cggatggacacccacaggtcggccctgcggacccggcaggtgactttggttttgggatttgagattgacgcggtg

SEQ ID NO: 670263 - DNA, 100 bp, Homo sapiens
accaggaggccaaagagttgtaccgagactataaccacggtgtgctgaagataaccatctgtgaagatttcgatgtcgatcattttgtgtctgactgtag

SEQ ID NO: 670264 - DNA, 125 bp, Homo sapiens
gtgcttttatattcatctcaaaaacaaaattctgaactcaggacttggcaagaaactaaatatattttgccaactttggaaaaagaattattcttggcagagcacagtgaccttgaagaaggtgg

SEQ ID NO: 670265 - DNA, 90 bp, Homo sapiens
tggcgggtgccctggctaccatggaccatcctgctggtcagcactgcggctggtgagtataggtgcttggagaggataaggaaatcaccc

SEQ ID NO: 670266 - DNA, 104 bp, Homo sapiens
tctgccgcagctagaaatgctcaagaaccagctggaccagaccctgtattcagtggatcagctggcaccacccaaatagataaattggcccatctggtcttgtg

SEQ ID NO: 670267 - DNA, 75 bp, Homo sapiens
tcatcagccccaagcccctcgccctgcccggggcgcatgtggtgggtttggaaatcccttgtctccaggttgctg

SEQ ID NO: 670268 - DNA, 74 bp, Homo sapiens
ttgcgacggaaatgtgtcatcgaaagccaggtcacgagaagagaatgccttctagatgcaaaatcacctccaaa

SEQ ID NO: 670269 - DNA, 82 bp, Homo sapiens
caagatgtagctaatgaccgtggttcccactgaggttttgaaaaagtcgctgtgcatggtcaagtgccactggaaagagaag

SEQ ID NO: 670270 - DNA, 75 bp, Homo sapiens
cctagaacggaactggaaacgcagaagacacttaaataggccatccgttgcacactggtaaactgcacatgtgaa

SEQ ID NO: 670271 - DNA, 114 bp, Homo sapiens
ggaagttacggtttacagcgaagtccacccagcgtttccgaggtgaaggcgccgcgccaggccgggcgggcgatgaaggcggtgagcctgaacacacctggctgactgagatgc

SEQ ID NO: 670272 - DNA, 100 bp, Homo sapiens
tgcaaactgcgaaaatgtgaggtgctgaagaaaaaagtagggcttctcaaggagctcattgctatggacagtgctatcaccctgtggcagttccttcttc

SEQ ID NO: 670273 - DNA, 88 bp, Homo sapiens
aggtgcagatggcactttccaaagtggatgcctccggggagattgaggtggtgccttctgcctctgccctgatcatcaaagccctcaa

SEQ ID NO: 670274 - DNA, 74 bp, Homo sapiens
aaaaaattaattcatagagatcttaagaatctatgtactttcatcagcgcggccagtaagtttgcacagctcca

SEQ ID NO: 670275 - DNA, 100 bp, Homo sapiens
tggagctgtctggttgtgagcagggtctgcacgaaataaagctcctgggcaaggggacgtctgcagctgaggtgataaaagaaaatgtggctgaagttac

SEQ ID NO: 670276 - DNA, 75 bp, Homo sapiens
ctgcagacggcgagacctcctgcacagggccaattcctgtccccccagcagcatggcatcgtgtgctgaaccctc

SEQ ID NO: 670277 - DNA, 75 bp, Homo sapiens
agagagtactgtattcaagcctttgaatcatttgtaagaagattacgtgtgaaaatgaacttgtgcaaacccaac

SEQ ID NO: 670278 - DNA, 96 bp, Homo sapiens
gaaaacagcagaacgccagctttgcagaggccacaagaggaagctgaatgaagaggacgccgccagcgagtccagcagggagtccagcaacgagga

SEQ ID NO: 670279 - DNA, 75 bp, Homo sapiens
gtcgatggtcggcggcgcccggatgggcagctgagctctattaccaggttttaaacttcgccatgatcgtgtctt

SEQ ID NO: 670280 - DNA, 97 bp, Homo sapiens
gggcagctagcgcgaccctgagccggcgcccgtggtccggccatggacgacctcggtgtgcctacaggggttgtggaaggagacgctgcccccggtc

SEQ ID NO: 670281 - DNA, 90 bp, Homo sapiens
atcagttctacgagaccctccctgctgagatgcgcaaattcactccccagtacaaaggcatctctgggaaaggacctggggctggtgagg

SEQ ID NO: 670282 - DNA, 74 bp, Homo sapiens
gcgacagcagccccgccccggcctctggggagccccaggaggattattgaccagtttgaggagaacatgcctgt

SEQ ID NO: 670283 - DNA, 96 bp, Homo sapiens
cgatgatgatgaagaggatgatgatgaagatgccggtggtggtgtgcacattgagccccggtatagacagttcccccagctgaccagatcccaggt

SEQ ID NO: 670284 - DNA, 100 bp, Homo sapiens
cagcttcgtgtttggatgcaatgttcttaggatcctcctcccgtccttctcatccttcctgcaagctttcttcctggtggcagatgacatcatggattca

SEQ ID NO: 670285 - DNA, 98 bp, Homo sapiens
acagtttcaggattggcgggcttggtttcagcgagaaaagatgatactacaaatcattctaactcctccaaggaggtcccttcctcagctgttttgag

SEQ ID NO: 670286 - DNA, 75 bp, Homo sapiens
ccgtggccatgaccagtgctctgcccatcatccagaagctagagccgcaaagcaactcatgcagcaattccagaa

SEQ ID NO: 670287 - DNA, 82 bp, Homo sapiens
acagaaagagctgttaacacttcctagataacggcgaatgacaacagagctgctcaaggcgggaactctgagctaagcagtg

SEQ ID NO: 670288 - DNA, 100 bp, Homo sapiens
cggcggcgggcaggcgtgcggaggacactcctgcgaccaggaatgggtggtgtggacagctgccaggcgttgaagaccacccctggctctgtgcccctgt

SEQ ID NO: 670289 - DNA, 75 bp, Homo sapiens
tgcagatcctgacctctctgatgagatggatcgggactggtgattgcagctggaagtgcccatgaccgagctggc

SEQ ID NO: 670290 - DNA, 115 bp, Homo sapiens
ggggcaagacgggttcagttcgtcatggggctgtttggaaagacccaggagaagccgcccaaagaactgctgagatctgtatctgtggacctgaatgttgatccctcgcttcaga

SEQ ID NO: 670291 - DNA, 100 bp, Homo sapiens
gttggagaactacaggaacctgctttctctcgatgaggataacatccctccagaagatggacttccaggattatgttgaatggaagtggtgagagtggac

SEQ ID NO: 670292 - DNA, 76 bp, Homo sapiens
cctttgttgattaactggacaaattcagccagagagatgacacgggggaaattcctcaatattctagagaagccca

SEQ ID NO: 670293 - DNA, 76 bp, Homo sapiens
ggaatttgtggctggctggatctctgcatcagaagagctaacaattgctggaatgacctttacaacttttgatctt

SEQ ID NO: 670294 - DNA, 125 bp, Homo sapiens
cagagttctagggttctaagtgatgtccaggaaggaggaggaataatatttatggagcatatattatggaacacagttagatggagtcagatttgaaaatgaaaaaattaatgttattgccaaga

SEQ ID NO: 670295 - DNA, 83 bp, Homo sapiens
gggagcccaccgggcgggcctggccaaggacagagcgggatgccaccagcttgtccaaagggaagttccaggagctcctggtg

SEQ ID NO: 670296 - DNA, 80 bp, Homo sapiens
atagacctaaagccacagtcttcaagagcccacggacaccacctcaacggtttggcatagaaatggtaccccttgttcaa

SEQ ID NO: 670297 - DNA, 88 bp, Homo sapiens
actagagaagattggacagcaggtcgacaacggggtctggctctgtcacccaggctggagtgcagtggcacgattatggctcattgca

SEQ ID NO: 670298 - DNA, 100 bp, Homo sapiens
ctcagcttcgcggagctgcttaagcccttctcccgcctcacttccgaggcttgcattgaaaggctctagttacagtggacttcttgaacgacatcatatt

SEQ ID NO: 670299 - DNA, 74 bp, Homo sapiens
cgaccccccaagaaaccccgccatggaggcttcattctggacgaggctggagcgcctggaccatgctgctgagc

SEQ ID NO: 670300 - DNA, 82 bp, Homo sapiens
gttcgcgtctctctgctgcggcgcggggaccgctgtgctctcgggcaacaggtttgtctatgctggctctaactcgggcgtg

SEQ ID NO: 670301 - DNA, 82 bp, Homo sapiens
cgctgagcctgcagccggccctgccgcgtgagtgcatctccatccacgttggccaggctggtgtccagattggcaatgcctg

SEQ ID NO: 670302 - DNA, 75 bp, Homo sapiens
gctcaactggctgaagtccaagaacccggggcctggcccgagccaagtcaatcccaacaaagacatactccaatg

SEQ ID NO: 670303 - DNA, 87 bp, Homo sapiens
cgcgcgcgcctgtagctcgcgggcctcgcagttttattagctctctgggagtgagctacatgatgttgtgcactgaaaattacccaa

SEQ ID NO: 670304 - DNA, 50 bp, Homo sapiens
cgacatgttgcttttcgtggagattgagaacgggctctgcatctgtgcag

SEQ ID NO: 670305 - DNA, 100 bp, Homo sapiens
ttacattgctgaggacgagaatgggaagattgtggggtatgtcctggccaaaatgcgttcctgttgaatgaagacttgggagattccttggatagtgtgg

SEQ ID NO: 670306 - DNA, 75 bp, Homo sapiens
tttaattttgccggaatatttcaagacaccgaaagattcccgtcgtaacttaaagggaaattttcacaatgtccg

SEQ ID NO: 670307 - DNA, 100 bp, Homo sapiens
gactttcttcgagatcaatttactaccacagaagtcagaaacatgacagctgccctacaggcagctctgaagaacccccctatcaacaccaagagtcagg

SEQ ID NO: 670308 - DNA, 75 bp, Homo sapiens
ttagtggatatagcacaccatccccagccattctggcataaagcatgcttccattgcgagacctgcaagatgaca

SEQ ID NO: 670309 - DNA, 100 bp, Homo sapiens
gcctgacagctctgcggctcgggccctgaggaacagattatggcctttgcaagcaaatgagtactcctctcctaaagaaagattacgttgatgaaaaaga

SEQ ID NO: 670310 - DNA, 75 bp, Homo sapiens
gtgatgctggagaactatagccacctggtttctcttgagagagcaggagattcggatgggtcagatggctatggg

SEQ ID NO: 670311 - DNA, 96 bp, Homo sapiens
gacagacaaaaggctatgaagcgtttacgtgtcccccctttgggagctgctcagagttctaaagttcctgttgcttcagacaatggatgagcaatc

SEQ ID NO: 670312 - DNA, 100 bp, Homo sapiens
ggctccttcaaataaagccacagctgctgattcattgtttgaccgacagggtaggagtcaatcccaccagcattgactcagtcgtaattgggaaggacca

SEQ ID NO: 670313 - DNA, 74 bp, Homo sapiens
gttgccggtgccggcctagcgtcctggaattacttcaatcaaagacacctatggctgccgatgaaggctcagca

SEQ ID NO: 670314 - DNA, 80 bp, Homo sapiens
actgacgagttcttcaagaaatgcagagtgatcccatctcaggagcacctgaatggatctcgaggacctggaagaagcag

SEQ ID NO: 670315 - DNA, 83 bp, Homo sapiens
acctgcgcctgcccggacggcatgctgctggccagggacatgaggagctgcctcacaggtgccagatgtgacatccagatgac

SEQ ID NO: 670316 - DNA, 100 bp, Homo sapiens
ttaatgaatatgcttctaagctgggagatgataggcagccattctacaaaagtggaagctgtggtcagaactctgatgaaaatacagcttagagatccag

SEQ ID NO: 670317 - DNA, 100 bp, Homo sapiens
gataagcctcgacttagaagctaccgagttaccctaagaaaggtctgaaggggcgtctcgattacctgagctctctgaaggtgaagggccttgtgctggg

SEQ ID NO: 670318 - DNA, 75 bp, Homo sapiens
ctgccttccacctccagtgctgatgcggcattccaaaagaactcactgtcctgattgggatagcagagaaagctg

SEQ ID NO: 670319 - DNA, 98 bp, Homo sapiens
caggagtcggcggctcagttgtccatgaccctgaaggtccaggagtacccgaccctcaagtttgaagaaaacaggtctgaaacaaggtcttaccccca

SEQ ID NO: 670320 - DNA, 100 bp, Homo sapiens
ccgtgctgcttatggcggcgctggagagggggcgctgagctgttgggagctgaagaagcaggtggagagtgccgagctgaagaaccagcggctcaaggag

SEQ ID NO: 670321 - DNA, 82 bp, Homo sapiens
cgcatttgtgggcgcgcggcacgcagccgggaggccgaggactcggagttcacctgcaggtgcgcgcggagccatggttatc

SEQ ID NO: 670322 - DNA, 82 bp, Homo sapiens
gctcagttgggtggactacggggagcgcgccgagctggatgactcggacgctctggccctgccccatctcccagtagcttcc

SEQ ID NO: 670323 - DNA, 75 bp, Homo sapiens
caaagacgtagaaagaaatcttagcagggaagaggaagaacgtctgagaaataaaattcgagctgatcatgagaa

SEQ ID NO: 670324 - DNA, 100 bp, Homo sapiens
ctgccgcctgaagtgcgggcgcagctggcggagctggagctggagctctcggaggaaatgggatttgaccgatacaaaatggtggtgcaagtagtgattg

SEQ ID NO: 670325 - DNA, 50 bp, Homo sapiens
aagaattgaaccttcaccatataaggtagcagaaggtcaagaaatttgtg

SEQ ID NO: 670326 - DNA, 100 bp, Homo sapiens
gattcacgtgtgcccaggccctgaggtgggccggacctgggagtggcagagtttatgtggccgaggcagacaagtggaattaggccttgctgcaggggac

SEQ ID NO: 670327 - DNA, 83 bp, Homo sapiens
gaaggaacgaggcaaggagctaaagcagcgtgcgttcagccctggggtgtgagatcaaccatgagttccgttgcagttttgac

SEQ ID NO: 670328 - DNA, 100 bp, Homo sapiens
aaaaagttcttgggacaaacttcatttggtcaaagctcagattcacagttgcataagccgtcacctggaatgtcttagaagccgtgaggtatggctgtat

SEQ ID NO: 670329 - DNA, 100 bp, Homo sapiens
gcaaccctgagaacaacgtgggccttatcacactggctaagggcaagattcttgccaagagaattaatgtgcgtattgagcacattaagcactctaagag

SEQ ID NO: 670330 - DNA, 75 bp, Homo sapiens
cgcaaggcgaagaccagtactatctgcgggtcaccacgttgagtgtgcgaggaaaaaataaaaaagagaaacttg

SEQ ID NO: 670331 - DNA, 101 bp, Homo sapiens
agctgggtcagtccgccgctcaccccgcggccgcaccttcccgccttctcagttaattggccttggtcctcacagctccaaaaagaaacaggatctcgata

SEQ ID NO: 670332 - DNA, 73 bp, Homo sapiens
ggggaatctatagttaatcttggcgacattgacaatgatggctttgaaggaggagttggaaactctggagagc

SEQ ID NO: 670333 - DNA, 100 bp, Homo sapiens
aggagatgaaagctttgtatgaacaaaaccagtctgatgtatagactgtcttcaagctcactgatattttcctctgcttgatccattgtgctgttgagag

SEQ ID NO: 670334 - DNA, 74 bp, Homo sapiens
gcagccgggagacagatgcgaggcggcggtcagggtttgagaaatactttaagaggagtggaaggaacacaaac

SEQ ID NO: 670335 - DNA, 100 bp, Homo sapiens
aatgatagaaacaactttagatatggatcaggtgctgctggtgagtagcagccggtacccagaccagtggattgtcccaggaggaggaatggaacccgag

SEQ ID NO: 670336 - DNA, 100 bp, Homo sapiens
tgcctcactgagcaaccaagaggtgggttaggagtacagaagatgctgtggactattcagacatcaatgaggtggcagaagatgaaagccgaagatacca

SEQ ID NO: 670337 - DNA, 100 bp, Homo sapiens
gaaaatgtgtcctttgtggaggagtacaggtcctggtgcttgatggtcgaggccatctcctgggccgcctggcggccatcgtggctaaacaggtactgct

SEQ ID NO: 670338 - DNA, 100 bp, Homo sapiens
gcggcgccgagaggccgtgcgggacgcgggcgccaggaccggccgaacgcagaggggatcccaacaagccctcaggattcagaagtgttaaagctcctgt

SEQ ID NO: 670339 - DNA, 82 bp, Homo sapiens
gctcgctggcaccccgaacgggttgcttcccccgctgcgaggtaagtaaggaggtctctgtaccatggctcgtacaaagcag

SEQ ID NO: 670340 - DNA, 74 bp, Homo sapiens
aacaagcaagcatgcagcttactgcttgaaagcttaattggcttagtgtcgacttcaataattggaaagactgg

SEQ ID NO: 670341 - DNA, 82 bp, Homo sapiens
tgctgggtacgacgacttcaactgcaacgtctgggatgcactcaaagccgaccgggcaggcgccatgtcagaaccggctggg

SEQ ID NO: 670342 - DNA, 74 bp, Homo sapiens
gccaaggcagaagaaatcttggagaagggtctaaagagcagtatagctgtgactatggatctggcagattcttt

SEQ ID NO: 670343 - DNA, 99 bp, Homo sapiens
agtcccctctcatcgtcaacactatgggatgggtttcagaatggggaatgcatcagcaacccccacacccccctccagatcagccatggatgccaccaa

SEQ ID NO: 670344 - DNA, 94 bp, Homo sapiens
agccttcatagggacagccgcccctggtgcacacaccctcgtattctcctgcccttccccagttactccacaggatccgctgaacataggatgt

SEQ ID NO: 670345 - DNA, 82 bp, Homo sapiens
cagagagggaagagattcagccagcacactcctcgcgagcaagtaatagctcttcaagtctgcaataaaaaatggcctccaa

SEQ ID NO: 670346 - DNA, 50 bp, Homo sapiens
ctgggaggcgggatggagtgatagggaagttatgtgtctcggtaccacgt

SEQ ID NO: 670347 - DNA, 101 bp, Homo sapiens
ggaggagaccggcacccagacaggtggcgaaggcagaggagtactgtctgatgagcgtgaaaggttgtttcaccgacttccacatcgactttggaggcact

SEQ ID NO: 670348 - DNA, 96 bp, Homo sapiens
cctcctttaaacagcttctccgggtctcagcatgctgacattatctctacggtagaattcaaccacacgggagaattactagcgacaggggacaag

SEQ ID NO: 670349 - DNA, 80 bp, Homo sapiens
cggccaccgactactgtcagcagctgtgccagaaaccagcaaatatcctagtaatgggagaaggtcctgagagggggaga

SEQ ID NO: 670350 - DNA, 96 bp, Homo sapiens
gtagtatgacttccttcagtggaccactctgcaatgacctggaagcatcagttcacagcagtaatgcacactgtacagataagacaattgaagctg

SEQ ID NO: 670351 - DNA, 89 bp, Homo sapiens
cgttgctgcgttgtgaggggtgtcagctcagtggaccgtatcgtgggtctggatcaagtcactggtatgactgagacagcttttggctc

SEQ ID NO: 670352 - DNA, 74 bp, Homo sapiens
ttggcgcttggacggcgggaaccggctccggagcgagaacgcgcgtctccataacccctcggacaaacgccgcc

SEQ ID NO: 670353 - DNA, 87 bp, Homo sapiens
aatttccgtcccccaccaagtccggatgctcactccaaagtctcagcagcactctcgagtggaccctgaggagctcttcaccaagct

SEQ ID NO: 670354 - DNA, 51 bp, Homo sapiens
gtcaaaagatatggcgccatatcagggcatcattaagcaagctaatggaaa

SEQ ID NO: 670355 - DNA, 100 bp, Homo sapiens
tctggtggccttttgtccctttgcctcatcccaggttgccttggaaaatgccaacgccgtgtctgaaggatgtaagttgtccaataaggcaagttcccac

SEQ ID NO: 670356 - DNA, 97 bp, Homo sapiens
caaggcgtgaggcgccgcccgggtgtccccgcggcgcaggaggcggtggagcgcagagcgggcgagcgcgatttggtgcttccagatgtgagttatc

SEQ ID NO: 670357 - DNA, 75 bp, Homo sapiens
gcactatctagtgtcagtgatggcggtgaaacgtcagccgggtcccatctgatgccgaggctgaaggagtctcgc

SEQ ID NO: 670358 - DNA, 82 bp, Homo sapiens
agggtggaagctgggaaacccacaggaggcaaccacactagtttagatgagaaatattcgattatctgacttcactgaatcc

SEQ ID NO: 670359 - DNA, 100 bp, Homo sapiens
tatctttgaacatattattaagcggattcctggcccctgacaaggttgacagtaaattctttgaccccaaatttgcctttaaggaggttgaagttcaggc

SEQ ID NO: 670360 - DNA, 50 bp, Homo sapiens
ctcagagctggaggatgaaggatcggggaactctaatgatccaggacaaa

SEQ ID NO: 670361 - DNA, 50 bp, Homo sapiens
gcagttttgtgtccatgtgaacaactgctaaagtaaataatgccagcctg

SEQ ID NO: 670362 - DNA, 100 bp, Homo sapiens
taagattgcgtacccactgcagagtgctgaagacggggtagccacgagacaccttggaagagcttaaggaaatagataaaggcatgtggaagaaactgca

SEQ ID NO: 670363 - DNA, 107 bp, Homo sapiens
agcgagctgagtggttgtgtggtcgcgtctcggaaaccggtagcgcttgcagcatggtgaaatgacaatggatgctctgttggctcgattgaaacttctgaatccag

SEQ ID NO: 670364 - DNA, 74 bp, Homo sapiens
gctaatgagaagctagataagttacattgattacccacctagtacaacatcttacgggaagagcatagtatttc

SEQ ID NO: 670365 - DNA, 100 bp, Homo sapiens
atgccatctgttttcctaaaagactgaaatgggggcgaccattcttaggctggtggaggaagtgaaggagctgtgtgatggcctggagttagaaaatgaa

SEQ ID NO: 670366 - DNA, 75 bp, Homo sapiens
gcccttgcggagttccgcgtccgaggtgtgaagttttccaagagataacttcaccaagatgtccagtgataggca

SEQ ID NO: 670367 - DNA, 100 bp, Homo sapiens
ctttctcgcccagcgcccccaggccgctcccggggctcacgctttcctcaaatgaaagagatagcagtgaaccagggaatttcattcctctttttacacc

SEQ ID NO: 670368 - DNA, 88 bp, Homo sapiens
ttgctcagtctctgtcagaggaagatcccttgcctcatctagttgaatctgaagatgtggacctgctgatgaagagggctgattgtat

SEQ ID NO: 670369 - DNA, 82 bp, Homo sapiens
agaattcagaaggagctagctgaaataacccttgatcctcctcctaattgcaggaaataatgcaaaaggtgtcccaaggctc

SEQ ID NO: 670370 - DNA, 50 bp, Homo sapiens
ctcccgagtagctggaactacaggtggcgtgtgacgagcatggctcccgg

SEQ ID NO: 670371 - DNA, 100 bp, Homo sapiens
tgtgtggttgcaacggagataaattcccggaaccgcgattcggcgtgtcagccccatgcaatcattcgtcataccattagatctacaaacaggaatgcca

SEQ ID NO: 670372 - DNA, 75 bp, Homo sapiens
gggctgccgatgggaaatcccaggctgccgcggctcctgtgtgctttgaagttaattggccttggtcctcacagc

SEQ ID NO: 670373 - DNA, 50 bp, Homo sapiens
cgagccgggtcccaccatggccgcgaattgatcagaatcatccagataat

SEQ ID NO: 670374 - DNA, 75 bp, Homo sapiens
aaaaatttaaacaagaatccactgttgctactgaaagggtatttcaaagtattgattcaagaaatggatctcagg

SEQ ID NO: 670375 - DNA, 50 bp, Homo sapiens
ccagtaggatggtgaagacctacgagagctccacgcaggagatcggtgag

SEQ ID NO: 670376 - DNA, 103 bp, Homo sapiens
tttgcagtggagtcttggaggagccagtacagtgagaaagatcagtctaaagaaaaggagaagaaagtgaaaaaaacaattccttcctgggctaccctttctg

SEQ ID NO: 670377 - DNA, 75 bp, Homo sapiens
cttttttccttcctaggagaaatcgaggagctgcggctctaccccccggagtttggaattcacccagttgcaggc

SEQ ID NO: 670378 - DNA, 80 bp, Homo sapiens
ggtgacagcctcaagggcttcagcaccgcgcccatggcagagccagaccgttcggggtgagggcactggcgtgctgggct

SEQ ID NO: 670379 - DNA, 100 bp, Homo sapiens
ggcaagatccagatcgggatttacgtggagatcaagcgcagcgatgcccctggcgaagcggtgctgcctccagcccagagatgccgccaagatgcccgag

SEQ ID NO: 670380 - DNA, 75 bp, Homo sapiens
ctgagatcgtcaagtctcccagcgaccccaagcaataccggtgtcctgatggcaaatttcaagggccacgcgctt

SEQ ID NO: 670381 - DNA, 100 bp, Homo sapiens
ctcaggacaacccagatgtgcaacaaagtgcgatgatgataccacgagtcaacccaaaagttgctggggagaagttgctctttaatgaattgcatctcat

SEQ ID NO: 670382 - DNA, 100 bp, Homo sapiens
gaggtgtctagcccagtggaccttctgaaggtcgtggttcaattccagaattctttcatattatgaaaagaaagtttaccaacaaagaatgggaaacaat

SEQ ID NO: 670383 - DNA, 72 bp, Homo sapiens
ttgccagagcaagagctggatctcgtctttctccacctgtctttaccagtttccaagactatgttactgggc

SEQ ID NO: 670384 - DNA, 75 bp, Homo sapiens
actttttctgccatgaatttgcattcaggactcagggagtacacacttaccaggcctcaagaaaggagaactagt

SEQ ID NO: 670385 - DNA, 97 bp, Homo sapiens
cccagccatgcctcctgtacagcctgtggaagtgtcattaaatttgacggtggagaggaagtacttatttcaggggaattcaacgacctgagaaagg

SEQ ID NO: 670386 - DNA, 100 bp, Homo sapiens
tgaaaacatcatcgttttgaagagttctgcgttttgccagtcacctctcaactgtgtgccaaaggttcgatacaagaggctgttttcctagcgtggcttg

SEQ ID NO: 670387 - DNA, 100 bp, Homo sapiens
gattctagaggggtgacagcgaaacgagacctgtcttctggttacctggatgatactaagcaggaaacagctaatgggcccacctcctgtctgcctccca

SEQ ID NO: 670388 - DNA, 95 bp, Homo sapiens
cttttcactgaggccacccggatcctcttcttcaacacacccaaaaagatgacagactacgccaagaagagctccttcccctggacactctacct

SEQ ID NO: 670389 - DNA, 74 bp, Homo sapiens
acaatatttcagaggtcatgtcaaaagaggttcagcagactgtacaggatctttttggcagagccccaagtaaa

SEQ ID NO: 670390 - DNA, 99 bp, Homo sapiens
taggcatcttattgatcctccagtcgagttcctctgtgacgagggtgcaggtatctctggggactacatcgatcgcgtggacgagcccttgtcctgctc

SEQ ID NO: 670391 - DNA, 152 bp, Homo sapiens
agggcgcctgctgctcccgggcagtgctttccccaagtagtccgatggctgcggctgcgccgaggcgccctactcagatcctgcactggatggatcagcggacaacacacagaccggtaatctgggtcaatcagttctgccatcccacccag

SEQ ID NO: 670392 - DNA, 51 bp, Homo sapiens
gggaaagcctggagtcctggctcactggaatagtcaaatgatttcagttcg

SEQ ID NO: 670393 - DNA, 75 bp, Homo sapiens
ccggcggccctcacagcaaccagcaccagatgaaggagcattcctcttgggtagatatagttgtaggtactccgg

SEQ ID NO: 670394 - DNA, 71 bp, Homo sapiens
actaaacatcgtgggggatctcttacggaaagtaggggagaaggagggggtccagtgggaggccaaggagg

SEQ ID NO: 670395 - DNA, 83 bp, Homo sapiens
cttcgctgtggtgaagctggggcggcaccggatcaccaagacggaggtttggtgcacctcgatttggaggaagtagggcaggg

SEQ ID NO: 670396 - DNA, 75 bp, Homo sapiens
tcgagttctggtgtgaagagataaatcaccaggtggaacaggaggattttgtaatggaagggcatggcaagactc

SEQ ID NO: 670397 - DNA, 51 bp, Homo sapiens
tatcaataccctgttcccaaccgagcaaagacaggatcttgccatgttgcc

SEQ ID NO: 670398 - DNA, 100 bp, Homo sapiens
cccgcgtgctgagtggaaagttccgcatcccattttttatgtccacagggtagtacagaaacagatggcattcatgctaggccggcatggggtgttcctg

SEQ ID NO: 670399 - DNA, 82 bp, Homo sapiens
ccgaggcaccgaggcactcagaggaggtatcagtagcaaattcaaaaactacagaatcagctccagaggactttgttaacaa

SEQ ID NO: 670400 - DNA, 96 bp, Homo sapiens
ttcgcagtgacctggggaacctgctcaaagccctgggtcgcttggaagaagccaaggcatattgtattttagcaggatcattagtatctgaaggag

SEQ ID NO: 670401 - DNA, 90 bp, Homo sapiens
tgacagctctgcggctcgggccctgaggggtgagcccctccagactccgaataggagatcaagagtttgattcattgcctgctttactgg

SEQ ID NO: 670402 - DNA, 75 bp, Homo sapiens
acaagaggggacaagtacctttatgaaccagtgtatcccaagcagcacacttctgcttttgttccttcatcagga

SEQ ID NO: 670403 - DNA, 98 bp, Homo sapiens
ttcagttaacatcgtgacctccagttccatccatgttgctgcaaatggaacatcatttacagcgagcaatttcagcacagcaagtgtttagagaaaaa

SEQ ID NO: 670404 - DNA, 83 bp, Homo sapiens
tacctcagggcttattggtatcctaacaccatcttcatcttcatcttctcagcttgctgactgcatcaaaacatgtaaacaag

SEQ ID NO: 670405 - DNA, 101 bp, Homo sapiens
gacaacgccttaacccaaggaagtgactcaaactgtgagaacttcaggtttttctctgtcagtgcagttgctatgttgcagaagatcaacagtatcagtgg

SEQ ID NO: 670406 - DNA, 88 bp, Homo sapiens
ggtcgtggagccaggagcgacgtcaccgccatggcaggcatcaaagacaaatgctgtgcttcatgaagttaaaagagaggggctcccc

SEQ ID NO: 670407 - DNA, 100 bp, Homo sapiens
aggcgtgagaattcctcaatgactgccctctaaaggaagagtatgaaagttttcaagacgcctacaagtggaaaatgcactcctcccagccaaatcaagc

SEQ ID NO: 670408 - DNA, 50 bp, Homo sapiens
ggaaaatgagccatgaaccaaccaatgaagagaagacaaggtggcctctc

SEQ ID NO: 670409 - DNA, 100 bp, Homo sapiens
ctccaaaaacacccatccaggcagggggatatggtgtggccgacgacgatgccctcgctgaggagcgcatgcggagaggccagaacgccctgccagccca

SEQ ID NO: 670410 - DNA, 82 bp, Homo sapiens
tttgccaggaactggggggccgactatatcctgacgcatctagatgtagtgaacaacccagtatttcagatatcaaggagaa

SEQ ID NO: 670411 - DNA, 100 bp, Homo sapiens
gcccccgcgggcgcagccctttgcgcagccgccgggaccctggcccctgtcgagggggggccctcagcctcttggccttgaacgggctgttcatcttgat

SEQ ID NO: 670412 - DNA, 100 bp, Homo sapiens
gaaagcggcggcggtggcggcttcaacagcagctcttgcccttaaggaacaattgagctggaacgtctgagcaatctggtaggcaagccatctgagaacc

SEQ ID NO: 670413 - DNA, 99 bp, Homo sapiens
gtggagtccgagctgagatccatctgcaccacggtgctgcattgggctctaatggaagagctaaatcgcagcaagaaggactttgaagcaatcattcaa

SEQ ID NO: 670414 - DNA, 100 bp, Homo sapiens
gtttgctaaatttgaaaaggagaaaatgaatgccaaatgggacacgactgtggatattcataaggagaaagtggcacgaagagagattggtattttgaca

SEQ ID NO: 670415 - DNA, 98 bp, Homo sapiens
tgggccaatggaatctacctggtttgtggcaggctctatggcctgcaggaagcgctggaaatagccagagagatgattttctggcatccttaaatctt

SEQ ID NO: 670416 - DNA, 101 bp, Homo sapiens
gagcgaactgtcaaagaggtgctgcccgctttggagaacaacaaggagcagcttcagcgcctgctcctggtcatcactaaccagatttacttggagtacat

SEQ ID NO: 670417 - DNA, 83 bp, Homo sapiens
cgtggaacgacccgcgcgtgccctctgagggccccaaggttttaaaatcaaagatgggaaaatcggagaaaattgcccttccc

SEQ ID NO: 670418 - DNA, 75 bp, Homo sapiens
gctttggccactttacttcctgccagggaagaaggagaaagggccaacccctgaagaagcaatacagaaactgaa

SEQ ID NO: 670419 - DNA, 100 bp, Homo sapiens
aaggacttctgcgcgcgggagttcgaggccctgcggagctgcttcgccgctgcgatgacctactccctgactcggttcgccatctacgagactgtgcggg

SEQ ID NO: 670420 - DNA, 113 bp, Homo sapiens
cagatcgggatttacgtggagatcaagcgcagcgatgtgtctttggtgcaacactaacaaggcttgtctggactacccagttacaagcgtcttgccaccggcttccctttgta

SEQ ID NO: 670421 - DNA, 76 bp, Homo sapiens
gttccaccaggccgggaagcccatcgggagtttccagatgtcttggaatgcactgtatctcatgcagtagaaaaga

SEQ ID NO: 670422 - DNA, 75 bp, Homo sapiens
agcttgtgtagcgtcagatccttgagtgataaaggagtagaggggtattccctcagcggatactacacccatcca

SEQ ID NO: 670423 - DNA, 75 bp, Homo sapiens
gcgaggaggaggcgctgcgtcagtaccagcaggtttgtgaaatggctgctgacatttctgaatccagcggggctg

SEQ ID NO: 670424 - DNA, 50 bp, Homo sapiens
tcagcactgactttcagctatggaatcgacttggattctcacttgcattt

SEQ ID NO: 670425 - DNA, 82 bp, Homo sapiens
cgggcgccgcgggacctctccgggccatggagagcgcctgctcgctgtgcccccgggttatgacgacccccaataaaggaaa

SEQ ID NO: 670426 - DNA, 75 bp, Homo sapiens
gacgtatcatggcgtgtttgtcaacattcagattgtcttctcctccaaggtctacatgattacctgaagtttaat

SEQ ID NO: 670427 - DNA, 100 bp, Homo sapiens
gctctttagctgaaatacttctgaagaagctaaaccagccccagaaatatttgaaaatgaagtcatggccctgctgagagactttgctaaaaacaaaaac

SEQ ID NO: 670428 - DNA, 100 bp, Homo sapiens
acatccgcttcatctccgagctcgctcgctacagcaacagtgaggtggaagtgatagagggcaccctgcagtgcccggaatctggacgtatgttccccat

SEQ ID NO: 670429 - DNA, 90 bp, Homo sapiens
gtttgtctcttccagatcagaactgaggaacaaaaacccccatcctgggaaaaatggggaagctggcgatatgaaaggtgaggtctatcc

SEQ ID NO: 670430 - DNA, 83 bp, Homo sapiens
ctgggacacccgggagtcaggaaatgctctggtttgtcaggctggcactactagtgaagttgggccttttccagaatgctgag

SEQ ID NO: 670431 - DNA, 75 bp, Homo sapiens
aattcctaagaatccagaacttgtgccacagaactacagtatgtgtcagccatgaccaccccggctcgtatgtca

SEQ ID NO: 670432 - DNA, 74 bp, Homo sapiens
gagactctatatgaaaaggaactccctgacatccttgataacctttttcatgctgctttctgcagtgtgtgtaa

SEQ ID NO: 670433 - DNA, 98 bp, Homo sapiens
cctgtggccagtgttgtcatggacaaggacaagcctatggaggctccagtcatgctgtgggatgagtccagcttccctgacatcccaggggctgtaag

SEQ ID NO: 670434 - DNA, 82 bp, Homo sapiens
aggggccttgataacacagagtttcaaggagcgagcccagggcgtggtgctgaaagtgctcacaaacttcaagagcagtgag

SEQ ID NO: 670435 - DNA, 100 bp, Homo sapiens
ctggagtgaagagatctgcctggaaccctgactctatcactaggaagaccaacactgtcatctgaagttggaatcatcatctgtgatattgctaatccag

SEQ ID NO: 670436 - DNA, 100 bp, Homo sapiens
accctgtctagatattacagcaatgctttttcagggggtgctcaaaggatttaaaggagaactaattcatgtatttaacaaacatgatggtgccttgagg

SEQ ID NO: 670437 - DNA, 99 bp, Homo sapiens
aaggagtgcttctaccagcccatgcccctgaaggcctcgctggagatcgagtaccaagagctggatggcctgttggaaatcaaccgcatgacccacaag

SEQ ID NO: 670438 - DNA, 75 bp, Homo sapiens
ccttgggctacgcgtatgtgaacttccagcagccggcggacggaagccatcttcgacaagagcacagggaaggtt

SEQ ID NO: 670439 - DNA, 75 bp, Homo sapiens
actggaaatataggacatgcgtttgagatctactgtgagtagagtacagagagatggatgaaagcttggccaacc

SEQ ID NO: 670440 - DNA, 100 bp, Homo sapiens
ttatgaacgccttgttgcccagttccccagttctggcagattctggaaactgtacattgaagcagagggtaagcttgatgattaccaggaacgaatgaac

SEQ ID NO: 670441 - DNA, 90 bp, Homo sapiens
ggaaaagaacagagccatcattcaagaagtttgcttcatgctggagtttatccagaaattttccccaaaagaagcagaaaatctgcctct

SEQ ID NO: 670442 - DNA, 83 bp, Homo sapiens
agatgactcaactctcagtgaaagtgccaatcaggtctttctgctccataatgggagaagtaaagaacaaagacttaaggaac

SEQ ID NO: 670443 - DNA, 50 bp, Homo sapiens
gaggaggagaaggagaggcgccgccaggaggccccaccgccactgtcacc

SEQ ID NO: 670444 - DNA, 75 bp, Homo sapiens
gaggctggacgcttgcatggcgcttgagaacccagtgacttgattgtaaaaatttacagagcggaatcatatgct

SEQ ID NO: 670445 - DNA, 83 bp, Homo sapiens
ttcactgacagtattgaggaggaggctgcacaccatagtcaccagcaaagcagcccgacggccatggaggctgaagagacgat

SEQ ID NO: 670446 - DNA, 75 bp, Homo sapiens
attccaagtaactcttatttgtttgtcagggagccactggtgatgtggatggggcacagattgtctttaaagaag

SEQ ID NO: 670447 - DNA, 101 bp, Homo sapiens
catcggaggacctccctgccctgtataccgagggaacagtgtatgggtttcgacagaccatgatgaaattgagaatgtggccaaacaatttggtgcacaag

SEQ ID NO: 670448 - DNA, 82 bp, Homo sapiens
tccgtggccacgaggacgtcaccatgatgccgacaaaaggatcaaggtggcgaagcccgtggtggagatggatggtgatgag

SEQ ID NO: 670449 - DNA, 75 bp, Homo sapiens
atgacccactctttggtttgtccagagacagtgagcaggccagatcagaaaagggagctcaggtaccttccagag

SEQ ID NO: 670450 - DNA, 116 bp, Homo sapiens
aagagaagaaatggacatgattgcctaaatcagccaaacacaggatattgatgaatgtgtaaacaacactgtttgtgacagtcacgggttttgtgacaatacagctggctccttcc

SEQ ID NO: 670451 - DNA, 100 bp, Homo sapiens
gaagaaggacttcggaatgcactacaacaggaaaatcatattatagatggagtaaagtctatacgagatactccagccaaaaatgcacaaaagtcaaatc

SEQ ID NO: 670452 - DNA, 83 bp, Homo sapiens
acgtcccagcctctaggaacgctccactttgaggctctgatgaacattccagtgctggtgttggatgtcaatgatgatttttc

SEQ ID NO: 670453 - DNA, 50 bp, Homo sapiens
attttacattcccactagcagggttagcatggcctcattgaaagaactag

SEQ ID NO: 670454 - DNA, 88 bp, Homo sapiens
cagagaccttgagggatatctttcttcactcctcttcacttcttcagccctgtgacctccctcctgtcttgcagctcctcctggcacc

SEQ ID NO: 670455 - DNA, 82 bp, Homo sapiens
cggagatggtgcagaagatggaggagccgccgccatgtctgcgcatctgcaatggatggtcgtgcggaactgctccagtttc

SEQ ID NO: 670456 - DNA, 86 bp, Homo sapiens
caacaacctgctgggcaccttcatctggaataaggatgagacctgcacgcagtggctcacagcagcacgatttgtgacagcccgag

SEQ ID NO: 670457 - DNA, 100 bp, Homo sapiens
tcggacgtgcggggcctgggcctcccggtccgcaagcagattaagcctgatcaagatgacaacctcccaaaagcaccgagacttcgtggcagagcccatg

SEQ ID NO: 670458 - DNA, 75 bp, Homo sapiens
gagtggaagccatgaggccaaaggcagttgtattgcaatcatttggggaagaatctacagttgctgatggacaga

SEQ ID NO: 670459 - DNA, 96 bp, Homo sapiens
ccgtcccgtccgacagccaggcccgggagaatggttggatttcatcccttactggtctcaaccaaaatattcctgttggaatcatgatgataatca

SEQ ID NO: 670460 - DNA, 82 bp, Homo sapiens
cgcctccatctgaagagggctccaggcatccggtcctggtccctgctggttgatgaagatgtgtgtgtctttaagtgctcag

SEQ ID NO: 670461 - DNA, 100 bp, Homo sapiens
tgcagttctggaagcaagaatttatcaaaggaaagatggatccagacaagttcaattttgtggggaaattgcttggaccaagaggaaactccttgaagag

SEQ ID NO: 670462 - DNA, 59 bp, Homo sapiens
tcaagagcaatcagtaccatctggtcacggtctagatcacattctcgatccagaggaag

SEQ ID NO: 670463 - DNA, 76 bp, Homo sapiens
cgtcgggtcagatccgacagaagggttcaggataagtttgaggtgctgaattacacaagcattcctatctttctcc

SEQ ID NO: 670464 - DNA, 100 bp, Homo sapiens
cgcttctttccatactatgtttacaacatcatcggtggacttgatgaagaaggaccaaactcttacccaggatctactggagcagctgttggagcccatg

SEQ ID NO: 670465 - DNA, 83 bp, Homo sapiens
ggaattggaggacctggaggtggacggtcagaaagttgaagttccacagccactgagttgatcaatgtccgagttaccaccat

SEQ ID NO: 670466 - DNA, 89 bp, Homo sapiens
tgtttattcaccatcaacaaagaagaccacacactgggaaacatcattaaatcgtgtccctggccagtgtccttccacctgtccacaag

SEQ ID NO: 670467 - DNA, 100 bp, Homo sapiens
gctctgggaagtgcgcagtccgatgagagtccctacactaaatccgccagccagacaaagccgcctgatggagcgttggctgtgaggagacagagcatcc

SEQ ID NO: 670468 - DNA, 75 bp, Homo sapiens
agctgaataaagctgttttggaactgtcaggtacctcaaagcatgctattaactgagtacttggatatgaaaaat

SEQ ID NO: 670469 - DNA, 50 bp, Homo sapiens
acacttaaaggaagtgctcattggagggtgccgcccatcctgcctccaac

SEQ ID NO: 670470 - DNA, 97 bp, Homo sapiens
cctactgcctggaggccggggagccgacgcctgggaactccggatgtgactcctgttacatgaaaatggaagaggtcagagttgtccaagagggagg

SEQ ID NO: 670471 - DNA, 75 bp, Homo sapiens
tccagtttgagaaacctggatctgcgatctgtttgtggtgccaaatctgattccagttttgatgttcaaattggg

SEQ ID NO: 670472 - DNA, 114 bp, Homo sapiens
ttattcttcagttggatgctctctatttttagatctaaatatcatggctacccatacagtgaaagcaagttgaatacattggtgcagaagcttcatgacttccttgcacactca

SEQ ID NO: 670473 - DNA, 99 bp, Homo sapiens
ctgaagatggctactctggagttgaggtggagaacgccggggccatcggcccgtcccggttcgggctcaagagggccgaggtgttgggccacaagacgc

SEQ ID NO: 670474 - DNA, 100 bp, Homo sapiens
agaaacacttcctataaatctcgcccaaacaggaaaggtggtggattacttgactcaatactcgggtataaagcctggtgacctcgatgccaaaatttcc

SEQ ID NO: 670475 - DNA, 100 bp, Homo sapiens
aagactctgacattcctggctgtcatgctcattgttctgaactccacgttaagtgggcagaccaacatccacctcagcaaaaacttcttcctgacgaatc

SEQ ID NO: 670476 - DNA, 90 bp, Homo sapiens
cgggctgactctgcttgtgttcgtggccacgctgctgatcgtcctgctgctgatggtgtgcgccacaatggtgcgcatgaatgtcctggc

SEQ ID NO: 670477 - DNA, 75 bp, Homo sapiens
ctgaaggccctgactctgatgttggatgcagcagagagttatgccaaggtccaagcatctcattttgaaggccta

SEQ ID NO: 670478 - DNA, 75 bp, Homo sapiens
atgccaacattccttctgtgtccctgtccaagcgagagatgccaacactatttgtggagtcagttttggaagtgc

SEQ ID NO: 670479 - DNA, 100 bp, Homo sapiens
tgtgaataattttgcctttggtcctgaggtggatcaccagctgaaggagcggtttgcaaacatgaaggaaggtggagttggcatgaacttaacagcagca

SEQ ID NO: 670480 - DNA, 90 bp, Homo sapiens
gacaaggcaaagaacctgaagacgacccaaaagggtacctaggttgtctgcattcaaaagagcattctattaaagctaccttaatttggc

SEQ ID NO: 670481 - DNA, 83 bp, Homo sapiens
ttgcagcctgcaccggccaacggaactgtggctgcaccatctgtcttcatcttcccgccatctgatgagcagttgaaatctgg

SEQ ID NO: 670482 - DNA, 100 bp, Homo sapiens
catggcctcggagaagccgctggcggcagtcacttgtacagcgccggtcaacatcgcggtcatcaagtactgactggagactgatgcatgagggggctac

SEQ ID NO: 670483 - DNA, 136 bp, Homo sapiens
ggacaacatcccgctgcagccggtgcgccagaagaagcggatggacagcaggccccgcgccgggtgctggagaatctggtaaaagcaccattgtgaagcagatgaggatcctgcatgttaatgggtttaatggaga

SEQ ID NO: 670484 - DNA, 98 bp, Homo sapiens
caccatgcaagctttgtcggaagaggaccggaggctctggatggaagccatggatggccgggaacctccaagaaggatcaagaaggtggagaagaaaa

SEQ ID NO: 670485 - DNA, 50 bp, Homo sapiens
tcgtcgtctatgggggctactcgaaacagcctcctgacagtgggcctcca

SEQ ID NO: 670486 - DNA, 101 bp, Homo sapiens
caccattagaaactatccagaagaagctggctgcaaaagggctaagggatccatggggccggctgctgccttggttcacatttatcttgatggctctgtgc

SEQ ID NO: 670487 - DNA, 100 bp, Homo sapiens
agcagcttaaagatcagtatttcatgcaaagacatcagctacttaagcgccacgagaaggaaatcccctcagaatggcacattgaactgatgttagacag

SEQ ID NO: 670488 - DNA, 100 bp, Homo sapiens
gagcggggctctgtggctgctcctggctctgcgcaccgggtgaggtggctttgaccccgggttgcccggccagcacgaccgaggaggtggctggacagct

SEQ ID NO: 670489 - DNA, 74 bp, Homo sapiens
aaaacatatccgagggtgtcctgttacttccaagtcatcaccagaaagaatcccctactttgaaactagtgctg

SEQ ID NO: 670490 - DNA, 100 bp, Homo sapiens
ggagtaatagatttttccctctaccttaaggatgtgcaggatcttgatggtggcaaggagctacggaaaaacctgcgagccctggtggttgtccatgcta

SEQ ID NO: 670491 - DNA, 134 bp, Homo sapiens
ccagcagcactatgctaaggaaactccaaggcttgccttcaagaataactgcgaactacttggtaatcctggccggccgggtctcaatggaatgaaaggagatcctggtctccctggtgttccaggattcccag

SEQ ID NO: 670492 - DNA, 75 bp, Homo sapiens
cagtactgacgtgtacatcgtgatgtgggacaccggccgttgctccagggagaactgcaaatatcttcatccacc

SEQ ID NO: 670493 - DNA, 100 bp, Homo sapiens
tccaatttcctcttcaacccactgcttcctgactcgctctactccgtggaagcacgctcacaaagggtgcaaaaatgcagagtaataaaacttttaactt

SEQ ID NO: 670494 - DNA, 80 bp, Homo sapiens
tgaatgagatcaaaggtcacctggaaattgccttattggaaaaacatttcttacgcggacctacgtgggcgccatgcccg

SEQ ID NO: 670495 - DNA, 82 bp, Homo sapiens
gggcggcggctccacctggggattcctgaggccgtgtttgtggtaccctcacctgagtcccaagtacaaggagtcttttgat

SEQ ID NO: 670496 - DNA, 75 bp, Homo sapiens
ggggcggtccgttgccaaagccagcaagagtgagccatggagctacgtgtggggaacaagtaccgcctgggacgg

SEQ ID NO: 670497 - DNA, 100 bp, Homo sapiens
ccacacatattctggaagtgatcaatgcacacatggtactaagcaaagccaacagccagctctcaaaggtctatggccctgtgttcactctgtattttgg

SEQ ID NO: 670498 - DNA, 74 bp, Homo sapiens
atttgtgtgacttgactcttcaaacacaaagtacgaatgtaaagttatcgcagaaaaatctcatcaggaatgaa

SEQ ID NO: 670499 - DNA, 83 bp, Homo sapiens
ggagctttcgcagctggagaaggtttccaatacttatctacaggaatcgccatgaccccagctctgagggaggcaacagcaaa

SEQ ID NO: 670500 - DNA, 75 bp, Homo sapiens
tcttcaagactggtttgatgctattaacttcgtagacgaggaagccctcctatgacactgaaacagatcctagtg

SEQ ID NO: 670501 - DNA, 100 bp, Homo sapiens
ccgccctaatggaggtctccagtttcgggccgttgctccagggagaactgcaaatatcttcatccacccccacatttaaaaacgcagttggagataaatg

SEQ ID NO: 670502 - DNA, 90 bp, Homo sapiens
ctcttacgtctgcggaagtgcagctgcctcagttcttagcgcaggcaccacaccaaccccgtgggcactgagtggcggtggaagatggac

SEQ ID NO: 670503 - DNA, 82 bp, Homo sapiens
gattttgctgtcaaagttgtgtcagtgaatacaaacaggttcccagtctaagtgggtgactttccaagatagaggcagatca

SEQ ID NO: 670504 - DNA, 98 bp, Homo sapiens
gaagatgatgatgtcctcagtattgattcaggcccttgatgagcctccctatttgacagtgggcactgatgtgagtgctaaatacagaggagcctttt

SEQ ID NO: 670505 - DNA, 100 bp, Homo sapiens
ctcaccggacgccgcgcgccaccggccctccgcggggcaggggctgctgcgagctcgccgggcgccctttagacggaccagttactctccacaagaaaat

SEQ ID NO: 670506 - DNA, 75 bp, Homo sapiens
tgaggaggaagcgaggccacgccagcagtggggcagcacctgcacctacggcgatcctgctcatctctgattact

SEQ ID NO: 670507 - DNA, 90 bp, Homo sapiens
cggaaaggataagcctcgacttagaagctaccgagttaccctaagaaagtaccttccactggaagaatctcaaacagcgctacttactca

SEQ ID NO: 670508 - DNA, 82 bp, Homo sapiens
atgccttgttccacaagatatcaggtacctgtttcccaggcaactactgatcaggcatttctggaccccaaaacaacaaact

SEQ ID NO: 670509 - DNA, 75 bp, Homo sapiens
cgggatggtgccacaggaggctgtgcgggccccgctccgcttcgaatgggttagcatggcctcattgaaagaact

SEQ ID NO: 670510 - DNA, 90 bp, Homo sapiens
ctaacaattcctgttttcgccaggagcttccaggacatccagtgctacgagtggtctcagttgtaggagtgagcgatcagcggttgaccc

SEQ ID NO: 670511 - DNA, 90 bp, Homo sapiens
ctaggagcctggggttcggcgctatggaggagctcgatggcgagccaacagtcactcggagcccatcgtggtgaggcttaaggaggtccg

SEQ ID NO: 670512 - DNA, 83 bp, Homo sapiens
cagaaacgtgaggatcaagaagccggactacaaggtcgcctacgtgcagctgggactttgaacatgtcggggatcgccctcag

SEQ ID NO: 670513 - DNA, 100 bp, Homo sapiens
ctcctcactgtcaagcacgagctgcggactgatggagtgtttggaaggtgccagaaggttccggcaatggacttttaccgctacgaggtgtcgcccgtgg

SEQ ID NO: 670514 - DNA, 100 bp, Homo sapiens
ggctggttgttccgttgcgagctgcagctgcgatctctgtggtaggcccaggatattggtgctggaaaaggcaaatactatgctgtcaattttccaatga

SEQ ID NO: 670515 - DNA, 71 bp, Homo sapiens
ggtggtcgtccgcggctccggtcacgtcaccgtgcagttacaattcatgatacagaaaaatgccaagcatg

SEQ ID NO: 670516 - DNA, 82 bp, Homo sapiens
tgaggagctctgaacccagcccacagggaagcagaggaagtattggatgaacgaatatacctcatccattggaattggagtt

SEQ ID NO: 670517 - DNA, 75 bp, Homo sapiens
ccgtcgacggcgagcccttgggccgcgtctcctttgaggctggaggcaaagctggaaaggacagtgggaaggcca

SEQ ID NO: 670518 - DNA, 90 bp, Homo sapiens
tgctgctgcagtgggacaggtggcggcgaccggcggcgtccgaggaggtttttcgttggaatatacgttgcacatttatggcgattctga

SEQ ID NO: 670519 - DNA, 100 bp, Homo sapiens
ctgttgccttcattagcagcttttcctcctcttccctgcacttcccagaaccaaagaatgtgaagggggtccatggagggaggagtctgctactagtctt

SEQ ID NO: 670520 - DNA, 50 bp, Homo sapiens
gaactacacagtttaattcaaagcccccctctgaggacctgggaagcctg

SEQ ID NO: 670521 - DNA, 100 bp, Homo sapiens
ctttggaaggatatcgaatatgtcaccaatttaagtgggcagaccaacatccacctcagcaaaaacttcttcctgacgaatcgcgccagggagcgctcag

SEQ ID NO: 670522 - DNA, 98 bp, Homo sapiens
cacggtcagcacccaggaacacgaagccccgggcaccttccgggtggagttcagtgaaagggcagtccagagacaacaagttcagcaagaaagattgt

SEQ ID NO: 670523 - DNA, 110 bp, Homo sapiens
acgccatgtcgggttattcgagtgaccgagaccgcggccgggaccgaggatcaggatcctcatgaccagccaaagagaagaagaattaggaagcataaatcaaagaaaaa

SEQ ID NO: 670524 - DNA, 98 bp, Homo sapiens
gaaatcctaatgacagtctccaaattcgcctccatctgtaccatggcaaaagtcaacaactctagcttaattggagtaggctatactcagactctgag

SEQ ID NO: 670525 - DNA, 51 bp, Homo sapiens
cgagtacctgagattagcccagggaatgggtactgttcaaaaaggaatgcc

SEQ ID NO: 670526 - DNA, 75 bp, Homo sapiens
caaagactgtggaacttttaagtggagtggtggatcagaccaaagatggggtgggctttgacagcgagaatcccg

SEQ ID NO: 670527 - DNA, 100 bp, Homo sapiens
ttggagaggctgtgagccacaatgcatcgctggaagtagccattggtcgcattatgtttcagctcttctcagacatatgtccaaaaacatgcaaaaactt

SEQ ID NO: 670528 - DNA, 100 bp, Homo sapiens
cttccacaccccctccgtgggtgtgtggtgacagagctgaatgaacctctctccaatgaagatcgaaatctcctctctgtggcctacaagaatgtggttg

SEQ ID NO: 670529 - DNA, 100 bp, Homo sapiens
catgcttttggctgccctgagctggcagtacctgaccactctctcccagacacgagacgacttcctgggccaggtggacgtgccccttagtcaccttccg

SEQ ID NO: 670530 - DNA, 96 bp, Homo sapiens
gccgcaggcgcagacccacccgccatgaagccccccgcaggtaattgaacggcgcattcggcaagagctgcctttcatggccacagagaacatcat

SEQ ID NO: 670531 - DNA, 100 bp, Homo sapiens
atgggcctcttctttatgaagcaaagagaaaccccgttcaccaaggccatggaagtggaggctgcagaggcccggtccccagcccccggctacaagcgct

SEQ ID NO: 670532 - DNA, 82 bp, Homo sapiens
ctctgcctcggggacgaaagcaggctctaagtatgcagtcatctccaaatggccagtttgtagcgccaagtgatattcagtt

SEQ ID NO: 670533 - DNA, 90 bp, Homo sapiens
agggtcttcatccagaaacgaggagaggcagatgcgaaccagaacaatgggacctcctctcaggacacagcggtgactgactccaagcgc

SEQ ID NO: 670534 - DNA, 95 bp, Homo sapiens
ttcctgcttctccttttcatgagtgttcctgtggtctctgcacctcctttctcctgtggacatctctacagcaatgagtgaacgggcacttgctc

SEQ ID NO: 670535 - DNA, 100 bp, Homo sapiens
ataggggctgtaaatctcaaatccagcaatcgaaccccagtggtacaggaatttgaaagctggctcaactaccctctggagaagataggcttctggcgac

SEQ ID NO: 670536 - DNA, 100 bp, Homo sapiens
gcggccagaatcggagccccaaccgcgctgccggtccaggggcaagttcatcctactctcgagtctaatgatgatgctcttcagtatgttgaagaattaa

SEQ ID NO: 670537 - DNA, 76 bp, Homo sapiens
acgtgaccagaagtcccgccgcttaaaggaatgttgtaccatctttgggtaggcagacttccctgacgacatcagt

SEQ ID NO: 670538 - DNA, 75 bp, Homo sapiens
gcctgtctgatgtctgtggaggaagagacggagctgctccttagaagtccagcctctgatgaagcaggagagaaa

SEQ ID NO: 670539 - DNA, 100 bp, Homo sapiens
cggcgaatcacttataaatggcgccgaagcaggacccgaagcctaaattccaggaggaacaccctgcagccagaagaagcgctttcaacaagcgaccccc

SEQ ID NO: 670540 - DNA, 50 bp, Homo sapiens
atgtggactacaatggaaaccttccaggccatgaccttgcctcctttcct

SEQ ID NO: 670541 - DNA, 90 bp, Homo sapiens
gctggaggtgcagggccaggaggaacatgagtcgtccccagcactgcgacagttgtgatcgtggtgtgcgtcagcttcctggtgttcatg

SEQ ID NO: 670542 - DNA, 100 bp, Homo sapiens
ggcaaggagctaaagcagcgtgcgttcagccctggggtggtctttgggaagaagcttcctgcctttgccaccatccccatccaccagctgcagcatgaga

SEQ ID NO: 670543 - DNA, 88 bp, Homo sapiens
ggagaagacgaggatgatgcggaaattaaccccaaggtctctaattaacagaagatggcaaagcccagccacagcagctatgtccttc

SEQ ID NO: 670544 - DNA, 82 bp, Homo sapiens
aagattcggaggtaacagtgaagggattcaggatatacggtgcaccttggagaccaagacacattccaccccagtggggggt

SEQ ID NO: 670545 - DNA, 74 bp, Homo sapiens
cagcaacaagacagagctggcctggagtccgcggctggccgcgtgagtagctccagaaggtcctgagcctcggc

SEQ ID NO: 670546 - DNA, 50 bp, Homo sapiens
gcaggagaagatggcggtctccacagtagttccgagtctgagatggagga

SEQ ID NO: 670547 - DNA, 82 bp, Homo sapiens
aacgtgagacgcaccgcccggactcaccatgggcgtgatggtgggcatgggtcagaaggattcctatgtgggcgacgaggcc

SEQ ID NO: 670548 - DNA, 75 bp, Homo sapiens
caatctattctgctgattcacaattatggagactgtatgccgacaaaaggatcaaggtggcgaagcccgtggtgg

SEQ ID NO: 670549 - DNA, 75 bp, Homo sapiens
gcggtgcagggtaacatggcggatgcggaaggtggctgagatctgcgttgaaatggagctgcgggacgagattct

SEQ ID NO: 670550 - DNA, 88 bp, Homo sapiens
ccacttcaaagttgtataaaattaatcaaacttgatctccatggaaatcaggagaatttttggaaaaggtacgacagaagaaaaaacg

SEQ ID NO: 670551 - DNA, 82 bp, Homo sapiens
ccatgtcgggttattcgagtgaccgagaccgcggccgggaccgaggagttgacgctggtgaagacattcatgatttaaacac

SEQ ID NO: 670552 - DNA, 101 bp, Homo sapiens
cttcaaagaagatccagagaagctcttcacagatctcagagaaattggccatggaagctttggagcagtgtattttgccagaaatgtacacacaggagagc

SEQ ID NO: 670553 - DNA, 114 bp, Homo sapiens
cccagaccctggagcctcagttggaagcagccgatccagcctgcggagcctgtggggcagatatgattctataacagactcttccagaaatgatatgaagaggaaatttgccct

SEQ ID NO: 670554 - DNA, 75 bp, Homo sapiens
aaacaataaagaccggaagctgagtttttatccaaacattgctgaggctcttgtcagcaaaggtctagccacagt

SEQ ID NO: 670555 - DNA, 73 bp, Homo sapiens
ctggttttgtggcggctgctgctagagctggagcatttgccggcttatgtccctgatgccaaaaatgcaccta

SEQ ID NO: 670556 - DNA, 90 bp, Homo sapiens
tgaacttctgatggaaaccgctgaagttgaacaaaatggtggtctctttataatggtcatcatggtcacaggagaccatccaatcacagc

SEQ ID NO: 670557 - DNA, 96 bp, Homo sapiens
acagctatctcgggagaaacaacaactgctacatctgttggaggagccaactagcatggaagtgcagggacaggctggcctgacatggaaggtgaa

SEQ ID NO: 670558 - DNA, 75 bp, Homo sapiens
gaccagcttagcttctgtcctaaaggcatgggttggaattggagcctatcccccaacccgaaggctaacagcatc

SEQ ID NO: 670559 - DNA, 90 bp, Homo sapiens
gaaaaggtattcattaaagaaaataatgggaaggaagaagtatccaagctgggctcaaaatgcagagaactcaaagatattcatttcggc

SEQ ID NO: 670560 - DNA, 51 bp, Homo sapiens
gttcgtgtcaactgtttggacgagggaagacatgtaaggaatttgcataag

SEQ ID NO: 670561 - DNA, 50 bp, Homo sapiens
tgggaccttaacagggagccatgttttgcacagtaataagttgactcaca

SEQ ID NO: 670562 - DNA, 75 bp, Homo sapiens
ggggacatccgccatgctccaaacaacttggcctcagctgaaggaattgaagaatctgcagcagcaatacttaca

SEQ ID NO: 670563 - DNA, 51 bp, Homo sapiens
gaaagtcccaggatgactactgtgtcaaaaatatggctacacacacctttc

SEQ ID NO: 670564 - DNA, 74 bp, Homo sapiens
caccgttggtatcctcatggacggtggagccgccaccaaaatgcagattttcgtgaaaacccttacggggaaga

SEQ ID NO: 670565 - DNA, 50 bp, Homo sapiens
aaggactcacagtggctgcaagtttgtgaagtgtggatatgcaggctcta

SEQ ID NO: 670566 - DNA, 100 bp, Homo sapiens
gttgaaaatggaagagtaattgcctgctttgattccctaaaggaatcattaaccaatggcaacaggaatccaaggataaagtgatttccctcctgttaac

SEQ ID NO: 670567 - DNA, 75 bp, Homo sapiens
gaagcccagagcgggagagactggctcaagaccatggaacccttaggagaaatcttgagagtggacagcaattgt

SEQ ID NO: 670568 - DNA, 100 bp, Homo sapiens
cacactgtctctctaccagggcctgctctccaacttccctgacatcatccatctacaaaaaggaactttatattgctgttggaatatctggagccatcca

SEQ ID NO: 670569 - DNA, 100 bp, Homo sapiens
ctgagtatgttcacgatcggggtcaggtgaaatgacaatggatgctctgttggctcgattgaaacttctgaatccagatgaccttagagaagaaatcgtc

SEQ ID NO: 670570 - DNA, 100 bp, Homo sapiens
ctcttgtaaacagtcagacaatagtgagctggttagtgaagggcttttacctttacagtcatcatccttttatggtagcagagctggatccaaggaacac

SEQ ID NO: 670571 - DNA, 100 bp, Homo sapiens
cacatgaagactaaagcatctgtcagaaaagctgtaagactggaaagtacttaccagaatcgaacacgctatatggtagtggtttcaactaatggtagac

SEQ ID NO: 670572 - DNA, 100 bp, Homo sapiens
aaagaaggccctgagtcaaagaagatgcctcgaactaaacaaattcatcccagaaatctaagaggactctcagcttgtatcctctggacacaataatcca

SEQ ID NO: 670573 - DNA, 75 bp, Homo sapiens
agcatggcacgctgcatggagccaaaatcgggtctgaggtgggagatgccatcccagcagtggaggtgtttgaag

SEQ ID NO: 670574 - DNA, 89 bp, Homo sapiens
gcctgacagctctgcggctcgggccctgaggtgtggggatattcagctttgccaggtatggcagtgatttttatagcatgcactataaa

SEQ ID NO: 670575 - DNA, 75 bp, Homo sapiens
cttctggcaaacagtgtttgcctctggttcagctcatacaacagcttcttagctcctccatttacaacctacaaa

SEQ ID NO: 670576 - DNA, 50 bp, Homo sapiens
aacagataatattatggcacttaacagaagcagacagtatgagcatgacc

SEQ ID NO: 670577 - DNA, 100 bp, Homo sapiens
agactcctttacatgatagtcttcctatcacgggcactagtgtggctctcctgttccagcaattgggttgcagccccacccacgtcacggtgtacagcga

SEQ ID NO: 670578 - DNA, 100 bp, Homo sapiens
ttctcgatgtcgtgctaaatcagaaaagttatcaaagtcttgaccagttatcagcagaagttagcctttctcagacttcactagatccaggccagtcaca

SEQ ID NO: 670579 - DNA, 113 bp, Homo sapiens
gaagacgatctgcacttcgcattttggcattgacatttaattttagggtcctttatatagaagggagagtaggtcttgggtggtgcctatgatgagttcatctttgctcctcg

SEQ ID NO: 670580 - DNA, 73 bp, Homo sapiens
atcctttatcctggtcatcttctatttccaaaccgcagggccgtaggcagccatggcgcccagccggaatggc

SEQ ID NO: 670581 - DNA, 75 bp, Homo sapiens
gatatggctgcttcccgttctgccatgatgcttcctgcctgacacagctcacttcaagaagtgcacaatgtcaga

SEQ ID NO: 670582 - DNA, 75 bp, Homo sapiens
gtgcctgatgatcacgcagctggctggcttcagtggaccaagtgctgcagcagctcccagtccagtgctaggaaa

SEQ ID NO: 670583 - DNA, 82 bp, Homo sapiens
gcctgtcccgttgtcagagtggaagccagaataaaagctacttggccgtaaggctaaaagaccaagatctgagagattcaag

SEQ ID NO: 670584 - DNA, 51 bp, Homo sapiens
cccggcagccaccccgtctgggaactcttcacggggatttctgctgccgcc

SEQ ID NO: 670585 - DNA, 100 bp, Homo sapiens
agcgccagctgcagccctggccgcgcactcgcctcagctgagcctgggcatgacagcaagcgctgtggcggctttgatcctcatgacgtcctccatcatg

SEQ ID NO: 670586 - DNA, 82 bp, Homo sapiens
tccgagccccttcctgagaagatcccaggagcctgttcctctcacgccctcacctggctgagccgcagtagttcttcagtgg

SEQ ID NO: 670587 - DNA, 83 bp, Homo sapiens
cgctgtgtggttgcaacggagataaattcccggaaccgcgattcggcgtgtcagatgtccagaaggcttcttgggggaatatt

SEQ ID NO: 670588 - DNA, 98 bp, Homo sapiens
tgctgctggggacagtgaccgtggggttcctcgcccagagcgtcttggcgcacttttcaggattagaagaggctgtgtatagaaacatacaagcttgc

SEQ ID NO: 670589 - DNA, 100 bp, Homo sapiens
cgcggccagtgcgggtggctggctttgccattagcgggggcctttcctgaggacggcgtacggagtgtgggttaaaaagatcaagtggcatgagcagcct

SEQ ID NO: 670590 - DNA, 73 bp, Homo sapiens
tctgccttgtacagttcccatcacatgcgacctaaagtcatgtggcacctccttcgaaggtacatggcatccc

SEQ ID NO: 670591 - DNA, 82 bp, Homo sapiens
ctgaggactataataccttgggatgtggacacaatttgtaagagaaatgttctttactaccatggaaagccaccttctgcgc

SEQ ID NO: 670592 - DNA, 101 bp, Homo sapiens
tggatagtcgtaaacttcctatgatagcctatatgaacccaatagcaatggcgagatcaaggggtccaatccagtcttcagggccaacaatacaggattat

SEQ ID NO: 670593 - DNA, 84 bp, Homo sapiens
gcccatcgagtcgaagcaccgcagcctggtgcagatcatctacgacgagaaccggcaagagtgagccatggagctacgtgtggg

SEQ ID NO: 670594 - DNA, 75 bp, Homo sapiens
tggtcatacaccagtactaccaaggacagcttttttcctgcaagatcatcactccattcagaaggctaatgctgt

SEQ ID NO: 670595 - DNA, 50 bp, Homo sapiens
ccctttggccctgtatcaggagcacagttgcagaatgaagaagagtctgg

SEQ ID NO: 670596 - DNA, 75 bp, Homo sapiens
agccacagcagcctcccaaggagtctgcaagttgctgatgactatcagccagttcgtctgctcagtaaacctggg

SEQ ID NO: 670597 - DNA, 98 bp, Homo sapiens
tagatgcaaatgggtatctgaaaaatggatcagcttgatgattccctgaatcagatccgtaagctccagaggtctctggatgaagagaaagaaagaaa

SEQ ID NO: 670598 - DNA, 85 bp, Homo sapiens
cattgacagagagaaccagtgcgtcattatcagagctgtaggtaaaacttgcctactgatcagttacacaaccaatgcatttcct

SEQ ID NO: 670599 - DNA, 100 bp, Homo sapiens
aaaagaacaggaccccgtacgtcactaccactgtctctgctcacagtgccaaggatgaccgagtgggagacagcagcaccagcggtggcagagaccccag

SEQ ID NO: 670600 - DNA, 51 bp, Homo sapiens
ggggaaagcggaaggaatgtcgcgtgcaccacaccccactctggccggagc

SEQ ID NO: 670601 - DNA, 83 bp, Homo sapiens
cttcagagagaggaagccgaaaacaccctgcaatctttcagacaggattgccccctgtgggtcactttctcagtcattttgag

SEQ ID NO: 670602 - DNA, 95 bp, Homo sapiens
ttctgatcagaccaattggagagaagttgccaacatctggaggctgttctgctttggagttaaaggaagaagccatggatttaataaatagagaa

SEQ ID NO: 670603 - DNA, 95 bp, Homo sapiens
aaccacccactcctgtttcccagaggtctgaggagcagaaatgcgccggctctgcagcagtaccgcactagcgccggctccccggccaaccagtc

SEQ ID NO: 670604 - DNA, 51 bp, Homo sapiens
catggtggatcgggcagaggctagagacggggtttcgccatgttggccagg

SEQ ID NO: 670605 - DNA, 74 bp, Homo sapiens
ccacagacacttctgatagtgaaggcctgaagtgttagaagattcacctctggttccccaaaaaggcagttttc

SEQ ID NO: 670606 - DNA, 75 bp, Homo sapiens
ggcgatcaaggccaagtatccgccagtcaataggaagtacgagtattcattccacttaaaacctgaaaacattgg

SEQ ID NO: 670607 - DNA, 82 bp, Homo sapiens
ctgggagcaattaacagcacattaagaaactaatctggattcactccctctggttgatacccactcaaaaaggacacttctg

SEQ ID NO: 670608 - DNA, 88 bp, Homo sapiens
ggagaaggggtccgagggcagtctgtgtcaaacgcagcgctcctttaccctcatcgtggaggcctgggactgggacaacgataccacc

SEQ ID NO: 670609 - DNA, 75 bp, Homo sapiens
atggacgccaaggcgaggcaggactgtgtcaaggagatcggcctcttgaagaatgattacggacctgaagccaaa

SEQ ID NO: 670610 - DNA, 100 bp, Homo sapiens
ggctctggttgaggatgtacagagagctcctggacaacagctcaagtttccaagtctcttaaggagcgattaggcatgtcagctgatccagataatgagg

SEQ ID NO: 670611 - DNA, 83 bp, Homo sapiens
ggggcagctgcgggcgctgcgtgccgtgttccggagccagcagcagcccagctcaacattggcaatgtgctccctgtgggcac

SEQ ID NO: 670612 - DNA, 98 bp, Homo sapiens
tgggcttcacgcagaagagcaacatgaagctgcacatgaagcgggcgcacagctatgctgcgtccagaccaaagcatttactggtatttatcaacccg

SEQ ID NO: 670613 - DNA, 120 bp, Homo sapiens
gacggacatgcgcgggagggcgccgcggggcagccgccgctcctccggggctctttggtgtaacgggaaactgcgctgcctgtagtaagctcatccctgcctttgagatggtgatgcgtg

SEQ ID NO: 670614 - DNA, 75 bp, Homo sapiens
gacggggagatcagcatttgcatggaacacatgcacagacgcagtcttcagcaaggaagtgctgggaacgccctg

SEQ ID NO: 670615 - DNA, 95 bp, Homo sapiens
cggaacccggcgcggcggcggcacgatggtcatggcgtatttcgtcgagaatttttggcgcgccgcgattcaccagcctggtcccttctgcggag

SEQ ID NO: 670616 - DNA, 80 bp, Homo sapiens
ccccacaccaccgcactgtcgctgcccgcctgccctgaggagtccccgctgcttgatgatctcaatgccacccaccaaca

SEQ ID NO: 670617 - DNA, 83 bp, Homo sapiens
ccccaacacgtctctgttcgtcaggaacgtggccgacgacaccaggttagctttatacgtctacgaatatttactgcacgtag

SEQ ID NO: 670618 - DNA, 75 bp, Homo sapiens
actgcagcattgcagccgccaagacgacattcacggcatggtgtaactcccacctccggaaggcggggacacaga

SEQ ID NO: 670619 - DNA, 75 bp, Homo sapiens
aaggacaaacccaccttcatcaaagggagtcctccctgctgctgtgtggacgacacgtgggcacaggcagaagtg

SEQ ID NO: 670620 - DNA, 101 bp, Homo sapiens
catgtgcagtgtcgacaattgcaggatgcacagattctgaaaggcctaaagaatgtatttgacgaagcaatattggctgccctggagcctccagaaccgaa

SEQ ID NO: 670621 - DNA, 82 bp, Homo sapiens
cagctacagactttcctgagtcaggaatgtatcctgtcaggtataatgtcagtgaatggcaagaaagttcttcatatggatc

SEQ ID NO: 670622 - DNA, 95 bp, Homo sapiens
gggcagcggaggggcgacaaagtttatcggcgggggcttcaggcaatacctcttagtgttgacctttggatacattatataaacttcttaaaaga

SEQ ID NO: 670623 - DNA, 100 bp, Homo sapiens
ggaaactcaagttgaatgaaaatgccatctccaggctccaggctaaccaaaagtctgttctggggatgacagcatgggaggcaatggctccacatgtaaa

SEQ ID NO: 670624 - DNA, 100 bp, Homo sapiens
atgacaggggtaacacccttccagatgatttttgaggctttctgtgaagaattggaatcaatgatacaggagcaatttaagaaggggaagaaccccacag

SEQ ID NO: 670625 - DNA, 75 bp, Homo sapiens
cagcactggactcatggaggctgagcatttattcaggtactagcaaaggccagacgtcttactcaacaacttccc

SEQ ID NO: 670626 - DNA, 73 bp, Homo sapiens
gaagaagaagcaggatgaactgaaacggattgccagagaattggcagaaggtgtaatcctgagagattcacat

SEQ ID NO: 670627 - DNA, 75 bp, Homo sapiens
cggcgaccggcggcgtccgaggagggctgttttgctgcagcttctgaagtgttaaagcacttgaaggaacgattt

SEQ ID NO: 670628 - DNA, 100 bp, Homo sapiens
ggtcattgactttggttctgctagtcacgtttccaaagctgtgtgctcaacctacttacagtcacgttactacagaaatgcactcggtgatggaaagaga

SEQ ID NO: 670629 - DNA, 82 bp, Homo sapiens
aagcccccgacagctcagccagacttcccctatggtgagaagccctaccactgcaactgggacggctgcggctggaagtttg

SEQ ID NO: 670630 - DNA, 75 bp, Homo sapiens
gcggtttcaaacggcttagagcaggccgcttggttctgacccagctgaggttgaactcccaccacctgatcttgg

SEQ ID NO: 670631 - DNA, 89 bp, Homo sapiens
cgcatcctatggctcaaagaaagatgattatgtgttaaaccgcctgacttttgcgtctactctttctcacctgcgtcgtttaaattctc

SEQ ID NO: 670632 - DNA, 83 bp, Homo sapiens
cccactaccgcgcctatctcctcaagtgccacgagctgccgttttatgggtcaaaatgcagatcttcgtgaaaacccttaccg

SEQ ID NO: 670633 - DNA, 80 bp, Homo sapiens
ctttggcaggaaggcgaggcttccgcccggcacaggggttggaatcgaagcctcttaaaatggcagatgacttggacttc

SEQ ID NO: 670634 - DNA, 75 bp, Homo sapiens
caaggacatcaacttccggccgcagatgtcccaggtagcagatgatggctatggagtttcctacatgattgcagg

SEQ ID NO: 670635 - DNA, 98 bp, Homo sapiens
gcgccgctcatccccctctcccagcagttcctgtgccttaagaacattagaaccttcctgtccacctgctgtgagaagttcggcctcaagcggagcga

SEQ ID NO: 670636 - DNA, 98 bp, Homo sapiens
cgggactaggagcttaagtgaagagctggcctcggaccccgccctgcgcagcaagctggtccgcctgtcctccgactctttcgcccgcctggtggagc

SEQ ID NO: 670637 - DNA, 90 bp, Homo sapiens
aatgaggcgcctgcctccccagcaaatcgagaaaaacctcagcgacctgatcgacctggctctggcacgttttgggggaggtgcctgcag

SEQ ID NO: 670638 - DNA, 82 bp, Homo sapiens
agaatccaccgccatccgccaccatggaggaccccgttctggagcgttatttcaaaggccacaaagctgcgatcacctcctt

SEQ ID NO: 670639 - DNA, 75 bp, Homo sapiens
tggtcccagagtcatcatgaagatatttagcttcctgtggtatactgatgagcagaactcttccactacatacct

SEQ ID NO: 670640 - DNA, 100 bp, Homo sapiens
tggcgctacggtctggccgtcggctgcggcgccatcgttcaaggagcagggacaagttacaggaatgttctccaagcagcaatccaaaagagtctcaagg

SEQ ID NO: 670641 - DNA, 97 bp, Homo sapiens
ggacagagacccaacagcttatgcattagctgaacatctttcagagttgtatccgatgagaacaagttgagcagtgccaacggccatgaagaacgta

SEQ ID NO: 670642 - DNA, 100 bp, Homo sapiens
aaagaggcaaagcaagcgagaagtcgcgggcccagcccacagcagggtcttgagtcaccacgtccgaatataattcttgggttagtaatctgccaaaaaa

SEQ ID NO: 670643 - DNA, 50 bp, Homo sapiens
gctgcttatggctataaaattacaggtactccaaagattcaggtttactc

SEQ ID NO: 670644 - DNA, 100 bp, Homo sapiens
caaggagctctgcatattgttcagctgtcaggaggaagcttcaagcacctgcatgctttccagcctcagtcaggtgctgagcgccgtcctcaaggatctc

SEQ ID NO: 670645 - DNA, 74 bp, Homo sapiens
ctctgcctccggggacaagaaactagagcaaataaccgttttgaaattagccctcaggactgcccccggaccct

SEQ ID NO: 670646 - DNA, 83 bp, Homo sapiens
gttttatttcgggagcaagggggctctgctgcatcttccaatcttccagggatgcctggtgtgcaggagtatatacaacagcc

SEQ ID NO: 670647 - DNA, 75 bp, Homo sapiens
ctggccaccacgggacaggaaggcaccacactgtaactcgaggcatcaccaaaggcgtgaaggaggactttcgcc

SEQ ID NO: 670648 - DNA, 75 bp, Homo sapiens
cctgcgagccgacaacgccttcatgctgctcacgcagtatccagaaggctacctggaagccctggccaaccgaga

SEQ ID NO: 670649 - DNA, 90 bp, Homo sapiens
agtaaatcttgcccaaagaaatgtagccttggaccgagacatgatgaagaaaggtctctgcatggattcccccagccctatggaccccca

SEQ ID NO: 670650 - DNA, 100 bp, Homo sapiens
ggatgattacagttcttcctaaaaaaggatcagcacgagcggaaccacatcgcagggtattggaagcaagtcggacccattgccgttggctccttctgcc

SEQ ID NO: 670651 - DNA, 95 bp, Homo sapiens
agctccggccgcctggctccccatactagtcgccgttaaccaaatggccaagggaaccactgaagaaatgaaatatgttctgggccaacttgttg

SEQ ID NO: 670652 - DNA, 74 bp, Homo sapiens
agaacctcctaagagtcacccaaacaatcggctgagaatgagaagaggttgcagtccatgagctgggaaaggag

SEQ ID NO: 670653 - DNA, 90 bp, Homo sapiens
ggagactgtgccgtggagggcctcgccatgtcctgctgcccgcaccagtatgcatgagcgggtgaaccgaacagaaagacagtttcgatc

SEQ ID NO: 670654 - DNA, 91 bp, Homo sapiens
cttgcctagtagcctcagccgctgtgggctcctggggagatggaggggccggggctgggctcgcagctgggatctagcaattgggaggcag

SEQ ID NO: 670655 - DNA, 50 bp, Homo sapiens
actttcgctatcgatctcctcattcagacacagtgccaacataaacctac

SEQ ID NO: 670656 - DNA, 75 bp, Homo sapiens
caggaggggcgagagggagccgcagctgatgtcagagccctatgagtttgtctctctggaatggctgcaaaagtg

SEQ ID NO: 670657 - DNA, 82 bp, Homo sapiens
ctttcttctctggcagctgcaaacgggcgctgacctcaaccagcaggctggaggacgtgtgccagtgttagacacactcata

SEQ ID NO: 670658 - DNA, 74 bp, Homo sapiens
gggctgtcgctcgtctacttcctcagcagcaccttcaagcagatggcgagcggctgcagctgcaggatgaggaa

SEQ ID NO: 670659 - DNA, 50 bp, Homo sapiens
ccacagggatcctaaaatctatagcagaccccacgttagctgaaatggga

SEQ ID NO: 670660 - DNA, 150 bp, Homo sapiens
tgtccaaagtggtgccgttttctcactatgctgggacattgctgctacttctggcaggtgtggcctgcctccgagaatgcaatgagagccactatggaacaccatgccaacagaggtgtttacccccctattcaagttcatgtcacgctg

SEQ ID NO: 670661 - DNA, 75 bp, Homo sapiens
gcggtccgacagagtcctccgtgtcctcccccgcatgacccccttgaaaaatcctgggtagaagctggatcagca

SEQ ID NO: 670662 - DNA, 98 bp, Homo sapiens
agaagaggtcccaatcccccactctttccgccctaatggaggtctccagtttcgatgccatggacaatattaccaggcagaaccaattctacgatacc

SEQ ID NO: 670663 - DNA, 106 bp, Homo sapiens
cagggcctgcagcgggagctggacggcgagcgcgagcggcgcgagaaaccatcccaggcctcaggacctgagttctccgacgcccacatgacatggctgaactttg

SEQ ID NO: 670664 - DNA, 51 bp, Homo sapiens
tgctccggggaggtcacctgacgaggagcactttcatttggacccgtggat

SEQ ID NO: 670665 - DNA, 83 bp, Homo sapiens
cttagctgtgctcgcgctactctctctttctggcctggaggctatccagcgtgtccctacctgcaccggacgacgggggacac

SEQ ID NO: 670666 - DNA, 50 bp, Homo sapiens
cgtgcttcaaggatgcagagtatatttgctggcctagacctgaactcttc

SEQ ID NO: 670667 - DNA, 100 bp, Homo sapiens
tcactctctcgggattattgccgattgccagggtgctgaccgtgggagccgaccgagaataagaagatctacttggacattattcacacatacatggaag

SEQ ID NO: 670668 - DNA, 90 bp, Homo sapiens
tcaagtaccacgcgggcacctatatggctcgtggacagcagaaaattcagtctcagcagaaaaatgccaaaaagcaagctggacaaaaga

SEQ ID NO: 670669 - DNA, 83 bp, Homo sapiens
ggccgctgctcaagttccagatttggattttttatcaagcagaaatgcatcgaacaacgagaatcaagatcactgagctaaat

SEQ ID NO: 670670 - DNA, 80 bp, Homo sapiens
aaaggcattttcggcttcactgacagcgactgcattgcacaagtgaagctgatgtggaggctgtcatggataagttgttt

SEQ ID NO: 670671 - DNA, 100 bp, Homo sapiens
attactgtattatcaccaccccagatgacctggaggggaaaaatgaggactcagtggaactgctggtgttgggtgcagtcgctttcaatctgaaatcaaa

SEQ ID NO: 670672 - DNA, 76 bp, Homo sapiens
aacccgtgtgactttgactgggtttcccaagccggctgtgcaccccaggagagatggtgaagttcctcactgcaat

SEQ ID NO: 670673 - DNA, 83 bp, Homo sapiens
ggaggagctgtgcagccgcgaggaggcgcgggaggtgttcgagaacgaccccgagacgatggagaaggaggagacaacccggg

SEQ ID NO: 670674 - DNA, 50 bp, Homo sapiens
tttatcctcaagagtcagctggcaggcatatgggcaacaaagctatggaa

SEQ ID NO: 670675 - DNA, 82 bp, Homo sapiens
gcattgactggaaacaatggcatttacagaaagagtcaacagcagtggcaacaggtcaaaatgcagatcttcgtgaaaaccc

SEQ ID NO: 670676 - DNA, 82 bp, Homo sapiens
aggtcagcgtgggcagttctatcagtgttaatctcaggggcgatataatcaatgaggtggtcctaaagttgctcaaggctgg

SEQ ID NO: 670677 - DNA, 100 bp, Homo sapiens
ggaaccgtggctcacgagctgcagggagtgcaccaggaaagaccacagcaagattctttcattcgtctcctcctagcctgggggaccaggctcgaactga

SEQ ID NO: 670678 - DNA, 82 bp, Homo sapiens
cctgcgaccgccctgcgcttcgtgcaccggggcggtccgttgccaaagccaggtcaaagttggaaattgtaatactcctaaa

SEQ ID NO: 670679 - DNA, 87 bp, Homo sapiens
agcacagtcttgttacccagtaactaccaaacatgaatgtagtgacaagctggcccagggcctgttcacaatgagcttgcattccag

SEQ ID NO: 670680 - DNA, 101 bp, Homo sapiens
gtcccgcgccccgagaccgccgtcgctcggacgctcctgctcggctgggtcttcgcccaggtggccggcgcttcaggtaacggaaggccattggaaatggg

SEQ ID NO: 670681 - DNA, 75 bp, Homo sapiens
tgctgccagggtccctgaagagggaagacacgcggaaacagactatagggtatgaccccatcatttccccagagg

SEQ ID NO: 670682 - DNA, 100 bp, Homo sapiens
tgcaatcttcaggaaagtaagaggagatttaccgcattgtttctcagaagcaaatgtcagacagacgcgaaaatgacatgtctccaagcaacaatgtggt

SEQ ID NO: 670683 - DNA, 50 bp, Homo sapiens
agctcatattttgaagtgtttacgggcttactcaattccagatatggccg

SEQ ID NO: 670684 - DNA, 98 bp, Homo sapiens
caaaactgtacaatctaaagtggactgcattttgacacgaatgcagagtttgagtccagatcccaaagcccagtacacaagtatctacggagccctca

SEQ ID NO: 670685 - DNA, 100 bp, Homo sapiens
ctcagcggtgttggaacttcgttgcttgcttgcctgtgcgcgcgtgcgcggacatggcctcaaacgcccgagggcaacatccttcgagaccggttcaaga

SEQ ID NO: 670686 - DNA, 100 bp, Homo sapiens
gcaccaactgcagctggtacatccagggcgaccgtggtgacatgattaccatcagctctgaaatagaaaatgtctgcagacggcggaggcatccaggaca

SEQ ID NO: 670687 - DNA, 75 bp, Homo sapiens
tgtttgtggatcgctgtgatcgtcacttgatgttcgcacacaagccatgtaccagatgatggatcaaggctttgt

SEQ ID NO: 670688 - DNA, 75 bp, Homo sapiens
gaaaaagcaagagtttgttatatagcagcactgtacaaaacgagttaaacagacatggcccttgccccctgggag

SEQ ID NO: 670689 - DNA, 100 bp, Homo sapiens
gcctgtggcccacagatccaatagagaccagagggtgcttgccaggtgtcagttgtacccgaggcgttctcagcagcagcaagtacctgtggtggatttc

SEQ ID NO: 670690 - DNA, 96 bp, Homo sapiens
agcgtggagacccgtctgttatttctgaagtggttctgaaagatggaagaattgaaagactaaagttagagcttgaaaggaaagatgctgaaatcc

SEQ ID NO: 670691 - DNA, 50 bp, Homo sapiens
gtcagcacccagactggcagcatgaccggactatgctgagaaggaaaata

SEQ ID NO: 670692 - DNA, 100 bp, Homo sapiens
cctgcgcgaagctggccaaagcctgcccagacggctcacctgtgcgggatggaacaaaagtgctgccagaccctagtctcccaccacgtggacccctccc

SEQ ID NO: 670693 - DNA, 101 bp, Homo sapiens
agccaaggcgactgcttaacacactgaggcatggaggagtgacggcaggaactttctgtgctctgacaacccttatgcaccaactagaaaaagaaaattcc

SEQ ID NO: 670694 - DNA, 50 bp, Homo sapiens
tttcggaaatgcccttacagcagcagatcctgcccggcctgtacatcggc

SEQ ID NO: 670695 - DNA, 100 bp, Homo sapiens
tccccgccgctcccgggggccgtgacggaaacttggatttaactggccagaagcaggtattcaaagcagagaacaatccctgggtgacccccattgcaga

SEQ ID NO: 670696 - DNA, 83 bp, Homo sapiens
cttggactgagtcctgcaggacacagttggaactgataatgggagagaagcaattgaaagtggggctgcatttctcttcatga

SEQ ID NO: 670697 - DNA, 82 bp, Homo sapiens
aaatatgctgctttcttgtcaagagccaaaagaactatgaaagtaccagatatggaactgcaagcacatgttgaccagataa

SEQ ID NO: 670698 - DNA, 78 bp, Homo sapiens
tgagtcaaataaacatttgtgctatgtatttgacagcgaaaagtgttctctgctggatgaaccgaatcctaacagtcc

SEQ ID NO: 670699 - DNA, 100 bp, Homo sapiens
gtgaaggaactgagcctgatgaagggcagccagggccaaatccatatccccccaatattgggtgccctggaggttccaatcctgcccacccaccacctat

SEQ ID NO: 670700 - DNA, 82 bp, Homo sapiens
gtgcctctggcagtgacgaggacgaagtgtccgaggtaatctgtaagtcagatgctccaacaggggatgttcttcttgatga

SEQ ID NO: 670701 - DNA, 100 bp, Homo sapiens
cgccggagcttgaatcgttttaataacatagctgatccagaagaactgttcacaaaattagagcgcattgggaaaggctcatttggggaagttttcaaag

SEQ ID NO: 670702 - DNA, 109 bp, Homo sapiens
gaaattccagaggatatcagtgacagagatgatgatttcatttccaatgccgagttcctgttctgggcttcgctgtgcatgacccatctcagcaggatggccgaggacc

SEQ ID NO: 670703 - DNA, 50 bp, Homo sapiens
ccgtctcgtggcgcctcctgtctgtggggagctcaaagaggcccatgaag

SEQ ID NO: 670704 - DNA, 90 bp, Homo sapiens
aaaaaccatcagtgtttgggaatgattctgatgatgatgatgagacattcacggcatggtgtaactcccacctccggaaggcggggacac

SEQ ID NO: 670705 - DNA, 90 bp, Homo sapiens
gcgtgcctggttacagctgtttccacgtgcggtgctcgtcgggagtgatcacctaccctacagattagaagcccaggacccaggaaggag

SEQ ID NO: 670706 - DNA, 49 bp, Homo sapiens
gagccctccggccagcggggagcgtggatgcaactagagagacaaatcg

SEQ ID NO: 670707 - DNA, 101 bp, Homo sapiens
ggagagaagcggatcccgtccgagccccggccccaagtaacgccgccgccccggagccgccggagggatataagaccttcttcaacacactctaccataac

SEQ ID NO: 670708 - DNA, 75 bp, Homo sapiens
accaaccctgccagcacctggaccttggacattcagacttcagaatggtggagatgttacagccaaaaatatctg

SEQ ID NO: 670709 - DNA, 71 bp, Homo sapiens
gcaagcttagagcgtctggccaagaatcagaggaagtggccacagtacacgaacctggggctcctgaacag

SEQ ID NO: 670710 - DNA, 80 bp, Homo sapiens
ccacaatttccatcaaaaagtgattaagcagagaatggagaagaaggttgattccagacaatgcagatcttcgtgaagac

SEQ ID NO: 670711 - DNA, 115 bp, Homo sapiens
aaataacatgccagagtttttactaagaagtatgaaaaaggaacccctttcttctacagcaaaaaaggtcaaaatgcagatcttcgtgaaaacccttaccggcaagaccatcacc

SEQ ID NO: 670712 - DNA, 75 bp, Homo sapiens
gggctgggatagcgcgagtgtccgcggccgagcagcagctctctattggaggcatcatcattctgaaggatacca

SEQ ID NO: 670713 - DNA, 50 bp, Homo sapiens
ttggatggtaccaactgctcaagaagttgaaaacaccacacactgtgagt

SEQ ID NO: 670714 - DNA, 101 bp, Homo sapiens
tcatatcaaggtggaaggcagctgaagggttcttcatcactaggaactggctctcctagaatacaactaataacactaaaaggatgatggacagcagcctg

SEQ ID NO: 670715 - DNA, 82 bp, Homo sapiens
gccaaactgtggagcctcttctgtaaccaagttgcaagaatgtagtaactctgatcagctacaaggaaaggaggaaagagta

SEQ ID NO: 670716 - DNA, 98 bp, Homo sapiens
aagaactacagctcatcaggaggagatcgcagcaggggccaattcctgtccccccagcagcatggcatcgtgtgctgaaccctctgagccctctgccc

SEQ ID NO: 670717 - DNA, 50 bp, Homo sapiens
ctcagacagtacaggaagacttgaggatgcttgctctgtcaaggcacagc

SEQ ID NO: 670718 - DNA, 100 bp, Homo sapiens
tcggtgcaccaagagcagcctcacatggtgtgggccgacatcaagagctgcgagatccaacagggtagatatggattcccagtttctccagcggccagtg

SEQ ID NO: 670719 - DNA, 80 bp, Homo sapiens
taaggaaagtactgtccaaatgaattatgtcagcaacgtatccaaggaattgaatgatctggcacgggaccctccagcac

SEQ ID NO: 670720 - DNA, 75 bp, Homo sapiens
tgagtggttgtgtggtcgcgtctcggaaaccggtagcgcttgcagcatggaccgcctctttttcgtcatggaata

SEQ ID NO: 670721 - DNA, 100 bp, Homo sapiens
gatcatgaaagagatcctggacctatgaatatccagtttgagccatcggatctaagatccaaaagaattctccactttaccaatacttacaggatctggg

SEQ ID NO: 670722 - DNA, 87 bp, Homo sapiens
tggtggaggtgacccatgacctgcagctccctggaattcccatgccaccaccacctttgggactcccccctctgcagcctcctccgc

SEQ ID NO: 670723 - DNA, 100 bp, Homo sapiens
actccccagggcagaaatagcgaccatggcgagtgcctacaccaactaatgttacaattgaatcctataacatgaaccctatcgtatattgggagtacca

SEQ ID NO: 670724 - DNA, 100 bp, Homo sapiens
taaaagcacagttttaagagagaatcccctactttgaaactagtgctgccaatgggacaaacataagccaagcaattgagatgcttctggacctgataat

SEQ ID NO: 670725 - DNA, 90 bp, Homo sapiens
acacccccgacggcgtgaagtggctggacacacagggccccaggccagcccaagatcgaccacctgcggaggctgcaccttggcgcttgc

SEQ ID NO: 670726 - DNA, 75 bp, Homo sapiens
ctcaactatcgggttggagtgctagattatgatgaagatgactatgatgctgattgtgaagacattgattgcaag

SEQ ID NO: 670727 - DNA, 75 bp, Homo sapiens
cttgcacataccacccaggtgttccggtctttcacgatgcattaaagatggagtttcactcttgtctcccaggct

SEQ ID NO: 670728 - DNA, 78 bp, Homo sapiens
aaattggatcttacacttgaaatacagactgttggggaacaagagagcattagtttggatgaattcaagtcattttgc

SEQ ID NO: 670729 - DNA, 100 bp, Homo sapiens
ctcctctccgctccgcatggcggcagcggcctgcacaccaagggcgcccttcccctggatacggtcactttctacaaggctcctgaaggtcaaaccggag

SEQ ID NO: 670730 - DNA, 75 bp, Homo sapiens
attctgcttggaaggtcagctctgagagagctggatgttttagaagaatgtatgtctcttcccaagctatcttct

SEQ ID NO: 670731 - DNA, 90 bp, Homo sapiens
ctgggatccagtacgagttgaatcattgttcaaataagctgtggtcgccaggacccccccagagccaagaccttctccagaaggtgaccc

SEQ ID NO: 670732 - DNA, 98 bp, Homo sapiens
gcgggctcggcatcagcgggttcacgagtgggcttggtgaggcaacagcaggcctttcctcacgccagaacaatgtcaccaccaagtaagcgaagaaa

SEQ ID NO: 670733 - DNA, 75 bp, Homo sapiens
tgcaccctgcttggagacggacttgcttccgtatgtctggacctaatagctcttcagaatggtccattgaaggtc

SEQ ID NO: 670734 - DNA, 90 bp, Homo sapiens
caaagtgccatgtctttaatggcagagcggcttgggtaaatccaccttaatcaacaccctcttcaaatccaaaatcagccggaagtcggt

SEQ ID NO: 670735 - DNA, 100 bp, Homo sapiens
gcagaacttgaaggttaaaccactagcccatttcacaggtgcctgtgtcagtggccatgatgactccccaggtgatcacccctcagcaaatgcagcagat

SEQ ID NO: 670736 - DNA, 83 bp, Homo sapiens
ctccgcaaagcgccgcggccgctacgatgctgaacatctccttcccagccactggctgccagaaactcattgaagtggacgat

SEQ ID NO: 670737 - DNA, 83 bp, Homo sapiens
ccccgagctgctggagaactgaaggcggacagtctcctgcgaaaccaggcaatgggccctgggctgcatcttgtacctgctgt

SEQ ID NO: 670738 - DNA, 98 bp, Homo sapiens
ttccaggtagacatggaggccgtcggggagacgctgtggtgtgactggggcaggaccatcagggtgaggtggctttgaccccgggttgcccggccagc

SEQ ID NO: 670739 - DNA, 100 bp, Homo sapiens
ggggggattctcgacctgctaacagaactggaccttttcggcacgtgtggttctcaaatataggcattctgatgggaacttgtgtgttaaagtaacagat

SEQ ID NO: 670740 - DNA, 82 bp, Homo sapiens
ggtgcaggcgctgcgccgcaacgccgagcgcaccgacatctgcctgctcaaagggacccagacatggagctgcgggaagaag

SEQ ID NO: 670741 - DNA, 124 bp, Homo sapiens
tgtccagcttcggaggaaatctgacttggaaactagtgaaccaaaacctttcctctactatcctgaaatcaaagtttcagaatggcttcggttattgcctttccttggtgtactcgcacttctt

SEQ ID NO: 670742 - DNA, 109 bp, Homo sapiens
ttgttctccatgttttcagggcctgacctcgttgctgctgtcaagcagagaagcgcctagaacactgcctgtaacgtggaaggtgttcgatctatagagttttgtcgaa

SEQ ID NO: 670743 - DNA, 75 bp, Homo sapiens
gtgcccttgagactcggcacgagcaggaacccctgaaaagcaaaggcctcatctccatggcacaggtgatgaaac

SEQ ID NO: 670744 - DNA, 79 bp, Homo sapiens
tcacacttactatcaggtgctgattgatgctcgtgactgcccacatatagttttgagaacagagtgctgttttagagct

SEQ ID NO: 670745 - DNA, 83 bp, Homo sapiens
aaaacttcttgccaaccaaagtgagacatggaatccattaaaattgcattatcagttaagaaatgtacgggaacgattagcta

SEQ ID NO: 670746 - DNA, 80 bp, Homo sapiens
gtgagggtgtacaaatacccctttgaattaattatggctgtgaccattgtgaggtagatattttgttctaattttccaga

SEQ ID NO: 670747 - DNA, 100 bp, Homo sapiens
cagctgaaaatgtggggaagccaacaatcattgagatttatcgaggtgtgagagtcggagggttgaaagagtctgcagtgcattctcagtataagaggtc

SEQ ID NO: 670748 - DNA, 98 bp, Homo sapiens
ggcaacgctgtgaccctgggagattactaccagggccggaggattaccatcaccggaatttcatcaagaccaacttctcctgaaaaattttcagtgcc

SEQ ID NO: 670749 - DNA, 75 bp, Homo sapiens
ctcgtcggcggcgccctgcaccgcgcctcgcaaagcctcatggcggtccgagcttcgttcgagaacaactgtgag

SEQ ID NO: 670750 - DNA, 90 bp, Homo sapiens
cagattttgaagctaaagttaagcaggaccctcactacgtccagcaggcgctgaccaacgtcttgctgatggacgccgtcgtgggcacac

SEQ ID NO: 670751 - DNA, 92 bp, Homo sapiens
cccggattactatctcaaaaactatgaggatgattcttgaagacctggatgaacaaatttatatcattaccttagaggaagaagcactccag

SEQ ID NO: 670752 - DNA, 74 bp, Homo sapiens
gctttactcattttatgatctggagtcaagcatctggccatctgaagaggttttggcttactactgcctcaagc

SEQ ID NO: 670753 - DNA, 75 bp, Homo sapiens
caacaagtgttgttaaacacaaaccaccctttaaattttcaagggaaggacagaccagtgtgcttttcttggaga

SEQ ID NO: 670754 - DNA, 100 bp, Homo sapiens
catggatgggcacactgtgggggtgtcctggtgcacccccagtgggtgctcacagctgcccattgcctaaagaaccagcagggctccagcgggggagcgg

SEQ ID NO: 670755 - DNA, 82 bp, Homo sapiens
ctgcgcgggctcgagagctcgccccgaacgggggtcttcctcctccgccgttgacagatggtcagtaggacagaaggtaaca

SEQ ID NO: 670756 - DNA, 82 bp, Homo sapiens
cgccgccctcgcaacctggcagccgccgccgtggaagggtgtgtttgaccatcgaatgaagtgctggcagaaatgggaagat

SEQ ID NO: 670757 - DNA, 76 bp, Homo sapiens
ccggactctgctcaacgccagccggagcctagaagtcagctatgtggaggtgctgaaggtggggaggacccagctg

SEQ ID NO: 670758 - DNA, 83 bp, Homo sapiens
gccacccgcctcccaccatggctctgaagagaatccacaagtgagaaagatcagtctaaagaaaaggagaagaaagtgaaaaa

SEQ ID NO: 670759 - DNA, 75 bp, Homo sapiens
cagccccagttatgtggacgagctgttaaaccagttttctggatatgccgcagaaggatccgtgccagaagcaag

SEQ ID NO: 670760 - DNA, 140 bp, Homo sapiens
caccatccacgccagccgcaccatgccgctcctaagcctgcacagccgcggcggcagcagcagtgagagacaatgcagatcttcgtgaagactctgactggtaagaccatcaccctcgaggttgagcccagtgacaccat

SEQ ID NO: 670761 - DNA, 90 bp, Homo sapiens
cgttgccaaccacctaactgccttccactgggagctgttccgatgtgtgcatgagctctatcgtccgagctttgtgcacccaggggctgc

SEQ ID NO: 670762 - DNA, 100 bp, Homo sapiens
attgagcaggctacagtccactccagcatgaaaaaatgcctgtcttaaaggctgaagcgtcacattataactctgacttaaataacttgctgttctgctg

SEQ ID NO: 670763 - DNA, 100 bp, Homo sapiens
ctgccgaggaccttctgggcccccacattaatgaggagtgagctgagtcgacagaaacttcatacccaagagctgctttctcagctggaaatggcaaatg

SEQ ID NO: 670764 - DNA, 96 bp, Homo sapiens
gggagagcatcggaagcttcactgaatagccctcgaggtggctgcaaaattcgggttcagggggactggatcagagagcgccgctttgaaatccct

SEQ ID NO: 670765 - DNA, 101 bp, Homo sapiens
cagataagcttgacattacagccaagatggtgctgtcccagagacaacgagatgaactcttcccaagctcttccttcagtcccacgactacagtctgtatt

SEQ ID NO: 670766 - DNA, 100 bp, Homo sapiens
agaaacctggatctttgctagaaagagaggaaatgtgtcatggagtgggaggagccccacgacagcaccctgtactgcctgcagacagatggcaaccacc

SEQ ID NO: 670767 - DNA, 90 bp, Homo sapiens
tggtttactggcataattactcatcatgatctcttcacccgcaccatgatcgttatgaatgatcaggttcttgccagttacataaatccc

SEQ ID NO: 670768 - DNA, 82 bp, Homo sapiens
cttcaacaagaggacccaggagaaattcgccctcaaagtgtccctggccagtgtccttccacctgtccacaagcatggggaa

SEQ ID NO: 670769 - DNA, 82 bp, Homo sapiens
ggacgcgcgctgctgccgggttcacacgacgcgctgctgccgcgattacccggctacgagttccagggagctctgtcctggt

SEQ ID NO: 670770 - DNA, 82 bp, Homo sapiens
gaaagatttgaagcactacaaacaagcagctgagtgaccaagaatatggcccaggtgaccaaagccctggacaaggccctga

SEQ ID NO: 670771 - DNA, 100 bp, Homo sapiens
acttaaaaaaacattggaattctgcttatctaggtgctaagtgtggtggctcacacctgtaatctcagctacttgggaggctgaggcagaagaatcactt

SEQ ID NO: 670772 - DNA, 83 bp, Homo sapiens
gcatcgtctgcactccccatacaggtgtcgtgaaaactacccctaaaagccaaaatgggaaaggaaaagactcatatcaacat

SEQ ID NO: 670773 - DNA, 75 bp, Homo sapiens
tggggagatcacagtccatgccaagcttactgtcctccgaggtcaccaaggaagaaggattggccttggcccgag

SEQ ID NO: 670774 - DNA, 85 bp, Homo sapiens
agactgggggcgagctgagcacctgtagtcaatcacacgcaggtgtcatggagaaactccagctgggcccagagattctgcagcg

SEQ ID NO: 670775 - DNA, 100 bp, Homo sapiens
ccttgcccgccgggtgaacctcaccgaggcgagagtgcagaagtcataaggacgaggctccgggaagagggcaccaagtacaagtcttttgtccagacgg

SEQ ID NO: 670776 - DNA, 74 bp, Homo sapiens
tggaggaggaggatgaatttgatagagaggatgggaagcacaaaatgcaagaggaaaatgttaaactaaaaaag

SEQ ID NO: 670777 - DNA, 74 bp, Homo sapiens
ctggaattacattgaatatacaggcagctgtgtcaatgttgaaacaagactataaagaaggagaaatgaccttg

SEQ ID NO: 670778 - DNA, 75 bp, Homo sapiens
gaagtcaattcaaaggacctgcccccagagagagatcgcgtcttcgccaggaggactttcccccgcggattgtgg

SEQ ID NO: 670779 - DNA, 75 bp, Homo sapiens
tagggcaaggtatcatctggtggataaagatcatgacaggcctatatgaacccaatagcaatggcgagatcaagg

SEQ ID NO: 670780 - DNA, 98 bp, Homo sapiens
aggcctaagaattttggcattggccaggagtggtggctcacacctgtaatcccagctctgggaggccaaggccagtggattgcttgagcccaggagtt

SEQ ID NO: 670781 - DNA, 76 bp, Homo sapiens
tctgggtcttccgaggccaggagcttgcctttccggtcatggaaaatggaagatttgcaaaatacaaatattttac

SEQ ID NO: 670782 - DNA, 96 bp, Homo sapiens
gacagaagctcctaggcatgtttctgggacaaatgaggaggagatgttaaagtaacccatcttgcaggacgacattgaagattggtcttctgttga

SEQ ID NO: 670783 - DNA, 100 bp, Homo sapiens
ggccgggagctcctggtcatcgagctgtccgacaaccctggcgtccatgagcctggccttgcaattgccagtgccctaatagatatttcacaacagaaag

SEQ ID NO: 670784 - DNA, 110 bp, Homo sapiens
tagtggtgaaggtggaaaaggctataccaaagaccaagtagatggagttctcaggttggcaaaagcagcttttgatgatgcaattgcagaactggatacgctgagtgaag

SEQ ID NO: 670785 - DNA, 97 bp, Homo sapiens
accataaagagaaagctagtgaatgggaaaatgagactaaggtgtcagtatgttcttcaagctgctctgctcctgggcccaagctattctcctgcct

SEQ ID NO: 670786 - DNA, 75 bp, Homo sapiens
ctttgtatctcatgccacggccaaattcagtagcagattagccgatgaattacatatgccatctctccctgaaat

SEQ ID NO: 670787 - DNA, 100 bp, Homo sapiens
cggcatgcccagggagaaaaaactgcaggcattaatgtccgaaagagtcaactactggattttctgtctggcaaacagtatgcagtaggtgatgaaactg

SEQ ID NO: 670788 - DNA, 90 bp, Homo sapiens
caaaattggtgggttcttggtctcactgacttcaagaatgaagccgtggaccctcacggaagcaggaagagctggtgcagcaggtgcgga

SEQ ID NO: 670789 - DNA, 100 bp, Homo sapiens
cattcagaatttgaccatcttggtgagaaacattaagacctactaccaggtgaactgcgccaggccactgtggccatgatgaacaggaaggatgagctgg

SEQ ID NO: 670790 - DNA, 75 bp, Homo sapiens
cggcgaggagaaccaactggtcccgaaagagttttgtcagcctggcgggtggcagctgtccagagagaggaagca

SEQ ID NO: 670791 - DNA, 100 bp, Homo sapiens
gtacgtggaggacccggccggacaccaggaggaggagtataagctgatgtacgggatgctcttctctatccgctcgtttgtcagcaagatgtccccgcta

SEQ ID NO: 670792 - DNA, 101 bp, Homo sapiens
tggcatcgcctgagcccgggacggcagcggcctggggacccagcaagggttcaggataagtttgaggtgctgaattacacaagcattcctatctttctccc

SEQ ID NO: 670793 - DNA, 75 bp, Homo sapiens
tcagacagcatatttgagtcatttccttcgtacccacagtgcttcatgagagtgatgctattgctgagattagag

SEQ ID NO: 670794 - DNA, 83 bp, Homo sapiens
gtcagccacgccctcacggaagattctggaccctaacactggggaaggcactgatcctgaaactgaagaccccaaccacctcc

SEQ ID NO: 670795 - DNA, 100 bp, Homo sapiens
tccagttggaattgaagaatattcccaagtccttcacccgggtgccacatctgccccattcctcatcttcatcttccctgccatcttctacttccgaatc

SEQ ID NO: 670796 - DNA, 100 bp, Homo sapiens
tgttgcatttggtaatttagcagaacttggagtgttcagcctgggtgttcctgtagatgctctcttctttattggtaaccagttggtggccacgagtcat

SEQ ID NO: 670797 - DNA, 75 bp, Homo sapiens
tccagcttctgctgtccttctttgtggagagcaagtgggctcgggatgagtttgaaggcctcttcaagcagccag

SEQ ID NO: 670798 - DNA, 75 bp, Homo sapiens
ggcacccagacaggtggcgacggcagaggactggtgagcgacctgctggaattctgcttctacaccttccgagag

SEQ ID NO: 670799 - DNA, 100 bp, Homo sapiens
gcagcatctacaaccctgaagtgcttgatatcacagaggaaactctgcattctcgcttcctggagggccagccagtgaccttcagtgaggaagtcttctt

SEQ ID NO: 670800 - DNA, 100 bp, Homo sapiens
ccgcggaggaggaggaggtggagttgctgcccttccggagtccgccccgtgaggagaatgactggcattgctcgggtaccacttgctggagctgctggag

SEQ ID NO: 670801 - DNA, 59 bp, Homo sapiens
agacctggtggaggtgttaaatgaaagagtaaacatggaagtactaacttcattccaga

SEQ ID NO: 670802 - DNA, 75 bp, Homo sapiens
tctttaaatatgcggaggccgccaggcggctcatcgagtccaggttgaaggggcccggccaggactcggggaagg

SEQ ID NO: 670803 - DNA, 74 bp, Homo sapiens
ggccagatcggcttcatgctgtgcagcaagaacccggtggtgtgtgatgagaacggctctaagggttatgcctt

SEQ ID NO: 670804 - DNA, 100 bp, Homo sapiens
tggcgttgtcgatgccgctgaatgggctgaaggaggaggacaaagagcccctcatcgagctcttcgtcaaggtacacagcttctcctagcatgacttcga

SEQ ID NO: 670805 - DNA, 89 bp, Homo sapiens
ctgcagaaatatcagctagaaccatgcagtcaatgcagctcaacaaggacacagtgtgcaaaccttgccttgcaggctacttctctgat

SEQ ID NO: 670806 - DNA, 100 bp, Homo sapiens
tgtgcgcatttccattatgagaatgttgagttcggcagcatacaggccaaagatgaagaggaagcctttctggattggagtgatgatgatgatgatgatg

SEQ ID NO: 670807 - DNA, 75 bp, Homo sapiens
aggcagaagaaatcttggagaagggtctaaaggacgagattgaggagctgcgggccgagatgctggagatgcggg

SEQ ID NO: 670808 - DNA, 75 bp, Homo sapiens
tctagatgccctcaactatgctctccgctgtgtccacagcgttcaaggctggaaattgaatccagttgtgggtgc

SEQ ID NO: 670809 - DNA, 100 bp, Homo sapiens
ggggacgccggcgagactcgccaggagccaagagctaagaagaaatttcctgacttgtttgtcttcttggaagattcctcctcatgtctcaaaatcttcc

SEQ ID NO: 670810 - DNA, 86 bp, Homo sapiens
gcaaggagctaaagcagcgtgcgttcagccctggggtctcaccaacggctttgggggtgcgaggagcgagcaggagccgggcggcg

SEQ ID NO: 670811 - DNA, 85 bp, Homo sapiens
ccatcccttccgaggcccgacttcggtgggtctacatcccctttcagcagccccatcacctccgacgaggaatacctgagccccc

SEQ ID NO: 670812 - DNA, 98 bp, Homo sapiens
ccctctccttttcgtttccggaaacatggtgtggactggatgaacaaggtgatggcacgtttcgtgaggggggatgcccggccggccgagatcgactc

SEQ ID NO: 670813 - DNA, 100 bp, Homo sapiens
gacacagaccccaactctgtccattctatccccagaagtagccctgaagggggtggcttccaccactgctccagcgaccgtggcgggggcttctgtgcct

SEQ ID NO: 670814 - DNA, 96 bp, Homo sapiens
aggaatcagaatcgagagggcctgagggccctgcagaaggatctcagcctctctggaatgatgagaagacagcagctgattacaagattttaggtg

SEQ ID NO: 670815 - DNA, 98 bp, Homo sapiens
aggggcaagccagccatcctgggaccccaggcgtgcaggttctctttgagggttccagcaacagatagaaatgctttaagttcactctggggaaagct

SEQ ID NO: 670816 - DNA, 85 bp, Homo sapiens
caagatcaccgtgacatccgaggtgcctttctccaaaaggctatgtggaggagatatagagccaagaaatatttatgtaaagtga

SEQ ID NO: 670817 - DNA, 74 bp, Homo sapiens
cctgatcaagcgggcacggctggccaaggtgaacggcagcgagcagacagtggttgccttcttcatcatgccag

SEQ ID NO: 670818 - DNA, 90 bp, Homo sapiens
agatgctgagctatctggagacagctgactactccatccgagaagagatttaatctatgccagcaattatgacaatgttagcagaccatg

SEQ ID NO: 670819 - DNA, 50 bp, Homo sapiens
cggtttgaacctcagattaatgcggaggggccatgctatgatagtggaag

SEQ ID NO: 670820 - DNA, 100 bp, Homo sapiens
cctgcctgagttgccgttccctgagctggagcgggtgctgcaggcgccgccgccggacgtcggcaacggagaagtagctgctgctggtggtgacaatgtc

SEQ ID NO: 670821 - DNA, 100 bp, Homo sapiens
catcgattgcatcagcaatgtggcgcacgaatttatagagcggcagcacgcaaagaacaggtattactactaccaccggcagtaccgccgcgtgccagac

SEQ ID NO: 670822 - DNA, 75 bp, Homo sapiens
tgaaagtggacaagtgctctcgacaggacaccgtcttcatgaagaaggctggatccagacccctttgtgcggcac

SEQ ID NO: 670823 - DNA, 73 bp, Homo sapiens
aatcccagggaaaggattgcaatcaccacattataaggtatgtgcaagaggtgaaataattggcgtgaaagtt

SEQ ID NO: 670824 - DNA, 105 bp, Homo sapiens
cagatggcggatgccctgcagtacctgcagaaggtctctggagacatcttcagcaggcctgggttctgaggaaaacgcaatggtggccatggacttgggctctcc

SEQ ID NO: 670825 - DNA, 97 bp, Homo sapiens
tgacattcaaccgtacccgccaagctgtcatcacaaaagagttgattgaaattatctctggtgctgcagctctgtacaaacccgtagtgctgatgaa

SEQ ID NO: 670826 - DNA, 75 bp, Homo sapiens
ggagtcgagtctagaattcacacagagccacctaggccatgaccacaatgtttcttcagtagccatcatgcccaa

SEQ ID NO: 670827 - DNA, 83 bp, Homo sapiens
gcaacacacctggaggctttctgcttcactactgcctcttggccgtcacgcaaggagctattgtgacaatcttggttaccatc

SEQ ID NO: 670828 - DNA, 83 bp, Homo sapiens
cgcgtgctaatggtggaaacccacaacggtcctctccacccggatcctggccatgaaggcctcgctctgcaagctgtcgccct

SEQ ID NO: 670829 - DNA, 75 bp, Homo sapiens
ccctcaacacggaccgcgcccgccgggcacacaagaatggtcactactgtccaggacggccggcagtttctaaag

SEQ ID NO: 670830 - DNA, 98 bp, Homo sapiens
cggattcatttagagctgcggaacaggacgccctctgatacaggcaggattgaacccaactaccccaaggtctgcggccaccagggcaatgtgctgga

SEQ ID NO: 670831 - DNA, 80 bp, Homo sapiens
tactactactactacatggacgtctggggcaaagggaccacggtcaccgtctcctcaggctggaatgcaatggtgtgatc

SEQ ID NO: 670832 - DNA, 90 bp, Homo sapiens
agtcaaagtggttatcccaacagaaagaaaaagcttgtggtgaaggggggcaaaaaaaagaagcaagttctgaagttcactcttgattgc

SEQ ID NO: 670833 - DNA, 100 bp, Homo sapiens
cctgggcagtggctacatcggaagagtcttcggcatcgggcgacagcaggtcacagtggacgaggtgttggcggaagtttgtgaagtgtggatatgcagg

SEQ ID NO: 670834 - DNA, 73 bp, Homo sapiens
ctttgatgacttttaatctgtatgaagaatggacacaagttgcaaggacacaactcagatgggaagttcatcg

SEQ ID NO: 670835 - DNA, 90 bp, Homo sapiens
ctgaactcaacttctgaaatttacagaaacaaactacatctcagggaaccaaccggtgagccctctcctaagagacccaggggaagaccc

SEQ ID NO: 670836 - DNA, 100 bp, Homo sapiens
atcatccatgtgagtgaccatgcagcaaaagaaggagggtcctctcagtgattaaggagtatgctgctgctgttccgctttgcgtcctcgctacaaacgc

SEQ ID NO: 670837 - DNA, 98 bp, Homo sapiens
ccagagtcacacacggtcctaagagctgggcaccaggaagcgaaggctgtggctgccttttctctatcctctttcctttattcattatcagcgccaat

SEQ ID NO: 670838 - DNA, 76 bp, Homo sapiens
gctgtcttcccgcttgcgtcagggacctgcccgactcagtggtacatgtcccttgctgtgtgtgaacttgaccagc

SEQ ID NO: 670839 - DNA, 49 bp, Homo sapiens
gcatgcccatacgattaaacctgcctcgagatttctgtggctcctcaag

SEQ ID NO: 670840 - DNA, 75 bp, Homo sapiens
ctggacacggccatcgggcagtggctccgctgggataagaacatccatgatagcagtcttctgtaaatcgaactt

SEQ ID NO: 670841 - DNA, 75 bp, Homo sapiens
catttcttcggcattctgcaacagggaaacatgcacaattcttggattacaacaggtgaagattctggggtgggc

SEQ ID NO: 670842 - DNA, 98 bp, Homo sapiens
agttcgtctcttacgtctgcggaagtgcagctgcctcagttcttagcgcaggttatacattggctcttcaaagacgttcacctcatcagagaaatccc

SEQ ID NO: 670843 - DNA, 90 bp, Homo sapiens
gtgaccaccggcctggtattgggatgcgcaaatctgtccaaggctgcctggggagcattggagaagaatggcacccagctgatgatccgc

SEQ ID NO: 670844 - DNA, 82 bp, Homo sapiens
gcgcctgggggtgcgcgcctgcgacctgcccgcctgggcctgggttctgaggaaaacgcaatggtggccatggacttgggct

SEQ ID NO: 670845 - DNA, 100 bp, Homo sapiens
tgaccatgagcagtcccgacgcagcaaaggcaaacttggaaagagcaagatcggcagccctaaaaccggaacatgaacattttgcagtactgcccctctt

SEQ ID NO: 670846 - DNA, 99 bp, Homo sapiens
cccctgcgcggccaacgcccaggatccgcaagctgcgcgcccacgagatcactggggtgatcctgctggctgttggagtctggggcaaacttactctgg

SEQ ID NO: 670847 - DNA, 75 bp, Homo sapiens
tatccaacaagaaaaagacctgtggctattaagataggagcccagtttcctccaattgcagcacaagaccttcct

SEQ ID NO: 670848 - DNA, 83 bp, Homo sapiens
cttcgttgcttgcttgcctgtgcgcgcgtgcgcggacatggcctcaaacgcctctggaacaggacccaaggacattatcatta

SEQ ID NO: 670849 - DNA, 100 bp, Homo sapiens
aaacccagaacagaagatcattaagagagtgattgctcttgaaggagatattgtcagttggaatcaactggactcggccttagtagtagtagactaagaa

SEQ ID NO: 670850 - DNA, 83 bp, Homo sapiens
actgtcaagacatttcttcggcattctgcaacaggatattagaaatggctactccccagtcaattttcatctttgcaatctgc

SEQ ID NO: 670851 - DNA, 99 bp, Homo sapiens
ctcagcgttcccctctggcgcctttgctgctcctctctctgcacgggctcacctgaaacttcatgtaccattgcacttcctgagaagctgtccccaatc

SEQ ID NO: 670852 - DNA, 100 bp, Homo sapiens
gcgagaaggcacggagtcgccgcggagcgcagacaatgcagatcttcgtgaagactctgactggtaagaccatcaccctcgaggttgagcccagtgacac

SEQ ID NO: 670853 - DNA, 100 bp, Homo sapiens
tatcttgaaaagctgccagaaaggatttaagcgagagcctcactggttcccaggacatcaacctgaactggatcctccccgatacaaatgcacagaaaag

SEQ ID NO: 670854 - DNA, 75 bp, Homo sapiens
gcaagttgaagcccgaagttgtggaggagctgaccaggaagacctactcttgctgagcgagagcgagaagcggcc

SEQ ID NO: 670855 - DNA, 51 bp, Homo sapiens
gcggaagcaggactcggggcacttggcaattcatgatgaccaataaactgg

SEQ ID NO: 670856 - DNA, 51 bp, Homo sapiens
agctgctgaagcgggtgctcgtccgacctgcaggctgggacaatgaaaaga

SEQ ID NO: 670857 - DNA, 75 bp, Homo sapiens
catcgctcagacaccatggggaaggtgaaggtcggagtcaacgggaggagatgttaaagtaacccatcttgcagg

SEQ ID NO: 670858 - DNA, 100 bp, Homo sapiens
ggagatgagcacgccctttacctgcgtttcctggatgctcttaaagattgaagataaaactttccaagtccttggtaatctttacagcgagggagactgc

SEQ ID NO: 670859 - DNA, 82 bp, Homo sapiens
gtccccggcgggtgtgcgtgtgcaccccggagcgtctggtggcgttgttggggccaagcccagcattcggtgcttcattaaa

SEQ ID NO: 670860 - DNA, 75 bp, Homo sapiens
tcccaagtagctgggactgcaggaacttcacgtccatcttctaccctcactatggcaactgttacatcttcaact

SEQ ID NO: 670861 - DNA, 99 bp, Homo sapiens
caagccttcccagttatcataaccttgaatggcgactagatgtacaggtggataagattgtggaccagctgcagcagttaatgcaggtgtatgacttgg

SEQ ID NO: 670862 - DNA, 100 bp, Homo sapiens
gcgggagctgtgcagctccttatcatggtatgttgagtctaaaaaggacagagtcacagtagtcttcagcacagtgtttaaggatgacgacgatgtggtc

SEQ ID NO: 670863 - DNA, 74 bp, Homo sapiens
caaagctgcacggcagtctgtttatgaggagactccatcctctgccaatggcccttcccgggagggctctaggc

SEQ ID NO: 670864 - DNA, 80 bp, Homo sapiens
aagcaatgataattcccaggacagtcagtctggtactaacaatgcaggcctacaagactatgaaagaggatgaaaaaaga

SEQ ID NO: 670865 - DNA, 74 bp, Homo sapiens
ctaaatggatgtagccgactcattattgcggtctctaattaacagaagatggcaaagcccagccacagcagcta

SEQ ID NO: 670866 - DNA, 51 bp, Homo sapiens
gctgaggcttatttgggaaagaagattcaaccctatgaaaagataaaggcc

SEQ ID NO: 670867 - DNA, 100 bp, Homo sapiens
tgaagactctgtgcaaactggccgtgattcagtataacctagaccagtcctgtttgcctcatgatatcaggaataatccaggaagtgtcccggaaaagag

SEQ ID NO: 670868 - DNA, 51 bp, Homo sapiens
atcgcgtggagtgacggtcacaccgcggcgtatttcactcagctgtccgag

SEQ ID NO: 670869 - DNA, 100 bp, Homo sapiens
cctctgggagcttctcagccattttccacagatcaggtgcgcttctccgagaaggtcactgtccatttcctggctgtctgggcagggccggcccaggccg

SEQ ID NO: 670870 - DNA, 75 bp, Homo sapiens
tggggagcctcagcggtctgcgcctggcagcagctgtcaataccagcaaatatgcagaaagctatcggatccaaa

SEQ ID NO: 670871 - DNA, 100 bp, Homo sapiens
cggtgtggtggcggcggcggagactgcgggcccgtagctgggctctgcgagtcaagtccatcatctccagaaccagctagtcttcctgcagaagatatta

SEQ ID NO: 670872 - DNA, 83 bp, Homo sapiens
atgtctgcgagccaggattcccgatctcctgggaggcccccgtggagaagaagactgagtgtatccagaaagggaagaacaac

SEQ ID NO: 670873 - DNA, 100 bp, Homo sapiens
tgtctcgtggtttttcactgtcctggaaaaggcctgaagtggcactgaaatgaggcatagatgagtcaccaggagactaaagtccatcaaaaacatccag

SEQ ID NO: 670874 - DNA, 99 bp, Homo sapiens
ttttgaaatcgacacacaaagaatagagttgagcctgtgggacacttcgggttttaaaatcaaagatgggaaaatcggagaaaattgcccttccccatg

SEQ ID NO: 670875 - DNA, 74 bp, Homo sapiens
ggcaacctcactgagttagaatcagaggagttgattgaccaccagttgagagcctgcagttcatcagttgagag

SEQ ID NO: 670876 - DNA, 99 bp, Homo sapiens
gttctactccttctacaggtgtgtatggagaaacaattgcagcacttacagacataaccaacttgaaccatctggaatctgatgggcagatcacaattt

SEQ ID NO: 670877 - DNA, 50 bp, Homo sapiens
gcgcgaatatcgtcatcgttagaagagaaaattcctgttccaagagaaaa

SEQ ID NO: 670878 - DNA, 75 bp, Homo sapiens
gctggtgcctgtgcaagttgttgaggaatgaaatggaaaggcattttctggagcttcttcagtttaatattaatg

SEQ ID NO: 670879 - DNA, 83 bp, Homo sapiens
ggctgcggtcagcgcttcgatcctgagaccaattccgacggactctccttcagcaactccagaagcttcagactttggtgatg

SEQ ID NO: 670880 - DNA, 82 bp, Homo sapiens
gttgcaagaaaacaagctcagggctcccactgattctacattacgacaatgcagatcttcgtgaagactctgactggtaaga

SEQ ID NO: 670881 - DNA, 97 bp, Homo sapiens
gggctggggccttcactcctctgtggctctggaagagcccgatttcctcaggagatggcatctattatggagacaatcggtttaacacagtgagcga

SEQ ID NO: 670882 - DNA, 75 bp, Homo sapiens
cagcgccagcagctggactatggcatctatgttatcaaccagtggcagtatgatcacctcacggctacctatctt

SEQ ID NO: 670883 - DNA, 50 bp, Homo sapiens
gccctggggcttctgctctgctcagacactggctctgagaccccgactgc

SEQ ID NO: 670884 - DNA, 83 bp, Homo sapiens
cgggaacccaggagacaggccacacagatgctaaaactgcagaatctgggtggtccaccacgacccctgccgtggaggagctg

SEQ ID NO: 670885 - DNA, 101 bp, Homo sapiens
ggacagcagtataaaacccagaagcagaacttgaaggttaaaccactagcccatttcacaggtgtgagcattttcgatccatgttccagtcgtattggaat

SEQ ID NO: 670886 - DNA, 98 bp, Homo sapiens
gaagatcatcattaaggacggaggcacgggagatggaagggagtcaaggatgttgccatgtatgtgccatctctgccctaagccaatatcatgaagaa

SEQ ID NO: 670887 - DNA, 82 bp, Homo sapiens
aagaggaccagactttgttaatgaaggtttggccgtaagctgtgtctcctgggaactgtgctggtcaacgcggtgtcgggcg

SEQ ID NO: 670888 - DNA, 101 bp, Homo sapiens
ttggtgccacacaacatctcgtcagaccactcatgatacaatgtctctttgctatatgaccttgaaaatcttccggcatccaaggattccattgtgcatca

SEQ ID NO: 670889 - DNA, 100 bp, Homo sapiens
cggaaggatgatttcgttatggtggcttcccacacttctgactcggacgttccttccggtgtcactgaggtggtcgtgaagctctttgactctgatccca

SEQ ID NO: 670890 - DNA, 82 bp, Homo sapiens
gctgaattggatgaaagataaagcccttaaggacaaggtggacacccatatccatgcagccgcttgcatgaaccagaaacat

SEQ ID NO: 670891 - DNA, 98 bp, Homo sapiens
gcccatccagctgaacccggcccccgacggctctgcagttaacgggaccagctctgcggagcagcacagcattctcagaagcagtctactgagctctt

SEQ ID NO: 670892 - DNA, 82 bp, Homo sapiens
gaactgatattccaacagtaaaacctctcaaaccgaggaacaagttgaaatcatcgcagaaggataaagttcgtcagtttat

SEQ ID NO: 670893 - DNA, 75 bp, Homo sapiens
acacattgactattccattgtctagactttgtgttccaagatcagagctgtggcacgagctgtgcgacctcatct

SEQ ID NO: 670894 - DNA, 100 bp, Homo sapiens
aaaaactcagtgagacacaatttatcattgaataagtgttttaagaaagtggacaaagagaggagtcaggagccaaaaacctgtatatcatctccgtgaa

SEQ ID NO: 670895 - DNA, 78 bp, Homo sapiens
ctgcctcagcctcccgagtggctgggattacagccaccagtgaagactataagctcctggaaaatatgaataaactca

SEQ ID NO: 670896 - DNA, 100 bp, Homo sapiens
ggcagcggcctggggacccagcaagtaaactgtttcacgttagacctgtaacccaaggagatgtgtatagagctgaaactgaagaaattcctaaaatatt

SEQ ID NO: 670897 - DNA, 82 bp, Homo sapiens
cttcgcccggctttgcagcggggacttcggcggcggcgcctcaggcacctcggcccggaagatgcctctaatggaggagttt

SEQ ID NO: 670898 - DNA, 75 bp, Homo sapiens
ggtcggactcccgcggcgggaggagcctgttcccctgagacttaattcagtgcacaaatgagatgaatgtgaaca

SEQ ID NO: 670899 - DNA, 82 bp, Homo sapiens
aacgttccactctgtgttgatatgtgtctcaattggttgctcaatgtctatgacacggagcatgataaagatccagaaagct

SEQ ID NO: 670900 - DNA, 98 bp, Homo sapiens
caaggaaccaaggcggccctggctgggggaaccactatgatcactgttctccatagtggtgttcggctccatcgtgaacgagggctacctcaacagcg

SEQ ID NO: 670901 - DNA, 116 bp, Homo sapiens
ccgccatggagcccgactcggtgattgaggacaagaccatcgagctcatgttaatgaaggagttcccccttctgagtatgttcaatatccatgaaaaccttttagaagcccttctg

SEQ ID NO: 670902 - DNA, 75 bp, Homo sapiens
tctttcaccgcagtgggctaccataaacacatcaccttgatttttaatcccacgttgtctgagggaagtcaaaag

SEQ ID NO: 670903 - DNA, 75 bp, Homo sapiens
ctcgcgatgagtggtctcggcaggctcttcgggaaggattccaactccacagagtgaccagagagaggacgtggc

SEQ ID NO: 670904 - DNA, 76 bp, Homo sapiens
ctcagtcctcggcgcccgcctgccgcctccggagcgcctgtgtgggaaatctggcattttttaaagtttgcgcccc

SEQ ID NO: 670905 - DNA, 83 bp, Homo sapiens
gagacctccatggtccatgaactcaaccggatcagttccacaagatggttgagctgacagtggcggcccgacaggcgtacaag

SEQ ID NO: 670906 - DNA, 110 bp, Homo sapiens
cggagcttatactcctcccagtgacgggtctggagtgcgtgggggaccggctgttggcggcttccccgggcgctgcctggacaggcctgcctgcgtgctgggacatgtct

SEQ ID NO: 670907 - DNA, 82 bp, Homo sapiens
gtggaggagctgtgcagccgcgaggaggcgcgggaggtgttcgagaacgaccccgagacggctggagtgcagtggcgagatc

SEQ ID NO: 670908 - DNA, 82 bp, Homo sapiens
tgggcaacgtggccgacagcacaggtgtccattccaacttttccaccaccatcccgcccacctcctggcaaacggatctccc

SEQ ID NO: 670909 - DNA, 75 bp, Homo sapiens
gggattataggcgtgagccaccgtgcctggctgaagctgcaagctttcttcctggtggcagatgacatcatggat

SEQ ID NO: 670910 - DNA, 75 bp, Homo sapiens
tgtatgaacaccttttccctgagcttgttgatgattttcaggttcttccaggttggaaagagaatatgctggaga

SEQ ID NO: 670911 - DNA, 100 bp, Homo sapiens
gttgccattatagagctggaattaggcaaatatggacagctgcacatcattgactcctgggcccaactgtgaccgatttaaactgcacataccatatgct

SEQ ID NO: 670912 - DNA, 82 bp, Homo sapiens
ctgctcagctggggtcatctgggaacctatagaggctcccttaatgcggagaaaggtgtggggctgccttccaggaggatga

SEQ ID NO: 670913 - DNA, 90 bp, Homo sapiens
ccggcttcggagcgggagtgttcgttgtgccagcgactaaaaagagaacgctgcgatgactggggactagacaccatgaggcaaatccaa

SEQ ID NO: 670914 - DNA, 140 bp, Homo sapiens
aaatatgagaaagaatatcagacaatgcgagagagtcagctgcaacaggaagacccaatggatagatacaaggtggcttcccacacttctgactcggacgttccttccggtgtcactgaggtggtcgtgaagctctttga

SEQ ID NO: 670915 - DNA, 76 bp, Homo sapiens
agtcactgcagccaacccttcagcaaggcaagccggtatattcggggcccaggagcaaggaaaagtggccttttgc

SEQ ID NO: 670916 - DNA, 50 bp, Homo sapiens
gtggatgacaacagcagtaacggatgctccaggatgaaacgccataggcc

SEQ ID NO: 670917 - DNA, 83 bp, Homo sapiens
ggaaggagttcaccaccatcaaggtcaaaatgcagatcttcgtgaaaacccttaccggcaagaccatcacccttgaggtggag

SEQ ID NO: 670918 - DNA, 111 bp, Homo sapiens
gcgtccaccatcttcctcttgctgccagtggtagcgctcgtctggcggagctgggtgtcgtgaaaactacccctaaaagccaaaatgggaaaggaaaagactcatatcaac

SEQ ID NO: 670919 - DNA, 75 bp, Homo sapiens
aagcgacttcagcgtgtggaccatcctgaagaagtgtgttggcctgtcatctcagcaaaacttaaggaaaataag

SEQ ID NO: 670920 - DNA, 50 bp, Homo sapiens
gcaacatttgggagtttatgcaagaatttggcaatgcagccacttctctg

SEQ ID NO: 670921 - DNA, 100 bp, Homo sapiens
cacggccagatctgccctccaagtcgagagaaagaacttatgggtttcagcaaatcggtaaatgaagcacgttcaaagatggatgtagcccagtcagaac

SEQ ID NO: 670922 - DNA, 100 bp, Homo sapiens
cggcccgggccggcgctccaaggcccgcccgggagggccggggccgcgctcaggagtggagtcaacatatcaatggagcaagtcacagtcgtcgatgcca

SEQ ID NO: 670923 - DNA, 95 bp, Homo sapiens
aacagcatagggttaagctgggctggttgcatgtacattcatggaggagtggtgaacatccatgaaaacaaacggactgggtcattgtttaagat

SEQ ID NO: 670924 - DNA, 83 bp, Homo sapiens
cgccggcgccggcgccgcggcctcttcggctgcggaccctgccattccggaggagccttatgccagcctggaccatcttggag

SEQ ID NO: 670925 - DNA, 100 bp, Homo sapiens
acgccgcaggctggagctgcccattaccggagcccattgtcaaaagagtggggaatggtgaggaaacgccgatgattggagacaaagtttatgtccatta

SEQ ID NO: 670926 - DNA, 74 bp, Homo sapiens
gacgacctacgcacacgagaacatgccttccctgagattctgcagctcagcgatgccctgcgggacaacatcct

SEQ ID NO: 670927 - DNA, 100 bp, Homo sapiens
cgagtcccccggagtccgactcgctacgcgggtcttgcgagatatctggccgcctctgccgcagctggaggcccccgacagctgctctcgggagccgcct

SEQ ID NO: 670928 - DNA, 101 bp, Homo sapiens
tgagaagtgtatatcaagccacaatttccatcaaaaagtgattaagcagagaatggagaagaaggttgattccaggtggggaagaaaacatgacagaaaca

SEQ ID NO: 670929 - DNA, 75 bp, Homo sapiens
tcaacagccatctggccctggtgaggtgaagaatgctgaccccctgaaggtgtacccgccactgaaggggagctt

SEQ ID NO: 670930 - DNA, 82 bp, Homo sapiens
cgagaagcgcagcaacgtgcggtgggaccacgagagccaaagtgaaaaggagagcttgttgaaggaaagagatcacattttg

SEQ ID NO: 670931 - DNA, 90 bp, Homo sapiens
atttttattggactgtggctgggatgagcacttttctatggatattattgattccctgaggaaggaattgcaacccagtgaagaagttac

SEQ ID NO: 670932 - DNA, 100 bp, Homo sapiens
ttaagatcacgctgacgtcggacccacggctgccgtacaaagtggttcttttcctatgactccatcaattccagctaatcctcccatggctttcaatcct

SEQ ID NO: 670933 - DNA, 100 bp, Homo sapiens
cggctggaggtgggatccacacagctcagaacagctggatcttgctcacactctttcaagagaagcttccttgctgggacgatgccggagtgtgaaggag

SEQ ID NO: 670934 - DNA, 99 bp, Homo sapiens
gactcggtccgtggcttcggaggcaagtttggtgtccagatggacagagttgatcaggaattttctacttctggtcatgcttacactgatacagggaaa

SEQ ID NO: 670935 - DNA, 75 bp, Homo sapiens
attcttttaccatcttattaattcactctggatttggtgctatggagaaatttttggtagaatataagagtgcag

SEQ ID NO: 670936 - DNA, 100 bp, Homo sapiens
tggggcccgccgccccgcgggggagggcggagctggcgcggcccctagctttctccttctggtgtggggcccgaggacccttgaacatctgtgaagaaat

SEQ ID NO: 670937 - DNA, 49 bp, Homo sapiens
cagcagctccactgaacagataagggaacggaaaacagttcttccttca

SEQ ID NO: 670938 - DNA, 101 bp, Homo sapiens
tcggacactacgtgctgggcgacacgctgggcgtcggcaccttcggcaaagtgaagagcatgtactggcattgaaaacattgacgaagctattacattgct

SEQ ID NO: 670939 - DNA, 50 bp, Homo sapiens
gccaagcgcatgatccgcatggccaagtattgaccactggcttagatctc

SEQ ID NO: 670940 - DNA, 75 bp, Homo sapiens
agcaagcaagctgttttgaaagtgtctaatattggctgatgtagagctataggggcaagattcttgccaagagaa

SEQ ID NO: 670941 - DNA, 105 bp, Homo sapiens
cgttcaagcagttggtagaagacttggatcgaattctcactctcacaaccaatgaggagagtagatctggagaaaccaacagctgtgttgaagaaataatccggg

SEQ ID NO: 670942 - DNA, 90 bp, Homo sapiens
tcaggtgactgtcccagaagtgaatcgcagggaggcgccacatccaccacctggggaaccagctgcagctgaaccagcactgcctggaca

SEQ ID NO: 670943 - DNA, 90 bp, Homo sapiens
ttaagttggagcagggagaggagctgtggataacgggaggtgaatttccatgtcaacatagtcctgctttgacagatccaaatgcttctg

SEQ ID NO: 670944 - DNA, 83 bp, Homo sapiens
cgcgaggacgaggcggcgccgccgggctgtggaggatgatcggctgaatgtaacagaggaactaacgtccaacgacaagacga

SEQ ID NO: 670945 - DNA, 96 bp, Homo sapiens
cctttccgtcgagttgaggaaggggagaaggaatttcatgttcggaatccccaggataagcacattgaagaagtgcggaagaacaaagaatccaaa

SEQ ID NO: 670946 - DNA, 75 bp, Homo sapiens
ctgcagcgggagctggacggcgagcgcgagcggcgcgagaaagtctccataacccctcggacaaacgccgccctg

SEQ ID NO: 670947 - DNA, 87 bp, Homo sapiens
actggatagcccatcagctccagacaaaccagacataagttcagaggaatctgtctccactgtagaagaacaagagaatgaaactcc

SEQ ID NO: 670948 - DNA, 78 bp, Homo sapiens
tgcgctccacagccatggacacgctgtcttcacttgtttttcagctggggaagaaggaattggattcaagtacgtggc

SEQ ID NO: 670949 - DNA, 100 bp, Homo sapiens
atggggaaaatctccccggtgactttcagatcaaagtggtcaaagcgttccatagttccctccacgaaagcattcagaaaccctacaaccaaaagtccat

SEQ ID NO: 670950 - DNA, 90 bp, Homo sapiens
tctaaagaagtatggcgtggggacttgtggacccagaggattttatggcacatttgggataccaataactagtgcctcgtactacgcgac

SEQ ID NO: 670951 - DNA, 75 bp, Homo sapiens
cctgcccacaaggcttcactggacccagctgtgaaacggaatataacaccagcaatcctgacttgttgctagtca

SEQ ID NO: 670952 - DNA, 75 bp, Homo sapiens
ttcaagcttaggaccacccaccatgcctatccagaccgagacatgggtgcccggcaccgcgcccgagcccactcc

SEQ ID NO: 670953 - DNA, 75 bp, Homo sapiens
agcctcccgactagctgggattacagtttgaaggaggagtttcctgcctggtatgagaagcttgttctggaaatg

SEQ ID NO: 670954 - DNA, 102 bp, Homo sapiens
agacgggaaaagattgagcggcgacagcaagaagtggagacagagcttaaaatgtatttgagttttgtcaccggctcccacgtcggagagctgatcatctgg

SEQ ID NO: 670955 - DNA, 83 bp, Homo sapiens
ctgaagacaggcttaagcatggaatggcatcaccagctgccggatgcggactgagagtgagccatcttgtggctccccagtgg

SEQ ID NO: 670956 - DNA, 90 bp, Homo sapiens
agtggcgcatctacggcagcgaggaggacctatgtgctctgccctaccacgctggccttgggtgcggcactcgtgaatgtacagatcccc

SEQ ID NO: 670957 - DNA, 74 bp, Homo sapiens
atggacccttcatgccagtgctgggatttggcacttatgctcctgatcatgcctccttgtatcagtcctctata

SEQ ID NO: 670958 - DNA, 75 bp, Homo sapiens
agccagtagacttacagaaaaagaagaagcggaaacaacgttctcccgcaaaaggctggtgaattaccatatctc

SEQ ID NO: 670959 - DNA, 100 bp, Homo sapiens
ccaccgccgagacccagcacatcgccgaccagtgattcgcctttgccagtctcatctcgtgtctgctttgttaagttccatgatccagactcagcagttg

SEQ ID NO: 670960 - DNA, 82 bp, Homo sapiens
ggcctggttacagtgttgtgcttctttttcaatcatggagagggattttacggagaaagatttggagaggatgtggttgaag

SEQ ID NO: 670961 - DNA, 100 bp, Homo sapiens
cgctgccgggcaccgaggaccagctcaatgacagcagcatctccctctcatcagcactgttgaaagaagaaaaaatgtcagtgctatctcctgaaatcaa

SEQ ID NO: 670962 - DNA, 75 bp, Homo sapiens
gcctcagcctctcgagtagctgggactacaggaatgagactacatacactaaaaaaccaaaaagcctaaaaaaag

SEQ ID NO: 670963 - DNA, 50 bp, Homo sapiens
tgcggacggacgctcgcctgccggctgagtttccaacatggctagatcca

SEQ ID NO: 670964 - DNA, 50 bp, Homo sapiens
gaaagaagctgcagcggaggaaggcgagatcttcgcaaatactgtggaca

SEQ ID NO: 670965 - DNA, 73 bp, Homo sapiens
ggccacctacagaaacaaaatgtcaacaaattgatggtaccaaaagaattggtggagctccatttgaagctga

SEQ ID NO: 670966 - DNA, 75 bp, Homo sapiens
gcatgttagtgctcaagagcctcattatctaccacccgagatgccccaagggagcgcttgtgagtgccttggctg

SEQ ID NO: 670967 - DNA, 75 bp, Homo sapiens
cgatcttcagactccgagtcgaatgaaaatgagccacaccttccacatgccaacatcccatgcaccatcgtggag

SEQ ID NO: 670968 - DNA, 88 bp, Homo sapiens
ggaatgtacacgataattaaagagtaaagttgtgctcaacgagcattacagcattgtgaagaactgattcagcagtacaaccgtgctg

SEQ ID NO: 670969 - DNA, 82 bp, Homo sapiens
gatatcgaggatttagccggaagatgattgacagaatatgtgtgaaagtacaagatcatctcaactccttacgaaattgtgg

SEQ ID NO: 670970 - DNA, 75 bp, Homo sapiens
gcaggataatgaaacatttggatttgaaattcaggttctactggaaggactacatcatcaaagacccaaacgtta

SEQ ID NO: 670971 - DNA, 100 bp, Homo sapiens
ggggctttggacgccggtggagacgcaggcgaggtttggtgcacctcgatttggaggaagtagggcagggcccttatctggaaagaagtttggaaaccct

SEQ ID NO: 670972 - DNA, 143 bp, Homo sapiens
ggaatacaagggcctcagggccggctaccactgcggctactgcgattccaaggagggcaaagcgtcctgcggtgctggagaatctggtaaaagcaccattgtgaagcagatgaggatcctgcatgttaatgggtttaatggag

SEQ ID NO: 670973 - DNA, 146 bp, Homo sapiens
acggctgcgcgggacggctctgtaggaaggaacttggttccccctccctcagcttccgccccaaaaggtactccaaagattcaggtttactcacgtcatccagcagagaatggaaagtcaaatttcctgaattgctatgtgtctgg

SEQ ID NO: 670974 - DNA, 101 bp, Homo sapiens
agaaatccaattcagctttttgtgctgccagcaagaaatgatcagtagcaccagtgtttatgaacatacatatgatagttgagaaagacacatattctgat

SEQ ID NO: 670975 - DNA, 88 bp, Homo sapiens
gcgctgctcgtccagctgattcaggaacgcctggctgaagaggattgcatcaagcaggaacatgaatctgaaggtggaagaacacctt

SEQ ID NO: 670976 - DNA, 75 bp, Homo sapiens
gactccctcagatccagtgataattgacagagcctggagaaagttcttgtggaattcagtcacaaggagttgttt

SEQ ID NO: 670977 - DNA, 82 bp, Homo sapiens
ttggcgtgtccctgcagcgaaggatcctggtcaccgacgatgagggcgcacctgctgtcctggagcttccgatctctgttcg

SEQ ID NO: 670978 - DNA, 75 bp, Homo sapiens
tgcagccagtactctatatgaacaatccgtctggatcacggatgtaggaagtggcctgctgaaaatgactgaata

SEQ ID NO: 670979 - DNA, 99 bp, Homo sapiens
ttaagagctgttgaacttgtaaaatcttggaataattctcttcttatgaagctgctggaacccaatgtgaatattggactggcggagccttgggaagtg

SEQ ID NO: 670980 - DNA, 100 bp, Homo sapiens
gttcgaaatatggcaactttgaaagatactgcaattctcattgcaagatcatcgcctccctggtttatagtagacagaccttttctgtttttcatccgac

SEQ ID NO: 670981 - DNA, 90 bp, Homo sapiens
aggcacgcgccaccactcccagtatcatcgagaaaggagaagaacactgtggacatctaattgaggcccacaaggaatgcatgagagccc

SEQ ID NO: 670982 - DNA, 101 bp, Homo sapiens
cttcaatgcagatgggtctgaggaagatgagaatgtgcctactgctcctgatcctccaagtcaacatttacgtgggcatgggacaggcttttgctttgatt

SEQ ID NO: 670983 - DNA, 75 bp, Homo sapiens
gggaccggaggagacatcggcctctgcaggcttgccgaagaagggaggtactccaaagattcaggtttactcacg

SEQ ID NO: 670984 - DNA, 100 bp, Homo sapiens
aacagaattacagagtatgatgtctgccatcatggatgttctcgcagaagcaaatggcacctttgccttaaaccttttgaaaacgctgggtaaagacaac

SEQ ID NO: 670985 - DNA, 50 bp, Homo sapiens
atcagaggagatgtaactatcggtggtgttcccactgatgaagagcaggc

SEQ ID NO: 670986 - DNA, 82 bp, Homo sapiens
aaattgctgaggcaggatccaggatggacaagcttggccgcaccattgcagaccatgctcaaggatgtccaatcaatggatg

SEQ ID NO: 670987 - DNA, 90 bp, Homo sapiens
ctgagatgggcaccgcggatctggggccgtcctcaggaccaggcctcctcttcccacctgtccagcagcatgaaagcagcatgattggcc

SEQ ID NO: 670988 - DNA, 96 bp, Homo sapiens
agccctggatggtgaagcgagagctgacaggaagcctgttctcagatatcctgaaaatgccacatcagtaagttgaacaagaagaacgggagcttt

SEQ ID NO: 670989 - DNA, 100 bp, Homo sapiens
cagggcagcatctctggtgcatgctgatgacgaaaaacatcatggaagggaagtggttgctgtgtatgttactggtgcttggaactgctattgttgaggc

SEQ ID NO: 670990 - DNA, 100 bp, Homo sapiens
agctcacccactgccagcagaggtcctggcattgatgtgcctgctccagacatgagcacaggtgagcgggagatgtcctggatcgctgatacctatgcca

SEQ ID NO: 670991 - DNA, 75 bp, Homo sapiens
aatactcctcctctaacatgtcagcgttattgtaatgcaagtcagcccaaggccaaccccactgtcactctgttc

SEQ ID NO: 670992 - DNA, 90 bp, Homo sapiens
tggcttgttgtcagaggccccaaatgaaaaactcttcttcgtggacactggctccaaggaaaaaggaattgaatgatctggcacgggacc

SEQ ID NO: 670993 - DNA, 100 bp, Homo sapiens
tttcccctcgggatcaactcttccaggaccaccaaaaataactttggctggtgtgaagcctcagtttaggtcatctggtggttcagaacactcaacagag

SEQ ID NO: 670994 - DNA, 100 bp, Homo sapiens
ggaagagacagattcctcggagcaggatgaacagacagacacagagaaccttgctcttcatatcagcatgtccaaagcagcatatgtactcttctaccag

SEQ ID NO: 670995 - DNA, 90 bp, Homo sapiens
ctgggacagaaagtgttaattcccgtaaaacagttccctaaggtacaggtttgcagattccgccagcagcacagcaagctctacagatga

SEQ ID NO: 670996 - DNA, 96 bp, Homo sapiens
ccagcactggtgaggttactccgcaagacgactgacctggagatccgggagctggtcacaggctttgaagacaagattcccaaaaggagattctct

SEQ ID NO: 670997 - DNA, 82 bp, Homo sapiens
ctgggtgcagttcctgcagtaccccactctacgatcagtgggtcctgtgtcggtgtcctttagcccagtgccatcactggca

SEQ ID NO: 670998 - DNA, 76 bp, Homo sapiens
aaggatggtttagaaatggaaaaatgtatggagtgaaggtacctgagcgcaggaaccatggtcttcattgctgcct

SEQ ID NO: 670999 - DNA, 90 bp, Homo sapiens
cagatggcggatgccctgcagtacctgcagaaggtctctggagacatcttcagcaggacagaataacgggctcccagattcacaagcccc

SEQ ID NO: 671000 - DNA, 100 bp, Homo sapiens
ctacggactatgggcgaatagctctgaccacccggcgaagagactgacttgcataccaaatgtgtggtggatgtggatgcaaacaaggttattcttaatc

SEQ ID NO: 671001 - DNA, 75 bp, Homo sapiens
gaattccaggctcacaaggctatcttagcagacaagttggatggcttgaggactggtactaaaaggaaacgtgac

SEQ ID NO: 671002 - DNA, 97 bp, Homo sapiens
cgaagacataaatccctgagtgcccgggaggagccttaacaagcgcacggagccctcaaggaaaataatgactctgaatgatataaaaataatacaa

SEQ ID NO: 671003 - DNA, 83 bp, Homo sapiens
atgatggctgtgggcggtaaacgcggttagtgcaagcatctgggccatcttcaatttgtcacaggtagtactgatggaattgg

SEQ ID NO: 671004 - DNA, 100 bp, Homo sapiens
ccatcgccgcacaagatcgccggagtcatattatcgacgtagttaaagcccactagcctaaagccgggcggactgcgagtccgaaattgaagttcagagg

SEQ ID NO: 671005 - DNA, 98 bp, Homo sapiens
acatcttccaccacagcttagagactcctttctacgaaaccgttcaagttctgaccatgaagctacagccatgatgaaagctcagtttatgagtctct

SEQ ID NO: 671006 - DNA, 83 bp, Homo sapiens
cagaaggcgatcaaggccaagtatccgccagtcaataggaagtacgagtagctcagcagcctcaggggctctcccagcaggat

SEQ ID NO: 671007 - DNA, 100 bp, Homo sapiens
ctgtacgcttggctatgtgacgctgctggaggaaacacctcaggacacggcctacaacaccaagaggcccactgctcagtggagcgtggaggacgaggag

SEQ ID NO: 671008 - DNA, 90 bp, Homo sapiens
gtggcaaaacatctaaggcctgaaaaccattcacatatgggtcttctacgactaatagactggggtttggctgagttttatcatcctggc

SEQ ID NO: 671009 - DNA, 90 bp, Homo sapiens
gccgtcagtcctttcagcttcagcctgctcaagaactgcagcattgcagccgccaagacggcagctgctcccaaccccagaacctttgct

SEQ ID NO: 671010 - DNA, 51 bp, Homo sapiens
tgaaattagcttaaaaaatgatctagctcctggaatgaggccgcccatggg

SEQ ID NO: 671011 - DNA, 90 bp, Homo sapiens
cagctacctgcacttctagatgctttgtgtgcaacacgtgccctgaaaagtggatcaatttccaacggaagtgctactacttcggcaagg

SEQ ID NO: 671012 - DNA, 75 bp, Homo sapiens
agaggatgatgtttttggtgaagttaaacacagtgggaatatcacttttgatgagattgtcaacattgctcgaca

SEQ ID NO: 671013 - DNA, 101 bp, Homo sapiens
aacgccctggaagcgtatcagaaaacaggccaggctgcgtccctgctggctgtgctgctgctgctgctggagcgcggcatgttctcctcaccctccccgcc

SEQ ID NO: 671014 - DNA, 50 bp, Homo sapiens
ccgggcccaggtcccttcctccggcagacagaagttagctcggttcaacg

SEQ ID NO: 671015 - DNA, 98 bp, Homo sapiens
ctcatcacactggagctgatccaccgatacgtggagctcttagacaaatactttggcagtgggaaagctctggcaatttaaatgacccaaataaggag

SEQ ID NO: 671016 - DNA, 75 bp, Homo sapiens
aacagctcgttggcagtagcagcttatgaggatggaactgcaagcacatgttgaccagataactgaaatggcagc

SEQ ID NO: 671017 - DNA, 82 bp, Homo sapiens
cctctccttttccctctccctttccctaaggtggacccccaaaagtacaagggcatatttaacggattctcagttacactta

SEQ ID NO: 671018 - DNA, 100 bp, Homo sapiens
atgaagaagaagactatgatgatgatgaggaggaagacaaagagaaagatggagctgaagatgggcaggtggaagaatgataaaaagttgattgcagaag

SEQ ID NO: 671019 - DNA, 49 bp, Homo sapiens
tcacgtcccgcacacccaagggacccatggatgaaggaccagatcttga

SEQ ID NO: 671020 - DNA, 134 bp, Homo sapiens
catggccgcgcacaggccggtggaatgggtccaggccgtggtcagccgcttcgacgagcagggtcttaaaggaacaatggattcgagctaagtatgagagacgggaatttatggctgatggggaaaccatctcg

SEQ ID NO: 671021 - DNA, 75 bp, Homo sapiens
ccatgaccgtggagcagaacgtgctgcagcagagcgcggcgcagaaggttttgcactgattgcaaaaataaagtc

SEQ ID NO: 671022 - DNA, 110 bp, Homo sapiens
cgcctcctacgtttacctgtccatggtgttggagcgggccggagagaagtagagtgggctgcgaggagaaggaaacaggcctttcggaggctcctcatccctcggaggtc

SEQ ID NO: 671023 - DNA, 82 bp, Homo sapiens
taccatcaccctgaaaacatccagctcccaccgggcccaagaggagagggtttgaccgcttcggaccagatggcacgggcag

SEQ ID NO: 671024 - DNA, 82 bp, Homo sapiens
gtggacatcagccccaaacaggacgaaggcgtgctgaaggcatgtcgggccccaggcctgtggtgctgagcgggccttcggg

SEQ ID NO: 671025 - DNA, 80 bp, Homo sapiens
caaagcctgcacaagctctgtgagaggatagaggggcatcattgcagaatacaacaaaatcaatgatgtaaaggaagatg

SEQ ID NO: 671026 - DNA, 115 bp, Homo sapiens
gaagcctggatcaactttaataaagaggaaagagaggcttttgcagagtcactcaggacaagcttgaaggagttaggacctggaaatgtacagaaagaagtctcatcttcctttg

SEQ ID NO: 671027 - DNA, 80 bp, Homo sapiens
ggccttcctcgtggccgcctccttcttcctcatcgtggcagctctgggccatgtagggcaggaccgggtggactttggcc

SEQ ID NO: 671028 - DNA, 85 bp, Homo sapiens
tttccaggatatgtgcaagaccttgccactcagatctgcaaacagcaaagcccaggcatccgtgtcattctggaccttactccca

SEQ ID NO: 671029 - DNA, 75 bp, Homo sapiens
gctcgagtgcctgcaggatgtgagggagatccaaaaagttggcagctcttgcagaagccttaaaggaagtctccc

SEQ ID NO: 671030 - DNA, 83 bp, Homo sapiens
aaactaggcttgaaggtgctgaaattaataaaagccttttagcactcaagtttcagagcgtcctcagccaaggaaataaaaag

SEQ ID NO: 671031 - DNA, 101 bp, Homo sapiens
cttcatcacggggagacatcagctggatattgagatggaaggatgactatgagtatgagctattatagaaaccatggacattaaagtgggctttgtaaaga

SEQ ID NO: 671032 - DNA, 83 bp, Homo sapiens
aaggtgaaggtcggagtcaacgggttgatgataattagaagcatgctttccactgaacttcccgacaacatttgttatgcaga

SEQ ID NO: 671033 - DNA, 80 bp, Homo sapiens
ctgcacggcagtctgtttatgagattttcaacccatgaaagtgcagcccatgccattgtttcggtgaacggtactacgat

SEQ ID NO: 671034 - DNA, 83 bp, Homo sapiens
ggcgggggcggcgtgggcaagtcggcgctcaccatccagttcatccagacccagccgatgcccaatcctgtggcgtactacct

SEQ ID NO: 671035 - DNA, 137 bp, Homo sapiens
gtctatgtctgtgtagcaaggaattaccttggagaggctgtgagccacaatgcatcgctggaagtagccaagtgtgaacatggctacgcctcttcattcccgtccatgccgagcccccgactgcagcattcaaagcc

SEQ ID NO: 671036 - DNA, 83 bp, Homo sapiens
ctggaagaaaaagatacaacgaactagcacaacgaggattcccaacttcttctggagcctggggatcggtcacactggtgcgt

SEQ ID NO: 671037 - DNA, 100 bp, Homo sapiens
tgctggcaggctgccttccctgacccccagttacgcctggaatatgaaggcttccccgtcccgatcttggcatatacagaagggctgcatggaaaatggc

SEQ ID NO: 671038 - DNA, 100 bp, Homo sapiens
ttggaagcaatgtttgaacaaactcgaagaacagctgtggaaagaagttgcaaaacactggaagtccattggaatattaagcccaggagttgctttgggg

SEQ ID NO: 671039 - DNA, 80 bp, Homo sapiens
cccacctgcccggtgcccgaggaggcagccaagctcgtagcctgccactccgtgcggcagcaaggcgaaccccatcccta

SEQ ID NO: 671040 - DNA, 75 bp, Homo sapiens
cagccagatcaacacaattgatagaggagatgttaaagtaacccatcttgcaggacgacattgaagattggtctt

SEQ ID NO: 671041 - DNA, 124 bp, Homo sapiens
agtgtaggaagaggcactgctgagggggcgcgaggggaacggaggccagagctgcgggcactgcacttggctgtgattcatcagcatgaacccttcctggattttcttctaggcttctcggccg

SEQ ID NO: 671042 - DNA, 82 bp, Homo sapiens
ccagaagaagactggtctctcccaccacacagaggtcgctttggtcatcttggcttagccatcaacttgatcacatatgatg

SEQ ID NO: 671043 - DNA, 118 bp, Homo sapiens
gagagagcgagctgagtggttgtgtggtcgcgtctcggaaaccggtagcgcttgcagcatgatgtgaagttcatttccaatccgccctccatggtggcagcggggagcgtggtggccg

SEQ ID NO: 671044 - DNA, 100 bp, Homo sapiens
cacaagctaaagacgggccattttccagacctcatccagcagaaagatgaaggtcttagaatcattgattggaatgatccagaaattcccttatgatgac

SEQ ID NO: 671045 - DNA, 71 bp, Homo sapiens
ggattctcactgagttttgactagcggaagaaaaggtgaccctgagagtgtggctggggagtatgggcggc

SEQ ID NO: 671046 - DNA, 97 bp, Homo sapiens
cctgggaaatgcacagaaattgccaaaagcttactgaaacaaatgcaggtatcaagtgcttggactccatgtgctgtttcccggaaggagaagcagc

SEQ ID NO: 671047 - DNA, 98 bp, Homo sapiens
tcgtggcattatccttcagtggggctattggactgacttttcttatgctgggatgtgccttagaggattatggggatctatttgtgatgactatatgg

SEQ ID NO: 671048 - DNA, 83 bp, Homo sapiens
tcgttaatgttcggggccgccgggcgccaaccgatcggagctccagcagccgggaacagctgacaatgcagatcttcgtgaag

SEQ ID NO: 671049 - DNA, 100 bp, Homo sapiens
tgcaagatggcactcaacatgaacaactacaaaggctatgaaaagaagccctattgtaatgcctggaaactgacaaactagctctcccgatgagccccag

SEQ ID NO: 671050 - DNA, 50 bp, Homo sapiens
ccggcagtcatctcgcggccgttcagacaaaactgtgtggagttttatcc

SEQ ID NO: 671051 - DNA, 100 bp, Homo sapiens
tgagaagcccgtgtcaccgccgcccatcgagtcgaagcaccgcagcctggtgcagatcatctacgacgagaaccggttacagaatgtctgaaggggacag

SEQ ID NO: 671052 - DNA, 82 bp, Homo sapiens
ccagaaatccctttcatcctacaactatattcatgtgggagctcaattaaagatggaaatcatattatgtagaatacttggg

SEQ ID NO: 671053 - DNA, 85 bp, Homo sapiens
attgagatacaagtttccgaacaggagcccccctccacagtgaagtacctggggctgctggcaatgtccaagatcctgaagaccc

SEQ ID NO: 671054 - DNA, 95 bp, Homo sapiens
ggctcagccgcaagtacccgtccatcatagtcaactgcgtggaagagaagcaatcagccatgactgcctttgcactgtccatgctctcagcccac

SEQ ID NO: 671055 - DNA, 100 bp, Homo sapiens
ccctagcggcagcggctctagaagtagatcctccagtagtgattcaatcagcagcagcagtagtaccagcagtgacagatagagtcttgctctgtgaccc

SEQ ID NO: 671056 - DNA, 75 bp, Homo sapiens
ccctctcccaacatggcggcctcagaaatccccggcttcctgactgatgaagagtgtcggctcatcatccatctg

SEQ ID NO: 671057 - DNA, 88 bp, Homo sapiens
agacagcttcatcttcccagttcatcatggcttcaacatccagggagtccacggcctttgcggggaaacatgttgtattccggaagtg

SEQ ID NO: 671058 - DNA, 90 bp, Homo sapiens
cccgggctgggctttcctcacccggattgcttccaagtatgatcatcaggcagaagaagatcttcgcaattggatagaagaggtgacagg

SEQ ID NO: 671059 - DNA, 100 bp, Homo sapiens
gaagaagcagcgtaccaagaaaaataaagaagaggctgcagaatatgctaaacttttggccaagagaatgaagtgcccaccagaagtatgtccgacaagc

SEQ ID NO: 671060 - DNA, 83 bp, Homo sapiens
cccgctccgcagccccgggcacggcggaggcagcggagccctgggccatcgtgtcaacagcatctccaccctggagcctgtga

SEQ ID NO: 671061 - DNA, 112 bp, Homo sapiens
ccctaaccacactatttatatcaacaacctcaatgagaagatcaagaaggatgatgccatggacaatattaccaggcagaaccaattctacgatacccaagtcatcaaacaa

SEQ ID NO: 671062 - DNA, 100 bp, Homo sapiens
ggaaagactatctcccagttggacagcggatgcctgggactcgtttcattgctttcaaagttcctttgcaaaagattccgttgcagacgctctggatggc

SEQ ID NO: 671063 - DNA, 95 bp, Homo sapiens
cggcccgcgcggagcggacgcgcgtggcgctgcccggtgtaattacttcaagcctccaggatggcaatccagttccgttcgctcttccccttggc

SEQ ID NO: 671064 - DNA, 96 bp, Homo sapiens
ttaaaatacccgcaacagccccttcgtcccaatcaccccatactcgacgatcgacacgtggccaggccggcggagcggaggcatgatcgtcatcac

SEQ ID NO: 671065 - DNA, 118 bp, Homo sapiens
ggagattcgggccgtcaccctgcctcccctgcgtcccgccaccggccgcttctgtcctcgacaatgcagatcttcgtgaagactctgactggtaagaccatcaccctcgaggttgagc

SEQ ID NO: 671066 - DNA, 75 bp, Homo sapiens
ttccatcatggcgtcaatgcaggctggagcattggatttgctaaaggagcttaagaatattcctatgaccctgga

SEQ ID NO: 671067 - DNA, 75 bp, Homo sapiens
ataagacctctgagctgttcctcccagctacgagctgccccagcttagcagtgtctgcaaaaacgaatcttttcc

SEQ ID NO: 671068 - DNA, 100 bp, Homo sapiens
ctggcctttgtgagcctcagcctgcagttctgcgaccatggccttgctgggtaagcgctgtgacgtccccaccaacggctgcggacccgaccgctggaac

SEQ ID NO: 671069 - DNA, 75 bp, Homo sapiens
cctgcagaggggtccatacggcgttgttctggaccgcaacagatgaccaaggaagtttgggattatgttttcttc

SEQ ID NO: 671070 - DNA, 98 bp, Homo sapiens
caaagataaggaacccgaagtcgtcttcatcggggactccttggtccagctcatgcaccagtgcgaggcagcacagtcagtgctgatttcattatttg

SEQ ID NO: 671071 - DNA, 50 bp, Homo sapiens
ctgattcttgacaccagatgcagtcctggtatctgggatagcaaaggtct

SEQ ID NO: 671072 - DNA, 75 bp, Homo sapiens
ccgaggccgggaggccgtgcccggagggtgtgctgatctgcaaaccctggacacaatgcagccaattgagaggaa

SEQ ID NO: 671073 - DNA, 116 bp, Homo sapiens
gggagcgagagctggagaagctgggattggagattccacccaaacttgctggtcactgggagatggctcggactcaaaagaacaaggccacagcacaccacttagggctgcttaag

SEQ ID NO: 671074 - DNA, 49 bp, Homo sapiens
cgagtgtgtctcctgtagtaaatgcaagtgctgctggaccaggcgggct

SEQ ID NO: 671075 - DNA, 73 bp, Homo sapiens
agaatacaaacctgacaagggtaaagactggtattgctcgagttccacttgctggagctgccgggggcccagg

SEQ ID NO: 671076 - DNA, 82 bp, Homo sapiens
cacgcacgcggtgcagggtaacatggcggatgcggaaggagctgtcataaccctggggaaggcacagaagttccgattcaac

SEQ ID NO: 671077 - DNA, 106 bp, Homo sapiens
ggctgcgggagccgggctaggacgccgagcggtgactccccgccgctcccgggggccgtgacgatggactagaggcttttaccagatttcttaaaactgaattcag

SEQ ID NO: 671078 - DNA, 82 bp, Homo sapiens
gatgatcgagaggatctggtgtaccaggcgaagctggccgagcaggctgagcgatacgacgactgttggagcagaactactg

SEQ ID NO: 671079 - DNA, 100 bp, Homo sapiens
gacgcaggaggtctgctgccgaggggccggcttggcctggggcgttcacgactgtcagctgtgctccgagcgcctgggaggatgatgaaattccactgta

SEQ ID NO: 671080 - DNA, 100 bp, Homo sapiens
aagttgactgagatcagaggccctgtgatgatcgtgtcagatcctcagtttgtggtctgccagctaaaggtgaagatatattcctccaattcaggaccca

SEQ ID NO: 671081 - DNA, 85 bp, Homo sapiens
gctccttctcctggagacgcaactcaaggtcctgttgttggagagttcccatgtcaaaatgacataaatttgtcacaagcaccag

SEQ ID NO: 671082 - DNA, 101 bp, Homo sapiens
ggacaggactctgatgggggtagtgaggaagtggtcctaactcctgcagagctcattgaaagattggagcagattagtgacaagagctggggttaggatcc

SEQ ID NO: 671083 - DNA, 97 bp, Homo sapiens
ccggcggggccgagcgccgcgcgtcccgagcatggcaggctccctgcctccctgcgtggtggactgtggcaccggtactatactggcaattgctgga

SEQ ID NO: 671084 - DNA, 100 bp, Homo sapiens
atgaattcaatcaattctttgtgactcctcgatcttcagttgaggtggatctatcttaacgaccagaatttatgcatccccgccagttcctcttttgttt

SEQ ID NO: 671085 - DNA, 75 bp, Homo sapiens
aacccagcagcttgccagcatcgttgcagtgtaaacaggaacatcgataagtagtgtaaaaacttgcacaatgaa

SEQ ID NO: 671086 - DNA, 101 bp, Homo sapiens
aagccctttgaggagcactggaggaagcacaccctgtcctatgtggacgttggcactgggaaggtcatcatcagatttgaaatatttaaagtggatacaaa

SEQ ID NO: 671087 - DNA, 50 bp, Homo sapiens
ctttgggatccggccagatgattacttggagggtgaggacaaaatcttct

SEQ ID NO: 671088 - DNA, 75 bp, Homo sapiens
tttatcgtctgcaacaacatgttaagacagacctcttttcaagtacaaaacctcaagaagaacagaagacgagtc

SEQ ID NO: 671089 - DNA, 75 bp, Homo sapiens
ccgggatggaggacgttaactctaacgtgaacgcggaccaggagacagatgccttggggaaacagtctgtgaaca

SEQ ID NO: 671090 - DNA, 74 bp, Homo sapiens
gaccaaaaagcagctggacagcacaattggaatccaccctgtctgtgcagagatggagtttcactcttgtcacc

SEQ ID NO: 671091 - DNA, 100 bp, Homo sapiens
cagatggcggatgccctgcagtacctgcagaaggtctctggagacatcttcagcaggtgagtgcttccacggctggctggagcccctcctggctcgaatc

SEQ ID NO: 671092 - DNA, 51 bp, Homo sapiens
tctggaaggttccatcccctgcagggcctggagctgcagtggttgctggag

SEQ ID NO: 671093 - DNA, 82 bp, Homo sapiens
cgcctgcggaggcggtcctatgacgccgcggcgagtcctttgcacatgttggcaacacacgcatccgcatcggcctccctgc

SEQ ID NO: 671094 - DNA, 100 bp, Homo sapiens
ttcgactgctagagccgagcgaagcgagggccctcctggacccgggagcggaccctggtggcggtgaagcccgatggcgtgcaacggcggctcgttgggg

SEQ ID NO: 671095 - DNA, 50 bp, Homo sapiens
atacaatgatggggcagcaagtggccaatctcttccagttgcgcctcttc

SEQ ID NO: 671096 - DNA, 75 bp, Homo sapiens
tgcctgtccccgggggcgccatggcgaccggagcgaacgccacgccgttgggcggtgcgtctttctacgtgaata

SEQ ID NO: 671097 - DNA, 90 bp, Homo sapiens
gctttggcaaagctggggattggccagctgactgctcaggaagtaaaatcgcggtttgctgcggtaatcatgaggataagagagccacga

SEQ ID NO: 671098 - DNA, 96 bp, Homo sapiens
cggcagcggcggcgcgggcggaggcagcagcaggcggatgagttccacccgttcatcgaggccctgctgcctcacgtccgcgccttcgcctacacc

SEQ ID NO: 671099 - DNA, 100 bp, Homo sapiens
cttctgctgatgagatttatgactgcaaggtggagcactggggcctggaccagcctcttctgaaacactggggacttcaaggacagcaaggaagaaaagg

SEQ ID NO: 671100 - DNA, 50 bp, Homo sapiens
aagggaaaactacagccaccacacacaagtgctgggctttgacaaacttc

SEQ ID NO: 671101 - DNA, 80 bp, Homo sapiens
ggccgttgccgccgtccgcgctcggcccccgcggagagacaatgcagatcttcgtgaagactctgactggtaagaccatc

SEQ ID NO: 671102 - DNA, 80 bp, Homo sapiens
ttggtccacaaggcttgctgcccaatctttgccaacaggagtctccccaggacagtgctatcacccgggatattaaccga

SEQ ID NO: 671103 - DNA, 100 bp, Homo sapiens
gctgctctgcgcccccagcctcctcgtcgccctggatgatacttgttgatgccactgttatcatcctcctagcagaagatagtcctactgagaaaatgag

SEQ ID NO: 671104 - DNA, 100 bp, Homo sapiens
agaagcatgctaagaacaacagtcaggccaagccttctgcctgtgatggcttgcgaggatccctggaacgcctccagctgggatacgtggacattgtctt

SEQ ID NO: 671105 - DNA, 120 bp, Homo sapiens
ttttagcatcgaaactaggagaaataagaatggctgtagaggaacttcagtctataataaagagatgttaccaaacgattccctggttatgattctgaaagcaaggaatttaatgcagaa

SEQ ID NO: 671106 - DNA, 75 bp, Homo sapiens
ggaggagcgaggcagctgtactaggactgggaacggcatttaaatcaaacggtattgagatggattgggttatga

SEQ ID NO: 671107 - DNA, 82 bp, Homo sapiens
gacgctaaacgtgccctactctgccccgggggagaggaagtactgtgagagtcttgcctgttgccgcccactcagcacagcc

SEQ ID NO: 671108 - DNA, 90 bp, Homo sapiens
cttttcgtgcaactgaaaatgacattgctaatagctctgatccagccacacgccaaatgctaattggtacggttctccatgaggtgtttc

SEQ ID NO: 671109 - DNA, 100 bp, Homo sapiens
acctgagcggccttctaccctcaggaggtctgctaccaaatgcactgcccagtgcaatgcaggcagcttctcaagcaggcgctgggcatgcttctgtggc

SEQ ID NO: 671110 - DNA, 82 bp, Homo sapiens
gtaatattagaacatacatgttggctcgcacagatatggaaaatcttgctttggtcgatggaccttgcactcaagtgaggag

SEQ ID NO: 671111 - DNA, 96 bp, Homo sapiens
gcacctgtcattcacacaaggcttttggaggacccgatactgggggccacccttcctgcaggccccatcagtgcagtttgacagtccagagtggga

SEQ ID NO: 671112 - DNA, 100 bp, Homo sapiens
cccatctcaccccccaagcggatactggtcttctcgtcggattgcccatgcacttgttgcagaaacagccaaggcacaactccagatgttccgagctcag

SEQ ID NO: 671113 - DNA, 89 bp, Homo sapiens
cctgctggaggagcgggccgggcggggggcctcggaaggagctggagtcagatggcagcactatggaggactattcacaggaggactgg

SEQ ID NO: 671114 - DNA, 78 bp, Homo sapiens
tttagttgagcaccggaaagaacgtctgaaggggcgtctcgattacctgagctctctgaaggtgaagggccttgtgct

SEQ ID NO: 671115 - DNA, 74 bp, Homo sapiens
aggtgttgatgccgccggacgccaacacatatctctttatggtacaagctcgaggtataatgttgagagaaaat

SEQ ID NO: 671116 - DNA, 98 bp, Homo sapiens
accggcgcatccaaactttgatctacgacgccctggagagaccgcggggctgggcgctgctttaccacgcgttggttcacagaagatcttattagacg

SEQ ID NO: 671117 - DNA, 99 bp, Homo sapiens
cccagtccatccaggcctccggcgaggcctcgacttcttccagtcgcccagtttttgccccaacccggagctacagggagctggccgactgcacctggc

SEQ ID NO: 671118 - DNA, 98 bp, Homo sapiens
tgtgagaccaagaggaaggggccagccctgcccatgtgactcactccgggaaccaggaagacagcgcttccagcaacccgtttgcactccccaactct

SEQ ID NO: 671119 - DNA, 100 bp, Homo sapiens
tgcaacttcaagtagtggaaggagtacagggaagtctataagctttgcaacagaattacagagtatgatctgctactgtttgaacggtcttggatgaaca

SEQ ID NO: 671120 - DNA, 75 bp, Homo sapiens
aacaatctatcagcctcctcctcaactttatgattgctgcatatgacagtgctgcaggtggagaaattttcagcc

SEQ ID NO: 671121 - DNA, 83 bp, Homo sapiens
agaatattttgcctgctggaacctgctgtatctactcaagagtggaagttttcacagaattgctgtgtgatgcgttacactac

SEQ ID NO: 671122 - DNA, 75 bp, Homo sapiens
caggcacacaagtgtgaggagttgctaaatgctcagttggatatgtcaagtgaccagatagctgccaatctgcaa

SEQ ID NO: 671123 - DNA, 51 bp, Homo sapiens
cttcaatactacctttatttccaccataggccagtactgatgcaggcactg

SEQ ID NO: 671124 - DNA, 100 bp, Homo sapiens
tatttcaagagtcacttctttacttggtgcaggaaggcagtctttgctacgtacagcaaaagttagagatgtttatgattacttccgagctgtcctgcag

SEQ ID NO: 671125 - DNA, 75 bp, Homo sapiens
ctggggttctgagactccctgtcccggaccgcagtgctcaacaggaaccttggattatattttacaacgctgtca

SEQ ID NO: 671126 - DNA, 75 bp, Homo sapiens
gtttgcgagcaggttctcggagggaccgggatagcgctccagggcagtgttaccagtgcccatcaggtgcctgcc

SEQ ID NO: 671127 - DNA, 100 bp, Homo sapiens
tgcaatgtttagccaacccaaattaccttaattagggagacgtggtgggcggtccttcctgtgacacgacccttgagtgacagttctatttgattgcctc

SEQ ID NO: 671128 - DNA, 97 bp, Homo sapiens
caggtacacaaatgcacgcgacaggaaccaggcagacatgccacagacgctgagtgcctccgacatggtcaccccaggcagcctcagcccacccccc

SEQ ID NO: 671129 - DNA, 75 bp, Homo sapiens
actcaagcctttctacatgagggataatgaagatggccctcagcacacggctggaggctcccaggtgattttcac

SEQ ID NO: 671130 - DNA, 73 bp, Homo sapiens
ccagctttcccccgagggtcaacgagaaagagatcggctcctgttctggatgtcagatatgcatctgcctcct

SEQ ID NO: 671131 - DNA, 100 bp, Homo sapiens
acagtaatgaaagtaaagcagatcctgggcagaaggatatggaatattatcttgtaaaatggaaaggatggccagattctacaaatacttgggaaccttt

SEQ ID NO: 671132 - DNA, 100 bp, Homo sapiens
ccagcagctcctggccaacagcactgcactagaagaggccatgctccaggaacagcagaggctgggccttggattgacttggcctctacttcttgttaag

SEQ ID NO: 671133 - DNA, 138 bp, Homo sapiens
gtccccactgaccagcgcgcaggacagcgccttcctcaacgacgcggacatggtcatgagctttgtgaacctgggtgtggacactgccagcggctgcagccgacttggaatgacctgggagacaaatacaacagcatg

SEQ ID NO: 671134 - DNA, 100 bp, Homo sapiens
cccatcttctggaggcaggtgtacaatgccaccattgcagagcatgccccggttggacactgctttctgcagggtcgacatgttaaaacgggtcagttgg

SEQ ID NO: 671135 - DNA, 97 bp, Homo sapiens
aagttacttattcttttaagaggtctgcctggttctgggaaaacaacattgtctcgggcatccgcttcgatcctgaaattccgcaaacactacgact

SEQ ID NO: 671136 - DNA, 74 bp, Homo sapiens
gctgtgattgctgaattgtctgggcagttactccacaggatccgctgaacataggatgttgccacaaaatctac

SEQ ID NO: 671137 - DNA, 82 bp, Homo sapiens
gaagacaaaggcttctaaagtatacgccacagcacatccattgtggagcagccttttggggctggagtgcagtggcatgatc

SEQ ID NO: 671138 - DNA, 82 bp, Homo sapiens
cggcggtagcggcagtggcggcgcgtaggaggcggcaaaatttggtttctctaatattactggaattgattactctccttct

SEQ ID NO: 671139 - DNA, 101 bp, Homo sapiens
aacgagcacaacaggagctacgaggagttgaaatttaaaagcctgttgattcaagaactttctaaagtatttccggaagacatggctaagtatcgaagcat

SEQ ID NO: 671140 - DNA, 51 bp, Homo sapiens
cccacggagcctccggggctgggccatgaagcccccaggaggagaatcgag

SEQ ID NO: 671141 - DNA, 76 bp, Homo sapiens
gttggagtgctggtgaatcatttcaagagttatttcgagaagtacgaataatgaagatactgaatcatcctaatat

SEQ ID NO: 671142 - DNA, 75 bp, Homo sapiens
ctgcggaccccgagtccagcgggcggcgggagggtgcgtgctctggaggaggccaacgccgacctggaagtgaag

SEQ ID NO: 671143 - DNA, 90 bp, Homo sapiens
gctgaaaacagactcctgtgatgtaaatgactgtgtccagcaagttgtggaacttctacaggaacgggtggtgaagaaggtgaagtccat

SEQ ID NO: 671144 - DNA, 100 bp, Homo sapiens
tggccaagtccgaccccatggtgcagagccagccgccaaggttgacctcagcttcggagccacctctggatgaactgcccccagcccccgccccattaaa

SEQ ID NO: 671145 - DNA, 75 bp, Homo sapiens
ccgcggcctgccgcaatggaaacatctatattctgagaaggacccctcgtccagtcattgtggaacccatggagc

SEQ ID NO: 671146 - DNA, 99 bp, Homo sapiens
cggaagaggccggatggagtccgtgagatgggttttagctgccgccggagtcgagatgtcatttgtcagagtgaaccgctgtggtccccgagttggtgt

SEQ ID NO: 671147 - DNA, 113 bp, Homo sapiens
cggggcttgccctggtcttgctcggccgatgaagtgcagaggtttttttctgacagagtctcactcccatcgcccagacttgagtgtagtgatgtgatcactgctcactgcag

SEQ ID NO: 671148 - DNA, 97 bp, Homo sapiens
cttctcaagatgtggagctctccttgcagatcggtgacacagttcacatcctggagatgtacgagggtctgtagcatctctgtctgttggagaaggc

SEQ ID NO: 671149 - DNA, 100 bp, Homo sapiens
cttctgcaagatgcggctgctggacggcggcagcttcaccgccgagtcctccaggggccatcgggttttacttttctcccaaatgacccagatgttggat

SEQ ID NO: 671150 - DNA, 83 bp, Homo sapiens
tggtttctggcctacagagtgccccaattttcaggttgactaaaacatgggcgggcatttgatgtagaactactgtacatagc

SEQ ID NO: 671151 - DNA, 95 bp, Homo sapiens
atatgctgtattcagctcaggaccaggcaccttctgtggaaggaggcaagtgaggcctatctggttggcctttttgaagacaccaacctgtgtgc

SEQ ID NO: 671152 - DNA, 96 bp, Homo sapiens
ggtttcgagatttgctgctaggggaccaaggatggcaaaacgacgacagttggcagatgcactacctgaacactcccctgccaaaacctctgctgt

SEQ ID NO: 671153 - DNA, 74 bp, Homo sapiens
tcaaactccgaatctgatttccactctcccaggaagtcttcggaaatcactgttgttctgttgtccccagttcc

SEQ ID NO: 671154 - DNA, 75 bp, Homo sapiens
gacagaacagttaatcctcaatttaagcctgatctaacccctagaaacagattgggaaaatgaggtacgttagtg

SEQ ID NO: 671155 - DNA, 82 bp, Homo sapiens
aggctggaacttgccctgtctcctcgcagatgagactggtcgaattgacaaatcttaccctacagtatgtggccacacagga

SEQ ID NO: 671156 - DNA, 75 bp, Homo sapiens
gcccactcgcctcacctgagcctgggtgaaaagagatttgaatgcccggaatgttctaaaaggtttatgcggagt

SEQ ID NO: 671157 - DNA, 75 bp, Homo sapiens
ctctgatgtcaatcttgagggctagttgactggtctgagtgtctccaatggaaaggaccaacttgtagtgttcca

SEQ ID NO: 671158 - DNA, 98 bp, Homo sapiens
agagcccagagcgacccttcctggccatcctgggcggagagaagaagaaggaggttcctgctgtgccagaaacccttaagaaaaagcgaaggaatttc

SEQ ID NO: 671159 - DNA, 82 bp, Homo sapiens
cggcggggctgaggcggccgcggggcccgagcgcaggaacttgctactaccagcaccatgccctaccaatatccagcactga

SEQ ID NO: 671160 - DNA, 50 bp, Homo sapiens
ccagtacccccttgccatggcagcaaagctgaccccgcactacatctacc

SEQ ID NO: 671161 - DNA, 74 bp, Homo sapiens
aatcaggcagttttgtgtccatgtgaacaactacggcaaagagcctcagccaagtgcagaagctgctgctgccc

SEQ ID NO: 671162 - DNA, 75 bp, Homo sapiens
gacgcagccaagcagcagcccctgacaggtgcccagggtggctccgtggcccgcacactcctggaagatgggaca

SEQ ID NO: 671163 - DNA, 75 bp, Homo sapiens
agagaggtacctctccttttccctctccctttccctaaggtgacttaagagattaaaattaatttggttgctgtt

SEQ ID NO: 671164 - DNA, 73 bp, Homo sapiens
gcaggcgccgagactgacaacgcggtcccacaggtgggagatgagggagcaggccacttcgtgaagatggtgc

SEQ ID NO: 671165 - DNA, 83 bp, Homo sapiens
cgactgagatctgatgatatttacaaccaggttttcctttggaatatggataaatacaccatgatacggaaactagaaggaca

SEQ ID NO: 671166 - DNA, 50 bp, Homo sapiens
cggatctcagaaggccagttcaaagacatctcgagatctggcgtgtttta

SEQ ID NO: 671167 - DNA, 75 bp, Homo sapiens
gcggcgacggcggcggcggcgggcacagtgccgtggaggtcccagcccccgctgcggttctcggaggtccggagc

SEQ ID NO: 671168 - DNA, 100 bp, Homo sapiens
gatgaaatcactcactgcatacggcctcaggacatcaaggagcgccgagcagtcatcatcctcaggaagtgggctgcttcgatccctacagtgacgatcc

SEQ ID NO: 671169 - DNA, 121 bp, Homo sapiens
aacggcagaccgtctcctgagcgccccaggtagaatttcaaagccatttcataattctgaatcatgtctgataacggagaactggaagataagcctccagcacctcctgtgcgaatgagca

SEQ ID NO: 671170 - DNA, 100 bp, Homo sapiens
ggagatgatggatcaggcaaatgataaaaaagtggctgctattgaagccctaaatgatgaaaattcccatgagtcagctgatttcagtgctgctgaacta

SEQ ID NO: 671171 - DNA, 100 bp, Homo sapiens
ccgatatcatttctgatctgtctgaatgtttaattaatcaggaatgtgaagaaattctacagatctctccagcgaacactgaatgagttaaaagagtatc

SEQ ID NO: 671172 - DNA, 75 bp, Homo sapiens
gagatatggctgcttcccgttctgccatgatgagaaacagcacccaggactatcttccaaagagttctggatatc

SEQ ID NO: 671173 - DNA, 100 bp, Homo sapiens
tacagagatgtcatgttggagaactacagcaacttggtctcactggggtgtccgcaatgttgccagtgtctgtctgcagattggctacccaactgttgca

SEQ ID NO: 671174 - DNA, 75 bp, Homo sapiens
ggcgaacgcggagagcacgccatgaaggcctcgggcacgccacaatggtgcgcatgaatgtcctggcagatgctc

SEQ ID NO: 671175 - DNA, 99 bp, Homo sapiens
gattgaggactgccagctggcgctgcagatgctagctaaacagttggaagctcttggtttagctgaaaagcctcagttggtgactcgctttcaagaagt

SEQ ID NO: 671176 - DNA, 75 bp, Homo sapiens
accagcgcagcgctgccatggagcccagcagcaagaaaaatggctacaaacttcctagcacatgagaagatctgg

SEQ ID NO: 671177 - DNA, 101 bp, Homo sapiens
ggaagatttactttcgaagctataacactgtgacttctgccgtgttcaccgtgggagacaacgtggtttcaggcagcgatgaccgcacggtgaaagtctgg

SEQ ID NO: 671178 - DNA, 75 bp, Homo sapiens
ccggaaccagacgatgagacagagttgcgaccgcgcggcagatttattgctaaacatgggtgcatttttggataa

SEQ ID NO: 671179 - DNA, 83 bp, Homo sapiens
cttggactgagtcctgcaggacacaggactgaattcggagaaggtagctgctctgatacagaaactgaattccgacccccagt

SEQ ID NO: 671180 - DNA, 101 bp, Homo sapiens
gacggagctgagacgaggagactggaaaacagacagcacctccagcacagcaagtatccgttacagcactgatgtgagtgtagatgaagtaaaagctttgg

SEQ ID NO: 671181 - DNA, 74 bp, Homo sapiens
tactttgtctgactacaatattcaaaaggagagaagatgactgaggaggaggtggagaccgttctggcaggaca

SEQ ID NO: 671182 - DNA, 100 bp, Homo sapiens
atttttccctctaccttaaggatgtgcaggatcttgatggtggcaaggaaatgaattcccagttcctgagcagttcaagaccctatggaacgggcagaag

SEQ ID NO: 671183 - DNA, 82 bp, Homo sapiens
cggctcccagtccctgaaagcattaccgggttcgctaggctcacagatatgtgtcacaaagatgtctacacggaactgccag

SEQ ID NO: 671184 - DNA, 75 bp, Homo sapiens
aaaggtgatctggacaaaggaacaggtatctcaggatcttaccaacagtatcattacagctgtgttcctttcagt

SEQ ID NO: 671185 - DNA, 90 bp, Homo sapiens
ttcaggaactggaaaagtacccgggtattcagctacgcaaagtagaagagcagcgtgaacaggaagctaagcatgaacgcattgaaaacg

SEQ ID NO: 671186 - DNA, 100 bp, Homo sapiens
agctgtatgacattgatgtggccaaggtcaacaccctgattcgcacagcctgattcaggcctcagagctggtcttgacccggcttcgacatcaagtggag

SEQ ID NO: 671187 - DNA, 124 bp, Homo sapiens
caaacacaggattcaccacagtacttcacatcgtcgttcacatgggatccagatccagttcaggagcttacctatgatttacgaagccagtgtgatgcaatcagggtgacaaaaaccgtccgtc

SEQ ID NO: 671188 - DNA, 96 bp, Homo sapiens
gggcggatctcatatcttcacttggcaaactcaacaagatgagcagcaccagcagtaagagggctccgaccacggcaacccagaggctgaagcagg

SEQ ID NO: 671189 - DNA, 124 bp, Homo sapiens
acgggcagggtccaccacggaagaggaagcgggcctcggagcctggggacaaaggaagcgagtcacgtcccagcgctgctccctggagtttctggaagatgccgtgggatgcgctccagcacag

SEQ ID NO: 671190 - DNA, 82 bp, Homo sapiens
aaagggaaaacttgctgcggttgctcaagattcccaaatgctggaaaatcctctttgctaagttgtgtttctcatgcaaaac

SEQ ID NO: 671191 - DNA, 80 bp, Homo sapiens
agcagtgtcatgcccatcacaaataaccctatcgcagccgggagttgctctatatgcaatcagtgctgtctactttgctg

SEQ ID NO: 671192 - DNA, 74 bp, Homo sapiens
ttaacgtctctgttagttcagaggggctgtttgcggggtggggtggggggttcgctatgtcggatgacgattcg

SEQ ID NO: 671193 - DNA, 98 bp, Homo sapiens
gtacccatctacctgctttggaaaggagcccttcagagacttgaagacagtgtgtgactctcctgtgagttaagagcactggctgagtcagacagacc

SEQ ID NO: 671194 - DNA, 125 bp, Homo sapiens
acgatctgcacttcgcattttggcattgacatttaattttagggtcctttatatagaagggagagtagccgtttccctggggagatggtaaccatactctattccataaccctcatgtgaatcca

SEQ ID NO: 671195 - DNA, 50 bp, Homo sapiens
gaaattcagacggctcccgaggtctattatcctcccagtccacaacgctg

SEQ ID NO: 671196 - DNA, 74 bp, Homo sapiens
tgaggaaaaagccaaagtgggaccaggcttccatgatgacgcccccaaggactacaggcaagtctctctgaccg

SEQ ID NO: 671197 - DNA, 95 bp, Homo sapiens
gcggggactactggtgcctgcgctgaaaaagcatgggcaccagcctcagcccgaacgacccttggccgctaaacccgctgtccatccagcagacc

SEQ ID NO: 671198 - DNA, 50 bp, Homo sapiens
gtgaggcctcctcagccacgtggaactttctggatgacgccccccctggc

SEQ ID NO: 671199 - DNA, 51 bp, Homo sapiens
gggcccggccacggcggagccaagtctttcctgcagctgcgcaactggacg

SEQ ID NO: 671200 - DNA, 100 bp, Homo sapiens
ccgggatgctattgagttaaatgcagccaattatacagtgtgatacaaactggactctcaggacaaaacgacaccagccaaaccagcagcccctcagcat

SEQ ID NO: 671201 - DNA, 90 bp, Homo sapiens
cagagtccaatggatcaacacagccaagagttgctacgatggaagttaaagggaaaaagcaattcacaggaaagagtacaaagacagcac

SEQ ID NO: 671202 - DNA, 75 bp, Homo sapiens
cttgagcagaggggcaggctgcagaagttggtggcaaaagaggaggagaagcagccccaaaagacgaaggaaccc

SEQ ID NO: 671203 - DNA, 97 bp, Homo sapiens
cagtggacgtggatttggggatggctataatgggtatggaggaggacctggagtttcctcaagaggagagaacttagtccaccaaattcaataccgg

SEQ ID NO: 671204 - DNA, 96 bp, Homo sapiens
catggcattcctcagggaatactttgagaggtcattaaggagtccaagcaggagcacaaggatgtgatgtgaggcaggacccacctggtggcctct

SEQ ID NO: 671205 - DNA, 100 bp, Homo sapiens
ctggactcagcggtagcaacctcgccccttgcaacaaaggcagactgagcgccagagaggacgtttccaactcaaacctgggttactaggtgtctttcag

SEQ ID NO: 671206 - DNA, 117 bp, Homo sapiens
cagcccttgagtttgtgcccgcccacgggtggacagcagaggcgattgcagaaggagcccaggagacgcaggtcagaatggaaatgggctgcagaccgggcagctattgtcagccgc

SEQ ID NO: 671207 - DNA, 100 bp, Homo sapiens
cggctgcctctgcgaatggacggcgtgggaagaggtgcagtagacattgttgcaatcatgatcggcaatctgaaaggcacaaaaattctgcaatctattc

SEQ ID NO: 671208 - DNA, 100 bp, Homo sapiens
cttcatcaacaacaacgtcaaggcctaccgggacgacattgacctccagaacctcattgactttgctcaggaatacgagctgacatggacccaaatcctc

SEQ ID NO: 671209 - DNA, 74 bp, Homo sapiens
ccaaaacttaccctcgcctggacatagagaaagaaacactttgtgctactctgtggggctttggaaaagcatgt

SEQ ID NO: 671210 - DNA, 75 bp, Homo sapiens
atggtggaatgtatccgggaggtcaacgaggtcatccaggtcctggtgcttgatggtcgaggccatctcctgggc

SEQ ID NO: 671211 - DNA, 100 bp, Homo sapiens
ggtcttcattgttgggggagcaaatccaaacagaagcttctcagacgtgcacaccatggatctggatttaaagattgattgtctccaggagagtcaagaa

SEQ ID NO: 671212 - DNA, 98 bp, Homo sapiens
ggacattgaccaatgctcaagtgatggctggttttcaggaactcataaatgccacctcaacaattcagagatgccttggttcaagggatggaaagtca

SEQ ID NO: 671213 - DNA, 96 bp, Homo sapiens
ccttgtttaatgactttggtgccctcaacatctctcagagacgaaagcaacgcacctcttgctttttcctccaaagtatgttatgttaagtttcgt

SEQ ID NO: 671214 - DNA, 98 bp, Homo sapiens
caggatcctcagaacactgttaaggtccagtttctcttcagcaacgggtagcagaattggaaaaaattaatgcagaatttttacgtgcacaacagcag

SEQ ID NO: 671215 - DNA, 83 bp, Homo sapiens
aataagtctccttccagataatcttctcaggacaccatccgttcaattggtacaaagctgggcacactacaaagagtatcttg

SEQ ID NO: 671216 - DNA, 75 bp, Homo sapiens
gttgctaacccagaacactatattaaacatcccctacagaacagataatctcagtgataccttgaagaagctgaa

SEQ ID NO: 671217 - DNA, 75 bp, Homo sapiens
cacagtctcaagaagaatttaaactggaggacctgaagaagctagaaccaatcacggaacagcaaatttctgaga

SEQ ID NO: 671218 - DNA, 115 bp, Homo sapiens
tgtgattctggagagtgacccccagcaagtgatccagaaggtgaattttaggcctccccagtttaaattagacccccgcctagctcgactcctgggcatccatacccagactcgt

SEQ ID NO: 671219 - DNA, 101 bp, Homo sapiens
ttcctgtgcagtcctgttggaatttatcaagaagttggtatatgtttacctggttcgatatgctgaagaacagcaggatcttgcactcctgtccataagca

SEQ ID NO: 671220 - DNA, 75 bp, Homo sapiens
catctgttgaaatagaatgacatgtatcgaaggatgatcgcagtgatgtggagagcagctcagaggaagaagatg

SEQ ID NO: 671221 - DNA, 153 bp, Homo sapiens
cgagagaggcaccgggatcgtgaccgagaccgtgaccgagagcgtgaccgagagcgcgaatatcgtcatcgttagaaggcacagaccccacaggctcctcggacactgggtccatcacctcctgccccatcatccactccaacaccaacagcc

SEQ ID NO: 671222 - DNA, 91 bp, Homo sapiens
gccatggcgaccggagcgaacgccacgccgttggacaatgcagatcttcgtgaagactctgactggtaagaccatcaccctcgaggttgag

SEQ ID NO: 671223 - DNA, 99 bp, Homo sapiens
aggaaaatgttttgccacgtggatgtgaagatttcctctaaaagatgtgttcagagcaacattgttttgttgacacaagcatttagaagaaagtttgtg

SEQ ID NO: 671224 - DNA, 100 bp, Homo sapiens
tcctatgggctctcggccgaagtcaagaacaaggctttctccatatttacgtgcttgtaactctggcatgacctttgctccagtctctaccagagggcgg

SEQ ID NO: 671225 - DNA, 50 bp, Homo sapiens
ggggaagaacgtgctactgctggaattcctggaaaactcaagcaattcgt

SEQ ID NO: 671226 - DNA, 97 bp, Homo sapiens
tggcacccctttgaagagaagattgtcagcagttcgttcacgtgcaactccagggacctgctgggctgcttggcacaggagcacaacatcagcgcga

SEQ ID NO: 671227 - DNA, 75 bp, Homo sapiens
gacatgggggcctcaaacgtggagatcaactcctctctgttaatggagtggacccactgatctcagcatgaagag

SEQ ID NO: 671228 - DNA, 74 bp, Homo sapiens
tctcagagattatgcagccctgggcacagactgtggtggttggtagagccagaatctcacaaactatgatctct

SEQ ID NO: 671229 - DNA, 100 bp, Homo sapiens
aaggatggggatggctgcactgtcctgcacgtcgtcgctgcccactccccaggatacctcgttaagcctttccgcttggccctcatccagcttcagattt

SEQ ID NO: 671230 - DNA, 100 bp, Homo sapiens
aaacgtagggaccacatcaaagacagctttcacagtttgcgggactcagtcccatcactccaaggagagaaggcgcagttgtgtagcagttgagtaatgc

SEQ ID NO: 671231 - DNA, 75 bp, Homo sapiens
cacagaagctttagtcagcggaccaaagccacctattgaaaggcgttatggttttctatggcccggactgaatgt

SEQ ID NO: 671232 - DNA, 88 bp, Homo sapiens
gttgcatgctgagaatttgaaaaatgaagatgatgtagacactggactattagtgatgccaattggtggaaaggagaaaatcacagag

SEQ ID NO: 671233 - DNA, 101 bp, Homo sapiens
cggacgcgggagggcagcaccacgggcggcagacaatgcagatcttcgtgaagactctgactggtaagaccatcaccctcgaggttgagcccagtgacacc

SEQ ID NO: 671234 - DNA, 100 bp, Homo sapiens
ccgtgcactatattgcagttggacatgagaaccgtgcaaatttctgatctagagaattagaggagacagcactgattgcagtgacagaagcggtgccagc

SEQ ID NO: 671235 - DNA, 75 bp, Homo sapiens
catggacatgccccagctggtttgccctccaggaaatgggtcctgatgaatatgaagagatggaagaagaggagg

SEQ ID NO: 671236 - DNA, 90 bp, Homo sapiens
cgaaggccccttctgcctgatggcacattcagctcctgtaagaagttgaagcagttggaggaaaggccttgccatgtattgttgatgtga

SEQ ID NO: 671237 - DNA, 75 bp, Homo sapiens
tgcttgcccggcccccgcctgcctccgccggctacagcgggaagagcggtgctggagaatctggtaaaagcacca

SEQ ID NO: 671238 - DNA, 87 bp, Homo sapiens
gcgaatactggaagagaataaccgaaaaattgcagaagcacaagccaaactgggcaagactggagagttaaatcagcttttaaatgc

SEQ ID NO: 671239 - DNA, 76 bp, Homo sapiens
gtggacaagctcctgctagaggaggcgttgcaggacagcccccagattctcacatgcttaacactggaaatgattt

SEQ ID NO: 671240 - DNA, 90 bp, Homo sapiens
cacgtacggggcaccaggcgccggcaacggctccctctcgggcgactggtaccgcaggaaccagaaacagatgattatgctgagattata

SEQ ID NO: 671241 - DNA, 75 bp, Homo sapiens
ctagggctcagggagcaggagcttcaggttgtccgagcatctgggaacaaattatgcgcacagccatgaagtata

SEQ ID NO: 671242 - DNA, 100 bp, Homo sapiens
cgcgacggcgacgtcgctggccccggctcgagccccgggggtccggagaaacgtgaagagggctggtgggtggtgattggagatgccaagtccaatagcc

SEQ ID NO: 671243 - DNA, 100 bp, Homo sapiens
aaatcccctcgcttatcctgtgggggccgccgggctgcggcaaggttgcagagcctgaggcctgtgatcagatgtacgagagcttagcgcgactccattc

SEQ ID NO: 671244 - DNA, 74 bp, Homo sapiens
atctcaaaaacaaaattctgaactcaggacttggcaaataaaccgagaaaactggtgtacaatagagccatgcc

SEQ ID NO: 671245 - DNA, 95 bp, Homo sapiens
tggaagggacgctaattcgggtacccattccccaactgcttttcaggaagccttggacgctgcaggtgataaacttgtagtagttgacttctcag

SEQ ID NO: 671246 - DNA, 100 bp, Homo sapiens
gaagatcggccgcccgggctacaaagtcaccaggagactaaagtccatcaaaaacatccagaaaattaccaagtctatgaaaatggtagcggcagcaaaa

SEQ ID NO: 671247 - DNA, 98 bp, Homo sapiens
cagcacctgcagcagcacctgcatggctctggggaggaggaggaagaggaagaggaggatgacccacttgcacgaaagcaagagattatcaaagtcac

SEQ ID NO: 671248 - DNA, 90 bp, Homo sapiens
ccgttccagttcacaaacctggcagctatcccaccaaatattttggttgtgagctgggagcacagacccagtttgatgttaagaatgacc

SEQ ID NO: 671249 - DNA, 82 bp, Homo sapiens
ctctttcgactccagaggagaagctggcagctctctgtaagaaatatgctgatctttactatactggcaattgctggagaag

SEQ ID NO: 671250 - DNA, 95 bp, Homo sapiens
cattaacaaatggttttgacactccagaagagaggtatcagaagcttaaaaagctctggtagctgaagaacatctcacagtggacgccagggtct

SEQ ID NO: 671251 - DNA, 75 bp, Homo sapiens
aaggattccaagtaactcttatttggtatggcatgaattgccttattcagtttgaagattttgccaatgtgaatg

SEQ ID NO: 671252 - DNA, 97 bp, Homo sapiens
gtccccggcacacgcgcagccccggcctctcggcctctgccggagaaacaggaagcacaagcctatgcagacgacaacagtttgctgttcatggaga

SEQ ID NO: 671253 - DNA, 83 bp, Homo sapiens
cggcgacggaggagagcagctcctcactgtcaagcacgagctgcggactgagatggggtgatgattatgatgaagaaggtgaa

SEQ ID NO: 671254 - DNA, 118 bp, Homo sapiens
agcactctggctggcaccaggaaagatgttgaagtgactaaggagacgaggacttgctatgttgccagtttggtcttgaactcttggtctcaagtgattctcctgccttgggttccca

SEQ ID NO: 671255 - DNA, 100 bp, Homo sapiens
cccaacattaaatgaaagatatttattacttcatctgcttggtagaggtggctttagtgaagtgtataaggtacaagaaaattccccaggacacagagct

SEQ ID NO: 671256 - DNA, 83 bp, Homo sapiens
ccgcactcctggtcctgctcggggctctgttcccagatgatatcatcaagttgaatcgaaaggaagggaagaagcagaatttt

SEQ ID NO: 671257 - DNA, 75 bp, Homo sapiens
gcagacttggccaaatggacgggactattaaggttaaacccatccagagtaatggctgcggccttacccaggacc

SEQ ID NO: 671258 - DNA, 75 bp, Homo sapiens
gttcacccgctgccgggcaccgaggaccagctcaatgacaggttgtttacattcagagctctatcaataagagga

SEQ ID NO: 671259 - DNA, 122 bp, Homo sapiens
agtcagtcagagagccttgggccagagttccaggggctctgggagtggctgccagggacaggagagagtggcaagagtacgtttatcaagcagatgagaatcatccatgggtcaggatactc

SEQ ID NO: 671260 - DNA, 82 bp, Homo sapiens
ggcggggctgaggcggccgcggggcccgagcgcagcaaacggggattcagcgtccgatcctttggaacagggactcacgtga

SEQ ID NO: 671261 - DNA, 50 bp, Homo sapiens
aagccttcctttatcgctttcaggacccagatgatgtggtaccagttggc

SEQ ID NO: 671262 - DNA, 90 bp, Homo sapiens
cccaggtgtctgagcacagcatcatcaaggacttcaccaagcagcgtttagtgggctacagatggcatggcatctaaaaccttacaatgc

SEQ ID NO: 671263 - DNA, 97 bp, Homo sapiens
gttatgttcactgctcttcagcctcagcggcagtgttctgtgtgcagaatcttgacaaaacttttggaagtgtcagatgatccccaagtcttagctg

SEQ ID NO: 671264 - DNA, 75 bp, Homo sapiens
acgtcccgctggatctgacccgagaaaccgaagctgaaagactggcatcctcctgggggctttattctgggatta

SEQ ID NO: 671265 - DNA, 100 bp, Homo sapiens
aaagagatcaccgacaagatcaccacggacgagatgatcaaacgcctgaaggatgggaagcacaaaatgcaagaggaaaatgttaaactaaaaaagcccc

SEQ ID NO: 671266 - DNA, 100 bp, Homo sapiens
tcatcattgatggtacatggagccaggctaaggacattttctataagaactccttgttccgacatcccaaacagaacattaaccaggtggtatttgttgg

SEQ ID NO: 671267 - DNA, 83 bp, Homo sapiens
aaggaactcgtcctacgtaacacagccagttaggaagttactagagtctaccccatcgccagtcgtcttctgccacaatgaca

SEQ ID NO: 671268 - DNA, 100 bp, Homo sapiens
cagaaggcgccaccatggcggcgcccccgcagcccgtcacccacctcatctttgacatggacggacttcttctggccacgagactcaaacaacttgctgg

SEQ ID NO: 671269 - DNA, 126 bp, Homo sapiens
aacttcggcaagatccagatcgggatttacgtggagatcaagcgcagcgatggtgtggccgacgacgatgccctcgctgaggagcgcatgcggagaggccagaacgccctgccagcccagcctgcc

SEQ ID NO: 671270 - DNA, 101 bp, Homo sapiens
tgccggagatggaaacaggaaagcctgttgttttgtcgtcccagagaaagctgatggtttgtgttttaacttaactgtgattgcatcgagttgtaccccac

SEQ ID NO: 671271 - DNA, 98 bp, Homo sapiens
tgtactggaaatcagtttgctgaaattaatcaacgattcttgaagttgaagaaaagcagcctcccgcgacgatgcccctcaacgttagcttcaccaac

SEQ ID NO: 671272 - DNA, 75 bp, Homo sapiens
acaaaaaatggacttgactatgcactcaggttgaggaggaagaggaggagttggtcttgctgtctcaggagtggc

SEQ ID NO: 671273 - DNA, 75 bp, Homo sapiens
gcgggtaactgggccgttgccgccgtccgcgctcggcccccgcggagaggaacagtggaggccatgtgtcttttg

SEQ ID NO: 671274 - DNA, 88 bp, Homo sapiens
tcctcacatgcataatatagttgaggacaaattgatggccaggagatcactgccaccgccgtgctggccccctggcctaggccacccc

SEQ ID NO: 671275 - DNA, 100 bp, Homo sapiens
tacgctgccgccaaaggagacttcccctccctgaggcttctcgtcgagcactaccctgagatcatgcggccagatgatgccaacgtggccggcaatgtcc

SEQ ID NO: 671276 - DNA, 75 bp, Homo sapiens
cagcccgttcgctggactgcaaaccgagctcccgtctgccttgcagaatatgcttataggcgtggaattgcagag

SEQ ID NO: 671277 - DNA, 100 bp, Homo sapiens
tttcgacacacctgtagacgttcgccaggtaaagaacatccatgatagcagtcttctgtaaatcgaacttttcaagaattctctgaaggaaccaagtagg

SEQ ID NO: 671278 - DNA, 75 bp, Homo sapiens
cgatgatgattctagcaggttcctgagtcctcgagcgcgggaagaaagatctgactgcagccatgagcagcaatg

SEQ ID NO: 671279 - DNA, 101 bp, Homo sapiens
gatgatgataatactcagaatcaggagaaggaaatgctgcttagattaaatgcgttgttggaattacatgaacgacagccttcgcaccgacgtcttcgtgc

SEQ ID NO: 671280 - DNA, 100 bp, Homo sapiens
tattttttgctgaaccacccttcaaggctagagtaccgtggcacaatctcagctcattgcaacctctgcttcctgggctcaagcactctgcccacctcag

SEQ ID NO: 671281 - DNA, 101 bp, Homo sapiens
cgacggccgctgcctaagctggaaagctgctttgaatgctgcatcaagtgtctgggaggagtcccctacgcctccctggtggccaccatcctctgcttctc

SEQ ID NO: 671282 - DNA, 100 bp, Homo sapiens
gaaggcgattggatgcggcggcggcggcggatcccggagagccccggagtgagcggagtagcgagtcggcaacccggagatcaatgaactgagccatgtt

SEQ ID NO: 671283 - DNA, 74 bp, Homo sapiens
gcaaataatcacagattagctattttccgcagatttccagtggccccactgatcccttatccactcatcactaa

SEQ ID NO: 671284 - DNA, 138 bp, Homo sapiens
cggcgcctcggagaagaaggaccccggcggcctcacgcactcgggcctctggaggatctgctgcctggaagttattctctagctgaggatgatgatgttgaacaagatagatacagtgtctgttccctgcagccacca

SEQ ID NO: 671285 - DNA, 101 bp, Homo sapiens
ctttgcagactccagctggaacccctgctgcaagcgatggaggaggaacaagcacatcatgattgacttggggactggcaacaacaacaagattaactggg

SEQ ID NO: 671286 - DNA, 51 bp, Homo sapiens
gtggcaaacctttcttgagctcagcacccaccaaggctccggatgtgttcc

SEQ ID NO: 671287 - DNA, 82 bp, Homo sapiens
gttcacagagctagccggacgtcctccgactcaagtacctggagtagaacagaaaaattattatgtctgtgttcccttggga

SEQ ID NO: 671288 - DNA, 82 bp, Homo sapiens
gaggccaatgatgggagaccaccgggatgggcaggctgaaggtgatgtggccgccctcaaccgacgcatccagctcgttgag

SEQ ID NO: 671289 - DNA, 87 bp, Homo sapiens
tgaacgaaagcagtgacggaggagcttgtaccaccgtagagacggggcttcatcaggttggccacgctgatctcaaactcctgagct

SEQ ID NO: 671290 - DNA, 100 bp, Homo sapiens
ctggaagcgcttcctggatgagaagagcggcagtttcgtgagcgacctcagcaggatgggtcatcagttaaggaagttgaaacctaccaccggacacgtg

SEQ ID NO: 671291 - DNA, 75 bp, Homo sapiens
tagctgaaataacccttgatcctcctcctaattgcagatataagagttcggaccgcccagcacacaaggtcagca

SEQ ID NO: 671292 - DNA, 100 bp, Homo sapiens
aaaagatgaaatggagcagaagtgcagaatgctgcttctaaattacttgggcaaaattgggtccaaaacgcctttgatggcagctgcaactttttccgtt

SEQ ID NO: 671293 - DNA, 100 bp, Homo sapiens
gctgagtgcggcatgatctccatcaccgaatggcagactcattgctatggacagtgctatcaccctgtggcagttccttcttcagctcctgcagaagcct

SEQ ID NO: 671294 - DNA, 82 bp, Homo sapiens
cctaccaagaagccagtcaagcggccagggctgaaggcctttcggcagcagctgaggaagaccacgcggaccaaagggtttc

SEQ ID NO: 671295 - DNA, 50 bp, Homo sapiens
gggactcagatgcccttagacttgaaagactgaaagaggtgtccccactg

SEQ ID NO: 671296 - DNA, 51 bp, Homo sapiens
ggtgtcttacttcctcatcaccggaggtgtatgtatggatctatgacccag

SEQ ID NO: 671297 - DNA, 100 bp, Homo sapiens
atttcgttagtcatctaaatcagagacatcaatttgattatggagaatttgtgattcctggattttgtgaagggggatttaaaatccatgaggctgatat

SEQ ID NO: 671298 - DNA, 100 bp, Homo sapiens
ccccactcctccaagaaccaacccccaaattggctgggacagagcaaatttttcagaacataaaacaagaatatagtcgttatcagaggtggagacattt

SEQ ID NO: 671299 - DNA, 100 bp, Homo sapiens
gagagaggcaccgggatcgtgaccgagaccgtgaccgagagcgtgaccgagagcgcgaatatcgtcatcgttagaagagctcttcagaaaccaggctgct

SEQ ID NO: 671300 - DNA, 83 bp, Homo sapiens
agcgaagctgctgcggttcctgagccggagacatgcaagaaagcacttcagccaagcagaagggagccagctggacgaggtgc

SEQ ID NO: 671301 - DNA, 96 bp, Homo sapiens
ggatttggcgctgcagaaccagatccgggagcacgtcatctccatcgaggagttgcatgctgagaatttgaaaaatgaagatgatgtagacactgg

SEQ ID NO: 671302 - DNA, 100 bp, Homo sapiens
atgaagaggatgatgaagatgaggactccacagtattcgacatcaaatacaggcctcccgaggagcccagacagctgcagccacagctccccgtatcaag

SEQ ID NO: 671303 - DNA, 100 bp, Homo sapiens
agatgtctaacgataaggagcggtttgccaggattaaactgcaaatatctcatgaagctgctgcctgtatcactggtctccgggcagccatggaggcttt

SEQ ID NO: 671304 - DNA, 82 bp, Homo sapiens
gaagaatttcctctgaagcaccggtttttagaacttcagccataaaaatgggcagaattttccttgatcatatcggtggtac

SEQ ID NO: 671305 - DNA, 95 bp, Homo sapiens
aaatttatgcacaaagatggttcggtcccacttgcagcagaaattcttgctggaggctgctaagctgtgctagaacaaaaatgcaatgaaagaaa

SEQ ID NO: 671306 - DNA, 98 bp, Homo sapiens
cacctatagcatcaacttcttctccaagacctgcgaccgcatcaagcagtccgccagcggaaccaagcggcgcgtgttcatcatcgagaccatgggcg

SEQ ID NO: 671307 - DNA, 75 bp, Homo sapiens
ctcttcctcacttccctgtactctcatcgctctcggcctccgacacggtgtcgtgaaaactacccctaaaagcca

SEQ ID NO: 671308 - DNA, 98 bp, Homo sapiens
cacatgtttccgcggagcggacccagcaatgacgagatgaccaagcgagacgtgcctggcttcgccatcgggggcctgagcgggggtgagagcaagtc

SEQ ID NO: 671309 - DNA, 82 bp, Homo sapiens
aggaacagggcagacgttagcgtgagtgatcactctcaatcccggatgagctctctccggaacagcacaacctttctttata

SEQ ID NO: 671310 - DNA, 94 bp, Homo sapiens
gcttcgtgaacatctagcacagaaaccagtatttctccccagattgatccaaatcctgatcagtcagcagatgatagaccatcctgcccctctc

SEQ ID NO: 671311 - DNA, 114 bp, Homo sapiens
gaaggaaatcagagggtgttctagggacttctgaagaagatcaagcgtttcctggaggacaccacggatgatggagaactgagcaagttcgtgaaggatttctcaggaaatgcg

SEQ ID NO: 671312 - DNA, 75 bp, Homo sapiens
cacaggtagccctggacggcattcagtgttttggtcaagtttacccatgggggaactggttccagccaaaccgca

SEQ ID NO: 671313 - DNA, 75 bp, Homo sapiens
ggacaacctgataaggggtcatcaggagacttaattcagtgcacaaatgagatgaatgtgaacatcccacagttg

SEQ ID NO: 671314 - DNA, 88 bp, Homo sapiens
aaggcgcgagtgaggaaaggaggtactgtagccctgggcgctgcctatggcacagccaagagcggtaccggcattgcggccatgtctg

SEQ ID NO: 671315 - DNA, 90 bp, Homo sapiens
ggcctctccagaagacaagcagatgccgctatgcttcctgaacagcccacagaactgaaaattgggccgatttccacctatgatgcatca

SEQ ID NO: 671316 - DNA, 75 bp, Homo sapiens
catgatgcctggtgccccattacaacccgtggacaaggaagatggggagccaaagaccaagcatctcagagaaga

SEQ ID NO: 671317 - DNA, 110 bp, Homo sapiens
ggggcaagagctacccgctgtgcccctactgctacaaccacccacccttccgagacatgaagaaaggccgcatccgaaacactccagagaccgacgagtccctgatcgac

SEQ ID NO: 671318 - DNA, 75 bp, Homo sapiens
tgattcctgggagcacatccatttcattggcaagtgaagtaagaactctgctagagaggaaatggctgcttcatc

SEQ ID NO: 671319 - DNA, 82 bp, Homo sapiens
ctgatgtccccctcctggcagcccagacgtttattcagaggtacaatgactcttcttgcttttcacctaagttgaataagca

SEQ ID NO: 671320 - DNA, 100 bp, Homo sapiens
gggaggttacgcagcaaaccatccagaaggcctccggtgtggctgtctctgatggtgtcatcaaggtgttcaacgacatgaaggtgcgtaagtcttcaac

SEQ ID NO: 671321 - DNA, 75 bp, Homo sapiens
ctgtccttcatgcagtctctcattggcttctttgagactgaaatggcagggccgcatcatcgagtgcacacactg

SEQ ID NO: 671322 - DNA, 74 bp, Homo sapiens
ggctgtgttgacatcaaggatctaccaggatcaagttgctggtgaatgtattatagaaaaacagggcagaatcc

SEQ ID NO: 671323 - DNA, 96 bp, Homo sapiens
agaaggttgggttcagaagaggggctaaggcagctggataagcacagccaggccacagcccagcagctggtgcagctcctcagcaagcagaaccag

SEQ ID NO: 671324 - DNA, 87 bp, Homo sapiens
gcgaaaggctattgttgcagaccgggtttgatcccatataatttcatctgtgtgcagacagggtccatcctgtcaaccctaacctct

SEQ ID NO: 671325 - DNA, 74 bp, Homo sapiens
gacggaatgcctccatacatggaagtctgttagaactgctgtgctgatcaacgggacgctccgtctttgaagaa

SEQ ID NO: 671326 - DNA, 100 bp, Homo sapiens
accacctcagccaccctgaccactatcatcaccatggaaaaagtgacttgagcagtgccaaacccaagtctgaaatccacgtgtctatggccactccggt

SEQ ID NO: 671327 - DNA, 99 bp, Homo sapiens
caaatctgatgtgatctctcagctggagcaagaagaggacctgtgcagggcagagcaggaggccccccgagactgtgccctgtccacggtgcctcctgc

SEQ ID NO: 671328 - DNA, 75 bp, Homo sapiens
gaaagggaagagatgatttctccatcctgaacgtgcagcgctctccacacaaggagatgcaagtcaggtgattgg

SEQ ID NO: 671329 - DNA, 95 bp, Homo sapiens
tgatccagaagtccagagctgaggactgcctgtttgcagtattctaccttgtaaatactgttatttgtatatactgtaaatgatgacatcggtgg

SEQ ID NO: 671330 - DNA, 75 bp, Homo sapiens
ctggccaaggtgattcagattgcaacgtcatcctccacagctaaggacgtggtgggtcctctggtgcgaaattcc

SEQ ID NO: 671331 - DNA, 100 bp, Homo sapiens
tacccaaactactgttccttcaaaagccagcagtgtctgatgagaaaccgcaatcggaagattgatgaggacatgactgcccgaattagcatggctgatg

SEQ ID NO: 671332 - DNA, 82 bp, Homo sapiens
ttggtgattctctgctagatgttgtggttgaaaataatctagatattgatggctttgggtgataagtctgtcagagttatgc

SEQ ID NO: 671333 - DNA, 96 bp, Homo sapiens
tcagctgcccccctctgccctgtgttgagcccatcaacgtggaaggaagttgctgcccaatgtgtccaggattgtcaccagacctgcaatctatgg

SEQ ID NO: 671334 - DNA, 51 bp, Homo sapiens
gtttgccatcccaaggccgaagatgctgtctttgcatttcaactacgcaac

SEQ ID NO: 671335 - DNA, 82 bp, Homo sapiens
cacactgctgtttaccttggcgaggcctttcaccaagtccatggcacggcatatcttcccaaagatcttggccactatggac

SEQ ID NO: 671336 - DNA, 95 bp, Homo sapiens
cacacagtgtgcctgcaacctgtccggggatcccagggagaacccagtgacttgattgtaaaaatttacagagcggaatcatatgctggtctcca

SEQ ID NO: 671337 - DNA, 96 bp, Homo sapiens
ttttttttgcggaacctgaaaaattcaagaagttgaaaaacgcttttcacgtcacctggagagatgcacagtaaccctccactgagtgaagaaatg

SEQ ID NO: 671338 - DNA, 50 bp, Homo sapiens
agaaatgcttacacacagaaatgatcccctgtaagcagcttacagattcg

SEQ ID NO: 671339 - DNA, 127 bp, Homo sapiens
ggtatcttccttgatcagcctttacagtaaaaatgacccatctatggctgcttaatgccacgcccagatttcttctaccgctgcttccctgatgggctagcccattctgacttgatgtgtacagggg

SEQ ID NO: 671340 - DNA, 100 bp, Homo sapiens
ctcacgcctgtaatctcagcactttgggaggccaagaaagcagagaactcatcaaatgaggaggaaacgtcaagtgaaggcaacatgagggtgcatgctg

SEQ ID NO: 671341 - DNA, 97 bp, Homo sapiens
ctctatccggtgaagctctacgtgtacgacctgtccaaaggcctggcccggcggctcagccccatcatgctggaacccggcagtgggcaggtgtttg

SEQ ID NO: 671342 - DNA, 75 bp, Homo sapiens
tgatcaagtaccttgagacactcctttactcacagcagcagggtaagcttgatgattaccaggaacgaatgaaca

SEQ ID NO: 671343 - DNA, 89 bp, Homo sapiens
ccgctgccgccgcccccagctcccccgcctcggggagggcaccaggttttggcacaaataccagtgggaatagtatttttggaagtaaa

SEQ ID NO: 671344 - DNA, 100 bp, Homo sapiens
catggatcctagcatcctgaagggagagcctgcgacagggaaaaggcagaagacttatgcagagatggaccccaccacagcagccttggagaaggagcat

SEQ ID NO: 671345 - DNA, 97 bp, Homo sapiens
gtcgcctggaggaccagtatttcccatggaggcctatccctcggccagatcctgtgcataataatgaagaaacacatgatcaagtgctgaaaaccag

SEQ ID NO: 671346 - DNA, 100 bp, Homo sapiens
ttcattcagaccttggctacaggcacaaatacatttacaagagccctgagctgccacggatactgaggttaaacaggctgattctggaagttctgaggaa

SEQ ID NO: 671347 - DNA, 95 bp, Homo sapiens
cctagctctcctctctttgcagagccatacaaagttgatatacacatgacaccatccactgacttctataagaaattagccttggactgttctgg

SEQ ID NO: 671348 - DNA, 101 bp, Homo sapiens
tgtttagccaacccaaattaccttaattagagcctatctctggcagaagtagccaacgagctggacacggagaccctgcggaggctgaagcgggagtgtgg

SEQ ID NO: 671349 - DNA, 95 bp, Homo sapiens
ccactgcagaccacatgctggcctaggcggcctggccccaaattctggccagttttatctccggcctcttcaatttctacgaggacttgtacttc

SEQ ID NO: 671350 - DNA, 75 bp, Homo sapiens
cagtgccaggcagcgggcacccaggcgtggcggccaccaaggtgttccagggcgtcctggagctggagggcgtcg

SEQ ID NO: 671351 - DNA, 102 bp, Homo sapiens
gccaaaaggaaatgcatctttatgtcagaaacacaaagcagcccaaccaaaggttggctggggaacagaccagggaattggtggatttggagaagagccggg

SEQ ID NO: 671352 - DNA, 148 bp, Homo sapiens
gagagaagacgatctgcacttcgcattttggcattgacatttaattttagggtcctttatatagaagggagagtagaaaactgtcgctgaaaagcaggagaagagaaatcaggatcgcttgaggaggagagaggagagggaacgggag

SEQ ID NO: 671353 - DNA, 50 bp, Homo sapiens
tggagcacgcagacccgcttttaaaggaatggaagttggatacactttgt

SEQ ID NO: 671354 - DNA, 118 bp, Homo sapiens
ccactgactcctacctccaaagtttatactatcagaccttattttcctaaggatgagtcaccaggagactaaagtccatcaaaaacatccagaaaattaccaagtctatgaaaatggt

SEQ ID NO: 671355 - DNA, 100 bp, Homo sapiens
cagacgcggcacagagagggcctgggagcttgctgcagcttcaggttgacatcatggacatatgtgagtccatcctggagaggaagcggcatgacagcga

SEQ ID NO: 671356 - DNA, 100 bp, Homo sapiens
aagaaggagtacctgagcagcctccagccccgcctcaacagcatcatgcagaacactcgtgaaactgctcaggccatcaagggtatgcatatacgaaaag

SEQ ID NO: 671357 - DNA, 100 bp, Homo sapiens
aaatcaactacctaatgttatacaggctctggaaaaacatgaagcatcattagttattcctgctggtagaactcttccaagttttaccacagcagaactg

SEQ ID NO: 671358 - DNA, 73 bp, Homo sapiens
cccagacctcatcatcaactccatccaacacttcgtttactccgctccttcgagaactcatagaacggaagac

SEQ ID NO: 671359 - DNA, 82 bp, Homo sapiens
gctgcggcctggcggcttccaggcgcactaccgcgagcccaaggtggtgtttgctaaggagcagctggcacgcaggaagctg

SEQ ID NO: 671360 - DNA, 75 bp, Homo sapiens
gctaattgggccaaatgctcctttaatttttgaacgaggtgttggggatgtcctttgcactgaccctgaactgcc

SEQ ID NO: 671361 - DNA, 75 bp, Homo sapiens
ttccttccttattgatttcaagatgggaaaactgacaaccatgcctgcaggtctgatatatgcatctgtaagtgt

SEQ ID NO: 671362 - DNA, 100 bp, Homo sapiens
gtcccgataagaagaaaatacttttcttcaatgataagagctgtcagttttctgtggatgaaggtgttgacttcaaaatcaaaactgtagagctaagagg

SEQ ID NO: 671363 - DNA, 98 bp, Homo sapiens
tcacctgtcatgcctggaacagggatcgtactcgtggtgaaattgcctctacctttgatcacccagaactggtgaagcttggaagttgcaaacttatc

SEQ ID NO: 671364 - DNA, 50 bp, Homo sapiens
cctaggcagaatgcttggaaagagaccctcctggatgacttccttctcac

SEQ ID NO: 671365 - DNA, 49 bp, Homo sapiens
ctcccgagtagctaggattacagccagagctgtgattgtgcccgctgag

SEQ ID NO: 671366 - DNA, 82 bp, Homo sapiens
caaccgcctacgagacactcaaggtatgaaataatgtactcttgctggagaaccgatcccttagaccgccccaccttttcag

SEQ ID NO: 671367 - DNA, 100 bp, Homo sapiens
acatttagaatttctacttattctgaggttcgaaatgagttttacaaggacacacagggtgtgatactggtctatgatgttgggcagaaagactcctttg

SEQ ID NO: 671368 - DNA, 75 bp, Homo sapiens
tgctctgctaaaaggctccttcagtgagcaaggcatcaacgagtttctcagttcctggtccagaactttacacag

SEQ ID NO: 671369 - DNA, 83 bp, Homo sapiens
gctcgcccagctcgcccagcgtccgccgcgcctcggccaagaccatgaaacccttgggcacgccccttcagaagctgttatcc

SEQ ID NO: 671370 - DNA, 75 bp, Homo sapiens
ggcacggcaaccctgccctgcagtgcctgggccagagccaggaaggcctcttcaccctgctcgtggaagatttcg

SEQ ID NO: 671371 - DNA, 74 bp, Homo sapiens
cttgaagccctacgccgtggacttccagcgcaggcgctggttttcaatacagaataatcagttggtttaccaga

SEQ ID NO: 671372 - DNA, 75 bp, Homo sapiens
gaaaatgccaacgccgtgtctgaagaaccgagattaagcgtagctcctgaaatggatatcatggactactgcaaa

SEQ ID NO: 671373 - DNA, 50 bp, Homo sapiens
gtggagacaggcagcccacaacaaggaatcaggaaacccaggcccaacgg

SEQ ID NO: 671374 - DNA, 100 bp, Homo sapiens
ggtatccaagggttgtatcgaggctataaaagcacagttttaagagaggtgctgttggcagcagcggtctgcacaaaagcaggaaaggctattgtttctc

SEQ ID NO: 671375 - DNA, 75 bp, Homo sapiens
gctgaactgggtgctttatataggagagtggtttttcctcctgtctcatgaggtgctcaaccctatgtattgttt

SEQ ID NO: 671376 - DNA, 75 bp, Homo sapiens
tgcatgtgcacgaggaagaaggaatcctggtggcaggtgcccctgggcgctgggattgctctagcctgtaagtat

SEQ ID NO: 671377 - DNA, 50 bp, Homo sapiens
gccctgggagctgcccccagcgagcccccctccatgcgcctgaaggcccg

SEQ ID NO: 671378 - DNA, 100 bp, Homo sapiens
atcttacgcttgtctaaggagctgggcatagagacttacaaagtgaatgtcagtgagcgtctcgttcaatatgtcaagttgctgatgtatattcaagatg

SEQ ID NO: 671379 - DNA, 103 bp, Homo sapiens
cgtggaggccatggcaatcatgggtttcagcgaggaggagcagctatgctcccgggcagagaagaaagcagagcccccacctagcaagcccacggtggccaag

SEQ ID NO: 671380 - DNA, 50 bp, Homo sapiens
ggacaaactcagacatcgtggaggtttatcttgcagattatggactttcc

SEQ ID NO: 671381 - DNA, 75 bp, Homo sapiens
acttggtacaaggagtatatcatgaaaattctacttcaaagctacaccaaaattgcattgagccaaacttgccac

SEQ ID NO: 671382 - DNA, 100 bp, Homo sapiens
tatgaccccaccattgaagactcctacctgaaacatacggagattgacaatcaatgggccatcttggacggctgatcttgatatcctggtctcaagtgat

SEQ ID NO: 671383 - DNA, 100 bp, Homo sapiens
gacacaaaggccctccctgcagcaacgtagagccactgccccaacacagatccatttctggctatcaagtactagctccaactgcctattatgatcagac

SEQ ID NO: 671384 - DNA, 100 bp, Homo sapiens
tttctttactctggggtcccggctgccctgtggcctcgctcctcggaggtcaccattactttaagtactgcaaaatctcagcattggctctgctgaagat

SEQ ID NO: 671385 - DNA, 90 bp, Homo sapiens
gtgagcagtgggaaaaatggaccaacttctttggcaagtggacattttactggctcaaaggtgttatgaacataaacagtatagaaatgg

SEQ ID NO: 671386 - DNA, 100 bp, Homo sapiens
cttcagtacagagctctctgtcctgcacaactttttcagtccttcccccaagaccaggcgccagggcgagaaacccaccttgtcccatccacatcaggac

SEQ ID NO: 671387 - DNA, 100 bp, Homo sapiens
tgagcgagctgtcagagcccggggacggcgaggccctcatgtaccacacgactatatcatcatgtacatagaaaaatccaaaggattctgcaaaaaagct

SEQ ID NO: 671388 - DNA, 82 bp, Homo sapiens
gcggtaccgcaaagccgagaagatccgcaacatcctcgcccggtcaagaaagagctcttggaggaagttggccagaatggca

SEQ ID NO: 671389 - DNA, 97 bp, Homo sapiens
ggagccctccagtcagtactgattgaattactcaaggctgcctctctgcaaagttgagggagattcttcaagcaatcactatgtcaacagacacagg

SEQ ID NO: 671390 - DNA, 75 bp, Homo sapiens
gcattgctggaggatacaaacgtaccacaagagccaggccatctatctggagtcaaaggacaaccagaaactgag

SEQ ID NO: 671391 - DNA, 75 bp, Homo sapiens
gaaaatcatccatctaaagcaccagtaaaatatggtgaactcattgtcttagggaggagatgaccgccgggttct

SEQ ID NO: 671392 - DNA, 75 bp, Homo sapiens
tcaccgacggctaccgggcctacctgccgtccaggctgtgtatcaaaagcaattaccagctctggctgggtcgcc

SEQ ID NO: 671393 - DNA, 101 bp, Homo sapiens
cattcctagctcagaaagcaacgttttgagccacaactgtcacaactccagatataattggtgattacaactttcctctataaattaactcttgacactcc

SEQ ID NO: 671394 - DNA, 83 bp, Homo sapiens
ctctagggaccctgctgaatagctggggctacaggcgtgtgtcactgcgcccagtacaagccagctgccatgttgtgagcaca

SEQ ID NO: 671395 - DNA, 50 bp, Homo sapiens
gcggtgcagcagccggccgacccagagtatggtcagtaggacagaaggta

SEQ ID NO: 671396 - DNA, 100 bp, Homo sapiens
gggaccacacgcagaacagccggcagctgagcctggtggcctccgttctcttggcccagctggcagccaggaggcaggagcagcgggcgacagtgcgggc

SEQ ID NO: 671397 - DNA, 108 bp, Homo sapiens
ctcgaacccgcctgcgatggggcgagaaaggtcccactgcagccctccaagcagggggatatgagactttctactcggaatatcctgagtgttgcgtggatgtaaaac

SEQ ID NO: 671398 - DNA, 75 bp, Homo sapiens
gcgattggaagagaagcccccgcctgaactctttgcttccggaatccgggattgttgctgacatagaattagaaa

SEQ ID NO: 671399 - DNA, 75 bp, Homo sapiens
ctggactgtgcagtatttccagtctgtctcagccaactgcacctataatatgtgaatttcttacaatgatggcag

SEQ ID NO: 671400 - DNA, 90 bp, Homo sapiens
accctcgccaacctggcggagttcttctgcagggacggcttcagccgcatccacgagatccaggaacttgctactaccagcaccatgccc

SEQ ID NO: 671401 - DNA, 127 bp, Homo sapiens
cgttgacgtccatttaccagtcttccctggcaagattcttctgaattgtgctgccttggccaaaagagcttgcagttccccacaatgatgaatggacccgatttgccaggacccttgtggaaattcg

SEQ ID NO: 671402 - DNA, 82 bp, Homo sapiens
tggagcttaaaaagctgcacgcaagtgttaaacttctgacactggccaaaagaagaccctagacaagaaagatggaagacga

SEQ ID NO: 671403 - DNA, 98 bp, Homo sapiens
gccactcagctgacatatgaaggactcattgatgaaatttatggcattcagaacaattcctgacattcagacaactgacttgtaactgacttataact

SEQ ID NO: 671404 - DNA, 95 bp, Homo sapiens
ctgagtgatgggcagcccccaccacccgcccaggccagccccagcagcaacagcagcacagaaacaaggcgaggaggaagtggcctctcaccatg

SEQ ID NO: 671405 - DNA, 51 bp, Homo sapiens
tgaagccgcctctgtattacttaccaggatgatcggctgaatgtaacagag

SEQ ID NO: 671406 - DNA, 82 bp, Homo sapiens
cgccaatgagttcagcgaccggtgcaccccataacgaaggaggcccaacttcattcaataaggagcctgacggatttatccc

SEQ ID NO: 671407 - DNA, 76 bp, Homo sapiens
tgaatagttctactccttctacaggtgtgtatgagcatgaataatctttcatttagtgagctatgttgcctcttct

SEQ ID NO: 671408 - DNA, 100 bp, Homo sapiens
tcggcgatggagctgttatttttagatacttttaaacacccgagcgctgaggcggtaaccagcgtgagctcgcccgccagaagaatatgaaaaagcagag

SEQ ID NO: 671409 - DNA, 75 bp, Homo sapiens
tgatgcgagcagagaacttctttatccttcgaaggaagcctgtggagggtctccagaagcttccactgactgctg

SEQ ID NO: 671410 - DNA, 80 bp, Homo sapiens
ctgctgcaggccatcgacccccagagcaacacctgcctagagctggaacgttacctccagagcgagccctgctatgtttc

SEQ ID NO: 671411 - DNA, 75 bp, Homo sapiens
caacgattcagctcaccagcgccatcgtcaggacgtgtatgacaaagtggactatctgagctccctgggcaagac

SEQ ID NO: 671412 - DNA, 75 bp, Homo sapiens
acaacagtgactttgaggaatcagttaactgcctgtatccatggatcagctgctcttctatacccaatgtattgg

SEQ ID NO: 671413 - DNA, 100 bp, Homo sapiens
gagtgcttctaccagcccatgcccctgaaggcctcgctggagatcgagtaccaaaacagctttgctgagccatcaaggtctaatggaagcatggttcggc

SEQ ID NO: 671414 - DNA, 71 bp, Homo sapiens
ggaaggccatgaagcagggcttcgagttcaacatcatggtggtcgacagcaaggccatcgtggacgggaac

SEQ ID NO: 671415 - DNA, 75 bp, Homo sapiens
ggaagcagctggccgaatgtcaaaagcaccttggacaaattgaaaaatctccatccagttcctggtgtacaggcg

SEQ ID NO: 671416 - DNA, 100 bp, Homo sapiens
tcggcttcctgccctgcttcgcgttcatgtggctcctggacaagagagttattcaagcggagaaatgttgctacagcagaagaagaaacagaagaagaag

SEQ ID NO: 671417 - DNA, 102 bp, Homo sapiens
cagcatctacctgaaactgctaagaaccaagatggagtaccacaccaaaattcactaccaaaagaggcaagaaagtctgtacccatccaaggaaaaaatggg

SEQ ID NO: 671418 - DNA, 104 bp, Homo sapiens
gaattttgcaaaagtaaaattggcaagacatatccttacaggcagagagatgaggaaaatgaggcccaaagaagtgatgccacttggttaaggtcccagagcag

SEQ ID NO: 671419 - DNA, 100 bp, Homo sapiens
tcttccaagtctaatagacctaaagccacagtcttcaagagcccacggacaccacctcaacggatttgaatttgttgaaatgagcagtcgtaaatcaaag

SEQ ID NO: 671420 - DNA, 98 bp, Homo sapiens
ccaagcgccttctcattcagaagaactgcctcctcttgctcactcctgcccctcctaaagctgaagccaaagcgaaggctttaaaggccaagaaggca

SEQ ID NO: 671421 - DNA, 83 bp, Homo sapiens
aagctcgtggcctgcctctgcgtgccagcccctgtcaaagggaacaggaagcagtccacggagggtgacgccctagacccacc

SEQ ID NO: 671422 - DNA, 100 bp, Homo sapiens
cagcatgaagaccccggcggacacagggcagcgggtggcatgagacgtgggaacatgggccacctcacacggatcgccaacgcggtggtgcagaacctgg

SEQ ID NO: 671423 - DNA, 74 bp, Homo sapiens
ccgcacttcgacttctctaggctattgctctggccatgagccgggatggctcaagcgggggtgtcatctacctg

SEQ ID NO: 671424 - DNA, 96 bp, Homo sapiens
gcgcccggccggacccgggcccgaggttagagcagccagcgggtacagaatggattttggaagagggagtcaccactggacctccaaggaagccac

SEQ ID NO: 671425 - DNA, 83 bp, Homo sapiens
ctcggattctcgtagctgtgccggacacggcatcagcgaggagatacgcatcctctaaccttagatgaaattttggatgaaac

SEQ ID NO: 671426 - DNA, 75 bp, Homo sapiens
tggaaacaaaatattcatgctggatattgaggttttcctttggaatatggataaatacaccatgatacggaaact

SEQ ID NO: 671427 - DNA, 75 bp, Homo sapiens
tcacagtcctacaccaagtgttttcaacagtgcaggtcgtaatctgaaggagtggctgagggagcaattttgtga

SEQ ID NO: 671428 - DNA, 90 bp, Homo sapiens
gtcctcatggccgccccgccggagcccggtgagcccgaggagaggaagagatccgtgctcagctcacagagcagatgaaatgcctggacc

SEQ ID NO: 671429 - DNA, 75 bp, Homo sapiens
aaggctactgccccctgggtgcaaagaggtccagcaccccatcctcgcccactggcacgtcatcctcagactcgg

SEQ ID NO: 671430 - DNA, 75 bp, Homo sapiens
gccctcgcgacgcgcccggcccggagcccccagcgcagcggccgcgacagcccacctgaggatattgaccataag

SEQ ID NO: 671431 - DNA, 96 bp, Homo sapiens
atggaatgaaggttgtccttatcagcagatcaaaggataaacttgaccaggtttccagtgaaataagtgaagccttgaaaggaaaggtcacagttc

SEQ ID NO: 671432 - DNA, 83 bp, Homo sapiens
ctgaatttccttctgcctgctgcccgatttctatttgactggcaatagtctgacaatgcagatcttcgtgaagactctgactg

SEQ ID NO: 671433 - DNA, 83 bp, Homo sapiens
ggcgcccaggcctcccagcagcagtcccgagcagagacatatctgaagagatggattaagaatgctttggattaaggattgtg

SEQ ID NO: 671434 - DNA, 100 bp, Homo sapiens
ggcaagtggagacagcaatctcaacttcagcctgcctagggtagttaaaagacgagtgaatgctctcaaaaacctgcaagttaaatgtgcacagatagaa

SEQ ID NO: 671435 - DNA, 75 bp, Homo sapiens
ccgagggtctgtgtcaagagcggcaggggctgcaggagataagagaaacggtgtctccagaacgctatagctatg

SEQ ID NO: 671436 - DNA, 100 bp, Homo sapiens
cgtgggcgccgagccccatttcttcgatcgcagctacgacaagggcctcgcttggtaccggagcatcagatccatgctgctgctgactcggagccccaca

SEQ ID NO: 671437 - DNA, 51 bp, Homo sapiens
agtccctctgccccacatcctgggcaatttcttgcaaccaccaccgaggcc

SEQ ID NO: 671438 - DNA, 100 bp, Homo sapiens
ggggcgccccaggggcgggtgcccgaggcgcggcccaacagcagcaacgacaacatccagtccatcacctccggggactgggacgtgaccaagatcctag

SEQ ID NO: 671439 - DNA, 75 bp, Homo sapiens
gcgcaagaacctcttcccccgcagagaagagctgctcagtctggcatgcaggcataatcaccagcaacacccggg

SEQ ID NO: 671440 - DNA, 100 bp, Homo sapiens
gactacaagaagagggcggagcggagacgggagtattatgaaaagatcttgtgaatgggagagttcacatccgcgactggcgagaggagacactgtggaa

SEQ ID NO: 671441 - DNA, 78 bp, Homo sapiens
cgcatctggctgcagctctgcggggcgcaggaggcggtgcacagcgccaagtgctgaagctgctgaaagatggcagaa

SEQ ID NO: 671442 - DNA, 98 bp, Homo sapiens
aagaaaagccatcgtaagagaagatctattaagtgcaaaagtttgtgacttgaagtggatacataaattcagaaggagctggcggacatcactttaga

SEQ ID NO: 671443 - DNA, 88 bp, Homo sapiens
ggagcacgcatcgtgtccacctggtgccggcgtgattgccccgggccctggtgcccttccacaacctgggccttctcatcggcctctt

SEQ ID NO: 671444 - DNA, 88 bp, Homo sapiens
caagatccagtccccacaggagtgggaggcgatccaggccttgacggatgtgaaatggtctgacttcgggtttcctggaagaaatgga

SEQ ID NO: 671445 - DNA, 100 bp, Homo sapiens
acaccaaagaagagaaagacaaggatgaccaggaatgggaaagccccaggttccttgcattgactccatggagagtatatcacctgatttccgtcatgat

SEQ ID NO: 671446 - DNA, 75 bp, Homo sapiens
ggcggtacccgggtggttaaacttcgcaaaatggttggtgttcgaggaagagacattgttgttcttggtgtggag

SEQ ID NO: 671447 - DNA, 87 bp, Homo sapiens
agcctgcgccaccacgtcacgcacacgctcggcgctgcgatccgcgcatataacggtaatactgcattgcatgattgtgcagaatct

SEQ ID NO: 671448 - DNA, 75 bp, Homo sapiens
aggctaccaaggagatgggattcactgtcttgcattcttttatacagcaaaatgcaagagcctggagctgtgctg

SEQ ID NO: 671449 - DNA, 75 bp, Homo sapiens
gcagaggggcattatgcttcccagaactatcttgctaatcatggccggttaaatgagtctgaagccaggcgaaaa

SEQ ID NO: 671450 - DNA, 87 bp, Homo sapiens
gagccagcgtgggaggccgctgccgtcgcgcgccttggcttgaccactatgctatcatcaagtttccgctgaccactgagtctgcca

SEQ ID NO: 671451 - DNA, 102 bp, Homo sapiens
aggagcggccggagtcagcgatggtgcccggcgaggagaaccaactggtcccgaaagaggactcgctcagcagcagcctgaaaacttgctacaagtatctca

SEQ ID NO: 671452 - DNA, 96 bp, Homo sapiens
ctacgacctgatcgagcgcatcgaggatttggcgctgcagaaccagatccgggagcacgtcatctccatcgaggatgaagactggcccatttgcag

SEQ ID NO: 671453 - DNA, 75 bp, Homo sapiens
cggagataaattcccggaaccgcgattcggcgtgtcagaatatcctccgaatcctaaatctagagctccaaggat

SEQ ID NO: 671454 - DNA, 75 bp, Homo sapiens
ccccagccacagcacacaggaccaggctgcgagaacaggaattttctacttctggtcatgcttacactgatacag

SEQ ID NO: 671455 - DNA, 100 bp, Homo sapiens
tcactaactttgtgaagaacctctctgccttatccgactggtactccgtctacacgtctgccattgccttcaccatgttttaggtagaagtagaaagagg

SEQ ID NO: 671456 - DNA, 75 bp, Homo sapiens
ctcatatatttaacccccctccaaaaagagatggggaagaagatgaaggtgatgaagacaggttggacaatgcag

SEQ ID NO: 671457 - DNA, 51 bp, Homo sapiens
caaagctacaagggatttgttgacataacgaactcacctgtgagtgaatct

SEQ ID NO: 671458 - DNA, 100 bp, Homo sapiens
caagaacagaacaggccctatggggcatacctatggctttattgacctcgactcccatgcggcaccacactgtaactcgaggcatcaccaaaggcgtgaa

SEQ ID NO: 671459 - DNA, 75 bp, Homo sapiens
cagacgcagccgtagacaccagctccgaaatcaccaccaagaaacttcagtgctctcaagaaggaaaatatttat

SEQ ID NO: 671460 - DNA, 80 bp, Homo sapiens
cttgcatttcctgacttccagattagtgttatttttacttcaaactattacttcttgacccaagaggtataggtcctatt

SEQ ID NO: 671461 - DNA, 85 bp, Homo sapiens
ttagaggacttccctttggatgtagcaaggaagaaattgttcagttcttctcaggagcaggggagagaagacagaagaggttgga

SEQ ID NO: 671462 - DNA, 82 bp, Homo sapiens
gaattatccttggacttacataaagcattttggactttattttcttgcagaacataaattattaggaaacattaaaaatgtg

SEQ ID NO: 671463 - DNA, 100 bp, Homo sapiens
caaaacctacagatggagataaaaattactactgttattcaacatgtgttccagttcacacaaaagatgttggacaatttctacaattttgcttcatcat

SEQ ID NO: 671464 - DNA, 82 bp, Homo sapiens
tcttcgctctttgcatcttaactgcaggtgtcgtgaaaactacccctaaaagccaaaatgggaaaggaaaagactcatatca

SEQ ID NO: 671465 - DNA, 96 bp, Homo sapiens
aaacggaagagaaagagaagtgtccaggaggggtgctttacaaggccaagtacggtccaatgtggatgtcctacttagggcctcagatgcacgtga

SEQ ID NO: 671466 - DNA, 83 bp, Homo sapiens
tcttccccaaccagcctggaggcaagaggctcctgcagacccctggcttcctcttccccgggcgctgcctggacaggcctgcc

SEQ ID NO: 671467 - DNA, 135 bp, Homo sapiens
tggaggtaaaaggagtggcttgcaggatggagaagctgcaccagtgttattggaagctgtggaaaatctctgttctcacaaagtctccccaatgctctacaagcaactgcgtcaggcctgtgaagaccacgtcca

SEQ ID NO: 671468 - DNA, 100 bp, Homo sapiens
tattgtcaccatcttgttcttcttcccgtcccaaaggccctctctcaagtggtggtttgacttcaaaggtggcatacactgtcctgggcttcatcccttt

SEQ ID NO: 671469 - DNA, 88 bp, Homo sapiens
agaggaaagccgatttgttaacagatcaattgctcagatgagagaagccaccactttggcaaatggatggagtcttactctgtcgccc

SEQ ID NO: 671470 - DNA, 82 bp, Homo sapiens
cacacagaacaacaaggtgttgatgccgccggacggggctaagtgatggatcttgtactccgtgttgcagattactattttt

SEQ ID NO: 671471 - DNA, 101 bp, Homo sapiens
gaaatgctccacgcagttactagtgtctgaagatccaaaggaaggaggagctaccaccaaagagtcaggttcagccgtctgtatatctccccagatacctg

SEQ ID NO: 671472 - DNA, 82 bp, Homo sapiens
gcgaggtccgcgcagcccagcgcagccatgactctggtccttcctgtggttcgtgggcttctgcttcctcaccaatcagtgg

SEQ ID NO: 671473 - DNA, 82 bp, Homo sapiens
cagagagacggcagccgctgtacagattcatcaccacgaagatggctgtgccacccacgtatgccgatcttggcaaatctgc

SEQ ID NO: 671474 - DNA, 74 bp, Homo sapiens
gggatcaatatttcacctgatgataagaaatctgaaatagagtactatgctatgttggctaaaactggtgtcca

SEQ ID NO: 671475 - DNA, 82 bp, Homo sapiens
cggggtgtcagtgtggaggagactgaggctggctacagcaaacatcattcaagatgtccagcaaagggagcagcacagatgg

SEQ ID NO: 671476 - DNA, 83 bp, Homo sapiens
tgttaacgtctgctccagctcgcagcccgctgctggatctctgttgaggagctggcgcggaatctggtcatcaaggtcaacag

SEQ ID NO: 671477 - DNA, 51 bp, Homo sapiens
cgctcttcagcaccaccccgggagcaagaaagtacgactatcagcagccac

SEQ ID NO: 671478 - DNA, 74 bp, Homo sapiens
agagacgtgccagctgttcaccaccgagctagaataatccagaatggctactctgatctatgttgataaggaaa

SEQ ID NO: 671479 - DNA, 74 bp, Homo sapiens
cgcaggttccctacacggtctcctgggtcaaggaactccgggcacagaatcttgcttcataccccagaacctaa

SEQ ID NO: 671480 - DNA, 88 bp, Homo sapiens
catctttagttcgtctttcctagagaggatgagctcaggtttctacaaaaatgtggtgaagattcaaaagcatgttaccttcaaccaa

SEQ ID NO: 671481 - DNA, 75 bp, Homo sapiens
ctcgtcagcactgactttcagctatggaatcggaactgaaattaccattcacttttttaagtggacatattcatg

SEQ ID NO: 671482 - DNA, 100 bp, Homo sapiens
aagagtccaggacaaacgcttgtgcgagtaaatgtagagtcattaacaaggagcatgtactggccgcagcaaaggtagactcctacgggaaatgcctgca

SEQ ID NO: 671483 - DNA, 100 bp, Homo sapiens
gtcaaggacccgccctccaagtacgtggaagatgaagatcctgccaaaggtgatcagagtcgatcagttgaccttggggaagataatgtgacagagcaga

SEQ ID NO: 671484 - DNA, 50 bp, Homo sapiens
aaaaggaggccaaagactttgacactgtaatttatgatcgactggcagag

SEQ ID NO: 671485 - DNA, 100 bp, Homo sapiens
atgcctgaagacttggatgaaaatatggattacaggttgatgtgggaggttggaactcagtttatccgtggtgtgtctggaggagaaagaaaaaggacta

SEQ ID NO: 671486 - DNA, 82 bp, Homo sapiens
cggcgtttctgcgtctgccgtggacagcgaagctgctgcggttcctgagccggagacaatgcagatcttcgtgaagactctg

SEQ ID NO: 671487 - DNA, 75 bp, Homo sapiens
tttttgacatctgtacttcaagaaagaccggggagctctgcacaaagccatcagcctcgagcacgctgttcacat

SEQ ID NO: 671488 - DNA, 101 bp, Homo sapiens
caggaaacatggcggcggcgggtgttgtgagcgggaagtccaagccttatgcatttgatcgggtgttccagtcaagcacatctcaagagcaagtgtataat

SEQ ID NO: 671489 - DNA, 75 bp, Homo sapiens
atctctcaggctgcatcaggatgaatgatgacccaagtatggaaggcacaggagatcttaggcccagaaaggcag

SEQ ID NO: 671490 - DNA, 96 bp, Homo sapiens
cggagccggcgcggggtccacaaaggagagtgggcgctccctttctcttcctggaagatcagtcccaccccccatttctacatctccttgggtata

SEQ ID NO: 671491 - DNA, 75 bp, Homo sapiens
caaaaattagaacctcttcgccaaagccttaatttatctgaaaggtgggttgcctatgaaaaagaacattttaaa

SEQ ID NO: 671492 - DNA, 100 bp, Homo sapiens
tggatcgactttgttacctgaaagagcagatcagtcgcatcgaatacattcattcaaagaacttcatccaccgggatgtgaagccagacaacttcctcat

SEQ ID NO: 671493 - DNA, 99 bp, Homo sapiens
cagagacatcaaaacctggaccttctggattacaggccaaattagcaaggtggatctatgacatcacgcaaaaatatgatttttccttctacatatgtg

SEQ ID NO: 671494 - DNA, 99 bp, Homo sapiens
gttatgcccaccctccaactttgcgacggaaatgtgtcatcgaaagccagttcccagtgacctgacagcagaggagcgtcaagaactggagaacatccg

SEQ ID NO: 671495 - DNA, 101 bp, Homo sapiens
accttcaaggagtggtttctgccagagggatggcgcgaaagaggccagggatgccggcgacggttgtgtcgcagttgatgcggatgaaattaaaaggctag

SEQ ID NO: 671496 - DNA, 75 bp, Homo sapiens
tattgccttaattgttgttttagcaactaagacacctgctgttgatggttctccggaagaaacggcgtttagagc

SEQ ID NO: 671497 - DNA, 75 bp, Homo sapiens
gggagagccactgacgccgggaccgggaccgccgccgccgccgccaccatgagatttacaaacgaggaccacctg

SEQ ID NO: 671498 - DNA, 90 bp, Homo sapiens
gccctgcagtacctgcagaaggtctctggagacatcttcagcagatcatgattctggaaggaggtggtgtaatgaatctcaaccccggca

SEQ ID NO: 671499 - DNA, 144 bp, Homo sapiens
accccttcctgatgatcccggacctgagcagcccgtacctctccaacggacccctgtctcccggaggagcgcgcaccgaatcagagaagatcattgctgagttgaatgaaacttgggaagagaagcttcgtaaaacagaggcca

SEQ ID NO: 671500 - DNA, 100 bp, Homo sapiens
gtcctctgaaatgaacagcatagaacatcatcttcagcgggctatttcagcacagcaggtgtatggcgagaagagggataatatggttataccggtccca

SEQ ID NO: 671501 - DNA, 83 bp, Homo sapiens
cttggcccttgttcccccaaatgtctgactctgactctcggactgagaaacgcaagattctgctctctttgctgaactcggtt

SEQ ID NO: 671502 - DNA, 83 bp, Homo sapiens
cagctgtcaatgaagactccatcattggtggcttcacaggctgctcaagaagccgagatcaatgccagaaaagccaaaaactc

SEQ ID NO: 671503 - DNA, 82 bp, Homo sapiens
ggcacccacggagcctccggggctggctaccggctctctgaccagttccacgacatcctcattcgaaagtttgacaggcagg

SEQ ID NO: 671504 - DNA, 143 bp, Homo sapiens
aaatccctttccaatgagcctccctcagaaaccatggaggaaatagagcacacatgcccacagcctcgactgggctggttgatatgtgaagagccaacctgtcgcaatcgaactcgtcaccttccccttcaattctcccgaac

SEQ ID NO: 671505 - DNA, 50 bp, Homo sapiens
aaccctggtcaccgtctcctcaggaagtactagccggacatcatgagtgg

SEQ ID NO: 671506 - DNA, 98 bp, Homo sapiens
ctccgcagtgaccggactcgggggaggatgctttaatctggatcccaatagagttttggatgtcattttagaagtgtttgaatgcaggccagaacacg

SEQ ID NO: 671507 - DNA, 75 bp, Homo sapiens
gttcagccgcgctgccgagaagctttacctcgctgaccctatgaagaatacagattctgttcatcttgctctgaa

SEQ ID NO: 671508 - DNA, 75 bp, Homo sapiens
gagcagatttacaaactggccaagaagggccttactccttcacagatcggaccctaaagtaaattggttgaagaa

SEQ ID NO: 671509 - DNA, 49 bp, Homo sapiens
cagcctgcggagcctgtggggcaggttaaaaagatcaagtggcatgagc

SEQ ID NO: 671510 - DNA, 100 bp, Homo sapiens
tgctcctccatctccagatcggatcacggtgagggaaagatgagcgaggagacggcgacttctgacaacgagtacttaagagattatggcatcagaaacc

SEQ ID NO: 671511 - DNA, 82 bp, Homo sapiens
ctctgggatcccggccaccagcaattgtccgcttcctgcctgacacagctcacttcaagaagtgcacaatgtcagaacgtgg

SEQ ID NO: 671512 - DNA, 98 bp, Homo sapiens
gcggggcccgagggcaaggagcagattgattttgatgatgtggctgcaataaacccagaactcttacagcttcttcccttacatccgaaggacaatct

SEQ ID NO: 671513 - DNA, 113 bp, Homo sapiens
aagctgttgacatctcataaacggctggttatgaaagacagtgcaggaggcatgcatctccccatgtgctatgatgctggctctggtgtacattgaacggctccggcaccgaa

SEQ ID NO: 671514 - DNA, 75 bp, Homo sapiens
caagaaatgactaatcaagagtctgccgtacatgtgaaaatggtgagccaatggtggcagcagaagtaggcgtat

SEQ ID NO: 671515 - DNA, 87 bp, Homo sapiens
gggaagacgcggcggcggcggcggaggatgagcctgcagagcgcgcagtacctccgatatttggagttcttacaacatggcagacat

SEQ ID NO: 671516 - DNA, 82 bp, Homo sapiens
gtccgggagccccagggcagccgccccgccgagtcgcagctgcctgtggaggaaccgattgtgtccacagatgaggtcatct

SEQ ID NO: 671517 - DNA, 95 bp, Homo sapiens
aaagtcaagaagacagcggaagctggaggagtgacagatgcctgtgaggagccaccaacatttgaagctatggagctcattggtaaaccaaaacc

SEQ ID NO: 671518 - DNA, 100 bp, Homo sapiens
attcccagagtgttgccaaggccaaatatgaatttttatttggcagatctgaagggaaagctccagatactagtatgatctcgtgaaatcttgagagaaa

SEQ ID NO: 671519 - DNA, 88 bp, Homo sapiens
caataaaataaattcttttgaactagatcgagctgatagagaccctagtaacatgctttaaggatgagaatggcaaagctgggaaaaa

SEQ ID NO: 671520 - DNA, 80 bp, Homo sapiens
ggccagggaaccctggtcaccgtctcctcagactttaccagaatgcaggacatcccggaggagacggagagccgcgacgg

SEQ ID NO: 671521 - DNA, 99 bp, Homo sapiens
atcagttactacaaatgggacaggaggtgactgcttagaaaactgcacagcatctgatgaaattagcgaataagaacatcaaccatgtcttacactcca

SEQ ID NO: 671522 - DNA, 83 bp, Homo sapiens
cctccagctccctacccatccgccaggagccctcttccttcagttcccagaggtccacttgggccagtggtactttatcgcag

SEQ ID NO: 671523 - DNA, 100 bp, Homo sapiens
ctgcgcgtggctggggaggcgaggccggacgcacctctgtttgggggtcctcagtatgagcccagaggacctggtcggcccttgtaccaaagaagaatct

SEQ ID NO: 671524 - DNA, 78 bp, Homo sapiens
tcgaaaaagtgggatcatcggtaaagcacctaaaaccaggtattgttgcagcatctggcagtgagactgaggatgagg

SEQ ID NO: 671525 - DNA, 83 bp, Homo sapiens
gagctgggcgcggattcgccgaggcaccgaggcactcagaggagctcaaaagccaaaagtctctgagaacgactttgaagatc

SEQ ID NO: 671526 - DNA, 100 bp, Homo sapiens
gatcgaagagtccccccaagtctcctgaagaggaaggagcggtgtcctcttaagaaaatgttcttatcaattcaggatcgagatatgaagcgaaatacct

SEQ ID NO: 671527 - DNA, 75 bp, Homo sapiens
tacagcgcagccatcctggagtacctcaccgcagaggcggaacagcagctggtggactgcgcccaggacttcaat

SEQ ID NO: 671528 - DNA, 100 bp, Homo sapiens
ggaggtgcagatggcactttccaaagtggatgcctccggggagcggggtcgcggccgtcaggggcactcagcgcgccgtcggggtccagaactacctgga

SEQ ID NO: 671529 - DNA, 87 bp, Homo sapiens
ctgttgtgacaagaaaagctgtggcaaccgaaatgagactccctcagatccagtgataattgacagaaactggcgatggaatatgag

SEQ ID NO: 671530 - DNA, 75 bp, Homo sapiens
ctccttgtggagctattgccaacagcatgtttaatgtcatggctccgatcttcatcttgaagaagagtgacattg

SEQ ID NO: 671531 - DNA, 100 bp, Homo sapiens
ggggaaaatggcggacgggaaggcgggagacgagaagcctgaaaagtcgcagcgagctggagccgccggaggctttcagtccagtgtaaagctgttggag

SEQ ID NO: 671532 - DNA, 50 bp, Homo sapiens
agataggactccgaaaggcacccagatcaatgtccgagttaccaccatgg

SEQ ID NO: 671533 - DNA, 75 bp, Homo sapiens
ccgaccgctacgctgtctactggaacagcagcaaccccagcaaatcaatgaggacacgggaacagcacgtgccat

SEQ ID NO: 671534 - DNA, 83 bp, Homo sapiens
ttacgccttgaaggacgaggtcagagaactgaagcagaaactaatctggattcactccctctggttgatacccactcaaaaag

SEQ ID NO: 671535 - DNA, 83 bp, Homo sapiens
agaactccaaggagaaaggcggcgatgatatcatcaagttgaatcgaaaggaagggaagaagcagaattttccaagactaaat

SEQ ID NO: 671536 - DNA, 50 bp, Homo sapiens
ggagctgacagacaagctcgagaatctgaattatccagaacagaaagttg

SEQ ID NO: 671537 - DNA, 97 bp, Homo sapiens
cagggaagacgccggtgtatggtagatttagacgttactttacctggggaaggtggaaaagatcgacctttcaaggtgtcaatcaaatttgtctctc

SEQ ID NO: 671538 - DNA, 75 bp, Homo sapiens
agtggttatcttttgatgtcaccggagttgtgcggcagtggttgagccgtggagatgtacaggtggatcatctga

SEQ ID NO: 671539 - DNA, 82 bp, Homo sapiens
gaatgaatatccacaatttagcatcaggcaaaggaagcaccgcacatttttcaggtgtggtcattgtaagactctggctcct

SEQ ID NO: 671540 - DNA, 100 bp, Homo sapiens
aggatatcgacgtcgtgatccagaagtccagagctgaggactgcctgtttgcaggctcctctgctgaacagcccctgggcgggagactcaggaagctgag

SEQ ID NO: 671541 - DNA, 97 bp, Homo sapiens
agtgagacattatttggtgaaatgccctcagaacagttcatgccgtggaggaagtggtgaaggaggtggtgggacatgccaaggagactggagagaa

SEQ ID NO: 671542 - DNA, 86 bp, Homo sapiens
aagaaacctctctgcatccccaactgtctacagctactacgcacagaatgaggtggtggccaccgatgacctggatttccggcacc

SEQ ID NO: 671543 - DNA, 101 bp, Homo sapiens
ccccggtttggtgttgcggcgcccaccttcgggaggatcaggtgctggagaatctggtaaaagcaccattgtgaagcagatgaggatcctgcatgttaatg

SEQ ID NO: 671544 - DNA, 98 bp, Homo sapiens
cagatgccagctctgaaaaactcttcaacactgttattgtaaacaaagaacttcgagaaaccaagacctctgaatacttcagcctttcccaccatcct

SEQ ID NO: 671545 - DNA, 82 bp, Homo sapiens
tccgccgctcaccccgcggccgcaccttcccgccttctcagtgaatgagttcacggtgatcaggaagaagttcaagtgtccg

SEQ ID NO: 671546 - DNA, 83 bp, Homo sapiens
gtaactttctcccttgatccgggagtctttccactgggcccctgtcccagctggccctgccccaggtactggggctgatcctg

SEQ ID NO: 671547 - DNA, 75 bp, Homo sapiens
gctttgcaaagagtccttcaaagtgaattctgcaatgctgtgagagaggaacttgtaatagctggcatcgttgag

SEQ ID NO: 671548 - DNA, 99 bp, Homo sapiens
gcaagactatgaatctctgttccaaatgctttgctgggattttatattggaagacatggatcttgctgccaacgagatcagcatttatgacaaactttc

SEQ ID NO: 671549 - DNA, 90 bp, Homo sapiens
ccgccttctctgtcagctctttccccgtcagcatcccagccgtgctcacggtgaaagaacttgtcctggacaacagtcggtcgaatgaag

SEQ ID NO: 671550 - DNA, 89 bp, Homo sapiens
tgcgctcgatccagcaccatggggaagcgggacaatcgggtgcctccggcctctcctcctctccgtcaacacccacccaagtgaccaag

SEQ ID NO: 671551 - DNA, 51 bp, Homo sapiens
aaaacacgatcagctcttagacaggttttgggatttgagattgacgcggtg

SEQ ID NO: 671552 - DNA, 83 bp, Homo sapiens
ggctgaacttcaccttttggctttcttggcctgatgctgaactctcgagggtgtggtggacacaggcctattcatcaacatgg

SEQ ID NO: 671553 - DNA, 51 bp, Homo sapiens
caaccaggtctcctgcaaccaggcgttggctgcaaccctaatgaagatgtg

SEQ ID NO: 671554 - DNA, 100 bp, Homo sapiens
gtgctcgtgatggggctgatcttcgccaaactgtggagcctcttctgtaaccaaggtgacagtatgttgactgctgtctctgtggccagagattgtggaa

SEQ ID NO: 671555 - DNA, 89 bp, Homo sapiens
gaacgactgggttcgcctgcccagcaaatgcgaagagaggctggcggcgctcaagctggaagcagaggacatcgccctgacagccacaa

SEQ ID NO: 671556 - DNA, 90 bp, Homo sapiens
gcatgtggtttggcacccaagtcaggagcctgtctctcttgctgatcgagaggtgatatcccggcttcggaactgcatcatctcgctggt

SEQ ID NO: 671557 - DNA, 100 bp, Homo sapiens
tatgttaagaaaacataccaatattgttgcacagactaattggacgaggccttggcccagtactttgggaatgggacagagttggcccagcaagaagata

SEQ ID NO: 671558 - DNA, 51 bp, Homo sapiens
cgtgtttgctgcgcccgcactgcgcatctgcaaacatagagaattctgggc

SEQ ID NO: 671559 - DNA, 75 bp, Homo sapiens
ctgcccctgagatccacccaagttgtgatggacaatctaaaatatgtaaatcagttgaagaaggaaaatgaacgt

SEQ ID NO: 671560 - DNA, 74 bp, Homo sapiens
ttgaagaaattcaccattcctaagatcaggaggacagctgagaaagaaatggcacctcgaaaggggaaggaaaa

SEQ ID NO: 671561 - DNA, 83 bp, Homo sapiens
cgaccggagagcggagcgcgagcaggacccgcgtgtcgcccctcagcagtgccccttcatggctgtgctctttgccaaactcg

SEQ ID NO: 671562 - DNA, 90 bp, Homo sapiens
aatggacagttagtcacccacctacatgttgagcaccagcagacgtttttgaatcaactgagagaaattacggggattaatgacacccag

SEQ ID NO: 671563 - DNA, 74 bp, Homo sapiens
cagttacaggacaggctaacaccaatggaggctttacttcagacaaggatggctaaaggtgaccccaagaaacc

SEQ ID NO: 671564 - DNA, 75 bp, Homo sapiens
gcagctgtcgccgccgctctcaggtctcctctgagcctccggcctccataagacccaaaacagatgacacctctt

SEQ ID NO: 671565 - DNA, 83 bp, Homo sapiens
gcaacgccgagcgcaccgacatctgcctgctcaaagggtggctgttgcaccacgccctccctcctgcccctgaggcccggaag

SEQ ID NO: 671566 - DNA, 100 bp, Homo sapiens
ctaaaaaactgaagcaattaatggaggaacatgatcaggcatctccatcaggatttcaaccagagatggagagcagctctaaattgggaagcaatgccgg

SEQ ID NO: 671567 - DNA, 85 bp, Homo sapiens
ctggtggaagtggttggaaatggcacctatggacaagtctataaggtgcagtagacattgttgcaatcatgatcggcaatctgaa

SEQ ID NO: 671568 - DNA, 74 bp, Homo sapiens
gtgagcagggctgagatgggcaccgcggatctggggccgtcctcaggaagctatgaagcagataacccagctcc

SEQ ID NO: 671569 - DNA, 100 bp, Homo sapiens
gaagatggcaaactgtactatgacaaaagatgcctcctgacaaggtgatccgggcgggccccgcaggaattttatcccctcaccggcctcacactagtat

SEQ ID NO: 671570 - DNA, 76 bp, Homo sapiens
atccgatgcaccctttttgtcagattatcaggatgagggaggtatatcgaattccaaagaaaagtcaaactgaaaa

SEQ ID NO: 671571 - DNA, 100 bp, Homo sapiens
aaacttccccagagccaggcacaaggatgaacattctgccgaagagaacaagacgtgtgaagactcaggctggaagattatatctggatcaccaccagag

SEQ ID NO: 671572 - DNA, 83 bp, Homo sapiens
ccagtgcccaagtacggtttgatataacgtcgaggtcaagcacattaaaatcatgacagcagaaggactgtaccggatcacag

SEQ ID NO: 671573 - DNA, 75 bp, Homo sapiens
aacaatgggaaccagtctttcaaaatgttaatttggagtggcccctggagtcagtttcctacaccatccgaggcc

SEQ ID NO: 671574 - DNA, 100 bp, Homo sapiens
aaaagcaacgtgatcgtggccttggcccgagatagcctggcattggcgaggcccaagagcagtgatatgcactaaagattattcatcaagcacataaatc

SEQ ID NO: 671575 - DNA, 74 bp, Homo sapiens
caccggggagccggccttggacacggtgaaattcctaagcaggttaaagtgaaaaaactgaagaatctaaagac

SEQ ID NO: 671576 - DNA, 94 bp, Homo sapiens
tggatgcctgcaaagcgaggctgaagaaggccaaggctgcagaagccaaagccacggtgagaagccctaccactgcaactgggacggctgcggc

SEQ ID NO: 671577 - DNA, 100 bp, Homo sapiens
cagaagagcttctcctcatcaactggggatgattacagttcttcctaaaaaagagctgagaagctccagctgctgaaccaccggcctgtgactgctgtgg

SEQ ID NO: 671578 - DNA, 78 bp, Homo sapiens
gtcagcctgaaaggaacaggccgaactgctgtatgggctctcgccacccttgaacaagctgaagctggtgcactcaaa

SEQ ID NO: 671579 - DNA, 51 bp, Homo sapiens
cagtgaatgataaagacgataatgaaaaatgccacttgttggttgagcatg

SEQ ID NO: 671580 - DNA, 87 bp, Homo sapiens
agagcaaggcgaccccggccgcccgcgccagcaagaggatcgtcctgccggagcccaggaagctcttcgtgggcggtcttgactgga

SEQ ID NO: 671581 - DNA, 100 bp, Homo sapiens
gcggtgactggctgcggcgggcccgccccccgggttctccgcccccgccgccgccattacggagctcccagtggtcatcatcagatttgaaatatttaaa

SEQ ID NO: 671582 - DNA, 75 bp, Homo sapiens
tttggctgtgacctgacggagtatctggaaagctcgggacaggatggtcagcccaaggccaaccccactgtcact

SEQ ID NO: 671583 - DNA, 98 bp, Homo sapiens
caatgtggaatttaatggtgtctatcagtccatgaccaagaaagctgccatcacgctacaggagaatgaagtttctagattagaagacataatgcagc

SEQ ID NO: 671584 - DNA, 100 bp, Homo sapiens
ggggagtcatcatgagcgatgttaccattgtgaaagaaggttgggttcagaagagggattgtcttcaaatttacagcaccatttcagtttgtcatctgtt

SEQ ID NO: 671585 - DNA, 82 bp, Homo sapiens
cacagtaccacatgcagctggccaaacaactggctggaatattgcaggtgcctttagagctgaggcaacttctcctagaatc

SEQ ID NO: 671586 - DNA, 83 bp, Homo sapiens
ccccaccgccgccccctccggcgtgttcatgcccccgggttgagaagctgatgtctcctcgacttccaactggaaccttgaac

SEQ ID NO: 671587 - DNA, 74 bp, Homo sapiens
tacaccagtactaccaaggacagcttttttcctgcaagcgtccttcgacctgaagcagcagctgctgctcaaca

SEQ ID NO: 671588 - DNA, 75 bp, Homo sapiens
ggcagcttgagttaaacgaacgtacttgcagatgcaaccttaaaatcagtgacaagaaacattccaaacaagcaa

SEQ ID NO: 671589 - DNA, 83 bp, Homo sapiens
gtggccacctctgcagtgtcttccacaacctgggagacaaggacggcagcaaggtgacaacagtggtggcaactcctgggcag

SEQ ID NO: 671590 - DNA, 88 bp, Homo sapiens
agcagcagtggcaaccccgggggcagcagcaactgccggacgccctatcgcaagcagcttttcacctctggttcctacatctggattg

SEQ ID NO: 671591 - DNA, 101 bp, Homo sapiens
tgatcacgaaccggagagcaaggttgaggccctagcacaaaacacagatcttaaagaacgcttacgcagaatccatgccgagtctctgctcctcgactccc

SEQ ID NO: 671592 - DNA, 100 bp, Homo sapiens
ctgggcccgtgtgcagagccttgcccagaacccacgcctcagaggaggaagaaggtgggaaaggtgaaaagaggaagagagaaacagatgatgaaggaga

SEQ ID NO: 671593 - DNA, 74 bp, Homo sapiens
gccattttgcccaaaccggtgaaagacttaaccaccaccatgtcgagcaaaagaacaaagaccaagaccaagaa

SEQ ID NO: 671594 - DNA, 100 bp, Homo sapiens
ccaaagtgccatgtctttaatggcaattgaaggaacagactaaaaatcgtgtcctggaaggaaactacaggtactaccagggattttcagtctgaagaag

SEQ ID NO: 671595 - DNA, 75 bp, Homo sapiens
ggtctattcaccgccatcaacctcgggctgaaggacacactgaataataattctctgggcaaaaagcacagttgg

SEQ ID NO: 671596 - DNA, 88 bp, Homo sapiens
gaggccgcctggggtagcggcggcgggagtcctggcgctctgcaggtgctcttacagcctgttccaagtgtggcttaatccgtctcca

SEQ ID NO: 671597 - DNA, 75 bp, Homo sapiens
ctaccaggaggccaggggtgtcgccatgtgtgagatcaaggtggcccagcccaaagaagtctatcagcagcagca

SEQ ID NO: 671598 - DNA, 82 bp, Homo sapiens
catggtgtcatggatcatctccaggctggtggtgtgtggacactgccagcggctgcagccgacttggaatgacctgggagac

SEQ ID NO: 671599 - DNA, 100 bp, Homo sapiens
aaaatcttaaccttcaaccatctggggaaaaggcaaaaatcccatctaccgcaactctcagttcgagagtaaagaaatcaatgtggactgaacataaatc

SEQ ID NO: 671600 - DNA, 97 bp, Homo sapiens
atggatatgtacacattcacccttcatcagtgaactatcaggtgtgagatcaaccatgagttccgttgcagttttgacccaagagagttttgctgaa

SEQ ID NO: 671601 - DNA, 50 bp, Homo sapiens
ctatcactggctcaatgatgaatcgcaatgtatctgctgagcaaaaagat

SEQ ID NO: 671602 - DNA, 100 bp, Homo sapiens
aaaaagaaactggagccaccatcaagctgtctaagtccaaagatttttacccagcaatgccaagtgagtacacctatgtgaaactgagaagtgattgctc

SEQ ID NO: 671603 - DNA, 50 bp, Homo sapiens
tggaggagaatcaagagctccgagaggccacaagaggaagctgaatgaag

SEQ ID NO: 671604 - DNA, 96 bp, Homo sapiens
ttcaagtaataaatggagtgcttggaggcatatgtggcttttgctgctctcaccaacaggcaaagaatctagatgcaataaccacccctgacccaa

SEQ ID NO: 671605 - DNA, 100 bp, Homo sapiens
accgccctccacgggagatgaacatccacagataaccagcccgagtcatgcagtcttttcgagaaaggtgtggtttccatggcaaacaacagaactacca

SEQ ID NO: 671606 - DNA, 100 bp, Homo sapiens
caggaacctgctttctctcgatgaggataacatccctccagaagatgaacatacaacctcctcttcagtgtcaaaaaagccacggttagaccagattcct

SEQ ID NO: 671607 - DNA, 80 bp, Homo sapiens
ctggaagaagcggaagaagatggcgctcaccagatcttgatgtggaagaaatggaggactcagaaccaaggatttccaag

SEQ ID NO: 671608 - DNA, 100 bp, Homo sapiens
gactgcactatgccaagaacgtcagaatcgacaaagttcatctctttgtggatcaacagtggctggctgttagggctttaggatcagatacaggaggatc

SEQ ID NO: 671609 - DNA, 101 bp, Homo sapiens
cccatctttatgcaaagccagcgttacagtaatgttccaggtcaatgagctgaaggagaaaggcaacaaggccctgagcgtgggtaacatcgatgatgcct

SEQ ID NO: 671610 - DNA, 100 bp, Homo sapiens
gctcaagagcttcaacctgtcagcgctggagaaacatgggcctgtttatgaggatgttcctgttcccgacatccggacgtgccacttctgcctcgtagaa

SEQ ID NO: 671611 - DNA, 99 bp, Homo sapiens
aggaagactcccagatatgcaccgtgggccgcctttggatctctgtggccaggttggatggcaagcatgtggtgtttggcaaagtgaaagaaggcatga

SEQ ID NO: 671612 - DNA, 75 bp, Homo sapiens
tcctggtcactagcggactcttcttcgccttcgagcgtcctgcctctgcggctctgccccctgcatcctgtgcag

SEQ ID NO: 671613 - DNA, 101 bp, Homo sapiens
caagcactaaaccactatgcttaccgagatgcggttttcctcgcagaacgcctttatgcagaagattttatttggagagaagcaagcatctttgcctcttt

SEQ ID NO: 671614 - DNA, 100 bp, Homo sapiens
gggcaggccgcgcaagcagcctccggtgagtcccgggacagcgctggtagggagtcagagaggcggatttggtcgtggacgtggtcagccacctcagtaa

SEQ ID NO: 671615 - DNA, 75 bp, Homo sapiens
atactactttgcaataacaatggaaaggtcatttcaatgtgttatccaggattttcaagcttcggtacttcaagt

SEQ ID NO: 671616 - DNA, 100 bp, Homo sapiens
cggtgctgcaagagaaggcactcaagtttatgctcctcagagaaattttgaaattgccttcaagatgtttgatttgaatggagatggagaagtagatatg

SEQ ID NO: 671617 - DNA, 102 bp, Homo sapiens
tgtcccagagacaacgagatgaactgagctatgaagacatgattggtgaggaggtgccatcggatcaatactactgggctcctttggcccagcatgagcgag

SEQ ID NO: 671618 - DNA, 90 bp, Homo sapiens
cgtttccattgtgatcccaccttctgggcaaagaatgtagtcaatttagatgggaaagggctccttcaagtatgcctgggtcttggataa

SEQ ID NO: 671619 - DNA, 96 bp, Homo sapiens
gcgacaccatagcacggttccagaagatgagagggatgcaggcagagacatttgtttgggtgaacaatgcatctgcacattcccagagtgttgcca

SEQ ID NO: 671620 - DNA, 98 bp, Homo sapiens
taagacccgctgtctggccctgagtagggtgtgacctccgcagccgcagaggaggagcgcagcccggcctcgatgaaggttattctttcagcagtgtc

SEQ ID NO: 671621 - DNA, 75 bp, Homo sapiens
ggtgtccatattgtgatgcctggttattacaggcctactgaacttgacgcactggtatttggccatctatacacc

SEQ ID NO: 671622 - DNA, 50 bp, Homo sapiens
ccagcacactcctcgcgagcaagattggaaacctggaagattactaccat

SEQ ID NO: 671623 - DNA, 100 bp, Homo sapiens
ctgacacatccaacttcgacgtggatgacgacgtgctgagaaacacggtgctgttggcagcagcggtctgcacaaaagcaggaaaggctattgtttctcg

SEQ ID NO: 671624 - DNA, 82 bp, Homo sapiens
aaacagaaacacttcttttattttcctgtaatatatctgtatcatcggagccaccaaaaccctcaacaggggcatctctgag

SEQ ID NO: 671625 - DNA, 99 bp, Homo sapiens
aagcacagatttgcttttacaccaattttcatacagtctcggggttttaaaactttgaaatcaaggacacgacgtctccagtctacctccgagagatta

SEQ ID NO: 671626 - DNA, 100 bp, Homo sapiens
ggaagattcgaggcggcgggggacaagtcggcgccccagagcggacgaggtgtcatggagaaactccagctgggcccagagattctgcagcgggaaaatc

SEQ ID NO: 671627 - DNA, 50 bp, Homo sapiens
agcaccaggagactgcctatgggcatcttgacccagccgaaaaagttgaa

SEQ ID NO: 671628 - DNA, 96 bp, Homo sapiens
ctgctggaagctcttgattatgatagttcagatgacagtgattttaaagttggagatgcctcagagagaaaaggaacagttccgtaagctctttat

SEQ ID NO: 671629 - DNA, 76 bp, Homo sapiens
gaaacagggttatcagtgccaagttcgaaaagatataatccgcatcctccccagtctagatgtcgaagtcaaagac

SEQ ID NO: 671630 - DNA, 74 bp, Homo sapiens
ctgaaacgatcctctcatctcagcctccaaaagtgctggcattacaggttctgaagccagacacaagatgaaaa

SEQ ID NO: 671631 - DNA, 50 bp, Homo sapiens
cagctagtaatttgccttctggattagataattgacgaccttgccaacct

SEQ ID NO: 671632 - DNA, 100 bp, Homo sapiens
aaaaaactatcaagttgggatcaggcagagtaggtgacctcacagtgactcaagctaccacttactgttgattgtgacgaaatgccagctgaggcacatg

SEQ ID NO: 671633 - DNA, 98 bp, Homo sapiens
tgctgagccccggcactgcctggctgcgagcacatgatggcgatacgggagctcaaagtgtgccttctcggggtcgcaatggaagaagagatcgccgc

SEQ ID NO: 671634 - DNA, 74 bp, Homo sapiens
tacaagaatgtgaaatttgttctcaagcacaacctttggaatgagtacacatccaggagtgaagaagacaagct

SEQ ID NO: 671635 - DNA, 101 bp, Homo sapiens
gggaggaagccctttctcctcggcactgtattctttacctgcttcccaatcccactgatgaggatcagcccatggtaggtagccatccaagcttcctgaag

SEQ ID NO: 671636 - DNA, 97 bp, Homo sapiens
caggcaggcttcgcggctgcgcccccggcccgcgcagcatgatcgggctgatgctgggcacctgcatcgccttctacgtcgtgatcggcgacttggg

SEQ ID NO: 671637 - DNA, 74 bp, Homo sapiens
cctgggccgcgtccatcacctggcactcaagggacagaatgatgctgctgaaattggaacaagaaattttagat

SEQ ID NO: 671638 - DNA, 97 bp, Homo sapiens
ggcccaagaaatcaaaataaaggaaacacatttcatatactgcaggaccctggctctcaagctcccacatcctggattagtgagtctcaggtttccc

SEQ ID NO: 671639 - DNA, 75 bp, Homo sapiens
taagagatatctgcaatgatgtactgcctcccgcgacgatgcccctcaacgttagcttcaccaacaggaactatg

SEQ ID NO: 671640 - DNA, 100 bp, Homo sapiens
agatgtgatgttggagaactatagcaatctggttttcttgggtcagctgcatggccacagacaggagactgtggggaccttggacctagggggagcctcc

SEQ ID NO: 671641 - DNA, 74 bp, Homo sapiens
cttgcctccgacgtcttcacgtgctgcttttgacacaaaaacggggttacgtgtggcagtgaagaagctctcca

SEQ ID NO: 671642 - DNA, 75 bp, Homo sapiens
gggccgcaccgccagggactggggtgagcggcccagagataattgacgaccttgccaacctagtggagaacacag

SEQ ID NO: 671643 - DNA, 100 bp, Homo sapiens
cccggatctcctggaagtgttggcggaggaaggtcataacttttgtgcagaaggacctaaatgtggtgaaaactcagagtgcaaaaactggaatacaaaa

SEQ ID NO: 671644 - DNA, 98 bp, Homo sapiens
gggaaactaggtcgatggtcggcggcgcccggatgggcagctgagagcctggagaaagttcttgtggaattcagtcacaaggagttgtttgatttcta

SEQ ID NO: 671645 - DNA, 75 bp, Homo sapiens
ggcggattagccttcgcggggcaaaatgccccgactatctgagatcggccaagatgactgaggtgatgatgaaca

SEQ ID NO: 671646 - DNA, 83 bp, Homo sapiens
gattttctctgcgttctgctcctactgcttcgcgtccagacagagtggagactgctgcacggactctggaaccatgaacatat

SEQ ID NO: 671647 - DNA, 100 bp, Homo sapiens
ttagcagatatactattgtactatggacttcatcgctttataacgcaggaggagggagacgcactgatgacatcgggccgctcctgcagctcgggcgcct

SEQ ID NO: 671648 - DNA, 101 bp, Homo sapiens
gtcttcggcatcgggcgacagcaggtcacagtggacgaggtgttggcggaagtgaatttgggtggtttgaaggatcacataaaggagatccagagatgccg

SEQ ID NO: 671649 - DNA, 98 bp, Homo sapiens
gaaaagaagaggaggaattaaattttaatgaagatattctgtgtccacatggcccacggatgacagtaaccagcccccgggccggggtgtcctctcca

SEQ ID NO: 671650 - DNA, 90 bp, Homo sapiens
cttccggccggcggcggctgctccgggtgagcaggctccagtgattcacgcccgcctggagaagaatcagagctcagctcatgactcacc

SEQ ID NO: 671651 - DNA, 110 bp, Homo sapiens
gtaaatgccggcttaccatctctaccatcatccgggctgatgaattcatccgagcaaatgccaccaacaagctgacagtcatagctgagcaaatccaacatttgcaagaa

SEQ ID NO: 671652 - DNA, 75 bp, Homo sapiens
ccatccaggactccctgactcgatgcaaactgaaaccgtgtcagttcagtcttcggtattggggaagggtgtaaa

SEQ ID NO: 671653 - DNA, 100 bp, Homo sapiens
cctggggttgaggaactgccttgttctaagaacggaagcatctgggctggatggaatttagcatcaagcagagtcccctttctgttcagagtgttgtaaa

SEQ ID NO: 671654 - DNA, 80 bp, Homo sapiens
tcatatgacattaacagacaagacacttttcagaaagacagtgagaactcaacagaggcaaaagcagtagattctaacaa

SEQ ID NO: 671655 - DNA, 100 bp, Homo sapiens
gagaagtttttacaaagaacatgctcacatcttcaggtgcctcattcacatacgtcaaggaaattgaggagcagctgcagctctactgggccatggactc

SEQ ID NO: 671656 - DNA, 74 bp, Homo sapiens
cagcctccctgtgcactgggaggagatctcggccaactaggatgaccccatcggaaacctgaacactgcctttg

SEQ ID NO: 671657 - DNA, 50 bp, Homo sapiens
aattggcaaagttattgccagcttcctgatgatcatgggaacagcaatag

SEQ ID NO: 671658 - DNA, 100 bp, Homo sapiens
ccacaacagctactatagtgttcctgagctgccaacgatacctgaggggggttgttttgatgaaagtgaaagccaatggagatcttcgtggatgatgaga

SEQ ID NO: 671659 - DNA, 50 bp, Homo sapiens
actactccagataccgaggctgcaggtaacatttgtcgatcacccattgc

SEQ ID NO: 671660 - DNA, 88 bp, Homo sapiens
atgaaccgcctcatcatgaactacctggtcacagactctgaagaagaagctatggagactacaccagccaaaggaaagaaagctgcaa

SEQ ID NO: 671661 - DNA, 75 bp, Homo sapiens
ctcgggccgggctgcgtgagggaggagggacgctgtttgtgactgtagtacccagtctctcacctcctgcttcgc

SEQ ID NO: 671662 - DNA, 142 bp, Homo sapiens
cgagaatgaaaaccttcaggagaaggaagggggagaggcggaagagagtgccacagacacgaccagtgaaactaacaagacagaaagaatttactttcaggttttcttacctaaagggagcaaagagaagagcaaaccaatg

SEQ ID NO: 671663 - DNA, 97 bp, Homo sapiens
ttttatttggcagatctgaagggaaagctccagatactagatgcttctggctggcacacctggcttcccctccatgctcagaactgcttcctactct

SEQ ID NO: 671664 - DNA, 96 bp, Homo sapiens
tccaggagagcatgaatatggattatttccagcgcccattcatgttggagcatggggaagtgattgactgtgtgcaggagctgagccactccgtga

SEQ ID NO: 671665 - DNA, 87 bp, Homo sapiens
agctgcgaggaaaatggcggcgggaggataaaagaatcagagtgtctcaacccttgacaagaggaccaagtgcctttattccagaga

SEQ ID NO: 671666 - DNA, 96 bp, Homo sapiens
tggtctaggtgctgctcctgaacttggtctctgagccatggcttcccatagacactcaggtcccaggtgtgtgatggcggctgcaatctgtcttgt

SEQ ID NO: 671667 - DNA, 100 bp, Homo sapiens
ctttttcgacgcctccgccgccgcctgaggaggcgagctagccgggagttacaccgccaccgccagctgctcctggaacacctggagtgcctggtgtcca

SEQ ID NO: 671668 - DNA, 75 bp, Homo sapiens
gacaacaaccggccgctggaggcgctcatggaggtgtctgtgtctggtctgtgcagacttttgcagacaaatcaa

SEQ ID NO: 671669 - DNA, 100 bp, Homo sapiens
cctcaccatgcccttctgcttcaaacaggcatcgtcctggattcaggtgatggcgtcacccacaatgtccccatctatgaaggctatgccctgccccatg

SEQ ID NO: 671670 - DNA, 83 bp, Homo sapiens
tggttactgggtctcctctcaagaaatctcaagatattaaagttactgctgttaaaaagaaaaggtatagtttggcagtgggg

SEQ ID NO: 671671 - DNA, 78 bp, Homo sapiens
gaattctcggggcggcacagttccagggggccattgacgtttagggatgtggccatagaattctctctggaggagtgg

SEQ ID NO: 671672 - DNA, 101 bp, Homo sapiens
ctccggcttatactcccagcggggaggcgggcagctctgcccggcagaaacctgtcttgttggatggcaagcatgtggtgtttggcaaagtgaaagaaggc

SEQ ID NO: 671673 - DNA, 103 bp, Homo sapiens
ctggcgggagcgcggttcggggccgcagagggctcgaccacttactggatgagaacagagtgccggacctcgcacagatgtaccagctgttcagccgggtgag

SEQ ID NO: 671674 - DNA, 100 bp, Homo sapiens
ccctcatgattggctcttacgcctcttctgccattacgttcccaggaatcaaggtaataattctcataggaaataaagcagatttggaggcacagagaga

SEQ ID NO: 671675 - DNA, 92 bp, Homo sapiens
gtcgggatatcgggtggcggctcgggacggaggacgcgctagtgtgagaagccctaccactgcaactgggacggctgcggctggaagtttgc

SEQ ID NO: 671676 - DNA, 98 bp, Homo sapiens
gtgcaccaaccaggttctcattactgccagggctgtgcctacaaaaaagggagatggcaacatccgctactacgaggtgagcgccgacaagcctcacc

SEQ ID NO: 671677 - DNA, 83 bp, Homo sapiens
cggaatttgctcaaatctcatcttaaccttggctgttgccaaaatggttcaacagtgctgtacttatgttgaggaaatcacag

SEQ ID NO: 671678 - DNA, 75 bp, Homo sapiens
gaaggacattgcggctcatatcaagaagcgattactttttgcaaaactctttggacatttaacatctgcaaggag

SEQ ID NO: 671679 - DNA, 75 bp, Homo sapiens
atcttgagagtgaagatctcgaaggatttcatagttgagtcagcagatactggagttatttgaaacatgtcagca

SEQ ID NO: 671680 - DNA, 100 bp, Homo sapiens
ccagaaagatgaattaatccttgaaggaaatgacattgagcttgtttcaaattcagcacctaactggaaatgactcaaacgtccaccagtaggagagagg

SEQ ID NO: 671681 - DNA, 83 bp, Homo sapiens
catccatgatagaaaaacttctttcacatggtacaaatattgaagaatgcagcaagaaaactttagaaactgttcctttggag

SEQ ID NO: 671682 - DNA, 100 bp, Homo sapiens
cccagacatcaagctctttgggaagtggagcaccgatgatgtgcagatcaatgacatttccctgcaggtgtggatgtggaagcagccaagcgggcagaag

SEQ ID NO: 671683 - DNA, 96 bp, Homo sapiens
cttctaagtcagagacatcaaaacctggaccttctggattacaggccaaattagcaaaatgccagaggattcaacatgagcatacctatgcctggg

SEQ ID NO: 671684 - DNA, 82 bp, Homo sapiens
agaagctgcacgacgtggacttctacaaggcccgcatggagggggatatgagactttctactcggaatatcctgagtgttgc

SEQ ID NO: 671685 - DNA, 83 bp, Homo sapiens
agctgttgcggggccatggcggggaccgcgctcaagaggctgatggccgagtacaaacccacaatggtgcgcatgaatgtcct

SEQ ID NO: 671686 - DNA, 95 bp, Homo sapiens
gggaccataactgatgatgtgcgggttcaggaggtacccaaactgaagatgactttcacacgacctgccaatcacagacaactcacttttgaaga

SEQ ID NO: 671687 - DNA, 90 bp, Homo sapiens
ggggacagctccaagggggaagataagcaggatcgcaacaaggagaagaaagaagcgctgagcaagggccgttgctccagggagaactgc

SEQ ID NO: 671688 - DNA, 75 bp, Homo sapiens
aagaaagtcaacgacaagaacccacacgtcgccttgtatgccctggagatgatgatgccaattcctacgagaatg

SEQ ID NO: 671689 - DNA, 123 bp, Homo sapiens
ggacagtggaacagcttgttcagatttaagcatcttgcaactggaaactatttagctgcagaggagtgtgaggaagaggctgtctgtgtcattatgtgtgcgtcggtcaagtataatatccgg

SEQ ID NO: 671690 - DNA, 100 bp, Homo sapiens
cctaccgatgctctggatcaatttgaagtcatcaagagagagggcacaggtacagagatgcccatgattggggaccgagtctttgtccactacactggct

SEQ ID NO: 671691 - DNA, 100 bp, Homo sapiens
taaaaaggtgtcaagatttggaatacgtacaggcacatttaactgttccagtgatcccagagttgtctctgtgggaagtttgtcctccgtccattgcgac

SEQ ID NO: 671692 - DNA, 89 bp, Homo sapiens
aaagcctcctcagccttctgagtcagcctgaaaggaacaggccgaactgctgtatgggctctgtgccgtgagcgatgtggagatgcagg

SEQ ID NO: 671693 - DNA, 75 bp, Homo sapiens
cctttagaaaattactttcactgtgtcttcagaaagatccttccaaaagtactatactggcaattgctggagaag

SEQ ID NO: 671694 - DNA, 113 bp, Homo sapiens
ggatcagcgcctacccgagtgtgcgaagctagccaagtacaaaattggacagctgtacatgatcagcaaacacagccatgaacagagtgaccggggagaaggggtggaggtcg

SEQ ID NO: 671695 - DNA, 88 bp, Homo sapiens
ggccatgccaaggactatgtggagatcctggccaatttggagcaaggcttagcagaagacggcggcatgagcagcgtgactcaggagg

SEQ ID NO: 671696 - DNA, 100 bp, Homo sapiens
cagcaaccgaattccagttttggatcaatcttcctgtcctacaactgacaaaggatcccctaaagacccctggaaggctggaccatggcacaagaactgc

SEQ ID NO: 671697 - DNA, 74 bp, Homo sapiens
acgcacctgcagctctgctgagagagtgcaagccgtgggtttgcctgagaatacagatcaacccacagaacaaa

SEQ ID NO: 671698 - DNA, 100 bp, Homo sapiens
ggaaagacagaagagaagggaaatggcaagggagcattccaggagagaaaggctccctgaaacaacagtaacctacccctgtgggtcatcatcatgccct

SEQ ID NO: 671699 - DNA, 98 bp, Homo sapiens
gcccaagccgattgagataccactcagtggggagatattccgagtggtgtgcatctgtttgggtaatccaccagagacattcacctgggaatatcgag

SEQ ID NO: 671700 - DNA, 51 bp, Homo sapiens
ccggcgcccagccgtcccggaggtattccaataactgtaccacctccaggt

SEQ ID NO: 671701 - DNA, 100 bp, Homo sapiens
gcagcagtcatccatgaggatgtgcatgggctcgcggcggtctttcatctgcaggatgaggtgcggagcgggccctggtggcgcggccctccctggagag

SEQ ID NO: 671702 - DNA, 108 bp, Homo sapiens
ggaactgatggcgttcctgttacctctcatcattgtgttaatggtgaagcacagcgattcccgaaaagcttttgacatcacctatgtgcgtctcaagttccacaccag

SEQ ID NO: 671703 - DNA, 75 bp, Homo sapiens
tcgggagccgtggccctgatccagacctgggcaggtactccaaagattcaggtttactcacgtcatccagcagag

SEQ ID NO: 671704 - DNA, 75 bp, Homo sapiens
cttgcaggctgtgtcacagaagagaagtgaaatgacaatggatgctctgttggctcgattgaaacttctgaatcc

SEQ ID NO: 671705 - DNA, 76 bp, Homo sapiens
tcgttattggagccaggcctacaccccagaaatcttcccaaggctgcagacaccgacggatttgctttgggagcca

SEQ ID NO: 671706 - DNA, 75 bp, Homo sapiens
ctgtgtcccgcaatgccaacctcagcaccatcaagcagatggcccactgcgtgaccttggttcagctgtccattt

SEQ ID NO: 671707 - DNA, 51 bp, Homo sapiens
aagtgatggagcagcattttcaggaaaaacgtggtcttcgagaaatgcgag

SEQ ID NO: 671708 - DNA, 98 bp, Homo sapiens
gtttagctgaatcccatcctggagatggccaaaaaggctttgaaatctgagtccgctgcctcaagtacagggaaggaagataaacagccagcaccagg

SEQ ID NO: 671709 - DNA, 101 bp, Homo sapiens
actacctcaaccaatcggacacctaccaggtggacggcacggacgacagaagcgactttggtgagactctgcttcgccgacacgaggtgaccatctgcaat

SEQ ID NO: 671710 - DNA, 80 bp, Homo sapiens
ttcaaatcgtcaccctcatggtcgctccggagtccttcaataatgttaaacagtggctgcaggaaatagatcgttatgcc

SEQ ID NO: 671711 - DNA, 100 bp, Homo sapiens
tctgggggtcctctctgagtcaaatccagtgtaagactttgaccccgacgcaggcttcagtgattgccgcggatcagaagcctgagcactttggctcgag

SEQ ID NO: 671712 - DNA, 101 bp, Homo sapiens
caccatttcaaattttcacactcagggaaaccaatgtacctgcacatcggggaggagatagacggcgtggacatgcgggcggaggttgggcttctgagccg

SEQ ID NO: 671713 - DNA, 125 bp, Homo sapiens
gcaaactgggaagaggaccctcaccaggaaccacatctgccagcaccttgatcttgaacttctcagcctccagaacggttgtccatctgggactttcaaggccaaccaaggggatgaggcctgta

SEQ ID NO: 671714 - DNA, 98 bp, Homo sapiens
cgggcaggcgggaggcaacggagctaccagccggactctgcgagacagcctcagtggctgggacccggagaccctggccctcctgctgagggaggagc

SEQ ID NO: 671715 - DNA, 60 bp, Homo sapiens
aggcctggacactgtcacactcaacatcacctctcaggctatggagttactagtagagaa

SEQ ID NO: 671716 - DNA, 100 bp, Homo sapiens
atatccgtgcccggatatttctcatcgccagcaaagagcttgagacaacctctcctacattgagcacatctttgagatctcccgccgtcctgacctactc

SEQ ID NO: 671717 - DNA, 108 bp, Homo sapiens
aaggaaaaactggagagcttcatcaaaaatagtgatagctttgataaggccgttgctccagggagaactgcaaatatcttcatccacccccacatttaaaaacgcagt

SEQ ID NO: 671718 - DNA, 82 bp, Homo sapiens
ccatgtacagccgctccatccagggccaccatgtctgcctcctggtgaaaaagatttaaattccaggttgtcatcaatggcc

SEQ ID NO: 671719 - DNA, 101 bp, Homo sapiens
gacgaggaagagttgtggcgaggcagatcctgccccgtggccgcggccgtctcgtagatgccgtgcgcgaaattcggaagtatgatgatgtgacggaaaag

SEQ ID NO: 671720 - DNA, 100 bp, Homo sapiens
ccctccctccctccgacgctgtggtgtaactgtcacactccctcaggcaggaccatggaacacagcatctttggtcttcaatcagtccccttcaatggct

SEQ ID NO: 671721 - DNA, 99 bp, Homo sapiens
ctgacctggccaattctgacgccctcaaggtcgccaaggaggtggacccccagggcatgatgacctgaaggagatgctggacaccaacaaggattctct

SEQ ID NO: 671722 - DNA, 100 bp, Homo sapiens
tacagcgggccgggaaaagtggcactgaggctctggaacttctgcccagctctccttggaaacattggcaaatttggagcgacagatctatgcttttgag

SEQ ID NO: 671723 - DNA, 87 bp, Homo sapiens
gcagttgaagaagtgaagaaattattggtacctgcactctccttaaggcggcagcaaataggtgaaagattgaatgaatgggcagtc

SEQ ID NO: 671724 - DNA, 95 bp, Homo sapiens
ccgttttcactctgctactttttctcaacacctgccttctgaatgcattactctactgactggcagagacaggagaggtagatgtccacgcccac

SEQ ID NO: 671725 - DNA, 100 bp, Homo sapiens
tttctcagcaccttggcgaagccttgggtttctttcttaaaggactgatttttagaactccacatttgagaactgataaatttcaaacggaagagagtgg

SEQ ID NO: 671726 - DNA, 100 bp, Homo sapiens
ccttcagcagggctgtggctaccatgttctctcgcgcgggtgtcgctgggctgtcggcctggaccttgcagccgcaatgaaatgcactcggtgatggaaa

SEQ ID NO: 671727 - DNA, 100 bp, Homo sapiens
catctgcgcctttgccttggtgaccttgctgcaacagatcctgtatggcaggaactacattaagagcaccttctagccaccatggcaacctcatctgaag

SEQ ID NO: 671728 - DNA, 87 bp, Homo sapiens
gaggcggcgcggcagcggagggacggcagtctcgcgcgcgcaaatctgtccaaggctgcctggggagcattggagaagaatggcacc

SEQ ID NO: 671729 - DNA, 98 bp, Homo sapiens
ggcgttggaggccaccgtttccaggaagctgttttaggttatgtgaaagagatgtttcctcatctctaaggcttaccagaagctctgatttgaagaga

SEQ ID NO: 671730 - DNA, 97 bp, Homo sapiens
gcctcctgagtagctggcattacagcgatgactacctgtccctggagggttcccgctggccaccagccatcaggcaggccacacgctggaagtacac

SEQ ID NO: 671731 - DNA, 100 bp, Homo sapiens
acgtcaataatgaaagctcttcagagatttcctttgacctcgctgagtacactgcggacgttgacggagttggcactctacgacttctagatgcagttaa

SEQ ID NO: 671732 - DNA, 75 bp, Homo sapiens
atcatccacgcacctgcagctctgctgagagagtgcaagccgtgggggagtgcatccgccccaacccttttcccc

SEQ ID NO: 671733 - DNA, 75 bp, Homo sapiens
ccggcatggcacattacaacttcaagaaaattacggtggtgccgtccgccaaggaggaaatgagtctcaaccaga

SEQ ID NO: 671734 - DNA, 110 bp, Homo sapiens
atctgtcttcggtggactccttcggcagtccacccaccgccgccgcctcccagttgagccccatatgggggttggcaggcagcagagaggcccctttcaaggtgttcggg

SEQ ID NO: 671735 - DNA, 100 bp, Homo sapiens
tgcctgttctcccctcgtcggtggctaagtgatcagggccaaagcggtcagtgagaaggaagtggactctggaaacgacatttatggcaaccctatcaag

SEQ ID NO: 671736 - DNA, 101 bp, Homo sapiens
ggtgcagacagctgtgactatgaagggggcactactcctgtgtgtgaggacatcggacgcagcctcctgacctatggccgccgcatccccctggctgaatg

SEQ ID NO: 671737 - DNA, 75 bp, Homo sapiens
cggagtgcgggcgcgccccaccaccgccctcaccatggtcaaaatgcagatcttcgtgaaaacccttaccggcaa

SEQ ID NO: 671738 - DNA, 98 bp, Homo sapiens
agaggaactaccagatcgggaagaccaaggtggacaacctggaggaatttctgaacgacccgctgaagaagcacacgctgatccgctttctccccagg

SEQ ID NO: 671739 - DNA, 75 bp, Homo sapiens
cggaacagtggaaggaaatagcaacagtggtgaagtttgctgacctctctgaggctgccaaccggaacaatgacg

SEQ ID NO: 671740 - DNA, 74 bp, Homo sapiens
ggacatggccacctgggacgaaaagattgaaactcccatgatgaacatcatcccagggggagccgtggccaagc

SEQ ID NO: 671741 - DNA, 100 bp, Homo sapiens
ttgctggctgctctgaactaaaagcatccgtggggaccgaaagaggtttttgcacaccttattaaggtggggaccaaggcatactgaacacattttttag

SEQ ID NO: 671742 - DNA, 82 bp, Homo sapiens
actctttctgttcaggccagaccctctgggagcttctcagccattttccacagatcaggttttggctacgggcctccacctc

SEQ ID NO: 671743 - DNA, 74 bp, Homo sapiens
ccacaaacgccgcaccaggtcttgtagcagcgcctcctcgggctgatggagttatgagaacaatgaacacagaa

SEQ ID NO: 671744 - DNA, 100 bp, Homo sapiens
aacgaatcatccacgcacctgcagctctgctgagagagtgcaagccgtgggttcatgtggctcacatccagattgcgccaggctgagcgaagccgccaat

SEQ ID NO: 671745 - DNA, 75 bp, Homo sapiens
ctgacaatgaagttcactgggacagcattataattcaggcaagcacaatgttagagccacagctgaaacaactac

SEQ ID NO: 671746 - DNA, 75 bp, Homo sapiens
ccccagcgcagtgaagtggtgagcctttttgtcactggtaagaatgattgatgttggctgatattggagtgctca

SEQ ID NO: 671747 - DNA, 100 bp, Homo sapiens
tcctcctttagaaaactgatcttaatacaggtggtgatgatgtccagcaactctgtgaagcaggagaagaggagtttttggaaatcatggcactcgtggg

SEQ ID NO: 671748 - DNA, 111 bp, Homo sapiens
gccctgagtcactgcctgcgcagctccggccgcctggctccccatactagtcgccgggagtgcatccgccccaacccttttccccctcgtctcctgtgagaattccccgtc

SEQ ID NO: 671749 - DNA, 100 bp, Homo sapiens
ctcatggtatatttgcagccagtactctatatgaacaatccgtctggatcacggatgtaggaagtgggtgtccgcaatgttgccagtgtctgtctgcaga

SEQ ID NO: 671750 - DNA, 82 bp, Homo sapiens
actctacgcaactgttgctttttcatgggatcatagacggtatttctatgtaaacgaacagtcgggcgagtctcagtgggag

SEQ ID NO: 671751 - DNA, 75 bp, Homo sapiens
ttggaagcgctttgatttacagcagctgcagacttcccaagtaagaagcggaagaggagccgctggaaccaagac

SEQ ID NO: 671752 - DNA, 90 bp, Homo sapiens
gaagtcctctctggtgctgacaatattgccagccaaagcctctaagaaacccagcgtgcatcgcttcaaggccgggacagtgtggccgag

SEQ ID NO: 671753 - DNA, 96 bp, Homo sapiens
catactgcagatgtgcaaccctagagaaggcaagcagggcaatgtattccaagatgcagtcttcaatcaaacagttacagttattgaaagagagga

SEQ ID NO: 671754 - DNA, 78 bp, Homo sapiens
ttcaatccgctctactggaatgtgtggggacgccctactacatgtcaccggagaggatccatgagaacggctacaact

SEQ ID NO: 671755 - DNA, 75 bp, Homo sapiens
cctggtcgctggtgaagcccgcggcgcgcgcctctcccggaccctgcaggattttgctggagccaggtgtgatcc

SEQ ID NO: 671756 - DNA, 76 bp, Homo sapiens
cccaaggccatctacctggacatcgatggacgcattcagaagatatcccgatgtctgtgggtataatcgatcctag

SEQ ID NO: 671757 - DNA, 97 bp, Homo sapiens
gctggtgaggctcacgttggagggcttcgcgtctgcttcggagaccgtaaggaatctatgtactttcatcagcgcggccagtaagtttgcacagctc

SEQ ID NO: 671758 - DNA, 75 bp, Homo sapiens
acctggagtgagtggagccccagcaccaagtggcacaactgttacattggcgaatttgaaatcattgatgaccac

SEQ ID NO: 671759 - DNA, 100 bp, Homo sapiens
gctggaagacatgttttcactgttcgacgaggaagttcatcagcagaggaaatggtcactctcttggttcaggcgggcctctttgacactgccatatcac

SEQ ID NO: 671760 - DNA, 75 bp, Homo sapiens
cgttgaaggacaccagctgcggaatttgcggctttggcagctttgcaaactcctgtaccagcagtggagccacat

SEQ ID NO: 671761 - DNA, 99 bp, Homo sapiens
gcagtggtcgcttcttctccttgaccagaggatttcttagtgccagagcttcaagctactgaagaagaaaaaagcaaattagaatctggtttgacaaat

SEQ ID NO: 671762 - DNA, 100 bp, Homo sapiens
gctgccgccatgcataccacccggcctgtctggggcccagctatccaacccgggccacgcgcaaacggcgccactgggatgataaggatgccttctatgt

SEQ ID NO: 671763 - DNA, 50 bp, Homo sapiens
tatgggccacatgcagtttctctcaggtgatcgaggaaacatctcaacat

SEQ ID NO: 671764 - DNA, 75 bp, Homo sapiens
ccctgtgtggccaagaagctggtgtgcggagatgaaggaacactttggtcttagtaacctgactggaatgaactg

SEQ ID NO: 671765 - DNA, 74 bp, Homo sapiens
gtcatggagccgctcactgccagccgtctgcagcccaaggagctggatccctctgctgtgctccccttagactg

SEQ ID NO: 671766 - DNA, 96 bp, Homo sapiens
cgccttgctccttttgtctaccttcttctgatccagacagaatgtaaaaagggcagctctctggcatgttcctgactgaggatctcataacattta

SEQ ID NO: 671767 - DNA, 80 bp, Homo sapiens
ccgagccagcgagccagcgagccgccgacccgccgagcaaaatgatgtgaagttcatttccaatccgccctccatggtgg

SEQ ID NO: 671768 - DNA, 100 bp, Homo sapiens
ggatccatataaacagggatttggaaatgttgcaaccaacacagatgggaagaattactgtggcctaccaggctggtctcgaactcctgacctcaagtga

SEQ ID NO: 671769 - DNA, 82 bp, Homo sapiens
tctggctctggaattgctactgctgcctctgtcactcctggtgaccagcattcaaggaggctgtgcagaaggtatcctgcag

SEQ ID NO: 671770 - DNA, 95 bp, Homo sapiens
acttccgacttctggcacccagtggtgacccctgccctcgtgtgcctcagtcagctgctcaccaaggacttgattattcttagaaatgcacttga

SEQ ID NO: 671771 - DNA, 90 bp, Homo sapiens
tgttttcatcacttctctccagaaggtacggtggttgaggagagcaatggttctgatgagatggagaattcagatgaaaccaaaatgtca

SEQ ID NO: 671772 - DNA, 90 bp, Homo sapiens
gaccacacactgggaaacatcattaaatcaacacacgcaggacttgaaagatgttactaataatgtccactacgagaactatggaatcag

SEQ ID NO: 671773 - DNA, 99 bp, Homo sapiens
gaaaagcccctttactgtaaaaggaaattggtacccctataatgggcagtgtctaccagatattgcatttaaatcaaacggtattgagatggattgggt

SEQ ID NO: 671774 - DNA, 100 bp, Homo sapiens
ctgtcactattaaatatgactttcatgaaatatgtggattccaatctctgttgcttcatcccaggaaaggctcttcagcttcttcactgtttccctctgg

SEQ ID NO: 671775 - DNA, 83 bp, Homo sapiens
gctaaatattgcggcagttttatggcaagaatatcacggcatgggcatgagtagcttgaaactgctgaagtatgtcctgtttt

SEQ ID NO: 671776 - DNA, 82 bp, Homo sapiens
ttaccccactctttccgccctaatggaggtctccagtttagctcgaagagtgtggaaaaactaccttcctgctatcaatggc

SEQ ID NO: 671777 - DNA, 96 bp, Homo sapiens
tatatgtcccgactgaggatgtcccacccgctgtacctgtgcaatgccagtgatgacgacaatctggagcctggattcatcagcatcgtcaagctg

SEQ ID NO: 671778 - DNA, 74 bp, Homo sapiens
atccctcctgaaactctaccctccaggggatgaggaagctccatcaagtatgatggtgaaggatgaatatgtgc

SEQ ID NO: 671779 - DNA, 97 bp, Homo sapiens
agatcctttgacaccttcagaatcgactcaagagttacatgcatcaggagtgaaaaggctctcagtgtctgagttaaatgaaatcctggaagaaatt

SEQ ID NO: 671780 - DNA, 82 bp, Homo sapiens
ggacagccgcccctggtgcacacaccctcgtattctcctgcccttccccaggtgaaaggtgtagcagtcactcggcctacac

SEQ ID NO: 671781 - DNA, 100 bp, Homo sapiens
gtggcatccgaggagctgtggtccagcctgcgcggcgggaagcggcggcggcggctccagcgtcctaagagggaagacatgtaaggaatttgcataagac

SEQ ID NO: 671782 - DNA, 135 bp, Homo sapiens
tttttggtgattcctgaactcgcacaggagctacatgtctggactgacaagagttgctctaagcagaataaattccctgaaaaaagaaaaaggaactctgtggactcagatctgaaaagcacaagagaatctatg

SEQ ID NO: 671783 - DNA, 98 bp, Homo sapiens
cttgccagaaaccttatgttgcacttattcatggaattacaatgggtggggacaaaactttcggtttgaagaataagaaaggagcaaagcaacagaag

SEQ ID NO: 671784 - DNA, 97 bp, Homo sapiens
gaccttcctgcccttcacgctccaggagctaggtgtcatggagaaactccagctgggcccagagattctgcagcgggaaaatccaaggcttatttat

SEQ ID NO: 671785 - DNA, 75 bp, Homo sapiens
ccccttcttgcagcgccagcagcttgcttatggcatctatgtcatccaccagaggtgttcggcagtggcagccag

SEQ ID NO: 671786 - DNA, 75 bp, Homo sapiens
ctgtgattttcagaggggaatactaagaagatcaccccttctgtgtcattctctgaggaaaacaagttcttctca

SEQ ID NO: 671787 - DNA, 96 bp, Homo sapiens
aagcttggaatgatcatcaaacagctatggtgatgattagagacatactaatgtacatggcaggcattcaacaacatgttttgctgtaccttgcag

SEQ ID NO: 671788 - DNA, 133 bp, Homo sapiens
caaccttcaaggatggaacaagaccatggatgggaaggcagatgtatctttcgttctcttttttgactgtaataatgagtgccggtggtggtgtgcacattgagccccggtatagacagttcccccagctgac

SEQ ID NO: 671789 - DNA, 98 bp, Homo sapiens
agcctgctccactgtaagggtgtcaggatctgaagagctatggtgaaacaccactgaagcattgccaaggtactccaaagattcaggtttactcacgt

SEQ ID NO: 671790 - DNA, 58 bp, Homo sapiens
gggatattcttgaaggaattcaaaggctggcagtgatggtgaaagcataggaaactgc

SEQ ID NO: 671791 - DNA, 80 bp, Homo sapiens
gagagaggaagccgaaaacaccctgcaatctttcagacagatcaccgaagtggccttggagtacaacaactgtcatgggg

SEQ ID NO: 671792 - DNA, 75 bp, Homo sapiens
tgaacgcccccctggcagggacattggtggacccccaaaagtacaagggcatatttaacggattctcagttacac

SEQ ID NO: 671793 - DNA, 96 bp, Homo sapiens
gttcaacacagcaatgaccaaagcaacccctgctgtacggacagcatataaatttgaatgggatggtctagtaaggataacctttgttaggaaaaa

SEQ ID NO: 671794 - DNA, 82 bp, Homo sapiens
cgcgcccggcccggagcccccagcgcagcggccgcgccgccaccggcacggccaggccagcatggtggaccacttacttcca

SEQ ID NO: 671795 - DNA, 100 bp, Homo sapiens
acatgtgaacactcaagtgaagcaaaagccttccatgattacgtgactgcttagaaaactgcacagcatctgatgaaattagcgaataagaacatcaacc

SEQ ID NO: 671796 - DNA, 100 bp, Homo sapiens
gaagccgcctctgtattacttaccagaaaaatggctacaaacttcctagcacatgagaagatctggttcgacaagttcaaatatgacgacgcagaaagga

SEQ ID NO: 671797 - DNA, 83 bp, Homo sapiens
gcctgagacaagccacaagctgagcctccattatggcatgctgaatttaccaaagaagaattggttcagaagctcagttccac

SEQ ID NO: 671798 - DNA, 75 bp, Homo sapiens
ttgcccctcggccgggcggacggttgcagtgtaggattttggaagtcctccctccatcacatcaaaatggttttg

SEQ ID NO: 671799 - DNA, 50 bp, Homo sapiens
attccaagtaactcttatttgatttttgatcaccatactgaagaggatat

SEQ ID NO: 671800 - DNA, 82 bp, Homo sapiens
cgctgaagtccgaggcccttcgcaactggcaagatccacagaccagcatggctgccactgctgctgtgagtcccagtgacta

SEQ ID NO: 671801 - DNA, 100 bp, Homo sapiens
cggcgggcggcgggcggcaaaggagcagccatgagggccgggcccagtcaccgaccttctaatacccgatttacaattacattgaactacaaggatcccc

SEQ ID NO: 671802 - DNA, 75 bp, Homo sapiens
aaaacgagctctggacctcgctgggggactcgtggacccgccccggatctcagtgaatatcttccggactctgcc

SEQ ID NO: 671803 - DNA, 100 bp, Homo sapiens
caagaccagggccctgcagctggaagaggagctgttccaggttctccagagagcgggcatccagagaggagtcctgggagagcgggcggagcgagcgagg

SEQ ID NO: 671804 - DNA, 80 bp, Homo sapiens
aatctacacagcaaagttaacctgacacagaaaatccttgtgcaaataaatgcttaggtttggacagaggagccaaaggc

SEQ ID NO: 671805 - DNA, 97 bp, Homo sapiens
gctcgagggaccatggccgatcctcgcgtgagacagatcaagatcaagaccggcgtggtgaagcgaatgttggctcaattaagaaacatcagggaga

SEQ ID NO: 671806 - DNA, 100 bp, Homo sapiens
ggaagatgtaaagcaatatttcgagcagtttggcaagaaactaatctggattcactccctctggttgatacccactcaaaaaggacacttctgattaaga

SEQ ID NO: 671807 - DNA, 82 bp, Homo sapiens
caggaacctgggcgagcagcggcgggggcccgaggggctcattggtgggcagtattacttatgggaattgctctgatcatgc

SEQ ID NO: 671808 - DNA, 75 bp, Homo sapiens
cagattcaacaggctgccaataaaggagcaagatggctagggtggatgacgtagtagatgaaagtgatgacaacg

SEQ ID NO: 671809 - DNA, 75 bp, Homo sapiens
ctccaatgggcctttccagcccgtggtccttctccatattcgagaacgtgcgcatcgaccccagtagcctgtcct

SEQ ID NO: 671810 - DNA, 82 bp, Homo sapiens
gccagatctgccagcaccacgacatcatcttcccctttgagtttgacaccacagtcaggaggctactcacagtcgaactaca

SEQ ID NO: 671811 - DNA, 100 bp, Homo sapiens
tcttcatgtggccgcatttctgggagatgcagagatcattgaactcctgattttgtcagggcctgccttaagtgtgaaagtaatgactgatgaaagtgga

SEQ ID NO: 671812 - DNA, 100 bp, Homo sapiens
tgaaacttaccaggttatctctcaggctgctgtggttcatgccacagccaaaggtttgttggcatccaaagctgttggggttgatggtgctgaaaaaaag

SEQ ID NO: 671813 - DNA, 87 bp, Homo sapiens
cagaggcgctggagctgggtcagtccgccgctcaccccgcggccgcaccttcccgccttctcagcccttcagatatttcaacactcc

SEQ ID NO: 671814 - DNA, 100 bp, Homo sapiens
ggaaatcgggctgaagcgactgagtccgcgatggagggttccgagtctgaggaagacataaccttgtgcctgcctgcccacctctctctctggtcctgtt

SEQ ID NO: 671815 - DNA, 98 bp, Homo sapiens
caacatctataagtgaaaccttggaagagaaggcatcaaacagaaaggccttttgctaagtagcagcctgatgcactccgagtcagagctggacagcg

SEQ ID NO: 671816 - DNA, 90 bp, Homo sapiens
ccagagtccgcggccggggcgcgggagggctgccaggcgcccagctgtgcccagatggatgggacagagacccggcagcggaggctggac

SEQ ID NO: 671817 - DNA, 100 bp, Homo sapiens
gaccgagcctgggaggccggccggtgccagcacctttcggcttctgagacggcggcagcagcggcattcagagaacacgtagcgactccgaagatcagcc

SEQ ID NO: 671818 - DNA, 83 bp, Homo sapiens
gaacgagacttttctcagatgttggatatttgcttggaaaaacgtgtgggtacgaccttgccctgggcgctgcctatggcaca

SEQ ID NO: 671819 - DNA, 98 bp, Homo sapiens
ccagctgccgcgactgggaggagcgccggaacgccgaggcccaggttggtgttcgaggaagagacattgttgttcttggtgtggagaagaagtcagtg

SEQ ID NO: 671820 - DNA, 75 bp, Homo sapiens
cagctgcgacggggagcggcggagaccgcctctgctcccgcctggggagtacatcgatgcccaccctgagaccat

SEQ ID NO: 671821 - DNA, 75 bp, Homo sapiens
acaacatgtattgtgctgtatatgaatgatcttttgggaaccaggcttgaaaatgaaggagatagcctcctgcag

SEQ ID NO: 671822 - DNA, 101 bp, Homo sapiens
gcaaagctgctaaaccgtaccttggctgtccctccttggattgagtaccagcatcacaagcctcctttcaccaacaatctccctggaaaaggagacatgaa

SEQ ID NO: 671823 - DNA, 120 bp, Homo sapiens
ctcctactgatgagacaagatgtggtgatgacagaatcagcttttaggttgacggatatattcagacgttacgacacggatcaggacggctggattcaggtgtcgtacgaacagtacctg

SEQ ID NO: 671824 - DNA, 98 bp, Homo sapiens
acttttacctacgttggcggccccagaaggccaagctataacatcagaaatggtgaatgaatacaagaaaattcttttgctgaaaggatttgagctca

SEQ ID NO: 671825 - DNA, 100 bp, Homo sapiens
cttcctctgaaccagactataactatgaatttgcacagatggaagttatcatgaaaaccctgaatagtaatgataatttgcatttggggagcaggtggag

SEQ ID NO: 671826 - DNA, 74 bp, Homo sapiens
accacatcagtaattattcttgattgatttcctaaattcagtaatagtggaccttcaaaggaagaatcaagacc

SEQ ID NO: 671827 - DNA, 98 bp, Homo sapiens
catgatattactgtaccgttagaagtttttgaaatatcctccgaatcctaaatctagagctccaaggatgctggtcattaagaaaggtaatacaaaag

SEQ ID NO: 671828 - DNA, 100 bp, Homo sapiens
ctggcacggagcctccgctgtctcggtgtggatgcacgcatgctgggcaatggtgaagaccaccgcagggcggccgagattggtttatcttggaagctaa

SEQ ID NO: 671829 - DNA, 101 bp, Homo sapiens
ccggagggccggggccgcaccgcccttcgcagccgcctctgccgccgccgccgcgttggcctcgccgcccctgctcgggctggagggcagtggcatgatct

SEQ ID NO: 671830 - DNA, 51 bp, Homo sapiens
ctatagtcggagtggagaactgcaaggctatgacttctgccaggtcctgca

SEQ ID NO: 671831 - DNA, 100 bp, Homo sapiens
caagaaaaagcacctggactccacacacagcaccttgacttgcatgagcagggagttccagtgcgaggacggggaggcctgcattgtgctctcggagcgc

SEQ ID NO: 671832 - DNA, 90 bp, Homo sapiens
gagattttgccagagaaaggacgagcagcaagtcagggagcttaagatgcattgttctgggttggcatggcatcctgatgttgctactca

SEQ ID NO: 671833 - DNA, 73 bp, Homo sapiens
attgaagaggattttccacacatcagatcaccaaatacacgctgatcgatgagcaggacatcccgctggtgga

SEQ ID NO: 671834 - DNA, 50 bp, Homo sapiens
ccttccacagtgcaaggaagacgccgagaaaaactgttcttgaaaaccac

SEQ ID NO: 671835 - DNA, 100 bp, Homo sapiens
cgaggtcatccttggcatgggctacaaggaaaacggtcccaatattgaagcccatggatcttatggtagaagcgagtccacggcgaatttttgcaaatgc

SEQ ID NO: 671836 - DNA, 75 bp, Homo sapiens
ctgggcaggagaggcctgttgctgccgtctcgactcgtggatgcgggctgacgcacgaggcacacaggaaggagg

SEQ ID NO: 671837 - DNA, 83 bp, Homo sapiens
tgcatgtatttggaacaaaaaaaggagatgcctggcagccccgctctctgcaatggattaccgggccttggtgcatgagcgag

SEQ ID NO: 671838 - DNA, 50 bp, Homo sapiens
ggcaaaggtgcttcggggacattccagttcccagtgacctgacagcagag

SEQ ID NO: 671839 - DNA, 75 bp, Homo sapiens
gaagggtgaatgccatgtcaactttgttcggaagtgtttaactgctgaagagatcttttcccttcatggcttttc

SEQ ID NO: 671840 - DNA, 100 bp, Homo sapiens
ccgcggccgggaggtctgggccgcagcgggaccccagttcctccgccaagcgcggccgccgcccccgcctcagattgccttgggtccccagtgtttactc

SEQ ID NO: 671841 - DNA, 100 bp, Homo sapiens
ctcgggcggcgccgccaggacgcccggggcgcccagcaggagggctggagtgcagtagtggaaccttggctcgctgcagcctctgcctctccacctcaag

SEQ ID NO: 671842 - DNA, 97 bp, Homo sapiens
tccacgaacatgagcccactgctgcacttctatggccgtaaagacaagaggaccctgccttggtgtgagagtgagggaagaggaagctggaacgagg

SEQ ID NO: 671843 - DNA, 101 bp, Homo sapiens
ctcctgagtagccgggactacagtgtccatgggctattcctcaaaatacaatatcttgttctttggctgatgtaatgagtgaacagctggccaaagaattg

SEQ ID NO: 671844 - DNA, 100 bp, Homo sapiens
ctgcggtccagaacccggccctcaccgccctcaccacccctatccagacggctgcccttcaagtaccatctgaagatgatgagaaactgaaaaagaggaa

SEQ ID NO: 671845 - DNA, 75 bp, Homo sapiens
ggggagtggaaaggctctcagtgaaaaaggtaggcttgatcacattcatggccctggtaggcagctttgtgccag

SEQ ID NO: 671846 - DNA, 100 bp, Homo sapiens
agagcctcacagacccagccatcgttaagtgctattaccacagctactggcactccatggtctatgtgccacagatgcagcagcagcttcatgtagagaa

SEQ ID NO: 671847 - DNA, 98 bp, Homo sapiens
aggaattggtttctacacttgtggaaacacttatgactggcaaaaggggaagccagtttattaggaaccatttgcagatggatgacatcacctgttac

SEQ ID NO: 671848 - DNA, 100 bp, Homo sapiens
attcgaatgagaacaagagtagcaggaaaaacgaaattacttgcaattatgccagctgtccaggcagccatcttgtctggagacaagtctgagaatgttc

SEQ ID NO: 671849 - DNA, 76 bp, Homo sapiens
aagaagatcatcattaaggacggaggcacgacactggccaaaagaagaccctagacaagaaagatggaagacgaat

SEQ ID NO: 671850 - DNA, 82 bp, Homo sapiens
gtcatcggttcggtaaagtttctgttctctgagctccacgcaggagatcggtgaggagctgatcaacggagtcatctactcc

SEQ ID NO: 671851 - DNA, 50 bp, Homo sapiens
ccgcggtccccgctcttgctggatcagattttattaagacctctactgga

SEQ ID NO: 671852 - DNA, 100 bp, Homo sapiens
ccagcttcagtggacaacctgataaggggtcatcaggagtctatgataagcgtgaaaatcccctcctccccgaggaggaggaacagagagccattgctaa

SEQ ID NO: 671853 - DNA, 74 bp, Homo sapiens
gctcgtgagtgcatggggtataagaaatgcactcggtgatggaaagagagccactattctgaagaacacttggc

SEQ ID NO: 671854 - DNA, 113 bp, Homo sapiens
aggtcccagagcacgacgagcgcggaggaccgggaggctcccgggcttgcgtgggattttttatcaagcagaaatgcatcgaacaacgagaatcaagatcactgagctaaatc

SEQ ID NO: 671855 - DNA, 75 bp, Homo sapiens
atcgacaccaaggagctggagccactggactctagtatgggattcctttctacctacaatacctcgcccactggc

SEQ ID NO: 671856 - DNA, 109 bp, Homo sapiens
gtgaacccatcctgccgtccttctccactttcgccagcccgtgccgcgagcgcggcctgcaggagctgcctgtggaggaaccgattgtgtccacagatgaggtcatctt

SEQ ID NO: 671857 - DNA, 75 bp, Homo sapiens
ttggcattgacatttaattttagggtcctttatatagaagggagagtaggtggctgggagcccgagccccacacc

SEQ ID NO: 671858 - DNA, 100 bp, Homo sapiens
ggacgggttccttggcggttggggatttgggtcctgctcaatctggaattttgtcagatcgtgaagtggtaaacctctttcttcattttactgtcaaccc

SEQ ID NO: 671859 - DNA, 51 bp, Homo sapiens
cctcgacacagattccaccaaaagctcagcattccaaaatatgcccggtgc

SEQ ID NO: 671860 - DNA, 100 bp, Homo sapiens
gtgaaagccaacgcaatgttcggtgcgggggacgaggacgacaccgatttcctctcgccgagcggcgggggctaagtgatggatcttgtactccgtgttg

SEQ ID NO: 671861 - DNA, 125 bp, Homo sapiens
acacccttggagaatgtgggctcatatccttttcagactacattttcctcacaactgttctttccagtgctggagaatctggtaaaagcaccattgtgaagcagatgaggatcctgcatgttaat

SEQ ID NO: 671862 - DNA, 90 bp, Homo sapiens
ctatgatcatgcgacggttcagtttgcctggagatgtagacagagctcgacagtatgtactacagttgctgatagtccaactccaccgcc

SEQ ID NO: 671863 - DNA, 101 bp, Homo sapiens
actcctcctctaacatgtcagcgttattgtaatgcaatctctggcatctctatcccctatgaggcaccacgtaagacctcctgcccttagctctcttgctc

SEQ ID NO: 671864 - DNA, 83 bp, Homo sapiens
cagcaattgcccttaaaacatcatccctgccctggatcggcctggagccagtgcccaagtatcggctgtcggatgagggcgag

SEQ ID NO: 671865 - DNA, 95 bp, Homo sapiens
atggcagcagcgtggcctccgccaccgtgcacatccgaatggactcacagatgaatgcttctcacccggaaacaaacttgccagttgggtatcct

SEQ ID NO: 671866 - DNA, 73 bp, Homo sapiens
tcttaacctagtagcccaggaatgtagtgctgaaaacttgaggatattatctttaggaagaaacaacataaag

SEQ ID NO: 671867 - DNA, 122 bp, Homo sapiens
agaatttatatagagatgtgatgttggagaactacagaaacctcgtctccctgggctttatcctgtggataaacgcagagtgaacgagtttggggagtcctacgaggagaaggccacgcggg

SEQ ID NO: 671868 - DNA, 82 bp, Homo sapiens
gacgttcgtcatttagtgcgggagggatcctgaaccgcgcggccgaaccctccgatgtgaagttcatttccaatccgccctc

SEQ ID NO: 671869 - DNA, 100 bp, Homo sapiens
tatggagcatttggaccagaaaaattcagaatttgaatacatctggcaagacaacttcaagtacagatggacccaaattccctggagataaaagttcaac

SEQ ID NO: 671870 - DNA, 89 bp, Homo sapiens
gttgatttgcactgctccgggtgtcggctccggcgggacgggcggttctgcgtacccctctccgttcaaaccttgtactactcagctga

SEQ ID NO: 671871 - DNA, 75 bp, Homo sapiens
ctggtatattcagtctctgtgtaatcatctgaagaaattggtcccaagtgagaaagatcagtctaaagaaaagga

SEQ ID NO: 671872 - DNA, 100 bp, Homo sapiens
tgcatggagtgacagtgaaaaaccgcatgatccgtcttcaccctgatgggacagtgctgtatgggctcagcttctccaaacaggctggtgtacagggagc

SEQ ID NO: 671873 - DNA, 74 bp, Homo sapiens
ctgaggttggacgtggggaatttctcctggggctcagagtgtgtgggcccatcgctggatggatctgtcagaac

SEQ ID NO: 671874 - DNA, 100 bp, Homo sapiens
agcccgacccccaggcagctcgccgctccctagcaccttctccagtcgacactctcgcgcccggagacaatgcagatcttcgtgaagactctgactggta

SEQ ID NO: 671875 - DNA, 100 bp, Homo sapiens
ccccatgatgttctggaagtaaaccttggttgtctttcgttggccagaggaattgtgtctctggagaatggttcgactgttgcctgataccatcaatagc

SEQ ID NO: 671876 - DNA, 98 bp, Homo sapiens
gcgccgcccgggtgtccccgcggcgcaggaggcggtggagcgcagagcgggcgagcgcggttctaggtcccaattctactgcaaatagtatcatggca

SEQ ID NO: 671877 - DNA, 75 bp, Homo sapiens
cagatgtcagttgtgttgatgtagataccaacactatttctcaaaaagaatggtttgtcattcattgaaacttcg

SEQ ID NO: 671878 - DNA, 50 bp, Homo sapiens
gagggagttcctgcctggcgacagcagcctcctccagctggtgatctcgg

SEQ ID NO: 671879 - DNA, 82 bp, Homo sapiens
tccaacgagccatgttccaggctgcaggagccgcccaggccaccccctctcatgtcaaaatgcagatcttcgtgaaaaccct

SEQ ID NO: 671880 - DNA, 75 bp, Homo sapiens
ttcagttgcacatccccacatcaatgcactgccaatggaatcccgttctgcttccagaagtggaagtgctcacgg

SEQ ID NO: 671881 - DNA, 100 bp, Homo sapiens
gaggcaatttgttaggccttttgttgtatttaatttttggaacaatttgatgagctaggagagagcacgttttcaatatcataggagcatttgatattcc

SEQ ID NO: 671882 - DNA, 75 bp, Homo sapiens
ggacttgaagcagaaagcaagtgaatacgagtcagaagacttggcatttggctgtttatgtccgagatgcccttt

SEQ ID NO: 671883 - DNA, 75 bp, Homo sapiens
tttgctgatcgccccagggatcaggagacacgatgaggcgagtggtacgacagagcaagtttcggcatgtatttg

SEQ ID NO: 671884 - DNA, 74 bp, Homo sapiens
gcagtggtcgcttcttctccttgtgcactatatgttgtggatctgaagaagtttaggaaaatagctgctggtga

SEQ ID NO: 671885 - DNA, 133 bp, Homo sapiens
cacaatagggtatcatttttacgggccttctggagatgcttccgaactgtgggcaaaaatggcgtccctagagcgtccaagatttttggtttcaaaccaatttcctgctgaccagaatgaaatggagccacat

SEQ ID NO: 671886 - DNA, 75 bp, Homo sapiens
acagacccaaggggctaaagagagcagcatctgccatatacaggcatccgtgggctctgagaagctctttgcgcc

SEQ ID NO: 671887 - DNA, 83 bp, Homo sapiens
ggccttgggcgcagccgagaagaaggtgaagatgctggagcagcagcgcagtgaggatctcgaggacctggaagaagcagagg

SEQ ID NO: 671888 - DNA, 100 bp, Homo sapiens
gtctgccacatgcatcatctcaggtgatactgtcatttgggataatgaaacacctatttgtgacaaactgctttctccaggggttaaaaataagaatttt

SEQ ID NO: 671889 - DNA, 50 bp, Homo sapiens
agctattctgggggcaacagagattttgaacacagcacgaaaacattttg

SEQ ID NO: 671890 - DNA, 101 bp, Homo sapiens
ccgcggagtcggcggtgttgtaggtagcggtaccttgagtggcaacagactgtgccctgtccacggtgcctcctgcatgtcctgctgccctgagctgtccc

SEQ ID NO: 671891 - DNA, 97 bp, Homo sapiens
gatgaggtgaagtccacaatcaagttccaaatgaagaaggagcttaatgccaggaacagattttgcagttggtggggtctcaataaaagttattttc

SEQ ID NO: 671892 - DNA, 51 bp, Homo sapiens
tgttccagtgtacttgaaaaggttgaaagctaattgcagagacgacatgac

SEQ ID NO: 671893 - DNA, 74 bp, Homo sapiens
tttttaccgtagaggtaaagaactatgggcagaagctcctcctggggtagagacagatcttattgatgttggat

SEQ ID NO: 671894 - DNA, 88 bp, Homo sapiens
tttgttaaggattccaagtaactcttatttggggaaagaaacactgatgactcccattccctttgctagaccacaagatttagggcca

SEQ ID NO: 671895 - DNA, 98 bp, Homo sapiens
cccaggaccctcttcgcgggcgattcgcgtagcctcagctcacatgtctgaaacggccgctggtggtcatccatgaactgtttgacaaatccatcatg

SEQ ID NO: 671896 - DNA, 80 bp, Homo sapiens
cgtgcccctacgtgcacaacatcacccgcaagcaggggaacaggaacctgataaagaatcaggagcctcagtggatgaag

SEQ ID NO: 671897 - DNA, 83 bp, Homo sapiens
actggggccacgtggagctgctggaggctttagatagtgacgggggcagagagctggactgccagctgtgcggtgcctggttt

SEQ ID NO: 671898 - DNA, 82 bp, Homo sapiens
gacctgctaacagaactggaccttttcgtgctgggattacaagcgtgagctaccacacccagcgaggaagccaagtttaacg

SEQ ID NO: 671899 - DNA, 75 bp, Homo sapiens
tgcggctgaggagcctgggatcccagacctgaacaaggtatgatctcgtgaaaccttgagagaaactgaatgacg

SEQ ID NO: 671900 - DNA, 101 bp, Homo sapiens
ccatggcaagaagaagctgtatcttatctatggaagataaagcatggagttggctaatggatgctggtactaggttttgacaagcttgcatcatgcgtgag

SEQ ID NO: 671901 - DNA, 75 bp, Homo sapiens
cagggacctgcatagacaaagcagttgagtttcccacagtcaaatcactcgcctctacagccggttcaccagcct

SEQ ID NO: 671902 - DNA, 82 bp, Homo sapiens
gtaaagcagaagagatatataaagcatttgtgcattcagatgctgctaaacaatgagaaagatcagtctaaagaaaaggaga

SEQ ID NO: 671903 - DNA, 97 bp, Homo sapiens
ttgaaagcagctcactgctagctgagcaaggttcgaaggaaggacctcagaaatgttctgccagcgcaaaggaataactcaagtcacctgtactgga

SEQ ID NO: 671904 - DNA, 96 bp, Homo sapiens
tcccggtgcacacagttcctctttctgaagatcaggccaaatttgagtttcatcatggtgactatgaaaaacagtttctgcatgtactgagccgca

SEQ ID NO: 671905 - DNA, 115 bp, Homo sapiens
cagcaggaaaaggaggctttaaaacaagaagtgatgtctttacataagcaacttcagaatgctggtggcaagtccatccgaaaaataatttgggaggatatttttccaaagctta

SEQ ID NO: 671906 - DNA, 83 bp, Homo sapiens
ctcctctggaccctcgcggccgtgggcagcggctgccgcgcctgtctgcccgagggagatgatatcatcaagttgaatcgaaa

SEQ ID NO: 671907 - DNA, 100 bp, Homo sapiens
cggcggagaagcagctcgccagccagcagcccgccagccgccgggaggtgggattctcagcaagttacagaagtatctttgacaactcttgtgaactttg

SEQ ID NO: 671908 - DNA, 90 bp, Homo sapiens
ggagcctcccaaacaagggaaggagaaggccaagaaggcagagcagatactaatggaccatactaccaaggaccagtccacctgaaccac

SEQ ID NO: 671909 - DNA, 50 bp, Homo sapiens
tatatctccattgaatcagaaggaatttgtaagtgtctgggttcgagatc

SEQ ID NO: 671910 - DNA, 74 bp, Homo sapiens
agtttcccaggactccagaaaattcagcaaagaagaagcttttaaggtctaggcgttttacactgagattctcc

SEQ ID NO: 671911 - DNA, 100 bp, Homo sapiens
gcccccccaaacccctttccaaacctcgcacgcccaggaggagcaagtccgatggagaggctaagcggttgctatcagcactggatcttgttgaagtcaa

SEQ ID NO: 671912 - DNA, 100 bp, Homo sapiens
aaaagttccctcaaacagcactgaaactgtaatagaatctggctttgtctaccaagaaatgaattggataatccacataaacaaaaagcatggaaaattt

SEQ ID NO: 671913 - DNA, 74 bp, Homo sapiens
tgcagaggtgctggagctggcagcctgtgcctactacactggcacaagtggatagagaaaagatctatcagtgg

SEQ ID NO: 671914 - DNA, 75 bp, Homo sapiens
ggcgaccggggggacagcggagaggaagggtgcgccctgagagccgggtagcctcggatagcggcgctgcgtacg

SEQ ID NO: 671915 - DNA, 90 bp, Homo sapiens
gcagcagctgctgtggaagggctccttcaagcccagcgagcatgatgacgaagatgatcctgcagaagctgaaaaggagggaaatgaaat

SEQ ID NO: 671916 - DNA, 74 bp, Homo sapiens
atttgtgggagttcttttgcaggtacttggaaaaattttgtggcattaaaaaccagacaaatgtattggccagg

SEQ ID NO: 671917 - DNA, 90 bp, Homo sapiens
gagcagctgaaggcacccgctgggtcatgtggttcggagacggcaaattctcagtggtgtgtgatggatgatgacaatgaagtaagggac

SEQ ID NO: 671918 - DNA, 88 bp, Homo sapiens
caagaggtggaagaggacgggctttaggctggaagcgccttagaggagccatttttccagtatttaggtcagttaacgtccataccag

SEQ ID NO: 671919 - DNA, 100 bp, Homo sapiens
gcgcttcctgtgggagtgacccgccgcccccgacccaggttatgacacacctccgtgtgatttatgagcgcatgaatcagtctctctccctgctctacaa

SEQ ID NO: 671920 - DNA, 74 bp, Homo sapiens
cctatgttaccgccacctaaaaacaaagaggattttgagaagatcttcagtttagatcttggaggcatatcaac

SEQ ID NO: 671921 - DNA, 90 bp, Homo sapiens
gcgcactgggaggtggaacgggccgaactgcaggttcctaaaagtaaagctttagaggccaccaaattggcaattgaagctggcttccgc

SEQ ID NO: 671922 - DNA, 96 bp, Homo sapiens
ccgtgttgccaacgaacagagcgtcagcatattttagactgaaaaaccccgttccaacaatcacatggatgaaggttaatggttatattcctagta

SEQ ID NO: 671923 - DNA, 100 bp, Homo sapiens
agcatatgtagtacttcagaggaagaattaaggggcatgttggtgcatttaactacaaaaccagattccttgcctgggactgaagaagcactaatggagg

SEQ ID NO: 671924 - DNA, 100 bp, Homo sapiens
ccagtctctaacgttttagaaaatcataacaagcggttctctaccctgtaaagggaaaatatttatccccaaacagaaacctgtacagacttttacagaa

SEQ ID NO: 671925 - DNA, 97 bp, Homo sapiens
ccgggagctctgaccgaggcgcctcgctggggcggggaccttgccttgcccggggtcatgaatgaaaaacttcagcactgcatggaactaacagatc

SEQ ID NO: 671926 - DNA, 100 bp, Homo sapiens
atatgcaccagcacgcctggctaagcccggaggctgtttgatgtcctgcacgagcccttcttgaaagtaccctgatgaccccagctgccaaggaaacccc

SEQ ID NO: 671927 - DNA, 83 bp, Homo sapiens
gctcttcaggatagtatcttggccagggaactcaaacagcagatgcaggtctctaattaacagaagatggcaaagcccagcca

SEQ ID NO: 671928 - DNA, 76 bp, Homo sapiens
aagacagagggttttcttttgagccagagactgctgctactttgaaacgtacgatagaggccctgatggacagagg

SEQ ID NO: 671929 - DNA, 100 bp, Homo sapiens
aagctgcttcgccggtgcttggcggacagaagagtgtgtagaatttgacagcagtatcaagagctgaggagaaggagaagatggaaaggagtctagcaac

SEQ ID NO: 671930 - DNA, 90 bp, Homo sapiens
tgatgttcactggaaggaaaatgggacattagttcaagtagcaactatatcaggtcacgagaagagaatgccttctagatgcaaaatcac

SEQ ID NO: 671931 - DNA, 96 bp, Homo sapiens
cctacgacgggctcaaccagcgcgtgcgggtgctggacgagaggaaggcgctgatcccctgcaagagtcactcagcctctgaagaagcttcgggtt

SEQ ID NO: 671932 - DNA, 75 bp, Homo sapiens
atctggaaagctcgggacaggatgggaaggtattcatgtaaatcaagaattactgcaaatatctccttgtatcac

SEQ ID NO: 671933 - DNA, 83 bp, Homo sapiens
catgagccccctgaggccccagaactatcttttcgtaagactttgaccccgacgcaggcttcagtgattgccgcggatcagaa

SEQ ID NO: 671934 - DNA, 98 bp, Homo sapiens
cctgggtcagctccctcagcatgggcatcaccttgatagtggactctgagatttgcccacctgatgaccttgccagcttgccatcatgcaaagaaaat

SEQ ID NO: 671935 - DNA, 75 bp, Homo sapiens
cacagaaatgcagggaccattgcttcttccagtgattacagtggcgagatcttgaacaactgctgcgtcatggag

SEQ ID NO: 671936 - DNA, 101 bp, Homo sapiens
acagaagctaatggacatatccattttgataatgtcagtgtggtatctctacagaatgacagcccatatcaaggcggtgtattctttttgacaattcattt

SEQ ID NO: 671937 - DNA, 50 bp, Homo sapiens
tgcatcaaaggtgtgaacacagagagcagctctaaattgggaagcaatgc

SEQ ID NO: 671938 - DNA, 75 bp, Homo sapiens
tccttctgatggcctctcagtaccaacaaccccacgagagactaattgagcagcgtgatactttgaaagaaacaa

SEQ ID NO: 671939 - DNA, 75 bp, Homo sapiens
ccagagctacccttcttggagcccacagggctactcagcatagagcgactaaacctttatgctgcttccctgcga

SEQ ID NO: 671940 - DNA, 74 bp, Homo sapiens
cacgtcatcgagtactcgttggccctggtcaccgtgctgaacgaggcagtagacccaggcctgccttctgtgaa

SEQ ID NO: 671941 - DNA, 75 bp, Homo sapiens
cctggaaaggaattgttttggcctaggatcatccagaggagaaggcagagcccccccaggctatgaatgccctga

SEQ ID NO: 671942 - DNA, 98 bp, Homo sapiens
cagaggatctcttctaacatccagaagatcacacagtgttactatatcatcatgtacatagaaaaatccaaaggattctgcaaaaaagctactagaac

SEQ ID NO: 671943 - DNA, 101 bp, Homo sapiens
cggagggctgcagcgcccaccctgcgccagagaccagataaaatccagacatttaatgtggatgcaccatgccagaccgtggaagatttaacgaatggggt

SEQ ID NO: 671944 - DNA, 83 bp, Homo sapiens
gagaggagcactttgaggacatggcctccgacgaggacatggtttccaggcctgaggtgcccgccctggccccaggagaatga

SEQ ID NO: 671945 - DNA, 90 bp, Homo sapiens
ggaacttcgaaccatggaccaggccctcaagtccctgatggcctcagaggaggaggtgtgcctaccgcatgttgccgctgctgtttctgc

SEQ ID NO: 671946 - DNA, 100 bp, Homo sapiens
cttttgtccctttgcctcatcccaggttgccttggaaaatgccaacgccgtgtctgaaggaagctggtgaactctacaaccggatgctgaagcgtttccg

SEQ ID NO: 671947 - DNA, 90 bp, Homo sapiens
atttgttaaggattccaagtaactcttatttgggcttctatttcgaccgcgatgatgtggctctggaaggcgtgagccacttcttccgcg

SEQ ID NO: 671948 - DNA, 83 bp, Homo sapiens
cccgcgcctgggctgccggcacttcgcggcaggtgaggcggaaccaaccctcctggccatgggaggggccgtggtggacgagg

SEQ ID NO: 671949 - DNA, 100 bp, Homo sapiens
ccgggttgggctgtgacgctgctgctggggtcaggtacaccagaggatcgcttcctggcagaatttgggagctgtttattgcagcactgttgtgccctct

SEQ ID NO: 671950 - DNA, 101 bp, Homo sapiens
aggatccggggatcaaagagcagtgggggttgctgacccagaggagagttctccaaacatgatcgtttactgcaaagtatcacacctgtgtatcataatat

SEQ ID NO: 671951 - DNA, 82 bp, Homo sapiens
attcgatccttggcacccagcctcctggacagaaataaaactgggaattgaatgatctggcacgggaccctccagcacagtg

SEQ ID NO: 671952 - DNA, 97 bp, Homo sapiens
ggcagcagcgctgccgccgcgtcctcagccaccgctccctcttcccacgtactatactggcaattgctggagaagattttgcaattgttgcttctga

SEQ ID NO: 671953 - DNA, 83 bp, Homo sapiens
cttagggaggaccccagacaccggagactgggaaatggtagcagtagctgatgtgcagtttggccccatgagatttcatcaag

SEQ ID NO: 671954 - DNA, 100 bp, Homo sapiens
agcaaagtggaactcttcagatcattccagaagctgctaagcagaattgcaagggacaagtggccacactccctcaggtcagttcaccgggacctggagg

SEQ ID NO: 671955 - DNA, 83 bp, Homo sapiens
cttcaacaagaggacccaggagaaattcgccctcaaagatgaacttactgctgtgaatgtaaagcaaggcttcaataatcagc

SEQ ID NO: 671956 - DNA, 51 bp, Homo sapiens
cgatgaagtgcagaggtttttttctgggtctcctatggacagaagtgcggg

SEQ ID NO: 671957 - DNA, 100 bp, Homo sapiens
tgccatccgggagcagacggtcaaggagatcaaagacgctggccttcagacctgatcagactcccaggggcagccaccacatgtatgacagagaacagag

SEQ ID NO: 671958 - DNA, 98 bp, Homo sapiens
ctctacctgggctcgcagaaggacgtcctaaacaagagaagagcaagttagtaccttgtaccaaaacatcaaccttgtggagccaagattaattcagc

SEQ ID NO: 671959 - DNA, 100 bp, Homo sapiens
gatttcagatactctgactccacctttacttttacctacgttggcggccccagaagtgtttgggaaatgggaagtaatgacagctggcacctgaactaag

SEQ ID NO: 671960 - DNA, 83 bp, Homo sapiens
atctgcaccggcccagctactgcgacgccgccttcgctctggagcagatttccaaggtaattttttctgcaggatgaattaag

SEQ ID NO: 671961 - DNA, 82 bp, Homo sapiens
gcagcgggaaaaggctaatggcacaactgtccacgtaggcattcaccccagcaagttactaaaagatgtaactgaactgcag

SEQ ID NO: 671962 - DNA, 75 bp, Homo sapiens
gtacacttttggccaggggaccaagctggagatcaaacagtaaagatgggaaaaccccactacacatgactgctc

SEQ ID NO: 671963 - DNA, 75 bp, Homo sapiens
tgggggagccctgccctcctggttcggcctccccgcgcactagaacggatgagttccacccgttcatcgaggccc

SEQ ID NO: 671964 - DNA, 100 bp, Homo sapiens
ttcgccgtcggtgccgagaccccatcaacgtggagggcctgctggttcttcacacacccccattcggcgtagtacccagagagctcaagatgtgtggcag

SEQ ID NO: 671965 - DNA, 82 bp, Homo sapiens
aaaggagaacaccttatttcaggacatacagcaaatgctgctcatcagcgtcaaaatagttcaaataattttacgaaaaaaa

SEQ ID NO: 671966 - DNA, 90 bp, Homo sapiens
cttctgtttacatggaactcagacatctgcaaatcatgaaaccaccatcatgggttcgggtcccatagaccccaaagaacttctcaaggg

SEQ ID NO: 671967 - DNA, 83 bp, Homo sapiens
cctgttcaccagcactgtctccaccctagaggcttcaacggaccacaccaaaatgccatctcaaatggaacacgccatggaaa

SEQ ID NO: 671968 - DNA, 75 bp, Homo sapiens
tgaatccaacaagatcccccgtctgaggactgacctttttcctgttcccagtgaagcggcggaaccggcacagcc

SEQ ID NO: 671969 - DNA, 90 bp, Homo sapiens
aagctgggcagctacaaaatcaatggccggacgaaagactacaggaatatgtggaagctgtctcttttcaacacttcatcaaaacacgat

SEQ ID NO: 671970 - DNA, 75 bp, Homo sapiens
gtttggaggaaagatgagacggtttgagcacaaaatgaacataattagggaaaataaggatctggcatgtttcta

SEQ ID NO: 671971 - DNA, 73 bp, Homo sapiens
actaatccatcttcagcttcaattacaagattcttacagaagcagagattgatgctcaccttgttgctctagc

SEQ ID NO: 671972 - DNA, 96 bp, Homo sapiens
ctgggggctgcggcctagaggtccgggcttggagttcgcctcagacgcggtggagccgccggagtctgagaaggagtcgttcacgcctactgagga

SEQ ID NO: 671973 - DNA, 74 bp, Homo sapiens
tttggcattgacatttaattttagggtcctttatatagaagggagagtagagcccatggatttcagaaaattat

SEQ ID NO: 671974 - DNA, 100 bp, Homo sapiens
agcctagaatgcatcagtgcccttgtggcgaatggggctcacgtcgatgagaaggcaaccaaagtgcaggacatcaaaaacaacctgaaagaggcgattg

SEQ ID NO: 671975 - DNA, 75 bp, Homo sapiens
taaaaatgaactgcggaggcaaggttttcccaaatagtgcaccccttgaaggagggacaaggctgaccatatgtg

SEQ ID NO: 671976 - DNA, 90 bp, Homo sapiens
cgagtgtacacactgcgagctactttctgactgcccgcctggcactgaagccgagctcaaagcaccgggtgctcagcagttctgcttctt

SEQ ID NO: 671977 - DNA, 80 bp, Homo sapiens
ccaaactgtcacagaaagagctgttaacacttcctagataacggtttggagtttgagaatcagaagactcgcttgggcat

SEQ ID NO: 671978 - DNA, 100 bp, Homo sapiens
tcaggcgtgcgcggacggtgtgcgggtaaactgtcttgagccccaccctcacctgcctgtgctggcaaccagtggcctagaccatgatgtgaagatctgg

SEQ ID NO: 671979 - DNA, 82 bp, Homo sapiens
ctacctggcattgccttttgttgagtcttatcgggacctcaaagaagtaactcctgaagggctccaaatggtaaagaaaaac

SEQ ID NO: 671980 - DNA, 83 bp, Homo sapiens
ctgaatggcatccgtcctaccggaaacctaggaaaagatctctccagcgaacactgaatgagttaaaagagtatcaaaagcag

SEQ ID NO: 671981 - DNA, 101 bp, Homo sapiens
acctcctccaagaccgtgctggtctttctcaacctcatcttctgggagctatgcctgttccagaccagccttcatcagcctcagagaagacgagttccctg

SEQ ID NO: 671982 - DNA, 99 bp, Homo sapiens
cccctacatgagaagcatgatgcagtcactaagccagaatcctgaccttgctgcacagaactgtaagagtaaatgggtccagtaattggaatgactcca

SEQ ID NO: 671983 - DNA, 50 bp, Homo sapiens
tgatgatcagaaacttatgattttagatgcaaaatccacaagtattcaag

SEQ ID NO: 671984 - DNA, 82 bp, Homo sapiens
tgtgataatgaggaagatcttcaaatgggcattcacaaggcaacctgtgaaaagctgaacaggtccaattctgaacttgagg

SEQ ID NO: 671985 - DNA, 82 bp, Homo sapiens
agaattagctgatgttcaggcataaggttgtttacaggtctctgcatggattcccccagccctatggacccccacatggcgg

SEQ ID NO: 671986 - DNA, 50 bp, Homo sapiens
cggcctcccaaagtgctgagattacagctgataccccaatgtccttcttt

SEQ ID NO: 671987 - DNA, 98 bp, Homo sapiens
caaggagcagctggaggagcagctgcgcccgctgccagcacacgactacttcgagttcttcgccgccgacctgagacctggacaaacaccagactcag

SEQ ID NO: 671988 - DNA, 53 bp, Homo sapiens
gaaggagctccgggctccctcctgcatagacggagtttcaccgtgttagccag

SEQ ID NO: 671989 - DNA, 100 bp, Homo sapiens
taaagaagctgctcgactagcaaaggaaaaatcacaagagaagatggaacttaccagtacaccttcacagcagcagtgttgtactgctacttctataaac

SEQ ID NO: 671990 - DNA, 83 bp, Homo sapiens
tggaattctcctgcctgcgggtctttaaagactgaggctgcagttcatggagctcgtttcaaagggcaagatctaaaactggc

SEQ ID NO: 671991 - DNA, 100 bp, Homo sapiens
agagaaaaacgttgttttatttgtggaagagaagggcacattaaaaaggaatgcccacagtttaaaggctcttcagatgcagaagaaccacagcttccag

SEQ ID NO: 671992 - DNA, 99 bp, Homo sapiens
cagacagctcttaccacatgatacaagagccggctggtggaagagtggggaccagaaaggtttgtgaatttcccagaccagccggtggtgtggagagaa

SEQ ID NO: 671993 - DNA, 75 bp, Homo sapiens
caagaatgtgaaatttgttctcaagcacaaaggacaagaattttgggcagatttgaatgccatgaacgtgtatga

SEQ ID NO: 671994 - DNA, 50 bp, Homo sapiens
gtggaggcagaggtggcatggggtgtgactgcacagaaaagttacaaaac

SEQ ID NO: 671995 - DNA, 88 bp, Homo sapiens
gagagggagccgcagctgatgtcaggtgaaaggtgtagcagtcactcggcctacacccacagcatcgaccttgtgaacccagcgacct

SEQ ID NO: 671996 - DNA, 75 bp, Homo sapiens
cgtcctctgaggcgacggccgcggctgcacagagccctatgagtttgtctctctggaatggctgcaaaagtggtt

SEQ ID NO: 671997 - DNA, 75 bp, Homo sapiens
tggcaccgtctccccctcggccttcttgggtgttcacgctgcccaaggtgagtgccaagctgaagttgaagctga

SEQ ID NO: 671998 - DNA, 74 bp, Homo sapiens
gaccagtggctctgttttcccacaacaggataaaatggaccagttgctacagatgctgcaaagtacagacccca

SEQ ID NO: 671999 - DNA, 75 bp, Homo sapiens
ttttgatggaacaaaggcggttaaacttgatatggtggaggacacagaaggacagagcgggatgccaccagcttg

SEQ ID NO: 672000 - DNA, 89 bp, Homo sapiens
gtaccgcctccttcccagccgcgcggcttcctccagacctctcggcgcggggatgtgatggacagcaccaccacccagaaatactggat

SEQ ID NO: 672001 - DNA, 75 bp, Homo sapiens
cccagtcggtgctccggggaggtcacctgacgaggagggacctaatacctatcattgctgctctggaatataatc

SEQ ID NO: 672002 - DNA, 100 bp, Homo sapiens
ttgtgatctgcgatcgagcctcggtcaaggaggagatcctgaaggaatgcgtggctccccacatggctgacattggctccgtgacctcctcggcctcagg

SEQ ID NO: 672003 - DNA, 100 bp, Homo sapiens
agccagggcctggtcgagacaactatttttgaggtatctgaggctaccccacagcactctctggcattgaaacccgatgaaggcaatgtatccaggcaca

SEQ ID NO: 672004 - DNA, 90 bp, Homo sapiens
aaaggaaccgggttgtcttgggccgggcagggcggatatggacatttctggaattacagagccccctctacattgagcacaagacagtga

SEQ ID NO: 672005 - DNA, 100 bp, Homo sapiens
cgtgagcgacccggacaccgacgcgctcatctgctggagcccgcatcttcatgatacagttaagaggaatcttgacagcgccacttcccctcagaatggc

SEQ ID NO: 672006 - DNA, 75 bp, Homo sapiens
tgcctggctggaatcattctcaccttgtatgctttacttgctgagacaaaggaaaacccactcccttggaggagc

SEQ ID NO: 672007 - DNA, 90 bp, Homo sapiens
gggaccggcggttgtctgtggccggaggctgatcaggtgcggctctatgagtggacaacagagaaggagctgcgcactgagtgcaaccac

SEQ ID NO: 672008 - DNA, 100 bp, Homo sapiens
gagcgcgaatatcgtcatcgttagaaggtgaagtatgaagtaacagaagatgtgtacacatccagaaagaaacaacaccagaccatgatgcattattttt

SEQ ID NO: 672009 - DNA, 75 bp, Homo sapiens
tgaatgctacttggatgcctcttaaggaatcatgggtaaagaaggaagacaggctgcaagaaacagtgactatgc

SEQ ID NO: 672010 - DNA, 78 bp, Homo sapiens
tgactcccagagaggatggcatctagaaggagtggaagctggacacactatgtgacttgtatgaaaccctgaccatca

SEQ ID NO: 672011 - DNA, 74 bp, Homo sapiens
gaccgaacagaaacccctcctcccctagcttcactcaatgttagtaaggagggcctgaggctatggcaggagga

SEQ ID NO: 672012 - DNA, 97 bp, Homo sapiens
tcatctggaagtaaaagatgttctgaagactttagtcctctctcacctgatgtgcctatggttgatactgcctctccaagcccaatggaaacatctg

SEQ ID NO: 672013 - DNA, 95 bp, Homo sapiens
ccctggcttgggcccagcgggaaggccgctacctgtctgaggaacccgagccctacctggcagtctacctgcactcggagccccggcccaatgag

SEQ ID NO: 672014 - DNA, 49 bp, Homo sapiens
ccaagaagctggtgtgcggagatgaagggccccagtacgggaccgtgga

SEQ ID NO: 672015 - DNA, 85 bp, Homo sapiens
aagtcatcagtttgaaagaagctaatgtgaagctccctagatctttagcttctactcccactgctcctaccactccagcaacgcc

SEQ ID NO: 672016 - DNA, 122 bp, Homo sapiens
tttttatcagtttaccttcaccttcgctaagaacccagggcagaaaggtttaggcgtggtgtccctcgtggccgttcacccctccaccgtcaacccgctcgggaagcagctcttgccaaaaa

SEQ ID NO: 672017 - DNA, 98 bp, Homo sapiens
gcttggggagattgagtccaagttcaaccaagccattgtgcgcttctccgagaaggtcactgtccatttcctggctgtctgggcagggccggcccagg

SEQ ID NO: 672018 - DNA, 51 bp, Homo sapiens
ttcacgggggttagtcgtattaagacagagacggggtttcgccatgttggc

SEQ ID NO: 672019 - DNA, 75 bp, Homo sapiens
cgcctgctgagtggacccgggtgcctggcctccagttgggactcctccatcatcagagtctgagcctgtgagaac

SEQ ID NO: 672020 - DNA, 90 bp, Homo sapiens
cctggtcctgacgcccccctcccgcccggaaagctgcccagccaccagcaaccccccagcccaaagcagtgtccacaccagcaccagcta

SEQ ID NO: 672021 - DNA, 100 bp, Homo sapiens
cccggccacctctgagaagggagacgacgctgctgggtccgctgagcggggcgacccgagggatgccaaggcctgcgtagtacacggcagtgatctaaag

SEQ ID NO: 672022 - DNA, 75 bp, Homo sapiens
gccaggcagtgcccttcccggagcgtgccctcgccgctgggctctggaggccacgggcatgatgcttcgggtcct

SEQ ID NO: 672023 - DNA, 75 bp, Homo sapiens
aaagagatgagagaccactctttccccaaggagttaaatacctgtgcatcccagcagcggattcaccatctcaaa

SEQ ID NO: 672024 - DNA, 75 bp, Homo sapiens
gtgatacgttcctgtgctgcaaaacctaaatctgtcattgttggattaattaaagaaatgattgccaagtttcaa

SEQ ID NO: 672025 - DNA, 80 bp, Homo sapiens
ttggacaccacggctcttatcaccccaacttccgtgctgagctgcccctcctggacctgatgaagctgtacgaaggcgcc

SEQ ID NO: 672026 - DNA, 82 bp, Homo sapiens
cagccgaacttcagggtttccaccgttcgttcaagatcatgatgctgccgccaccgccgccaccacggagcgagaagcccag

SEQ ID NO: 672027 - DNA, 50 bp, Homo sapiens
aggacatggagtatgaaagacgtgagggtcgctgtctgcccattgataga

SEQ ID NO: 672028 - DNA, 97 bp, Homo sapiens
cgtaattacattctctcggccagcgcctccgcggagagagcaagccacatcagtgctcctggcagatccctgcttccagctacgctcaatatgctat

SEQ ID NO: 672029 - DNA, 75 bp, Homo sapiens
tctgctgttgacaagacccggattggtgcagattcactttataggaacagcttcagcttcagtgatgaaaaactg

SEQ ID NO: 672030 - DNA, 75 bp, Homo sapiens
gtttgctaaatttgaaaaggagaaaatgaatgccaaatgggacacggaagctgccacttttgctagagagcaagg

SEQ ID NO: 672031 - DNA, 75 bp, Homo sapiens
gaggtcacgaaatcatccttgctgcctttgacaatttcaaagaggtcattgattacaacggggaacgcacgctgg

SEQ ID NO: 672032 - DNA, 50 bp, Homo sapiens
aggtgctgaagtccacgaagaggatgccggctccaggagcagcagtggag

SEQ ID NO: 672033 - DNA, 50 bp, Homo sapiens
ccccaatgggtctgtgaaggacgacaggctggatgagaatgaggatatgc

SEQ ID NO: 672034 - DNA, 100 bp, Homo sapiens
gccggctgggtgaggtggggcggcgcctctactacaaactgggccggaagctctgccggagagactatctcaggaaaacagttcctcctgaggatttcag

SEQ ID NO: 672035 - DNA, 82 bp, Homo sapiens
ccacattaaactcactgactacggcatgtgtaagcgacaagactctgggacgatgaagaagccgcacaccactgaagagatt

SEQ ID NO: 672036 - DNA, 87 bp, Homo sapiens
tacaccaaaaactcaggcttcgccacctgcgtgcaaagtactccaaagattcaggtttactcacgtcatccagcagagaatggaaag

SEQ ID NO: 672037 - DNA, 50 bp, Homo sapiens
cagaaagctgtatggacctctgtgtggctcccagatggacgtatcatcaa

SEQ ID NO: 672038 - DNA, 90 bp, Homo sapiens
agacatgtctgagactcctgctcagtgtagcattaagagatttacaaacgaggaccacctggcagttcataaacacaagcatgagatgac

SEQ ID NO: 672039 - DNA, 88 bp, Homo sapiens
gccacgccattaaagcgcttcagtcaaaccctgcaggtcgatgaaacaggtgtagaagttaaggacattgaattggtcatgtcacaag

SEQ ID NO: 672040 - DNA, 112 bp, Homo sapiens
cccgagccgcccgcagagcaagcgcggggaaccaaggagacgctcctggcactgcagacttaattcagtgcacaaatgagatgaatgtgaacatcccacagttggcagacag

SEQ ID NO: 672041 - DNA, 80 bp, Homo sapiens
ccattttatagacttcaaagcaacttaggccactgaactgtcaggcgggaaaacagatgagttttgatcatcctgagaaa

SEQ ID NO: 672042 - DNA, 100 bp, Homo sapiens
gagcaaggagcctgtgttcattgcagcaggggacatccgaatcctcactatggatgggctcattgaggacattaagcatcggcggtattatgagaagcca

SEQ ID NO: 672043 - DNA, 80 bp, Homo sapiens
ctgtaaattatgtgaaacctccaaatgtgggtgaggggaagtggcttcgaaacattgactattaccgtttagatggttcc

SEQ ID NO: 672044 - DNA, 50 bp, Homo sapiens
tgaaaatcaacgacaacttgagcacagtgctgaggaatgtaaacaagttt

SEQ ID NO: 672045 - DNA, 97 bp, Homo sapiens
ttaactcaaatatctcttcttaacacctacctgattctggcatacagtctgcttagtggcctatcttggcttgtttatgctttgtgtctcatatcag

SEQ ID NO: 672046 - DNA, 75 bp, Homo sapiens
agccgaggccgcgaactgcatcatggaggtttggtgcacctcgatttggaggaagtagggcagggcccttatctg

SEQ ID NO: 672047 - DNA, 100 bp, Homo sapiens
caacaagtcccggctccggaagatgaaggcctccggtgtggctgtctctgatggtgtcatcaaggtgttcaacgacatgaaggtgcgtaagtcttcaacg

SEQ ID NO: 672048 - DNA, 96 bp, Homo sapiens
tatgctgagactggttcaggttttgtagtaccaagtgcttctgccaaagcaggtgtggaagccatgagcaattacttcaatgagaatcaataccca

SEQ ID NO: 672049 - DNA, 75 bp, Homo sapiens
caaagatccccgttcctggagattctgattgaggactttccttatcccagttgattgtgcagaatacactgcctg

SEQ ID NO: 672050 - DNA, 83 bp, Homo sapiens
gtctggagtgcgtgggggaccggctgttggcgggagaatggggtactaagagaaaagcacgaagctgtggatcatagttccca

SEQ ID NO: 672051 - DNA, 97 bp, Homo sapiens
gagttccacatccggcacaactacccctggaacaagttgccggccaacgtgagacaggagatacaactcgtcaacgaatcaaattcagtgatgacag

SEQ ID NO: 672052 - DNA, 80 bp, Homo sapiens
atgttgcctttcactttactgccagcccctctcaacctcagatggccgaacagacccaattttggatgatgttggtgaag

SEQ ID NO: 672053 - DNA, 75 bp, Homo sapiens
tgatgatagattgtcagtctcttccaatgatactcaggctggctgatgttgtgacaccactctggaggttgagct

SEQ ID NO: 672054 - DNA, 96 bp, Homo sapiens
cagctttgtcacttttgaagcgctggaggtgcctatggtcctgagcactgggtcacgtctagtgtcagctgtgggggccgtcaccagtctcctatt

SEQ ID NO: 672055 - DNA, 82 bp, Homo sapiens
gatccagcctgcggagcctgtggggcaggaaaagaatacttgagatccatttgtaaggaaagaaaaggaagcaacaacataa

SEQ ID NO: 672056 - DNA, 75 bp, Homo sapiens
ttcgtcgtgggtcagcaagagggccccgctgaccaggtggctgcaggtctctctgaagaggctatcatggagctg

SEQ ID NO: 672057 - DNA, 97 bp, Homo sapiens
ctcttcatttagattggattctgaatatcagggatgacttgtcaagctcgaacatcatatactgaagatgaagttctttggggtcatcgtttttttc

SEQ ID NO: 672058 - DNA, 87 bp, Homo sapiens
cgcccaccagcacggcatccctgacgagacctgcaacaactaccaggccaaggaccaggtttcctgtgcctggtccccgaggaagcc

SEQ ID NO: 672059 - DNA, 100 bp, Homo sapiens
tgcaccaatcagcatgctgtgtctagctcaagtatcctaagaaatccggtaaccaataagaagcattacagattgtatgtgatttataaagttccgcaag

SEQ ID NO: 672060 - DNA, 98 bp, Homo sapiens
cggctcctccagctaccggcccaaggccatctacctggacatcgatggacgcattcagaagggcaaagaaaaaggtgattcctgcacctaaacccaaa

SEQ ID NO: 672061 - DNA, 97 bp, Homo sapiens
tttgagagcaaacagcagagtgcagaccaggacgcagaaaggattcgggagtgagaatgacgaggagagcccttcacgagaaggggctgaagacaga

SEQ ID NO: 672062 - DNA, 75 bp, Homo sapiens
atgcttatacagaatgaatattgtaatggaaacctgtccagtttaagtcgtcttggtctgagatataacagactg

SEQ ID NO: 672063 - DNA, 83 bp, Homo sapiens
ggaatatcaccggaaccagggtgaagtgcgtaaattcacagagaaacacgaatgggtaacaacagaaaatggcattggaacag

SEQ ID NO: 672064 - DNA, 100 bp, Homo sapiens
gggcccgcggcggcggcaagggcgggagggagcggtcgccgcgggatttggagctgcctagcctcgcggtcgggagttctgggaaatcgttcattcattt

SEQ ID NO: 672065 - DNA, 98 bp, Homo sapiens
cagctcggagtacctcctcctatgagcccagaggacctggtcggcccttgtaccaaagaagaatctcatctagctcagttcaaccttgttctgaagaa

SEQ ID NO: 672066 - DNA, 99 bp, Homo sapiens
cgatgatttactgaaatttgatgacctagatggaacacatgctctgatgatccggggatttctttcacggtttgataatgtccttcccgtcagcctggc

SEQ ID NO: 672067 - DNA, 100 bp, Homo sapiens
taatttcagaaggaaaatgggtcaagcttgaaaaaacaacgtacatggatcctactggtaaaactagtgtcttcattggctgctctggcatggagctgat

SEQ ID NO: 672068 - DNA, 74 bp, Homo sapiens
ggaagatcgcaccgcggacgcccgctgagcttggcgcacgggccgaccaggaagctcttcgtgggcggtcttga

SEQ ID NO: 672069 - DNA, 97 bp, Homo sapiens
tgggaagccgcacttacctatgaggccagcaagcggaggtgctgggagcgagttggctgtgtactaatggtcacttgatgtgcgctggctgttttat

SEQ ID NO: 672070 - DNA, 76 bp, Homo sapiens
ccagccgcaactccagccagctcaccgtccacctgcgatctcacacggaaggccaatgatgaggccaatcagagtg

SEQ ID NO: 672071 - DNA, 101 bp, Homo sapiens
tactattgattgggtgcgagaaaaatgtaaagacagagaaaggcatagacggatccagacatttaatgtggatgcaccatgccagaccgtggaagatttaa

SEQ ID NO: 672072 - DNA, 74 bp, Homo sapiens
ggtttttagtccattgactatgcagcctaatgtgcggagcttgttaacagacgtgcatgcctggcctgtggact

SEQ ID NO: 672073 - DNA, 46 bp, Homo sapiens
atcagatttgaaaatgaaagtgtcagtttaggggctggtgcaaagg

SEQ ID NO: 672074 - DNA, 117 bp, Homo sapiens
agcatctcctggaaagatgtaaatctcccaagtccaaagggactcaggacacccctgcacggcggccgaccctgacagctgcttcacgcctgtgtctccgcagcacttcatcgacct

SEQ ID NO: 672075 - DNA, 75 bp, Homo sapiens
cggcgacattgtggacttggcttcagtgaggtcctggacccaagccagaagcctctgcaaagcttccttccagac

SEQ ID NO: 672076 - DNA, 83 bp, Homo sapiens
cctgtggagacacggccagatctgccctccagtactccaaagattcaggtttactcacgtcatccagcagagaatggaaagtc

SEQ ID NO: 672077 - DNA, 74 bp, Homo sapiens
tgaagaagatgaggaagatgactcggaatcagaagctgaaacaggccctgaagaggaaagtgaggatgactctc

SEQ ID NO: 672078 - DNA, 98 bp, Homo sapiens
ttcatctccaccgtaggcattgacttccggtgtccacaggatgaaatgtccgagtcaggccagtcctcggcggccgccacacccagcaccacaggcac

SEQ ID NO: 672079 - DNA, 50 bp, Homo sapiens
ctcccagagccgtcactttaagctgaagggcctgtcacgtcagaagtgcc

SEQ ID NO: 672080 - DNA, 100 bp, Homo sapiens
gcagaactcgcctgtgacccaggatggcatccaggagagcccatggcaggaccggcacggcgaaaccttcaccttcagatggaggagatgtataagaaag

SEQ ID NO: 672081 - DNA, 100 bp, Homo sapiens
gagaaattggccatggaagctttggagcagtgtattttgaagaaggagagacgaccatcttgcaactagaaaaagatttgcgcacccaagtggaattgat

SEQ ID NO: 672082 - DNA, 75 bp, Homo sapiens
taagcagctgaacgagaaccaagtgcggacgctgtgcgagaaggaggtgaagtgaaatctgcaagagtcctgctc

SEQ ID NO: 672083 - DNA, 50 bp, Homo sapiens
ctcgcttgcagttcagcgaccacgggtgctttcttctgcgacctggtact

SEQ ID NO: 672084 - DNA, 101 bp, Homo sapiens
taagcggactgcagccgcgagctcctggaggcggcgggatggaggcggcggccggtgagaagccctaccactgcaactgggacggctgcggctggaagttt

SEQ ID NO: 672085 - DNA, 100 bp, Homo sapiens
tattaaaataaaatacctggatgaggaagatgaagaggggctgcattgtattctcaggctcctatgcctgggccaacttcaccatcctggccttgggcgt

SEQ ID NO: 672086 - DNA, 98 bp, Homo sapiens
ttgctcagctctcacaggagagggcgttcaggagtgggaatagctttgcgaaaaatgggcgcaatggccaagccagattgtatcatcacttgtgatgg

SEQ ID NO: 672087 - DNA, 90 bp, Homo sapiens
ccttgttgtcctggtgtttgctggaatggggatctttgcagcctttagaaagctgcaataggatctgtggctttggacacagcaaggtca

SEQ ID NO: 672088 - DNA, 90 bp, Homo sapiens
cccatggctgatgcagcaggcatcatccgctatgcaattggggagcttggtgttggtggcacgagtcagtggaaaatctgtggcctagat

SEQ ID NO: 672089 - DNA, 83 bp, Homo sapiens
ggacaagcttaataaaataaccgtccccgccagtcagaagttgagctgaagaaatcaggggagaaacccctgcttggtggaag

SEQ ID NO: 672090 - DNA, 97 bp, Homo sapiens
gttagtgctcaagagcctcattatctaccacccgagatgccccaagctgctctgttaaaagcgaaaatgaaacaattgcctgcggcaacagttcgac

SEQ ID NO: 672091 - DNA, 83 bp, Homo sapiens
gttcgaggccctgcggagctgcttcgccgctgcggtcagcccaaggccaaccccactgtcactctgttcccgccctcctctga

SEQ ID NO: 672092 - DNA, 96 bp, Homo sapiens
agtccggaggggctgccgcgggaggatgtacagttacccagcacgtgtacctcctcctcctcctattgctcgggctgtagtgccctcgaaacgtca

SEQ ID NO: 672093 - DNA, 100 bp, Homo sapiens
aaaatgttcgcctgctccaagtttgtctccactccctccttgccgtcatggaaatgatgagtcagaagattcagcagctcacagccctgggggcagctca

SEQ ID NO: 672094 - DNA, 83 bp, Homo sapiens
caaggtggggttcggggggccaccgaatcgctgtcacgccggcagcggggtcgcggccgtcaggggcactcagcgcgccgtcg

SEQ ID NO: 672095 - DNA, 100 bp, Homo sapiens
agtatgtgctgtctgtcttgaaatttacctaccctacattattccaaggtaatgattctcagtgtggagtcatttgattattaagacccattgacatgag

SEQ ID NO: 672096 - DNA, 75 bp, Homo sapiens
gttgttgccgtgtgtgctggaaacaaaatattcatgctggatattgaggacatggatttgattgacatactttgg

SEQ ID NO: 672097 - DNA, 100 bp, Homo sapiens
gcaagacaatcactgcagagataccagcttgctgatgaccgtatggcactggtgtcaggcatcagcttagatccagaagcagcgattggtgtgacaaaac

SEQ ID NO: 672098 - DNA, 78 bp, Homo sapiens
aaagggggaaaatgcccaggaggaagcaggagcagcccaagcgccttccctcacgttcattttccagacactgaaaga

SEQ ID NO: 672099 - DNA, 100 bp, Homo sapiens
atccagaaccatacccggtggactgcagcttgagaagaggtgggggggtgcccttcatcctgcgctgcggcaaggccctgaacgagcgcaaggccgaggt

SEQ ID NO: 672100 - DNA, 50 bp, Homo sapiens
cttcctccagacctctcggcgcgggtcaaaatgcagatcttcgtgaaaac

SEQ ID NO: 672101 - DNA, 73 bp, Homo sapiens
accaaaccagccagcccactaccagaagtggagtctttcattttggatcaggatgatttggaaaatccaatgc

SEQ ID NO: 672102 - DNA, 97 bp, Homo sapiens
ggagcttggtttcgggatctcggtgctgcagacggcgagacctcctgcacagggggatatgagactttctactcggaatatcctgagtgttgcgtgg

SEQ ID NO: 672103 - DNA, 82 bp, Homo sapiens
tgaagctcaccgacagtgccctgagggccttcgagagctaccgcgccagacagatggcatccgccacagactcgcgctatgg

SEQ ID NO: 672104 - DNA, 82 bp, Homo sapiens
atgcatccaacgtcaagtacaccatgcacaaggtcttccagtttctgaacctagacttcccaagtaagaagcggaagaggag

SEQ ID NO: 672105 - DNA, 100 bp, Homo sapiens
gtctccgccgctgcgggcccgctccgacgcggaagatgacacacaataatttttggttgaagaagatagaaatcagtgtttcagaagcagaaaaacgaac

SEQ ID NO: 672106 - DNA, 88 bp, Homo sapiens
gttcttccaagaaaccaacattcccaacagccaccaccaccaccagatggctttatcctgtggataaacgcagagtgaacgagtttgg

SEQ ID NO: 672107 - DNA, 98 bp, Homo sapiens
ctcctcggcctcggcgtgctgcgcctccgcggctgccctgcgccagatctgcgagtgaagagggacgagggaaaagaaacaaagccacagacgcaact

SEQ ID NO: 672108 - DNA, 75 bp, Homo sapiens
gaggtgccgacatggggcttaagatgtcctgcctgaaaggtttacccaaggtccagcctagcccctaggcaccat

SEQ ID NO: 672109 - DNA, 100 bp, Homo sapiens
gtggataatagtctactgtccaattctgtttactctgaattaccatcagctgaagggaaaatgaagattctgtttctggcgtctgcatacgcaagtcccc

SEQ ID NO: 672110 - DNA, 101 bp, Homo sapiens
cgtgcttccccttctccactggctgggatcccccgggctcggggcgcaggttctgctccagacgagcccttaccacgttgactcactcctgcagctcagcg

SEQ ID NO: 672111 - DNA, 98 bp, Homo sapiens
cgggcaactgtccgggctgtgagcaagaggaagctgcagcccacccgggcagccctcaccctgccagagactgctgctactttgaaacgtacgataga

SEQ ID NO: 672112 - DNA, 88 bp, Homo sapiens
cggcccttgtctgcaaacagtggtatcgacttatcaaagtgtctcgactgcattgtgagagtgaatctttcaagatggatctaatctt

SEQ ID NO: 672113 - DNA, 100 bp, Homo sapiens
gcttatccactcactcacccttccgaactcttaacatcaatgggcaaatccccacaggagaaggaggaactgctcgcagaaagaagaaggtggttcatag

SEQ ID NO: 672114 - DNA, 98 bp, Homo sapiens
cttccaggtcacggaggaggtgaaaaccacctcctccaccctgaagggtgccatccagctgggcatcggctacaccgtgggccacctgagctccaagc

SEQ ID NO: 672115 - DNA, 75 bp, Homo sapiens
gactttcgacaaggaagtgaaacaccaatgcaggatctgtctggctccattgatgacctccccacgggaacggaa

SEQ ID NO: 672116 - DNA, 100 bp, Homo sapiens
cgctgtagcccacatctagtcttgtctgcactgacgtctgacaaccatggtgccacctatgccttcagtgatcccaaatttgaagtcatcgaaaaacccc

SEQ ID NO: 672117 - DNA, 75 bp, Homo sapiens
caaggagccacacctggaccagaccccaggaaaggaaagaccacagcaagattctttcattcgtctcctcctagc

SEQ ID NO: 672118 - DNA, 96 bp, Homo sapiens
cggccctggtggaagacttgacccagacccttcaggacagtgctttggcagcatgtaagcagctgtttgccaagaacccaggtcactgctaagaaa

SEQ ID NO: 672119 - DNA, 99 bp, Homo sapiens
taatggatctgggccctgcacatataccatctctggctccagggaatgtgaggtgctgcgacaagagactttggacaaaaattgacttgagtaggtgta

SEQ ID NO: 672120 - DNA, 100 bp, Homo sapiens
tttaggatatgaaaaaatggccaaggctactgggaaactaaagggtgaggccacaagacagggcgggggcggcatgggaactcctagccctgactcccgg

SEQ ID NO: 672121 - DNA, 75 bp, Homo sapiens
tctgtatgagaaggacaacacctacttaggcgttcccacagctgtgcagaacttagcgccacgcgctgctgttgc

SEQ ID NO: 672122 - DNA, 71 bp, Homo sapiens
gaccccgagtaacaacgcgcgcttgagttggtataaactcctgaagcaatgcatgagagctggaagtggaa

SEQ ID NO: 672123 - DNA, 100 bp, Homo sapiens
ggtctgcttctatagcaacagcttcaatcctgggaaaaacttcaaactggtcaaatgcactgtccagacggagatccggccaacaagaacattagtcatg

SEQ ID NO: 672124 - DNA, 97 bp, Homo sapiens
acggacctgagccgcgaggacacgggctgcaacctgcagcacatcagcgaccgggagaacatagacgctggtagcagtgtttgatgagcaggatcca

SEQ ID NO: 672125 - DNA, 76 bp, Homo sapiens
ctgacagcgcgcacttcacccgcagttgctgggagtgtccactcgccttccaccagcatggcaacgtcttcacagt

SEQ ID NO: 672126 - DNA, 101 bp, Homo sapiens
ggtgaatggctggtacccattggcaactgcctatgcaacgctgggcatgaggagcggagcggagaatgccaagacacgatgaggcgagtggtacgacagag

SEQ ID NO: 672127 - DNA, 90 bp, Homo sapiens
tgtgatgctggagaactgcaggaacctggcctcactagcatcaaagctaagccagaagatttatcacattttcatcatcagctacaggat

SEQ ID NO: 672128 - DNA, 82 bp, Homo sapiens
cttcgcccccaagactgcgactctaaacggactcatgtactttgtcagcaattctggggtcagaagccatggagtcagcatt

SEQ ID NO: 672129 - DNA, 90 bp, Homo sapiens
gcccagagtgcctcttcagaccttcctcaggtctaccccgagccccggagcgagagcgagtgcctgagcaacatccgcgagttcctgcgc

SEQ ID NO: 672130 - DNA, 73 bp, Homo sapiens
gctcttgtgccctagcaccccgagaaccgtcagtttgagccagatggcaaaatttggtttctctaatattact

SEQ ID NO: 672131 - DNA, 95 bp, Homo sapiens
gcaacgatattgccctggtccacctctccagtcccctgcccctcacagactggcacagcctccaggttggcgggctcatctgcgctggggttctg

SEQ ID NO: 672132 - DNA, 100 bp, Homo sapiens
agactcctgctgaaagaagacagcactctgaaagcagctggaatcgccagtgttttagaaggagtatgtggaagggcaaggagtacctatagaaccccgg

SEQ ID NO: 672133 - DNA, 99 bp, Homo sapiens
cgaaaaaacttccagaacatctgggagaatatttaatggaaaatcgcttggttaaaacctgacacttttaacaggtcagatgtaccaacagtaccagca

SEQ ID NO: 672134 - DNA, 98 bp, Homo sapiens
aaggggccttcaagtaatgaacctagagaatgaattttcaccattgaatatattagaaccattctgccttggacccaatgttgtcttccagttgtgaa

SEQ ID NO: 672135 - DNA, 83 bp, Homo sapiens
cccaggagaaattcgccctcaaagctaccggctctctgaccagttccacgacatcctcattcgaaagtttgacaggcagggac

SEQ ID NO: 672136 - DNA, 98 bp, Homo sapiens
gggacagacccgaggcctccatgacccccgatgccaaacacctgtggctgatctggtggctggacccagagctgacctatggctgcgccaagcccttc

SEQ ID NO: 672137 - DNA, 97 bp, Homo sapiens
gaaaatgaggtacttaaagtgctttccgaagctgctatttcagttgcagaagaccctgcaaaatctcttacagagatatctacagactttgaccgtt

SEQ ID NO: 672138 - DNA, 100 bp, Homo sapiens
taaaaagaggcgaaaggaagcaagcagttcagaagagccaaggaataaacatgcaatgaacccaaaaggctgaatttcaatatgctgaaaccgtatttcg

SEQ ID NO: 672139 - DNA, 83 bp, Homo sapiens
cctggaattcttccctcctcgaactgctgagggagctgtcaatctcatctcaaggttatcaatactctggctgaccatcatca

SEQ ID NO: 672140 - DNA, 100 bp, Homo sapiens
ggatgggaggtggtggagtcggacctctatgccatgaacttcaatcccatcatttccagaaaggacatcacaggtgcaccaggccgtccagggagcccgg

SEQ ID NO: 672141 - DNA, 74 bp, Homo sapiens
tttgagtccgcatcgccacagctgaaggctgcgagggactaagagcagactgctgcagaagaatattttgcctg

SEQ ID NO: 672142 - DNA, 101 bp, Homo sapiens
ttgacgatatttgggaacctcgctattcacacacgtgtggagtgagagcgaggactgcctgcctttcttgcagctagcacaggattacatctcctcctgcg

SEQ ID NO: 672143 - DNA, 90 bp, Homo sapiens
cgccgcgcgaggaaatggccgaggggccggagccacaggctctgtgtgctccgggatggagcaggtgtgcagagggtgagaacccagctc

SEQ ID NO: 672144 - DNA, 75 bp, Homo sapiens
actagaaggggaggggagtggaaaggctctcagtgaaaaaggccttggatggtatactgtaaattcagcatatgg

SEQ ID NO: 672145 - DNA, 90 bp, Homo sapiens
tcctggccgatgccacggagcaagtgggccaggtaaaataccatgaagattttgaaaaaacaaaggggagaggctttactcccgtcgtgg

SEQ ID NO: 672146 - DNA, 100 bp, Homo sapiens
cacgtacagggtttcagggcagaaagcaggtgctaatgtcaatgctaaggacacactgtggctgacccctcttcatcgtgctgctgcctcccgaaacgag

SEQ ID NO: 672147 - DNA, 100 bp, Homo sapiens
gctcaagtatatcaagcattcaaattgctcacagctgatcctaagaaatgctgagccgattatcaggattagcaaatgttgttttgcatgaattatcagg

SEQ ID NO: 672148 - DNA, 98 bp, Homo sapiens
gctatgggaaaaccaagtgtggggagccgtcgcgccccgccgcctgccgagcctttgatgtccccaagaggagattacctggggcaattgatgttatc

SEQ ID NO: 672149 - DNA, 85 bp, Homo sapiens
aggagctgctgcagtacaagaggcagaatccagctcagctccacaagcagcaggcccaggctgaacctgagcggcatgtatggca

SEQ ID NO: 672150 - DNA, 90 bp, Homo sapiens
cacgcccacaaggaccagcataacctctacaatgggtgcaccgtgtctgaaccggacggcttttctcatttccacttgtacgtgtgcgct

SEQ ID NO: 672151 - DNA, 88 bp, Homo sapiens
gagcccccggaggaggatgggctgcagacacagcaggctgagcagctgcaaacccccgaaaaagctgcgtgcccagatgcgcgacctg

SEQ ID NO: 672152 - DNA, 90 bp, Homo sapiens
gcaagaggtactgtccatcaaacatcttccaccacagcttagagaaggatgccctgcagtggtctcgccatccagctacagtggagggag

SEQ ID NO: 672153 - DNA, 105 bp, Homo sapiens
gctgccgaggcgttcggtcctgctgttgcggccgctgccccagggctgcggggacggtaagaatgattgatgttggctgatattggagtgctcattcacatgaag

SEQ ID NO: 672154 - DNA, 82 bp, Homo sapiens
ctcattgagatggacattctcggcgcctcccgccatgatggggcttacagtgacgggaactgtggctgcaccatctgtcttc

SEQ ID NO: 672155 - DNA, 87 bp, Homo sapiens
tgcactgagcgggacctgcgagcagcgcgggcggcagcccgggggaagcggctggagcattggatttgctaaaggagcttaagaata

SEQ ID NO: 672156 - DNA, 109 bp, Homo sapiens
gcctcggcgagccctctgcagcggagccccctgcccatttggttttggtaatctcaggggcgatataatcaatgaggtggtcctaaagttgctcaaggctggatggtcc

SEQ ID NO: 672157 - DNA, 90 bp, Homo sapiens
ccagcggtagccctccttgcgcctccgattcccagccatgtgaagatgtgcttgcttcccctttgccttctgccatgattctaagtttcc

SEQ ID NO: 672158 - DNA, 100 bp, Homo sapiens
atgagggcaagaagggcttcactgacccctcggtggagatctgagcctcaggatgcaggaaatgggtcctgatgaatatgaagagatggaagaagaggag

SEQ ID NO: 672159 - DNA, 90 bp, Homo sapiens
gtttggaaaatggcatcatcccaagaagatgatgaaggagcaactcccattaaaaggcggcgtgttagcagtgatgaggagcacactgta

SEQ ID NO: 672160 - DNA, 96 bp, Homo sapiens
tcaaaagcgctgtaaggaagcagtcacgaccattgctgcatattggcatgggacccaggtacaagaaaattccccaggacacagagctggtttgga

SEQ ID NO: 672161 - DNA, 77 bp, Homo sapiens
ggattccaagtaactcttatttggtgaaattgctcaaataatggagcaaggtgacctctcagtgagagatgctgccg

SEQ ID NO: 672162 - DNA, 82 bp, Homo sapiens
ggcgggagcttccgggagggcggctcgcaggtgatgtgtccaatctagatcccaacttctcatttgaaggcaccaaactgga

SEQ ID NO: 672163 - DNA, 75 bp, Homo sapiens
ctggtgcgtcgtcgagggacggttctcccatgggcaggtggtctctctggatgagctgcgccccttccaggaccc

SEQ ID NO: 672164 - DNA, 83 bp, Homo sapiens
cccgcggccggagaagggctgcgggttagggggccggcgcccgcggttcaggtcatcagactagtgctgagtcttggggtact

SEQ ID NO: 672165 - DNA, 98 bp, Homo sapiens
agcagacagcctcagccgaggagcagctgaggcttgtggtcaatgctgtcagcagtattaaaggtggaagaaggtccatatctttttctgtgggtgct

SEQ ID NO: 672166 - DNA, 75 bp, Homo sapiens
tgagtgctaaactgtgtggggcgcggatgggatccagctgttagtcggtgagcatgtttttgaacacattaacac

SEQ ID NO: 672167 - DNA, 75 bp, Homo sapiens
ctcgggagctcatcttcgtggggcgtgaggagtgtgagctcatgctacaggtactccaaagattcaggtttactc

SEQ ID NO: 672168 - DNA, 89 bp, Homo sapiens
cggatccaacccagttagttacttcctgtctagagttgtagcttccacctggtgtgactgaagaaatatcaaatgtttcctagtaagac

SEQ ID NO: 672169 - DNA, 121 bp, Homo sapiens
cataaaaacactttctgaagctcatgaagactgtgtaaataatatcagctccatttatcttaaagaaattggacagcatatgaagacaggacatcacatatgaatgcacgatatgaagagc

SEQ ID NO: 672170 - DNA, 75 bp, Homo sapiens
cgcttcctggcatgtcagagaacccctccgtctatgtgcctgcgcaccttttgacaagacagccaacatcacctt

SEQ ID NO: 672171 - DNA, 99 bp, Homo sapiens
gcatgggcaaccactcaggacggcccgaggatccggaaccaggagctcgcccgtcagcgaggagtcctggagcgcacagagaagatggtggacaagatg

SEQ ID NO: 672172 - DNA, 75 bp, Homo sapiens
tcgatttgtccaggatcactttgaccacaacatcagccctactattggagaggtgagagacttcagaggctgccc

SEQ ID NO: 672173 - DNA, 98 bp, Homo sapiens
tcagggacagtggcggatgtgcactgctacaggactctactatggagctctcaaaggtctatggccctgtgttcactctgtattttggcctgaaaccc

SEQ ID NO: 672174 - DNA, 50 bp, Homo sapiens
cagcagcctacgcccacccagagaattgcagaatttacctcaagaactct

SEQ ID NO: 672175 - DNA, 76 bp, Homo sapiens
gagagtgaagatctcgaaggatttcataggtcgtggtggccgagttggaacccacgggggcactctctcttcctat

SEQ ID NO: 672176 - DNA, 75 bp, Homo sapiens
tgtagagaggaccccggtacatctgaaagccgggaaatggattctttctactaatccagatacttgttgaagtgc

SEQ ID NO: 672177 - DNA, 75 bp, Homo sapiens
tatattctcacttatgggtataaaggtacatgtcccagagcaagcacacggaggcccgggagctcatgtactcgg

SEQ ID NO: 672178 - DNA, 98 bp, Homo sapiens
tgcagagcagctggcacgtgacttccgcatccctgacaagaggctactgcagcactggggtgtcagttgttggtccgacccagaacgcttcagttctg

SEQ ID NO: 672179 - DNA, 83 bp, Homo sapiens
ctacaagcaagctgaatggaggccagatagtaccatgatagctgtatcagtagttgatgtcacttggcgatattcctgcaaac

SEQ ID NO: 672180 - DNA, 60 bp, Homo sapiens
ctgtaaagtatacgtttcccagcacccaccaccagcaggctggagtgcagtggtacaatc

SEQ ID NO: 672181 - DNA, 100 bp, Homo sapiens
ataaatcccggttttggctgcttaaactgctggctttactcatcagtcttaagtatggttgttttatgtggcaattgggagatactgatacttgttttca

SEQ ID NO: 672182 - DNA, 88 bp, Homo sapiens
ctcattctactggagcaaatgtattctaccttgtaaatactgttatttgtatatactgtaaatgatgacatcggtgggcactaaccga

SEQ ID NO: 672183 - DNA, 75 bp, Homo sapiens
ggcatttacagaaagagtcaacagcagtggcaacaggaaagagcctgcctgtctttgccatcatcctcatcatct

SEQ ID NO: 672184 - DNA, 80 bp, Homo sapiens
gtcggatgttgtgttgcccgccaccatgagctacacaggtgtggacactgccagcggctgcagccgacttggaatgacct

SEQ ID NO: 672185 - DNA, 75 bp, Homo sapiens
cggagctgtgcgagagcctcctcacttgggaatactcccccagttgcaagaggcgcaggaccgtggaagacttca

SEQ ID NO: 672186 - DNA, 75 bp, Homo sapiens
aactctccgggcggccgcacctgccaggtgttggtaaatcatgcttattgctacagtttacagacaagaggtttc

SEQ ID NO: 672187 - DNA, 75 bp, Homo sapiens
gcagaagagaagcagtgaaggagtgcagaggcatcacctgaaagctctcaaaggtctatggccctgtgttcactc

SEQ ID NO: 672188 - DNA, 50 bp, Homo sapiens
caccaacaagcgcaagagagacgaaggtacatgtcccagagcaagcacac

SEQ ID NO: 672189 - DNA, 82 bp, Homo sapiens
cagccgaacttcagggtttccaccgttcgttcaagacctgcctagagctggaacgttacctccagagcgagccctgctatgt

SEQ ID NO: 672190 - DNA, 101 bp, Homo sapiens
ctgtgccaggatggtgggcagctgttgtactatcatgagccctggccgctacctgtctgaggaacccgagccctacctggcagtctacctgcactcggagc

SEQ ID NO: 672191 - DNA, 90 bp, Homo sapiens
tctatgccatcacagacaccgcctacaggagtatgatgcaagtactgccaaatctgtcgaaagggagataatgaagaactgcttcttctt

SEQ ID NO: 672192 - DNA, 75 bp, Homo sapiens
atgaagaaggtcacatcaagttaacagaggatcttatgtctctccttgatgccgacattcattctgcccacccaa

SEQ ID NO: 672193 - DNA, 100 bp, Homo sapiens
gcccagaggaggacaagtttgagaatggaggccacggggggttcctggagtcttttaaggtaagaatgattgatgttggctgatattggagtgctcattc

SEQ ID NO: 672194 - DNA, 100 bp, Homo sapiens
ggaccctccagcacagtgttcagcaggtcctgttggagatgataagatagagtttcaccatgttgtccagggtggtctcaaaactcctgagctcaagcga

SEQ ID NO: 672195 - DNA, 74 bp, Homo sapiens
agaaactcgctctaaagacggaaccgccacagcactcaaagccccacagtcttcgttataacctcacggtgctg

SEQ ID NO: 672196 - DNA, 75 bp, Homo sapiens
agcagctgggcctgggcggactcctcggccaatcagcctcgcgggctgacgcacgaggcacacaggaaggaggtg

SEQ ID NO: 672197 - DNA, 100 bp, Homo sapiens
cggggcgcttcgccccgggccccccagcatgaagaccccggcggacacagcttactggaggttttggctctgcgtgagtgtggtctacgagctgtttctc

SEQ ID NO: 672198 - DNA, 99 bp, Homo sapiens
ctctctgaattctcgggtttctggtatttacttatgggatgtagaaggcagaaaatattttgacttcctgagttcttacagtgctgtcaaccaagggca

SEQ ID NO: 672199 - DNA, 83 bp, Homo sapiens
atgacaccaagcccatctgaaatgttcattccggcaaatgtggttctgaaatgatattgagctcctggcagcttgcagagaag

SEQ ID NO: 672200 - DNA, 133 bp, Homo sapiens
cagcgcatgcccgctgcgcaccatcaagagagtccagttcggagtcctgagtccggatgaactggtccctgtccttcgaatggtggaaggtgataccatctatgattactgctggtattctctgatgtcctca

SEQ ID NO: 672201 - DNA, 51 bp, Homo sapiens
gtagccgaaggggacgccgggaacagactaatagggatgccaaaggaaaaa

SEQ ID NO: 672202 - DNA, 51 bp, Homo sapiens
gtcagaccagaccgtccgggtgaaggtactccaaagattcaggtttactca

SEQ ID NO: 672203 - DNA, 73 bp, Homo sapiens
tctggacaagatgaagtctttctgccaggtcacagactgggatgagcaacgggctgaaggcacgtttcccggg

SEQ ID NO: 672204 - DNA, 75 bp, Homo sapiens
ggggagcggcgttggaggccaccgtttccaggtacatgtcccagagcaagcacacggaggcccgggagctcatgt

SEQ ID NO: 672205 - DNA, 100 bp, Homo sapiens
ggagacctacttccatgagtttggccacgtgatgcaccagctctgctcccagaacgggctcatgtcggggctgatgcagatgctgctgctgaaggtgtct

SEQ ID NO: 672206 - DNA, 90 bp, Homo sapiens
cctgcaccggcaggtgagaggcggatctacagacataggagcctgctgcaggcctgggagcggcagcggcaggaggagcggcagcaggcc

SEQ ID NO: 672207 - DNA, 83 bp, Homo sapiens
cggaacctcagtgactcgccgataatcgaggacctgccaataacgcgatgagcttaaagcttttcaagccaggccaagaagct

SEQ ID NO: 672208 - DNA, 100 bp, Homo sapiens
aatgaagacttgaggcgaatggccgaatctctccgatgaaccagaaactcgagatgcatggtgggcagaaatcagacaagaaataaaatcacatgctaaa

SEQ ID NO: 672209 - DNA, 83 bp, Homo sapiens
ggaacccgcgccgcgagggctccttccctcagcctgtgggccaaagctgaccaactcccccaccgtcatcgtcatggtgggcc

SEQ ID NO: 672210 - DNA, 100 bp, Homo sapiens
atgaacagaatctgccggatggtgctggccacttgcttgggatcctttatcctggtcatcttctatttccaaaggaggctgccggcgtggaccgcgggaa

SEQ ID NO: 672211 - DNA, 82 bp, Homo sapiens
ccatgccgctcctaagcctgcacagccgcggcggcagcagcagtgagagcggagctggagtttgttcagatcatcatcatcg

SEQ ID NO: 672212 - DNA, 101 bp, Homo sapiens
ctcccaagtagctgagactgcagatctttaatctcatgaagtacgacagctacagccgcttcttaaagtctgacttgtttttaaaacacaagcgaaccgag

SEQ ID NO: 672213 - DNA, 100 bp, Homo sapiens
gccggggagaaggtgttgttgccggagctgagaccgggcggccacagtccgcagggatgaacctcgagttgctggatatcatggaaatcaggacagtggc

SEQ ID NO: 672214 - DNA, 87 bp, Homo sapiens
cgtccccggcgcgaagaggctggactcggattcgttgcctgaggtcagataccaggcccaggttccatgatgcccgggcagcacatg

SEQ ID NO: 672215 - DNA, 80 bp, Homo sapiens
ccagggcctcggcggccgctctgcctgcgcgctgctcctgctctgctacctgtaagactttgaccccgacgcaggcttca

SEQ ID NO: 672216 - DNA, 75 bp, Homo sapiens
agttttgtgtccatgtgaacaactacacatcatctcagagttggagcacctgacgtttgtcaacacggatgtggg

SEQ ID NO: 672217 - DNA, 90 bp, Homo sapiens
ggaaattcagcagggcgaagacgccttcccacctagctctcctctctttgcagagccatacaaagttgaagagagaagggcacagttacc

SEQ ID NO: 672218 - DNA, 96 bp, Homo sapiens
atttttacctcattacttcaagggcgtgctcagtatctacaaagacccaggttatgatgtgattgctcaagcccaatctgggactgggaaaacggc

SEQ ID NO: 672219 - DNA, 75 bp, Homo sapiens
attgtggtgcacacgccctgcatcgagcagctggagaagacgttggtgatcaaagtgtccggtgtgatcctgtcc

SEQ ID NO: 672220 - DNA, 101 bp, Homo sapiens
ctggagtacctgtctggtacctggtacccggcacactgtgagttcctggacatcaagggctgagatttaccgcattgtttctcagaagcaaatgtcagaca

SEQ ID NO: 672221 - DNA, 97 bp, Homo sapiens
accagcgcttctccaccaggatcacgtttgagtgtgctcagatatcggatgaagatttgataaagtggaaggcactgtttgaggaagtccctgagtt

SEQ ID NO: 672222 - DNA, 100 bp, Homo sapiens
cccgcgcagtccgcgcagccctcatcgcaactgggcccgcgcgcagatgggcaccaacaagtttgccagccagcagggcatgacggcctatggcacccgg

SEQ ID NO: 672223 - DNA, 75 bp, Homo sapiens
ttctgatataaaacgatgacattttcaggaaaatcctgggaagtggaaaatcaactttagccaaagcaatctgta

SEQ ID NO: 672224 - DNA, 100 bp, Homo sapiens
tcccacgtgcttccccttctccactggctgggatcccccgggctcggggcgcagctgtctgcttttctgtggagactgcgggttgcagacaccagcagcc

SEQ ID NO: 672225 - DNA, 74 bp, Homo sapiens
gaagttggaagtgtctcttagcagcgcgcggagaagaacggggagccagcattctgtgtctggctgactctgcc

SEQ ID NO: 672226 - DNA, 76 bp, Homo sapiens
aaggcatctctactaagagctggggtctatcctgacaaatctgtagagtccaatgtgctgattgctgctaacagtc

SEQ ID NO: 672227 - DNA, 80 bp, Homo sapiens
ctcattccttctccagggagagtcgctgcaggttgctgagtcattaggaatcacagaattcctacggaagaaagaaatac

SEQ ID NO: 672228 - DNA, 82 bp, Homo sapiens
atttcatggggctccactaacagctacaccaaaattgcattgagccaaacttgccaccaagagcccaacaatcaccatgatg

SEQ ID NO: 672229 - DNA, 90 bp, Homo sapiens
tccgccatggacctcttcggggacctgccggagcccgagcgctcgccgcgcccggctgccgtcggcagaaccaattgaaagaccaacagc

SEQ ID NO: 672230 - DNA, 82 bp, Homo sapiens
gggagtgctctgttcacggctccatcgctgttagtacgtacctgtgggcatcatgttccttgttggaagcaagatcgtggaa

SEQ ID NO: 672231 - DNA, 100 bp, Homo sapiens
aaggcaggcgagaagaccatctctgtggtcctacagcagccagactgccttccgggtcactgccatggaggagccgcagtcagatcctagcgtcgagccc

SEQ ID NO: 672232 - DNA, 90 bp, Homo sapiens
gtaggaggaaatgcagctttaattggacagaaatttgcagccaactcagatttaaaggtttcatgtccttagcaagctactgagtttcat

SEQ ID NO: 672233 - DNA, 71 bp, Homo sapiens
gacccaccaatggaagcagctggcttcactgctcaggtgatattgaagcagctttcaataaccttcagcac

SEQ ID NO: 672234 - DNA, 101 bp, Homo sapiens
acactatggcgctgaaacggattaataaggagaactacgatgacccgcacaaaacccctgcctccccagttgtccacatcaggggcctgattgacggtgtg

SEQ ID NO: 672235 - DNA, 101 bp, Homo sapiens
agagccaataaatcctccccgttccgcggacgatatggaatgatttatcaggttgcttatcaagtgtcccacaaatgaaaaaaatttctacatcttacgag

SEQ ID NO: 672236 - DNA, 104 bp, Homo sapiens
cggtggactccttcggcagtccacccaccgccgccgcctcccagccaacatgcccatcactcggatgcgcatgagaccctggctagagatgcagattaattcca

SEQ ID NO: 672237 - DNA, 80 bp, Homo sapiens
aaataggaaaattaagtttagtagtgctcctattaagctggataacgcagatgaacaagcagcccagatcagaagggaac

SEQ ID NO: 672238 - DNA, 89 bp, Homo sapiens
tgagtggtgacagtagcccagcccgccggccagatatgcaaccattgtctccaatttctgtccatgaacgctacagttctcctaccgca

SEQ ID NO: 672239 - DNA, 102 bp, Homo sapiens
ctggagcctcagttggaagcagccgatccagcctgcggagcctgtggggcagggatttcagtcataatcggttgtctaactggaacatcagcttggaatcac

SEQ ID NO: 672240 - DNA, 100 bp, Homo sapiens
aacatggcggagctgacggtggaggttcgcggctctaacggggctttctacaaggtgacagccgtgagggtgtatgtgaacagttcctctgagaatctca

SEQ ID NO: 672241 - DNA, 75 bp, Homo sapiens
cccgcgcagcccccggccgcagcgcaggcagcccagcagatggtcatcatgggccagtgctactacaacgagacc

SEQ ID NO: 672242 - DNA, 100 bp, Homo sapiens
ccagaaaaaactacactgtctactgccaagaataactgaagtgaagtgatggactccgatttggagagtagtaagacgtgaaaggaatacacttgtgttt

SEQ ID NO: 672243 - DNA, 100 bp, Homo sapiens
ggcttggaacagggctgcacacctttctgctttatctggaatcgtgcgggagctgaaaagtcgaggagtggcctacaaatccagagacacagctataaag

SEQ ID NO: 672244 - DNA, 75 bp, Homo sapiens
aagacttccttgctgtgaggctcgtgtggaccccagagcatgcacaggctgcagccaactctggtccccagatgg

SEQ ID NO: 672245 - DNA, 96 bp, Homo sapiens
ggcgcttgagttggtcgggggcagcggcaggtgtccctggccagtgtccttccacctgtccacaagcatggggaacatcttcgccaacctcttcaa

SEQ ID NO: 672246 - DNA, 110 bp, Homo sapiens
aatgggacacagtaaacagattcgaattttacttctgaacgaaatggagaaactggaaaagaccctcttcagacttgaacaagaattttaccttcaatgatgacttcagt

SEQ ID NO: 672247 - DNA, 100 bp, Homo sapiens
agtcattcagggagcccttaatgcctcagaaaccacacccaaagaatttggtgttcacttggcagaactgactgtagatccccagggggcactggcaatc

SEQ ID NO: 672248 - DNA, 100 bp, Homo sapiens
cagagctgtgcctcccagcaccacagtccttctgcagtccctcgtccagccacccccagaacgtggtgtagtatgggaagaaactattattttgcttcct

SEQ ID NO: 672249 - DNA, 80 bp, Homo sapiens
gacagctgagctggcatcagaagacctacgccttcagggactggtgattgcagctggaagtgcccatgaccgagctggcg

SEQ ID NO: 672250 - DNA, 98 bp, Homo sapiens
tgatataaaagcagcaaatctacttttgggttacaaaaatccagaccaggttgaaaaagatcatctagcaaagccttttttcccagctacatataagg

SEQ ID NO: 672251 - DNA, 100 bp, Homo sapiens
cggcgctacgggacccgagccgtcccagaaaccaaagggcaggcacggcagcaaacgcctgaggttggtcaaagaaaaagtgatgtatgaaaaagaggca

SEQ ID NO: 672252 - DNA, 87 bp, Homo sapiens
gaactgtggcttgtgatccatgggcgagtctacgatgtcacccgcttcctcaacgagattacgtgtgaaaatgaacttgtgcaaacc

SEQ ID NO: 672253 - DNA, 100 bp, Homo sapiens
cgcggagccatggccgaggtgttgcggacgctggccgatctacgcagaccccaccaagaggctggagctgtacttccggcccaaggacccatactgccac

SEQ ID NO: 672254 - DNA, 50 bp, Homo sapiens
acgacatgctggcctcgctggatccaattctggtacagcagttgcgccgg

SEQ ID NO: 672255 - DNA, 99 bp, Homo sapiens
ggaaaggcgctgttttcaccgaattagaatcgcgggaaaatagagaagagtttgtttgaaggtctcgcgagatcgaataccccagaatcttccatgctc

SEQ ID NO: 672256 - DNA, 100 bp, Homo sapiens
attatgttataatgtggaacctggatgaatgtagagagaaagtacttcaaggcgtggtgtccctcgtggccgttcacccctccaccgtcaacccgctcgg

SEQ ID NO: 672257 - DNA, 98 bp, Homo sapiens
aacatttcttggaattggactgtgggcatggaatgaaaaagtggtgaagctgctgctgcggtacggagggaacccgcagcagagcaacaggaaaggcg

SEQ ID NO: 672258 - DNA, 50 bp, Homo sapiens
gtgacagtctgcatgtgcagttttcagatagggatgaggaagaaatgacc

SEQ ID NO: 672259 - DNA, 113 bp, Homo sapiens
ttgtggagccggagctgggcgcggattcgccgaggcaccgaggcactcagaggaggtgtggacactgccagcggctgcagccgacttggaatgacctgggagacaaatacaac

SEQ ID NO: 672260 - DNA, 100 bp, Homo sapiens
gcttcttactggatttcttcatggtgtccattttatttagcaaggaagtaacagctagcagtcgccactatgttgacaggctatttgaccctgatcccca

SEQ ID NO: 672261 - DNA, 98 bp, Homo sapiens
gttttgggcatgcacgtgatactcacacagtggcttctgctcaccaacagatgaagacagatgcaccaacgaggtggaaatggatattgttgaaaaac

SEQ ID NO: 672262 - DNA, 100 bp, Homo sapiens
gaagatcctgctgcccgagcccaggcctgtcccctcagttcccaggtgccatgaggaagcctcgtcggaagtcccggcagaatgccgagggccggcgttc

SEQ ID NO: 672263 - DNA, 50 bp, Homo sapiens
ggaagggacaagaagatactgccctgggattgtcaatgaggcagatcaga

SEQ ID NO: 672264 - DNA, 50 bp, Homo sapiens
gaactacagaaacttggtcttcctgggtattgctgtctctaagcaagacc

SEQ ID NO: 672265 - DNA, 96 bp, Homo sapiens
gacgaggctgcggtgtctgctgctattctccgagcttcgcaatggcacagagcagatgctgtcccatggcaccgctgatgtggtcttagaggcctg

SEQ ID NO: 672266 - DNA, 100 bp, Homo sapiens
cgttcaagcgaaaacatgaccgctgagcccatgagaggccacaagaggaagctgaatgaagaggacgccgccagcgagtccagcagggagtccagcaacg

SEQ ID NO: 672267 - DNA, 83 bp, Homo sapiens
caatgactttgagccctaccttactggacagtcaaatcaggacttgggaccctggaggactgacgctgctggcctgggcgtcc

SEQ ID NO: 672268 - DNA, 75 bp, Homo sapiens
tcatgagaagtggcgatcaaaattgactgaaactgttgaggagcccatggaggaagaagaagcagccaaagaaga

SEQ ID NO: 672269 - DNA, 100 bp, Homo sapiens
aattgaaatgcactctattaatgacaaacaggtgtgtggggagcagcaccgctttgaaaagctgatggaatatttccggaatgaggacagcaacatcgac

SEQ ID NO: 672270 - DNA, 100 bp, Homo sapiens
gcgccctgtaggctggagggactgtgaggtaaacagctgagggggaggagacggtggtttcatgatcaacatgggagactcccacgtggacaccagctcc

SEQ ID NO: 672271 - DNA, 96 bp, Homo sapiens
gcgagcttcagtggtgattccagtgactggggatagtgaaggtgctacggtgcaggttgaaactgataaagccactgttggatttgagagcctgga

SEQ ID NO: 672272 - DNA, 100 bp, Homo sapiens
ccaaacaactggcagaatttgctaggtcagaaagcaacattgaatgcagaagaaatggcggacttctacaaggaatttttaagtaaaaattttcagaagc

SEQ ID NO: 672273 - DNA, 75 bp, Homo sapiens
ctcggatctgctggacgaggtcttcttcaacagcgaggtggacgagaaagtggtgagaagccctaccactgcaac

SEQ ID NO: 672274 - DNA, 100 bp, Homo sapiens
caactctcattattaccatatggcccatggaaaagattttgcatctagaggaattgaaaacaagcatgagacgaagctgaagggagtcatctatttccag

SEQ ID NO: 672275 - DNA, 76 bp, Homo sapiens
ccctggcggagcagagacaggccctcggggtggaggaagaacagttagaagctatattgtcagcagcaattcagac

SEQ ID NO: 672276 - DNA, 75 bp, Homo sapiens
ttctaacgctgcctttgctttaaaacagtattacttgcggaagcagtcaattatagatttcttcaaaccagcttc

SEQ ID NO: 672277 - DNA, 100 bp, Homo sapiens
ttcctagaacatctgaagcagaagtacccccaccacgcctctgcaatcatgggtcaccaagagaggctgagagaccagatcagctttgagtgaactttga

SEQ ID NO: 672278 - DNA, 100 bp, Homo sapiens
gcagctgctgctggccatgagataatcgtgcagtattttctgaatcacctgaactttgacctggaccggggcgtgtttccagtagtcatccaggctgtgg

SEQ ID NO: 672279 - DNA, 75 bp, Homo sapiens
agcatcattctttctgcaccaaacccggaaggaaagacggtctcgccacattgcccagactggtctgaaagtctt

SEQ ID NO: 672280 - DNA, 80 bp, Homo sapiens
gtagcctccggattggaatcattcccgcagggtttccaggcctgaggtgcccgccctggccccaggagaatgaaccagcc

SEQ ID NO: 672281 - DNA, 76 bp, Homo sapiens
gcggtctgggccttttgggcagcttttccggcctgacaacttcatctttgggaaagaatatggcaaagctgatgca

SEQ ID NO: 672282 - DNA, 101 bp, Homo sapiens
atcagtgcccttgtggcgaatggggctcacgtcgagtgagcgactggtgggaggagtacatctacctccgaggacgagggccgctcatggtgaacagcaac

SEQ ID NO: 672283 - DNA, 100 bp, Homo sapiens
aacttctgctgcctgggcttcatcgccttggcctactccctcaaagcccattacgcagtccaggcaagaagatcccggagcatcactaggaaaagaaagc

SEQ ID NO: 672284 - DNA, 74 bp, Homo sapiens
tgaaaacatttttgaaaagacaagccatcaaaactgccttcagaagcaaaaggtatctagaagagcagaagaca

SEQ ID NO: 672285 - DNA, 82 bp, Homo sapiens
gccgctctgtctacaacccgagtggagacctttggcgacttggcctttggcgacatcttcctccacctgctcacgggcaacc

SEQ ID NO: 672286 - DNA, 100 bp, Homo sapiens
caggtgtcccgcgggcctcgatttggggagcaggtggacatcttcaataaggagctactgctaatccccatccacctggaggtgcattggtccctcatct

SEQ ID NO: 672287 - DNA, 82 bp, Homo sapiens
catgccgctcctaagcctgcacagccgcggcggcagcagcagtgagagggaaatcctcattgacgattcaatttgttgaagg

SEQ ID NO: 672288 - DNA, 101 bp, Homo sapiens
aacatcagttctacgagaccctccctgctgagatgcgcaaattcactccccagtacaaaggaagctcttcgtgggcggtcttgactggagcacgacccaag

SEQ ID NO: 672289 - DNA, 101 bp, Homo sapiens
attcttactgcgatctttttatttgctaccttgggcttaaggagcctgcctatatctactgagttctagcctcagttttacccaaagttgatttgaattac

SEQ ID NO: 672290 - DNA, 75 bp, Homo sapiens
gacttttgaagaaatctggaagttttccacctaccatgctctcggcactgcctccttacctgtgaggaatgcaaa

SEQ ID NO: 672291 - DNA, 82 bp, Homo sapiens
tcgggttattcgagtgaccgagaccgcggccgggaccgagggggatcctgctaaagcggagcggcaagtccctgaacaagga

SEQ ID NO: 672292 - DNA, 83 bp, Homo sapiens
gctatccatattgatcgcctggactgtgcagtatttccagtctgtctcagccgtcatggaaatgatgagtcagaagattcagc

SEQ ID NO: 672293 - DNA, 100 bp, Homo sapiens
gctgcgagagtggcagaggagctggcggagagcggcctgcgggcgatcgggccgagcagaagatggctgtgccacccacgtatgccgatcttggcaaatc

SEQ ID NO: 672294 - DNA, 82 bp, Homo sapiens
tgaagaccaatttttacgtctagatttccatgcccatggaaggctaagtgctatttatggaggtacctatatgctgaataaa

SEQ ID NO: 672295 - DNA, 100 bp, Homo sapiens
ctctcgaattccttcctggaatccagctaccagacgcaaacatgcagatctttgtgaagaccctcactggcaaaaccatcacccttgaggtcgagcccag

SEQ ID NO: 672296 - DNA, 76 bp, Homo sapiens
tcacaaaacagcagatttcccaagagcagcggaaaatgatccagtcacagatggctgggaagaatggtaccagaac

SEQ ID NO: 672297 - DNA, 100 bp, Homo sapiens
gggagaggcctggaggacaccaacatgatctcccttgagtttagaaatctggctgagaaataccaaacagtgattgccgacatttgccggagaatgggca

SEQ ID NO: 672298 - DNA, 80 bp, Homo sapiens
atccaaaacaaacgctattcctctcacgaaggagggagccccaggaacaggagtcccaccgaagaactgctctctgacag

SEQ ID NO: 672299 - DNA, 51 bp, Homo sapiens
gttctggacaagatgaagtctttctgccagagactcctaaaggggaactcc

SEQ ID NO: 672300 - DNA, 101 bp, Homo sapiens
ctacccccagcaccacctccagcccctgcgcctcgattttatcatgtgggcaacctgctgcaactggttctgcctggatggacagcctgaggaggtcccac

SEQ ID NO: 672301 - DNA, 100 bp, Homo sapiens
tttctcttgatcctcccgaaatcttccagatccgcgtagtgaggaatcgtctccaccgtcatggggggcggagacctgtgcccagcgcctcaagttccgg

SEQ ID NO: 672302 - DNA, 91 bp, Homo sapiens
cccgggcttcggcccccaccagagactcggtctggtgagctgtaccttctttctggcagtgaatggtctgtattcctctagtgatgatgtg

SEQ ID NO: 672303 - DNA, 51 bp, Homo sapiens
aaaacatcctgaggacagtgcctggaggacgaatgccttagtttccacttt

SEQ ID NO: 672304 - DNA, 80 bp, Homo sapiens
acgccatgtcgggttattcgagtgaccgagaccgcggccgggaccgaggtggcctcgtggtctatgcggacggacctctg

SEQ ID NO: 672305 - DNA, 98 bp, Homo sapiens
tttaccaggatctggagaatcatccatctgttcttaagtatgagaagattaagggttgaaaaataccggccacagaccctgaatgatctcatttctca

SEQ ID NO: 672306 - DNA, 80 bp, Homo sapiens
cgaggaactcaaagtggatgaggaaagacatcctggacctggagaaccagcgagaaaacctggagcagccattcctgagt

SEQ ID NO: 672307 - DNA, 100 bp, Homo sapiens
gggaatatctggattctgctcagaggaacttgtactgggatgtgatgatggagaactacagcaacttactctcactggttgatattcactgatggactcc

SEQ ID NO: 672308 - DNA, 83 bp, Homo sapiens
gctgtttgtgggccagctgccctctgaggagatggtcatgacagatgatatcatcaagttgaatcgaaaggaagggaagaagc

SEQ ID NO: 672309 - DNA, 75 bp, Homo sapiens
tgcagagcagcacctccatcaggtacaacctcgaggagctctaccaggaattggcagcaatgaaacagattctcg

SEQ ID NO: 672310 - DNA, 100 bp, Homo sapiens
atgaatgagattcttagtggaatcaagttcaatttaccagctggatatgtgggactagtattcctgggtatggcactgtcctatgccatctcttcaccac

SEQ ID NO: 672311 - DNA, 50 bp, Homo sapiens
agtacaagggctgctgcgaggaccaagatgatctgtactggacacacgtg

SEQ ID NO: 672312 - DNA, 50 bp, Homo sapiens
aaacaactttagatatggatcaggatcttcagcctgttaaacaagaaaac

SEQ ID NO: 672313 - DNA, 74 bp, Homo sapiens
gtcctcttccgttcttcacccctacaccttggagtaatcacaagtgaagaagctgaaagacgaggacagttcta

SEQ ID NO: 672314 - DNA, 94 bp, Homo sapiens
gtcttcggtggactccttcggcagtccacccaccgccgccgcctcccagaacaccttccaccatgaccacctcagcaagttcccacttaaataa

SEQ ID NO: 672315 - DNA, 88 bp, Homo sapiens
ctggggctgcctgccgggcggccgggcgcggcgagcccagacaaaaagccttggcatccacgggaggaagaagtgttcaggcagcatg

SEQ ID NO: 672316 - DNA, 90 bp, Homo sapiens
gtctctgctcttcagtacaatcctgtaaagaaactgcggcaatgaaagctgatctcctgagggccaggaacatgaagaggtacatcaacc

SEQ ID NO: 672317 - DNA, 100 bp, Homo sapiens
aacccacaactacgaatgaatgtccatccccagatacttctcaaaatacttgtaaaagtcctccaaaaatgagcaaggaccctaaagtaaattggttgaa

SEQ ID NO: 672318 - DNA, 100 bp, Homo sapiens
cttcgaaacgtgataagaagcacctggatgagacatttgctacagcatcccacattaagtcaacggagtatgccaaaatggtccaggtcttacatgcata

SEQ ID NO: 672319 - DNA, 100 bp, Homo sapiens
ttcacctttgtctcctcagcagacgcggaagatctcacattcttgaaggtggcattgaagagcactaagatcggaagatgagtgagcttgaccagttacg

SEQ ID NO: 672320 - DNA, 100 bp, Homo sapiens
gagctacccggagctccaagacagggaactccagcatgtcggaagaagagctgaccaaggccatggaggggctaggcatggacgaaggggatggggaagg

SEQ ID NO: 672321 - DNA, 88 bp, Homo sapiens
gatctgcacttcgcattttggcattgacatttaattttagggtcctttatatagaagggagagtagatgatggtgtgagcatccccgg

SEQ ID NO: 672322 - DNA, 96 bp, Homo sapiens
gaagtccacccagaaggtgctggacccgaagaaggacgtgctgacccgcctgaagcacctgcgggcgctgctggggatatcccagagaaggaagga

SEQ ID NO: 672323 - DNA, 100 bp, Homo sapiens
gtgcaatggatccagcaggacagctcagcccagagagttgatagtgaggatgaggatgatgaccttcagtatgccgatcatgattatgaagtaccacaac

SEQ ID NO: 672324 - DNA, 100 bp, Homo sapiens
aaccaggaagaaccgtaccagaaccactccggccgattcgtctgcactgtacccggctactactacttcaccttccaggctggagtgcagtggagtgatc

SEQ ID NO: 672325 - DNA, 82 bp, Homo sapiens
tgcgcgcctcgcctcacagcgaaacgccgcgcactcggagccggcacggctcggcgatgtacgatcgggcgatcagtgcccc

SEQ ID NO: 672326 - DNA, 90 bp, Homo sapiens
atcccactgatgaggatcagcccatggcagaatccagagaccacatttgaagtatatgttgaagtggcctatcccaggacaggtggcact

SEQ ID NO: 672327 - DNA, 98 bp, Homo sapiens
atgcaggagcagacgctgcagttggagcaacagtccaagctcaaagccatgttacaggagctgaattttggtgcatatttgggtcttccagctttcct

SEQ ID NO: 672328 - DNA, 75 bp, Homo sapiens
cgggaatgggctacctacacctgtgtgctgggctttcacgtctacgttggcgttccgggccgcgtggcggtgaat

SEQ ID NO: 672329 - DNA, 100 bp, Homo sapiens
cgattacctctcagtagccatgctcatgatcggcgtgtttggatgtactttacaggcctgtttaaagaagaaaacccgtatgctagatttgaaaacaact

SEQ ID NO: 672330 - DNA, 74 bp, Homo sapiens
tgacctactggctgcaggggacgtggacggggacgtgttcgtgaaatctgaaatagagtactatgctatgttgg

SEQ ID NO: 672331 - DNA, 90 bp, Homo sapiens
tagacttcgaacatttaaacagcaagacactaagggcgactaccagaaagcgctgctgtacctgtgtggtggagatgactgaagcccgac

SEQ ID NO: 672332 - DNA, 51 bp, Homo sapiens
tggaattgaagaattcaaacctcctgaggtttttaaagacaattgttgcaa

SEQ ID NO: 672333 - DNA, 100 bp, Homo sapiens
gatttagcgtttcagaattgcaattccaaaatgtgtaagacgggatattctcttctgtgctgtcaaggtggtggtgaccgcggtggcttcaaaaattttg

SEQ ID NO: 672334 - DNA, 98 bp, Homo sapiens
tctgacagccctgtgtgacaccaagataagtaacgtggaatgaatcttacttgttgaatatcttctggttactagttggattcatttgtgaaagaatc

SEQ ID NO: 672335 - DNA, 100 bp, Homo sapiens
gttcacgcggcgcgagcacatgaagcgccacacgctgctacgagttccagggagctctgtcctggtgaccgtgcccgggttatgacgactaatcccaaac

SEQ ID NO: 672336 - DNA, 75 bp, Homo sapiens
ctacagtgagtcattcaaacagcatgacataactgatatgtgctgattagaaggctcacttgtgcagtgtggagg

SEQ ID NO: 672337 - DNA, 83 bp, Homo sapiens
caggaatccgtatctgggaacaggattttttatcaagcagaaatgcatcgaacaacgagaatcaagatcactgagctaaatcc

SEQ ID NO: 672338 - DNA, 98 bp, Homo sapiens
ttaaggattccaagtaactcttatttgatccaaattccagaatttgtggacatttactcataggtgcagccaagaattcttttgcaaaactcatggat

SEQ ID NO: 672339 - DNA, 90 bp, Homo sapiens
ggagcgagctccattggaaagatgttcgtgaactggtggtaggtgactctcctattccatctgtttcttcgggatcatcttcacctcttt

SEQ ID NO: 672340 - DNA, 83 bp, Homo sapiens
cgcagcaccgcagccttgggcctcgcgccggctatggccgtgccctggggctgagccctcagcgccgtgccgtccctgcagtg

SEQ ID NO: 672341 - DNA, 75 bp, Homo sapiens
ggaaaccaaagaaccttccatgatggacctgcctagggtagttaaaagacgagtgaatgctctcaaaaacctgca

SEQ ID NO: 672342 - DNA, 100 bp, Homo sapiens
cggccctgctgctcctggccctctgcttgcttgtccggcgcaccagagcctgccttctggtacaagatgcctgtggaatgttcggtgaagtgcacttgga

SEQ ID NO: 672343 - DNA, 82 bp, Homo sapiens
gctggaagtgcactgtctgtgacaaaatcgcatggactcaccctgtcacccaggttggactgcactggcctcaacctcctga

SEQ ID NO: 672344 - DNA, 112 bp, Homo sapiens
tctgcggctctccgccgtccccagccctgcctctccctgggctctgagttcaaagaggccttttcattgtttgaccggaccccgactggagagatgaagatcacctacggcc

SEQ ID NO: 672345 - DNA, 73 bp, Homo sapiens
gcctgcgcgtcccgctcgtttcgcacaacgtggaagttcttggaatactttccgatgatgtagagactgatac

SEQ ID NO: 672346 - DNA, 100 bp, Homo sapiens
tatccccagtggagccggagtgcgggcgcgccccaccaccgccctcaccatggctttgacaaattacaaaaggctcgtttggatctgtgacacatcgttt

SEQ ID NO: 672347 - DNA, 100 bp, Homo sapiens
gccaaggaaaaactggagagcttcatcaaaaatagtgatagctttgataagaaacgatttgaacagcagcaaaaactcttagaagaagaaagaaaaagac

SEQ ID NO: 672348 - DNA, 89 bp, Homo sapiens
aacagttctctcaatacataaagaacagcgtaactccagacatggagtgtatggtgaataaattcaagaaaacatctattcgtaagcaa

SEQ ID NO: 672349 - DNA, 75 bp, Homo sapiens
ctgattttggctgttcacagcgttcatctgatgggatacgtgcatcggatccatcaattaagggaacctttcact

SEQ ID NO: 672350 - DNA, 105 bp, Homo sapiens
acgaagaatttgatgaactatgttttgaatttggtctggagcttgatgaaattatccgagcagttggcagactaaaaagagagcggtctatgagtgaaaatgctg

SEQ ID NO: 672351 - DNA, 74 bp, Homo sapiens
cctgctgggcctcaaggaccgcgagattgatgtacagctatatattttgtcctttctttcacctcatgatctgt

SEQ ID NO: 672352 - DNA, 97 bp, Homo sapiens
tttcagattacatcaatgcaaatatcatcatggctgaatcttctccatttgttgagcgacttctgaaaaagggctatgaagttatttacctcacaga

SEQ ID NO: 672353 - DNA, 100 bp, Homo sapiens
tggacgctgactcggaagtgcaggacttgatcatcttccctgacgactgtgagttcaagcgggtgccgcagtgccccagcgggagggtctacgtgctgaa

SEQ ID NO: 672354 - DNA, 113 bp, Homo sapiens
ggcagcagcccagacgcggcacagagagggcctgggagcttgctgcagcttcaggagcaggccgggctctcgccatgggtcactgtcgcctctgccacgggaagttttcctcg

SEQ ID NO: 672355 - DNA, 75 bp, Homo sapiens
cggacttgaatcttttgcctggccgcaacccgccagcctgcaatggaacggcagtgatgcaggagctgcgtccac

SEQ ID NO: 672356 - DNA, 75 bp, Homo sapiens
gctgagggcacgtgtttgcggttcagccctttgatgaccgcagcagctgcagaaccttggcctgaaaatgctaca

SEQ ID NO: 672357 - DNA, 75 bp, Homo sapiens
ttgcttgcagttaggtcaagtggagcccatgcagaatgccaccaagtatggcaacatgacagaggaccatgtgat

SEQ ID NO: 672358 - DNA, 100 bp, Homo sapiens
agacctcctggaggacaactcagccactaccatcatccccatcctgtaccccatcaacatcctcatccaggaaattcagtttgcctgttctgtatgcaag

SEQ ID NO: 672359 - DNA, 82 bp, Homo sapiens
aacaccgttcccccagccgggctgttccagtctcatcagattttccatgtcctggtggtggcagcagcctttgtccacttct

SEQ ID NO: 672360 - DNA, 98 bp, Homo sapiens
acagactcctatttgaagtatttgacgaaaatagactggcttctttgctaaagaatgatgagactaaggccctcactccagcttccttgcagaaggaa

SEQ ID NO: 672361 - DNA, 100 bp, Homo sapiens
cgccagcgccggcctcctccgtgcggagaagaagctgcggccgcacctggccaaggttcagggagcaagtttccgaggttggaaagaagtgacttcactg

SEQ ID NO: 672362 - DNA, 100 bp, Homo sapiens
ggtgaaggtccggggcttgccctggtcttgctcggccgatgaagtgcagaggtttttttctgatatcaatgaatgcttggaggacaagagtgtttgccag

SEQ ID NO: 672363 - DNA, 90 bp, Homo sapiens
caacaaaagaactagcagattttgtaagggaacgtgttatccaagataaattctgtgggattataaacatttcagtagaaggcctgcatg

SEQ ID NO: 672364 - DNA, 100 bp, Homo sapiens
ctacgataacgcgcttttgctcctcctgaagtgtctttggtccaacgttgttccaggattcttgggatgagcttcttattggtgacgtggaactgaaaag

SEQ ID NO: 672365 - DNA, 100 bp, Homo sapiens
aagaaatagaacattactaaagccacctgtacatctttctccttttgaattacctgccctccgaagaagaatgtctgatcacagatacggggatggtggc

SEQ ID NO: 672366 - DNA, 75 bp, Homo sapiens
tattcgagtgaccgagaccgcggccgggaccgaggatacacaatcatcatcttactagttctctgtgttgctcgc

SEQ ID NO: 672367 - DNA, 83 bp, Homo sapiens
ctctcatctcgctcggctgcgggaaatcgggctgaagcgactgagtccgcgatggaggtgtttgaagtggtggaacgtgtaga

SEQ ID NO: 672368 - DNA, 100 bp, Homo sapiens
gtctttttgttcaagataaagtgattttttgcctttgttgattaactggacaaattcaggattctaacattttcagagaaccttttggaaagaacaagcc

SEQ ID NO: 672369 - DNA, 100 bp, Homo sapiens
agtggacaacaatgcaattgagtttttactgctgcaggcatcagatggcattcatcactggactcctcccaaagcagacaactaaactggtaggtggcag

SEQ ID NO: 672370 - DNA, 99 bp, Homo sapiens
catccccccaccgtttccccctgttgcagggttttgtttatataactcaagttgtttggctaaattcttcagcttctcggacaaactatttagtggaaa

SEQ ID NO: 672371 - DNA, 80 bp, Homo sapiens
gcagtggttgcgggatcaggagaaacaggctcgccaggtccgaggccccagccagtagaggcggggtttcaccgtgttag

SEQ ID NO: 672372 - DNA, 90 bp, Homo sapiens
cgccctgcgccccgctctgctgtgggcgctgctggcgctctggctgtgctgcgcgacccccgcgcatgctgggatgaaagcagctccatc

SEQ ID NO: 672373 - DNA, 74 bp, Homo sapiens
ttgctactggagaggatgatgatgatgaagttccaggttgcaggcgccccactggttactgcaacgaccactgc

SEQ ID NO: 672374 - DNA, 75 bp, Homo sapiens
ctctacgctactgccatgataataacataattcacagggatgtgaaggttcatcctaagttccactataaacagg

SEQ ID NO: 672375 - DNA, 88 bp, Homo sapiens
accacaggcttccagtacgagctggttaggaggcacagggcgtcggacctgcacgagctgtctgcacaggaagtcctggagaacctga

SEQ ID NO: 672376 - DNA, 100 bp, Homo sapiens
tgcaattactgagagacaacttgacagccatcgaagacggcaatttggaggaaatggaagaggaagtacggcttaagaagcgaaaaagacgaagaaatgt

SEQ ID NO: 672377 - DNA, 75 bp, Homo sapiens
aggcagccaagctcgtagcctgccactccgtgcaacactctgctccagccaaggtggtgagggcagctgttccta

SEQ ID NO: 672378 - DNA, 98 bp, Homo sapiens
cgtgctctctcgcggcggccggcggggcccgcgctgcagccggagacccggagaaagggactctcgttggggagatagagattcagaaggcacctgga

SEQ ID NO: 672379 - DNA, 75 bp, Homo sapiens
caatccagcgaccatcaacgcagccacaggaaagaccacagcaagattctttcattcgtctcctcctagcctggg

SEQ ID NO: 672380 - DNA, 82 bp, Homo sapiens
cgaaatgccctcacaccagacctacggagggagctggaaattcctgacgttcattgatctgcaggagtcctggcaaaataag

SEQ ID NO: 672381 - DNA, 87 bp, Homo sapiens
ataaagaacgtggggactgtacctcccttcagagccaacatcacttagaagcatttgacattgtgcagcaaagaaatggttatggag

SEQ ID NO: 672382 - DNA, 75 bp, Homo sapiens
gcttgggatcctttatcctggtcatcttctatttccaaagtatgttgcacccagatcaacctctccacttctcct

SEQ ID NO: 672383 - DNA, 100 bp, Homo sapiens
cgggatcctagcacggcgcccatcttacaggtgaggaactgaggctgtgttcctgttggggctggccttggtcccacagcaaaccattccctccgcagct

SEQ ID NO: 672384 - DNA, 83 bp, Homo sapiens
gccatgcccccggcacctgagggttcctggacctgccctgggaagacgtgctgctcccacacgtcctgaaccgggtcccgctg

SEQ ID NO: 672385 - DNA, 75 bp, Homo sapiens
cgggaacagacggatcggcagggcggggcggaacgggtgagaaggactggcagaaatacgagactgctcggcggc

SEQ ID NO: 672386 - DNA, 96 bp, Homo sapiens
cgaacccagtcgcgcagcgctgcagtgaattttccccccaaactgcaataagccgccttccaaggaagaggatcacctagcccgggtagaagaggc

SEQ ID NO: 672387 - DNA, 111 bp, Homo sapiens
atatcttcgagctgaacctgaggaccattattttttaatgtcattgaagactctccggaattcagatttgaaaccatatattatcttcattgcacccccttcacaagaaag

SEQ ID NO: 672388 - DNA, 100 bp, Homo sapiens
tttactggagtaggtgttagtaaggctccatctactctttgaagcttctgcccagcttgcattgtttctaggagaacctgcgtcatacctttatctatag

SEQ ID NO: 672389 - DNA, 97 bp, Homo sapiens
cctgccggcagctccaaccatgggaggccgcgtctttctcgggagtgcatccgccccaacccttttccccctcgtctcctgtgagaattccccgtcg

SEQ ID NO: 672390 - DNA, 83 bp, Homo sapiens
gctaaagcagcgtgcgttcagccctgggatgggggactcaaggagatttcaccaccacccatcctcggcctgtggtcaaagtg

SEQ ID NO: 672391 - DNA, 100 bp, Homo sapiens
gtgggagaaggttctgtctatcagtgctgcgagaaaggaaagaaacaagtttgctctcagcgggaattccagagacgctgtaacactctgatttcattga

SEQ ID NO: 672392 - DNA, 90 bp, Homo sapiens
tcccaagtagctgggattgcagccattatttggaaagcaggtctataaatgagaaagattatcatagtcgacgctacattgatgagtaca

SEQ ID NO: 672393 - DNA, 83 bp, Homo sapiens
ctggaccaagatcgagcccagcgtcaacttcctcaagtcgcccaaagtgtcctcagcctgcgggggctgcgtggaggtggact

SEQ ID NO: 672394 - DNA, 80 bp, Homo sapiens
tgacggcgactgcgggaggccagatgacccgttggcttcctgaccacctggccgcccactgctatgcgtgcgacagtgcc

SEQ ID NO: 672395 - DNA, 100 bp, Homo sapiens
tcgtgccgattcttttacctgagaaatgctacgaccaacttttcgttcagtgggacttgcttcacggttgggggccgtcccgctcctaaggcaggaagat

SEQ ID NO: 672396 - DNA, 75 bp, Homo sapiens
gtggcagcttcgaagccagcccaggttatgattcagaggaggaggaagagagcaggcccatgagttacgatgaga

SEQ ID NO: 672397 - DNA, 97 bp, Homo sapiens
ctggacctccaaggaagccacgtgcagacatctacaaccttcgatctcctgacgagtgatctgtgaaaatggttcgctattcacttgacccggagaa

SEQ ID NO: 672398 - DNA, 83 bp, Homo sapiens
ggtccccgcgttcacagccccagcgcagtaagactttgaccccgacgcaggcttcagtgattgccgcggatcagaagcctgag

SEQ ID NO: 672399 - DNA, 50 bp, Homo sapiens
gaagaagtgacagatgattccaggtcattgagactgcctcttctcaaagg

SEQ ID NO: 672400 - DNA, 83 bp, Homo sapiens
ggaagcgtctccgttgggtccggccgctctgcgggactctgaggaaaagctcgcaccagttgcagagtgggcaggatcttaag

SEQ ID NO: 672401 - DNA, 83 bp, Homo sapiens
ctccactttcgccagcccgtgccgcgagcgcggcctgcaggagggctcctcgcacctaccccagcaactcaaattcaccacct

SEQ ID NO: 672402 - DNA, 100 bp, Homo sapiens
ccagctctgatgcttttgctgctgtggctcagctgtttcagacaactcaaggccaacagacatatctgaagagatggattaagaatgctttggattaagg

SEQ ID NO: 672403 - DNA, 100 bp, Homo sapiens
cgaggtcaacacccgccgagcacaggctgacctggcctatcagcttcaggctatagaaagcgcaattggtggtaacgcttatcaacacagcaaagtgaac

SEQ ID NO: 672404 - DNA, 75 bp, Homo sapiens
ttatatcccaccattgccacgggcattctccatctccttgcagggtaaggtagccgaacgtggtacccaccatgg

SEQ ID NO: 672405 - DNA, 96 bp, Homo sapiens
agccgggccggcccgaccccaccggccatacgaactgaagcgctgcggcatggcgcgcgcctgcctccaggccgtcaagtacctcatgttcgcctt

SEQ ID NO: 672406 - DNA, 98 bp, Homo sapiens
ctttgtctgttcaccagttggctgctcagggagagatgctctatctggctactcgtatcgaacaagccatcctccgttacctgaagaacgatgggaag

SEQ ID NO: 672407 - DNA, 51 bp, Homo sapiens
aacctgataaggggtcatcaggaggaaaacatttaaagttgatgatatgtt

SEQ ID NO: 672408 - DNA, 73 bp, Homo sapiens
taagctcaactctagccagctaggttcctggtgctttggggagatgggcggctggtctggctgggggccctgg

SEQ ID NO: 672409 - DNA, 80 bp, Homo sapiens
gcgcagtcatgagtcgcttcaagtttatcggtacatgatgttgattgatggcacaaatgaagtttttatgattgatagag

SEQ ID NO: 672410 - DNA, 100 bp, Homo sapiens
cctggctgtcttctgccattcaggtgaatttccaatcatcagcccaggtcgggtatatgaatacacaagctgtaccacattctctacaacatcaggatac

SEQ ID NO: 672411 - DNA, 50 bp, Homo sapiens
aagaccaccaggagcacacttgtctaaagaccctcattccagagagcatc

SEQ ID NO: 672412 - DNA, 100 bp, Homo sapiens
gggagaagcatgggaaggaggccgagccgggatctcaggtcctcgggggcggcggccacgccaaggacgggccaccagcccctcgggttccaagatgcag

SEQ ID NO: 672413 - DNA, 83 bp, Homo sapiens
gtttggctttccagagggcagtgtagaggtcagggaagtcaaagatgcatccctgagttcttcctagcaggcaagcagccgtg

SEQ ID NO: 672414 - DNA, 83 bp, Homo sapiens
cgtacattcggggtgccagaaggaaagcataggagaaaagccttacagatgctcatgggaagggtgtgagtggcgttttgcaa

SEQ ID NO: 672415 - DNA, 100 bp, Homo sapiens
gcaactactttggattcacccacagcggggcggcggcggcggcggctgcggcccaatatagaaatacatgctacaggatttaactatcagaatgaagatg

SEQ ID NO: 672416 - DNA, 75 bp, Homo sapiens
ggatcccgagcgcggggaggcagaccggcacattcaggaccccgcgagccagcggctgacgtggaacaagtcccc

SEQ ID NO: 672417 - DNA, 75 bp, Homo sapiens
gccgttccagccctcgcccgatgcacgggattaatgcagtatcgaatggacaagtccgaggtgatagttacagtg

SEQ ID NO: 672418 - DNA, 83 bp, Homo sapiens
tgaacccaacctagtgggtgtaatacatcatgaactgcagggatttgcctcaaagggcactgcaaaaattgaacagaggaatc

SEQ ID NO: 672419 - DNA, 75 bp, Homo sapiens
ctggggacgaagagctgcagctcctcctgtgcgggtgacagaccatgccaccactgccctgctccactatcagct

SEQ ID NO: 672420 - DNA, 83 bp, Homo sapiens
caaaggaagacttgtaacctggagaagaggatttacttcatttgggtcactaggtcacgggggcctcacttcattctcttcca

SEQ ID NO: 672421 - DNA, 75 bp, Homo sapiens
tcttcccaggctgtcatataactcctgagaatagtggttcttaactctttttaaccgtgattggagataccacaa

SEQ ID NO: 672422 - DNA, 75 bp, Homo sapiens
caagatctggactactgttgaaaaaatttccagtgaggacacaactcagatgggaagttcatcgcccgggcacag

SEQ ID NO: 672423 - DNA, 75 bp, Homo sapiens
ccgggcccgggcatggtggtctggggcaacgcggaaggatttttacctcctataactccaccagaaaagtttttt

SEQ ID NO: 672424 - DNA, 96 bp, Homo sapiens
gctctgcagacctgtgtcggcgcggaacccggactgagacatgcaattcaaagaagctttttcactatttgacaaagatggtgatggaactataac

SEQ ID NO: 672425 - DNA, 97 bp, Homo sapiens
gtctctcactggattggtgccacctaaaacattgttatgctggaaatgctagaatataatcactatcagcatgttggcagataaattgaacatgact

SEQ ID NO: 672426 - DNA, 50 bp, Homo sapiens
tttctagcattgaatatgtagttctgacagagtctcgttctgtcacccag

SEQ ID NO: 672427 - DNA, 100 bp, Homo sapiens
gcttgctgctttttctaactatttcaagatgatatttattcaccaaacaaggcttatgtagacatgaggaagattggcagtagccggggaatggtttctg

SEQ ID NO: 672428 - DNA, 82 bp, Homo sapiens
ccgggcgggggcaccgagggctaccacgttctgcgggtcagcccaaggccaaccccactgtcactctgttcccgccctcctc

SEQ ID NO: 672429 - DNA, 100 bp, Homo sapiens
aaaagtttgactgaaaaagtttctctctatagaggtgacatcacattgctagaggtagatgctatagtcaatgccgttcctggtccagaactttacacag

SEQ ID NO: 672430 - DNA, 100 bp, Homo sapiens
gggttattcgagtgaccgagaccgcggccgggaccgagggcttctcacggcattcagcagcagcgttgctgtaaccgacaaagacaccttcgaattaagc

SEQ ID NO: 672431 - DNA, 75 bp, Homo sapiens
agcgctggggtcgtggctgcgtcctctaggccagctgctacaggagctgagagaccctaccctcactttccgtct

SEQ ID NO: 672432 - DNA, 125 bp, Homo sapiens
cctcggtgctgtggtgcagagctagttcctctccagctcagccgcgtaggacacaactcagatgggaagttcatcgcccgggcacagcggatagagtacgactgtgaactagttccccggcgagt

SEQ ID NO: 672433 - DNA, 50 bp, Homo sapiens
tcgttcctgacaaagatgatgtgattcgcctttgccagtctcatctcgtg

SEQ ID NO: 672434 - DNA, 101 bp, Homo sapiens
ggccagaagcgggcggcgcgggggagatggtcgggaactacaagcggactgtgaagcggatcgacgatggccaccgcctgtgcagcgacctcatgaactgc

SEQ ID NO: 672435 - DNA, 131 bp, Homo sapiens
cgacgactccgtcgcagactacggacctgtctgggtctcagccgccaaagaccccgtccggtagttgttagaactgtggccagagtcagccccaggtcagaatgctggtcagcagcagactcacatcccag

SEQ ID NO: 672436 - DNA, 100 bp, Homo sapiens
ccaagcgagtgacacgagagctcaaggacaggttaaaaagatcaagtggcatgagcagccttttggggaaaattggtgccaagaagcagaaaatgagcac

SEQ ID NO: 672437 - DNA, 51 bp, Homo sapiens
aggactctatccaacctattatatggaggagtctgctactagtcttatcag

SEQ ID NO: 672438 - DNA, 82 bp, Homo sapiens
atgccgtcggcggctcccacggctgcatccaccacaacagtgtggagagcaccgtatgtgccctgaaattgcccgccttttg

SEQ ID NO: 672439 - DNA, 95 bp, Homo sapiens
tgggaaccctggaggggccttcctcatccgggagagccagaccaggagaggccagcatccttcagaaaaagcatccccgaggaggaagacgaatc

SEQ ID NO: 672440 - DNA, 98 bp, Homo sapiens
cggcccgcacgctgggactcctgctgctggtcgtcttgggcttcctggtgctccgcagacgtttgatgcaaatgatttgtatcaggggcagaatttta

SEQ ID NO: 672441 - DNA, 83 bp, Homo sapiens
atatctagtccagcaagaccttgctcttttgaagaggccatgaaagattatactgacctggccatgagcacggtgaagcagac

SEQ ID NO: 672442 - DNA, 50 bp, Homo sapiens
cgcggggaccgctgtgctctcgcgtgcctgccagtgtagagccggtggag

SEQ ID NO: 672443 - DNA, 124 bp, Homo sapiens
ccggaatgctgcccgatggccctgggtcctcgctgtggggcaatccgggcttgcagacgagtaagactttgaccccgacgcaggcttcagtgattgccgcggatcagaagcctgagcactttgg

SEQ ID NO: 672444 - DNA, 75 bp, Homo sapiens
gaagccagagaccaacgagatcctgcacatgtctttgggcgtggttgctctccagaccctacgaaaattagttga

SEQ ID NO: 672445 - DNA, 83 bp, Homo sapiens
cagcgcctcagctctgtggaggagcagcagtagtcggagggtgcaggctaagtcctatcagccatggaaacaccattgctctc

SEQ ID NO: 672446 - DNA, 51 bp, Homo sapiens
gtgctgaggatgctaaagctatttatgaggcttcccacctcgactgccacc

SEQ ID NO: 672447 - DNA, 96 bp, Homo sapiens
cctgcgatccccagactggagcctgcttctgccccgcagagagaactgggcccaggtggcttcgtcctgttcatcgccaactaggggaagcgaatg

SEQ ID NO: 672448 - DNA, 101 bp, Homo sapiens
aatatggacagacttcttagacttggaggaggtatgcctggactgggccaggccactgctgaagccaacaacttagcagctgcagcctctgccaaggacat

SEQ ID NO: 672449 - DNA, 83 bp, Homo sapiens
atcgagccttggcggcggacgtgcaggaatactcccccagttgcaagaggcgcaggaccgtggaagacttcaacaaattctgc

SEQ ID NO: 672450 - DNA, 50 bp, Homo sapiens
ccgaggccccctcttcgcctcctccagctgttgagtggaatgtcatggcc

SEQ ID NO: 672451 - DNA, 89 bp, Homo sapiens
gttggggaagtcgaagccaagcgccgtatgggactttgggcgctgtgagcggcggcgagcagaaaactttagaaactgttcctttggag

SEQ ID NO: 672452 - DNA, 100 bp, Homo sapiens
cgcggggacctcggagggagcccggcggcttcgggtgccatcgcctgcaggattctttattcagctctgacagtggcttcagcaactaccgtggcatcct

SEQ ID NO: 672453 - DNA, 75 bp, Homo sapiens
gcgcggggactgcaaccctaatcaggtaaaggcgacacaggaggagaaccgggagctgaggagcaggtgtgagga

SEQ ID NO: 672454 - DNA, 90 bp, Homo sapiens
tgctgccccggcgcaccgactggaccgggaaggagcatcccaggacctaccagaatctgcggaagaagtccctatagaaccatacaacat

SEQ ID NO: 672455 - DNA, 90 bp, Homo sapiens
cttgtcttctccactgttcctggaggaatccgagaagagcagagcggagggagccccagacacgcaaagaatggctcaagaagtactgac

SEQ ID NO: 672456 - DNA, 82 bp, Homo sapiens
caggaacccgcgccgcgagggctccttccctcaggctgaaggtgatgtggccgccctcaaccgacgcatccagctcgttgag

SEQ ID NO: 672457 - DNA, 90 bp, Homo sapiens
gtggctgcgtcaccgccgcccccccagacaagatggacaccgcggaggaagggtcgataaagacaggagtggagtgatatcagacaccga

SEQ ID NO: 672458 - DNA, 98 bp, Homo sapiens
gactcctttgacgacgttgaccgcacactggatgaatggaagcttaacaagcacaagccctggctggagcccacctaccacggcatagtcacagagaa

SEQ ID NO: 672459 - DNA, 101 bp, Homo sapiens
tccgccccgcgagcacagagcctcgcctttgccgatccgccgcccgtccacacccgccgccaggtaatcattaccaaatgaggaggaaaggacgatgtcat

SEQ ID NO: 672460 - DNA, 50 bp, Homo sapiens
gagaatccaattacaccttccaaaggaagcgagttgcccgtgtgtgcaag

SEQ ID NO: 672461 - DNA, 75 bp, Homo sapiens
aaatcttctccctggacctcgtgcatacgaaggagcatttctaccagaggcagcaccggctgcccgagccctcct

SEQ ID NO: 672462 - DNA, 51 bp, Homo sapiens
cgaggatgatgcggaaattaaccccaaggtgatgatgaacagtctacacag

SEQ ID NO: 672463 - DNA, 75 bp, Homo sapiens
aggtgcaggtgtctcttctcgccctggcggggaagaccccccacccaacctgccttactttgtacgacgctctcg

SEQ ID NO: 672464 - DNA, 82 bp, Homo sapiens
gcatgacgtgcaggtctctagcgccttcctgcctgacacagctcacttcaagaagtgcacaatgtcagaacgtggaattaag

SEQ ID NO: 672465 - DNA, 50 bp, Homo sapiens
ggaactctggtggtttcaggaagcattagtgccagcagtagttcccaagg

SEQ ID NO: 672466 - DNA, 99 bp, Homo sapiens
aactcgttgtttgcgtgcaatgttcaccagtcagtgtttgaaggagaagagagcaaggacttgacccaatgaaagaagcatatggcacttgtgaagata

SEQ ID NO: 672467 - DNA, 87 bp, Homo sapiens
aaagcagtcgtaagaagaggtcccaatcccccactctttccgccctaatggaggtctccagtttcgagcatgcaagcggcaagatgt

SEQ ID NO: 672468 - DNA, 74 bp, Homo sapiens
cggagcgggcggcggcgttggcggcttgtgcagcaatggccaagatcaagcaaaagctgcgggaaattgaagag

SEQ ID NO: 672469 - DNA, 101 bp, Homo sapiens
aaaggtcaccagtcccaagtcgtccccctctccgccccccaggaggggcgagagggagccgcagctgatgtcagccgatacggaagatgtgtgcattgtag

SEQ ID NO: 672470 - DNA, 100 bp, Homo sapiens
ccgccacagcgacgccggcgccgagggacaccgcagtatgaggcagaggtcatcatcagatttgaaatatttaaagtggatacaaaactatttcagcaat

SEQ ID NO: 672471 - DNA, 100 bp, Homo sapiens
ttccaactccaggaccctttccttctctacagaaatgccagataaatcccatccatagtgtggaactgaagtagagaaggcaaaagatggattcaatcag

SEQ ID NO: 672472 - DNA, 119 bp, Homo sapiens
cgaggggcttcataccagctgaagagcgacaagccgctggcagccgcggatctcaccgccgctcagggaagttctactacatcaccctgctacgagaccccgtgtcccgctacctgagc

SEQ ID NO: 672473 - DNA, 98 bp, Homo sapiens
tgtgtggggtcctgtcactatttggagttagccctgcgtagccagttaccaacactggagcaggatggtgggactcaaaatccagtgtcttctcccgg

SEQ ID NO: 672474 - DNA, 75 bp, Homo sapiens
gggagacgagaagcctgaaaagtcgcagcgagctggagccgccggagcttggtaaaatgcggctgacaattccgt

SEQ ID NO: 672475 - DNA, 75 bp, Homo sapiens
tcgaggctgtcctctggtgagaaggtggtgaggcttcccgtcatattccaggtaagaatgattgatgttggctga

SEQ ID NO: 672476 - DNA, 75 bp, Homo sapiens
caactgcgaggaaaatgagcagtctctgcccccgccggccggcctcaacaaaggacagaataacgggctcccaga

SEQ ID NO: 672477 - DNA, 98 bp, Homo sapiens
cttgcccacgcaccccactcggcgtcgcgcggcgtgccctgcttgtcacaggttaaacccatccagagtaatggctgcggccttacccaggaccctgg

SEQ ID NO: 672478 - DNA, 98 bp, Homo sapiens
cgcgcgatgctggaccagttgatgggcacctcccgggacgattccaacaatgtctcacccatcttggctgccacccaaaagcactggtgagcccctcg

SEQ ID NO: 672479 - DNA, 90 bp, Homo sapiens
ggccgcttggttctgacccagctgaggtggattcaccaatgaacttgaagcatcctcatgacctagtcatattaatgagacaagaagcaa

SEQ ID NO: 672480 - DNA, 117 bp, Homo sapiens
ttatcaaagacagcaggattttcaccagactgcattatggatgatgccatcaacatcctgcagaatgaaagtcacaatccaaggtccggctcctccgcgtcccagggccggacggag

SEQ ID NO: 672481 - DNA, 85 bp, Homo sapiens
aatccagtatttgcggatagctccaaactgggatatacacagacagcaattctgaggattctgggaatccatcaacaactaggtt

SEQ ID NO: 672482 - DNA, 98 bp, Homo sapiens
gagaggtgctagtggctggacttgacctggaaaggtacatcaggaacgtctctatcaagaatacaatttcagcaaggctgagggccatctgaaacaga

SEQ ID NO: 672483 - DNA, 83 bp, Homo sapiens
gacggatcatagtgccccacaacgtgagcaaggagttctgcacggctatccagtcagttcgctgctattcccatgggtcacag

SEQ ID NO: 672484 - DNA, 82 bp, Homo sapiens
gatgcctgcaaagcgaggctgaagaaggccaaggctgcagaagccaaagccacgattgagtttgtgacgggcaccaaaaaag

SEQ ID NO: 672485 - DNA, 75 bp, Homo sapiens
tccgtgcagcccaacttccagcaggacaagtacatcgacgccatcagcaacaagcagggcgagctggagaattac

SEQ ID NO: 672486 - DNA, 100 bp, Homo sapiens
ggcgagcctgagcgcggcggcggcccacgcgcagcgacagggagaggtgactccccggacagctcaacaccaaagctttcgcgggcacagcggccgcagt

SEQ ID NO: 672487 - DNA, 100 bp, Homo sapiens
ctagaagctgtcttgaatgccttggataaaattgtggaagaaggcaaagtccgcaaagagccagcctggtgttgacttcaaaatcaaaactgtagagcta

SEQ ID NO: 672488 - DNA, 98 bp, Homo sapiens
gggagatccgcctgcagctgaaggaataaatccaccagtaccccaacttctccggggccccggactcattcaactccctccatcccggtgctgacagc

SEQ ID NO: 672489 - DNA, 75 bp, Homo sapiens
ttgatgtagccaagttcacatcaagtccagggttaagtacagaagctctacattaatcatactcctccaccactg

SEQ ID NO: 672490 - DNA, 50 bp, Homo sapiens
gagacggtggagctccataagctaaaggccaaacgtaccaagaaagtcgg

SEQ ID NO: 672491 - DNA, 145 bp, Homo sapiens
tgctgaccccgccgttgctcctgctgctgcccctgctctcagctctggtcgcggcggctatcgacggttctccttccccagtcaccagttgctcgagttagaattgtctgcaatggccgccctgcagaaatctgtgagctctttc

SEQ ID NO: 672492 - DNA, 104 bp, Homo sapiens
acaataagcagacagaagagccaagcagctatggaggaaaatcagacaatgcagatcttcgtgaagactctgactggtaagaccatcaccctcgaggttgagcc

SEQ ID NO: 672493 - DNA, 83 bp, Homo sapiens
ggggatgtgagcgctgagcccttggcagctctattaccaggttttaaacttcgccatgatcgtgtcttctgcactcatgatat

SEQ ID NO: 672494 - DNA, 74 bp, Homo sapiens
ccaaataccagctcgacaaagatggggttgtcctctttaagaagaaaaactgcttaaggttgaaaagagaaatt

SEQ ID NO: 672495 - DNA, 75 bp, Homo sapiens
gcctctgattccaaagccgaagcctaagcagggggaagcgagtagcattatctgatgatgagacaaaggaaactg

SEQ ID NO: 672496 - DNA, 100 bp, Homo sapiens
tgctgtatgaattcttcgtcaaagtctacccctcctgtcggggaggcaaggtggttttggaccagacaggcgtgtctaaccctctgcccgaggagatgct

SEQ ID NO: 672497 - DNA, 87 bp, Homo sapiens
tctatcagcacaatctacgaagaatcaagcagtttcttcaggctcatccacctgcagacatggggcgcagaaagtcaaaacgaaagc

SEQ ID NO: 672498 - DNA, 97 bp, Homo sapiens
tgaccctgcagcatctaccgctcactgtagaccatctcaagcaggatcagggagcttccaaggcatttgatacctttttgatgggaagaagggctct

SEQ ID NO: 672499 - DNA, 76 bp, Homo sapiens
cccaggaaggggttcccagaagtcagaatccaagatgtctcccaacgagcgtgcccgcttgtacttcctgctggcc

SEQ ID NO: 672500 - DNA, 100 bp, Homo sapiens
gggcaccttgcgcttcttgcagtcgggttctccaaaaaatgtggaatcctttgcatctatgctgagacattctcctcttacacagatgggacctgcaaag

SEQ ID NO: 672501 - DNA, 96 bp, Homo sapiens
gtcagcctgccctaggacttcatgtctatatatttccccattcactgacaatgcagatcttcgtgaagactctgactggtaagaccatcaccctcg

SEQ ID NO: 672502 - DNA, 95 bp, Homo sapiens
atgattgttatgaggacaacagaacttgtgaacaaggatctggatatttattataagactcttgaccatggtggtgaccgcggtggcttcaaaaa

SEQ ID NO: 672503 - DNA, 100 bp, Homo sapiens
gaagtgagacagctgaagcgtgttggggaaggagctgtaaagagaggaatgaccctgcataaaaaggcagctgaagatagactggcaagcacaggctcag

SEQ ID NO: 672504 - DNA, 89 bp, Homo sapiens
cttcacccgcgggccgtcagcacctcgttcggttgcagggtgaacctggcgatttgcttgcaggtatatgtctcgagtccacggtatgc

SEQ ID NO: 672505 - DNA, 74 bp, Homo sapiens
catcagcaccccagaccttgtttttgctttctcagtttggcaggcttgagaaggagaaagcagaaattgaacgc

SEQ ID NO: 672506 - DNA, 75 bp, Homo sapiens
ggacagaggcaccaaggacctccaagacaggacccgtcgccatgggccgtgtgatccgtggacagaggaagggcg

SEQ ID NO: 672507 - DNA, 90 bp, Homo sapiens
tgcgcccgcgccaccatcttcggctgaagacgctctgctgttgcccgtattcaggagttcttcagacggagaaaagaaaggaaagaaatg

SEQ ID NO: 672508 - DNA, 100 bp, Homo sapiens
atctgccgtgatcaatatcaggaaaggccccatcttcccttcacacctggtttcccggtcctctggcgaggatcctccaaggcgtctcacatgaaccggc

SEQ ID NO: 672509 - DNA, 90 bp, Homo sapiens
tcggcggcttccgtagcgggagggcgaaagatggcggcggcagtactgggacagttgggtgctggagaatctggtaaaagcaccattgtg

SEQ ID NO: 672510 - DNA, 82 bp, Homo sapiens
aaaacttcctttgcttgtgctcagtgttctaagaacggaagcatctgggctggatggaatttagcatcaagcagagtcccct

SEQ ID NO: 672511 - DNA, 96 bp, Homo sapiens
gccggaggggaatccggaagggacacgctgaacaggtggtagaaggacagcccccctgccctgagacaacactcggaggcctgtattccagcgaga

SEQ ID NO: 672512 - DNA, 100 bp, Homo sapiens
gggaaagcaaggccaaagacagggagaaggtatgcttcagaagtgtccttctgttgatgacttcgtaagtgccctcgtttccgacttggatctggacttc

SEQ ID NO: 672513 - DNA, 74 bp, Homo sapiens
cactgatatctcaaaaggtgatctggacaaaggaacaggtatctcagctgcatatctatgtgagactgaatttt

SEQ ID NO: 672514 - DNA, 82 bp, Homo sapiens
ttggggatggcgtgcagcgcaaccacgagacggccttccaaggcttcaacggaccacaccaaaatgccatctcaaatggaac

SEQ ID NO: 672515 - DNA, 83 bp, Homo sapiens
cgagctgctggagaactgaaggcggacagtctcctgcgaaaccaggcaatgggtcatcatcagatttgaaatatttaaagtgg

SEQ ID NO: 672516 - DNA, 82 bp, Homo sapiens
aacgctgtggaaagtctgcactctttcaactggcagagggttacacatcattttggaatgactgtatatcatctggattacg

SEQ ID NO: 672517 - DNA, 90 bp, Homo sapiens
ctatggaggagctcgatggcgagccaacagtcactgtgccaagtctagtggtggcagggaagacttggagtcatctggactgcagagaag

SEQ ID NO: 672518 - DNA, 83 bp, Homo sapiens
caaaaagccgagtagagaagttatcaggaggatacgaagcgttttcggcttcctgcccggagctgtgcagcaaacagtcgacc

SEQ ID NO: 672519 - DNA, 144 bp, Homo sapiens
cgctgctggtgtttctgatcatatgtgtgctagtgggcatggtctggtgctcggtacggcagaaggaaaccagcctggacaccaagtctgtgtcagaaggccacctcaagaggaacatcgtggtgaagaccgtggagatgcggg

SEQ ID NO: 672520 - DNA, 90 bp, Homo sapiens
gcctctaaactcacaccaagtatgctgcgattagctattgaaggcctgcagccctgccaaggtaaccctgctggggtcagttatcttcac

SEQ ID NO: 672521 - DNA, 51 bp, Homo sapiens
ggattccaagtaactcttatttgggctgttttgctgcagcttctgaagtgt

SEQ ID NO: 672522 - DNA, 90 bp, Homo sapiens
gcgggaaggggctctagagcttcgggaaagcaggcaggatgggagagtcgccgatagaaccacctcttccctgcctcctgggcttggggg

SEQ ID NO: 672523 - DNA, 75 bp, Homo sapiens
ggcgtccactcggtggtgaagggccggctgcacctgactttggccaacgtgggagggccctcctggacccgggag

SEQ ID NO: 672524 - DNA, 100 bp, Homo sapiens
caaacacagaggaatgaccaccatggcagatggcaacagaggatgtcaacaattttttggagctttgtaggcagccaatcccagagaagcagacgggatg

SEQ ID NO: 672525 - DNA, 96 bp, Homo sapiens
cgctgttgctgatgtggctttatgaaaggtttgttaacactttgcataaagatgtcaacatctccctgagtacagatacctctctcaatgttggtg

SEQ ID NO: 672526 - DNA, 75 bp, Homo sapiens
ggttattcgagtgaccgagaccgcggccgggaccgaggaccacgtggccgtgaccatccagctcctccttagacg

SEQ ID NO: 672527 - DNA, 100 bp, Homo sapiens
cgctcgacacgcgggtgcggggcgacctcggtggcccgcagtgccggtggtggtgtgcacattgagccccggtatagacagttcccccagctgaccagat

SEQ ID NO: 672528 - DNA, 100 bp, Homo sapiens
agcccctgagagccgggtggaccctgaggtccttcacagcctgcaggcctatgaacgctctgagagcttggaggtggccttcgttactcagctggtgaag

SEQ ID NO: 672529 - DNA, 100 bp, Homo sapiens
ggaaaagaacacctgtgaaagaccgattttctgcagaagatgaagctttgagtaacattgccagagaggaaggcactgatcctgaaactgaagaccccaa

SEQ ID NO: 672530 - DNA, 87 bp, Homo sapiens
ttttggcattgacatttaattttagggtcctttatatagaagggagagtagggtaattgggatacttctggcagcgaactgagtgaa

SEQ ID NO: 672531 - DNA, 90 bp, Homo sapiens
ccggctgcatcatggacgagtgcacgtggtcgagttaccagatgtatgctactcatggtgggtcctggcttccctaaagataattggaag

SEQ ID NO: 672532 - DNA, 75 bp, Homo sapiens
cagaggtgtgctgacgacctgctacaacagaagtaagaatgattgatgttggctgatattggagtgctcattcac

SEQ ID NO: 672533 - DNA, 100 bp, Homo sapiens
acagagcctcgcctttgccgatccgccgcccgtccacacccgccgccagttgtatcacggactgattcaccgagcccaaccgtactcaactcacatattt

SEQ ID NO: 672534 - DNA, 100 bp, Homo sapiens
gtggtgctggaaggggccagtctggagacagtcaagatgagaccaacaggagttgcacaggtacgatctactggaattcctaatgggccaacagctgact

SEQ ID NO: 672535 - DNA, 75 bp, Homo sapiens
ctgaaactggttcttgggtgtttaagcatgactcctcctaaaggcaacctggtagacctcatcacactgtaactg

SEQ ID NO: 672536 - DNA, 100 bp, Homo sapiens
atcaagagccttcattgcatgataccaggcctggttgcagtatgcttgaaatctgggatgtggaagacccttccaatgcagctaaccctcccttatgtag

SEQ ID NO: 672537 - DNA, 75 bp, Homo sapiens
gctgtcagcgatagcccagtggatggccattccaggacacagagtctgggatctaataattcagtcattttggat

SEQ ID NO: 672538 - DNA, 89 bp, Homo sapiens
acaagctgtaccaggacgaaaaggctactgcagcactggggtgtcagttgttggtccgacccagaacgcttcagttctgctctgcaagg

SEQ ID NO: 672539 - DNA, 95 bp, Homo sapiens
ctgaaccccaaggccaaccgcgagaagatgacccagtctcggaagggtgctgacctggaccgggagaagaaggctgccgagtgcaaggtggacag

SEQ ID NO: 672540 - DNA, 75 bp, Homo sapiens
ggaggacacacctaaacatgtggaatcccaatgccggagaattctcaccaaatgttcccaaatccttatcctcag

SEQ ID NO: 672541 - DNA, 90 bp, Homo sapiens
gcagtggtcgcttcttctccttggatatgatgatgcctatagatttgggggaaaagacaatatatttagtttcattctttgaaggtttac

SEQ ID NO: 672542 - DNA, 51 bp, Homo sapiens
tgctacattggaacagggccgcctctcaagatgtcctgtgaagtcaacgag

SEQ ID NO: 672543 - DNA, 75 bp, Homo sapiens
gacagagctttgatagtcgtaccatatgcagaagccaggcgttgtggggcagatgatcgaggcagctgaagagcg

SEQ ID NO: 672544 - DNA, 100 bp, Homo sapiens
accgcttcgagaagcgccacaagaacatgtctgtacacctgtccccctgcttcagcttcctggacaagatcgacgtgatcaagcaggctgactatgtgcc

SEQ ID NO: 672545 - DNA, 91 bp, Homo sapiens
ttataatccaggtgactgactgtgaagaggaagaaagggaagagaagttcaggaattatccagactgccttgccactagatgaatggaaga

SEQ ID NO: 672546 - DNA, 51 bp, Homo sapiens
gagaccagcctggctaacatggtgatccacccacctcggcctcccaaagtg

SEQ ID NO: 672547 - DNA, 112 bp, Homo sapiens
ggagaaaacaagacaagcccattcattcatttgagcatagcaagtgtcatggagaaactccagctgggcccagagattctgcagcgggaaaatccaaggcttatttatgcca

SEQ ID NO: 672548 - DNA, 97 bp, Homo sapiens
gcacgggccctggggaagagaagcagttcctggaggtgtgccagaagacagcagagattagcctcttgaagcagcagctgcgtgaagcccaggcgga

SEQ ID NO: 672549 - DNA, 101 bp, Homo sapiens
ctgcccagccccttgtcagccagggctgaacccccgcagatggtctcctgatcctggctgataagctccagggccccttttcctttgagctgacggccgag

SEQ ID NO: 672550 - DNA, 98 bp, Homo sapiens
cttatgctgatatacatccaatgaggctgttacacatctgtattgaaggttggggcaactggcgttggtcagagcctttcagtgtggaccatgccggg

SEQ ID NO: 672551 - DNA, 90 bp, Homo sapiens
gaaactgctggtgtccaatctggattttggagtctcagacgccgatattcagggttctgagcaaggttcaaccagtcaagaacaggcctt

SEQ ID NO: 672552 - DNA, 75 bp, Homo sapiens
caaaccgctggcaaggctgcccccagaggagagagtccgttttacgtcctcatcgagacttcaggctccaacgca

SEQ ID NO: 672553 - DNA, 75 bp, Homo sapiens
agcaagactatgaatctctgttccaaatgctttgctggttggtcaaagaaaaagtgatgtatgaaaaagaggcaa

SEQ ID NO: 672554 - DNA, 88 bp, Homo sapiens
caatggtgatgtggatgtggaagaaagtgatgaggttttggcacaaataccagtgggaatagtatttttggaagtaaaccagcacctg

SEQ ID NO: 672555 - DNA, 83 bp, Homo sapiens
gaggatgatttcatgtgcgatgatgaggaggactacgacctgttgttgacctcctgtactggagagacattaagaagactgga

SEQ ID NO: 672556 - DNA, 74 bp, Homo sapiens
ctcagcctcctgtgtagctgggattacaggtatattgtttacagaaagagctaaagataaaaaatcacagtctt

SEQ ID NO: 672557 - DNA, 82 bp, Homo sapiens
gaagaagactatcagccactaatgaagttgggaactcagaccgtaccttgcaacaagccattttgcagactttgatcacagt

SEQ ID NO: 672558 - DNA, 100 bp, Homo sapiens
gttgctcttttggttgaacagtctcgatcagaaaggtcatatatcagttatgtgcatgctctgatacatctggtcctactatgaggtacttgagaaccag

SEQ ID NO: 672559 - DNA, 100 bp, Homo sapiens
gtgaattcacagtctaccatgaattggaaggccttgaaccggggcattgctgctgtcaaggaggatgcagtcgagatgctggccagctacgggctggcgt

SEQ ID NO: 672560 - DNA, 75 bp, Homo sapiens
gttccatgctgtctgttcagacttcagcttggtgctcaagttggcttaccagaagttacactgggacttctccct

SEQ ID NO: 672561 - DNA, 75 bp, Homo sapiens
acagagcctcgcctttgccgatccgccgcccgtccacacccgccgccagagcgccgccctgtgctgggctgccgg

SEQ ID NO: 672562 - DNA, 83 bp, Homo sapiens
tgcctctctccagcagactgcgatcaggcctttgtgacactaaccacaaacgatgcctacgccaaaggtgccctggtcctggg

SEQ ID NO: 672563 - DNA, 100 bp, Homo sapiens
gtttgggttctccacgcattctagactcccgaagagcttgcaagcaatactttgagaagtatccaggagaccatgaactcctttgggaagttgaaggtgt

SEQ ID NO: 672564 - DNA, 82 bp, Homo sapiens
gctctccctcgagaagctccagatggcgtcttccgtgggcaacgtggccgacagcacaggactgctgtgtaagctatggtgg

SEQ ID NO: 672565 - DNA, 100 bp, Homo sapiens
agtgagggtgtacaaatacccctttgaattaattatggctccctaccacttatgtcttggatgaagatgaacctcgattccttgaagaagttgattacag

SEQ ID NO: 672566 - DNA, 100 bp, Homo sapiens
gggaagcgctccgggcctggaatccctacgcgtccctttgggtttagcacgatgagctcaatcggcactgggatgtgctggtggacggacagccatgtga

SEQ ID NO: 672567 - DNA, 100 bp, Homo sapiens
ccggcgtctgcgcttccccatggggctggcctgcggcgcctgggcgctctgagttcctctgtgacgagggtgcaggtatctctggggactacatcgatcg

SEQ ID NO: 672568 - DNA, 50 bp, Homo sapiens
tgtggaggaaaacaacttcgagggcagaagacacctatggctgccgatga

SEQ ID NO: 672569 - DNA, 83 bp, Homo sapiens
aagagaaccctgcggaggagaccggcgaggagaagcagttggctggagttgtcttccttggagtcgggctgtgggcatggagc

SEQ ID NO: 672570 - DNA, 98 bp, Homo sapiens
gtgtggggttggtgtgattagcttcgcagtctggaaagctttaggagttcacagtgtagatatagttgtaggtactccgggaagactagatgacttgg

SEQ ID NO: 672571 - DNA, 74 bp, Homo sapiens
atatgggttagcatgctggcaagaggaggacagaaagtgactgagaccgaagatgatagtgatagtgacagcga

SEQ ID NO: 672572 - DNA, 100 bp, Homo sapiens
ttctggcagtgtagcatctcttccacaatcagacaggtcctcatccagctcacaggaaagtctcaatcaacgaaacggaatattccaatgctctttgtcc

SEQ ID NO: 672573 - DNA, 100 bp, Homo sapiens
ttgtgtctggagtgaagattttttatggttctcagactggaacagcgaagatggagcctcgctctgtcgccaagactggagttcagcggcacgatctcgg

SEQ ID NO: 672574 - DNA, 75 bp, Homo sapiens
tggccactgcgcagaccagacttcgctcgtactcgtgcgcctcgcttcgcctccaggaccactggctgcccatga

SEQ ID NO: 672575 - DNA, 76 bp, Homo sapiens
ggcctctggaatttagcgctcgcccagctagccgcaggattataccttgacaatgtactttcaacaagcctggaga

SEQ ID NO: 672576 - DNA, 74 bp, Homo sapiens
tggaggcagaggtggcatgggatatgagatcctgactccaaactccattcccaagggtttcatggacgggaagc

SEQ ID NO: 672577 - DNA, 145 bp, Homo sapiens
ggcgggtgaagatcggacactacgtgctgggcgacacgctgggcgtcggcaccttcggcaaagtgaagacgtcacactgctcagctccgcgaagagttgctgaaacttccctgccctgaaggcttggatcctgacactgacgatg

SEQ ID NO: 672578 - DNA, 100 bp, Homo sapiens
tgatggtggcagcaacaaggagggaaaaaagagcaggtggaaaaggaaagttgaaatggatgcagtcagaactgaatgttgaagaagtggtaaatgacag

SEQ ID NO: 672579 - DNA, 101 bp, Homo sapiens
cgtgacctaaagctggagtattttgagattggagaattaaggattctgagaaacgaacccctcttcatgtggccgcatttctgggagatgcagagatcatt

SEQ ID NO: 672580 - DNA, 74 bp, Homo sapiens
tcaaccacagtcttgtagatattttaacccaaaggcccctagcagtcttcttgatgctttggaacaacatttag

SEQ ID NO: 672581 - DNA, 72 bp, Homo sapiens
aaactgctgctctttcacttctcaggcgtcaccgagagctcagatgatgataattccgaagaaggcttccac

SEQ ID NO: 672582 - DNA, 101 bp, Homo sapiens
cgacgcccggcgccagcacatcgcaggtacagagtgaagacagtgtcctcctgtttgttattgcatggacgatcacggaaatcatccgttactccttttat

SEQ ID NO: 672583 - DNA, 114 bp, Homo sapiens
ccgggagggaggtggggggggtcagccccccgcccggccagccgccccgtccgggagctgcccggccagcccgcttctctgcccggagccatgaatctcagtagcgccagtagc

SEQ ID NO: 672584 - DNA, 96 bp, Homo sapiens
agagatgaagcaattgcagcttgcagagcaggggctcccttctctgtaattggaaacacaatcagatcctgaggaggatgaaggggctggccctgg

SEQ ID NO: 672585 - DNA, 98 bp, Homo sapiens
catgcaagttttaaatagcatggcagcatttattgcccttccatcaatcttgcaaagaatcttacagatttcagagacaactgtctgaaccctgccac

SEQ ID NO: 672586 - DNA, 50 bp, Homo sapiens
ccagagatgaccccttatgaaggttacgccaaggaggccctgaatctggc

SEQ ID NO: 672587 - DNA, 100 bp, Homo sapiens
ggaaaagttggggaaagggaaaatggaagtcaaagaaatgcaaatattctttcaaatgtgtaaatagtctcaaggaaacccagcgtttgctggcagaacc

SEQ ID NO: 672588 - DNA, 100 bp, Homo sapiens
tataaagaagatcttgaaaaatcgaagattaagacagaactcaactcatcagctgaaacactctgatctacaaatttggaagaaccgaagagctatggac

SEQ ID NO: 672589 - DNA, 80 bp, Homo sapiens
gggctcgccttgtatctcaacaccctgagtgcggatttctgctatgatgacaggcacggatgggcagaagcctttgcagg

SEQ ID NO: 672590 - DNA, 100 bp, Homo sapiens
ccaaaggggagcaaagccgggctcggcccgaggcccccaggacctccatctcccaatgttggagtgagaagccacagaaatggagagtggaaatatatag

SEQ ID NO: 672591 - DNA, 140 bp, Homo sapiens
tgcaggaaaccttgaacctgccaccagtggccagtgagactgtcgaccgcctggttttagagagtcagtttttactgcttcaggccctccaaacatactctgatgacatcttgtcttctgaaacacataccaaaattgat

SEQ ID NO: 672592 - DNA, 97 bp, Homo sapiens
gccgccgcccctcctgcagcagcagcagcgagaagatttggtgcttccagatgtgagttatcaggtggaatccagtgaggaggatcagtctcagact

SEQ ID NO: 672593 - DNA, 83 bp, Homo sapiens
aggaggatggcggagtcggggctcctgacgactgtggatattcataaggagaaagtggcacgaagagagattggtattttgac

SEQ ID NO: 672594 - DNA, 95 bp, Homo sapiens
tgactattcagatcatccaagtggaggttcctacagagattcatatgagagttatgagactaaggtgtcagtatgttcttcaagctgctctgctc

SEQ ID NO: 672595 - DNA, 74 bp, Homo sapiens
ggaagaagctctacgaatgccaggtaaaagtttcatttgatctgaatagtattaaaataaaatacctggatgag

SEQ ID NO: 672596 - DNA, 74 bp, Homo sapiens
cctgagcgccccaggtagaatttcaaaggaactctaatgatccaggacaaagaagttaccctggagtatgtatc

SEQ ID NO: 672597 - DNA, 51 bp, Homo sapiens
aatgatcatcaaagtagcagctttggggtttgtgtttagtgaatcagaggg

SEQ ID NO: 672598 - DNA, 100 bp, Homo sapiens
aacacttcctataaatctcgcccaaacaggaaagacaatctccaccatgaaagtgatgcagtttcagggtatgaaacgcaaagccagttctcccgtcccc

SEQ ID NO: 672599 - DNA, 100 bp, Homo sapiens
gcctcttccagtgggcagggtcagcaggcccaaacccccacagacttaattcagtgcacaaatgagatgaatgtgaacatcccacagttggcagacagtt

SEQ ID NO: 672600 - DNA, 82 bp, Homo sapiens
aacctggacgccggaagccgggaaatgcctcccgcgacgatgcccctcaacgttagcttcaccaacaggaactatgacctcg

SEQ ID NO: 672601 - DNA, 49 bp, Homo sapiens
agctgttgctggacccctggcaggtctgcagatctccaggggagcccac

SEQ ID NO: 672602 - DNA, 90 bp, Homo sapiens
ttcgctcctgcgacaaaatgctgctattgagggcacctacattgacaagaaatgccccttcactggtaatgtgtccattcgagggcggat

SEQ ID NO: 672603 - DNA, 100 bp, Homo sapiens
cccgagggcatcctgggcaccatcaactccatcgtgatggcctttttaggagttcaggcctatgagagctacaagaagaaggactacacccaggtggact

SEQ ID NO: 672604 - DNA, 100 bp, Homo sapiens
gcagagaccatgatcgtttctgggtcctagctgctcaccctaaccttaacctctttgcagcaggttcatcttccttcctgtacagtattttcaaacttcc

SEQ ID NO: 672605 - DNA, 101 bp, Homo sapiens
accagccggcagctccggagctgcccgcgccatgtccgcgcacaatcggggcaccgagctcgatggcccactgcgtgaccttggttcagctgtccatttcc

SEQ ID NO: 672606 - DNA, 82 bp, Homo sapiens
gagccctgctacgcgtcgggtccaggtggcagaacatcctagacccaatgtctgtggatcacgttataatgcttactgttgc

SEQ ID NO: 672607 - DNA, 90 bp, Homo sapiens
cagtcattttactgtcaagacatttcttcggcattctgcaacagaattcaattcgtcataatctgtccctacacagcaagttcattcgtg

SEQ ID NO: 672608 - DNA, 74 bp, Homo sapiens
gatgaggaagaagaccccacgttggttaccacagagaagcgcttcctcaaagacagtttgtacaatgaaggaat

SEQ ID NO: 672609 - DNA, 98 bp, Homo sapiens
cgcgcaggagctgcaggagggccagcgctgcgtggtcattctgcccgactcagtgcggaactacatggtgattctgggggtccacttgtctgtaatgg

SEQ ID NO: 672610 - DNA, 75 bp, Homo sapiens
gcaccagtaaaatatggtgaactcattgtcttaggatttggagcaagaggtggtggtggccttcccccgaagaaa

SEQ ID NO: 672611 - DNA, 120 bp, Homo sapiens
gtgcttctaccagcccatgcccctgaaggcctcgctggagatcgagtaccaaatgccatcccgcccactttctacagaccctacttcagaattgttcgatttgacgtctcagcaatggag

SEQ ID NO: 672612 - DNA, 100 bp, Homo sapiens
caagaaaaacaaacgtcacacatgaagaacacacagcggtggaaaagaaaaggcgacggcggattgacagaagtatgattggagagcccacaaactttgt

SEQ ID NO: 672613 - DNA, 82 bp, Homo sapiens
attaatctttggagagacatcctatattcctttcaggatggccaggccatgttatgggatctcaacgaaggcaaacaccttt

SEQ ID NO: 672614 - DNA, 82 bp, Homo sapiens
aagagattcagccagcacactcctcgcgagcaaggacttcgcaggtgagcagtaacggaaatcagccccgtttattcctccc

SEQ ID NO: 672615 - DNA, 90 bp, Homo sapiens
aggagatcgaggacgccgagaagtactccttcatggccaccgtcaccaaggcgcccaagaaggcatctccttggaaacaatgccatcttt

SEQ ID NO: 672616 - DNA, 100 bp, Homo sapiens
gctggttggagattctccggggacccttccgtatctgcctaggcattttgctgtctcctcctaatacggcagcctgcttctgcaaagtggtacgatcgaa

SEQ ID NO: 672617 - DNA, 96 bp, Homo sapiens
ggcgagacctacaaagatgacatccagcggcacctggagactcttatccggagctaccccgacatcagcgtgctgaaggagctgctccaggtgcag

SEQ ID NO: 672618 - DNA, 82 bp, Homo sapiens
ggcgacttcaacagcaagagggacgagatgtggaaaaaggatgttgtacctcaggcgttgttagatcagtatttatctatga

SEQ ID NO: 672619 - DNA, 100 bp, Homo sapiens
gtgactgctgaagatggtgaaggagctggagaagcacggagttcgggggatggcacagaatgggaacggaaagatgctgaaggatgggagaccgttcaga

SEQ ID NO: 672620 - DNA, 83 bp, Homo sapiens
cgacagcaacagctctgccggctggaaggtgtccctggccagtgtccttccacctgtccacaagcatggggaacatcttcgcc

SEQ ID NO: 672621 - DNA, 96 bp, Homo sapiens
ggcttcagggcccactgggttccccaaagctgagaatcctgagatatgtcttgtcgttcaagacttgcaacactaaacgagaaattgacagccctt

SEQ ID NO: 672622 - DNA, 100 bp, Homo sapiens
tgatgaaaccacttctctacatcccatctcaatcagaattactagattttctctcaaactacgagggtatgttagagcccaccaaggaaccactgaaacc

SEQ ID NO: 672623 - DNA, 90 bp, Homo sapiens
tcctgctcttccagttcgggatgattgcttccaagtatgatcatcaggcagaagaagatcttcgcaattggatagaagaggtgacaggca

SEQ ID NO: 672624 - DNA, 98 bp, Homo sapiens
agctgtacggagtgtcagaagaggatgcactttaactccaatggcctggaacccaaagagattaatgattcatcaagggatagttgtacttgtctcgt

SEQ ID NO: 672625 - DNA, 100 bp, Homo sapiens
ggagctggcggacatcactttagaccctccacctaattgcagatttcgacctcatcaggatgcaaaccccgaaaaaccacgtgttgctgctctaattgac

SEQ ID NO: 672626 - DNA, 100 bp, Homo sapiens
aaccacccaaggcccaaaagcgtcaaactcaccaaaaacaacatctttccagaaagagctaagcgactggagaccccaaaggagctggactcagatggtg

SEQ ID NO: 672627 - DNA, 82 bp, Homo sapiens
cctgcggtttcttcgatatggctcactgcatgggactgtcctgggcctggaagtggaagctcttcgtgggcggtcttgactg

SEQ ID NO: 672628 - DNA, 82 bp, Homo sapiens
cagctatcgtggacgtcactggccctggtggggattgacagccacgggaagatatctccggagcatttggataatgtgacag

SEQ ID NO: 672629 - DNA, 82 bp, Homo sapiens
gagttctctgtgtctgtgaaggtggcccagttgaaatccttcccttcctctaccttggaagtgcctaccatgcatccaagtg

SEQ ID NO: 672630 - DNA, 88 bp, Homo sapiens
tttcggcaaccgctgctggcagttttgccaggtgtttgttaccttgctccagaacctgggtatcaacccagcaaacattggcttcagt

SEQ ID NO: 672631 - DNA, 90 bp, Homo sapiens
caccgcagccttgggcctcgcgccggctatggccgtgccctggggctgagccctcaggctaccggctctctgaccagttccacgacatcc

SEQ ID NO: 672632 - DNA, 76 bp, Homo sapiens
aaaaatggcaaccctgtctgtaggaggaaaaactgtatcacgttttcgttgcatagtatgggactgggactccaat

SEQ ID NO: 672633 - DNA, 100 bp, Homo sapiens
agatgctgcaggacgccatcagcaagatggaccccaccgctggacaacgttcatggctctcgggtagaacctagtgaaacggccagaatgaattctatgg

SEQ ID NO: 672634 - DNA, 110 bp, Homo sapiens
ttttccttagaacaccaaagattgtctctggcaaagctttcaccaacaatcaccagtggtttacacaacattgcaaggagcattgaaactcgaaactactcagaaggatt

SEQ ID NO: 672635 - DNA, 50 bp, Homo sapiens
cgaggagattcaggatgaagttgagccccacagtcttcgttataacctca

SEQ ID NO: 672636 - DNA, 74 bp, Homo sapiens
gtgatcgtggcaggttcaaatggctggtataattataggcaccagctgaaccttagccggccgatcgaggagca

SEQ ID NO: 672637 - DNA, 74 bp, Homo sapiens
gcgacaagccgctggcagccgcggatctcaccgccgctcaggagtgtgtggcaggccccaacatcgccgccatc

SEQ ID NO: 672638 - DNA, 98 bp, Homo sapiens
gccctgctgagagggaaaaggacgccgcggtcttcccaggcgtcgcggagagcaggaacttagtgatttggcccgtgaccctccagcacaatgttctg

SEQ ID NO: 672639 - DNA, 98 bp, Homo sapiens
tttgtagcaccaggaagtgttcaatcctcagatgacctagaagaagacagtagcgactacagcattccttccaggttgcaaattcgtgaagaatcagc

SEQ ID NO: 672640 - DNA, 96 bp, Homo sapiens
ttcgcagtggtcgcttcttctccttggacctcagcagccatgtcgaagccccatagtgaagccgggactgccttcattcagacccagcagctgcac

SEQ ID NO: 672641 - DNA, 101 bp, Homo sapiens
aactcccagcctgcttcataccagagacgacttttagttactagatctggcaggaaaattaaaggaagaggaccaaggccccagccgctcgaagctctgac

SEQ ID NO: 672642 - DNA, 118 bp, Homo sapiens
cggcaagggcaacttcgcggtggtcaagcgggccacgcacctcgtcaccaaggccaagacaatgcagatcttcgtgaagactctgactggtaagaccatcaccctcgaggttgagccc

SEQ ID NO: 672643 - DNA, 100 bp, Homo sapiens
aggcgcggctggtcggtcccaggtcccggcctccgtaatgagagcccggaaccactctttgtgccgcagcttcgcaggtcctcagaatggttggaatgac

SEQ ID NO: 672644 - DNA, 83 bp, Homo sapiens
ctgtggtctctgcacctcctttcttatggaaatttcatcgataagctaagactcttcaccaggggaggatccggtggaatggg

SEQ ID NO: 672645 - DNA, 100 bp, Homo sapiens
gctgccggctggatgggaagttaatgtttacggcgaagtctactcaacgtttccaaggagtgcccgtgcgcagcggagatgccaccttccccaaagctat

SEQ ID NO: 672646 - DNA, 90 bp, Homo sapiens
gaattcctgcagatccagaagcagacctgagaagatggctaagctcccagtgattttaggcaatctagacattacaattgataatgtttc

SEQ ID NO: 672647 - DNA, 95 bp, Homo sapiens
cttaatcctactcagaagaacttgtacagagatgtgatgttggagaactatagcaatctggttttcttggaagatgtatgcaaccagcccttact

SEQ ID NO: 672648 - DNA, 97 bp, Homo sapiens
ggggatcttccccaaggtggccaccaacatcatgcgagcctggttgttccagcacctctcgccagaaagactccaggggactcattactctgtgcag

SEQ ID NO: 672649 - DNA, 100 bp, Homo sapiens
tttatcagtgcttggcaatgaacaaatatggagccattcttagtcaaaaagctcatcttgccttatcaagtgtggatgaggtcaccattgtcaacatttt

SEQ ID NO: 672650 - DNA, 100 bp, Homo sapiens
ttcagcagggtttacagacattagcaacggaagccccgggcctcatcccagggaaagtggagaatgaggacatgaataaagaccagatcttgctggaaaa

SEQ ID NO: 672651 - DNA, 101 bp, Homo sapiens
attcgaagcaataacatcaacacactgttcaaaatcatgcgagtggggacagcttcttcctagatagaatgagtccatttaagtcccaggacggtggaaac

SEQ ID NO: 672652 - DNA, 75 bp, Homo sapiens
ggagtactcttattttgaaaagaaatcaggacctttgatatttaggaaaactatgtttaactctacagatatcaa

SEQ ID NO: 672653 - DNA, 75 bp, Homo sapiens
gaagattcgaggcggcgggggacaagtcggcgccccagagcggacgaggtttttcccactcggctttcacgtttg

SEQ ID NO: 672654 - DNA, 75 bp, Homo sapiens
cagcatgcaacccaaagcgctaattcacagggacctgaaaccaccaaatctcttgcatggcaccaagaatgttac

SEQ ID NO: 672655 - DNA, 74 bp, Homo sapiens
gccaggcccgcagtcctaccccattgtgacagtgcacaagggtctggatccctgaccctgatgaggtatggcgc

SEQ ID NO: 672656 - DNA, 49 bp, Homo sapiens
caccaggtccgcgccaggcgtctcggggcttcagaatggcagaagatga

SEQ ID NO: 672657 - DNA, 85 bp, Homo sapiens
catctcttcggcggtgcgcaaggcgggcatcgcgcaccttgccggtggtggtgtgcacattgagccccggtatagacagttcccc

SEQ ID NO: 672658 - DNA, 100 bp, Homo sapiens
ccacgtctgccaagacagcatgtctggtgtctgacttccagcaactgctggcctgtgccagggtgcaagctgagcactggagtggagttttcctgtggag

SEQ ID NO: 672659 - DNA, 75 bp, Homo sapiens
tatcaagtcccactatcaaggataagccacttgctggtgaaaaggaccccacgaagtgttggatataagccagac

SEQ ID NO: 672660 - DNA, 75 bp, Homo sapiens
ctggatgtgaaatggcggtcggcgaggttttaaaatcaaagatgggaaaatcggagaaaattgcccttccccatg

SEQ ID NO: 672661 - DNA, 149 bp, Homo sapiens
gtcccgtttccctctgtgcggcggccggcgggaccataagggcttaactcatatatttaacccccctccaaaaaatgccatggacaatattaccaggcagaaccaattctacgatacccaagtcatcaaacaagaaaacgagtcaggct

SEQ ID NO: 672662 - DNA, 50 bp, Homo sapiens
agatcatccgggagagcggtaaccagataaagactgtgatgtttgacaag

SEQ ID NO: 672663 - DNA, 100 bp, Homo sapiens
cggcagtgtgaggagctgctatggtgctgagtttcctggtagagccggccgagctgaggcggtcgcggccatgaagaaccgggctgtgggtcggcccaag

SEQ ID NO: 672664 - DNA, 75 bp, Homo sapiens
cagccgccaaagaccccgtccggtactccaaagattcaggtttactcacgtcatccagcagagaatggaaagtca

SEQ ID NO: 672665 - DNA, 100 bp, Homo sapiens
ggagaaacgagatgggggtgaagctggagatatttcggggtctcctatggacagaagtgcgggcaaggagctttgttcctccccgatgtcaccctcccac

SEQ ID NO: 672666 - DNA, 90 bp, Homo sapiens
gctttggaaggctgaatgcactaaacatgaagagcttgaaagcgaagttcaggaagagtgaccgaagtgatgatgacgacagaagcagtg

SEQ ID NO: 672667 - DNA, 97 bp, Homo sapiens
ctaggcgaagatccggactctgggtgttttgctaccgtgaccgtttagattttgaggatgacatgattataacatctgatgtctctcgatatattga

SEQ ID NO: 672668 - DNA, 51 bp, Homo sapiens
gtgattttcagaggggaatgctaagagagttattcccagaacctgtgtctt

SEQ ID NO: 672669 - DNA, 83 bp, Homo sapiens
tgaaaacgtctgcccggcgtagcgggaacccagcatgattttcagggtcctccaccttctgggccccaagttggaggctgatc

SEQ ID NO: 672670 - DNA, 100 bp, Homo sapiens
gccatacaagatggaacaatagttttaatgggaacatacgatgatggagcaaccaaggcagcttttggcaaggagtctgaagttcttattgggaacctgg

SEQ ID NO: 672671 - DNA, 82 bp, Homo sapiens
ctcggcggtggaggactcacttcctgctccatccccggctgggccctggggcggtactgatgctttgggttggaaaaaattg

SEQ ID NO: 672672 - DNA, 51 bp, Homo sapiens
cttccatcaatcatatctcacagttcccagaaatgaatgctatgatcatgc

SEQ ID NO: 672673 - DNA, 90 bp, Homo sapiens
ttctgttttgcctgaatacatgatttaaacaagagatttccacagaagagatggggttttgccatgttgcccagactggtctcaaactcc

SEQ ID NO: 672674 - DNA, 101 bp, Homo sapiens
atatgttggtggtcccagcttcaaagaaatgaatttagataatgggctgtgtgcaatgtaaggataaagaagcaacaaaactgacggaggagagggacggc

SEQ ID NO: 672675 - DNA, 97 bp, Homo sapiens
attctctctcagccagcacagctcaggccagttcgtcggctgccagcaacaatcaccaggaacaggagtacagctgtgtagtaaagatgccttctgg

SEQ ID NO: 672676 - DNA, 99 bp, Homo sapiens
aaaatctttgatcgccatggtcaaaaaagaagtgaaattaacttacctggatttctgctcaggaaagtaggagaaagaagaaagaatacatggacagcc

SEQ ID NO: 672677 - DNA, 75 bp, Homo sapiens
tgggagcagcggtggaagcgaagccaccaaccaaggcaactcagctgatgctgtaacaaccacagaaactgcgac

SEQ ID NO: 672678 - DNA, 75 bp, Homo sapiens
cggcggcggtggaggagccggagcataatggtagctacagcaagctgggtagcaggcagatccaaaggatatcat

SEQ ID NO: 672679 - DNA, 90 bp, Homo sapiens
ggaggagcactgcaagcttgagcaccagcagctcaaactttggaacaaataccgaatttccaacattccatcactaatattcctcgacgc

SEQ ID NO: 672680 - DNA, 100 bp, Homo sapiens
gcacttggaactcctttataagtgtcagctgtgaggttggctttgatatgagtaaagaagctgcaagaaaatgctatgagaaatctggcctgacaccaaa

SEQ ID NO: 672681 - DNA, 75 bp, Homo sapiens
cagccgcacgccgaccggcgccgggagatcctgggtatcgaaggatgatcgcagtgatgtggagagcagctcaga

SEQ ID NO: 672682 - DNA, 90 bp, Homo sapiens
tcagtttcacaagatccggtttcaaatatgagggctacttctacaagtccgaacagccagtccagcaaaatgaacagcattgtctaccag

SEQ ID NO: 672683 - DNA, 98 bp, Homo sapiens
ggaagcattcagtcctctcgatataagaaggaatcaaagtcaggccttgtgaaaccagataaactcaagccatggagggattactgcattacatcaac

SEQ ID NO: 672684 - DNA, 98 bp, Homo sapiens
ccagaggtgcaaggagctgggtatcaccgccctacacatcaaactccgggccacaggaggaaataggacctgggggcctacagttctgccaggaagtg

SEQ ID NO: 672685 - DNA, 82 bp, Homo sapiens
cacttgcttgggatcctttatcctggtcatcttctatttccaaagactccatccccgtgtctacctccctccttggagacac

SEQ ID NO: 672686 - DNA, 98 bp, Homo sapiens
cagacggtgccccatagatggccagctttcccccgagggtcaacgagaaagagatcggaatcctgaagtgggtaaaactgattgacaactttgaaggg

SEQ ID NO: 672687 - DNA, 97 bp, Homo sapiens
gatgatcaagatggctcttcatggaaatgcattgtcaggattttttatcaagcagaaatgcatcgaacaacgagaatcaagatcactgagctaaatc

SEQ ID NO: 672688 - DNA, 51 bp, Homo sapiens
tgctttaaccatcgaaaatgaggcttgagaaggagaaagcagaaattgaac

SEQ ID NO: 672689 - DNA, 78 bp, Homo sapiens
gcgcccgccgacccgcgccctgctccctctcagcacctgggcggacggtaaggagtgccaatggaccgatgcctgcct

SEQ ID NO: 672690 - DNA, 71 bp, Homo sapiens
agccctgtgtgacaccaagataagtaacctttacacggattttgatgaaattcgacaagaaattgaaaatg

SEQ ID NO: 672691 - DNA, 82 bp, Homo sapiens
aaatgaatgaatgtacacacctcattgtgcaagaaccaaaagatttctgcacctaatgaatttgatgtcatgtttaaactgg

SEQ ID NO: 672692 - DNA, 100 bp, Homo sapiens
atcagatgagccgtcttgccaaggtcatttggatccaggattcctagcaagtgacaaaacatctggcaatgcgccactcaatgaagaaattaacattgcg

SEQ ID NO: 672693 - DNA, 82 bp, Homo sapiens
atccgccggaaccgcgtggccctgaagggggactcgggcaagggtgccgaagatagacaagaggcacacagagacagaccaa

SEQ ID NO: 672694 - DNA, 100 bp, Homo sapiens
cgaagaggctggactcggattcgttgcctgaggaatcgagcccactggaaacatggtgaagcagccagccaagttcactgtggacaccatcagcgccggg

SEQ ID NO: 672695 - DNA, 75 bp, Homo sapiens
tcttcacagatggcgatgctgctttggaatttgcagacttctatgattttagccttatgtttgatcatcggccaa

SEQ ID NO: 672696 - DNA, 100 bp, Homo sapiens
ctgacgggcgcccggccggctgcggtccgtgcggaggctgagccggccgcgggcgcgaccggaggcaggcctaaaggggagtggccccagtggcggtagc

SEQ ID NO: 672697 - DNA, 96 bp, Homo sapiens
gaagccttttccgttgccggtgccggcctagcgtcctggaattacttcaatcaatctgtgcagataataatcatgtccggacgtggacagtaacac

SEQ ID NO: 672698 - DNA, 100 bp, Homo sapiens
aaaatggacaacctgctgcgggatcccaaatcggaagtgaattcggattgtttgctgtagtattattgattccacagaatacagccaacctccaggtttc

SEQ ID NO: 672699 - DNA, 100 bp, Homo sapiens
aggaggagatggatgaatgtgagcaggcgctggctgctgagcccaaggccaaggaccccttcgctcacctgcccaagagttccaagttcttcgatttgat

SEQ ID NO: 672700 - DNA, 98 bp, Homo sapiens
gagacagaagagcggggtcggggccggctgaccaggaacctgggcgagcagcggcgggggcccgagggatttaccatatgagccccccaggagatcag

SEQ ID NO: 672701 - DNA, 97 bp, Homo sapiens
tcctttctggaatggaggtcttatgagctgctattgaacacggcaggcttggtggagccagtgaacgtggtggacaatggagatggcacacacacag

SEQ ID NO: 672702 - DNA, 75 bp, Homo sapiens
ctagaacaagaccagctgtggattggcactaaagaccattgtgatgaatgactgtattatccgaggggatctggc

SEQ ID NO: 672703 - DNA, 100 bp, Homo sapiens
gaaagaaattgttaagaaatttcatcctgtaaactatgatgtattcagatacgtgataacacatctaaacaggctggagtgcaatggtgcgatctcggct

SEQ ID NO: 672704 - DNA, 107 bp, Homo sapiens
cccgcgtccgccgattcctcctccttggtcgccgcgtccttggctggcgtggtttccaggcctgaggtgcccgccctggccccaggagaatgaaccagccgcagagg

SEQ ID NO: 672705 - DNA, 50 bp, Homo sapiens
agagcaccaggcccaccgtgaaaggactttctgcagggcgactgcaccaa

SEQ ID NO: 672706 - DNA, 75 bp, Homo sapiens
ggaaaagccatcgtgaaggagctcctggagctgggcaccatcatgggagcagcattgctggaggactggtgaagg

SEQ ID NO: 672707 - DNA, 50 bp, Homo sapiens
gcgaagccatgacgtcagtcagatgccttcaattaagttgcagagttctg

SEQ ID NO: 672708 - DNA, 75 bp, Homo sapiens
agatcagaaagctaccaaacacactgctcagaaaggatgagctttctgatgttagccaaggcggatctaaagcta

SEQ ID NO: 672709 - DNA, 90 bp, Homo sapiens
ccaccaacaacaccacaataatccacagccaagttcaaaagaatgctgaaccgggagctgacacacctctcagagatgagccgatcaggg

SEQ ID NO: 672710 - DNA, 100 bp, Homo sapiens
cgagaatacagagagaaaattgagacggagctaagagatatctgcaatgatgtactggagcaccagcgaaagcagccagtctgagatattgacactacag

SEQ ID NO: 672711 - DNA, 100 bp, Homo sapiens
gggcctgccccccgtgccagacaatgcggacctctctgggctggctattaagacatatctgaagagatggattaagaatgctttggattaaggattgtgg

SEQ ID NO: 672712 - DNA, 76 bp, Homo sapiens
gactcactgacggagaagcagtggctcaaggacacatttgacatccggatcctgatggccaagtctgtcaagtaca

SEQ ID NO: 672713 - DNA, 96 bp, Homo sapiens
atgacattcctgaaacagaagtagaagatgatgaaggatggtcccctcttgctgttggctgcacatcaggaaggctgtgatgggaatgaaggtgaa

SEQ ID NO: 672714 - DNA, 75 bp, Homo sapiens
aaaacgcttttcacgtcacctggagagatgcacaggttaatttggagtggcccctggagtcagtttcctacacca

SEQ ID NO: 672715 - DNA, 75 bp, Homo sapiens
gtgtttccaggaagttcagagagaacagcttgccgggattgctgtccttgccattggactatggctccgattcga

SEQ ID NO: 672716 - DNA, 75 bp, Homo sapiens
ggcaagtcggcgctcaccatccagttcatccagtgtaaacaggaacatcgataagtagtgtaaaaacttgcacaa

SEQ ID NO: 672717 - DNA, 100 bp, Homo sapiens
cattacgttaaagaacgggatgccaagattatttgcatgggtgcaaaagaaaatggtttgccgctggagtatcaagagaagttaaaagcaatagaaccaa

SEQ ID NO: 672718 - DNA, 100 bp, Homo sapiens
gagtctactctgtcgctcttgtgccctagcaccccgagaaccgtcagtttgagccagatggtccagtccaggtgcagcagcaaggagaacattctcagag

SEQ ID NO: 672719 - DNA, 74 bp, Homo sapiens
ggcagagcacaaggagatggaggcagctgtgcggagggtagtggcagccatgaaccggatggaccagaagaagc

SEQ ID NO: 672720 - DNA, 75 bp, Homo sapiens
gctgtgggaaataatgatgtaaagatgctgagccagggaggcggcccttccagcagccatgagggaaggacagga

SEQ ID NO: 672721 - DNA, 87 bp, Homo sapiens
tcatctccagctgcctcagttttcttatcactaaaacagcagccccttcacagatgtagtcactacaaatcttaaattgcgaaatcc

SEQ ID NO: 672722 - DNA, 100 bp, Homo sapiens
cttggtatatagatacttgcaagagtcaggtatattcaagagcaaatgaccaagagccatgtgggtggtggttggctaaagttcggatgatgaaaggaga

SEQ ID NO: 672723 - DNA, 98 bp, Homo sapiens
ggccaagcgaccacccaaagaagatcagtgtactgttacccggacatacctattccttcacaagttctggttcttcagtgctgcttactattttggta

SEQ ID NO: 672724 - DNA, 100 bp, Homo sapiens
tgacttcagagacactgccaagcagccttagccctagtgtagaggttaatttggagtggcccctggagtcagtttcctacaccatccgaggccccaccca

SEQ ID NO: 672725 - DNA, 75 bp, Homo sapiens
gggattcctcacagcgtctggcaggagacagtgtttcacaaaatgattttccttctgaagctcccatctccttga

SEQ ID NO: 672726 - DNA, 82 bp, Homo sapiens
cagttccccagttctggcagattctggaaactgtacattgaagcagagccatccaacatattctttacaatggatgatgtgg

SEQ ID NO: 672727 - DNA, 75 bp, Homo sapiens
ctccactcatgcctgtaaaataaagaaatggtggagtcaatgaagaaagtagcagggatggatgtggagctgaca

SEQ ID NO: 672728 - DNA, 100 bp, Homo sapiens
ggaggtctgggccgcagcgggaccccagttcctccgccaagcgcggccgccgcccccgcctcagtaaggatggggatgataagaagagacctgtgatcat

SEQ ID NO: 672729 - DNA, 97 bp, Homo sapiens
tggaggatgtgcggggtgcgccggcagaggatccagtgttcaccatcctggccccggaaggcttttgaacacttgcagcaattagaattaataaagc

SEQ ID NO: 672730 - DNA, 80 bp, Homo sapiens
ccgagactggcgggggtggacgcccgggccgggctgcgcccgcttcttgcagggtactagatggaaacttgagaaaggac

SEQ ID NO: 672731 - DNA, 50 bp, Homo sapiens
gcaccactgaagtgaccgaatgaggtgttcagctcccgacaggcactgaa

SEQ ID NO: 672732 - DNA, 142 bp, Homo sapiens
atcaagcaggttttaaatcaagatttaacattccaacacataaaaattatttatccaacagctcctcccagaactgctttctgaagcaagtttccaagaagctcttcaggaaagcattcctgacattcaagcgcacgagtgg

SEQ ID NO: 672733 - DNA, 100 bp, Homo sapiens
aacccgcagcaggactacgaactcgtccagagggtcggcagcggcacctacggggacgtctataagaataagaaagccttgagttttgtgaaaaaccgga

SEQ ID NO: 672734 - DNA, 73 bp, Homo sapiens
agagacaggaggcagcagacggacatccagtctgtaggtatattgttagagccatgcagtgaccgtggtgata

SEQ ID NO: 672735 - DNA, 129 bp, Homo sapiens
aaccagaaagtgtggatttgtgtggagcacacattgaatgggccaaggaaaaatcgagcagaaagaatgtctttcaggtggaaaaccatgaattccttgtaaaaccttcatttgatcctaatctcagtg

SEQ ID NO: 672736 - DNA, 100 bp, Homo sapiens
gcggagcttcgccaaggctggcgcagtcggtgctcgcggtgaggatcgatgacctggaccacctcccggagaccaccaccatcgacgcctcctccattgg

SEQ ID NO: 672737 - DNA, 82 bp, Homo sapiens
cgtcccccgcgggtctgctctgtgtgccatggacgggcataatcaccagcaacacccgggacaataatacgggggccaccta

SEQ ID NO: 672738 - DNA, 51 bp, Homo sapiens
cgagcacctcctcgaagtcatcccagtgtagctcaagtggagtacagaagg

SEQ ID NO: 672739 - DNA, 75 bp, Homo sapiens
gcaggtgctggaagaagcacatatttttagtgacaaagactgtgactatggtttgtaaaagaatggacttggtct

SEQ ID NO: 672740 - DNA, 98 bp, Homo sapiens
cagaagcagcgcctgatcgagtccctccggaactcacactccagacccaacatgagtgaagtttcctgcaagaaacgggacgactatttggaatggcc

SEQ ID NO: 672741 - DNA, 75 bp, Homo sapiens
gactgcacttgcgaagggagcttggggaggaactcctctggtgcaagtgtggtagctattgacaacaaaatcgag

SEQ ID NO: 672742 - DNA, 100 bp, Homo sapiens
taaacatggtggacagaaagtcagcctcttgtggtgatgtgctctatgaactccttcagcatattctgaagcagaggaaacctcggattcttttttcacc

SEQ ID NO: 672743 - DNA, 90 bp, Homo sapiens
gcttcctccagacctctcggcgcgggtgacagttaaaggatttgaacctttaattcagtttgcctacactgctaaactgattttaagtaa

SEQ ID NO: 672744 - DNA, 101 bp, Homo sapiens
gtggtcactaggagtatgccagatggaagaaccattgttagtgaacgtggacaaagctgttgtctcagggagcacagaactgtttaaggaagacagagcag

SEQ ID NO: 672745 - DNA, 98 bp, Homo sapiens
tttctcaatggcttggaaccagaaaatatccacatgatgattggacttcctcgttctgcccatcttcctaacaaggctatggctgataacagcagtga

SEQ ID NO: 672746 - DNA, 106 bp, Homo sapiens
ttttgggttggtgaaactggatgtgaaaacaaagtcttgcagtggcgtgcaaactttgcgtaacttattgagcaaggtttccccttccttttctgccgaacttaaa

SEQ ID NO: 672747 - DNA, 100 bp, Homo sapiens
ggagttcatgcttgtgaaggatgcaagattcaagatggaaaaggtgatgtaaccattacaaatgatggtgctaccattctgaaacaaatgcaagtattac

SEQ ID NO: 672748 - DNA, 83 bp, Homo sapiens
cctggctgctggagagttgaatgccagccaccagccatggatagggtctctctctctgccacccaggccagagtgcagttgac

SEQ ID NO: 672749 - DNA, 87 bp, Homo sapiens
gtgggctcctggtgtctctggtaagactttgaccccgacgcaggcttcagtgattgccgcggatcagaagcctgagcactttggctc

SEQ ID NO: 672750 - DNA, 90 bp, Homo sapiens
ccggcacggggcgggcagcggctgcctgggcactatggaggtgaagagcaaggagcctcctcaacaagcccaagagtgagatgaccccag

SEQ ID NO: 672751 - DNA, 101 bp, Homo sapiens
cgctgaacgagagggacacggagcaggagccaaaaacctgtatatcatctccgtgaaggggatcaagggacggctgaacagacttcccgctgctggtgtgg

SEQ ID NO: 672752 - DNA, 100 bp, Homo sapiens
tcaatgtggatgaacttgatacccccgatgaagcagattcttttgagtacactggccatgagtgaaagcagcagcagtagcaacatctccaccatgttgg

SEQ ID NO: 672753 - DNA, 88 bp, Homo sapiens
gacaagttttggtggcacgcagcctggggactctgcctcgtgccgctgagcctggcgcagatcggagcaggtgcagtgattcataccc

SEQ ID NO: 672754 - DNA, 101 bp, Homo sapiens
tcgctttccaaggacaatgtcttcgagaataaccgtttgaagtggctctcttcgcccttcccctcatcgtccttcagccctggcggcctggcacctgagat

SEQ ID NO: 672755 - DNA, 75 bp, Homo sapiens
ggcgacttcaactccgtcggaggcaactcactttgttggagggatgtataggggccatgccacttcattttttgg

SEQ ID NO: 672756 - DNA, 83 bp, Homo sapiens
gggcatgtcgggccgggagatcgctcagctggccgtgtcctggcagggcgtctctggccgagcctctttttgtggaaaacgac

SEQ ID NO: 672757 - DNA, 100 bp, Homo sapiens
cgtcgccgggaccctcgcgcgcgaccgccgaatcgctcctgcagcagagatcatggaagggaagtggttgctgtgtatgttactggtgcttggaactgct

SEQ ID NO: 672758 - DNA, 90 bp, Homo sapiens
ccgacatggaacagggactcactgggggtcacccaacctgcctgcagtttaccctgaacatgaccgaggctgtcaagacctacaagtggc

SEQ ID NO: 672759 - DNA, 98 bp, Homo sapiens
agcttcaagcttaggaccacccaccatgcctatccagatcagcttgaacgggtctttttacgacttggccatgctgaaacagatgaacaattacagaa

SEQ ID NO: 672760 - DNA, 75 bp, Homo sapiens
gccagatggtggaggaatacacttatttatgaactgactgccgtccacctcgtggattctcactactgcacagac

SEQ ID NO: 672761 - DNA, 96 bp, Homo sapiens
gaaatcatgtgaaatgtgtaaagatgctcttagttgctcttcaaaaaatggactcaatgctttcctcagaagctgcctgggtatcgcaatataagg

SEQ ID NO: 672762 - DNA, 90 bp, Homo sapiens
gagattcaatgaagtggccgcacagtatagtgaagataaagccaggcaagggacatcaacgagtgtgatgaggccgaggctgcctccccg

SEQ ID NO: 672763 - DNA, 82 bp, Homo sapiens
gcggcggcctcggcctccggcgcagcccggaaatgtccggcaagatcgagaaagcaggacactgcccatctctaagataaga

SEQ ID NO: 672764 - DNA, 75 bp, Homo sapiens
agaaaatgagcagatactgaatgtaaaccctgcagacatttgaagacagtgatttgttccatttgattggtgtta

SEQ ID NO: 672765 - DNA, 93 bp, Homo sapiens
agcctcagttggaagcagccgatccagcctgcggagcctgtggggcagggacctctactcacggttttctgaatggaaatcaggaacaaactg

SEQ ID NO: 672766 - DNA, 89 bp, Homo sapiens
cgcgaggagccgccgcgcgcccgcgccctccgcgcgacgccaggatgcagcagtctcggccctggctgctctatgcagtgaatattaca

SEQ ID NO: 672767 - DNA, 96 bp, Homo sapiens
gagaagttcatgaccatggtgctggacacctgctggctccctggacactctctgctctgcccctggcagcactgtcaccacccagctgggacctta

SEQ ID NO: 672768 - DNA, 100 bp, Homo sapiens
gccggagtttgcagaggctgcctccgagcgccgtccgccaggaagactccctgcctcctgagtcccaggaggagctttatctttatatactgcccttacc

SEQ ID NO: 672769 - DNA, 100 bp, Homo sapiens
gctgccccggcgcaccgactggaccgggaaggagcatcccaggacctaccagaatctggaattgaatgatctggcacgggaccctccagcacagtgttca

SEQ ID NO: 672770 - DNA, 58 bp, Homo sapiens
gcggcctgcgggcgatcgggccgagggccaattcctgtccccccagcagcatggcatc

SEQ ID NO: 672771 - DNA, 100 bp, Homo sapiens
aaggaaaaactggagagcttcatcaaaaatagtgatagctttgataaggaactgtctgggacctttgctcatctgtgtcagcaagttgacgtcacccggg

SEQ ID NO: 672772 - DNA, 100 bp, Homo sapiens
ctgaacgccgccttggacctcctgggaggcgaggacggtctctgccagtataaatgcagtgacgtgggtgcctgatagacatcctaggactatacagaag

SEQ ID NO: 672773 - DNA, 97 bp, Homo sapiens
gcttctgcctggtgctctgcgtcctcatcgggcttatgttcgagtcagccataatggcaggtgaagaaattaatgaagactatccagtagaaattca

SEQ ID NO: 672774 - DNA, 74 bp, Homo sapiens
ccaggaggagcaagtccgatggagaggctaagcgccaatgagtgccaggagcgccctgttgagtgtaagttctg

SEQ ID NO: 672775 - DNA, 82 bp, Homo sapiens
ctttcagaaacttattcacagttaccaaagctgacaatgcagatcttcgtgaagactctgactggtaagaccatcaccctcg

SEQ ID NO: 672776 - DNA, 80 bp, Homo sapiens
agcttcagacactaaaagacaacctgcagctgcctctacagtttctgtccaggagtggtgacgcctaagctatcactgga

SEQ ID NO: 672777 - DNA, 94 bp, Homo sapiens
ccgagatgacttggatctgcagaacctcattgattttggccagaaaaaggcctccggaatgccccccgctgctgggcagtgatccagcccctgc

SEQ ID NO: 672778 - DNA, 100 bp, Homo sapiens
ggaaagatcatgttagcacacccagaaacttcacacgatgcagaccccaggtgtcagctgtgatgcatgtttaaaaggaaattttcgaggtcgcagatat

SEQ ID NO: 672779 - DNA, 100 bp, Homo sapiens
gaccacacaggcgacgtggggggctcctcctctcacgaagaggacgaggagggcccatactacagcgcactgtcaggcctgggcggatgatgtggagcgg

SEQ ID NO: 672780 - DNA, 82 bp, Homo sapiens
ccaggactcaccccaagggctacaccgagtacaaagtaaccgcgcaggaaaaaggtcactggtcagaacagcaagaagaaag

SEQ ID NO: 672781 - DNA, 96 bp, Homo sapiens
tcgtggccaacacggtcttgctgaaagccagggaagggcgactacgtgcacaagtctgtgtttatcattttcttccaaggcgatcagctgaaaaac

SEQ ID NO: 672782 - DNA, 80 bp, Homo sapiens
atcaaaccagtattcttttcacacaggctggtcgtctgatgataaggaaattagttgcagagaaattgaatatcccttgg

SEQ ID NO: 672783 - DNA, 100 bp, Homo sapiens
aaagtaattggtgtaaaatctgaaggagaaattgtctccagctttaagaccacgacatcgagagctgcctgccagctcgtgaaggagtacatcggccacc

SEQ ID NO: 672784 - DNA, 120 bp, Homo sapiens
agcgggaccccgagcaccgggccctctgcgacctggggccctgggtgaagtgctccgccgcccttgcctccagagctgtaggtaaaacttgcctactgatcagttacacaaccaatgcat

SEQ ID NO: 672785 - DNA, 90 bp, Homo sapiens
tgaggagcttgaggaagcaggcagggaaatgtctgccgccgccggctctcgggagcgcaacactgcagccccaaactggataccacccac

SEQ ID NO: 672786 - DNA, 100 bp, Homo sapiens
gccggatgggcgctgcgggccggggcgcggaccgcggagcggccatatcatggtgacagagtacgtggagcacggacccctggatgtgtggctgcggagg

SEQ ID NO: 672787 - DNA, 136 bp, Homo sapiens
tgatgtgggaatataagtgggagaacacgggggatgccgagctgtatgggcccttcaccagcgcccagatgcagaactgatagtgcatcagctgacccaggtaatttaaaatattcttcatccagagatagaggtg

SEQ ID NO: 672788 - DNA, 76 bp, Homo sapiens
ctgaggacggctcaggagcatgacaagcgagaccctgtggtggcttattactcgtggggtagagcagcggctgcca

SEQ ID NO: 672789 - DNA, 75 bp, Homo sapiens
cccagaggtcgtggaggtggccgtggaggcagaggtggcatgggagttgatctctctaatgtattagatcttcat

SEQ ID NO: 672790 - DNA, 74 bp, Homo sapiens
ggaaatcgtgcacttgcaggccgggcagtgcggcaaccaaatcggcgccaaggagctgctaagccgcacatctc

SEQ ID NO: 672791 - DNA, 100 bp, Homo sapiens
ctacattacaaaaattccatttttcatcgaatagtacagaatggctggatacaaggaggggtcgcaatgtatctgctgagcaaaaagatgaaaacaaaga

SEQ ID NO: 672792 - DNA, 100 bp, Homo sapiens
cataacattcccaaaggtaatgcgatggagataaggaggtctattataagaactccctgcccatccttttaacaagaggcttagaaagagacatgccaaa

SEQ ID NO: 672793 - DNA, 74 bp, Homo sapiens
gaggctgctgggcaggtcatgagtcaccatggtggatccataaagaacccagccaacccgcagagggaggggag

SEQ ID NO: 672794 - DNA, 121 bp, Homo sapiens
gtagtcatttgggaaggaataagcctggaagaaaaagatacaacgaactagcacaacgaggtttcactgttacatgccttgaagtgatgaggaggtttctgttactatatgctacacagca

SEQ ID NO: 672795 - DNA, 51 bp, Homo sapiens
ctgtggagatcatggactatgaaggtattaacaagtaaaggtgacgcgtgg

SEQ ID NO: 672796 - DNA, 98 bp, Homo sapiens
cgcaagttggaacaaggagaagagctatggacacagagaatttttccaagttacagctacctaggttgcagtgagctgagatcgcaccactgcactcc

SEQ ID NO: 672797 - DNA, 100 bp, Homo sapiens
ccgcagagtggacctgcaggtacttggatctccagtgggagctgccctctcgaaggcaggacagcggtggcggcaggcacattgcaagcaacccgtgcct

SEQ ID NO: 672798 - DNA, 100 bp, Homo sapiens
aaagagagggaatatttatggaagacactgcctgggaggaaccatctggattgtaacagcaagttcttttcaagcacaaaagttccaggagagagagaat

SEQ ID NO: 672799 - DNA, 88 bp, Homo sapiens
cccgaagccacacagaagtgaagatggaatccttacctcagtaaaccaccgaagccctcttcaagcagtagaacctatctcaacgtcc

SEQ ID NO: 672800 - DNA, 90 bp, Homo sapiens
catcgccaagcagcaacagctggcagcatcacccccggacagcaagacactttttcaaaaatggcaatggtatcagaattcctcaagcag

SEQ ID NO: 672801 - DNA, 100 bp, Homo sapiens
cagggctttaccagcaactaccccagtgccggggagggttctgctgcttcgaaagctggaatatcctggaaccttcttttgtttgtcagcagccaaggtg

SEQ ID NO: 672802 - DNA, 100 bp, Homo sapiens
taacaagctcctggaggcttctacagattctaaagggaaagatttcctgggagatctacggaatccagaggcagcattgtctccaaccttccgtagtgac

SEQ ID NO: 672803 - DNA, 75 bp, Homo sapiens
tggaccagggcgtgaacgtcacccagggctgtgggacagatgatgtctaccatgttctacccactggtcaccttt

SEQ ID NO: 672804 - DNA, 74 bp, Homo sapiens
atatggagtagttttctctagcaaaggatcaactcactatcctgaaggtccattctcccaagaagaggggacag

SEQ ID NO: 672805 - DNA, 100 bp, Homo sapiens
gctgtggatctcatacgccggaatgtccagctcaatgacgtggcccacctggtacagccgagccaagcagatgcccgggctgtgctgaagtttgctgctg

SEQ ID NO: 672806 - DNA, 100 bp, Homo sapiens
cagacagcgagtggcgacgatgttctccacagacgaaggtcaatgctggcaaacctacacgttcaccagggaccccatctatttcactggcctagcttca

SEQ ID NO: 672807 - DNA, 96 bp, Homo sapiens
gtgactaagatgtttaaagcagaagaacaagttgaaatcatcgcagaaggataaagttcgtcagtttatgatcttcacacaatctagtgaaaaaac

SEQ ID NO: 672808 - DNA, 96 bp, Homo sapiens
gaacttgtcacacacctgaagtgggatgacccatactatgacatcgcccggcaccagatcgtggaggtggcagctctttcgacgtgtagcagcagc

SEQ ID NO: 672809 - DNA, 100 bp, Homo sapiens
cgagttctcggtactcttcagggatgagtcatgtggcagtggaaaatgcgctcgggctggaccagcaggagcaggccgggctctcgccatgggtcactgt

SEQ ID NO: 672810 - DNA, 75 bp, Homo sapiens
gttggttgcagttgtgtagtagttaagctcagatttcttttatccaagatattggaaggctccctctgaagcgac

SEQ ID NO: 672811 - DNA, 83 bp, Homo sapiens
cgggtcatcttttccccagaggcgtcggaatggacctgtgccacccagatgtttccattcctgaaaaacccaagcttagattt

SEQ ID NO: 672812 - DNA, 82 bp, Homo sapiens
tggccctcagggcatccccgttttcggtggacccaagtggagagattgtggaactggcgaaaggtgcatgtccctggaagga

SEQ ID NO: 672813 - DNA, 80 bp, Homo sapiens
agatggtgttacctggagcttaaaaagctgcacgcaagtgttaaacttctggacatggatttgattgacatactttggag

SEQ ID NO: 672814 - DNA, 98 bp, Homo sapiens
aggcaaggagctaaagcagcgtgcgttcagccctgggcagcacaagccagcgaggaggcagtgtcatttcgccgtgaacgcagcacatttaggcgcca

SEQ ID NO: 672815 - DNA, 75 bp, Homo sapiens
tgcccggtgcccgaggaggcagccaagctcatggcctgccactgcgtgccatctggaatcaagagacccatggca

SEQ ID NO: 672816 - DNA, 75 bp, Homo sapiens
tgtgacttgactcttcaaacacaaagaccttaacagtggaagtagaggttgtgatcatctcgaacaggaaagcag

SEQ ID NO: 672817 - DNA, 73 bp, Homo sapiens
gaagaaccggaagaaactgtccgagaagcccaaatactaaggctcgtacgtctgcatcgattatcttacgtgg

SEQ ID NO: 672818 - DNA, 100 bp, Homo sapiens
gcaggtggtctgtgaagccacacagtgtccagatacgaggggtgaagcaagaagcatttcatttgcacatctttcttggacttgggatatacagttccag

SEQ ID NO: 672819 - DNA, 108 bp, Homo sapiens
aactctaccctggaggagattctggggcagtatcaacggagtctccgggtgccggtggtggtgtgcacattgagccccggtatagacagttcccccagctgaccagat

SEQ ID NO: 672820 - DNA, 75 bp, Homo sapiens
tgacagaagagctccagaatgtgaaacaaaccaagatcactccatggatgaaatgacagctgtggtgaaaattga

SEQ ID NO: 672821 - DNA, 76 bp, Homo sapiens
tgatgctgaggagctcctggtcgatgaagaggatgatgtttttggtgaaggttgctcgtgggggccccgcgggcag

SEQ ID NO: 672822 - DNA, 98 bp, Homo sapiens
actgtcattgactcctcctgtgttccagttaataaagcatctacaaatgaggcagcctggggcagaaatcttcttgacagagacacattttctaaatc

SEQ ID NO: 672823 - DNA, 100 bp, Homo sapiens
ctgttgccatgtccgcaccgggacgatcatcctggggacctggtacatgatggagtttcactcttgttgcccaggctggagtgcaatggcgtgacctcgg

SEQ ID NO: 672824 - DNA, 87 bp, Homo sapiens
aggattcagggaataggagctggggagcccttctgcgccacagttctcagcacagatattctacacctcacgccttcacctttaaca

SEQ ID NO: 672825 - DNA, 76 bp, Homo sapiens
cacaaaccaccctttaaattttcaagggaaggacaggaccaaaagatctcagattgctataactgaaggtatattt

SEQ ID NO: 672826 - DNA, 83 bp, Homo sapiens
gatccagcctgcggagcctgtggggcaggtatgccaccatatacaccatgttcccagtgttctccttagtgctggaccaggac

SEQ ID NO: 672827 - DNA, 100 bp, Homo sapiens
ctagctgatgataggggggttccatctcccaacttgtccatgaactacggaagaaaatttggacaggttgatccagaatgtaaagatagaaaatgagagt

SEQ ID NO: 672828 - DNA, 100 bp, Homo sapiens
ggtcgatgaagaggatgatgtttttggtgaaggtatctggtgacccatctcatgggggcagatctgaacaacattgtgaaatgtcagaagcttacagatg

SEQ ID NO: 672829 - DNA, 100 bp, Homo sapiens
taacattccccagctggaagacgtttctcagttcctgcagacccttgtggtagctgttctgcgcttcatacaactgaaaccgaaggttttaaacccgtgg

SEQ ID NO: 672830 - DNA, 97 bp, Homo sapiens
gttcgaagtggctgtgggtattgctgcggctggtgcgtcgtcgctctaggcattcaactcagaaacagacagtttcaagctggcctatggagggcac

SEQ ID NO: 672831 - DNA, 74 bp, Homo sapiens
gaagacgaatcgttaaacatcttaggtcagggcccagtctatggcatgaataggcttccaccccaacagcatat

SEQ ID NO: 672832 - DNA, 100 bp, Homo sapiens
ggtgacgctgggcctgcagcgcggagcagaaagcagaacccgcagggaagtcttctgaccaactggccctccgtccctcctaccataaaggaggaggaaa

SEQ ID NO: 672833 - DNA, 90 bp, Homo sapiens
cagcccaggagctcctggaagatctccgcactctggagcataatgttggcttttcatggcctgccactgaaaatcaagaaagaaccccac

SEQ ID NO: 672834 - DNA, 83 bp, Homo sapiens
actccttcggcagtccacccaccgccgccgcctcccaggtgacgcggcgcacggcgcggatggtggccgagtggcagtgtgtg

SEQ ID NO: 672835 - DNA, 51 bp, Homo sapiens
catatcttcacttggcaaactcaacaaggacacattcagctaacgtatttt

SEQ ID NO: 672836 - DNA, 59 bp, Homo sapiens
tgccttggcgctggccggctacatcgagcccaccttgggacaccttgactccaagccca

SEQ ID NO: 672837 - DNA, 83 bp, Homo sapiens
ctgcaccccaccttgatccagcggacttacggtcctcatcaccgggggcatcgtggccacagctgggcgcttcacccagtggt

SEQ ID NO: 672838 - DNA, 80 bp, Homo sapiens
agaacgccgcgctgcgcatctccaacagcgacctgagcgattcttcgctgctgctgccttaccgccgagaaccaccaccc

SEQ ID NO: 672839 - DNA, 100 bp, Homo sapiens
tttaagagaagaaatggacatgattgcctaaatcagccaaacacaggtaatctatgccagcaattatgacaatgttagcagaccatgcagctcgtcagct

SEQ ID NO: 672840 - DNA, 90 bp, Homo sapiens
tcgccgcggtgcacctgtacctgctgccctggaggaaggagttcaccaccatcaaggtttgggaaaagttcttaagttctgaaacgccgc

SEQ ID NO: 672841 - DNA, 100 bp, Homo sapiens
gcaggcgccgaggaggaagagcgagcccggacggcgcctctcgaacgagtgtgggcgcgaggcagattacctaaaacctcgggcagaagaggagaggagg

SEQ ID NO: 672842 - DNA, 100 bp, Homo sapiens
gctcgacctcgtgaagatccgcttcgccggtgtggatgaggtcaccattgtcaacattttgaccaaccgcagcaatgcacagagacaggatattgccttc

SEQ ID NO: 672843 - DNA, 89 bp, Homo sapiens
gatttggacattgattatattggagtttttaggccaccaaacccttggacaatggcaattatgaatgtattagctgagctacatcagga

SEQ ID NO: 672844 - DNA, 75 bp, Homo sapiens
gggtctcgggggccgctctgggatcccggccaccagcaattgtccggtatcatgatattagctggtttgacatca

SEQ ID NO: 672845 - DNA, 76 bp, Homo sapiens
ctggagcagcagagctgaaggaacccaaacttggactgaagtgactctactaagactttgctgataaactcaatga

SEQ ID NO: 672846 - DNA, 100 bp, Homo sapiens
tcagaatctgctctacccgacttaacagaatgacagggagagagtttttctctcgtttcccagaactctatccttttcttctcaaacagttggaaactgt

SEQ ID NO: 672847 - DNA, 76 bp, Homo sapiens
tcgtctcttacgtctgcggaagtgcagctgcctcagttcttagcgcagctgttgaaggaggatgttcccatcttgg

SEQ ID NO: 672848 - DNA, 51 bp, Homo sapiens
ccttctcagaacttatgcataccgtgacagtatgttgactgctgtctctgt

SEQ ID NO: 672849 - DNA, 83 bp, Homo sapiens
ttgcaagtgggagcactggaagtacgggcagttgcagtgttggagctaaagaactgtggctgcaccatctgtcttcatcttcc

SEQ ID NO: 672850 - DNA, 100 bp, Homo sapiens
agatcaacttcctcaggcagctatatgaagaggggatttcccggtcccatggggagatcacagaagagagggacatcctgagccggcaacagggagacca

SEQ ID NO: 672851 - DNA, 74 bp, Homo sapiens
caaaaacattcaagaatgagagcgagaacacctgtcaagggtcagccagcagccggcccggggtgtcagccacc

SEQ ID NO: 672852 - DNA, 78 bp, Homo sapiens
tccgccgccgcctgaggaggcgagctagccgggagttacaccgccaccgccaggtggctattatcatggaaaactaat

SEQ ID NO: 672853 - DNA, 50 bp, Homo sapiens
cgggaggtcaacgaggtcatccagggagaagaagagtttgatatgcctca

SEQ ID NO: 672854 - DNA, 73 bp, Homo sapiens
gaaaaaaatttgctggatattgatgcgccagtcactgacagagctcggatagagagtccagccttttctactc

SEQ ID NO: 672855 - DNA, 100 bp, Homo sapiens
cactcatcagattggctgccagtatttgaagaacccaagtgattcagcagtgcacagcccctttacaaagcgccaggcttttaccccatcttcaaccatg

SEQ ID NO: 672856 - DNA, 75 bp, Homo sapiens
atatccatgtcggcttgtagagagattgcatacctcctaaatggctctactttgaacctgctgggcaaggaagag

SEQ ID NO: 672857 - DNA, 100 bp, Homo sapiens
gcccgccgcagggcgctgacggtcccgcacgtctgccgctgccaccggcgcgcccgagcacattcaggaccccgcgagccagcggctgacgtggaacaag

SEQ ID NO: 672858 - DNA, 113 bp, Homo sapiens
tgcatgtatttggaacaaaaaaaggagatgcctggcagccccgctctctgcagttatgatgtgattgctcaagcccaatctgggactgggaaaacggccacatttgccatatc

SEQ ID NO: 672859 - DNA, 95 bp, Homo sapiens
ccctgagcaagatttcctgggtcaacaggttacatttggccaaaatcggactccgtcaggccggctccggcgtcaaacccaagccacaagtctac

SEQ ID NO: 672860 - DNA, 96 bp, Homo sapiens
gctccgtggccttagctgtgctcgcgctactctctctttctggcctggaggctatccagccaaattcaacacccaacagcttccttaatagcaaag

SEQ ID NO: 672861 - DNA, 76 bp, Homo sapiens
ctcattttcacatctctcctgaatggatcacagcgtcgcagatgtctttggaagatgagaatgtgcctactgctcc

SEQ ID NO: 672862 - DNA, 82 bp, Homo sapiens
ccgccgcgtgggcctgcagcgcctcgccgctctctcttccccaggaatctacggcggatccggaagtgtcaacgtggtcgag

SEQ ID NO: 672863 - DNA, 100 bp, Homo sapiens
ctgcaaccccgcagagcgcatccatcaaagctttgcgcaacgccaacctcaggcgagatggatcctcagtcttccacaatgaaccctgtttacagccccg

SEQ ID NO: 672864 - DNA, 135 bp, Homo sapiens
ttattaaccacttaacctctcagaactgaacaaagacaacattgttcctggaacgccctctttttaaaaaagaaactggcgatggaatatgagaggagccctctggaaagaaaaggacagaccctgtgctttcat

SEQ ID NO: 672865 - DNA, 100 bp, Homo sapiens
ggtgcagaaataccagtccccagtgagggtgtacaaatacccctttgaattaattatggctgtggatgcccggagcataccagtgttagcaaaatggcaa

SEQ ID NO: 672866 - DNA, 100 bp, Homo sapiens
agggaaagtgccgctttaaggagaactgcagttgcagaggaaagtggtcgcttatggtcagaggagcagcctgctcaccctctccaggtgggggctgtgt

SEQ ID NO: 672867 - DNA, 90 bp, Homo sapiens
ctcccgcacccgggtctgcagtccctccgccatctcgcaggatttctataattggcctgatgaatcctttgatgaaatggacagtacact

SEQ ID NO: 672868 - DNA, 86 bp, Homo sapiens
tgagagccggacgggcactgggcgactctgtgcctcgctgagggattttttatcaagcagaaatgcatcgaacaacgagaatcaag

SEQ ID NO: 672869 - DNA, 77 bp, Homo sapiens
ggttctgggaaaacaacattgtctcgattcctgacattcagacaactgacttgtaactgacttataactgacttgta

SEQ ID NO: 672870 - DNA, 82 bp, Homo sapiens
ggcgggtgaagctgcagctctggttgaagaagcctcagcggaggcgatacggcctcctcgccaacactgaggaccccacgga

SEQ ID NO: 672871 - DNA, 75 bp, Homo sapiens
aggcgggagacgagaagcctgaaaagtcgcagcgagctggagccgccggaggatcaaaatacttgctggatggtg

SEQ ID NO: 672872 - DNA, 99 bp, Homo sapiens
gacaaattttttataatgcatcattgtgcgtccctgtatgcatactaccttgtactggaaagaatacccacctcatgtccaaaaagttgaaattaatcc

SEQ ID NO: 672873 - DNA, 83 bp, Homo sapiens
tgatcaggatttttggcctaccctccaaagaaaaggacttaaccaccaccatgtcgagcaaaagaacaaagaccaagaccaag

SEQ ID NO: 672874 - DNA, 50 bp, Homo sapiens
gccagagggctgaggtggagaggaagccatcttcgacaagagcacaggga

SEQ ID NO: 672875 - DNA, 82 bp, Homo sapiens
attagaagagcctgggaacttggtttaatgaacacacacattccagagaactgtgatggaaaatccccactcactgctcacg

SEQ ID NO: 672876 - DNA, 80 bp, Homo sapiens
gaccgagaccgtgaccgagagcgtgaccgagagcgcgaatatcgtcatcgttagaagtgtttgcagaagccaaacctgac

SEQ ID NO: 672877 - DNA, 100 bp, Homo sapiens
attttggccaaaccaaccgcacccctgaatttctccgcaaatttcctgccggcaagacggtctggaaaatcccgaagcagaagcccgtattcatctaggc

SEQ ID NO: 672878 - DNA, 71 bp, Homo sapiens
ctacatccagcacaagtgctacagcgatgcagccgccaagaagcagatgcggcccagaagcttctagagga

SEQ ID NO: 672879 - DNA, 75 bp, Homo sapiens
gccatggcgacatcctcggccgcgctgccccgaatactcggcgcgggtgagaagccctaccactgcaactgggac

SEQ ID NO: 672880 - DNA, 101 bp, Homo sapiens
ctacaccctcacagtttgctctgctcttccaacaccagtggaagatgatcacatcccagaagagtcaagtaccattggccaggatcaaacgcttatggaac

SEQ ID NO: 672881 - DNA, 100 bp, Homo sapiens
ccacccttctactttctgtctctaggaatttcactactctagattgtaaaccatggctgtgtggatacaagctcagcagctccaaggagaagcccttcat

SEQ ID NO: 672882 - DNA, 109 bp, Homo sapiens
tgagcggcgagtttccgatttaaagctgagctgcgaggaaaatggcggcgggagatgcctgaggaaacccagacccaagaccaaccgatggaggaggaggaggttgaga

SEQ ID NO: 672883 - DNA, 124 bp, Homo sapiens
ccagcaacgtccatatggtgaagaagattagcatcacagagcgaagctgcgatggagcagcaggctgggaagagatgctgatttctgcgataaaatcagtaggtacattttttggaatgttcgc

SEQ ID NO: 672884 - DNA, 75 bp, Homo sapiens
ttctccaggatggcagaggcggaattgcacaaggaaaggctgcaagccatagcaaaacctctgcgccatgagagc

SEQ ID NO: 672885 - DNA, 101 bp, Homo sapiens
aaaagaccctttactctgtggaaatggctcagatgcaggacatatctgaagagatggattaagaatgctttggattaaggattgtggagcacatttcaatc

SEQ ID NO: 672886 - DNA, 78 bp, Homo sapiens
ggctctgcagttaacgggaccagctctgcggaaacgcattccctgggatgaaaaaccctgctcaagcctgggtacagt

SEQ ID NO: 672887 - DNA, 50 bp, Homo sapiens
tttctttccctgcaccaactagcaggtccaatgatgcatcagcagcctcc

SEQ ID NO: 672888 - DNA, 110 bp, Homo sapiens
gtttctacctcaaggacatggagcgcttgaaagaggaaggtgctcgggtcttcggggcactgggtcccatcggtccctcctcacctgggctcaccctcgggggtctggcc

SEQ ID NO: 672889 - DNA, 100 bp, Homo sapiens
caaaggcaaggatttggacggtttctcattgatttcaggcaagtgtccagagaatggctgggatgaaagtacacttgaactctttttacatgaacttgca

SEQ ID NO: 672890 - DNA, 100 bp, Homo sapiens
gattgaggactgccagctggcgctgcaggcttcctggactgggtccccaagaagatgcagcgggtgggctgtgtggagctgctcaacacggtgcagaggc

SEQ ID NO: 672891 - DNA, 100 bp, Homo sapiens
cctgcctcagcctccaaagtagctgagactacagtcataccctaatgatcccagcaagataatgtcctgtcttctaagatgtgcatcaagcctggtacat

SEQ ID NO: 672892 - DNA, 82 bp, Homo sapiens
ttactgatgggaatttttgaaatgggctgggaaaagccatctcctattcaggctcggttttccgggacgagtttgatctggc

SEQ ID NO: 672893 - DNA, 75 bp, Homo sapiens
aggccacgtgaagatgctgcggctgagaggtggagaagagcgagtacttgagaaagaagaggaagaagatgatga

SEQ ID NO: 672894 - DNA, 98 bp, Homo sapiens
tgaagaccccgaaggaaaaggaggaattcgccgtgcccgagaatagctccgtccagcagagttcctgagttggaggtagaagaagaaacccaagttca

SEQ ID NO: 672895 - DNA, 100 bp, Homo sapiens
aaattccctaaacattttagatgatgattataatggacaagccaagatccactgtgtgtggagagtaatgcagcatcatgccaacagtctccagccagta

SEQ ID NO: 672896 - DNA, 100 bp, Homo sapiens
tacggtcatgagcttttgattaacaccttaataaccagcggagctgacacagccaagaagttggccttgtacttgcagctatattggcactactactggc

SEQ ID NO: 672897 - DNA, 110 bp, Homo sapiens
tgtcggattactcttcccaatgatgagacgcgtgtgaatgcaacgatggaagatgtgaatgactggctgactgaactctagaggaacttgatacagatgaatatgaagaa

SEQ ID NO: 672898 - DNA, 75 bp, Homo sapiens
agataatgaatgtcgaatgtgactgactagcagcttcattttgaattactccacaggatccgctgaacataggat

SEQ ID NO: 672899 - DNA, 75 bp, Homo sapiens
gccagttgcttgatcaggtggaacagattcagaaggagcaggattaccaaagggaccctgatgcttggtgtgacc

SEQ ID NO: 672900 - DNA, 100 bp, Homo sapiens
aaatgctccacctgtaagaacagaaaatcgtcttatagttgagaatttatcctcaagagtcagctggcagttctgcctcctgggggcattgctggccccc

SEQ ID NO: 672901 - DNA, 80 bp, Homo sapiens
gttggagggacagccccaggatgccgtgggccgcagccactcaggactgtcaaaggtttaactatagatcaacacatcat

SEQ ID NO: 672902 - DNA, 75 bp, Homo sapiens
aaataatagcaagatatgtaccattgtagatatagttgtaggtactccgggaagactagatgacttggtgtcaac

SEQ ID NO: 672903 - DNA, 83 bp, Homo sapiens
cggcttctgagacggcggcagcagcggcattcaggggttggccggagacctacgacatgaatacctcggagcccaagacggag

SEQ ID NO: 672904 - DNA, 75 bp, Homo sapiens
ccgcctcttggtttgcgtcctgcactgaaaggaaatgacggattttacttcccaagtaagaagcggaagaggagc

SEQ ID NO: 672905 - DNA, 100 bp, Homo sapiens
tgcagagttggtgagcagcgctctggggctcgccttgtatctcaacaccctgagtgcggatttctgctatgatgacaggccctcgggaccaaggatcacg

SEQ ID NO: 672906 - DNA, 95 bp, Homo sapiens
agaactgctctccatggagagagtaactctgtccttattatcggaccccgaggatcaggaaaaactatggctccagcaggagaagacagacacgg

SEQ ID NO: 672907 - DNA, 83 bp, Homo sapiens
cttggagaaaaggaaagctccatcaaagaggacccccagccagcccggttctcggacgacagccaagagcacaagatcatcct

SEQ ID NO: 672908 - DNA, 90 bp, Homo sapiens
agaaaaagagagaaaaggagccagaaaagccggcaaaaccacttacagctgaaaaggaggccaaacctgattttgtaccctctagtggtc

SEQ ID NO: 672909 - DNA, 100 bp, Homo sapiens
gcctttcagaaagtggctgacatggccaccaacacacgtgctgcgcagttggacagcattggcttcagcataatcaggaaatgcatccatgctgtggaaa

SEQ ID NO: 672910 - DNA, 50 bp, Homo sapiens
ccaccgtgcacatccgaatgggtttttgattggtcaaggagcacatgtag

SEQ ID NO: 672911 - DNA, 100 bp, Homo sapiens
tcagctcagtgctgtgcgggccagatcaagaagttggtatatgtttacctggttcgatatgctgaagaacagcaggatcttgcactcctgtccataagca

SEQ ID NO: 672912 - DNA, 50 bp, Homo sapiens
gtattccaaatttgatggcaagggatgggcgtgttttgggcgtgctagag

SEQ ID NO: 672913 - DNA, 100 bp, Homo sapiens
caaagaagtgaccaaaaagtcatctacatttcagattcaattagcagagcctcacagacaatggccaaatgtgtcaaagctgtcacagagggtgcccagg

SEQ ID NO: 672914 - DNA, 76 bp, Homo sapiens
cagagaaatgctaaagcagtactacattggtgatatccatccggttgactacagacaaaaagctgctgcagcaggt

SEQ ID NO: 672915 - DNA, 90 bp, Homo sapiens
cgaggccctcatgtaccacacgccaacaagtcccaaatttggaaaagctgactcatatgaaaagctggaaaaactaggggaaggatctta

SEQ ID NO: 672916 - DNA, 80 bp, Homo sapiens
caaatacacacactgctccagccacagtggttcttgtgtcaagacttaaacaggcacaatcaaaaccatctcagtcagaa

SEQ ID NO: 672917 - DNA, 82 bp, Homo sapiens
gatgggctttgctggaattgctgtaggtgcagctatgcatgccaatgaagatgtggaaagaatgttactaggaaacaagtgt

SEQ ID NO: 672918 - DNA, 83 bp, Homo sapiens
gtttctcctgaactgctcttggtctccatgaaggctactggcaggagcacatgagagaggatattagaaatggctactcccca

SEQ ID NO: 672919 - DNA, 75 bp, Homo sapiens
ttcagcggcattcaacaaatggcaggagcccagcagccggggccgccctattacaccgacccaggaggaccgggg

SEQ ID NO: 672920 - DNA, 83 bp, Homo sapiens
ctgtgcccaccagctccccatcgcagaggccatgctgacctacaagcagaagagaggctgtggccaggccagctgggctcggg

SEQ ID NO: 672921 - DNA, 83 bp, Homo sapiens
ctctggaccttgtctcgctcgggagcggaaacagcggcagccagagcaaattgtggctactaatttgccccctgaagatcaag

SEQ ID NO: 672922 - DNA, 75 bp, Homo sapiens
aaacttaattctagatgctgagggttaccttaaattgttactccacaggatccgctgaacataggatgttgccac

SEQ ID NO: 672923 - DNA, 90 bp, Homo sapiens
aagtttactccagataccaccagtgatgtggcagccggaatgcttattcctcacacttatccagctggacacctgttctgctgttgtgtc

SEQ ID NO: 672924 - DNA, 50 bp, Homo sapiens
agcctctgcctcccagaaactcagcatccgcacttccactaatagccaag

SEQ ID NO: 672925 - DNA, 100 bp, Homo sapiens
aatccatgctgtggctaacattggcacggcactcaagttcctcgaaggaagaaagcatcaggcactggccaagatgatgctgatggccactcagtgtaca

SEQ ID NO: 672926 - DNA, 82 bp, Homo sapiens
cggaagaagagagaatgggcggcggggactggccacggcgctgctaggttcaagaagacgtggaagctgcgggctctgaagg

SEQ ID NO: 672927 - DNA, 138 bp, Homo sapiens
atggtagcggcagcaaaatatgcccgagctgagagagagctgaaaccagctcgaatatatggattgggatctttaggaatgtatcctgtcaggtataatgtcagtgaatggcaagaaagttcttcatatggatcgaaa

SEQ ID NO: 672928 - DNA, 82 bp, Homo sapiens
tttggggtcagctggtgcttttataaattatgaaaaaagttgagaaggtaaccatcatgagcaacttgagttggtggaacca

SEQ ID NO: 672929 - DNA, 80 bp, Homo sapiens
agcccgtccgtccgccgccaccacccactccggacacagccgtgttgccgcccgctgtgctatgagcagtcagagcgccg

SEQ ID NO: 672930 - DNA, 100 bp, Homo sapiens
tatctctgtgtcaaggccatgatcctgctcaattccaacgttccatcctcagagcagcctgaactgttcctaaagaaacttcagcagtgctgtgtcattt

SEQ ID NO: 672931 - DNA, 100 bp, Homo sapiens
gaagtgctccactcgaacagatgtgagcgagaaagccgttgcctccagcaccacttctaatgatgctggcatcaccatctacatcaggtcagctgtctca

SEQ ID NO: 672932 - DNA, 75 bp, Homo sapiens
agctggagctggagctctcggagggtaatggaactgctggtccatctgaataaacgtataaaaagccgccccaaa

SEQ ID NO: 672933 - DNA, 104 bp, Homo sapiens
gcccatgcccgtgtgccccctgccatcgtgcagatgctgctggtgctgcagctggacccacaaaccgtggagaccaagaactggcacacggacgtgattgagat

SEQ ID NO: 672934 - DNA, 76 bp, Homo sapiens
ctgtacagggatgtgatgctggagaactgcaggaacctggcctcactaggtagtgggcagcagtcagtgacaggtg

SEQ ID NO: 672935 - DNA, 101 bp, Homo sapiens
atctttcttcactcctcttcacttcttcagagcaatttacagcaatgagggatttatacatgaaaaatggacaaggatttgcattagtttattccatcaca

SEQ ID NO: 672936 - DNA, 100 bp, Homo sapiens
tgtgcacctcaacactctgggggtgtattttataggagaactgtggcacaaagaggattctgtttctggcgtctgcatacgcaagtccccaactcgctga

SEQ ID NO: 672937 - DNA, 90 bp, Homo sapiens
gccaggcatcttaaccaagaagttgcagttcgtgcaaatcagttggggtggtccaaaagagatgccagctccaaggctctcaggcccccg

SEQ ID NO: 672938 - DNA, 90 bp, Homo sapiens
tgatgattcttcctgtgcttatcatgattgctctcccctcccctagtatggaagacctgtcatttactccatcctttatagtgatgctac

SEQ ID NO: 672939 - DNA, 98 bp, Homo sapiens
ggaggaaagcgggaagactcatcggagcgtgtggatttgagccgccgcattttttaaccctagatctcggctgatgggaaccaccctgtagaggtcca

SEQ ID NO: 672940 - DNA, 75 bp, Homo sapiens
tcattggtgaggtgctatctcggagacacatgaaggtggcattttttggcagctggaaacaacgtggaggtagat

SEQ ID NO: 672941 - DNA, 100 bp, Homo sapiens
acttcatcaagaacatgaggcagtacgacaccaggaacagcaggcgcttgaagaggctcagaaagctatccaacaactctttggcaaaatcaaagatatc

SEQ ID NO: 672942 - DNA, 50 bp, Homo sapiens
tgcagtccctcgtccagccacccccagattagtgacaagagctggggtta

SEQ ID NO: 672943 - DNA, 75 bp, Homo sapiens
cacgagttccaggagaccaaggaccagctcaccacggagaacatcatccttgtagagacagggtttcaccgtgtt

SEQ ID NO: 672944 - DNA, 90 bp, Homo sapiens
tgacaagcgagaccctgtggtggcttattactgctgagaagaaagccaaggtcattgcaggaatgaatgctgtggaagaaaaccaggggc

SEQ ID NO: 672945 - DNA, 100 bp, Homo sapiens
cctgatccggttcttggtgcccctgggcatcaccaacatagccatcgacttcggggagcaggtgcaatggatgagcttcatagtctggatccaagaaggc

SEQ ID NO: 672946 - DNA, 83 bp, Homo sapiens
aactggactgtcctctacagaaggaagcacaaaaagggacagtcggttgaaattgtaacacacactggaccccatagacgtct

SEQ ID NO: 672947 - DNA, 88 bp, Homo sapiens
ttctttttcttctgcccagtatttgcagcagtaacagcacagtttgcagctcaccttgtgaagatgaaatatccaagaatctgtattc

SEQ ID NO: 672948 - DNA, 98 bp, Homo sapiens
cgttgggctccgggaagccgttcgggctggggctgtcggccgcggggcggaggcactcgcgcgggggggactttgaacatgtcggggatcgccctcag

SEQ ID NO: 672949 - DNA, 100 bp, Homo sapiens
cacccgctgccgggcaccgaggaccagctcaatgacaggacagcggggattttcagtttgattgacaccctgtggcccccagcgatacctctgaaaacac

SEQ ID NO: 672950 - DNA, 100 bp, Homo sapiens
tgaggcctggaatttgattaactcattcaaggttacccagttgatcattcaacttcaagtggcacattatcttttaagcctagtcaatcattgattactc

SEQ ID NO: 672951 - DNA, 135 bp, Homo sapiens
tggaacagaggttatccaggccaaggcagcttgctctgggaccgtgagagccgtggtactgcagactgggtaaaggagctggaagtgcgaaaattgatgcatgtgagaggagatggaccctggtattactatgag

SEQ ID NO: 672952 - DNA, 113 bp, Homo sapiens
ctactgcgtggtgtgctttgagaccctgttcgccaacacctgcgaggagtgtgggaagcccatcggctgtgactgcaaggaaggcgtggaagtgcgagtggccagaatcttca

SEQ ID NO: 672953 - DNA, 83 bp, Homo sapiens
ggtgaactctgtccagttttcaaaccacacaggacccgtgcatctcttccgactctcgggcaagtgcttcagcctggtggagt

SEQ ID NO: 672954 - DNA, 100 bp, Homo sapiens
aagtcagttgttgcatcaaatacttcatatttggcttcaatgtcatattttgggtaatgaatttgggcatcctgaatggttagacttcccaagaaaagga

SEQ ID NO: 672955 - DNA, 83 bp, Homo sapiens
cagctggtggtcctggtctacgtcatcggactagacgcttgaagcaaagctgccatcccagaagacgacatgctctcagcaac

SEQ ID NO: 672956 - DNA, 96 bp, Homo sapiens
ctctacccagaattcaattaaagtggctcagggttcatagtggcgtcatgcacgcagactcctgcaagttcccctaagttcttagaggactgcttt

SEQ ID NO: 672957 - DNA, 83 bp, Homo sapiens
caatctcacccaattactctgctcagatgtggaagatgtgaaatttgtcatcaattatgactaccctaactcctcagaggatt

SEQ ID NO: 672958 - DNA, 80 bp, Homo sapiens
tgctgcccgcctttgcttcatctacagtcaggatgctggatgttcatggagtgagtttggaaattttagcattcaggtgc

SEQ ID NO: 672959 - DNA, 75 bp, Homo sapiens
agggcgcaggagcgggactgagagcgcctggaggctcgagcggaggcatattggaccagctatcccagaagtcag

SEQ ID NO: 672960 - DNA, 100 bp, Homo sapiens
cacgggactgcagccaggtccaatcttacaagtctcaagtcttctctgcagctttaccggatccccataggcactgagatagaagggatgaacattttag

SEQ ID NO: 672961 - DNA, 100 bp, Homo sapiens
actacaagcccaccaagctaaagaggctgcccagaaagcagttaacagtgccaccggtgttccaactgtttaaacacttcactacgcttagcagatgtcc

SEQ ID NO: 672962 - DNA, 83 bp, Homo sapiens
cagctgctgagttctcggtgaagaaaaggtatagtttggcagtggggcctccaaaaaaagacccaaaagttaaaggtgtccaa

SEQ ID NO: 672963 - DNA, 51 bp, Homo sapiens
gggagagcaaacttggctcagcccagtatcagcagatgttgcacacaaact

SEQ ID NO: 672964 - DNA, 99 bp, Homo sapiens
cttccctgtccatgtgtcggaagaggagaaggcagagcccccccaggctatgaatgccctgatgcggttgaaccagctgaagccagggctgcagtacaa

SEQ ID NO: 672965 - DNA, 101 bp, Homo sapiens
tagttgcgctccatggacagatcaacgaacctggacattgaggagctcaagctcccggagccctgcctgttccctgtccatccaggccagcagctgaagga

SEQ ID NO: 672966 - DNA, 50 bp, Homo sapiens
gtttcagccagtgcatgaccttactattgcatccacccaacccaccagta

SEQ ID NO: 672967 - DNA, 126 bp, Homo sapiens
cagagggccacctccttgcctgttcgcagtgctctcagtgctatcacccttactgtgtcaacagcaagtctctggcatctctatcccctatgaggcaccacgtaagacctcctgcccttagctctc

SEQ ID NO: 672968 - DNA, 100 bp, Homo sapiens
ttgcgccccctgctggtttcctgccctgtctgttgaaatcacaaagattagacacctttttagataggtgttcttcagcaccactgacaacacggttctg

SEQ ID NO: 672969 - DNA, 50 bp, Homo sapiens
gaggtagttccttcgcggtggagaggttccagaatctcagcttttacctg

SEQ ID NO: 672970 - DNA, 75 bp, Homo sapiens
atcgcttcaatgatgggaaggtggatcccgccgggaggtactttgctgctggtggagctgtctaaggctcaagat

SEQ ID NO: 672971 - DNA, 100 bp, Homo sapiens
cgcggcgccagttctccggcgggaaggaaaaccgcgcagagagtgcctacaccaactaatgttacaattgaatcctataacatgaaccctatcgtatatt

SEQ ID NO: 672972 - DNA, 75 bp, Homo sapiens
ggctccttaccagctcacctctcaccgcgcatgtttggagaaacttgtggtggagaatgttgatgtgttaacaca

SEQ ID NO: 672973 - DNA, 96 bp, Homo sapiens
ctgctcctgctggccgcctggacggctcgggcgctggaggttcatgcatgggagatctcagaccagttgttacagatccggcaggatgtggagtca

SEQ ID NO: 672974 - DNA, 74 bp, Homo sapiens
atgaagagaaaggcccggagactgtgttggggatgtcctttgcactgaccctgaactgccagattgacaaaacc

SEQ ID NO: 672975 - DNA, 83 bp, Homo sapiens
ggagtcttgagggacccccgactccaagcgcgaaaaccccggatggtgaggagcagaaagaatcttcaagagggagacatagg

SEQ ID NO: 672976 - DNA, 75 bp, Homo sapiens
agtctttccaaaaggtcaaggttcacaagacatatcaagtggatttgaagcccaatgggtcagaaataatggtca

SEQ ID NO: 672977 - DNA, 100 bp, Homo sapiens
ctgctgtttgcatttttggctgtctccctggtgcgtgtatttgcaccatatgcctgtggctctggcataccagaggataacaaagccattgacctttgcc

SEQ ID NO: 672978 - DNA, 97 bp, Homo sapiens
tgtggaactgatgtttaaaatcattggaccatttagtaagaagaattccagtcttataaagtatcagcagatgttgcacacaaacttggtatacctt

SEQ ID NO: 672979 - DNA, 50 bp, Homo sapiens
ccgggcgcaatggagcggaagaggctggcgcccatgcggctctacacgct

SEQ ID NO: 672980 - DNA, 75 bp, Homo sapiens
ctcacattgtccctgtgtctagcagtttcagagctgaaccacaatctctacgaggtgatgagcaaactggagaag

SEQ ID NO: 672981 - DNA, 101 bp, Homo sapiens
gaagactattcagaaaaagatgattgacgctattgacatggtacatcgtaacaagtccgaaggattcttccttgatgcatctcgacacatccttgaagcac

SEQ ID NO: 672982 - DNA, 100 bp, Homo sapiens
cggcaccaaggcccccaagccctccttcgtgtcgtacgtacgccctgagttgcagaatgaagaagagtctggagaacctgaacaggctgcaggtgatgct

SEQ ID NO: 672983 - DNA, 96 bp, Homo sapiens
agaaacccaggaaatcgagactcatgactcccagagaggatggcatctagaaggccccaatacctatgaagacgcagccgcctacatccaagcaca

SEQ ID NO: 672984 - DNA, 75 bp, Homo sapiens
cctaccggtctgtcagtgagatggcttctaacaagggacagtatgatttggtgaaatgcctggctcctattcgag

SEQ ID NO: 672985 - DNA, 51 bp, Homo sapiens
agcaatatctctgggctttcacaggggcttagggaaggccgagccagcctg

SEQ ID NO: 672986 - DNA, 97 bp, Homo sapiens
tagtcggcctgatggcttagaggactctgaggatagcaaaatcccttcccactggaggcatgtgatgagaggaaatcaccgaaaacgtggctgcttc

SEQ ID NO: 672987 - DNA, 82 bp, Homo sapiens
gaaaatgaaagctggctcacgaacaggcaaaccacaggaaaattgggccgatttccacctatgatgcatcatcaccaggcac

SEQ ID NO: 672988 - DNA, 75 bp, Homo sapiens
gagaaggtgcttgtggaagggggcccggctccctaggcgtcccatctcggggtctaatgtgatggaagagcagga

SEQ ID NO: 672989 - DNA, 96 bp, Homo sapiens
tggaagtccaagtcaaacgcagaaggactgcctcactgagcaaccaagacttcgggctcagaatcaggttctgaaaaaaggtgttgtggatgaaca

SEQ ID NO: 672990 - DNA, 75 bp, Homo sapiens
ccggaggagagactgctggagacatggggaaactgagacagggaaaattaagctcattttcgaggatggcttgac

SEQ ID NO: 672991 - DNA, 75 bp, Homo sapiens
cacagtagaactgctgcatctgcaacaacagcagaaatttggagagcttgtaatgaccaaagaatcaaaggcctt

SEQ ID NO: 672992 - DNA, 98 bp, Homo sapiens
gctgggcctccagacactatttcattagcctcagaacgatatgataaagacgatgaagccccctctgatggggatgagctgaccaagatggaggacga

SEQ ID NO: 672993 - DNA, 83 bp, Homo sapiens
gccaagaggcaaaggggaggttacgcagcaaaccatccagaaggaggaatcattatagattctaaaaatatattttcccttct

SEQ ID NO: 672994 - DNA, 90 bp, Homo sapiens
gtggtggaggcggcctctctggcagcagacatcagccacgcatctgaccttgttggctggccactcagtactccttgtccctggcctcgc

SEQ ID NO: 672995 - DNA, 100 bp, Homo sapiens
ccagctcgcgcttcagcgtcccggcgccgtcgcgccactcctccgaggtttcgaaaaaacgatgaaatgaaagctatggatgttttaccaattttgaagg

SEQ ID NO: 672996 - DNA, 100 bp, Homo sapiens
gagtgaagaacgccgccatccagccaccattccaagagctgttcctttgggtaccatgctggtggctggggcaaacctccagtggatgagactgggaaac

SEQ ID NO: 672997 - DNA, 76 bp, Homo sapiens
tcatcctggtcactagcggactcttcttcgccttcgattttcaatggttccagcaggtcaacacgggagaaggaac

SEQ ID NO: 672998 - DNA, 146 bp, Homo sapiens
agccgcagaagagccagcggggtcgcctagtgtcatgaccagggcgggagatcacaaccgccagagaggatgctgtgagagacaagagagacacctccaacttcgacaaagagttcaccagacagcctgtggaactgacccccact

SEQ ID NO: 672999 - DNA, 112 bp, Homo sapiens
tatctgtcttcggtggactccttcggcagtccacccaccgccgccgcctcccaggaaggaacaccagccagccgtggaacctcaggtgcaacagagacgccaggagatacta

SEQ ID NO: 673000 - DNA, 101 bp, Homo sapiens
aaaagattagcagaaactcaagaagagattagtgctgaagtagcagcaaagatttggaggccaatcactgccaccttttatttccctgtgggtccaggaac

SEQ ID NO: 673001 - DNA, 100 bp, Homo sapiens
gcgggtcatggagtcccgaaccctcctcctgctgttctcgggagccgtggccctgatccagacctgggcaggtggcttgtggtccggttggccaccaagt

SEQ ID NO: 673002 - DNA, 98 bp, Homo sapiens
tcagagctttacgatgtcacttgggaaggcctggagctgctgaagactgctattgggaaagctggctacactgataaggtggtcatcggcatggacgt

SEQ ID NO: 673003 - DNA, 100 bp, Homo sapiens
ggatctgacagatgccagcgtagctgaatccagtaccaaaaacgtcaacaacagttttacggagcttgatcctggatagtgtttgtatgatgtgcacacg

SEQ ID NO: 673004 - DNA, 83 bp, Homo sapiens
tacaccatggagcgcccggataaggcggcgctgaacgcactgcagcctcctgagttcaggatctggggactttgatgatttta

SEQ ID NO: 673005 - DNA, 100 bp, Homo sapiens
ctctgctgacaaccaaacgtgtgttctggaagggtgttttggaggagttgctgtggtttatcaaggttgatgttgaacagcacactttagccaagtattt

SEQ ID NO: 673006 - DNA, 82 bp, Homo sapiens
ctgaaaggctctccttgcagctgcttagacgctggatttttttcgggtagtggaaaaccagtcgagcaaaagatgtgataat

SEQ ID NO: 673007 - DNA, 71 bp, Homo sapiens
ccgactggagcaggcagcagcccagttccaaaagctgagacaagatcttgaaatggtactgtccactaagg

SEQ ID NO: 673008 - DNA, 75 bp, Homo sapiens
tgactcacaagatcactcacctgtccacactgcaggtcccagccgtcggttcaagcgagtggtggagaccatcca

SEQ ID NO: 673009 - DNA, 97 bp, Homo sapiens
cttggactcagatggctttctcactgaaagtacctggcaaagaattctgcaactttgttcagtgccagcgattatgaagtggctcctcctgagtacc

SEQ ID NO: 673010 - DNA, 100 bp, Homo sapiens
ccgtccctttccagggagggaacaaagcccacagcaccggtgtttagagaccatctttgaggaacccaaggaacgaaatggtacactaatctcaatcagc

SEQ ID NO: 673011 - DNA, 95 bp, Homo sapiens
gaccgaccattcttccctgggctggtgaagtacatgaactcagggccggttgtggccatgggcttctttcgccgcacaatccagaagaacctcca

SEQ ID NO: 673012 - DNA, 90 bp, Homo sapiens
cggagactttggggcctaactagatctgccgccgccttaatggggtccggttcaccagctgcaagagcgctaaggaccgtacagccatgt

SEQ ID NO: 673013 - DNA, 100 bp, Homo sapiens
tcatttccatgggacgagattctgaactcattgtatacccgaaatcttgtggatcaaggaaatggaaaatttaatctgatgattctctgttggggtgaag

SEQ ID NO: 673014 - DNA, 98 bp, Homo sapiens
cggatttactggaccccagtgtgaaagagctttaaggaagcctcctatttcagtttctcaacatgaaagtcatcaagcaatctcccatcttccaactg

SEQ ID NO: 673015 - DNA, 128 bp, Homo sapiens
aactgggaggtggacgtggcggcccagctgggcgagtatctggaggagtgaatctgaatggtgcctaccctaagctggtgcctttcagacctgcaggacggctgatctctccacctctgctactctct

SEQ ID NO: 673016 - DNA, 100 bp, Homo sapiens
ggcctccccagccatgtggaattgtgacataggaggatgccagctttgagtggagcctccacaggaaaggacactgcagcagatccaggccatggcgcag

SEQ ID NO: 673017 - DNA, 101 bp, Homo sapiens
gtaccatgagcagtgtttcgtgtgcgctcagtgcttccagcagttcccagaaggactcttctatgagctactctgacctacgacactctccggtttgctga

SEQ ID NO: 673018 - DNA, 75 bp, Homo sapiens
aattgttccactgttcactagtctagcttcagatgaacagatggagtttcactcttgtctcccaggctggagtac

SEQ ID NO: 673019 - DNA, 90 bp, Homo sapiens
acatcatagagtctggcgaagtgagcatcttgattagaagcaggctctttcgacgtgtagcagcagctttgccgggaatggaaagcacac

SEQ ID NO: 673020 - DNA, 74 bp, Homo sapiens
gaacttcaccttttggctttcttggcctgatgctgaactctcgagggtaagaatgattgatgttggctgatatt

SEQ ID NO: 673021 - DNA, 100 bp, Homo sapiens
gcgcaagcacaccctaccgaattacaagatcagatcaacaggcggtccttcgggtcggagtggacatcggatggtggcctggaagagacaattgatcctg

SEQ ID NO: 673022 - DNA, 92 bp, Homo sapiens
ccgcgaggaggcgcgggaggtgttcgagaacgaccccgagacgatggtggatgcttccaaaagcatcgaagctgtccatgaggacatccgcg

SEQ ID NO: 673023 - DNA, 75 bp, Homo sapiens
gacagatcacagctacggtgacatttctgccactgttggaagtttctttttgtggggacattcatggacaattct

SEQ ID NO: 673024 - DNA, 75 bp, Homo sapiens
ctacagcctactggtgactcggctgcaggctagcttgtcactttctgcaaaggtttccctcagggagcctcctgc

SEQ ID NO: 673025 - DNA, 75 bp, Homo sapiens
caatcaaagctcgacttctcaatcccaagtggccaaagttgattcgatgtcatcagtcccgtggtggagcctgtg

SEQ ID NO: 673026 - DNA, 75 bp, Homo sapiens
agattacgtgagcatcttcgtctgcagtgattggcagctcctgcggttccagggtcacccccgagaggacaacag

SEQ ID NO: 673027 - DNA, 75 bp, Homo sapiens
caggatggctggataaactctctcctcaaggagttacactgttagaccttatgatagccaagataacgagtgatg

SEQ ID NO: 673028 - DNA, 90 bp, Homo sapiens
agcaagcagctctaccgccgcctcaactgccgcctcgcctactcactctggagccgtgctggagatcagaatttatttacctctgtttat

SEQ ID NO: 673029 - DNA, 100 bp, Homo sapiens
aagaggagaaggggagaaaccaggcagtggcaaacaggaagggatgagaccatgcagcctgcgaaaccatcctttcttgaatattttgaacaaaaagaaa

SEQ ID NO: 673030 - DNA, 132 bp, Homo sapiens
cgaaggtgaagagttgtcccagctcggcccgcgggggagccccgggagccgcacgggatcgcttacacctgagacgaactacagaacagcacgtaccagaggtggaagtccaagtcaaacgcagaaggactg

SEQ ID NO: 673031 - DNA, 96 bp, Homo sapiens
cccaggtgtaagcgcagaaagcaggcgaacccgcggcgcaataacgggagtgcatccgccccaacccttttccccctcgtctcctgtgagaattcc

SEQ ID NO: 673032 - DNA, 82 bp, Homo sapiens
gggcacctccgagcgcaaggacagcgcgaggtccgcgcagcccagcgcagccatactacgtctactttgagaactcctccag

SEQ ID NO: 673033 - DNA, 75 bp, Homo sapiens
cgtcaggcctggacaaccatggagaaggctttcttgatcatggatggtgaagatataccagatttttcaagttta

SEQ ID NO: 673034 - DNA, 74 bp, Homo sapiens
atggaaccaaagcggatcagagagggctaccttgtgaagaaggggacatgggagtaggaaaatcttgcttgctt

SEQ ID NO: 673035 - DNA, 74 bp, Homo sapiens
cctggattatctactactgctcctcctggcatccgcagtggctgcgatggaagtgtactaatggtcacttgatg

SEQ ID NO: 673036 - DNA, 75 bp, Homo sapiens
ttgattcagcgacttatgtctgttgcttatacgtatgataatctggctcctagagagagctatccaaaatcacga

SEQ ID NO: 673037 - DNA, 75 bp, Homo sapiens
aagaagaaagaatgcgtgtattttgtggaaagttccaaactgtctgatgctggaggctgacccgcggctgattga

SEQ ID NO: 673038 - DNA, 100 bp, Homo sapiens
gaagcagaagaataaggagaaggataagtcgaaggggaaggcgcctgaagaggacgaagtgagaaagatcagtctaaagaaaaggagaagaaagtgaaaa

SEQ ID NO: 673039 - DNA, 99 bp, Homo sapiens
aggagatgcacacggcactcgagtgtgagatggagttttaacattgaatgcggagaacactaattatgcctatcaagttccaaacttccataaatgtga

SEQ ID NO: 673040 - DNA, 98 bp, Homo sapiens
ctcaaggagcagaagtacgaccggcagctgagggacatatttggagaagactgtgtaagtgtaaaggatgactctattcttagcgtcacagtggacgg

SEQ ID NO: 673041 - DNA, 83 bp, Homo sapiens
ctctccctcgctctcgctctgtcttttttgggcgccatgctgaggggaaggaccatggccaacctggagcgcaccttcatcgc

SEQ ID NO: 673042 - DNA, 82 bp, Homo sapiens
atcagagctgcagaagagtccaggaaacacatcaacacctgggtctcaaaaaagaccgaagcatgaatacaactttgtctga

SEQ ID NO: 673043 - DNA, 82 bp, Homo sapiens
caccatctccatcacccaccaacaacaccacaataatccacagccaaggcctatggtcctgcccagcacgccatttcaactg

SEQ ID NO: 673044 - DNA, 83 bp, Homo sapiens
ccctggcggccggcgcgctctgccgcgaggcgcgcgccgcgcaagtcttcttcctcaaagatgatatcatcaagttgaatcga

SEQ ID NO: 673045 - DNA, 100 bp, Homo sapiens
ccgcttctggtactttgtatctcagttaaagaagatgaagaagtcttcaggggagattgtctactgtgggcaggtggactttcactgctggatgtgtggg

SEQ ID NO: 673046 - DNA, 75 bp, Homo sapiens
cccagaacggagagctccctcctagaaaagaatttttccctagattggtgtaaacagccagacgtgggccttccc

SEQ ID NO: 673047 - DNA, 82 bp, Homo sapiens
ggaggatcgcggagtcccaatgaaacgggcagccatggccctccacagcccgcagcactctgaataaccctgctgatcaaat

SEQ ID NO: 673048 - DNA, 85 bp, Homo sapiens
gtccgggaggcgcttccacctctccaccaccgaccgcgtcatcaaagctcaggcgctcaggactgccaggacccagaggattcac

SEQ ID NO: 673049 - DNA, 97 bp, Homo sapiens
ctctgcgatcccgggtcatctccagatgctagggttatgggtaatctttagatggtggaagatctctctaaggagtgagtatcgatcaacaaaacct

SEQ ID NO: 673050 - DNA, 97 bp, Homo sapiens
ttggaattacagacatgggccactacacctggcgatctgtgtcttatacggtgtcatggagaaactccagctgggcccagagattctgcagcgggaa

SEQ ID NO: 673051 - DNA, 97 bp, Homo sapiens
acactaggagatctcctcaaagaagtttgtccttctgctattgatcctgaagattccaggagggcttcgtgtatggacctcaagcgttggaggtagc

SEQ ID NO: 673052 - DNA, 106 bp, Homo sapiens
gttcggcggcgctcccatggcgcacattaccattaaccagtacctgcagcagctgatgtagcccagcagttccagtatgctgtgcgggtgattggcagcaacttcg

SEQ ID NO: 673053 - DNA, 82 bp, Homo sapiens
actgcctcagggtcttcagtggtaacagccagtgtgcagcgttatcgaactccttccagatccagatcaagggatcgtttca

SEQ ID NO: 673054 - DNA, 101 bp, Homo sapiens
cggagtccggcggtagcagcggtggtgctggtggcggcggcgctttcggcgcgggcccgggccccgagcgcccgaacagtgccacaaggttgcagtagtga

SEQ ID NO: 673055 - DNA, 75 bp, Homo sapiens
tggacgccactacagttcatcaacatcaactacgtccctctgaaggcctccaagactgcagagaatgccaccagt

SEQ ID NO: 673056 - DNA, 50 bp, Homo sapiens
tttaaacaagagatttccacagaagtatcttctcacaggtatgaaacacc

SEQ ID NO: 673057 - DNA, 100 bp, Homo sapiens
aaggaggtgctgaagagcgaggaggtactaggttttgacaagcttgcatcatgcgtgagtataagctagtcgttcttggctcaggaggcgttggaaagtc

SEQ ID NO: 673058 - DNA, 89 bp, Homo sapiens
cctgcacctgcgccggctcctgcaaatgcaaagagtgcaaatgcacctcctgcaagaaaaggatgccctggacctaagtgacatcaact

SEQ ID NO: 673059 - DNA, 100 bp, Homo sapiens
ggagttgtatttagtgtgacgactgttgacctgaaaaggtctcctctgagcctccggcctccataagacccaaaacagatgacacctcttcccagtcccc

SEQ ID NO: 673060 - DNA, 100 bp, Homo sapiens
cagaccaggtctcatgcttggtgcctggtgccaggttcttcagacccagaagaagaaagtgttctctactccaaccgagcagcatgtcacttgaaggatg

SEQ ID NO: 673061 - DNA, 88 bp, Homo sapiens
cgactgtctacgggcggccggggctggtattccctctcgagtggtttccactcaacaagcccagtgttggggactacttccacatggc

SEQ ID NO: 673062 - DNA, 75 bp, Homo sapiens
ctgtgcccaagctcatcgagaagtgctggaccgaggacgaagtgacagatttgaccagttttgggccatcaatcg

SEQ ID NO: 673063 - DNA, 100 bp, Homo sapiens
aaaacacaaatcgcctaagaaaaagactggaaaggattctatgggtcagagaatttctgaatgaagaaaacaaaggtcttgatgttctagtggaatatct

SEQ ID NO: 673064 - DNA, 101 bp, Homo sapiens
gaagtggccgtagcggcttgttggataagtctttccagactctcctggggcttatgaagctgagtcaccatccccacctcctcctccgtctccacctcttg

SEQ ID NO: 673065 - DNA, 100 bp, Homo sapiens
gaggaccttctgattagtccacagtcttcctctatagaaagtgaatggcttggaggaaggcgtggagttcctgccagtcaacaacgtcaagaaggtggaa

SEQ ID NO: 673066 - DNA, 75 bp, Homo sapiens
tgccacctgtgcttcaacaaaggacactacatcaaggactgcccccagaaaattgtgttaaggaatggtactgag

SEQ ID NO: 673067 - DNA, 100 bp, Homo sapiens
cctggtcgatgaagaggatgatgtttttggtgaaggtgaattatgtaacctcattacgctggatgtagctcacaatcaacttgaacaccttccaaaggag

SEQ ID NO: 673068 - DNA, 100 bp, Homo sapiens
tccactgccttccctcgagctgatatcctccttccagccaaagcgaaaaggtcttctctgttggttgaaatgtctatgattttatctgcctcagtcattc

SEQ ID NO: 673069 - DNA, 51 bp, Homo sapiens
cggcaccggatcaccaagacggaggtgaagtctggagcaggacttctgagg

SEQ ID NO: 673070 - DNA, 75 bp, Homo sapiens
aaaggagagaagatgaaagtcctggaggagtgctgtgacatgtatatggatgaatgaacagtgtagcagtatcat

SEQ ID NO: 673071 - DNA, 98 bp, Homo sapiens
gccggagcttaggtcgggaagggatggatcgctgagccgatagcgtccgctaggctgtctgcctcgcaatacttcatgctgttgctgctgactgatgg

SEQ ID NO: 673072 - DNA, 99 bp, Homo sapiens
ctcatgtatgttctcacatctatctcagagggactcactactcttgctggattgccttttgcaattcttacttcaaggcatacccccttccaacgagga

SEQ ID NO: 673073 - DNA, 75 bp, Homo sapiens
ggggacctccaaagactaaactgacaagccttcaaggagcccaggggatatacacatgacaccatccactgactt

SEQ ID NO: 673074 - DNA, 122 bp, Homo sapiens
cttggcccagctggcagcccagcgggaggatctggagacagccatggagttctacttagaggccagtactaaagtggaagtggacatggagaaagcagaaagcctgcaagtgacgagaggag

SEQ ID NO: 673075 - DNA, 97 bp, Homo sapiens
cctttcgccgtggacgccgaccgtccgggacgagatctggaaagcatgaagactgggctttttttcctatgtctcttgggaactgcagctgcaatcc

SEQ ID NO: 673076 - DNA, 101 bp, Homo sapiens
ggggtaagcccacctcccctacctggagccggaacacagcatcatcccagtaagctccaaccagattgggctaatggatactacagacaacagagaaaact

SEQ ID NO: 673077 - DNA, 98 bp, Homo sapiens
tccgaacagttgaggccaaacaggagaaagtttcaactacactgaatgtggctcagggccatgaaatgacaagcattggactgctacttggtgtttct

SEQ ID NO: 673078 - DNA, 75 bp, Homo sapiens
aacgcggagagcacgccatgaaggcctcgggcacggtgctggagaatctggtaaaagcaccattgtgaagcagat

SEQ ID NO: 673079 - DNA, 100 bp, Homo sapiens
agacgctgcagttggagcaacagtccaagctcaaactctggattaatcgaattacagctgctagccaggaacatggactgaagtatccagcgctcattgg

SEQ ID NO: 673080 - DNA, 90 bp, Homo sapiens
gaaccatctcagaagccatgcccctcaggctggaacttgccctgtctcctcgcagatgagccagagactgctgctactttgaaacgtacg

SEQ ID NO: 673081 - DNA, 137 bp, Homo sapiens
gacatcaagctctgtgagggtttcaatgaggtgctgaaacagtgccgacttgcaaacggtagagccacccagagttccctcactgaagatctgagcatgacccgggacgaggcactgccggactctcattctgcaca

SEQ ID NO: 673082 - DNA, 82 bp, Homo sapiens
aaaaggccacggcacctgaagccccgagccctcccagcgcagaaagaagatgctgatatgctacaacacggatgaacctgga

SEQ ID NO: 673083 - DNA, 100 bp, Homo sapiens
gtgtgattgcaaatctcccatttttgatgcgacagaatcccactgagacgcttcggagagtgttgccaaaagtcagagtcgcttatgatgaagctacaga

SEQ ID NO: 673084 - DNA, 98 bp, Homo sapiens
ctctgcaccctgcccagaggtccctcagcaaagatggtacaaaagagtctttggaggatgcggctttgatggggcaagaatatcacggcatgggcatg

SEQ ID NO: 673085 - DNA, 90 bp, Homo sapiens
tttgattgagaaacttcatggggaactgcaagacaggaagagaggccgtgcccctcagctttggacatcagacagtgcaggagaagaatg

SEQ ID NO: 673086 - DNA, 100 bp, Homo sapiens
cgcagcgtggggccccgagcgcggatggggtgcatgaagtccaagttcctccaggtcggaggcaatacattctcaaaaactgaaaccagcgccagcccac

SEQ ID NO: 673087 - DNA, 82 bp, Homo sapiens
tcaggcctgcctagacggagtggggtatcatgatattagctggtttgacatcaagtcatttgtgagtcatcagatcttctcc

SEQ ID NO: 673088 - DNA, 97 bp, Homo sapiens
ttgctcggaacaaccattctaaagccttttatgctcagggcagctgcaatgactctccgcacggtattattgtcattgcaagcactattggcagctg

SEQ ID NO: 673089 - DNA, 100 bp, Homo sapiens
caagaatgccttctgattctgatgattctttgaccaaaaaagctggagtgcaatggtgccatctcagctcaccgcaatctctgcctcctgcattcaagtg

SEQ ID NO: 673090 - DNA, 49 bp, Homo sapiens
cgcggcggcagcagcagtgagaggaagcatgagtgggaaaagcatggga

SEQ ID NO: 673091 - DNA, 149 bp, Homo sapiens
cacctcttcctcttcaagctcatctacaacgagtactgtgggcctggagccaagcccctcttcaggagtaaggcatttcccggaaacattaactctgacggtgtggtccggcacgaattacagcatccgattattgcccgctatgtgcg

SEQ ID NO: 673092 - DNA, 83 bp, Homo sapiens
cgcaaacttgacactcaccctgaccgtaaaacaggcttggtgtcatctacctgggacagacagttttacttcacgcagggtgg

SEQ ID NO: 673093 - DNA, 74 bp, Homo sapiens
cggcaccaggagctgttccggctgcgcgggatcaaggcccaggaagtacacgagaagctccgaggatggctgaa

SEQ ID NO: 673094 - DNA, 87 bp, Homo sapiens
cggccgcggggactcggagctgagaggagctgctgctcggaccagcgcgctatcatggtgaacttacttcagattgtgcgggaccac

SEQ ID NO: 673095 - DNA, 99 bp, Homo sapiens
ttcttggggatgatgaatggagagagactgcatggggagcttctcgcagcaagaattattgccaagttagcagcttggggaaaagaactgatggaaggc

SEQ ID NO: 673096 - DNA, 90 bp, Homo sapiens
gttggtggtgacaagaacggcggtacccgggtggttaaacttcgcaaaatgggtgtccgcaatgttgccagtgtctgtctgcagattggc

SEQ ID NO: 673097 - DNA, 100 bp, Homo sapiens
tgtcctcatagagctgacagccccagatagcaatgatgatgtgaaaacagaagctgtggctgtaccagtgtgctgctgcaacaaagtgagaaaaagcttg

SEQ ID NO: 673098 - DNA, 84 bp, Homo sapiens
acgacgggttggggatggcgtgcagcgcaaccacgagacggccttccaagcaaaatgatgcttcaacacccaggccaggtctct

SEQ ID NO: 673099 - DNA, 75 bp, Homo sapiens
tattgtgagaggagacttcgatgagagcacctactgtgccaccatggtccagcactgtgaagccctcaaccggtc

SEQ ID NO: 673100 - DNA, 101 bp, Homo sapiens
acatcatcttccacacagcagcggctggcatcgttcagaacctctccacaggaattcctcctgatcagcagagactgatctttgctggcaagcagctggaa

SEQ ID NO: 673101 - DNA, 96 bp, Homo sapiens
gtcggcagcaagaacagagagagaggtggacagatctgagagatactgagatattccaatgtctgtgggaataattgacacaaggacgaatccaag

SEQ ID NO: 673102 - DNA, 100 bp, Homo sapiens
acgtcccgctggatctgacccgagattagaaaactgaagcttcaagaacagacttgcctaacaacaggaaacttgtatgtctcgaagtggcaattcacac

SEQ ID NO: 673103 - DNA, 101 bp, Homo sapiens
cgcccgtccccggcagcgacaatgagatggaatcgccacttatatatgtttcagttttgcttttgaacatatttgaattttcatcaggaatagtatataat

SEQ ID NO: 673104 - DNA, 100 bp, Homo sapiens
gcccctcctccaccagaggactgggaggagcatgtcaacagcaggtggtccattatggctgacatgcaaaatctggtagaaagattggagagggcagtgg

SEQ ID NO: 673105 - DNA, 83 bp, Homo sapiens
aaaccagtggtaaatgtcagctacaggccagcttatgaccagggaccatatgatgtggtggttctaccaggaggtaatctggg

SEQ ID NO: 673106 - DNA, 95 bp, Homo sapiens
gatgaaatctacataaagactaaaacattttaccaattttgcattgtttgtttgaaattgcattgacgactggtgatgccacactcaatcagaaa

SEQ ID NO: 673107 - DNA, 134 bp, Homo sapiens
gcctggcgtgcactccgcacctcggggacattattgcgcgtggaacggctgcttttggaaggtgtcatggagaaactccagctgggcccagagattctgcagcgggaaaatccaaggcttatttatgccaggct

SEQ ID NO: 673108 - DNA, 92 bp, Homo sapiens
gtctgtgtcgcagcttggtctcagaggagcatcgctggggtgggccatgcacagacacagctcatgtctcattaatcacaccaacaaaaaga

SEQ ID NO: 673109 - DNA, 75 bp, Homo sapiens
cgccgaggatgataaacacccaggacagagtttggagcctcttccatcaagtggacctgattttggaggattagg

SEQ ID NO: 673110 - DNA, 100 bp, Homo sapiens
tccaggacgtctagtggatatgatggaaagaggaaagattggattagacttttgcaaggagtggctggcgtgcccagctccaacccaacccccctgccca

SEQ ID NO: 673111 - DNA, 83 bp, Homo sapiens
aataaaactgaccaagacaatattcaaaagcagtttgatcaagttgtcacaacttggacaaaagtaacacagaagaaccttac

SEQ ID NO: 673112 - DNA, 75 bp, Homo sapiens
cgggcgcccccgagccgccgccgctgtccggagccccacagctctctgatgtaaaggatggagtaaatcaagcag

SEQ ID NO: 673113 - DNA, 95 bp, Homo sapiens
ctcgctgatgacacctgtgcagcccatgttggtcaaagatgttgattcattcatagtgtgaggcccagaaatcggcatttttaaacaagtacact

SEQ ID NO: 673114 - DNA, 73 bp, Homo sapiens
gttatattaaagaagtcccaagccgatcaaagtccagatctccatctccaaaaagaaggtaagctaaatgttt

SEQ ID NO: 673115 - DNA, 89 bp, Homo sapiens
agatccccaatttgtctgatgaaaacagcgtggatgaagtggagacttcctctgctaaattacctcgctgccgacagggaggctgggca

SEQ ID NO: 673116 - DNA, 83 bp, Homo sapiens
aggattccaagtaactcttatttgttatagctgaggtggtaccagtttaagaagtgagaacttcttcactgactgaaatttgc

SEQ ID NO: 673117 - DNA, 74 bp, Homo sapiens
gaaagttttccttttcgttaaatcctcaggcccattacgcagtccaggcaagaagatcccggagcatcactagg

SEQ ID NO: 673118 - DNA, 75 bp, Homo sapiens
ttcagtcctctcgatataagaaggaatcaaagtcaggccttgtgaaaccaggttttgattcccaccatggccatc

SEQ ID NO: 673119 - DNA, 75 bp, Homo sapiens
gaacacccccccatggaggcgagtactatactggcaattgctggagaagattttgcaattgttgcttctgatact

SEQ ID NO: 673120 - DNA, 50 bp, Homo sapiens
gaaggcgctgcgcaggcaggcggaggaggagaaacctcaattatttttcc

SEQ ID NO: 673121 - DNA, 82 bp, Homo sapiens
gtggctgcatgtttgaatcaggtggagaagcacttcaacgctggacgaaatctacaactcttgaaaaagaagttcctgtcat

SEQ ID NO: 673122 - DNA, 90 bp, Homo sapiens
ctaaaaacaaagagttatatgaaatcaatcctccagttagagcagccagcgggtacagaatggattttggaagagggagtcaccactgga

SEQ ID NO: 673123 - DNA, 74 bp, Homo sapiens
gtattgaaatgcatttgccttatacagctaaagccatggaaagtattggtaaaggttttcaaggtgtcatgaaa

SEQ ID NO: 673124 - DNA, 100 bp, Homo sapiens
gcacctcagccctggttccaagggtcaagaagacagtgaggacatggacagcctccttctacagtagatgacattaatgctgataagaatatctcttctg

SEQ ID NO: 673125 - DNA, 74 bp, Homo sapiens
cagcgcactggcaagtgcagcgcctgtaatgtttggcgagtctgtttgctgatggccgccaaagttggagttcg

SEQ ID NO: 673126 - DNA, 105 bp, Homo sapiens
ctcaccgcccagcccaaaccaggagattgcgagggagcgatgcggtgcagcgcgcactttcatttggacccgtggatacccattgaacagatgcttgaaacctgc

SEQ ID NO: 673127 - DNA, 100 bp, Homo sapiens
gcagaacccatagaactcgtggaaactgttcttgcccaaagaggttacttcaaagacaaagcttttgttaattatcttaaatacttgctttactggaaag

SEQ ID NO: 673128 - DNA, 75 bp, Homo sapiens
gaagcagatgatggttctaagatgggatctgatttagtcagtcacttttgttaggagtgataaacccaaactgtt

SEQ ID NO: 673129 - DNA, 100 bp, Homo sapiens
ccctggctaccatggaccatcctgctggtcagcactgcggctggatccgtggcctcctatgagctgactcagccaccctcagtgtccgtgtccccaggac

SEQ ID NO: 673130 - DNA, 82 bp, Homo sapiens
cagatttacaaactggccaagaagggccttactccttcacagatcggggatgttcgtctaaccccagaagactttgctagag

SEQ ID NO: 673131 - DNA, 102 bp, Homo sapiens
ctcatgttcctccatgataaaggaatcatctatagtggtattattcagcacgacttgattttctcccttcaacaaacagaatgtgtccttaaaccggttgaa

SEQ ID NO: 673132 - DNA, 96 bp, Homo sapiens
aggggtctccttatgccagggaccaggttaccctaacagcaggaaggttgtgccctgggaggagcggggacactgaggacctctctccaaattggc

SEQ ID NO: 673133 - DNA, 73 bp, Homo sapiens
taagatggcgactgtcgaaccggtgatgtgtccaatctagatcccaacttctcatttgaaggcaccaaactgg

SEQ ID NO: 673134 - DNA, 75 bp, Homo sapiens
caacaatgcctttgaccagtatcgagaccttgaaaattgccaccaaggccaacccttgggatggaaaatcactaa

SEQ ID NO: 673135 - DNA, 58 bp, Homo sapiens
ggaggctccaagacctcatcaacaattaagagatcgcggattcaggtgtggctctatg

SEQ ID NO: 673136 - DNA, 83 bp, Homo sapiens
cttcggcagtccacccaccgccgccgcctcccaggcgtttagagaaaatggcagacgatattgatattgaagcaatgcttgag

SEQ ID NO: 673137 - DNA, 100 bp, Homo sapiens
gcaaaatttaaccaaaatagaccctggagtgaaaccattaagcttgtgcgtcaagtcatggttttactgcaatcacagcaaccaaccccatttggcttat

SEQ ID NO: 673138 - DNA, 82 bp, Homo sapiens
cacggccgccaccaagatgagcagggcccttgcggagttccgcgtccgaggtgtgaagcagaaaggacccaggagcgataac

SEQ ID NO: 673139 - DNA, 90 bp, Homo sapiens
gtgaggcctccccagccacgtggaactgagctctgtgtgtcgtctgagcagtcgcgagaagatttccctccaggacttgtccaaggagcg

SEQ ID NO: 673140 - DNA, 50 bp, Homo sapiens
cacacctggaccagaccccaggaaagacggtactgcagggacaccagcaa

SEQ ID NO: 673141 - DNA, 75 bp, Homo sapiens
ggaagaggaagaggcgaaggctggcggaggaggagcttcggaaccaaaaagaagcttcccagagccggggccagg

SEQ ID NO: 673142 - DNA, 75 bp, Homo sapiens
caagaaaccccgatcacaaagatacgaatctcttaaggggccgctatgtgaaacagcctttacctgatgagtttg

SEQ ID NO: 673143 - DNA, 83 bp, Homo sapiens
gtcccgaagagtgtaagatgttcgcctgcgccaagctcgcctgcaccccctctctgatgccacagggcccagtgggctccggg

SEQ ID NO: 673144 - DNA, 90 bp, Homo sapiens
cagcaggtccctggccctcatgtacgagtccgagaaggttggggtcgcctcttccgagatgttctgccttactcaatacgggtcttgttg

SEQ ID NO: 673145 - DNA, 75 bp, Homo sapiens
tcccaacacccgccaccagcaggcatcgttaaagaatctggagtgaagcacaagggattgattgaaatacccaat

SEQ ID NO: 673146 - DNA, 100 bp, Homo sapiens
gcttagggtgaaacaaatacctttgaggtttaaatcagatttttgagaaaactgcctttccaaacagcattgcagttgacctatgttctaggaaccctac

SEQ ID NO: 673147 - DNA, 83 bp, Homo sapiens
gttgatcggtgatgccgcaaagaatcaagttgcaatgaaccccaccaacacagtttttgcggtgacttccacagtaaagcaag

SEQ ID NO: 673148 - DNA, 83 bp, Homo sapiens
ccgcggacacaaatctttagcgttggtcaaatcggaagcgattaagtgccagcaaggcctcgtgggctgtgcggctatcctgg

SEQ ID NO: 673149 - DNA, 94 bp, Homo sapiens
cagagcctcagtttgtgcaggacaccgacatggaacagggactcactggggtatcctttgaaagaaattgtggttatccatcaagatccagaag

SEQ ID NO: 673150 - DNA, 75 bp, Homo sapiens
cttcagggtttccaccgttcgttcaaggccctgctgctcctgggggccgccgccctggcctgcctcgccctggac

SEQ ID NO: 673151 - DNA, 100 bp, Homo sapiens
agatcacccacaaggacccgaagacaggaaagctgaggacttcaccagcgctggtgccgtgagcgatgtggagatgcaggaacactatgatgagtttttt

SEQ ID NO: 673152 - DNA, 74 bp, Homo sapiens
ggatcaggagaaacaggctcgccaggtccgaggccccagccagtagagacggggttttaccgtgttagccagga

SEQ ID NO: 673153 - DNA, 100 bp, Homo sapiens
cgcggccaggcagggaggagaccggcacccagacaggtggcgaaggcagaggagtctctaattaacagaagatggcaaagcccagccacagcagctatgt

SEQ ID NO: 673154 - DNA, 50 bp, Homo sapiens
atcaacgtccagcttaagattgctgggattacaagcgtgagctaccacac

SEQ ID NO: 673155 - DNA, 100 bp, Homo sapiens
cgcagaccacagttacatgtatggagaatggctggtctcctactcccagatgcatccgtgtcaatctttcaagacatttttcccgctccttggcaacttc

SEQ ID NO: 673156 - DNA, 82 bp, Homo sapiens
gcaggaggagctggcgtgggagaccgacggcctgtactaatggtcacttgatgtgcgctggctgttttatccacctactagc

SEQ ID NO: 673157 - DNA, 100 bp, Homo sapiens
ctccgggggacccgcggtccccaccgtgcagcggggcatcatcaagatgtgccggtggtggtgtgcacattgagccccggtatagacagttcccccagct

SEQ ID NO: 673158 - DNA, 74 bp, Homo sapiens
gaatattgaggacatgctggagtgggcaggggttgccctgctgtcagacgtctatcctgagaaaatcttgccgg

SEQ ID NO: 673159 - DNA, 93 bp, Homo sapiens
atggctggacagctagctgcttatggctataaaattacaggtgtgaatcatggcaatacagtgaaagacagtgatttactgcttttgagggcg

SEQ ID NO: 673160 - DNA, 83 bp, Homo sapiens
ggaaggggcacgggcacccccgcggtccccgggaggctagaggagaagcaacagtttcagcgccatctgacccgcccaccacc

SEQ ID NO: 673161 - DNA, 90 bp, Homo sapiens
ggcaacaacagcagcatcaaacagctgcagcaggaggatggaaaacccaagcagcagctgcaccaggaccgaggcaaagggaccgcagtt

SEQ ID NO: 673162 - DNA, 50 bp, Homo sapiens
gaccgagatcccaccagccctgttccatgccattgcagtgtcaactaggc

SEQ ID NO: 673163 - DNA, 99 bp, Homo sapiens
cagatctggcatctccactggacactggtcagaatgggagctgactgatatggtggtgtgggtgactggagcctcgagtggaattggtgaggagctggc

SEQ ID NO: 673164 - DNA, 75 bp, Homo sapiens
cacatgctggatattaaagagcacaatggacaggaatcaacagtgagacaattatgaaaccagcttcaatttcag

SEQ ID NO: 673165 - DNA, 90 bp, Homo sapiens
ggtcttgctcggccgatgaagtgcagaggtttttttctggagcagttcattgagctgtgcaagacgctttacaacatgttcagtgaagac

SEQ ID NO: 673166 - DNA, 83 bp, Homo sapiens
gtccgacagccaggcccgggagaagaacaagatcactcaaggtgaaggataatctactaataccagcactttgaatgaaaatt

SEQ ID NO: 673167 - DNA, 99 bp, Homo sapiens
catgaagctaccggccagggttttctttactctggggtcccggctgccctgtggcctcgctcctcggaggggttatgatgatggctacgggggtgaata

SEQ ID NO: 673168 - DNA, 75 bp, Homo sapiens
ttcgggccagcgacccgctgctcagcgtcctcatgtggggggtaaaccactcggtgatggaactgtactggaaca

SEQ ID NO: 673169 - DNA, 90 bp, Homo sapiens
ctactgcctgggggctgaggatgacaaaaaagccttcataggtgaatctgattaacgagcccctggtgatatttgtttgtgcaactacag

SEQ ID NO: 673170 - DNA, 82 bp, Homo sapiens
actccatctcattcattgtacagttgatattcactgatggactccaaagaatcattaactcctggtagagaagaaaacccca

SEQ ID NO: 673171 - DNA, 75 bp, Homo sapiens
gacccagccacccccggagcgcagtccccgaagccgttggacataccagatggtcgaagagctccacttcctgct

SEQ ID NO: 673172 - DNA, 101 bp, Homo sapiens
ttacacccgtgcccaggagcttgacgccttagataacagccatcctattgaattttttgctccactcaagcctgttagaatcaccatggaatacagctcca

SEQ ID NO: 673173 - DNA, 75 bp, Homo sapiens
ttttctgttttgcctgaatacatgatttaaacaagagatttccacagaagtaatagctcttcaagtctgcaataa

SEQ ID NO: 673174 - DNA, 71 bp, Homo sapiens
ccccacacccttggaggacttggagggccgcatccacagccatgagccaacctctcaccagcacacaaggg

SEQ ID NO: 673175 - DNA, 100 bp, Homo sapiens
gaaagcggcgttatgacaggaagcagagtggctatggtgggcaaactaagccgattttccggaaaaaggaactgtggctgcaccatctgtcttcatcttc

SEQ ID NO: 673176 - DNA, 100 bp, Homo sapiens
ctctgcttggcatccccttgctggacagtggctgtgggacagcatcgtggccgagctggaccgagagatgagcaggagcgtggacgtgaccaacaccacc

SEQ ID NO: 673177 - DNA, 110 bp, Homo sapiens
atgcatcctgccgtcttcctatccttacccgacctcagatgctcccttctgctcctgcaactccgatccaatatccgagaaattgagaaactttgtttgaaagtccgaaa

SEQ ID NO: 673178 - DNA, 100 bp, Homo sapiens
gccgagctgcgggagctgctggagttcacccacatgtacctgcagtcagatgatgagggagacctgcaggaaaagtccctggagcatcttcgcttgccgg

SEQ ID NO: 673179 - DNA, 101 bp, Homo sapiens
ccgccgcttcgctgacagccggccaccaggtccagagccaaacccgtcactgaccccccagcccaggcgcccagccactccccaccgctaccatggccgaa

SEQ ID NO: 673180 - DNA, 100 bp, Homo sapiens
gaggtgtcagtgttaaaggaacctctacaacgaaggtgaagccacggaagataaggtcctcgaaaatttccccttgctcaaactgaatcgcttctgatga

SEQ ID NO: 673181 - DNA, 98 bp, Homo sapiens
cagcaggcggtgacccgctaccggaaggccatcgccaagacaatgcagatcttcgtgaagactctgactggtaagaccatcaccctcgaggttgagcc

SEQ ID NO: 673182 - DNA, 74 bp, Homo sapiens
cgacgcgccccgcctcccccgtccggtccctctctccacgccgccgccatgatcctgctggaggtgaacaaccg

SEQ ID NO: 673183 - DNA, 95 bp, Homo sapiens
acacacaccatcatggtcctggatctagtgaaaagccatttgatgtatgcggtcagagaagaagtggaggtcctcaaagagcaaatcaaagaact

SEQ ID NO: 673184 - DNA, 102 bp, Homo sapiens
atagacattctgcgtcaggtccgggctcctggacttcgcctttcccgagccctggaggtggggagaaaagggcaagtgtccagagaatggctgggatgaaag

SEQ ID NO: 673185 - DNA, 74 bp, Homo sapiens
gagacgagaagcctgaaaagtcgcagcgagctggagccgccggagtatatgaaaatgatgatcagctcctgtgg

SEQ ID NO: 673186 - DNA, 100 bp, Homo sapiens
aacagaacgacctagtatttgaatttgctagtaacgtcatggaggatgaacgacagaattcaattcgtcataatctgtccctacacagcaagttcattcg

SEQ ID NO: 673187 - DNA, 83 bp, Homo sapiens
cggagacagacctgtccttcaagaaaggcgagcggctccagattgtcaacaacacgtcgccactgggacactgtgaaccagga

SEQ ID NO: 673188 - DNA, 74 bp, Homo sapiens
tgaggcaggagagggtagttgtgcttccctagggacaatgactcattcttcccaggacactggttcttgtggca

SEQ ID NO: 673189 - DNA, 50 bp, Homo sapiens
cccacatgcccccaccgttcacagccaccacatccaccaactggatcctg

SEQ ID NO: 673190 - DNA, 49 bp, Homo sapiens
cagttgtgcaaccttgaacaaatggctgcccgaaaccatgttaatagaa

SEQ ID NO: 673191 - DNA, 100 bp, Homo sapiens
cagtccagaccctgctgctgtcttcaaagaagattttcatcttcattggagagaccctcctgtccatgaactgggccatcgtggccgacattctgctggt

SEQ ID NO: 673192 - DNA, 49 bp, Homo sapiens
ccaagaaaaagcacctggactaagcagctgacacaggatgatgatactg

SEQ ID NO: 673193 - DNA, 100 bp, Homo sapiens
ctctgtgtctgccccaacagcccggaagagtttgaccccatgactggacgctgtgttcccccacgaacttctgctggcattctcatcaccaccatcgctt

SEQ ID NO: 673194 - DNA, 100 bp, Homo sapiens
ggcctcccaagccctgataagcattaactgaacgtctggatgctcttcttctggaaaaagcagagactgagcaacagtgtctttctctgaaaaaggaaaa

SEQ ID NO: 673195 - DNA, 96 bp, Homo sapiens
gccgcggcaacgaccgcaaccgcatcgtgctgcctttcagtttcgcctggccggcgtctgtagaggcttctggtgaaatcgcattatgcaagactg

SEQ ID NO: 673196 - DNA, 100 bp, Homo sapiens
gggcggggaaacttgccgccgctttcctccaacttgctgcgggtggatctccgctggacacaccgcctccgagctcaggtgcctaaaaggccagaggggc

SEQ ID NO: 673197 - DNA, 117 bp, Homo sapiens
atcctctccgtgggagccagcgagcctctctccctgatcttacgtgctcaaggccttggatggtatactgtaaattcagcatatggagataccattatcataccttgccgacttgac

SEQ ID NO: 673198 - DNA, 83 bp, Homo sapiens
caggaacatctctttcaatgacaaaaagtttgtcattaaacccatcgacaagaaggcaccttactatactggcaattgctgga

SEQ ID NO: 673199 - DNA, 75 bp, Homo sapiens
cgcctgcgacctgcccgcctggataaaataccatgaggagtttgagaagagccgcatgggccctagcgggggcga

SEQ ID NO: 673200 - DNA, 83 bp, Homo sapiens
ctgaatcccatcaggaaattttgattttactgagacaaagtacctgctacaaaggttacttttcacatagaaccatatagcaa

SEQ ID NO: 673201 - DNA, 106 bp, Homo sapiens
ggggggtctggaacactgtgagccgctcacagtgtctaaggtcctccagcagcctgacctgagtgggttagtgatccagagaaaccagcaggccaacttggtcagg

SEQ ID NO: 673202 - DNA, 101 bp, Homo sapiens
caagactatgaatctctgttccaaatgctttgctgggaggtggggaagacagggctccagctaccacaggacgggctctgggtatagccgttccagtcagg

SEQ ID NO: 673203 - DNA, 50 bp, Homo sapiens
tcactgtgaccaccaaccaagcagcgagtaaccagctcataaatcacatc

SEQ ID NO: 673204 - DNA, 75 bp, Homo sapiens
cttacgtctgcggaagtgcagctgcctcagttcttagcgcagctggacccacaaaccgtggagaccaagaactgg

SEQ ID NO: 673205 - DNA, 90 bp, Homo sapiens
cggacccaaagtgccatgtctttaatgttttttgccctgacatctcttcgtcttgtgtttttacttgcatttggcttgatgatcattgtg

SEQ ID NO: 673206 - DNA, 82 bp, Homo sapiens
gtgccccaccatgtcagacgcagccgtagacaccagctccgaaatcaccaccaagccggcacagtcttcactaccgtagaag

SEQ ID NO: 673207 - DNA, 78 bp, Homo sapiens
tcagctgttagcatggaactttcagaacctattgaccatgctcgacagctgaccaaggccatgatgcgaaaggccacg

SEQ ID NO: 673208 - DNA, 75 bp, Homo sapiens
gccgtacaaaaaataagcaaaagcgtcccaggagaactacacgaaggccatgcggctgtttgtgggagaaccggt

SEQ ID NO: 673209 - DNA, 75 bp, Homo sapiens
gcgggtcttttgctggctctttcctggaatattacgcggctgatataactgctacaggagctgagagaccctacc

SEQ ID NO: 673210 - DNA, 76 bp, Homo sapiens
gtatccaccgacagcattccaagctgtcacgggaagtctttttaggataaacgtaggcctgcgtggcctggtggct

SEQ ID NO: 673211 - DNA, 74 bp, Homo sapiens
gaaaatattggggccatttagtaacttctttgcaaggaaggatcgagatcgagaccgggatcgtgaagatcggt

SEQ ID NO: 673212 - DNA, 100 bp, Homo sapiens
gcgggtctggcgggaccggtttggaagactttgccggcctgcagcatgattatgatatgagggtggatgatttccttcgtcgcacacaagctgttgtcag

SEQ ID NO: 673213 - DNA, 82 bp, Homo sapiens
gatgacaaaacttcaagccaaacatcaagcagaatgtgatttgcttgaagatatgagattgccagcatactttgttgtcccc

SEQ ID NO: 673214 - DNA, 100 bp, Homo sapiens
caggaggaccagctggatcgacccccgggacaggtctattacaatggctaccatggagacacctctgaaacatttttggtgggcaatgtggacgaatgtg

SEQ ID NO: 673215 - DNA, 107 bp, Homo sapiens
actcatccacaatgatttctccagtgctcatcttgttctcgagttttctctgccatgttgctattgcaggacggaccgagggccctgtggtgacagcccagtacgac

SEQ ID NO: 673216 - DNA, 100 bp, Homo sapiens
ccggcgggagcgcgaacgagcgacggcggaacccgtgggcctgtggactgcagcctcggcggtcagcagtgcacgacctgcgacagcagatgacagcctt

SEQ ID NO: 673217 - DNA, 83 bp, Homo sapiens
ggcccggcggctgctgctgctgctgacgctgctgctgcccggcctcggggaaccacgtgaatgttgagggggcgacacacaag

SEQ ID NO: 673218 - DNA, 90 bp, Homo sapiens
aatgaaggggtctagatgtaaatgtcagtggaaaggagagctaccatcactaagacttcagtattgatgctcctccatcctttaagccag

SEQ ID NO: 673219 - DNA, 75 bp, Homo sapiens
gtgctgcacggaagaatatcagctccagaataatccagaatggctactctgatctatgttgataaggaaaatgga

SEQ ID NO: 673220 - DNA, 98 bp, Homo sapiens
cggctgatggagctctgaagcgggcagaggagctcaagactcaggccaatgactacttcaaagctgtgccctcctggctgaagaagccccaagacagc

SEQ ID NO: 673221 - DNA, 51 bp, Homo sapiens
tatatttcctttcaaaaagctgtattctttctaccagcagttgcatgaaca

SEQ ID NO: 673222 - DNA, 83 bp, Homo sapiens
aagagaaccctgcggaggagaccggcgaggagaagcagcaattctgtggtgttcttggtcacacatttatggagtttctgaag

SEQ ID NO: 673223 - DNA, 75 bp, Homo sapiens
gcaatattcaagaaggtgatgttgtattgaaggtgacttaagagattaaaattaatttggttgctgttggttctg

SEQ ID NO: 673224 - DNA, 75 bp, Homo sapiens
tctccgtcaatggctctgtgcagctgtcctacatcagcttccaggagatctattgggaaactgattataaccact

SEQ ID NO: 673225 - DNA, 82 bp, Homo sapiens
aagaagatgatgctccaagaacaatagcttgccctcataaaacaatgcagatcttcgtgaagactctgactggtaagaccat

SEQ ID NO: 673226 - DNA, 100 bp, Homo sapiens
ccatttggattctctgatttcactgccaagattctcatatacagaagatgaagctaggaaaataggagtggttggctgggtgaagaataccagcaaaggc

SEQ ID NO: 673227 - DNA, 83 bp, Homo sapiens
tttgtccgggaagctgatcctcagcttggaccccacgctgacctgtttcgcaaacacgctcgactacctgtgaagtggatggc

SEQ ID NO: 673228 - DNA, 100 bp, Homo sapiens
agctccaggagttcgtctcttacgtctgcggaagtgcagctgcctcagttcttagcgcagctgccactgcagagccccgccatggaagacacgccgttgg

SEQ ID NO: 673229 - DNA, 100 bp, Homo sapiens
gacgcagaatctgtttcacacaacaactgctatttgaagttggcttttgaaacgatgagtgttatatctgtggtcactaactgtgcgctgattggaatgt

SEQ ID NO: 673230 - DNA, 82 bp, Homo sapiens
tccctaatgatgatgctcagtttgatgcgtcacactacgacagtgagaaaggagcaaaagatacagatattgtggatgaagc

SEQ ID NO: 673231 - DNA, 75 bp, Homo sapiens
cattgacgccatgtcgggttattcgagtgaccgagaccgcggccgggaccgaggactagacgcttgaagcaaagc

SEQ ID NO: 673232 - DNA, 83 bp, Homo sapiens
atctatatcctttggcagctcacaggctgctccagttacagcaccacccggccgctgcacccggctgctcccaggccccccag

SEQ ID NO: 673233 - DNA, 75 bp, Homo sapiens
tgattgactgggctggcgttaactgtgcggaggcaggacccagatcaacttcactgtggccattgatttcactgc

SEQ ID NO: 673234 - DNA, 80 bp, Homo sapiens
gagcccgaggacatggagatggaaggggacggcaaaacagaacagaaaggcggagataaaaagaggggtgttaaaagacc

SEQ ID NO: 673235 - DNA, 83 bp, Homo sapiens
agaagacactacagcctcaaggaggtccacgccatccctctgcgctcctcctgggtcatgacctgtgcatatgccccttctgg

SEQ ID NO: 673236 - DNA, 98 bp, Homo sapiens
gcctcctcctaccctcgccatgtttcttacccggtctgagtacgacagatgcgacctaaagtcatgtggcacctccttcgaaggtacatggcatcccg

SEQ ID NO: 673237 - DNA, 75 bp, Homo sapiens
ccgatccagcctgcggagcctgtggggcagcatcaacaacagcaacttgtgattggcggtgaccggatattcagt

SEQ ID NO: 673238 - DNA, 90 bp, Homo sapiens
gccagaaggaagatggcggatctggaggagcagttgtctgatgaagagaaggcacgcatgtgtaccagtggactttgaagaggtgcacgt

SEQ ID NO: 673239 - DNA, 74 bp, Homo sapiens
gcgaaatccattgtcttccaccgaaagaagaatcttcagcgttccaatccacatgctgcctatcccaaccctgg

SEQ ID NO: 673240 - DNA, 75 bp, Homo sapiens
cagcccccaacgctgggccaggagatcctggagggccccccaccccaagcaggaaccccaggagatcaattttcc

SEQ ID NO: 673241 - DNA, 100 bp, Homo sapiens
ttggaaggaatccacggcattccagtgtgtcctcaagtggctggacggaccggtaattaggcagatggttctggcatttatgacccttgtgaaaaagaag

SEQ ID NO: 673242 - DNA, 90 bp, Homo sapiens
cctgtgcgggatggaacaaaaggatctcccattaaccagtcataatgaagtaagaacaagaagatggggaagaggaagtgtaaaaccgtg

SEQ ID NO: 673243 - DNA, 74 bp, Homo sapiens
aggcaggaatcaatccattcaatggaagtgaaagtacttagcattgatcaaagaaatttcaaattacgatcaat

SEQ ID NO: 673244 - DNA, 82 bp, Homo sapiens
aggtgtgggagatcgtgggcgagctgggcgacggcgccttcggcaaggtttacaagttgatattcactgatggactccaaag

SEQ ID NO: 673245 - DNA, 82 bp, Homo sapiens
agaaaatcgagacctcaagtaatcattcccaagtatctgagcccagagaggaaggctctgcccacctggctgtgcctggcgt

SEQ ID NO: 673246 - DNA, 100 bp, Homo sapiens
gggaggtgcgtcagatccgagctcgccatccagtttcctctccactagtccccccagttggagatctgaagccagcagacctgcagaacttggctcccgg

SEQ ID NO: 673247 - DNA, 100 bp, Homo sapiens
acgtttctcctatttcctgcgggttgcagcgcctacttgaacttactcagaccacctacttctctagcagggccatgaagcccccaggaggagaatcgag

SEQ ID NO: 673248 - DNA, 74 bp, Homo sapiens
gcctgggctggagtgttacattcagttcctggactccgtgaacccttaggagaaatcttgagagtggacagcaa

SEQ ID NO: 673249 - DNA, 100 bp, Homo sapiens
aggaggatgaacactatgattaccaccaggagattgcaagttcagaatgaccgaagaagcatgccgaacacggagtcagaaacgagcgcttgaacgggac

SEQ ID NO: 673250 - DNA, 100 bp, Homo sapiens
agaaccgcaggatcaaccttctttctcatgactatggagatattgttgctcaggagcttctctacaggttttttggaacgaagtggatgatgttcctcgc

SEQ ID NO: 673251 - DNA, 100 bp, Homo sapiens
cattgcagtggggacgatgagacccaaggacattcagccaagagggaaatatactgtggcctcatgaataggaatgtctgcccatatgtcaggattggaa

SEQ ID NO: 673252 - DNA, 90 bp, Homo sapiens
cccaaagagcaactgaagattcatacgcagctggcagatattatcatagttgctgcaggagcatctttccttgaagaagtacattattga

SEQ ID NO: 673253 - DNA, 100 bp, Homo sapiens
gatcacgtgacacgatttttgaaagactgccaggaactcctgccaccgccaccggctcccatggcccacatacccagtgggggtgccccagcagcggggg

SEQ ID NO: 673254 - DNA, 100 bp, Homo sapiens
ctgccagcgcagccgccagcgccggaatgtaaccggaagactcctggtgggccttcgatggtggaaccagatagatgaagatgggaagagccactggatc

SEQ ID NO: 673255 - DNA, 104 bp, Homo sapiens
caccttcgtggtcgtctggtcctactacgcgtacgtggtggagctctgcgtgtgtactccaaagattcaggtttactcacgtcatccagcagagaatggaaagt

SEQ ID NO: 673256 - DNA, 100 bp, Homo sapiens
ccaggccccgccgaggcggccagatgaacctctagtcttgctttgaaaaaatcattctgtgtaactcttgactgtgactaagttcctaatacacctgttg

SEQ ID NO: 673257 - DNA, 75 bp, Homo sapiens
tttcatcacatcatataagtctgtgcaggacctagatgtgaaggctggtggaggctgtgtaatgaccattggaga

SEQ ID NO: 673258 - DNA, 90 bp, Homo sapiens
cagaacctttgacttggtgttgaaagtgaaatgtcatgcctctgaaaatgaaggcatgtaaggaggaatcaagaagctgtgacatattct

SEQ ID NO: 673259 - DNA, 100 bp, Homo sapiens
ccaagatgtcgcagacggccatgtccgaaacctacggtgactattatatggttaaaaagattttggaggaaaacagttcaggtgacttgaacataaattg

SEQ ID NO: 673260 - DNA, 82 bp, Homo sapiens
gccaagctcgtggcctgcctctgcgtgcgtgctgacctcgctatcaaatacccaagttggatgttgctgccacagatcctgt

SEQ ID NO: 673261 - DNA, 108 bp, Homo sapiens
gctccaggttaggccgagctttgcgggaaagcagcggtgtcatggagaaactccagctgggcccagagattctgcagcgggaaaatccaaggcttatttatgccaggc

SEQ ID NO: 673262 - DNA, 100 bp, Homo sapiens
gaatgtcaaagttaagtggaaaagcagcggtatttctctgcctcctgtggacaaaaaaagggagtgtttgccattgtggagatgggggacgtgggtgctc

SEQ ID NO: 673263 - DNA, 100 bp, Homo sapiens
actccgtgacctggtacatcgccgagttctatgtatggccggtacactcaggaccttggggcctttgccaaagaggaagctgctcggattcgcctgggag

SEQ ID NO: 673264 - DNA, 100 bp, Homo sapiens
ctgggaccggtttgccgctgaggagtatgagacgcttgttgcagaggaatctgcccaagcacaattccaggaagggaccatcagcacgtgcccatcgaca

SEQ ID NO: 673265 - DNA, 75 bp, Homo sapiens
aaaggatccacaagtgctctaaatccagtaaacctggcagtgttaaaactgaacgagcaggggcttttggacaaa

SEQ ID NO: 673266 - DNA, 90 bp, Homo sapiens
attacgagggttcttgggaatagcagggtatttcagttactaactgatctgaaagagcagcgtaaagaaagtggaaagaataaacacagc

SEQ ID NO: 673267 - DNA, 100 bp, Homo sapiens
caagctgtccccagaggactacacgctcaagatcacaaaatttgtccaggatagacatagagctagaagaaacagacttcgtaaagatcaacttaagaaa

SEQ ID NO: 673268 - DNA, 100 bp, Homo sapiens
ccgccatggctgcgtcggagctctacacaaagagagcccaagaggatgagctggttaaaataagaaagtattacgagacatccaaagaagaagaactgaa

SEQ ID NO: 673269 - DNA, 82 bp, Homo sapiens
aactgaaaaaattcttaatgttaacagaatgtttttgaagaagcttcaggaacaagacagtgtatatcaagatttacaaacc

SEQ ID NO: 673270 - DNA, 90 bp, Homo sapiens
taaaggtcttcagactaatgttagcataccaaagttggaagatctaaggcaaagactcaaggatctggaagataaagagaagaaagagaa

SEQ ID NO: 673271 - DNA, 100 bp, Homo sapiens
caaaatgtcaacaaattgatggctctggattaatcgaattacagctgctagccaggaacatggactgaagtatccagcgctcattgggaatttagttaag

SEQ ID NO: 673272 - DNA, 90 bp, Homo sapiens
tgctagtcctggtggatctgcagtacgaagaattgcttcagattgctggaattagcccacatggtaatgctttaggagcatcaatgcagc

SEQ ID NO: 673273 - DNA, 100 bp, Homo sapiens
aagggaactttgaatattgtcaaggttaatgttgaagaaggaaaatgcggaagtcgtcatttgacaagttttataaatgagtatttgaagctcaggaata

SEQ ID NO: 673274 - DNA, 90 bp, Homo sapiens
atggaggccctggagctgcaaggagcgattgataggttatatgattggaaaaagagtcctgactctgatgtggctgctactttaaagaag

SEQ ID NO: 673275 - DNA, 98 bp, Homo sapiens
gatggcggtgcaggagtcggcggctcagttgtccatgaccctgaaggtccaggagtacccgaccctcaaggtcgaacaagtaaaattacttgaccgat

SEQ ID NO: 673276 - DNA, 100 bp, Homo sapiens
cttctttcttttccgtccagtgtcggcaaggggttgtcaccggcttccgcatccaagatgaagattggatgaaaaatctgacaaacagtatgctgaaaat

SEQ ID NO: 673277 - DNA, 100 bp, Homo sapiens
tgccatggacgacgaggaggagacgtaccggctctggaaaatccgcaagaccatcatgcaggaatggttttagggaagactgttgccggatgacaaggct

SEQ ID NO: 673278 - DNA, 80 bp, Homo sapiens
tttgtgtatgaagctcaagatgtggggagtggcagagagtatgcattaaagtgtactaatggtcacttgatgtgcgctgg

SEQ ID NO: 673279 - DNA, 98 bp, Homo sapiens
cgcggactgaaggagactgaaggcaaaaacgtccccgaagccagcagttgtagagactgttacaacagccaagccacagcagatacaagcgctgatgg

SEQ ID NO: 673280 - DNA, 82 bp, Homo sapiens
tttgatggtggccctcttgatccccggcttgctgaagtcaaacggaaggagagttttacatggaagtggcttacagaaactt

SEQ ID NO: 673281 - DNA, 115 bp, Homo sapiens
gatttggctacacacttatagatcttctgcactgtttacaggcacaggaagatattcctcgtcagcttgtctacattggtctttacctcttccacattgctggagcttacctttt

SEQ ID NO: 673282 - DNA, 60 bp, Homo sapiens
caccagtggaagatgatcacatcccaggtgttgactttaaggtgaaaacaatttcagtgg

SEQ ID NO: 673283 - DNA, 51 bp, Homo sapiens
agaaatgatcttagttctggaatagaaactggagcacccatcctaactgat

SEQ ID NO: 673284 - DNA, 82 bp, Homo sapiens
ggaggtagaagatggggaagatgagatgtcagaagctaaggacaatggcagtagagatgagaagcgaatgtctgtgacggag

SEQ ID NO: 673285 - DNA, 80 bp, Homo sapiens
aaaacaccagggcagagccagaaaagcaagagtttctgtttagatgaccagtctcctgggtgatcagcccatgacctaaa

SEQ ID NO: 673286 - DNA, 75 bp, Homo sapiens
acgacaggacgttggggcggcctggctccctcaggcgaagtttattttgagttggatgctgataaaatatgtaga

SEQ ID NO: 673287 - DNA, 100 bp, Homo sapiens
cgtggctcgggctcgggcggagctggagacgtgtggagctgttcgaggactcgcgggtgtgcagattactgatctctcattacccaactatctgatggca

SEQ ID NO: 673288 - DNA, 75 bp, Homo sapiens
ggcgccggccggctgcgaagacgcggtgggccgcccctccgcggaagaagtccctatagaaccatacaacatccc

SEQ ID NO: 673289 - DNA, 100 bp, Homo sapiens
tggggtggctctttgctaagtgctgctgttgcttcccgtgtagagctcctattaaggaaccaaaaaagttgatgcccaaaacatccctccccacagtcaa

SEQ ID NO: 673290 - DNA, 98 bp, Homo sapiens
cttccccctcacctatttggtcctcttggtcctcggatgtcacagcttttccatagaacaattggaagtggagctaaggattgtcctgggctgatgag

SEQ ID NO: 673291 - DNA, 76 bp, Homo sapiens
gagctgaatggaaaaaacattgaagacgtcattgcccagggtattgcactgcacaggccacattcacgtatatgat

SEQ ID NO: 673292 - DNA, 75 bp, Homo sapiens
tgaagagcaaccctgaaaaattactgaatgtgaagaaatgttaatttggagtggcccctggagtcagtttcctac

SEQ ID NO: 673293 - DNA, 75 bp, Homo sapiens
tacaccattgcctttgggatccggaatgtcacacacattgatcaggttatcaatactctggctgaccatcatcat

SEQ ID NO: 673294 - DNA, 82 bp, Homo sapiens
gcgcctctactacctctggatgtatttatccaataatggacaagtcaagccgcacacgtcttgctctcattatctgcaatga

SEQ ID NO: 673295 - DNA, 80 bp, Homo sapiens
atgaagatgatgtagacactggactattagctccaaaaggaattcttcatttgtctcctgatgtttatcaagagatggaa

SEQ ID NO: 673296 - DNA, 100 bp, Homo sapiens
aaaatgcacagaattaccaaaaacttctgcatccatattctggtgtaactgtggacatcaccattcaggaagctaaattttcaggagtgaaaagaaaaag

SEQ ID NO: 673297 - DNA, 75 bp, Homo sapiens
catgcctgatggagatcgcccagcgggcagttagcacccaggatcttttgccagaaatgagggcatactggcctg

SEQ ID NO: 673298 - DNA, 75 bp, Homo sapiens
agtgaaacctccaattggattgcagccaacacaaaggtgcctgtgtcggtggccatgatgtcgccgcagatgctt

SEQ ID NO: 673299 - DNA, 75 bp, Homo sapiens
tcagaggcgagagtggccccagccgggccagaagcagacatctgaatgggactccgagtgccttacatccctgca

SEQ ID NO: 673300 - DNA, 100 bp, Homo sapiens
tgggaaacctgtagggtatggtccagctgtgccgcaccgaggcgagcaggagcagggaacaggtaaaatagaactgcacgggaaacccatagaagttgag

SEQ ID NO: 673301 - DNA, 101 bp, Homo sapiens
ggaccgtccacccctccgcgctggcggtgtggacgcggaactcagcggagaaacgcgattgagatcctccccggcgtgaaggtcatcatcgcacacaccga

SEQ ID NO: 673302 - DNA, 75 bp, Homo sapiens
cctggatgtgtcggtgaccatctcgcaggatgccggcagctcaggagcatctatcggctgcacgccaacatcaac

SEQ ID NO: 673303 - DNA, 100 bp, Homo sapiens
atgacgaacacaaagggaaagaggagaggcacccgatatatgttctctaggccttttagaaaacatgtgttgtctcagcttggctctgccgagaacagac

SEQ ID NO: 673304 - DNA, 98 bp, Homo sapiens
ccactccgcggcgttcggggaaatggctgcgagaccctagaggcctgcggcctgcgctctccctgtccagccgcctgcagctgaccctgtaccagtac

SEQ ID NO: 673305 - DNA, 100 bp, Homo sapiens
ctctccaggaaggtactcaccaattccaaagcacatgcttgttgacgacgactacaccagacatttgcctgaaaaaattaaggatgaccagcagctgaag

SEQ ID NO: 673306 - DNA, 98 bp, Homo sapiens
caccccctgttcctgcagaacacagcaataccaagtttccaggcccgaagagcatcccagactattgggactcctctgccctgccagacccaggcttt

SEQ ID NO: 673307 - DNA, 75 bp, Homo sapiens
tttttggccccaggtgactcttaactcccaggacagagatgatgaggagtctgatgaggaagctgtgaagaaaac

SEQ ID NO: 673308 - DNA, 74 bp, Homo sapiens
ccaggtctccgtgcagcccaacttccagcaggacaaggactttgagggccagagtcccaaatgcacccagggtg

SEQ ID NO: 673309 - DNA, 110 bp, Homo sapiens
aattgataatgccagagaactacaagaacagagggattctttgactcagaaactacagttcacacaaaagatgttggacaatttctacaattttgcttcatcatttgctg

SEQ ID NO: 673310 - DNA, 75 bp, Homo sapiens
agaaaaagagaagaagatgaagaaacccagcttgatattgttgatcaagaagctactctagaagtcggagcagag

SEQ ID NO: 673311 - DNA, 49 bp, Homo sapiens
accctcgacctccagtgcagttcccaaacaaatttacatgtattggaga

SEQ ID NO: 673312 - DNA, 75 bp, Homo sapiens
aaggaggccttccagctgtttgaccgaacagcacccaagaaaacctcatttggctcgctgaaggatgaagaccgg

SEQ ID NO: 673313 - DNA, 74 bp, Homo sapiens
aacagtggtgctgtggaatgcccagccgagccaaaaacctgtatatcatctccgtgaaggggatcaagggacgg

SEQ ID NO: 673314 - DNA, 90 bp, Homo sapiens
tggggccgcagcgcgtggccgaggcgggcggcggccagctgggctccacagcccagggagcatattaatgaaaagtgccataaactgaaa

SEQ ID NO: 673315 - DNA, 90 bp, Homo sapiens
acgattgttgtttcttggactgcagaaattggaagagacaatgtgttgaacatcattaaccagatcatggatgagtgcatcccccaggac

SEQ ID NO: 673316 - DNA, 75 bp, Homo sapiens
cttgttaagagtggacaggttaagggactcccaggaatatcagaataactgaagtgaagtgatggactccgattt

SEQ ID NO: 673317 - DNA, 50 bp, Homo sapiens
caccgccaagcagagccccctctcccagatatgagatcctgactccaaac

SEQ ID NO: 673318 - DNA, 98 bp, Homo sapiens
gcgatggcagcgggagatgatggagcagagatacgcccagtatggggaggatgacgaggagatcgccacctgcaacagccggaacgggaacccggccc

SEQ ID NO: 673319 - DNA, 100 bp, Homo sapiens
ggcgctggagagggggcgctgagctgttgggtactatactggcaattgctggagaagattttgcaattgttgcttctgatactcgattgagtgaagggtt

SEQ ID NO: 673320 - DNA, 75 bp, Homo sapiens
ttctccttgctgacactagaagaaactatgttccaacttcctgtcaacaatcttggcagtttaagaaaagcccgg

SEQ ID NO: 673321 - DNA, 97 bp, Homo sapiens
ggcacttcattggccacctacagaaacaaaatgtcaacaaattgatggatgtggaattagaagaagctattagaagaagtcttgaggaaatgtaatt

SEQ ID NO: 673322 - DNA, 75 bp, Homo sapiens
atgaacctgagccttcagtcaagaccctccagcttgcctgttgtttttcaccattcagaacattgcctgaagcag

SEQ ID NO: 673323 - DNA, 92 bp, Homo sapiens
ctccgaaccagcatccccaccatcaacatggagaacaagaccacgtgggggaggatactgaggcacacagaggggagtcaccagccagagga

SEQ ID NO: 673324 - DNA, 51 bp, Homo sapiens
agaccctagaggcctgcggcctgcggctgaccccgcactacatctacccac

SEQ ID NO: 673325 - DNA, 100 bp, Homo sapiens
gccaaccccttcgagcaagacgtgggctgatcttcagacaagttctcagcgtttaaatctttcagcctccaatgctgcagtggctgaacttaaaccggat

SEQ ID NO: 673326 - DNA, 82 bp, Homo sapiens
tcacgcggacatcgtctcctgtgtggcgatggtcttcctgctggggctcatgtttgaggttcagcagctggacatggagaac

SEQ ID NO: 673327 - DNA, 74 bp, Homo sapiens
tgttcactttttacacactcgtgatgtagttcatcttgatttgaaggtacaacaaataacactgtgactccaac

SEQ ID NO: 673328 - DNA, 77 bp, Homo sapiens
attaaatgccgagaaggccagtacggtgtgggccatgtttgaggattgccccagcattcagttctatgagtaataaa

SEQ ID NO: 673329 - DNA, 101 bp, Homo sapiens
tccccgtccagaagcctgtaggaaagcggaagcggcctggcaggggaaggatcgagacacgatgaggcgagtggtacgacagagcaagtttcggcatgtat

SEQ ID NO: 673330 - DNA, 98 bp, Homo sapiens
agtttctgaggaatttcatcagagtccttaaatgcactggaagaccaagatttagatgctctcatggcagatctggtagcagacataagtgaggctga

SEQ ID NO: 673331 - DNA, 100 bp, Homo sapiens
aagaacatgctctaaagcccttcacagcaagacccaggaagccgcgggcaaactcagactcgaaggacctcttctcagctctcatcaagggccccactcg

SEQ ID NO: 673332 - DNA, 50 bp, Homo sapiens
agctgcagcggaggaaggcgaggatggagctgtagttacaccctccagac

SEQ ID NO: 673333 - DNA, 75 bp, Homo sapiens
agaaaaaggaagactctacacccttctcgttattcagggaagtgttcgccagttactacatgaaaagataagaga

SEQ ID NO: 673334 - DNA, 90 bp, Homo sapiens
actgcagcattgggaagaaaaggctagagaagtcaccctccttcgcctcggagtgggatgagtagtattattgattccacagaatacagc

SEQ ID NO: 673335 - DNA, 75 bp, Homo sapiens
ctggactttgaggccacgtgcgacaagccacagattcatcctcagcatgatcgggagggtttactgagcatggca

SEQ ID NO: 673336 - DNA, 95 bp, Homo sapiens
atggcaaccatataacaatcagtcacactcagggccccgtgaagcacgtgtacagagtcctgcagtgtcaggaagaagagctcacgcagatggtg

SEQ ID NO: 673337 - DNA, 100 bp, Homo sapiens
gactcatccccgccctgtgggagaagcacagtccacaggtagtaaaggcttttgtcgttctaaatcctgattacaagtcacatgatcaagaacaactaat

SEQ ID NO: 673338 - DNA, 100 bp, Homo sapiens
tggtggactcagagaccaataaaaataaactgcttgaacatcctttgactggttagccagaattctggggagacattgccaaggaattttactggaagac

SEQ ID NO: 673339 - DNA, 50 bp, Homo sapiens
caatccttggctcactgaggaggtttgccaccaccaaagatccctgacaa

SEQ ID NO: 673340 - DNA, 76 bp, Homo sapiens
cctccgggtacacgatgaattccagcaacaggaggccactgtctgcagctcccgtgaagatgtccactccagaccc

SEQ ID NO: 673341 - DNA, 76 bp, Homo sapiens
ggagaggaggctggaagaggaagatgcctagcacagaccttctgatgttggctttaatgactgatgaaacaatatc

SEQ ID NO: 673342 - DNA, 87 bp, Homo sapiens
ggcacttagaaccgcagcagggacgtcggtttgctatcgggactcggcgaggacggagtgaaacctcggtccggctgggctattgat

SEQ ID NO: 673343 - DNA, 101 bp, Homo sapiens
atgagtctgacaacgaacttgtatgagggtcatattgaaaaggatgcccgggaattcctggacaagcagggttgcttcaatcagcttttgtatgacatccg

SEQ ID NO: 673344 - DNA, 110 bp, Homo sapiens
gcggtttgtcgccagaaggaagatggcggatctggaggagcagttgtctgatgaagagaaggccgtcgctttcgggttctctcatcgcttcgtcgttcgccaatgtttga

SEQ ID NO: 673345 - DNA, 74 bp, Homo sapiens
cttcccagagtgctgggattacagcttatcacacagactttcagccaccacaatcagctggcacagaagacccg

SEQ ID NO: 673346 - DNA, 90 bp, Homo sapiens
cagtaccacagggacacttggggcctctcggatgagcacttccagcccagacctgtaactcaactggacccaaataaatcattattggag

SEQ ID NO: 673347 - DNA, 49 bp, Homo sapiens
cagagcattcagctgtctcaaatgcagatttctggttcagtaagggtga

SEQ ID NO: 673348 - DNA, 75 bp, Homo sapiens
gcccacaacaaggcggcggtggactgattctggctgtgactcagtcactgacactgagcctgaggacgagaaggt

SEQ ID NO: 673349 - DNA, 82 bp, Homo sapiens
gtgcgttgcgtgccctacttcaaggataagggcgacagcaacagctctgccggctggaaggaattcgaatttagagtttaat

SEQ ID NO: 673350 - DNA, 100 bp, Homo sapiens
atgttcaagtttaccaaaagagaggcaccgctggaacactaatgaggtagctacagcaagctgggtagcaggcagatccaaaggatatcatgaagtttcc

SEQ ID NO: 673351 - DNA, 74 bp, Homo sapiens
cattgccagctggaaggaaattgctacaagcaactcttcggctaacttcaaagactatcttgctaatcatggcc

SEQ ID NO: 673352 - DNA, 51 bp, Homo sapiens
cgttttccacaggcatcaaaatgcagacctactccaatgaagtccattgtg

SEQ ID NO: 673353 - DNA, 74 bp, Homo sapiens
ctgatatctgctcatggaaatagcagtagggcactcctaaaacacctggaaggagcatattaatgaaaagtgcc

SEQ ID NO: 673354 - DNA, 74 bp, Homo sapiens
agggaccacggtcaccgtctcctcagagccctatgagtttgtctctctggaatggctgcaaaagtggttggatg

SEQ ID NO: 673355 - DNA, 100 bp, Homo sapiens
cttaaactccctaaaatctccgcagctctggttcctgttgcggccggtgtttgtaaaatgtatgaagaacatctgaaaagaatgaatcccaacagtccct

SEQ ID NO: 673356 - DNA, 50 bp, Homo sapiens
acttgcaagctgctggatttgatgaggttatgcttcctcctggagcccag

SEQ ID NO: 673357 - DNA, 90 bp, Homo sapiens
tggcgctcaagatcgacctcactgaggctcgcgtgcaggtgcttcctttcacaactttttccagagggcaggcgtcctagctccagttgc

SEQ ID NO: 673358 - DNA, 100 bp, Homo sapiens
tgagaggctgggcacctacatgggccataccggagctgtgtggtgtgtggacgctgactcacggatgataccatcggggaccttaagaagctgattgcag

SEQ ID NO: 673359 - DNA, 75 bp, Homo sapiens
cgtcgaggggacgattggaatgacaggcttcatccctccacccctcatcttcggggctggcatcgactccacctg

SEQ ID NO: 673360 - DNA, 51 bp, Homo sapiens
cgcttcattggaatgaagtcccgaggtgctgggtcttcagctctaaagagg

SEQ ID NO: 673361 - DNA, 75 bp, Homo sapiens
caagaatgctgaactagagaaggatgctcagaacagattggcacccattgggaggttccgagtctgaggaagaca

SEQ ID NO: 673362 - DNA, 100 bp, Homo sapiens
taattgctgaacttaaaaagcagtctaaacctgtgaccacccctgaagaaattgcacagttgtgcagaagattctgaccttatttgaggcttacatatag

SEQ ID NO: 673363 - DNA, 50 bp, Homo sapiens
cggcgatcgagaaagtgcgcaaatggtgtctcccagtctgctaaagccct

SEQ ID NO: 673364 - DNA, 76 bp, Homo sapiens
cttctggaaatgagtcttcaagctctgtaagacattacgtagagaaatcgacactcttaatgaacgtttagctgct

SEQ ID NO: 673365 - DNA, 100 bp, Homo sapiens
gcggacatgctgggtggatccggatcgcatggaagacgcagcctggccgcgctctcccatgccggtggtggtgtgcacattgagccccggtatagacagt

SEQ ID NO: 673366 - DNA, 75 bp, Homo sapiens
cggggaccagcagctgtcgccgccgctctcaggcctggcatgcgtgggcagtgatgaacttcgaagctgtgctac

SEQ ID NO: 673367 - DNA, 83 bp, Homo sapiens
ccagggagtagggctgaggaccgcaaaaatcaatcgtgctggagaatctggtaaaagcaccattgtgaagcagatgaggatcc

SEQ ID NO: 673368 - DNA, 91 bp, Homo sapiens
gccgtgctgcttatggcggcgctggagagggggcgctgagctgttgggagtcttatcttaggagcattagcttgtttcatcatcacccaag

SEQ ID NO: 673369 - DNA, 100 bp, Homo sapiens
ctaggacgccgagcggtgactccccgccgctcccgggggccgtgacgaaatgcactcggtgatggaaagagagccactattctgaagaacacttggccaa

SEQ ID NO: 673370 - DNA, 100 bp, Homo sapiens
gcgggacccaggcggttgaggctggtcagatatttggagtctgggagtgatccttttcatgttggtgtgtgggcagccgccctttcaagaagccaatgac

SEQ ID NO: 673371 - DNA, 100 bp, Homo sapiens
agaacacggagctcgtcaagtcacccagcctgactgaaacgattgaatgcctgcaaaccaacattgatcacctccagagccaagtggaggagctgaagtc

SEQ ID NO: 673372 - DNA, 100 bp, Homo sapiens
ggccggccagaagcgggcggcgcgggggagatgagatcctgaaggagctagacgagtgctacgagcgcttcagtcgcgagacagacggggcgcagaagcg

SEQ ID NO: 673373 - DNA, 100 bp, Homo sapiens
gctggagaggagggtggacgaagctctctccagaaagacatcctgagaggacttggcagtatttgcaaccacgtggcttcacgagtccgccaaaccatca

SEQ ID NO: 673374 - DNA, 88 bp, Homo sapiens
tcgccacaccactgtttgtgctggatcgcagcgctgcctttccttatgaagaagacacaactcccctttgaattggagatttactaca

SEQ ID NO: 673375 - DNA, 100 bp, Homo sapiens
ctttcagaggatatatcccagcaaaacaaaccgagaagagacggtccagcagacaggtgaagagaaagcgctacactgaagacctggagttcaagatttc

SEQ ID NO: 673376 - DNA, 96 bp, Homo sapiens
taagataacatctctgccatgacatatggaaagttgatcatgtgctggagcgcttgcagagtgaaagcctggtgaacagaaggaaaccatgtcatg

SEQ ID NO: 673377 - DNA, 74 bp, Homo sapiens
cgtcgcgagatggaacgctggaaggagcatttctaccagaggcagcaccggctgcccgagccctcctgcccaca

SEQ ID NO: 673378 - DNA, 71 bp, Homo sapiens
aacctcacagccagagccagagatgttgatcttgtctcagaatattgcccaactggaggcccaggtggaaa

SEQ ID NO: 673379 - DNA, 101 bp, Homo sapiens
ctcgagaggcgcgcgccccgccgagatgtacgggttttgccaggccgggaaggacctgcgccttgtctccatttccaacgagcccatggatgtccctgcgg

SEQ ID NO: 673380 - DNA, 75 bp, Homo sapiens
gctatggtggtgcaggacccgctgctctgcgatctgccgatccagctcggttggtttagcaaaagcagctctaga

SEQ ID NO: 673381 - DNA, 75 bp, Homo sapiens
aactgttggagtttatatacacaggaactttaaatcttgacagatcaattctctccattttcgtctagcagtgga

SEQ ID NO: 673382 - DNA, 90 bp, Homo sapiens
cccgcaatcccacatggccgaaatgacaggtggcagaaagagcactctattattggaataatgaatacatcatgagtttgatagaagaaa

SEQ ID NO: 673383 - DNA, 75 bp, Homo sapiens
tctggatctcagctgctcttgaaggctctcccggctgtgatagaccttcagttacagagagagggagcagagtgg

SEQ ID NO: 673384 - DNA, 95 bp, Homo sapiens
caaagcaacagaagtttatcaaggctgtcacacatcaagttaaatttggtcaacaaaatccacgtcagatatggtccggaaaaagaacccccctc

SEQ ID NO: 673385 - DNA, 83 bp, Homo sapiens
gtcgtggaagcaggactgcgccgcgtcttcctcaaggcaggtaaaaatcaaggtgaccccaagaaaatggctcctcctccaaa

SEQ ID NO: 673386 - DNA, 75 bp, Homo sapiens
taccatggaccatcctgctggtcagcactgcggctggtataagtgtgctagcggagtgtctagattgtcctgaat

SEQ ID NO: 673387 - DNA, 80 bp, Homo sapiens
ggctccatggacacagacctgctgtgtgtgcttctgcgccccagtgttctaagaacggaagcatctgggctggatggaat

SEQ ID NO: 673388 - DNA, 99 bp, Homo sapiens
ggaatgccaaataagaaatttctggttaaacaaaatccttctgaaacaagaggtctgttaccatctgaagggatagttcatcttcattcagaaactaag

SEQ ID NO: 673389 - DNA, 83 bp, Homo sapiens
agcgactgaaggaggaatatcagtcccttatccgggttctgccggagacttccatttggcctcaatgtgaaattaaagtagaa

SEQ ID NO: 673390 - DNA, 71 bp, Homo sapiens
cctggaagcaagccgccgtggagaaggaagaactgtgctgaggtacgctctgttaggattccacagattgg

SEQ ID NO: 673391 - DNA, 74 bp, Homo sapiens
gaacaccaaccaaattgtcgccattaagaaagagtagctatccagatcacaaggaaggggaggaccccaataag

SEQ ID NO: 673392 - DNA, 97 bp, Homo sapiens
tcatcttcctgctcgtggccaacatcctgctggtcaacttgctcattgccatgttcaggtgcaggtgatggtcctaccagtgtgtctgttgaggtca

SEQ ID NO: 673393 - DNA, 83 bp, Homo sapiens
gctccctggacaactccgagcaggtatcacctcttctgggctcaagatggacaacaagaagcgcctggcctacgccatcatcc

SEQ ID NO: 673394 - DNA, 51 bp, Homo sapiens
tcttcttcgagtatttgtagaaggattcatgatgttgctatcaaaagttga

SEQ ID NO: 673395 - DNA, 118 bp, Homo sapiens
ccattgggggttgatacagcagagacgtcatacttggaaatggctgcaggttcagatcagagcaccataacatggtgtgggaagtgaagacaaatcagatgcctaatgcagtacagaa

SEQ ID NO: 673396 - DNA, 100 bp, Homo sapiens
ctggagcgttttcggggctgtaaagggagaatggcgcatgcgcatattcagggcggaaggcgcgctaagagcaggtgcctggaatacttattaagaaacg

SEQ ID NO: 673397 - DNA, 75 bp, Homo sapiens
gaacgaggacgcggactgcgaaggcaggaaagatcgtcctacttggagtaccaaaaagtaatgagagaaatagaa

SEQ ID NO: 673398 - DNA, 83 bp, Homo sapiens
caacatcctgtcacaggccatgctctggcaaaaacctgctctgttaaaagcgaaaatgaaacaattgcctgcggcaacagttc

SEQ ID NO: 673399 - DNA, 83 bp, Homo sapiens
cttgtttgtggatcgctgtgatcgtcacttgccatccagtccaatggatcagatgggcaagatgagacctcagccatatggcg

SEQ ID NO: 673400 - DNA, 100 bp, Homo sapiens
agacgcactgctacaaggtccatgaccatctgagtgggacatacttttgaaggatgtgcaatgttcaatcataagtgtgacaaaaactgacaagcaggaa

SEQ ID NO: 673401 - DNA, 75 bp, Homo sapiens
cgctccttcccgctccctcacacaccggcctcagcccgcaccgagtgaagatagtccaagtcctaagagacagcg

SEQ ID NO: 673402 - DNA, 74 bp, Homo sapiens
ggcggccggccgacccttcctgtcgctgacggcgactgcgggaggccagggttgaagctttgagagaagcagca

SEQ ID NO: 673403 - DNA, 100 bp, Homo sapiens
gtgacacgctgggggtcggcaccttcggcaaagtgaaggatatggtccagacctgtacatgaataactttggttagtcagagtgaaatattcaataatga

SEQ ID NO: 673404 - DNA, 101 bp, Homo sapiens
aaggacctacaggtttgtctcttccagatcagaactgaggaacaaaaacccccatcctgggaaaaatggggaagctggtgctgttacactaccaaactgtc

SEQ ID NO: 673405 - DNA, 83 bp, Homo sapiens
catcggcactctgaacgcggccaaggtgccggccgacaccggtaactaggatttctacctcaaccgcgagacctatgcaagga

SEQ ID NO: 673406 - DNA, 74 bp, Homo sapiens
aaaaagctgaaggtggaggcgccgcaagcgctgagaaagtgactgagaccgaagatgatagtgatagtgacagc

SEQ ID NO: 673407 - DNA, 83 bp, Homo sapiens
tgtcatttctatgctggcagaccctaatggagactcacctgctaatgttgatgctgcggtgggtcatgataactgggtacgtg

SEQ ID NO: 673408 - DNA, 74 bp, Homo sapiens
aactctccgggcggccgcacctgccaggttcatgcatgggagatctcagaccagttgttacagatccggcagga

SEQ ID NO: 673409 - DNA, 90 bp, Homo sapiens
gtgatgatagtattggcatttataatactgaactatggacctatgagtgcaaggatgatgctgaaaggaataacaaggcttatctctagg

SEQ ID NO: 673410 - DNA, 75 bp, Homo sapiens
tggagttttacagggaacatgtcaagccactcttcaatatggaagataaggacacatgacggaagtgtgtatttt

SEQ ID NO: 673411 - DNA, 100 bp, Homo sapiens
agcaattcctccctgttctacagtgagaggccgcagatcccctttgtgtggaaacgaccaggggattgttttaagaaaatggcagacaaaccagacatgg

SEQ ID NO: 673412 - DNA, 100 bp, Homo sapiens
agctgtagcttccagagacctgagtgaaaacaacgaccagagacagcaggaagattttcagtcaatgacttatggatttaaaatggctaacagtgtgaca

SEQ ID NO: 673413 - DNA, 75 bp, Homo sapiens
gctcagcatgatgtgtacaaaggcctacttccaggatattaatatgattctctcaatgatggatatcaacccagg

SEQ ID NO: 673414 - DNA, 100 bp, Homo sapiens
tgcgaagacatagaaatgaagtgacagtggaactgcggaaggtttcctggggccattactctggggatgaagaggacgcatactcggctgagccactgcc

SEQ ID NO: 673415 - DNA, 75 bp, Homo sapiens
gaagagcagagcggagggagccccagacacggatgctccagaccttgtatgattacttctggtgggaacgtctgt

SEQ ID NO: 673416 - DNA, 75 bp, Homo sapiens
ctcctgaaaacgtctgcccggcgtagcgggaacccagcatgattttcaggtgactgtgaagtgctgaccacactc

SEQ ID NO: 673417 - DNA, 82 bp, Homo sapiens
cggcgaacgcggagagcacgccatgaaggcctcgggcacggaccattgtagcactggtatacaatgtgctgaaaaccctaat

SEQ ID NO: 673418 - DNA, 90 bp, Homo sapiens
cgttatgaaataatttctgagatttccaagttgatcgttccaatttatgagaaacgtcgtgagtttgagcttgagtctactgaaagcatc

SEQ ID NO: 673419 - DNA, 100 bp, Homo sapiens
gggtggactggaggaggccgcgccgatgaacctgaccgaggctctaacaagagaagagatcacagaaacgtgaggatcaagaagccggactacaaggtcg

SEQ ID NO: 673420 - DNA, 75 bp, Homo sapiens
agggcacaaggccaggttcccaagagctcaggtcagaagccaatgacctggccctgaggctggctcgccactaca

SEQ ID NO: 673421 - DNA, 100 bp, Homo sapiens
tccgtgggcaacgtggccgacagcacagctgccttgaggtgcagtgttggggatccagagccatgtcggacctgctactactgggcctgattgggggcct

SEQ ID NO: 673422 - DNA, 100 bp, Homo sapiens
tgagccggaaagccgtgtcagatatgttgacggcttgcaaggtgtatgaaatctgaagagaagtcccttggtgtgggattacatacattttgcacaagag

SEQ ID NO: 673423 - DNA, 100 bp, Homo sapiens
gggggaagtcggcaaggacggcgagaagggtgacccctgtgaagtgtgcccaacactgcctgaagggttccagaactttgttggacttcctggaaagcca

SEQ ID NO: 673424 - DNA, 75 bp, Homo sapiens
gcaattgatgacagtgtcaaacaagagggtgcaattgaagcacttgcctatatttgtcaggatacgaatcaggtt

SEQ ID NO: 673425 - DNA, 82 bp, Homo sapiens
ctcgcttgcctacccgccggcccgcgggtctacttcctcaaagtcaccttcaggccattcagaggaggaaagagaggggaat

SEQ ID NO: 673426 - DNA, 98 bp, Homo sapiens
attttgctctcagtcatccttacccctaaagaaggagagtccagggatgtgatgattcaacgagaagccgatgtaaaaaataaggtaactgctgtggc

SEQ ID NO: 673427 - DNA, 109 bp, Homo sapiens
gatggcggatgccctgcagtacctgcagaaggtctctggagacatcttcagcagctcaaactggaggattataaggatcgcctgaaaagtggagagcatcttaatccag

SEQ ID NO: 673428 - DNA, 83 bp, Homo sapiens
ctccgcacgatgttcccctcgcggaggaaagcggcgcagctgccctgggaggacggcaggacacctcctacctgttcatcact

SEQ ID NO: 673429 - DNA, 82 bp, Homo sapiens
tgggacccaccgctgccctcagctccgagtccagggcgagaactgcatgaacttgcccccagacaaggtccagctgctgagc

SEQ ID NO: 673430 - DNA, 75 bp, Homo sapiens
gtactgcaaaaagtacacgagcttcaaggactccccctttggcttgagttttgtacggtttcatagccccccaga

SEQ ID NO: 673431 - DNA, 75 bp, Homo sapiens
tccagacgcccagccccacagccgtttcctcttcctgaacacgctcttcatccagcgcggccggcacgagaccac

SEQ ID NO: 673432 - DNA, 74 bp, Homo sapiens
ctctccaccaccgaccgcgtcatcaaagaattcagaaggagctggcggacatcactttagaccctccacctaat

SEQ ID NO: 673433 - DNA, 75 bp, Homo sapiens
agtcttggattcgtgaacagaccacagtggaccacttctgggggtctacacggacgtgcagcaggtggccagcag

SEQ ID NO: 673434 - DNA, 100 bp, Homo sapiens
aaaaagaagaatttattcactcaagactaaaaactaaaggcctgggcctgagaactgaatcagacttgtctgcagcgcagattgctacatattgcttggc

SEQ ID NO: 673435 - DNA, 101 bp, Homo sapiens
atttaggaagtgcgttcctgaagttctcagtgtttacaaaggagttgacagcacttttcaaaaacctgatttttcaagaggtaaaaagtagtgatattgcc

SEQ ID NO: 673436 - DNA, 99 bp, Homo sapiens
tggtgctggaaggggccagtctggagacagtcaagggggtgtgggtatggctgccgtgcagctgtgccgtacagtggagaatgtgacagtgttcggaac

SEQ ID NO: 673437 - DNA, 100 bp, Homo sapiens
ctctgggtccagccccttacttaaaggaagacagagatgtcaatgaccccatgcccaaccgaggcggcaatggactagctcctggggaggacagattcaa

SEQ ID NO: 673438 - DNA, 100 bp, Homo sapiens
tgtcatttgcagaaaactctacaattcctgatattcagaagaatgcagcaaaagccattactaaagcagcttatgatctgtgggcgaaatgctgaaaact

SEQ ID NO: 673439 - DNA, 50 bp, Homo sapiens
ctgaagagggaagacacgcggaaacagttatggactctgtgggattcatt

SEQ ID NO: 673440 - DNA, 75 bp, Homo sapiens
caaaaccttagtttttgaacaaagaaaatcagatggagttcacacctgaggaagccacagagggcctgatgaatc

SEQ ID NO: 673441 - DNA, 106 bp, Homo sapiens
cgggaggaaggaacgaggcaaggagctaaagcagcgtgcgttcagccctgggaagtccattggaatattaagcccaggagttgctttggggatggctggaagtgca

SEQ ID NO: 673442 - DNA, 90 bp, Homo sapiens
caggattcatgctctacatccccatagagagtcccagctgaaagacaatcctgccttctccatgctgaatgactcggatgatgatgtgat

SEQ ID NO: 673443 - DNA, 90 bp, Homo sapiens
gaagtccaagtcaaacgcagaaggactgcctcactgagcaaccaagaatttgattagaactatccgggacccagaaaagcccaatacttt

SEQ ID NO: 673444 - DNA, 73 bp, Homo sapiens
cccagaggactttcttccagcttctgctgtccttctttgtggagagcaaggatggatgcaaccttgaaagaac

SEQ ID NO: 673445 - DNA, 95 bp, Homo sapiens
agaagaagggacagaaagagcccagaacattcccccaggttgctgcagcaactggtcacacagtagtgttggtagaccagacagaggacatcctg

SEQ ID NO: 673446 - DNA, 90 bp, Homo sapiens
cccagacaccctgaaccagggggaattcaaagagctggtgcgaaaagatctgcaaaattttctcaagagggaagtgatgagctttccttt

SEQ ID NO: 673447 - DNA, 90 bp, Homo sapiens
ctctttgtgtatgctgtccgtgatacttcctcgcgtattgctaaaggaggagttgaccacaccaaaatgagtctacatggtgctagtggg

SEQ ID NO: 673448 - DNA, 95 bp, Homo sapiens
gcaccatgccgctcctaagcctgcacagccgcggcggcagcagcagtgagaggtggaagttaaacgagctgagcctcgggacagcaagagccaag

SEQ ID NO: 673449 - DNA, 87 bp, Homo sapiens
atggtgctgagtttcctggtagagccggccgagctgaggcggtcgcggccatgaagatggcccactgcgtgaccttggttcagctgt

SEQ ID NO: 673450 - DNA, 82 bp, Homo sapiens
caatgggaccctggaggaatgtcagcaccagaccaagagaccagcataaacactttggggactgagaggataagccatatca

SEQ ID NO: 673451 - DNA, 100 bp, Homo sapiens
ctttcggcagccgaacggccgcggcagtcccatgagcgtgtaagcaagcgtctacatcagagattccaggcctgggtagataaatggaccaaggagcatg

SEQ ID NO: 673452 - DNA, 97 bp, Homo sapiens
gccgaggtgttgcggacgctggccggctctttattgagaaactaccaaaacatcgagattacaaatctgctgtcattcctgaaaagaaagacacagt

SEQ ID NO: 673453 - DNA, 100 bp, Homo sapiens
tttgttaaggattccaagtaactcttatttggatacaatgtctctttgctatatgaccttgaaaatcttccggcatccaaggattccattgtgcatcaag

SEQ ID NO: 673454 - DNA, 75 bp, Homo sapiens
aatctgctggaaatgatggcctgtgaccgactgagccaatcagaactgggaatccctgcctctgtggatctagtg

SEQ ID NO: 673455 - DNA, 142 bp, Homo sapiens
ctacggccgcaaccagcagcgggtcttcttcctgtttgaccaccagatggtcctctgcaagaagttccttcctgtgtacagcccttctgaggaggagaagaggaaccccgcgctgtatgccagcaacgtgcggcgagtcatg

SEQ ID NO: 673456 - DNA, 88 bp, Homo sapiens
aagacaaagacccagtgaacaaatccgggggcaaggccaaaaagaaggaaattcacagtatggccaacagcaagatgcataccaggga

SEQ ID NO: 673457 - DNA, 74 bp, Homo sapiens
tcgggaccacaaaaggtcacgaagtagagaaagaaggcggagcaggagtctcgctctcagtcaaaatctccaac

SEQ ID NO: 673458 - DNA, 97 bp, Homo sapiens
gccatcacggttggaacgagaacttaaacagctttacttagaacgagttttgaagggtgatgtggaaaaactttctcaactggatgatgctcgcaac

SEQ ID NO: 673459 - DNA, 100 bp, Homo sapiens
cgcgaatatcgtcatcgttagaagatgccacaccacatgaagcccttgccatattacagctatgaccagcctgtgatcgggtactgccaggcccaccagc

SEQ ID NO: 673460 - DNA, 87 bp, Homo sapiens
tcgtgcggaaccgccatggccgagccggcttcgagacacctatggctgccgatgaaggctcagcagagaaacaggcaggagaggccc

SEQ ID NO: 673461 - DNA, 75 bp, Homo sapiens
gtgaagagacaggaggcagtagccaaacacccaggcgtagcgtgcctcctgtgattgttgaagagctgtggtgtg

SEQ ID NO: 673462 - DNA, 100 bp, Homo sapiens
ccttgaaaaagctgccctgagacggtgtcccgccgaaaggtggatcttcttgttccaaccaaagtgactggcatcattacacaaggagctaaagattttg

SEQ ID NO: 673463 - DNA, 100 bp, Homo sapiens
cctgccaggtcacacacatctctctggaggagccccttggggccagcacccaggttgtcccaccagagcctggctagccgtctcaaggaaaacatggaga

SEQ ID NO: 673464 - DNA, 100 bp, Homo sapiens
gtttctgcaggaaaagatctctctacttctcctaaggttaaaggactggatgcatttgttctgagcctgctcactctagatggtgaatcaatctacagcc

SEQ ID NO: 673465 - DNA, 75 bp, Homo sapiens
atgaggaggatttctggccttcgaggttgtgggaagaaaatgtattcctttttgagaggaaccaaacaactgcag

SEQ ID NO: 673466 - DNA, 80 bp, Homo sapiens
cagattcagtgtcatgtgaggacgtgcttcctgcttcatagataagagggttttcagagaaagatgctgatgaggtgaaa

SEQ ID NO: 673467 - DNA, 123 bp, Homo sapiens
ggaacgtgtcccggggccgacccggcccgtagtgtggaagcagcttcaggtctcagcatcagaggagcccaggaggaggaccctcccgatccccagctaatgagactggacaatatgcttttg

SEQ ID NO: 673468 - DNA, 100 bp, Homo sapiens
aaaggccagtacacacacaagatctaccacctgcagaggtcaatgtgacggtggactacattagaccagccagcccagccacagagacagtgcctgcctt

SEQ ID NO: 673469 - DNA, 97 bp, Homo sapiens
gccgtaacgtcactgacccaacatgcccttccctgagtcctggcgtatctgtaaagtaatctcacaagctgccaaagaacacatcccaagcagtaat

SEQ ID NO: 673470 - DNA, 106 bp, Homo sapiens
ctgatccgcaagcatgctcagaccttcattgctctgtgtgccaccgcttccatgaggcaggctgaacctgcagatatgcgcccagagatatggatcgcccaagagt

SEQ ID NO: 673471 - DNA, 75 bp, Homo sapiens
agcaaaccgggaaaggagaggatcccggagccggtgctggcatcggccccaccattcagattggggaggagacgg

SEQ ID NO: 673472 - DNA, 90 bp, Homo sapiens
cagggcggacagcagcctcgggtgcaatcctggagccccccagtgaggctgtgtgccaaccacgatgcaaacatggtgaatgtatcgggc

SEQ ID NO: 673473 - DNA, 100 bp, Homo sapiens
tctgccaagcgtattagctaagcatagccacgcatctgaccgatttcttaagcagctccataaaattctaggagataaggtgaacaatactgctgtaatt

SEQ ID NO: 673474 - DNA, 100 bp, Homo sapiens
tgccagctcgggcaggccttccgagaggaacctctatgccgacatcgacgccgcctggcaggccctgcgcaccaggggcaccaccacgaggcgatttgtg

SEQ ID NO: 673475 - DNA, 75 bp, Homo sapiens
cagtacttcacatcgtcgttcacatgggacgtgaacgatcaagagagagggaccatagtagatcacgagaaaaga

SEQ ID NO: 673476 - DNA, 99 bp, Homo sapiens
gtcccaacccgaaagtccagttctgcggcccggcagcggcgagcgggcgcgatgacacaggagtacgacaatctgaacagcagaagaagcaacaggagg

SEQ ID NO: 673477 - DNA, 100 bp, Homo sapiens
agagatattctactccatctcattcattgtacagggactgttgacatttagggatgtggccatagaattctctctggaggagtggcaacacctggacatt

SEQ ID NO: 673478 - DNA, 100 bp, Homo sapiens
gaagacttattataaatgaagatctggacagtggcacacagataccgtttattaaaagagctgtggcttggccacagatgtctttaattccaaaaacctg

SEQ ID NO: 673479 - DNA, 90 bp, Homo sapiens
gttaacgtctctgttagttcagagggagatgcacttatttacatggaaccagagaaacaagtgatgtccaggtcgtcagatgaatgtgtt

SEQ ID NO: 673480 - DNA, 75 bp, Homo sapiens
ccactgactcatgggccctggcggtggacgagcaggaagctgcggctgagtcggagaccctcctgttcttaactg

SEQ ID NO: 673481 - DNA, 91 bp, Homo sapiens
ctggaatcgagagaagactcctcaacaagttgctgcaatgtctgtgtctaatctatcatggattttaagcttgactttggcaattcccaag

SEQ ID NO: 673482 - DNA, 100 bp, Homo sapiens
gccaatgatcagaaagatatgaaggactgggttgaagccctgaaccaagccagcaagatcaccctccatcaagtatgatggtgaaggatgaatatgtgca

SEQ ID NO: 673483 - DNA, 83 bp, Homo sapiens
caagaactgaggagcaccaggagacgcaactcatcggcggagctggagtttgttcagatcatcatcatcgtggtggtgatgat

SEQ ID NO: 673484 - DNA, 75 bp, Homo sapiens
tccagcctcatcgaattcttgaagcagaagtgggcgctccatgaggtgcgagttcccaagatggatgaattgcag

SEQ ID NO: 673485 - DNA, 96 bp, Homo sapiens
caactgcaggaacaccgtcacgctgctggaggaggtacttaaaacagatgctgaggaacttgtctccagaagctattgggatacactgagacgtaa

SEQ ID NO: 673486 - DNA, 80 bp, Homo sapiens
gcttttgctcctcctgaagtgtctttggtccaacgttgttccagtttgcccgaccatctgtaagtcacacggctgcaccg

SEQ ID NO: 673487 - DNA, 78 bp, Homo sapiens
gagaactggagagaactgctggaaggagactggatgatagaattgtacattttgaccaatttaaagaagcattaatac

SEQ ID NO: 673488 - DNA, 100 bp, Homo sapiens
gctgcagcacgtggccaccaacctggggcgcaatgatgaccactggatcgtcgacacagactacgacacgtatgccgtgcagtactcctgccgcctcctg

SEQ ID NO: 673489 - DNA, 90 bp, Homo sapiens
gtcaacataaacaagacaagaatagccagcagccctgttctaggtgctcagatggagttataaaacttactatactggcaattgctggag

SEQ ID NO: 673490 - DNA, 100 bp, Homo sapiens
ctgaatcgctgcaccccagagggttctacctcagctgcatgggtttcccagagtgtcgctcagctgtgtggcttcctgactcggtgctggaggccagcag

SEQ ID NO: 673491 - DNA, 75 bp, Homo sapiens
gttctatgcactctgtgaccagctggagctgtgcctggggggcatgtgctctgtgtacctgaaggacagtgagaa

SEQ ID NO: 673492 - DNA, 83 bp, Homo sapiens
agaggcccttcagcacctggatgcaggagggggatatgagactttctactcggaatatcctgagtgttgcgtggatgtaaaac

SEQ ID NO: 673493 - DNA, 75 bp, Homo sapiens
ggaatcgtagtcttcctaggagttgggaggatactgaggcacacagaggggagtcaccagccagaggatgcatag

SEQ ID NO: 673494 - DNA, 89 bp, Homo sapiens
gatgagcagttcattctcgatcgccacccaaagtatgacaacattgtcattggtgctggattctctgattctacaggaaaatgtgggcc

SEQ ID NO: 673495 - DNA, 113 bp, Homo sapiens
gaaatcttgatcagccagatctttattacgagtactacccgcacgtgtaccctgggcgcagggaacatccatgatagcagtcttctgtaaatcgaacttttcaagaattctct

SEQ ID NO: 673496 - DNA, 80 bp, Homo sapiens
gtgaccgagaccgcggccgggaccgagggaggccccgtgtgggccgcggcccggccctcaccatggagtccatgttcgag

SEQ ID NO: 673497 - DNA, 83 bp, Homo sapiens
gtggactccttcggcagtccacccaccgccgccgcctcccagggtgtttctgtggcctgggactggttagcaccaacaagtcc

SEQ ID NO: 673498 - DNA, 100 bp, Homo sapiens
gcctctgattctcctgtgccaggtgatgctgtggagtcttcaaaaagcccgaccactctggattacaaatttacaggaggatgaaacagaagaaatggaa

SEQ ID NO: 673499 - DNA, 75 bp, Homo sapiens
ggacccagggagaaacaggggggcgagaagagaaacagaatgctgaccccctgaaggtgtacccgccactgaagg

SEQ ID NO: 673500 - DNA, 90 bp, Homo sapiens
ggagggttggctgcacaaacgaggtgacagagttagtccttgataattgcctgtgtgtcaatggggaaattgaaggcctgaatgatactt

SEQ ID NO: 673501 - DNA, 76 bp, Homo sapiens
gcctatcatttgaagacgttccttgaggaggtttgaaaaagcagctggaggaagtatctcacaccaggttagcttc

SEQ ID NO: 673502 - DNA, 80 bp, Homo sapiens
gcatgatgttcgtccgcaacgattgcaagacttggagtccaggtgtgagaaatttctacaaaaagacatttttgaaatcg

SEQ ID NO: 673503 - DNA, 100 bp, Homo sapiens
agatgaacagactagccactttgcattgactggaaacaatggcatttacagaaagagtcaacagcagtggcaacaggagaaagttctgccactaatgaac

SEQ ID NO: 673504 - DNA, 83 bp, Homo sapiens
gaatgggcccggctccgggtcaagggctgtaccgctccccgatgcccggagcggcctatccgttatctccagaagaagaagag

SEQ ID NO: 673505 - DNA, 98 bp, Homo sapiens
agagaggccgcgtcctgggcagaggaccctgtggatttagacatataccaaagctcccacatggtcgactatcagccctacaggaagcacaaatactc

SEQ ID NO: 673506 - DNA, 99 bp, Homo sapiens
aagaggtcccaatcccccactctttccgccctaatggaggtctccagtttcgggaaacagtgcttcttagtcctacgtcagcagcagtttaatgtccag

SEQ ID NO: 673507 - DNA, 101 bp, Homo sapiens
cgaggggcccgcagtagctgcgctcccggggaaggagccccacagtccccaggtgctggagaatctggtaaaagcaccattgtgaagcagatgaggatcct

SEQ ID NO: 673508 - DNA, 101 bp, Homo sapiens
acccgcacagaccttccgggaaagcgcggaattcagaggcagaggtattgatgtcaagctgaaccatcgtaggaagttgaaagccttagaaagaggacttg

SEQ ID NO: 673509 - DNA, 75 bp, Homo sapiens
aaatggttgaaaacagatatacaggtggaggagaaccgccagtaccgcatgcacagcctgcagcacaaggccgcc

SEQ ID NO: 673510 - DNA, 100 bp, Homo sapiens
aagttgcaaggatattcctcatgtatcatgcaaggatattcctcatatatcatgaagtgtttggattgtgagctatttcagaactgttctcaggactcat

SEQ ID NO: 673511 - DNA, 82 bp, Homo sapiens
cgggacacccgcgaggccggaaaatggtcaaaatgcagatcttcgtgaaaacccttaccggcaagaccatcacccttgaggt

SEQ ID NO: 673512 - DNA, 98 bp, Homo sapiens
ctgggttcccagtgctcctgggatgtttataactggagcctcaagtactacagccttccagcagccttcccagacccacagatcacacccagggaaaa

SEQ ID NO: 673513 - DNA, 88 bp, Homo sapiens
aatcaatgcccgctatgtgtctgttcacgtggacaattcccgagatcttgggggcaagtgtccagagaatggctgggatgaaagtaca

SEQ ID NO: 673514 - DNA, 76 bp, Homo sapiens
gaggaggcctggggaccatgggctccaggatcaagttcgtgagccacacatctccccacaccaagctcctccatac

SEQ ID NO: 673515 - DNA, 118 bp, Homo sapiens
gaggcgacatggggcacccggtgtaccgcggcgagaagccccagctgcactacgcgaatggcaacatacttgtttaacattgaattctgtgcaagaaagaaaaaatttaatatattcc

SEQ ID NO: 673516 - DNA, 99 bp, Homo sapiens
aggagctgcagcaagcgggagaccaggagctcctccaccaggccaaagacttcggcagtgaagtcttcgtcttaaatgatggtggagaagttgatttag

SEQ ID NO: 673517 - DNA, 74 bp, Homo sapiens
catgaaagagattgaatccattgtcaaaggtgctaaaatgatgtattttctggacaagtcaaggcaggagaaag

SEQ ID NO: 673518 - DNA, 100 bp, Homo sapiens
gcaactgcgatgtctgtggactgtcttgggcagcatgcagtgctttctgggtgtgcctacaggggttgtggaaggagacgctgcccccggtctatgccct

SEQ ID NO: 673519 - DNA, 83 bp, Homo sapiens
taattcaaggtcacacaatgtcggggatggacctccagatttccttactggtcccccacggcccttcaggatgaaagctgcgg

SEQ ID NO: 673520 - DNA, 100 bp, Homo sapiens
gacgagctggagcgcctgtcaggctgggaggaggaggaggagagctggcagcctgcttctgcaaagtggtacgatcgaagggactatgtcttcattgaat

SEQ ID NO: 673521 - DNA, 116 bp, Homo sapiens
cacctggaggccgcccgcacagtggcacaccacggaggcctgtaccacaccaatgctgaagtcaagctgcaggaattacatgatgcgtaatgctgtgctggcagccatggcggaga

SEQ ID NO: 673522 - DNA, 83 bp, Homo sapiens
ggacaagcttaataaaataaccgtccccgccagtcagaagttgaggtgaatacagcagtccagttaatcttggtggcagcttc

SEQ ID NO: 673523 - DNA, 100 bp, Homo sapiens
atttcaggcagctctgtccagtggagtgacccgttgccagagtgcagagagtctccacagcctattggctcacttggacatgatgctgacttgaggcggc

SEQ ID NO: 673524 - DNA, 100 bp, Homo sapiens
cagataaagcagaagttgttaatggttacgaagcaaagttcccagtgggccgtattcatcgacacctaaaatctaggacgaccagtcatggacgtgtggg

SEQ ID NO: 673525 - DNA, 50 bp, Homo sapiens
ttgacaaggcactgctttttcatgacggtttggtgcacctcgatttggag

SEQ ID NO: 673526 - DNA, 97 bp, Homo sapiens
gtcgagatgggaaaacaattagtctttgtgcagaaagcacagatgattgcttctagccacagtgcagcctggccagaatttccacatgttcacaaag

SEQ ID NO: 673527 - DNA, 83 bp, Homo sapiens
gtcgaccattccaaaaaaatcgccaaaagaggcagaagcttttcttctgagtctttcagaagaaattcaaagaagactagaag

SEQ ID NO: 673528 - DNA, 100 bp, Homo sapiens
ggcaagatgaatttcctccgcggggtaatggggggtcagagtgccggaccccagcacacagaagccgagacggtattctctactgccgctgatggtcaaa

SEQ ID NO: 673529 - DNA, 100 bp, Homo sapiens
ggacgcccgcggagagagccactcccgcccacgtcccatttcgcccctcgcgtccggagtccccgtggccagacacgatgaggcgagtggtacgacagag

SEQ ID NO: 673530 - DNA, 100 bp, Homo sapiens
gagaatgagaatgagttggataactctctaaactctcagtctaacacgaatacagacagatttcagagacaactgtctgaaccctgccaccccttccctc

SEQ ID NO: 673531 - DNA, 100 bp, Homo sapiens
gttttagtcttgggggtagagtgactgcttgcgaaccagttcagcagtgcctcagatgtgttgcagcatgccataatccacaagaagcatactgggaaaa

SEQ ID NO: 673532 - DNA, 75 bp, Homo sapiens
gcacgcggaggacgcgagggggacgctgcctggccgcgatcaaatttttggctctcatctgcacaaagtgtgtga

SEQ ID NO: 673533 - DNA, 100 bp, Homo sapiens
gccgccggccctcctgtcccgcgccaggtgctggagaatctggtaaaagcaccattgtgaagcagatgaggatcctgcatgttaatgggtttaatggaga

SEQ ID NO: 673534 - DNA, 90 bp, Homo sapiens
cccaggtgcccagaggactttcttccagcttctgctgtccttctttgtggagagcaagattataagcgccatggctatggctagtgttaa

SEQ ID NO: 673535 - DNA, 50 bp, Homo sapiens
acttaggaacttggattcaaggcagtgaatgattgactggctatcctggc

SEQ ID NO: 673536 - DNA, 144 bp, Homo sapiens
ggtacttttacccttacaggaggaaatgtgtttgaatatggtgtaaaagctgtgtatacatgtaatgagggattcttcagaaaagtgtgggcctcctccacctattagcaatggtgataccacctcctttctactaaaagtgta

SEQ ID NO: 673537 - DNA, 82 bp, Homo sapiens
cttagctgtgctcgcgctactctctctttctggcctggaggctatccagctgtaaacaggaacatcgataagtagtgtaaaa

SEQ ID NO: 673538 - DNA, 100 bp, Homo sapiens
aaatcatgaaagtcaccgtgaagaccccgaaggaaaaggaggaattcgccgtgcccgagaatagctccgtccagcaggttcccgtgtcagtggctatgat

SEQ ID NO: 673539 - DNA, 74 bp, Homo sapiens
ttgcaggctcggctggggcccgcaggaagaacccttgaagaagaggaagaggaaagaaagacaagtcaggcatg

SEQ ID NO: 673540 - DNA, 82 bp, Homo sapiens
ggagaataacggctgcacctggagattgacgcagagtgggcggcggtggtgagagtgataatgaactctcaagtggaacagg

SEQ ID NO: 673541 - DNA, 98 bp, Homo sapiens
ggcactacaagattgaagacagagggaatttaagaaacatccacagcagcgactggcccaagttctttgaaaagaatgagatgctggaggaaggacat

SEQ ID NO: 673542 - DNA, 75 bp, Homo sapiens
actccccagcactataaggagagagggtggtggttccaccagagatgtctcagccagatgtcctcttacttgttc

SEQ ID NO: 673543 - DNA, 96 bp, Homo sapiens
cttccagaaacgcaagaagtacaacgtgccggtccaggtgcagtgccatacttacactgggtactgctggtgtgtcaccccggatgggaagcccat

SEQ ID NO: 673544 - DNA, 82 bp, Homo sapiens
aatatttacatgttgcaaataaatccggattcttcaatcaaccccgcgtccgagctgggccacagcctgaacgagaacgtcc

SEQ ID NO: 673545 - DNA, 83 bp, Homo sapiens
tctggctgtgctgcgcgacccccgcgcatgatgagcagcaccagcagtaagagggctccgaccacggcaacccagaggctgaa

SEQ ID NO: 673546 - DNA, 76 bp, Homo sapiens
cgggaaaaatagtagcaccagttaatccagcacgtatggggccaagtgtaggctcccagcaggaactgagagcgcc

SEQ ID NO: 673547 - DNA, 95 bp, Homo sapiens
gcctcttcagccactttcttctaatacacctatatgggcctgccgtcttaggagctgtgagtgatggaatggggagaagatattaaagcagtttc

SEQ ID NO: 673548 - DNA, 99 bp, Homo sapiens
gcgggctccagccgcggctcgcgcgctcgctctgagcccccgcgcccaggtgggatggaagaagcctgtcagctaccaagtcaggattgttacccccac

SEQ ID NO: 673549 - DNA, 100 bp, Homo sapiens
cgcaagttcattgcctaccagttcacagacacgggcttccgagtggacctgccaatcaagtcggcccgctaccgtggccagtacaacacctatcccatca

SEQ ID NO: 673550 - DNA, 100 bp, Homo sapiens
tggcttcatctggtcctcataatcttacttatcctctaggtcccaggaatgaagcattcagcctgtatatggagcacagcatcctcctcttgacccacgg

SEQ ID NO: 673551 - DNA, 88 bp, Homo sapiens
ccaatccaaagacttcttctagcaaatttctatattcagatgaagttcaaattggtccagaaacagttatgaccactctttatactgc

SEQ ID NO: 673552 - DNA, 75 bp, Homo sapiens
agcccggagacagccgcccaccccgggcctatcgtagtccactgcaggacagagcgggatgccaccagcttgtcc

SEQ ID NO: 673553 - DNA, 74 bp, Homo sapiens
cctgccctaggacttcatgtctatatatttccccattcactgggggatatgagactttctactcggaatatcct

SEQ ID NO: 673554 - DNA, 82 bp, Homo sapiens
ggaaagaagcgaccgcggcggctggataaattctcaggagtgaaattacagagtcaaagatcatgaaataataactaaaata

SEQ ID NO: 673555 - DNA, 121 bp, Homo sapiens
gagagagcgagctgagtggttgtgtggtcgcgtctcggaaaccggtagcgcttgcagcatgagttacatccatatgggagaatagtctccagatcactacaatttctagctttgtaggagc

SEQ ID NO: 673556 - DNA, 75 bp, Homo sapiens
gccagactcagggatcaaagagcaaacagattcagtggcctgcattgaaattccgggtagatatgcctggctcag

SEQ ID NO: 673557 - DNA, 82 bp, Homo sapiens
cggcagagcaaggggcttacgcagaaggacctggccacggcccgcgatgctcccagcccggtgagacctgcctgaatggcgg

SEQ ID NO: 673558 - DNA, 83 bp, Homo sapiens
cccgaaccctcctcctgctgttctcgggagccgtggccctgatccagacctgggcaggaagttgccttaaagaatagacaaga

SEQ ID NO: 673559 - DNA, 88 bp, Homo sapiens
ccatggacgacgggtttgtgagcctggactcgccctcctatgtcctgtacagcttcttggacacttaatgattgttggcaagaaatgt

SEQ ID NO: 673560 - DNA, 75 bp, Homo sapiens
aacagcaacacagttacatagtaaaaggaggcctaagaagatgagaatgtgcctactgctcctgatcctccaagt

SEQ ID NO: 673561 - DNA, 75 bp, Homo sapiens
catctctgaggatgtgataattgtcacaagcaggataaaagaatcagagtgtctcaacccttgacaagaggacca

SEQ ID NO: 673562 - DNA, 83 bp, Homo sapiens
aggccgcgttggggtgagaccctcacttcatccggttcagccaatactatcttctgttccaacaacggaagtgtccactggtg

SEQ ID NO: 673563 - DNA, 98 bp, Homo sapiens
tccctgataacttcatagctgcctgtacagaaaagaaaatccccgttgtttttcgattgcaagaggtgcagtctttgcaagccacatttggaactttt

SEQ ID NO: 673564 - DNA, 100 bp, Homo sapiens
tggactttgggcgtcccattgccatgttttggccaaacggattcgtgttctcgagctgctgcggcggccacaaggaacccggatgccgctgagcttagcc

SEQ ID NO: 673565 - DNA, 75 bp, Homo sapiens
agctgggtctctgactcacttctgactttaggaaacttttgagaagaactttgaaagagaaacccataaaataag

SEQ ID NO: 673566 - DNA, 100 bp, Homo sapiens
gcaaaagccttccatgattacaaaacctttccaacctatgagagaaagagatgtgaagaaagaagacgggtcatagagatgctacattgctgattttgaa

SEQ ID NO: 673567 - DNA, 83 bp, Homo sapiens
tagaaaatgtaaaggccaagatccaggataaggaaggaactgtggctgcaccatctgtcttcatcttcccgccatctgatgag

SEQ ID NO: 673568 - DNA, 98 bp, Homo sapiens
tagcagtcatttcccaaatttaggagacaatgatgcaggcccagtccacaggtcctggctaccctgggaagagacaagaagtaaatgaagaaagagga

SEQ ID NO: 673569 - DNA, 90 bp, Homo sapiens
ggatcggcgctggacgtgctcctctccatggggttccccagagcccgcgcatcctgaggtgatatcagacttggtatttttgaaacagcc

SEQ ID NO: 673570 - DNA, 100 bp, Homo sapiens
tgatgaagacgttatttaccatatccagtatgatgaagttgtggaaagtaaaaatgtagccctaccaaaaggaactattgtactggcttctccaggctgg

SEQ ID NO: 673571 - DNA, 101 bp, Homo sapiens
cacaaatctggaacgggtggccgattactgcgagaacaactacatacagcctgtctcgatatagattgaagtttagcgctgataaagtagacacaatgatt

SEQ ID NO: 673572 - DNA, 97 bp, Homo sapiens
tggacgtgggatccacacagctcagaacagttggatcttgctcagtctctgtcagaggaagatcccttgcgggacgaccctgggacagtctccactg

SEQ ID NO: 673573 - DNA, 125 bp, Homo sapiens
cgctccgtggccttagctgtgctcgcgctactctctctttctggcctggaggctatccagcgtcgcgtggggcaggcagtggcgctgcgggccaaggccttcggcttcaacgtgctcttctacga

SEQ ID NO: 673574 - DNA, 100 bp, Homo sapiens
ctatttcctggcccaatagacaactctgggctattttcagagattgccttgcaacaggtttccatgttcttccgatcagaaccaaagtgggaggtggtgg

SEQ ID NO: 673575 - DNA, 101 bp, Homo sapiens
tcaggccacggtggaagacgcgtgccgcggcgcctggttgcctgcagcggcccggacccgagagggcagcaggatgggtgtggaagcagtgatggcacttt

SEQ ID NO: 673576 - DNA, 75 bp, Homo sapiens
gtcagaacgtggcttatgagtacctttgtcatttggaagaagcgaagaggtttcagaaccttctgtggtccagaa

SEQ ID NO: 673577 - DNA, 126 bp, Homo sapiens
gaaatacgtccagtaccagaatgtcccaaggaacacctgggcaacagaatattggtcaagttgctgaccttgaatcaagtcctaattcgaagcagagtcctcagggaaaatggaaaatacattccc

SEQ ID NO: 673578 - DNA, 75 bp, Homo sapiens
agttctccatcttgggaaagtctgggcttctccagggaaagtgaccgaggcagtgaaagaggccattgacgcagg

SEQ ID NO: 673579 - DNA, 75 bp, Homo sapiens
tgaaaattctcttcattctcttggactgaacttaaatactgatagctgccaatttgtggtgtctgaagaccaaga

SEQ ID NO: 673580 - DNA, 82 bp, Homo sapiens
ggaatctggagctggagcacaaggagctcggggagagggaaatcctcattgacgattcaatttgttgaaggccaatttgtgg

SEQ ID NO: 673581 - DNA, 83 bp, Homo sapiens
cagagcctcgcctttgccgatccgccgcccgtccacacccgccgccaggaacaagatcactcaaggtgaaggataatctacta

SEQ ID NO: 673582 - DNA, 73 bp, Homo sapiens
aagaatcaatgcgtggaattctcctacacttcctatttatgagaacacagaatgttcttggtgagaagggccg

SEQ ID NO: 673583 - DNA, 100 bp, Homo sapiens
tttcagaagttattccgatggtgccagtcagcagtttttgaactccatcaaaaagggggggaacacacctgaaactagaggaacagcttatgtggtctat

SEQ ID NO: 673584 - DNA, 100 bp, Homo sapiens
ccttacctgtttttccagctcacccactgccagcagaggatcctgatggtgaacatgccaggagagcaatgcaaaaggtgatggctacgactggtgggat

SEQ ID NO: 673585 - DNA, 100 bp, Homo sapiens
cccgagtgagccggacgaagtggacaagttcaaggccaagttcctgacagcctggaacaacgtcaagtacgagcgggacaaggagaaccggcatcggaag

SEQ ID NO: 673586 - DNA, 82 bp, Homo sapiens
acaagatcactcacctgtccacactgcaggctttatcctgtggataaacgcagagtgaacgagtttggggagtcctacgagg

SEQ ID NO: 673587 - DNA, 81 bp, Homo sapiens
ttggaccttccggagcttctcagaagacagagggttttcttttgagacacgttggtcgtcattgcctccgagcccacttta

SEQ ID NO: 673588 - DNA, 75 bp, Homo sapiens
aagtcatcatgggccggcctggaacagggttgtgagtcccggcccagcccctccacccccctgcccccccgatgc

SEQ ID NO: 673589 - DNA, 50 bp, Homo sapiens
tcgaattccagaatgatgaaattgtgggggacacagcgattgccacgcgc

SEQ ID NO: 673590 - DNA, 75 bp, Homo sapiens
gcatttccagcccgcccacccagggagtgcatccgccccaacccttttccccctcgtctcctgtgagaattcccc

SEQ ID NO: 673591 - DNA, 88 bp, Homo sapiens
acagcccggaatatcaagattcatctttttcactaattgtggcattcacactgttgtagcaaacagtgacgaatctcagcttctgaca

SEQ ID NO: 673592 - DNA, 98 bp, Homo sapiens
tcgtactgtcgccgtcaccgccgcggctccggccctggccccgatggctctgtgcaacggagactccaaggatgatcggctgaatgtaacagaggaac

SEQ ID NO: 673593 - DNA, 73 bp, Homo sapiens
gtggacatgtttgatcagcttttgcaagcagctgacagcagccatggcgagcggcagtggagacagcgtcacc

SEQ ID NO: 673594 - DNA, 100 bp, Homo sapiens
ttctttatcttctttgtcaattgctggggttggacttgatagctcaaatttgaaaacaacctttcaggttctccagcatttggctcaaggccccaagggc

SEQ ID NO: 673595 - DNA, 100 bp, Homo sapiens
caagtacctgccagagaacgacctgaaggtcactgcagccagaggggtccagaagagagaggaggcactgcctccactacagcaactgcacccacgatgc

SEQ ID NO: 673596 - DNA, 92 bp, Homo sapiens
cagtgtccaaccagggctacatgccttatttaaacaggttcattttggaaaaggtgccagatgcaattaaaaagtgtcagagggctggaatt

SEQ ID NO: 673597 - DNA, 82 bp, Homo sapiens
ggcgctgctctgtggggctctggccgcgcctggcctggccgggaccatgtgcagagcagagcgggcggaggaccccgggcgc

SEQ ID NO: 673598 - DNA, 50 bp, Homo sapiens
gtgaacctcgttttgagattaagaattctgcttggtcagaatcgtgatgg

SEQ ID NO: 673599 - DNA, 75 bp, Homo sapiens
tcccccacttcccgcttgggcgcccggacggcgaatggagcaggggcgcgcaggctggagtgcaatgacgcgatc

SEQ ID NO: 673600 - DNA, 83 bp, Homo sapiens
attctgtgtgctgtcggacccagagggtgacggcgccgctaggatgaagctcgtgaggccttgcaattgccagtgccctaata

SEQ ID NO: 673601 - DNA, 101 bp, Homo sapiens
aggtgaagccacggaagataaggagatggtaacctgcacctcaatgtgacggcggaggccttcagcccctcgctcctggctgccctggagccccacgtgta

SEQ ID NO: 673602 - DNA, 100 bp, Homo sapiens
aagctaaccacgctggtggatgccgacgccgaggccttcaccgcctacctggtgattgcatactcggaacatcgttaccgtatctttggggaaaccatcg

SEQ ID NO: 673603 - DNA, 51 bp, Homo sapiens
caaatttccatcggaatatgtaccgactacagatccagttgagtatgtgga

SEQ ID NO: 673604 - DNA, 82 bp, Homo sapiens
ctgccttcaggatcctccgctcccgaggaattactctgcttaatgtaagcaagctgaacattttgaagcttgctcctggtgg

SEQ ID NO: 673605 - DNA, 90 bp, Homo sapiens
gctccaccttccacagggtgatcccttccttcatgtgccagcgaggatgccatgaggaaagctggtgtggcacacagtaaatccagcaag

SEQ ID NO: 673606 - DNA, 126 bp, Homo sapiens
aggaggagtactttgatcgtgctacacccagcaatcgcactgaaggggatggcaactccgatcctgaatctagtgttaagtgtgatgcttccataatacatttggatgctgtcagctaagttcact

SEQ ID NO: 673607 - DNA, 100 bp, Homo sapiens
ttcgtgctgctgggattcgcgctgctgggcacccacggagcctccggggctggaccaagaatcgccttcagccctgtctggtgcatccttggcagaaagt

SEQ ID NO: 673608 - DNA, 97 bp, Homo sapiens
cagccccgcgtacggcctttcacgagtcttcaagccttcagcaagagaaattgggtgatatctgcttctcccttcgctacgtacctactgctggtaa

SEQ ID NO: 673609 - DNA, 75 bp, Homo sapiens
tggaaattgccaaacaatctgtgactattaagaccatgttggaagggatgagagtccaatgaaagcaaacttcct

SEQ ID NO: 673610 - DNA, 75 bp, Homo sapiens
tcatgatggcctctcaaagtcttatgtgtggacatcaggaatttgctgacacaatatcttccgcctggtgctggg

SEQ ID NO: 673611 - DNA, 98 bp, Homo sapiens
aacgaatgcagagtgctcctgacattgcctgtcactttttcccatgatactctggcttcacagcttttctgggagaagaggctacaaggacttagtgc

SEQ ID NO: 673612 - DNA, 100 bp, Homo sapiens
atggacttggggctagctgcggcggggctggatattgatgatgttaagaagttcaaaccgggttacctggaagctactcttaattggtttagattatata

SEQ ID NO: 673613 - DNA, 100 bp, Homo sapiens
accaatatggcgagaatctttaggacataccaggagagcctgacaaggagctgaatcctaagaagaagatttgggagcagatccagcctgatcttcacac

SEQ ID NO: 673614 - DNA, 88 bp, Homo sapiens
gcctcccccagaaagcaatgataattcccaggacagtcagtctggtactaacaatgcaggacagtcattttgtttactcattcagccc

SEQ ID NO: 673615 - DNA, 51 bp, Homo sapiens
ctaatggcaggcattttacaagaaataagcgggttttgaaaacaaaaaaaa

SEQ ID NO: 673616 - DNA, 97 bp, Homo sapiens
agaagaccgagcgggactatgtgggcacgctggagttcctggtgtcgaattcaattcgtcataatctgtccctacacagcaagttcattcgtgtgca

SEQ ID NO: 673617 - DNA, 89 bp, Homo sapiens
gctgaggggcggaggcgggagaggcgagctcgcgatgagtggtctcggcaggctcttcgggaagggctctatctaatgttcctcctctc

SEQ ID NO: 673618 - DNA, 118 bp, Homo sapiens
ctgtctaacagtggacaaccagaaagaaagtttatgcaaacctttgttctggctcctgaagaaagacagtggttcctgactcaggaagacagtctcagaaacatgtggaatgatattg

SEQ ID NO: 673619 - DNA, 87 bp, Homo sapiens
cgtggctgcgtcaccgccgcccccccagacaagatggacaccgcggaggaagctgctgtaagtaaagatgattccattatttcaagt

SEQ ID NO: 673620 - DNA, 87 bp, Homo sapiens
gcccaacagagggaactacaaccagaattaaacaaccaccatgtcgagcaaaaaggcaaagaccaagaccaccaagaagcgccctca

SEQ ID NO: 673621 - DNA, 83 bp, Homo sapiens
tcagctgatgaagcttctgaaccatccacacatcataaagctttaccaggtgcagaccatgaattacgtggggcagttagccg

SEQ ID NO: 673622 - DNA, 49 bp, Homo sapiens
gggcggctggcctcaccgcccactggatcgcaaaagaggatgctgtcct

SEQ ID NO: 673623 - DNA, 100 bp, Homo sapiens
ttcatgccttcttgatacctcatacttcaaaagtcaacttgagttggtggaaccaagtggctggattcatgttcccttaactgacaatcataagaagcca

SEQ ID NO: 673624 - DNA, 100 bp, Homo sapiens
gccaggttcttcactgaataggacaccatgtggcggatctttactggatcgctgctggtagaggagaagtcaagtgcccttctgcatgaccttcgagaga

SEQ ID NO: 673625 - DNA, 100 bp, Homo sapiens
caccctcagctccacattgagagcaaaatctacaagatgatgcagggaggaggtggagccgccaccaaaatgcagattttcgtgaaaacccttacgggga

SEQ ID NO: 673626 - DNA, 75 bp, Homo sapiens
acagagcgctactcctggcagtgcgtcaatcagagcgtcctgtgcggccataggaaaaggatacagagtagagtt

SEQ ID NO: 673627 - DNA, 100 bp, Homo sapiens
gcccacaaccgcaccaagaagcacgacctgctgaggtggataatattaatgcagctgtgatggatttgaaaaaaaagaagatccgcagtctaagtgaaga

SEQ ID NO: 673628 - DNA, 100 bp, Homo sapiens
caaaatgattttcctgttgcaatgcagggtccacatatagcctcagttacattagctgcttatgaatgcaattcagttaattttcccgaaccaccctatc

SEQ ID NO: 673629 - DNA, 90 bp, Homo sapiens
aggaagaagtattccaactccaacgtcatcatgcacgagacctcgcagtaccacgtccaggtacatccagacactgaaggaccacaggcc

SEQ ID NO: 673630 - DNA, 82 bp, Homo sapiens
tgaacaacgcggacttcatcatccctgtggagattgatggggtggtccaccagctgcacctgtggggggacctctcatgcag

SEQ ID NO: 673631 - DNA, 101 bp, Homo sapiens
gtgtaccaggcgaagctggccgagcaggctgagcgatacgacggagcatcagatccatgctgctgctgactcggagccccacagcttggcacaggctctct

SEQ ID NO: 673632 - DNA, 82 bp, Homo sapiens
ttttcagctctctcggtggacaccttttatcaaagatattatggaggatggttcaacaatgctcattgaagctgcaaagggt

SEQ ID NO: 673633 - DNA, 50 bp, Homo sapiens
cagggaaccctggtcaccgtctcctcagacttttaaagcgtctgaagcgg

SEQ ID NO: 673634 - DNA, 101 bp, Homo sapiens
cgcccgcgccctccgccggccctcaggcaaccactgagaaaacggaaccgaatagtcaagaggacaagaatgatggtggaaaatcaagaaaagggaatata

SEQ ID NO: 673635 - DNA, 100 bp, Homo sapiens
cctggttcagcttggccagatcgagcggagaaatggtgttgagatctgcatagccactcctggacgtctgatagatttcctggagtcaggaaagacaaat

SEQ ID NO: 673636 - DNA, 98 bp, Homo sapiens
ttgattgatatatatgctgacgaggagttcaaccaggtgttccccccacactggggctcccactactgcgaggagtgacccacgaaggccacagagat

SEQ ID NO: 673637 - DNA, 96 bp, Homo sapiens
cttgctgtgggagacaggatcgttgcgtgtaaacaggaacatcgataagtagtgtaaaaacttgcacaatgaaatccgaagccaaggatggagagg

SEQ ID NO: 673638 - DNA, 82 bp, Homo sapiens
ctgggagcttgctgcagcttcaggtcacccgtgtgaacagaaagtgagaggttgtagcacattgccaccgtccagatctcgg

SEQ ID NO: 673639 - DNA, 51 bp, Homo sapiens
ctatagtcggagtggagaactgcaagctgttgttggcctactgtacccctg

SEQ ID NO: 673640 - DNA, 100 bp, Homo sapiens
gtggaatgagcttatttttatccaaagcaggcaccgatgaagacgccattattagcgtccttgcctaccgcaacaccgcccagcgccaggagatcaggac

SEQ ID NO: 673641 - DNA, 97 bp, Homo sapiens
gagcagcctggcctgccatgtccgggagaagacagtgctggagaatctggtaaaagcaccattgtgaagcagatgaggatcctgcatgttaatgggt

SEQ ID NO: 673642 - DNA, 50 bp, Homo sapiens
ttgggaagggcagctttggcaagacgctctgcacaaaagccaccatgcag

SEQ ID NO: 673643 - DNA, 75 bp, Homo sapiens
gcgtcctatgagtttgttcagaggcttctgaaaggttacatgaagaactcgaaaattaatgctgaaaataaggcg

SEQ ID NO: 673644 - DNA, 100 bp, Homo sapiens
actaccatacctcagatagggtccacagaatggtcagaaaccctccataacctgaagctgtgcctttggctgcaacaagtatgttgattactcaaggatt

SEQ ID NO: 673645 - DNA, 100 bp, Homo sapiens
gagagatgccatctacaaagaattctccttccacaattttaatcaggtcatgcgcatcgtggataatgttcgtcctgatcgacagacggttatgttttca

SEQ ID NO: 673646 - DNA, 101 bp, Homo sapiens
caaagacgagcagtgtgtcgtgtgtggggacaaggcaactggttatcactaccgctgtatcacttgtgagggctgcaagatggagacctcacagacacggt

SEQ ID NO: 673647 - DNA, 74 bp, Homo sapiens
gctgccgccccttgggctaaaagatgtgtatatctcatgattgatatggagaaactagtcatgggccaaaggtc

SEQ ID NO: 673648 - DNA, 101 bp, Homo sapiens
gccgcggcccggaatcggggcgcttcgccccgggccccccagcatgaagaccccggcggacacaggtactccaaagattcaggtttactcacgtcatccag

SEQ ID NO: 673649 - DNA, 90 bp, Homo sapiens
ctgacaatgccccctcgcgccccggcctcggcgcccgctcccggctccagcgcgcctgcacgtgagtcgctctgcctgtctgatgacgac

SEQ ID NO: 673650 - DNA, 126 bp, Homo sapiens
ccgagctcgcctgcatctactcggccctcattctgcacgacgatgaggtgacagtcacggattgaaagaaggtggcaagaggaagaagcagaagcagagagaggagtcgaagaagaagaagtcgac

SEQ ID NO: 673651 - DNA, 100 bp, Homo sapiens
ggaaaggatgacatatttttggacctgaaacagaaattctggaacacctatatggtcatcatcagatttgaaatatttaaagtggatacaaaactatttc

SEQ ID NO: 673652 - DNA, 82 bp, Homo sapiens
catgtcctcaactttctgggcgttcatgatcctggccagcctgctcatcgcctactgcaacaccattcgcttttcacccaag

SEQ ID NO: 673653 - DNA, 100 bp, Homo sapiens
cggcagttcgctatctggcatcctggacaaagatctctcggaccgcagcaatgacattgtgactgtcatgtggcatgggtctctgcccaagctcgtaatg

SEQ ID NO: 673654 - DNA, 83 bp, Homo sapiens
cctgcttccgagcttcctgttccttcaggaagtgaaatggatggagcagaatctggaaaggaacaagatcactcaaggtgaag

SEQ ID NO: 673655 - DNA, 82 bp, Homo sapiens
gcagacggaagtggctccagcttcctatgatgacagttaccttgctctaagcgaaagacatgaggcctcagcctgaaatgag

SEQ ID NO: 673656 - DNA, 75 bp, Homo sapiens
caggaaaatcagaaatctctagaacaacttagtgatgtaatccttcaggggtcaggagagtgctggtattgtgac

SEQ ID NO: 673657 - DNA, 100 bp, Homo sapiens
cacccccatggaggccctggcagagcagactgacaatcacctgaaacattatttacatatcattgaaaacaaacccctgtatccagttatctatgatagc

SEQ ID NO: 673658 - DNA, 80 bp, Homo sapiens
tgtgaacgcctctgtgtttgaaacaaacattcgagcagtcactcaggaaatgttgtttaaggggaaccttctggatcctt

SEQ ID NO: 673659 - DNA, 101 bp, Homo sapiens
gtagccacctcctaaccttcccttcttgaacccccagctactgccttcctcatcaacaaagtgccccttcctgttgacaagttggcacctttacctctgga

SEQ ID NO: 673660 - DNA, 100 bp, Homo sapiens
agatgactcagtttcttccttcatacaaatccgaggatctgttccattgttctgggagcaaccagggttgcaagtctaccctgaactgcagatcaccaat

SEQ ID NO: 673661 - DNA, 80 bp, Homo sapiens
cagacatgcgccagcacgcctgagtaatcaagtcagaggattatatgacttttatctgcctagagaagaactatggatct

SEQ ID NO: 673662 - DNA, 75 bp, Homo sapiens
gggacgtgaacatggatgaccctaagaaggaaggtccggtgtctaaaagactatggagaatttgaagttgatgat

SEQ ID NO: 673663 - DNA, 100 bp, Homo sapiens
ggaccaggctctcctctctcaatttctggatatgtgcatggatctgaaagttcatcctgaacaggaaaaggtaatagcctgcagctggtgttttgagaag

SEQ ID NO: 673664 - DNA, 75 bp, Homo sapiens
tttgaatttgctagtaacgtcatggaggatgaacgacaggtctctgaaagaagatgaatttggctgagatttgtg

SEQ ID NO: 673665 - DNA, 98 bp, Homo sapiens
tttaaagtgcaacagaagagagtctgctgaactttagacatgagggatccagggaggaagctcctgggcaacgtgctggtctgtgtgctggcccatca

SEQ ID NO: 673666 - DNA, 75 bp, Homo sapiens
ctaggcattgaggagaaggcagcggacaaagagctcctgacccctgaggattaccagcgatttctagacctgggc

SEQ ID NO: 673667 - DNA, 143 bp, Homo sapiens
ggcctgtggagtttcttggacaggggccgcggggctccaggacggcgcccttagcgacaccatggatcagtttgacaacttagaaaaacacacacagtggggaattgatattcttgagaaatatatcaagtttgtgaaagaaa

SEQ ID NO: 673668 - DNA, 75 bp, Homo sapiens
ctctgttggcctgccttcccggaccaagacagctgctcagcctgtctctcttgctgatcgagaggtgatatcccg

SEQ ID NO: 673669 - DNA, 76 bp, Homo sapiens
cagctagcaaggtgacccatgcattggttaatatcaggatgaccagtgtcccagtgaaggaacgagtgaaggtgtc

SEQ ID NO: 673670 - DNA, 100 bp, Homo sapiens
tggtgcggctcatcttcgagaggaatgaggggagaatcatacttcatcggaatgaggagcccagggcagcagggacacgtccctgaagatggaggacttt

SEQ ID NO: 673671 - DNA, 95 bp, Homo sapiens
ctctcagcttcggagaatggagtcttccatcaatcatatctcacagcaaaccagtccagctacgggggcccagccagccagcagctgagtggggg

SEQ ID NO: 673672 - DNA, 101 bp, Homo sapiens
caggacctccactaatcaccagaacaaaatgtgcagagaatgatgaggagcaggaggcactgccatctctggataaacctggctggtactcccaagggaac

SEQ ID NO: 673673 - DNA, 98 bp, Homo sapiens
tttgctcctccctgcaactaactccattcttaattggaaatgcaacctcaccacaagtacaaagaccatctttcatggactactttgataagcaagac

SEQ ID NO: 673674 - DNA, 98 bp, Homo sapiens
gtcttttgtggcatgctgatgaactatagcaatgagaatgctgcagtgagaagaggagtttgttactttaaacagaggctgaagaaactatagaatta

SEQ ID NO: 673675 - DNA, 100 bp, Homo sapiens
gggacgagctttgaaagaacttgccagacttaaacagatgaataatacggcagctagtccaatgtctactgcaacttcaagtagtggaaggagtacaggg

SEQ ID NO: 673676 - DNA, 100 bp, Homo sapiens
ccgaacccagcattttcggcaaccgctgctggcagttttgccaggtgtttgttaccttggtgctggagaatctggtaaaagcaccattgtgaagcagatg

SEQ ID NO: 673677 - DNA, 100 bp, Homo sapiens
acacttttgggaagttaggatgtgatttggacatgtttttggatctagatgaaaccagaaacctcagcgctcacaagtatgcccagcagtggaaccagta

SEQ ID NO: 673678 - DNA, 71 bp, Homo sapiens
cctgcctggctgggttagatcaggccgcgccgggccgggtctggctgggcaatactagcccctctggagca

SEQ ID NO: 673679 - DNA, 83 bp, Homo sapiens
aaaagctgcagatgagagtgagagggaatggatccaattacacgtcaagtaggacaacatattgaaatggaaccagagtggga

SEQ ID NO: 673680 - DNA, 75 bp, Homo sapiens
atcccgccctggagctgggtcccaggaatgtgctgctgttcctgcaggacaaggcaagtagcctgcagtatgaaa

SEQ ID NO: 673681 - DNA, 106 bp, Homo sapiens
aattacgaaagtgctcccccatccccacagtataaaaagcatctcagttataagaaatgcacatctccgctcaaggtcccctgggacagtgcaaggaaagaaagaa

SEQ ID NO: 673682 - DNA, 90 bp, Homo sapiens
gtgaacatcgaatcatggaatcccttgcatggctctcacccagacttggagctgaagaagctggaaacatggaaacaccaacagctacag

SEQ ID NO: 673683 - DNA, 99 bp, Homo sapiens
gggcgcgggcggcggacagattgaccttcagagcgaggtgcaccccctgtggatgtgctccgggccctgaggttcccctccctccctgatggtgtccgg

SEQ ID NO: 673684 - DNA, 100 bp, Homo sapiens
gcttgagccccatcgtggattccaagacatccctgctgagagagccaaggggagatcgtggtgaaatggtttgaggctgtccagactggcctgcccatgt

SEQ ID NO: 673685 - DNA, 100 bp, Homo sapiens
atgaagagagagaagagggcagagccgtgcatggggctgctccccaggacctgagcaggaacctggagttttcagaaggaaaacgacagattcctttaaa

SEQ ID NO: 673686 - DNA, 90 bp, Homo sapiens
tgcttccactcctgccgtgattgtcagcttcctgaggtctcctcagccatgctgaactgaggaaaacggcaaaccagttaaatctcaggg

SEQ ID NO: 673687 - DNA, 75 bp, Homo sapiens
ggagccaccagcctctccttgaaaccaaggtgtatgttggtaacctgggaactggcgctggcaaaggagagttag

SEQ ID NO: 673688 - DNA, 100 bp, Homo sapiens
gggtccctgaagagggaagacacgcggaaacaggttagaggatgcattgggctcagtgaaaattcatgaaactaagtcaccagccttcagcaatctgagc

SEQ ID NO: 673689 - DNA, 100 bp, Homo sapiens
agacaactggctttggcatgatttatgattccctggattatgcaaagaaaaatgaacccaaacatagacttgcaagatggtggacttgctttgtgaagag

SEQ ID NO: 673690 - DNA, 100 bp, Homo sapiens
acactggacagcgggagcctggccaaaacttaccctcgcctggacatagagaaagagacagggtctagctatgttgccccggctggtatcaaactcctgg

SEQ ID NO: 673691 - DNA, 97 bp, Homo sapiens
aaaggagtcagggatggcccttactcagatcctcctggccaacttcttggcccagacagaggccctgatgaggggaaaatcgacggaggaggcccga

SEQ ID NO: 673692 - DNA, 80 bp, Homo sapiens
acagctacgcatagaagccgggattgagcgcatcaaggtgacttaagagattaaaattaatttggttgctgttggttctg

SEQ ID NO: 673693 - DNA, 83 bp, Homo sapiens
ggagccggccgtacgcggtgctgcgagggcagaacctgggcatggagggatttttgaaatcagatgagaggcagagattggcc

SEQ ID NO: 673694 - DNA, 100 bp, Homo sapiens
gggaagagactggagatgaggaggatgggagtcccatcgagagtttcattctgtcgcccaggctggagtgcaatggcgcgatctcggctcactgcaacct

SEQ ID NO: 673695 - DNA, 82 bp, Homo sapiens
caacaccacaataatccacagccaagtgaatgaaaggaatactctacaggaagaaaataaaaagctttctgaacaactccag

SEQ ID NO: 673696 - DNA, 101 bp, Homo sapiens
ccgcgccatgtccgcgcacaatcggggcaccgagctcgcctgcctagggtagttaaaagacgagtgaatgctctcaaaaacctgcaagttaaatgtgcaca

SEQ ID NO: 673697 - DNA, 100 bp, Homo sapiens
gatgaaaaagagtcacctaccatgggacctggcaaagtacttcagaacttttattccttccagaagcagaccccaccaacaactgaacgctttggtcagg

SEQ ID NO: 673698 - DNA, 75 bp, Homo sapiens
tccggccgcagccatgtgggacccgcgggcagctagtgtaaacaggaacatcgataagtagtgtaaaaacttgca

SEQ ID NO: 673699 - DNA, 100 bp, Homo sapiens
agtaatactgaatttgagaagtttgtgaactcaactggctatttgacagaggtatggatggcagaacagaaaatatcatatgataagaagaaacaagaag

SEQ ID NO: 673700 - DNA, 90 bp, Homo sapiens
aaggctgcggccccgcgccagagggccggtggctcctccgggcttctgaggacccgcagggagcgggctgaccggttccctgatgtgtta

SEQ ID NO: 673701 - DNA, 90 bp, Homo sapiens
gccgctgtagccgcccaccggtttttctgccacttttgcaagggcgaggtcagccccaaactaccgttcatccatgagctcggatttccc

SEQ ID NO: 673702 - DNA, 74 bp, Homo sapiens
cgctgctgtggccgctgctgctgctgctgctcctggaaaccgatgagtaacccgaagcccctagaggagtggtc

SEQ ID NO: 673703 - DNA, 83 bp, Homo sapiens
ctgctcaagaactgcagcattgcagccgccaagacgagctagagccggtgcaggccacgcagaacaagacagggaagtatgtg

SEQ ID NO: 673704 - DNA, 88 bp, Homo sapiens
tagaaaccaaaaaaccagaggttgcttcctgggtgcactttgataatttgaaaggtgggcaagttcctgagcgctgaggagtatcagc

SEQ ID NO: 673705 - DNA, 100 bp, Homo sapiens
atgatgatggatccatttctcctattgaggagtcaacatacacaccatctcagcaaggagtggcattcaactctggagctaaacagagggttattcggat

SEQ ID NO: 673706 - DNA, 98 bp, Homo sapiens
agtatccagttgctggtttctaacagctgaaggctccttcctcagagaagcttcctgttatgtaccttatggattctattgtgaaaaacgttggaaga

SEQ ID NO: 673707 - DNA, 79 bp, Homo sapiens
ggttgggtttggggtgggggaaaggaaccggaaacgggatggggagctggaccaggctggagtgcaatggcgcgatctc

SEQ ID NO: 673708 - DNA, 80 bp, Homo sapiens
caggaaaacaagctcagggctcccacggattctacattatgtacttggaccatgagactgtttcagccactttcatcgac

SEQ ID NO: 673709 - DNA, 87 bp, Homo sapiens
caagtcggcgctcaccatccagttcatccagactcagatatcagtgatcttattagctttttcacaagccagaacataatggtgacg

SEQ ID NO: 673710 - DNA, 98 bp, Homo sapiens
aataagtgtgtgtcctgtatgtctgagaaaccagatggcactgatggggaaacagaagttggagaaatacaacagaataaaagtgtcacttacgatct

SEQ ID NO: 673711 - DNA, 75 bp, Homo sapiens
atccagctttgttgaaaagcgaagccgttagtcccttaatacaaagggtcttgtggatgagcagcagaaagttcg

SEQ ID NO: 673712 - DNA, 75 bp, Homo sapiens
cacgctactactttgggtgctgtgaaatgcaagccaagctctactccaggaagtgaaaatgtgctgcctcgagag

SEQ ID NO: 673713 - DNA, 110 bp, Homo sapiens
acttcagtgcctcagagtgcagttcccaaggaggcttcaagacaaagggccccttacacaccagacagaaacgatactggagtatttgtgtcagacattgtcaaaggagg

SEQ ID NO: 673714 - DNA, 100 bp, Homo sapiens
gaagccgactgctgcctggtctgcaaagaagtcctttcaagtctctaggactggactcttcctaagcaagtccggtacggttcctggagcagcagaacaa

SEQ ID NO: 673715 - DNA, 101 bp, Homo sapiens
cgcggggcggtcggctgcggtggcggcgtttggatgattgtctctcggcggcggagtcgttcaacttcctcaattgctttgcctcactcttctatattgcc

SEQ ID NO: 673716 - DNA, 75 bp, Homo sapiens
aactgcgcagacctggtggaggtgttaaatgaaaggtatttgaagtataccatacaactgttttgaaaatccagc

SEQ ID NO: 673717 - DNA, 75 bp, Homo sapiens
ccagggctagcgcgagatctcctagaagtctgaagttgacaagcagcagcatagaccctggtctgagtatcaagc

SEQ ID NO: 673718 - DNA, 100 bp, Homo sapiens
gggcaccctgcaggtggtcagacatgtcatcaactcagctggtacaaacccgtagtgctgatgaaccaatgacaacatttgttgtctgtaatgaatgtgg

SEQ ID NO: 673719 - DNA, 100 bp, Homo sapiens
gggcggtaaggatttcaacatgcctctgacaatctctagttttgtcactcaagccctatcagaaggttggtttgaattggctggcattggtacataaaca

SEQ ID NO: 673720 - DNA, 75 bp, Homo sapiens
ccgaggagcagcaaaagcagtacaaggtgcacctggacctctgggttaagagttggaagtattggccaagaagag

SEQ ID NO: 673721 - DNA, 100 bp, Homo sapiens
gaaaaacctgacttttatcatcatattgataatctcaggagaactctatgcagaagaatcttgtgatatcccagtatttatgaatgccagaactaaaaat

SEQ ID NO: 673722 - DNA, 114 bp, Homo sapiens
aaatgaccgcaatctctgccagcaccttgggaagagaaagaaaatgccgaaggcactcagacagatttgagagggaagatctgatctcctagaattagagttggtacagaaacc

SEQ ID NO: 673723 - DNA, 80 bp, Homo sapiens
agttaccaggctaacatcagagaacatggtgccaagtcctgccctgccaacttcttggcagctgccgacgacaaactcag

SEQ ID NO: 673724 - DNA, 82 bp, Homo sapiens
gtgcggtgctcgtcgggagtgatcacctaccctacagcccacagaattcttccagtccctgggtggggacggagaaaggaac

SEQ ID NO: 673725 - DNA, 100 bp, Homo sapiens
actacagaaaagatggaaactttggacttcaagaacttggattaaagaacttgacaggattcagaatttcccatagatatgcaaccaaatccaaacctga

SEQ ID NO: 673726 - DNA, 82 bp, Homo sapiens
gtcattctccgcccagctttgttccgttgctgtttgaaagctgaatggctctatagtcaaggcaaggggagagcatatcggc

SEQ ID NO: 673727 - DNA, 100 bp, Homo sapiens
gagaaggaacgagagaaggaaattagtgatgatgaggcaagaggaggaacgacgtagaagagaggaagagatgatgattcgtcaacgtgagatggaagaa

SEQ ID NO: 673728 - DNA, 74 bp, Homo sapiens
acagattggttcctatgttcatgttgggaagaactgtgtgatttttcacgccatggataccttgcaaaggaacg

SEQ ID NO: 673729 - DNA, 100 bp, Homo sapiens
gcaacctctacaaggccaagttcatctcctccgtcaccagccacatctaccaggtgacagagctgaatgaacctctctccaatgaagatcgaaatctcct

SEQ ID NO: 673730 - DNA, 100 bp, Homo sapiens
tggaactacgtcttctctgcattttgtccacatgagaggattacctttccaagccaatgcccaagacattataaactgaattctacgaacccaatgccct

SEQ ID NO: 673731 - DNA, 100 bp, Homo sapiens
ggtggcgggtggaggttcgagcgctgttctcgctccggagccgctgcacatttcgaaatacatgctacaggatttaactatcagaatgaagatgaaaaag

SEQ ID NO: 673732 - DNA, 114 bp, Homo sapiens
tggcggtgcaggagtcggcggctcagttgtccatgaccctgaaggtccaggagtacccgaccctcaagatgtgaagttcatttccaatccgccctccatggtggcagcggggag

SEQ ID NO: 673733 - DNA, 103 bp, Homo sapiens
tcctgggtctgaaaaccatgaagacatagagcttctgcaggttaactccgttgactgccaaaatagcatccccaacgtgcagccctccgcatctatcagcagg

SEQ ID NO: 673734 - DNA, 97 bp, Homo sapiens
gaagtcggtgtttggagaaaaggactcaggagaagttgccccagtgcaaggcactgcattcgacctgagaaagccagtggagcttggaaaacacctg

SEQ ID NO: 673735 - DNA, 100 bp, Homo sapiens
gcagtggtcgcttcttctccttggtgcagtctttgcaagccacatttggaacttttgagtccatcttgagaagctcccaacataaacaagacctcacaga

SEQ ID NO: 673736 - DNA, 90 bp, Homo sapiens
tgctgcacaactgcgtgcaggaactgaagctcttagaatgttatagttttgccgctggactcttccctcccttcccccaccccatcagga

SEQ ID NO: 673737 - DNA, 96 bp, Homo sapiens
ggccgctggcgctgtcgccggctgcagtggccgccgctggagaccgcgggacctggcgctgcagcgagatttggtgcttccagatgtgagttatca

SEQ ID NO: 673738 - DNA, 100 bp, Homo sapiens
catctttaccctgttcattgggccagagggctgttgataatcaggtgtatgtggccacagcctctcctgcccgggatgacaaagcctcctatgttgcctg

SEQ ID NO: 673739 - DNA, 101 bp, Homo sapiens
ccagaaagtccaagctcgtggtgggtggaaaagtgttcgccgagaacactctgctccagccaaggtggtgagggcagctgttcctaaacagcgcaaaggca

SEQ ID NO: 673740 - DNA, 80 bp, Homo sapiens
gacgttttcgaagatgccttggaaaccatctcaatgtaaactgaaggaacttaatggaactgcacctgaagagaagaagt

SEQ ID NO: 673741 - DNA, 75 bp, Homo sapiens
ccagaccaggacttaataaagcacaacttgttgagctttgtgtccctggtgatgttggaacattaatgatggaac

SEQ ID NO: 673742 - DNA, 90 bp, Homo sapiens
gccgccgccgccgccgcagagctgcagctcggggccgaggatgccggtggccgtgggtccctacggacagtcccagccaagctgcttcga

SEQ ID NO: 673743 - DNA, 96 bp, Homo sapiens
tgtgaaagcccgcttcaagaggttcggaagtgccaaggtcatccggtccctccacgggcggctgcagggtggagttgcccagaagattgttgccac

SEQ ID NO: 673744 - DNA, 96 bp, Homo sapiens
gtttgatatcaccaaactggaggatgcctatgtattccctggggatggcgcatcacacaccaaaggaagcggctcagccccagggcagcacatcag

SEQ ID NO: 673745 - DNA, 80 bp, Homo sapiens
acctgggaactttggagagagtttgtgaggaaaatagcagctgaatactatgacaacctccctcactacaattcctggat

SEQ ID NO: 673746 - DNA, 100 bp, Homo sapiens
aagaggaatgttccctgacaatttcgttaaggctgaaggtgatgtggccgccctcaaccgacgcatccagctcgttgaggaggagttggacagggctcag

SEQ ID NO: 673747 - DNA, 90 bp, Homo sapiens
ggtggctggaaggagaactaaatgggagaagaggaatgttccctgacaatttcgttaaggaaggatgccaattctgcgcttctcagtaac

SEQ ID NO: 673748 - DNA, 98 bp, Homo sapiens
cagtaatagcagggaatcattatccttggctgagaatgcaatggaaaaacttcatagtatggatgatgcctttaaaagacaagttgatgcaattgttg

SEQ ID NO: 673749 - DNA, 98 bp, Homo sapiens
gttacaggcacaccaccacgcccagtgccggtggtggtgtgcacattgagccccggtatagacagttcccccagctgaccagatcccaggtgttccag

SEQ ID NO: 673750 - DNA, 98 bp, Homo sapiens
ttctacttcattcagaagatcaggtacacaaatgcacgcgacaggaaccaggtatctcattcagttgctaaacttatattagttaatttccactggca

SEQ ID NO: 673751 - DNA, 83 bp, Homo sapiens
cggcgcccggagcccgcgggcctgacacgcggcgggacatgcagatctcacattcttgaaggtggcattgaagagcactaaga

SEQ ID NO: 673752 - DNA, 51 bp, Homo sapiens
gcctggaccagcttaatggttctggtggtgaagcagtattttccaatttga

SEQ ID NO: 673753 - DNA, 100 bp, Homo sapiens
ccagggggctgtcgcccgaatgcaggaagaccgtgatgggagctgcagcacagtcgggggtgtaggttatggggtgttatgtgccaagaaccttgcaaag

SEQ ID NO: 673754 - DNA, 100 bp, Homo sapiens
gggacttcgttaaatcagtgcttcggggcacttagcacagcgcctggcgcaagtattgcctaagtgtaatcttgaacatgggcggtgctgtgagtgctgg

SEQ ID NO: 673755 - DNA, 100 bp, Homo sapiens
ggaacacggaggggaaggaggaggagcttaaaagaggctactgaaccccagttggccatggctgagaaactggcgatggaatatgagaggagccctctgg

SEQ ID NO: 673756 - DNA, 95 bp, Homo sapiens
aaaagcgagcctcttctgataactcaggatttacttgaaacaaaaggagaccctaatcttcagccttgaaaagatcttttgaggtcgaggaggtc

SEQ ID NO: 673757 - DNA, 90 bp, Homo sapiens
aaaagcatctccatgagtgtggctgggtcacgacaagggtggaattccagaacaagttctactcaggcacgggctacaagctgagtccct

SEQ ID NO: 673758 - DNA, 90 bp, Homo sapiens
aggacatgagcagtttacacatctcacccaattcagatattaataaggcagcggaaagaagaaatatgaatacggctccatcaagaccca

SEQ ID NO: 673759 - DNA, 100 bp, Homo sapiens
gtcgcctggaggaccagtatttcccatggaggctttccccagacatggccaacaagggtccttcctatggcatgagccgcgaagtgcagtccaaaatcga

SEQ ID NO: 673760 - DNA, 101 bp, Homo sapiens
tgctctgcctgctccacaagcggcgccgcgccctcggcctgcacgggtccgggcccaccagctggtcttgccaccttgcgacgtagtgatcaaagccgttg

SEQ ID NO: 673761 - DNA, 51 bp, Homo sapiens
aggaaaaagcagtaaagccagaggaaggaattgaatgatctggcacgggac

SEQ ID NO: 673762 - DNA, 50 bp, Homo sapiens
ttccacagatgtgtcaccaaaccaggtctctgctgctgatgaagctgtga

SEQ ID NO: 673763 - DNA, 90 bp, Homo sapiens
gacaggctcttacagtgcactcggcaggcagtacccctcttctctgtgaatcagtggctaacctggttagaaactgctgaagaagaagaa

SEQ ID NO: 673764 - DNA, 98 bp, Homo sapiens
atggaatccaagggggccagttcctgccgtctgctcttctgcctcttgatctccgccaccgtcttcaggccagacaaatttacatgtattggagacca

SEQ ID NO: 673765 - DNA, 100 bp, Homo sapiens
tcagtttctggaagaagaagaagagcatgatcggcatgtccaccaaggcaggactgcctccgggcctgccaggagcagatcgaagccctgctggagtcaa

SEQ ID NO: 673766 - DNA, 90 bp, Homo sapiens
ctgttctccatcctgtccaccgtgctgctcagagccacggacaccatcaactcccaggggctttagtgtatgaacatcctggacaagaat

SEQ ID NO: 673767 - DNA, 82 bp, Homo sapiens
gcggccctcaggagcaaggcgcccgccggggtcagcttggtcagcgtccattccagccccaacgaccagatgctgtgggtgc

SEQ ID NO: 673768 - DNA, 83 bp, Homo sapiens
gtccacccaccgccgccgcctcccaggtgtcagctgtgatgcatgtttaaaaggaaattttcgaggtcgcagatataagtgtt

SEQ ID NO: 673769 - DNA, 100 bp, Homo sapiens
agttccttgatgagctcatggagaggctgaagcagaggatgtggacagcccagcaagttcccatgagcctcttgcctggctcccccagcagggccgtcag

SEQ ID NO: 673770 - DNA, 75 bp, Homo sapiens
gatacttgacctacgcaagagacaatgtcatgtgattcagcctaatatctcagctcctggatttggatttggaat

SEQ ID NO: 673771 - DNA, 74 bp, Homo sapiens
cgaactggacctgagcctcagcgacctgaatgaggtcccggtgaaggagctgggcatccgtttccgaggcttta

SEQ ID NO: 673772 - DNA, 74 bp, Homo sapiens
ccctgaagagggaagacacgcggaaacagctcatcccactgatgacaccacgacgctctctgagagaccatccc

SEQ ID NO: 673773 - DNA, 90 bp, Homo sapiens
cagctgccggcaggacctttctctcgctgccgctgggaccccgtgtcatcgcccaggccgagcacgttccaaaagctgagacaagatctt

SEQ ID NO: 673774 - DNA, 101 bp, Homo sapiens
cgccgcgttggcgcttggacggcgggaaccggctccggagcgagaacgcgcgtgagaagccctaccactgcaactgggacggctgcggctggaagtttgcg

SEQ ID NO: 673775 - DNA, 83 bp, Homo sapiens
ctggtgcacacaccctcgtattctcctgcccttccccagagtgaagacatttccacctggacacctgaccatgtgcctgccct

SEQ ID NO: 673776 - DNA, 82 bp, Homo sapiens
gaaaatcaaaagaaacttttgcccttatcagtaacacctgaggatcagttcttaagagcagccccggtaactggaggaatgg

SEQ ID NO: 673777 - DNA, 83 bp, Homo sapiens
ctcccagccacctctgaagttgccaggcttcccaacattcttgtctgtgacatgggaaagcggaaccaccaaaaggagtgatg

SEQ ID NO: 673778 - DNA, 100 bp, Homo sapiens
agagacttgtacagagatgtcatgttggagaactacagcaactttgtgtcaccggatgtgtctgggaagctgaggatctgggataccacgcagaaggagc

SEQ ID NO: 673779 - DNA, 100 bp, Homo sapiens
agttctttcctgccagtgccgacaggacggtgctggaggcgctgctgccgctgaagggcctagaggagcgtgtggcagccgccgtggacctgatcatcaa

SEQ ID NO: 673780 - DNA, 82 bp, Homo sapiens
gatcaatataaggatgataattttggagaaggaaatgatggtggaatattaggcttgaagtagaaaatgccatgatgagaaa

SEQ ID NO: 673781 - DNA, 83 bp, Homo sapiens
ccaggaacgaatctctcaggctgcatcaggatgaatgatgacccaagtatggaaaaggggcaggatggggctgggaagtccaa

SEQ ID NO: 673782 - DNA, 75 bp, Homo sapiens
tcgagctgctgttatcccaccaatggagaaccaggtgcatcagcgcattgcggagctgaggaaagcaggtctgtg

SEQ ID NO: 673783 - DNA, 98 bp, Homo sapiens
gatcttctgcggattgttggaatctacccggttcagcgaggaagaatgcctccaacccagcccaatccaggccagtacgcactcaccaacggggaccc

SEQ ID NO: 673784 - DNA, 80 bp, Homo sapiens
gtccgtgcccgcgggacctgacagccgggtcagaggcggtgcgtctttctacgtgaataggattttgtggctggccagat

SEQ ID NO: 673785 - DNA, 95 bp, Homo sapiens
ggacgtgagcccagccgaggtaccgctgaagaggaatcaattttggaaccttttgaggatggctttgcaaatggggaagaaagtactccaaccag

SEQ ID NO: 673786 - DNA, 100 bp, Homo sapiens
cggcaacaatgatggagaaaaggaaccttcattaacagatgccattccctctcacccaagaggctacgcccaggaggaacagctgaaagaagaggaggaa

SEQ ID NO: 673787 - DNA, 90 bp, Homo sapiens
aaaaatttacccacaaatacctggtgaagaacaaattggttttgagctagtggagaaattatttcaaggtcagctggtattaaggacgcg

SEQ ID NO: 673788 - DNA, 83 bp, Homo sapiens
tctcgcttttatttgaaggaggtgagaaagcttcttgctatctacctccaccatgatgaaagtgtgttaaccaacgtgttctg

SEQ ID NO: 673789 - DNA, 75 bp, Homo sapiens
taaagaacagtaggatccttgctggggacgtggagacccatcaagtggccaatatgatgatcaggatgaagagag

SEQ ID NO: 673790 - DNA, 100 bp, Homo sapiens
cggcggcggcggctgcggtcgaagaaggggacgccgacaaggagaacgtatttaccgggcagtcaaagatctattcctacatgagcccgaacaaatgctc

SEQ ID NO: 673791 - DNA, 100 bp, Homo sapiens
ttggtcttctgatagcaactttaatgtgggtttcatcaccttaaatggttttgaaccaatgaaggtgtattcccttaaaaagacggacagcccatcgtgt

SEQ ID NO: 673792 - DNA, 90 bp, Homo sapiens
cggccacagagagattggtgtttttgtgaggcagtgagacctaaggtgattccagatcactgtatctttgccagtaacacatctgctctc

SEQ ID NO: 673793 - DNA, 100 bp, Homo sapiens
ttgtcagtttcttgagggctccccagccatgcttcctgtacagcctgcaaaactatgatgactttgaccagtttgataagcctggcgcggaacggtcgtg

SEQ ID NO: 673794 - DNA, 102 bp, Homo sapiens
tccacaatggaaccaattgttttacagtctgttccacatgatcattgtaataagaataatccagaatggctactctgatctatgttgataaggaaaatggag

SEQ ID NO: 673795 - DNA, 100 bp, Homo sapiens
ccgccggccgctagcgtcagcgccagccaggtccctgtgcgttttattgcgacctgccggtgggaactttgtctccgagtcggagcagcatggagcggcg

SEQ ID NO: 673796 - DNA, 74 bp, Homo sapiens
gaaaaaagagaactggtattcaaagaggatggtcagggaccaagacccctggacctggggcccagtcggccctc

SEQ ID NO: 673797 - DNA, 80 bp, Homo sapiens
ttgctagccattgtctcatgaaccatcctgatttagcaaaagacttaacaggtcagtcttcactgtttccaatggaagat

SEQ ID NO: 673798 - DNA, 98 bp, Homo sapiens
tggatgaccccactttgctctttgccaatgcaggcatgaaccagggacacggccaacacggtgaaggaaaagttcgggaggaagctttatgaatcctt

SEQ ID NO: 673799 - DNA, 100 bp, Homo sapiens
cttttgagcaaccactacaccagttccgagatcagggtctttggtgccccggaggttctggagaacttggaggtcatctttctgtccaagggcaaggatg

SEQ ID NO: 673800 - DNA, 100 bp, Homo sapiens
cggggacctgacccagtgtgtggactgcgtgattcctccagaggggtccctcttgcaggagcacgtgaattgcctctgcttacgttcaggccctgtccta

SEQ ID NO: 673801 - DNA, 75 bp, Homo sapiens
ggctgcaccattttacattcctaccatgaaaggaattgaatgatctggcacgggaccctccagcacagtgttcag

SEQ ID NO: 673802 - DNA, 74 bp, Homo sapiens
cttcctgcggacgtccaagctgctgcttccggatgactttaaggttgctccttgagggcaggacagttcttatg

SEQ ID NO: 673803 - DNA, 98 bp, Homo sapiens
cctgttcatcaggaacgtcgcggacgccaccaggctcagggtttggagcggccaccaaggccatgtgcatcggcctgcggtactggaagcctgagcgg

SEQ ID NO: 673804 - DNA, 82 bp, Homo sapiens
cggggagctgttgcgcagcctggagcaggacctcaagatatgaagatcaatgatgcagactgatggttttgatgaagctggg

SEQ ID NO: 673805 - DNA, 98 bp, Homo sapiens
cgggcccaaggcgtgaggcgccgcccgggtgtccccgcggcgcaggaggcggtggagcgcagagcgggcgagcgcggaagtgctctctggcgtggtgg

SEQ ID NO: 673806 - DNA, 74 bp, Homo sapiens
cagcggaagcagcgctctatacggatgctttcaatgaggtgaacggggtctgcatggaggggaagcagcatggg

SEQ ID NO: 673807 - DNA, 76 bp, Homo sapiens
gatgaagaagttattcaagatgagaatagtgacagtggtacaggaaagaaagaaaaagaaaagaaaaacagaaagg

SEQ ID NO: 673808 - DNA, 51 bp, Homo sapiens
gaatgcccttggcagcctgcccaagcggccaagattgccggtctctacaat

SEQ ID NO: 673809 - DNA, 98 bp, Homo sapiens
ggaaccaggatatcaagaccaaatggacatttgtatggaggaagaggaagaacattctgacagaaatgcatcacggaagtctcgtcctgaggtcatca

SEQ ID NO: 673810 - DNA, 100 bp, Homo sapiens
tgctactatgagaccaagcacacggaggaactggacagccaccttcgggatgagcataaggtgtgcaactgaggaacatggctcaagaaactaatcacag

SEQ ID NO: 673811 - DNA, 100 bp, Homo sapiens
tgcaccttcagaaacagtgctgaagcctttaaatgcagcatctgcgatgtgaggaaaggcacctccaccaggtagacgcaccctctgaagatggtgactc

SEQ ID NO: 673812 - DNA, 100 bp, Homo sapiens
acttgaacctttcctaagggacactaagggcttcagtcttgaaagttttagagccaaaggtactccaaagattcaggtttactcacgtcatccagcagag

SEQ ID NO: 673813 - DNA, 85 bp, Homo sapiens
aggaccctgtgctgggcgcggagtcacgcaggctcgaggatgtctccccgttcaatgttgtggcctggcacgggaattatacacc

SEQ ID NO: 673814 - DNA, 83 bp, Homo sapiens
actgtgaacgtgctgtggaatatatggtgaacacacagtgttcatcccctcaggaggacacagcttttgaggtaccatcttgg

SEQ ID NO: 673815 - DNA, 51 bp, Homo sapiens
gcagctgcgatctctgtggtaggcccagctgtgagccgtgagctttgaggc

SEQ ID NO: 673816 - DNA, 100 bp, Homo sapiens
attgaacatgccttcatcctctataacaagtatatcacatgttgcccatttaatgtggttcgaaagactctatgtttggcttcagtgttttgaaaaatac

SEQ ID NO: 673817 - DNA, 71 bp, Homo sapiens
ggggcttactgctgatgctagactgttatggacagagcgggatgccaccagcttgtccaaagggaagttcc

SEQ ID NO: 673818 - DNA, 83 bp, Homo sapiens
cgagccctaactcagcgcaggaggaccggctgccgccgccgccgccgccagacctgcctagagctggaacgttacctccagag

SEQ ID NO: 673819 - DNA, 101 bp, Homo sapiens
gtctccgcggcagccctcgctgtcatcctcattgctactgccctctgcgctcctgcatctgcctccccatgaacaaaccctatctgttttatttcaacatt

SEQ ID NO: 673820 - DNA, 101 bp, Homo sapiens
tgcagccttcccatgctatctgttgacatggaaaacaaggaaaatggctctgtcggtgtaaaaaactaaaactcaggtaatgggagaaatcaagattgcat

SEQ ID NO: 673821 - DNA, 100 bp, Homo sapiens
caagaatccttttggcttagagatcactaatccatcttcagcttcaattacaagaaccagcacctatgacagaagatctgctagaagagcagtctgaagt

SEQ ID NO: 673822 - DNA, 100 bp, Homo sapiens
aagctacactgaatatgtcttctaccagtacagaacaggtggccgcattttgccgcagtttgcatgagatgaacccctctgaccagagcccatctcctca

SEQ ID NO: 673823 - DNA, 90 bp, Homo sapiens
ctgggactttcttcgttgccatgaggaaagaattctccgagcttcctgcctgacacagctcacttcaagaagtgcacaatgtcagaacgt

SEQ ID NO: 673824 - DNA, 87 bp, Homo sapiens
ccatttgatgtgactcgtcggcgaatgcaattaggaactgttctgccggaatttgaaaagtgccttttattcacctcgatgatgatt

SEQ ID NO: 673825 - DNA, 82 bp, Homo sapiens
ttacaacattaatcagatactgcatttaaggggcactatgaacgaagaggagcagtttgtaaacattgatttgaatgatgac

SEQ ID NO: 673826 - DNA, 97 bp, Homo sapiens
cgctacggaccttaaaatacccgcaacagccccttcgtcccaactgcgcaaaccatgcaggatgatttactgatggacaaaagcaaaacccagcccc

SEQ ID NO: 673827 - DNA, 88 bp, Homo sapiens
tgtatgtgtgtgccagcgatgtccccatccgccgccgagaggaggcctatgagaatcaggaacagaagtgtgtcccggccagtggaga

SEQ ID NO: 673828 - DNA, 100 bp, Homo sapiens
catcaccaagcggtgagactatcacctatcgccaagtggtctttcatggtgctgattcagacatagaatggctacagaaagactttgggttgtatgtagt

SEQ ID NO: 673829 - DNA, 100 bp, Homo sapiens
ggacgctggttcatacactccaagactcctcagacccctgcacaattgagagaaaagcccgaagaattagcgtgacctccaaagtacaggcagacatcca

SEQ ID NO: 673830 - DNA, 83 bp, Homo sapiens
cgcggcacagagagggcctgggagcttgctgcagcttcagtgcagagcagagcgggcggaggaccccgggcgcgggcgcggac

SEQ ID NO: 673831 - DNA, 82 bp, Homo sapiens
cagaagtcagaatccaagatggtctccatcacatttttgcccagaggtaggggggattatgcccagttttgggatgttgaat

SEQ ID NO: 673832 - DNA, 98 bp, Homo sapiens
ggaggaagcaaccatttcagtctgcaggtcattaggttcgatacaagaggctgttttcctagcgtggcttgctgcctttggtaagaacatgtcgtcca

SEQ ID NO: 673833 - DNA, 101 bp, Homo sapiens
gggctgctggtgctgtgcgcgaggctcctcactgcagcgaagggagtaatggagtccaaagagaaacgagcagtaaacagtctcagcatggaaaatgccaa

SEQ ID NO: 673834 - DNA, 100 bp, Homo sapiens
tcctgggccaacatggggcaggagtgcatcaagtgccacatcaacgtgtatccacacaagcagaccaagatcactccatggatgaaatgacagctgtggt

SEQ ID NO: 673835 - DNA, 95 bp, Homo sapiens
cagcctcctgagtagctaaggactacaggattctgctggaagaagtaagagtgttcaccacatattttctgttcaagagaataatcatctcagtt

SEQ ID NO: 673836 - DNA, 50 bp, Homo sapiens
agcgcgaatatcgtcatcgttagaagattgcacatgttatgtgagttgga

SEQ ID NO: 673837 - DNA, 100 bp, Homo sapiens
atgaagtgcaggttaccactacagatggcacagggtattctgcacaaaagtgtaaggcaaacattggtgggcaccgatcttcctgttcattctgcaagaa

SEQ ID NO: 673838 - DNA, 74 bp, Homo sapiens
gggagctgctggccgcggcgtgggcagttcaggggctgggcggctgaggttgatgataattagaagcatgcttt

SEQ ID NO: 673839 - DNA, 100 bp, Homo sapiens
cgctgtgcccgggcctgcaccatgagcgtcccggccttcatcgacatcagtgaagaagatcaggcgccatgtcagaaccggctggggatgtccgtcagaa

SEQ ID NO: 673840 - DNA, 74 bp, Homo sapiens
ctggtgttatcaacttaaaagatgccacctctaagggaagtgttcgccagttactacatgaaaagataagagat

SEQ ID NO: 673841 - DNA, 82 bp, Homo sapiens
ctgcgagggactaagagcagagccttgtttgtatgaagtccagcacatctgtggttgagcttgttatgctgctttgttctca

SEQ ID NO: 673842 - DNA, 97 bp, Homo sapiens
atggaagattttgatgcaaatatcgaagaacagaaagaagaaaagaaagatgcagaggaagaggaaagcgaactgttggttgaatctggcgatgtgg

SEQ ID NO: 673843 - DNA, 75 bp, Homo sapiens
actcatcttcatggaaacgtctgctaagactgcttccaatgtagaagagtttgacggtgagaacatgtatatgag

SEQ ID NO: 673844 - DNA, 100 bp, Homo sapiens
attggcattaatgattctgtaacaataaccattctgtctaatgatgatgcctatggaattgttgcatttgctcagatgcctgaggaagtgcaccatggag

SEQ ID NO: 673845 - DNA, 73 bp, Homo sapiens
tctagaggcataattaggataataaatcctataacaatgcagtgtataaagcattgtcgtggaagttctccga

SEQ ID NO: 673846 - DNA, 115 bp, Homo sapiens
tttgagaggcagcactactcagacatcttcaccaccacagagcccatcaagcccgagcaggcttgcacagaaatctggaggcagtatcacctaacggtgagtagaaacacctttt

SEQ ID NO: 673847 - DNA, 75 bp, Homo sapiens
ctggaacctccagaaaaagtactttaagttacctacaggtgatcctagtcagaacatcctgaagagggtagaaga

SEQ ID NO: 673848 - DNA, 82 bp, Homo sapiens
ctgcagtgggacaggtggcggcgaccggcggcgtccgaggaggtgtagaatgagccaaggagactcaaacccagcagctatt

SEQ ID NO: 673849 - DNA, 50 bp, Homo sapiens
ggaaggtgtgtttcctcgccacaggtgaaatgttcccactgccaggaggc

SEQ ID NO: 673850 - DNA, 100 bp, Homo sapiens
gtgatatgttccagttgcacatttcctgcaaggactccaaagtggtgaggcttctgaatgcttatgatgaacatcaaacactcctgaaagaacaggattc

SEQ ID NO: 673851 - DNA, 75 bp, Homo sapiens
atgacttcaagttcccattcacatggccgccctgctcccccaatgaaaggccagcttcgaagaaaagctgaaagg

SEQ ID NO: 673852 - DNA, 75 bp, Homo sapiens
aggcattttgctgtctcctcctaatacgggttcattgaaaaaatccttagtgatattgacatgtctcaagtgaca

SEQ ID NO: 673853 - DNA, 72 bp, Homo sapiens
tgccctcaacgaccactttgtcaagctcatttcctgctccaagcccagccctcagccatggcatgccccctg

SEQ ID NO: 673854 - DNA, 100 bp, Homo sapiens
cggggacccttccgtatctgcctaggcattttgctgtctcctcctaatacggtctcggtccagctcgacttccagctcaggctccagcaccagcactggc

SEQ ID NO: 673855 - DNA, 95 bp, Homo sapiens
ctcttgcagaaagtttcaaagatgagcagcgatttcaacttggccttatggatgatgctgcggagtgctttgcagcagactgtcctgggaagctg

SEQ ID NO: 673856 - DNA, 100 bp, Homo sapiens
cccaataaccaggtgcttggcaaaatcgagcgggccattggggtcaccagtcgttggcacaccaagaagctgccccgcaagacccaccgaggcctgcgca

SEQ ID NO: 673857 - DNA, 101 bp, Homo sapiens
cccgggaccggcggcgcgcggcggccgaggccagggacgatgatgacattaatgatgttgcatcgatggctggagtaaacttgtcagaagaaagtgcaaga

SEQ ID NO: 673858 - DNA, 51 bp, Homo sapiens
gctgctgctgctggtcccactctgatggagagcaatacatcatcatctttg

SEQ ID NO: 673859 - DNA, 50 bp, Homo sapiens
ggaccacttctcccgccctgtgcgcacgtaccgggtgccgaaggaggtcc

SEQ ID NO: 673860 - DNA, 51 bp, Homo sapiens
tttacctgtgagatgtttcatcccaacacaagtctggaaaagtttgaaatt

SEQ ID NO: 673861 - DNA, 100 bp, Homo sapiens
tcaccactcaaaactgtaatactaaatgtgttaccataccaaggcgggtgccccggtgatgactggtgcgggagagagcaccaatcccgagaacagcgag

SEQ ID NO: 673862 - DNA, 73 bp, Homo sapiens
acagaaacaaaatgtcaacaaattgatgggactcagtggcctctgaggatgtggctgtgaacttcacacttga

SEQ ID NO: 673863 - DNA, 99 bp, Homo sapiens
ggtccgaggagcctcgcgcggcgctggagagagacaagatgtccgccagagctgcggccgccaagaggcggggtttcaccatgttgcccagactggtct

SEQ ID NO: 673864 - DNA, 100 bp, Homo sapiens
actgccgcttcagttctcccggtgtggccacgagtcggcagtgactcttcgagaagacagtgccaagaggttggagaggagggcacgccgcatctccgca

SEQ ID NO: 673865 - DNA, 101 bp, Homo sapiens
ggttttcaggaccaaaattgtggaaaagtcactctgcatgcttttcacttccactgcatctctcgctggctcaaaacacgacaggtgtgtccattggacaa

SEQ ID NO: 673866 - DNA, 100 bp, Homo sapiens
gatttgttaaggattccaagtaactcttatttgactcacttttccccttcgtctttctctccctttctgtctttctgtgtctcctccaagaatgaaatat

SEQ ID NO: 673867 - DNA, 100 bp, Homo sapiens
catgctggcaagtctgaaggtcaaacctgcctagagctggaacgttacctccagagcgagccctgctatgtttcagcctcagaaatcaaatttgacagcc

SEQ ID NO: 673868 - DNA, 83 bp, Homo sapiens
cgaaactgtgattgttttctgatgtgaagttcatttccaatccgccctccatggtggcagcggggagcgtggtggccgcagtg

SEQ ID NO: 673869 - DNA, 76 bp, Homo sapiens
gcaagagggagttaaggacattccaggcagaggcaaggagtcaactgagagttcaaatacaacaattgaggatgaa

SEQ ID NO: 673870 - DNA, 100 bp, Homo sapiens
atatgtgtacaaacctgtcatgaatcaaacatgttgtcctcagtacacaataaggccagcatgggcagtgggagtgtttctttctgtggtatgtccatgg

SEQ ID NO: 673871 - DNA, 82 bp, Homo sapiens
tttaaagatgcagaggatgctttgcagaaacttcataaatatatgcaggtggataatattaatgcagctgtgatggatttga

SEQ ID NO: 673872 - DNA, 100 bp, Homo sapiens
tggactccgtgcaggagctggccccgccgcccgccctaccccccaagcagcggcagctggcatgatgttgcagcccccctgagcccccattcacaggagg

SEQ ID NO: 673873 - DNA, 100 bp, Homo sapiens
aacacggtggcaagcaagtttaatcagacctgctcacacttcagaatagagaagtctattatcctcccagtccacaacgctgaaccgtggctggacgaat

SEQ ID NO: 673874 - DNA, 108 bp, Homo sapiens
ggagttccacatccggcacaactacccctggaacaagttgccggccaacgtgagacaggaaatgcaacctcaccacaagtacaaagaccatctttcatggactacttt

SEQ ID NO: 673875 - DNA, 74 bp, Homo sapiens
cctggcgcgatgcgtcaagtacactgaaattcatcctgagatgaggtcaaaatgcagatcttcgtgaaaaccct

SEQ ID NO: 673876 - DNA, 95 bp, Homo sapiens
attgcaatcaagtcacctgacacatttgtgagaactatttatgcagtacgaattggagcaatgttggcttatacacctctggatgagaagagcct

SEQ ID NO: 673877 - DNA, 83 bp, Homo sapiens
ataaaccaaaggaattttgaagtcaccactgaggaggaattcaccctgttcgtctatgatctattccagaggggagcttcacc

SEQ ID NO: 673878 - DNA, 74 bp, Homo sapiens
ggagtgcaagcttagagcgtctggccaagaatcagaggaagtgggtggtgaagaaggtgaagtccatgcagatg

SEQ ID NO: 673879 - DNA, 50 bp, Homo sapiens
tgaagagccttcaggcgctgggcgagaacctagaagtcggaatccggaag

SEQ ID NO: 673880 - DNA, 75 bp, Homo sapiens
caggggctgactgagagcgtctgcttgccgccaagctgagccaccaaagaaggaggctgccaccacggggccgca

SEQ ID NO: 673881 - DNA, 83 bp, Homo sapiens
taatcagattttgaccaagcattttgtaaggtgtcagctgtgatgcatgtttaaaaggaaattttcgaggtcgcagatataag

SEQ ID NO: 673882 - DNA, 130 bp, Homo sapiens
tgtttgcaaccactggttatcctggcaaaatggcaagccagtttcaaattcatcatttaggacaccctcagaaactggcagacctttcacttcgtatccaacaaattgaaacaactctcaatattttaga

SEQ ID NO: 673883 - DNA, 100 bp, Homo sapiens
ctggcgctgcgccgggccccgggccccgatggccccgaccgcgtgctggagctcttcgacccacccaaggtggaggcctgaattttgatctatgttctac

SEQ ID NO: 673884 - DNA, 75 bp, Homo sapiens
gctgtggcgggaagatggccggatttgaagagactgtactggtcagagaaagacatcagcaggagagccagagat

SEQ ID NO: 673885 - DNA, 50 bp, Homo sapiens
ggagactgcatcaggctctcggtttgtccagaggggttgcgtttatccgg

SEQ ID NO: 673886 - DNA, 100 bp, Homo sapiens
agcacctggatgagacatttgctacagcatcccacattaagtcaacgctattgacctgttgtattggcgggacatcaagcagacgggcatcgtgtttggg

SEQ ID NO: 673887 - DNA, 75 bp, Homo sapiens
ttcttattttactgtgcctgataccagagaacttcccagcatacctgagaatccttctcttggagtcaagaagcc

SEQ ID NO: 673888 - DNA, 97 bp, Homo sapiens
ctatacaagattatctagggtttcagcaggaggcagaagccgtggaagcgaatggaaaacagcacagctgacttcacagtagtagatactggtgaca

SEQ ID NO: 673889 - DNA, 101 bp, Homo sapiens
tgtctcggctcagctaatggaaatggagaccttgattctgattgaagataaaactttccaagtccttggtaatctttacagcgagggagactgcacttacc

SEQ ID NO: 673890 - DNA, 48 bp, Homo sapiens
gccagcggaagatcgtcatgcataaggaggctgtaaaagaattcattg

SEQ ID NO: 673891 - DNA, 100 bp, Homo sapiens
tatgaaccagttcctgatgatgatgagaacccattaaaagagccagtaaatcctgtggaaaatggccttcagtgatcttacatcgaggactgtgcatctt

SEQ ID NO: 673892 - DNA, 75 bp, Homo sapiens
aatctgagcaatatggaatattttgtgccacacacaaaaagggtcaaatacaacctgaactccctgtcacatgat

SEQ ID NO: 673893 - DNA, 97 bp, Homo sapiens
gagggagtgatgtcttccagactcggtgctgtacccgccaagagaagccagattgctccaaggcccgctgtgaagtccagttctctccacgttgtcc

SEQ ID NO: 673894 - DNA, 100 bp, Homo sapiens
ggaaaatcttatacaatgatgggtaaacaagaagaaagccaggctggcatcattccacagattacagagtcacgggagacaccgttctgtgttactgctg

SEQ ID NO: 673895 - DNA, 100 bp, Homo sapiens
aaactaggaatctatgatgctgatggtgatggagattttgatgtggatgatgccaaagttttattagatcgaaagctgctttgcgtcgcagttggagcag

SEQ ID NO: 673896 - DNA, 83 bp, Homo sapiens
agggcgacagcaacagctctgccggctggaagacaggtgatttggcttctgcacagttaggaggagcaccaaaccgatgggag

SEQ ID NO: 673897 - DNA, 73 bp, Homo sapiens
ctttattgaagctcacctttgtctaaataactgaacccaaagtgcagcctggtgtagccatgcaggaagatat

SEQ ID NO: 673898 - DNA, 101 bp, Homo sapiens
cgcagccacaaccaattcatagaatagactcccctggatttaagccagcctctcaacaggtctgtgtacactgggctcagtaagttgttatgttgctggaa

SEQ ID NO: 673899 - DNA, 100 bp, Homo sapiens
aaacaagccaggttccagactggagtgatcctcctcagattgtcaagtggtcagactgttgtttgccattagcttgcagacctggggatccttatcggct

SEQ ID NO: 673900 - DNA, 82 bp, Homo sapiens
cggcggagtagcaagtggccatggggagcctcagcggtctgcgcctggcagcaggtgccacttcggataaaccctttggact

SEQ ID NO: 673901 - DNA, 100 bp, Homo sapiens
atccccgcggacgccacagcgctacatttatgcagtgtgtgattctttctaaaacaactccctggaagagaggacatttaattcaacaatttattggcca

SEQ ID NO: 673902 - DNA, 100 bp, Homo sapiens
aggcgttcgcaccggaaaatgtagcttcccggttaagacctaatctgggagcctgcaagtgacaacagcctttgcggtccttagacagcttggcctggag

SEQ ID NO: 673903 - DNA, 85 bp, Homo sapiens
agtccggaggtgaggcggaactctgaggtggtccataaggctgtgcttgatgtatttgaggagggcacagaagcatctgctgcca

SEQ ID NO: 673904 - DNA, 95 bp, Homo sapiens
cccaatttgtctgatgaaaacagcgtggatgaagtggaggactttgtgtcattgtatcaagattttgaaaacttttatacaaggaatctgtacat

SEQ ID NO: 673905 - DNA, 96 bp, Homo sapiens
cgcggcgttggtggccagacgggctggtgcagcgactgcagccgacgccgttcaaaggaacgaggtcgcgtggggcaggcagtggcgctgcgggcc

SEQ ID NO: 673906 - DNA, 100 bp, Homo sapiens
aggggaagatggattgaggggccgagcggggaagcgagctgcaccggggaatcatgacttctgcagccgactggtcgaattgacaaatcttaccctacag

SEQ ID NO: 673907 - DNA, 75 bp, Homo sapiens
gcaagctctgcgaggccatctgccccgcccaggccatatacaaacagttcgacactgaccgatcagggaccattt

SEQ ID NO: 673908 - DNA, 50 bp, Homo sapiens
gttggacctttatacgtattgtaaagctaaaggtggttatttaagtattt

SEQ ID NO: 673909 - DNA, 82 bp, Homo sapiens
cagcttttggcagcatgaaagttagcagttgacatcatggacatatgtgagtccatcctggagaggaagcggcatgacagcg

SEQ ID NO: 673910 - DNA, 90 bp, Homo sapiens
tgcaccaatcagcatgctgtgtctagctcaagcagttggaattgatcacaccttttcagttgtacttcaatcctgaattaatctttaaac

SEQ ID NO: 673911 - DNA, 119 bp, Homo sapiens
aagaagctactggacctcgttcagcagtcatgtaactataagcagcttcggaaaggagccaatgaggatacactgcctctaggactgggacagatagccactgagtacctgcttcaaat

SEQ ID NO: 673912 - DNA, 100 bp, Homo sapiens
gtttcatgtcagaatcaaggagctgatttactgagcatcaacagtgctgctgaattaacttaccttaaagctgtgtgccaaccacgatgcaaacatggtg

SEQ ID NO: 673913 - DNA, 90 bp, Homo sapiens
acgggactaaactggcgggctccgtggaagcgtggccggcagcgtcccggacgaggaggagctcttgtccctggcaaagcgaaagcgcag

SEQ ID NO: 673914 - DNA, 100 bp, Homo sapiens
tattcaagttacttctgattggcgactcaggggttggaaagtcttgccttcttcttaggtttgcagcaggtccgatcagaaaacaaagaaaagagtgcag

SEQ ID NO: 673915 - DNA, 100 bp, Homo sapiens
ggcggagacccccgccctcaactgaggtatctttaggtggtgttgatcttacagtccgggtgctcacgacaggatattggcccactcagtcagccacacc

SEQ ID NO: 673916 - DNA, 98 bp, Homo sapiens
gccctggcgggtgccctggctaccatggaccatcctgctggtcagcactgcggctgaggtggtgggacacacgcaggggccactagatgggagcctgt

SEQ ID NO: 673917 - DNA, 74 bp, Homo sapiens
ccgtctcttcgagttcttcgtgctgctcaagccgtagggtgtgtgctgtccgggctcacggggaccctgtctcc

SEQ ID NO: 673918 - DNA, 100 bp, Homo sapiens
gtgccccgggcccgcgcgggatcgtgcgtcgtcccgccgcgtccctgaagggaaggaagcgagctgcagaaccttggcctgaaaatgctacattatatca

SEQ ID NO: 673919 - DNA, 75 bp, Homo sapiens
aatcgtgagcatggatgtgattcaacatgaaacaatatgctgggctcttgcactgtttggtggaaatggtgagac

SEQ ID NO: 673920 - DNA, 100 bp, Homo sapiens
aagatgggaaagttattgaacggctgggccagagcgtggttgctgaccagttgaaagctcccggagccctgcctgttccctgtccatccaggccagcagc

SEQ ID NO: 673921 - DNA, 101 bp, Homo sapiens
ccaggacgacgaggagcagggcctgactgcgcaggtgtccctggccagtgtccttccacctgtccacaagcatggggaacatcttcgccaacctcttcaag

SEQ ID NO: 673922 - DNA, 50 bp, Homo sapiens
ctacccgggatacggaggaggggcattgtttccaagtcgtacgagtgccg

SEQ ID NO: 673923 - DNA, 74 bp, Homo sapiens
cgctgctgggcacccacggagcctccggggctggttgggcccgaaggcatcctgcagaacggggctgtggacga

SEQ ID NO: 673924 - DNA, 95 bp, Homo sapiens
ggatttcagcctgcacggatggtcttgaaacacaaatggtttttgctctctattggaggcatcatcattctgaaggataccagtgaagacattga

SEQ ID NO: 673925 - DNA, 82 bp, Homo sapiens
atccttgaatgttgaagatgtccttaccagctttgacaatacaggaaatgtttaaacctgtttccctccaatcttgtggttg

SEQ ID NO: 673926 - DNA, 98 bp, Homo sapiens
ctcctcctcgcctgcgaagcatcacgtccgcttcccgacgctgagggcagccccgtccaggacttcccaagtaagaagcggaagaggagccgctggaa

SEQ ID NO: 673927 - DNA, 100 bp, Homo sapiens
caaaaaataaaaagcctaaatccagtgctggtatttcttcaatgccgaacatcactgttggtacccaggtggagccgccaccaaaatgcagattttcgtg

SEQ ID NO: 673928 - DNA, 115 bp, Homo sapiens
ctgcagcaccagggtggctacgcctcccggctggctcccagccaacctctgataaaccctcccagcggccatcagagagcacaaattgtagccctacccggaaaaggtcttcatc

SEQ ID NO: 673929 - DNA, 50 bp, Homo sapiens
gggatggagaaggaggaggaatcgagatcctgaaggagctagacgagtgc

SEQ ID NO: 673930 - DNA, 100 bp, Homo sapiens
gcggagatcgaggccatccaggaaagcctgcagccctctggacgtagacaagtttggcaacgagatcacccagctggcccggcccctgcctgtggagtat

SEQ ID NO: 673931 - DNA, 75 bp, Homo sapiens
tcagccaccgagaaggctacggcaccatgtacatgaagacacggcttttccagagaggatgatcttccacccaag

SEQ ID NO: 673932 - DNA, 89 bp, Homo sapiens
ctttaccttctctgtgtctttagaaataaaagaagatgatggtaaaggttattttagtggatgtttccaaggattgtcttcagtcatgg

SEQ ID NO: 673933 - DNA, 50 bp, Homo sapiens
tcgccagttaatagtattgtggaggacatgaaccttaacgaagagaaaaa

SEQ ID NO: 673934 - DNA, 83 bp, Homo sapiens
ctttttcgcaacgggtttgccgccagaacacagggactttgaacatgtcggggatcgccctcagcagactcgcccaggagagg

SEQ ID NO: 673935 - DNA, 75 bp, Homo sapiens
gcatgacgcacacaggagagccaggattcatgctctacatccccatagagttgggcatcgatgggctgattgtta

SEQ ID NO: 673936 - DNA, 80 bp, Homo sapiens
aagcctgcccagacggctcacctgtgcgggatggaacaaaaggtgaatgaaatcctgtgccgttcttcagtctggagtgc

SEQ ID NO: 673937 - DNA, 115 bp, Homo sapiens
gagaccctccctgctgagatgcgcaaattcactccccagtacaaagatttcttgcccaggagtgttcctgcctggcaaacaagatgtgtacctcggggtctacctcatgaatcag

SEQ ID NO: 673938 - DNA, 110 bp, Homo sapiens
gcgggattgttagatggaacacggctccatcatcacccaggcgcggagggaagacgccctggtgctcaccaagcaaggatgctggaggtcagcagattggcttcttgcta

SEQ ID NO: 673939 - DNA, 100 bp, Homo sapiens
gaaactcctggttgagctcaaagttattttacattgtggctgcctctttgatgagccgtatagcacatgtggatatagtcaatctgaaggtgatgacttc

SEQ ID NO: 673940 - DNA, 75 bp, Homo sapiens
tttaaagtaggagagcctacatattcttgcagaacaaagaactttgagtctggcaaggcttataagacaacatgg

SEQ ID NO: 673941 - DNA, 83 bp, Homo sapiens
cgcagaagtcgcgtgtctaggtgagtcgcggtgggtcctcgcttgcagttcagcgaccacggatattagaaatggctactccc

SEQ ID NO: 673942 - DNA, 82 bp, Homo sapiens
ctacatttcactggccgcttctgtgaaaaaggaactgtggctgcaccatctgtcttcatcttcccgccatctgatgagcagt

SEQ ID NO: 673943 - DNA, 82 bp, Homo sapiens
cggagctgggggcgggcgcacccccaggttctgggccggagaaggggcgacgttcgggcaccccccgaatggacaatctttc

SEQ ID NO: 673944 - DNA, 75 bp, Homo sapiens
agagtccgatgaaaggaatgggtctgggaccttaacagggagccatggtcagctggttaagatgctgctttatac

SEQ ID NO: 673945 - DNA, 75 bp, Homo sapiens
cgacgctggctgcagggacccggtgacagcgtgagagaaagaaagtcgtgctgtatccctactgacttctccagc

SEQ ID NO: 673946 - DNA, 119 bp, Homo sapiens
cgcaggcgcaaggcttcaggcgacccgtactgggcctactctgtgtgatccaggccaagccaccaagtacctatatgagctgctctacaacgaccctatcaagatcatccttatgcctg

SEQ ID NO: 673947 - DNA, 90 bp, Homo sapiens
ctgccccccaaggaagcgtgcaaatgccagaaagaggatttggccagagcgttttgtgctaaagtaaataatgccagcctgattggactg

SEQ ID NO: 673948 - DNA, 82 bp, Homo sapiens
ctaagcaaaaccctgcagaacggctgcctaatttacagcaaccatgaggatcccattgaagataccacgctgcatgtgtcct

SEQ ID NO: 673949 - DNA, 75 bp, Homo sapiens
gcaaaaccagcgtggcggccgcgctctcttccaggacatcaaggtggaaatttggactcccagggagaccctctt

SEQ ID NO: 673950 - DNA, 82 bp, Homo sapiens
cacgatctcttgtatcaggagttcttgcctctccttccaaacctcctgcaaggttgctccggttgctaagaagactatgaac

SEQ ID NO: 673951 - DNA, 88 bp, Homo sapiens
gttcttacaacatggcagacattgacaaaaaccgaaacttcattgccccttcaatgtgggaatccagccagaccctattcttggacag

SEQ ID NO: 673952 - DNA, 75 bp, Homo sapiens
tgaccctgggagacatcgacgtgaactttgaggcgctgatcatcaccatgtcggtagtcgggggaaccctcctcc

SEQ ID NO: 673953 - DNA, 75 bp, Homo sapiens
gtatgattgaagtttctaagccagggagaggaatcaaatgagtctgcagaatctagcagtaattgggaaaagcag

SEQ ID NO: 673954 - DNA, 101 bp, Homo sapiens
tagtctttccgcttcttgaatttctctctgtaaaggagaaagttggagtgactggtccccctgatccacaagtccgctgtccctctgtcattgagtttggg

SEQ ID NO: 673955 - DNA, 75 bp, Homo sapiens
tgatctccatgtcctgttgtggggcttttacagcctttggatcaggcctttgtgacactaaccacaaacgatgcc

SEQ ID NO: 673956 - DNA, 75 bp, Homo sapiens
atgctgctatctcataaattagagctaacagcaaaacagtatcctgaaaatgtttcgatgaaagatcctccggac

SEQ ID NO: 673957 - DNA, 100 bp, Homo sapiens
ccggagtgtatgtctttggagaacttctggagctggccaacgtgcaggaggcagctggctaagagtcttgggcaggctggtgaaattgagcctgaaacag

SEQ ID NO: 673958 - DNA, 74 bp, Homo sapiens
cggtttctcactgtgatgatgaagcatgatgtatcggcaagcagtgtaaacggaggacttggggaaaaaggacc

SEQ ID NO: 673959 - DNA, 76 bp, Homo sapiens
tgactatcctgcccctgagatccacccaagttgtggatgtacagttacccagcacgtgtacctcctcctcctccta

SEQ ID NO: 673960 - DNA, 93 bp, Homo sapiens
gtgctttgtgatcgaaaccctgaccggatcccataaacactgtcgacccctgagccccttccagtgctgcctgaggtgccctctacctgtgcc

SEQ ID NO: 673961 - DNA, 75 bp, Homo sapiens
acacagctcgacagtacgcctacttctataaagtcatccagggtctagacagtttcaaagtgaaacagaagttct

SEQ ID NO: 673962 - DNA, 83 bp, Homo sapiens
aagaccctctctttcgctgtttgagagtctctcggctcaaggaccgggaggttcttccgaatgatccagtctttcttgagcct

SEQ ID NO: 673963 - DNA, 83 bp, Homo sapiens
tggcctgggcgctccggtggcggcggagcacatgattaagtaccggtacatcccgttcacacatgggaagagaaggtacagag

SEQ ID NO: 673964 - DNA, 98 bp, Homo sapiens
agtcatcgtgcctgaaggagtacatgccctttatgaagatattcttgaggagttgatctctctaatgtattagatcttcatgcctttgatagtctctc

SEQ ID NO: 673965 - DNA, 97 bp, Homo sapiens
ttctgccctttcttgggctgtgttcacggaaggtgtgtatatttatgggctctacatggatggagcagcctgggacagacggaatgggaagctcatg

SEQ ID NO: 673966 - DNA, 76 bp, Homo sapiens
ctccgcctcggcggggccagccggcgagtctaaacccaagagcggtaagaatgattgatgttggctgatattggag

SEQ ID NO: 673967 - DNA, 100 bp, Homo sapiens
ccatcagcaagaagttcggagacatgaggttttgcacactagggaccaagaagccctcggggacactgctgagaaaagactgccgaagggaagaccagcg

SEQ ID NO: 673968 - DNA, 75 bp, Homo sapiens
gattcctccacaccacccacacaccagtcggcagcctccctggccctctttggattccagcacgacgcatcaaac

SEQ ID NO: 673969 - DNA, 75 bp, Homo sapiens
cgcagcccaggcgcgggggcgacgacaggctttgaacttggcctactccagcatttacggcagctaccggaactt

SEQ ID NO: 673970 - DNA, 73 bp, Homo sapiens
gccgagctggacccggaccggttttggccactgaagatcctggtgtcgccatgggccgccgccccgcccgttg

SEQ ID NO: 673971 - DNA, 99 bp, Homo sapiens
cctcaagcgatgtttgatattgaatatttcagaaaagatccaagaccattcttcaagtttgcaaagggttaatgcctcttggaagtcaggagtcttcag

SEQ ID NO: 673972 - DNA, 80 bp, Homo sapiens
ggaacccactcggggactctgccttttaccgggcgtctctggccgagcctctttttgtggaaaacgacagcagcagcagt

SEQ ID NO: 673973 - DNA, 90 bp, Homo sapiens
caccggcctcctgcaagagtttgatgtccaggtggtgttcggatggtttacccttcagcatttgttttgatctctcagaatgacatcccg

SEQ ID NO: 673974 - DNA, 83 bp, Homo sapiens
ctcggcagtcctgtttccctgtaagtgctacagttgaaactccagcagcgccggacccgggaagaactggtgagccaagggat

SEQ ID NO: 673975 - DNA, 75 bp, Homo sapiens
gcttccccggacgggttgagtgctcctgcttaggtgctggagaatctggtaaaagcaccattgtgaagcagatga

SEQ ID NO: 673976 - DNA, 97 bp, Homo sapiens
ttgttattttcccaatttttgctatactcctgttctggggacagtttggtattaaaaattccagcaagattatggaagagcatagctacatacaaaa

SEQ ID NO: 673977 - DNA, 74 bp, Homo sapiens
tcattatatggacagtttaggtcaggtcaattcagtgaagatatgatacccacagtgggcttcaacatgaggaa

SEQ ID NO: 673978 - DNA, 90 bp, Homo sapiens
tcctccgcgggcgtgaaggcggcgctcctactccctccccggactccgcggatgctaatactggagaccgtggacagaccaataatgctg

SEQ ID NO: 673979 - DNA, 100 bp, Homo sapiens
ctggatttggtcgcaaaggtcatgctgttggtgatattcctggagtccgctttaaggttcacaatattcttgcagaaatggtgatggggggaatggtatt

SEQ ID NO: 673980 - DNA, 75 bp, Homo sapiens
gattcgcagtggtcgcttcttctccttggttttgattcatggattcacccagtcattacttctagatgatgctgg

SEQ ID NO: 673981 - DNA, 75 bp, Homo sapiens
tccagcctgcggagcctgtggggcagatggatgagatcaaagggaaagaccgtgtgattctggccttggagaagg

SEQ ID NO: 673982 - DNA, 90 bp, Homo sapiens
ctcgtggacaagtttgcagatcgggagcgcaaggtcgccctcaaggccatgatcaaaacagctgcctctgcctggcatggagccccccgt

SEQ ID NO: 673983 - DNA, 82 bp, Homo sapiens
gaagcggaccgggctccgagtgtcaacgagagctagacaatgcagatcttcgtgaagactctgactggtaagaccatcaccc

SEQ ID NO: 673984 - DNA, 60 bp, Homo sapiens
ctggggcgcaccgccaagagctgggaggaattacggaggttgagctggtccggaatccct

SEQ ID NO: 673985 - DNA, 82 bp, Homo sapiens
agcttctcagccattttccacagatcaggcgggctgcatgctgttcccccacatctccccctgtgaggtgcgcgtgctcatg

SEQ ID NO: 673986 - DNA, 96 bp, Homo sapiens
ccgtgatgttggagaactacaggaacctggagtctgtgggttctgctgtgtggcaactcgtggcttcgtttttgaagctccctatttctggaaccc

SEQ ID NO: 673987 - DNA, 75 bp, Homo sapiens
gcaacacattttcctatacctctgccgggggccattgagactgccatggaagacttgaaaggtcacgtagctgag

SEQ ID NO: 673988 - DNA, 100 bp, Homo sapiens
aagatttcaggtgttgtgctgtcttgggaagaggacattttggaaaggtgcgggagtatgagttaagaaaaaacaacttctcagatactggaaactttgg

SEQ ID NO: 673989 - DNA, 96 bp, Homo sapiens
gccccttccttgaaaagcagaggccttgtaccccccagggttgccgggcgggacagtgattccagcccttcagaaaaatggctacaaacttcctag

SEQ ID NO: 673990 - DNA, 75 bp, Homo sapiens
agcctgcggagcctgtggggcaggttcttgatagtccacaatgggtgaaccacagcaagtgagtgcacttccacc

SEQ ID NO: 673991 - DNA, 75 bp, Homo sapiens
tctgctgaagaagcatcttttagggatcagcctgtgttttttagagccctaatttgtttagaactgtaatatgca

SEQ ID NO: 673992 - DNA, 87 bp, Homo sapiens
gaagggattgcccagtcagcaaaggttcagccctccaagcttagcagtgtctgcaaaaacgaatcttttcctacaacctgttaactg

SEQ ID NO: 673993 - DNA, 104 bp, Homo sapiens
aatcccctgtttgagaaaaggcctaagaattttggcattgacttaattcagtgcacaaatgagatgaatgtgaacatcccacagttggcagacagtttatttga

SEQ ID NO: 673994 - DNA, 100 bp, Homo sapiens
cagaagtccagagctgaggactgcctgtttgcaggaaggatcagaatgttctctctccagtcaactgctggaatctcctcttaaaccaggtgaagcggga

SEQ ID NO: 673995 - DNA, 75 bp, Homo sapiens
cctggatcttcgaacttttgacacggctttggaaacgacgtcatgtgttagcgggactacttgttgatatttgag

SEQ ID NO: 673996 - DNA, 99 bp, Homo sapiens
gctttgagaaattttgagtcctcgagtgaatgggcggatctcatatcttcacttggcaaactcaacaagggcggactactggaagtcacagccaaagaa

SEQ ID NO: 673997 - DNA, 111 bp, Homo sapiens
cggcgaatcacttataaatggcgccgaagcaggacccgaagcctaaattccaggagggtgtggatgaggtcaccattgtcaacattttgaccaaccgcagcaatgcacaga

SEQ ID NO: 673998 - DNA, 50 bp, Homo sapiens
gagaactacagcaacttactctcactggaagaagcctgggaagtttataa

SEQ ID NO: 673999 - DNA, 83 bp, Homo sapiens
gtatgaaaaccttactgcttctctcttcagtgtttgggaaatgggaagtaatgacagctggcacctgaactaagtacttttat

SEQ ID NO: 674000 - DNA, 110 bp, Homo sapiens
aacagcatagagccaatcacattttgcacaagggcagtcaccatgaaaggtacaggtttgcagattccgccagcagcacagcaagctctacagatgagtggctctttggc

SEQ ID NO: 674001 - DNA, 98 bp, Homo sapiens
cagaaaccccgttgacaaggcactgctttttcatgacggctgaccggttccctgatgtgttacctgcttctgctactgatccaaactgcagaacttct

SEQ ID NO: 674002 - DNA, 74 bp, Homo sapiens
cccgtaccgcagcccccgggcacgacctctcggacacggtgcaggcagatatttggagttcttacaacatggca

SEQ ID NO: 674003 - DNA, 83 bp, Homo sapiens
tgtagtcctgttcttctggctctaagatctgaatgttgtgaccactaatttggtgtcagaactgggaaggtggcattggcggg

SEQ ID NO: 674004 - DNA, 82 bp, Homo sapiens
acgagaggatccgcgagtgtattgctcttgtcaggatggtgaagctgttcatcggaaacctgccccgggaggctacagagca

SEQ ID NO: 674005 - DNA, 74 bp, Homo sapiens
cgcagtatcatgctggccaagaagatcatcattaaggacggaggcacgttttatgaaggatacggacagacaga

SEQ ID NO: 674006 - DNA, 101 bp, Homo sapiens
ggccagtcgcgggttttgggccgaggcctgggttacaagcagcaagtgcgcggttggggccactgcgaggccgttttagacccagattgatcactatgttg

SEQ ID NO: 674007 - DNA, 83 bp, Homo sapiens
gctgacgtggagcggtacatcgcctcggtgcagggctccaccccgtcgcctcgacaggcagcctgcttctgcaaagtggtacg

SEQ ID NO: 674008 - DNA, 90 bp, Homo sapiens
cttttgaaccactggaaagtgaggaattttgaagtacaccgtggtgacattgtatcattggtagttacactgttagaccttatgatagcc

SEQ ID NO: 674009 - DNA, 51 bp, Homo sapiens
atgcaatagcccttcagtactgttgtacgatacactgcctctaggactggg

SEQ ID NO: 674010 - DNA, 100 bp, Homo sapiens
cgcaccttctgtctcttcgtcaccttcgacctgctcttcatctccctgctctggatcatcgaactgaatatcttacagactctttcagcacctacgaaaa

SEQ ID NO: 674011 - DNA, 73 bp, Homo sapiens
accctacgttaccgtgctcaaggagatctataaggacaggcagaaattctcagaacaggttttcaaagtggcc

SEQ ID NO: 674012 - DNA, 100 bp, Homo sapiens
ctctgtgatgttgcctttgctggcgagcgctgcgaggtggacggaggagctttatctttatatactgcccttaccacacagcagaaactggcaggtgtca

SEQ ID NO: 674013 - DNA, 100 bp, Homo sapiens
atggatcccctgttccagcaaacgcacaagtggtatgcaagattacaattatgtgtgggccaactgttttgagatcacattagaactgtcttgttgcaag

SEQ ID NO: 674014 - DNA, 74 bp, Homo sapiens
ggaatggaggaatgcttgaatatagccagttccattgaggtacaaacccgtagtgctgatgaaccaatgacaac

SEQ ID NO: 674015 - DNA, 90 bp, Homo sapiens
caagaggcagacctaggaaatggactgttgggcgggagctgctgctccatctgattgactatctcgtaaccagtgatggcaaagaccctg

SEQ ID NO: 674016 - DNA, 100 bp, Homo sapiens
ttcggaagctagcgggtcgtgctctcgggaagctgcaccgccccttggatctcccttcgtggagacgacaccggggtcctcctgcccaccccaggggagg

SEQ ID NO: 674017 - DNA, 50 bp, Homo sapiens
gcgcgcgaggtcaagctgctgctgctcgagtacccaaaggcaagtggaac

SEQ ID NO: 674018 - DNA, 82 bp, Homo sapiens
aaacgctctttgttccagagcatggagatcaacctgcctagagctggaacgttacctccagagcgagccctgctatgtttca

SEQ ID NO: 674019 - DNA, 100 bp, Homo sapiens
tcttcagcttgagccccatcactagcaagagtgagccatggagctacgtgtggggaacaagtaccgcctgggacggaagatcgggagcgggtccttcgga

SEQ ID NO: 674020 - DNA, 82 bp, Homo sapiens
gaaatagcgcggctgtgcaagtacctgccagagaacgacctgaaggaccttcgcctctgcatttgtccagtaactctggctg

SEQ ID NO: 674021 - DNA, 75 bp, Homo sapiens
tgtatcaagtaatggtgcaaagcctgaagttccaatgattcttgttggtaataagtgtgacttggaagatgaaag

SEQ ID NO: 674022 - DNA, 88 bp, Homo sapiens
gccacccgccgacgcctcagccgcttggggcccgcacggaccctctacttcagtccctggatggccggttgcaggtgtcccatcggaa

SEQ ID NO: 674023 - DNA, 51 bp, Homo sapiens
attaatcaagcggtcaggataccggactgaggctgatgtgaatccaaaggc

SEQ ID NO: 674024 - DNA, 50 bp, Homo sapiens
cgaatatcgtcatcgttagaagatttggacacctcccacactgagtcccc

SEQ ID NO: 674025 - DNA, 83 bp, Homo sapiens
ccagctttgtggctgccgtcatcaccatcaccttcaatccgctctactggaatgtgacaatgcagatcttcgtgaagactctg

SEQ ID NO: 674026 - DNA, 103 bp, Homo sapiens
aattgtctgctagagcacagacggtgcccagaaagtgcctctgtcactggagatgcggcttcgccaacggatgaacaagagaactgggcaacccatgatccac

SEQ ID NO: 674027 - DNA, 75 bp, Homo sapiens
tcacacggctcaagtcaccaccgtgaacaaggtgctgggagctattaataataggagaggcctcgtggtgatgaa

SEQ ID NO: 674028 - DNA, 80 bp, Homo sapiens
accgaaactcaaagttaatggagccaaatttaataaaggagtagatcccataatagatcacgttcaagacagaaagacag

SEQ ID NO: 674029 - DNA, 100 bp, Homo sapiens
tctgcttgctgtataagaacctggccaacaagattgtccccattgccatccagctagtgagacctgcaacgacttccacccgatgttcttcacccacgac

SEQ ID NO: 674030 - DNA, 105 bp, Homo sapiens
accgcggtgcgcaagcgcaaccgtcggtgggtcggggatcggtcgcctgagaggtgagaagccctaccactgcaactgggacggctgcggctggaagtttgcgcg

SEQ ID NO: 674031 - DNA, 95 bp, Homo sapiens
gcggcagtggaaccgactcccagaactccggacgtgtgcggcggccgctgatgccgcccgcggcgaggtggcccggaccgcagtgccccaagaga

SEQ ID NO: 674032 - DNA, 75 bp, Homo sapiens
gtcctgctcttccagttcgggatggcagcctggcatcctcgctacaacctcattgttgtgggccgatacccagat

SEQ ID NO: 674033 - DNA, 100 bp, Homo sapiens
tagcttctattaagaatgaccctccttcaagagataatagagatctttaatctcatgaagtacgacagctacagccgcttcttaaagtctgacttgtttt

SEQ ID NO: 674034 - DNA, 75 bp, Homo sapiens
ctttagcagcagatgagagtgcaccccagagggttctattgcccacacaaaaagcctgtggactttctcctcgag

SEQ ID NO: 674035 - DNA, 82 bp, Homo sapiens
cacagccgcggcggcagcagcagtgagagtcccacagaacaacgagaagcttcaggagagcccgtgcatcttcgcattgacg

SEQ ID NO: 674036 - DNA, 50 bp, Homo sapiens
ggctgcaggagcagctagcacaggtgaaatgacaatggatgctctgttgg

SEQ ID NO: 674037 - DNA, 90 bp, Homo sapiens
ctggctcaggacatctgtaggaccagttccagctccagtgggcaccgccagcacgcccaggagccccttgtggcagcagcactacctgcc

SEQ ID NO: 674038 - DNA, 82 bp, Homo sapiens
aatccaaactttctgacatgcctttaaaaagggtcgaagctgctgaagtggtttttcctaatggaaaatcacatacctttcc

SEQ ID NO: 674039 - DNA, 75 bp, Homo sapiens
gttggattctgttgcctgggtaccaccagagggaaagctggggcggatagcagtgagattcacttcaaagtgaaa

SEQ ID NO: 674040 - DNA, 75 bp, Homo sapiens
gctgtgtttgggaggactcgaactggcgccagcttcccagtgatcctgtccatcgaggagcactgcagcgtggag

SEQ ID NO: 674041 - DNA, 100 bp, Homo sapiens
cagagaaagaagtgataggagggctctgtagggttgttatgaactagactggtccaacaggaaagtatgatagatgtgaactggggcttcttttcaacct

SEQ ID NO: 674042 - DNA, 88 bp, Homo sapiens
aatagagccataaagaaagcaaagcgcagaaatgttggatttgaagtggatcagtacaagggaaagcgggatttggagtcactgaggg

SEQ ID NO: 674043 - DNA, 80 bp, Homo sapiens
atccagcctgcggagcctgtggggcaggatcttcaagatgaagttcaaagggagaatactaatctgcaaaaactacaggc

SEQ ID NO: 674044 - DNA, 75 bp, Homo sapiens
cgcgtttcccgcctgagcgcaactagcggcgggtcgtgggcacctccaggtggccaatatgttctacattgtagt

SEQ ID NO: 674045 - DNA, 76 bp, Homo sapiens
atcagcctggattggtgaaactgaatcacaggagatatttccagggagatgcagttaaagacttgatgcttcgctt

SEQ ID NO: 674046 - DNA, 100 bp, Homo sapiens
ccagtcacctcttcatggcaaccatataacaatcagtcacactcaggtcacactgcagaacagagtgatattgcaaaaagccaaattatcagtctacgtg

SEQ ID NO: 674047 - DNA, 101 bp, Homo sapiens
cagaagaacttgtacagagatgtgatgttggagaactatagcaatctggttttcttggggcactagagatgctgaaacagatggacctgagaaaggagatc

SEQ ID NO: 674048 - DNA, 100 bp, Homo sapiens
aaaccatggaattgattctgccttctggtatccgttacagcactgatgtgagtgtagatgaagtaaaagctttggcttctctgatgacatacaagtgtgc

SEQ ID NO: 674049 - DNA, 98 bp, Homo sapiens
tgcaaaccacccaagtctgcaatcttaccagggaggccaagcgaccacccaaagaagctgaactagatgcagagcacgcccagaaggtcctggaaatg

SEQ ID NO: 674050 - DNA, 74 bp, Homo sapiens
gatgagctccatatagggagaactgctcagattggccatgtctatcctgcaccacctcctaagctgcccaacgg

SEQ ID NO: 674051 - DNA, 75 bp, Homo sapiens
ggtgtgattagcttcgcagtctggaaagctttaggagttcacagtgtcatacagcagatggaacaaaaaaaatta

SEQ ID NO: 674052 - DNA, 101 bp, Homo sapiens
cagccacagtctctgcatgtttccaagagcaacaggaaatgaacacattgcagattctctttgtggccagatgggtttgtatggacaggcttgtccatctg

SEQ ID NO: 674053 - DNA, 74 bp, Homo sapiens
gctcaaagaaagatgattatacatttctcttgggaagttgtgcatctgacaggaatatagtactgtacgatatg

SEQ ID NO: 674054 - DNA, 127 bp, Homo sapiens
tttcaaaaagcaaatgagacaagtcaagaatccttttggcttagagatcactaatccatcttcagcttcaattacaattcttcaggagagaataccatgggtaccacctgaatgcattgaaaatcct

SEQ ID NO: 674055 - DNA, 90 bp, Homo sapiens
cgacgacgaggaagaggaggtttctgagggcgtctctggccgagcctctttttgtggaaaacgacagcagcagcagtggcctggaagacg

SEQ ID NO: 674056 - DNA, 96 bp, Homo sapiens
cagaccccttcaaagaactaaggtggtatggtcaggaaaaagactacaatgtactagtcatggatcttctgggacctagcctcgaagacctcttca

SEQ ID NO: 674057 - DNA, 82 bp, Homo sapiens
ccattgacgccatgtcgggttattcgagtgaccgagaccgcggccgggaccgaggggtggcccagttgaaatccttcccttc

SEQ ID NO: 674058 - DNA, 98 bp, Homo sapiens
gccggactgcggttggggcgggaagagccggggccgtggctgacatggagcaggatgctccagaccttgtatgattacttctggtgggaacgtctgtg

SEQ ID NO: 674059 - DNA, 75 bp, Homo sapiens
ctcccacactttcaatggggaggcccacccagcccatggaggtgtttgtggacgacgagaccaagctcacgctgc

SEQ ID NO: 674060 - DNA, 50 bp, Homo sapiens
tgcctgctgctgcgcgtcttcaggtgacttaagagattaaaattaatttg

SEQ ID NO: 674061 - DNA, 125 bp, Homo sapiens
tgtctgatctccgaataactgaggcgtttctgtacatggattatctggtactccaaagattcaggtttactcacgtcatccagcagagaatggaaagtcaaatttcctgaattgctatgtgtctg

SEQ ID NO: 674062 - DNA, 100 bp, Homo sapiens
ggacctgtcccacctggcggccatcgtcatcctgctgctgaagatctggaagacgcgctcctgcgccgtggctcagcccagagagcagaggcgagtttgg

SEQ ID NO: 674063 - DNA, 74 bp, Homo sapiens
aggagaggagcggctgcgggagctcaccagcattgtgaataggcacagctgctttggaagaagatgctcagatt

SEQ ID NO: 674064 - DNA, 100 bp, Homo sapiens
tgcagcgttataagatgctcatcccgcagctgaaggagagtctacagaagaaattgcttcagagaattcagattgcatctttccttcagctcctgatgtt

SEQ ID NO: 674065 - DNA, 98 bp, Homo sapiens
cttaaaaagcagtctaaacctgtgaccacccctgaagaaattgcacaggctgccaggatatcgcagatgaattcagagcacaggagattgatggacag

SEQ ID NO: 674066 - DNA, 97 bp, Homo sapiens
gtcgactgtggctttgagcatccgtcagaagctgctggagccagttctgcttctcggcaaggagcgatttgctggtgtagacatccgtgtccgtgta

SEQ ID NO: 674067 - DNA, 100 bp, Homo sapiens
agctacacttttcaccaaggaactggtgctgcagcgagagatagctgatcagcttccttgggttttgctgatgacacaagagagctttgcctgaagatgg

SEQ ID NO: 674068 - DNA, 83 bp, Homo sapiens
ggttccttggtgtcatccagccttagcaaaccagagggctctggaacttcatccattctctatgaaacctcttctgaggcggg

SEQ ID NO: 674069 - DNA, 75 bp, Homo sapiens
tctggtgtaccaggcgaagctggccgagcaggctgagcgatacgacgtttgcagatggcgtgtacctggttctgc

SEQ ID NO: 674070 - DNA, 50 bp, Homo sapiens
ttgaccgctcctccaactaaccatattggtaaaggttttcaaggtgtcat

SEQ ID NO: 674071 - DNA, 100 bp, Homo sapiens
aactggagcacttggctcttatctactttggaggcctgtctggctcctttctctacacaggaggtaggcgaaaaccaagagtacatcggcctcgttctcc

SEQ ID NO: 674072 - DNA, 99 bp, Homo sapiens
cgtcgttccgcgacggcctggctttctgcgccatcctgcaccgccaccggcccgacctcatggccaattcctgtccccccagcagcatggcatcgtgtg

SEQ ID NO: 674073 - DNA, 101 bp, Homo sapiens
caaatacttgcctctgtccaaatggattctttggggaacactgtcagaatggtaattatgcgaagtggtcagccactcactggtacaaacgggaggaggtg

SEQ ID NO: 674074 - DNA, 80 bp, Homo sapiens
caatgatggcgagtgctttgtgatcgaaaccctgaccggatcccataaacactgtcgtaatggaggggaaagttccagtc

SEQ ID NO: 674075 - DNA, 90 bp, Homo sapiens
ggcgtgggcaagtcggcgctcaccatccagttcatccaggctactgcagcactggggtgtcagttgttggtccgacccagaacgcttcag

SEQ ID NO: 674076 - DNA, 112 bp, Homo sapiens
cctggctctataagctgaattatggcagcccagtcaagactctcagcgttctcatctctcttccttcaccatgaagctgatggacaaattccactcacccaaaatcaagaga

SEQ ID NO: 674077 - DNA, 100 bp, Homo sapiens
ctccggaggcggcgggacagagcgcctgcgaccccagtcggtgctccggggaggtcacctgacgaggaggaattgaatgatctggcacgggaccctccag

SEQ ID NO: 674078 - DNA, 75 bp, Homo sapiens
atagaaagatttatggattgtcggattgggagaaaaggaggatttggtgctatggagaaatttttggtagaatat

SEQ ID NO: 674079 - DNA, 74 bp, Homo sapiens
gattcgccgaggcaccgaggcactcagaggaggtcctgtccctgggcgccgacgtgctgcctgagtacaagctg

SEQ ID NO: 674080 - DNA, 100 bp, Homo sapiens
ccgccccggacgtggggcccaagcccccgtgaagatggtgtcctggatgatctccagagccgtggtttcccattctgtgatggggctcacacaaaacata

SEQ ID NO: 674081 - DNA, 100 bp, Homo sapiens
gaagatccgagccggccggagcacgccaggcctgaggtgtccctggccagtgtccttccacctgtccacaagcatggggaacatcttcgccaacctcttc

SEQ ID NO: 674082 - DNA, 88 bp, Homo sapiens
caagaacagttacccaaaaactgggattttctaaagcaagatggaaagttgccttttgttcctccggaggaagaatttattatgggag

SEQ ID NO: 674083 - DNA, 88 bp, Homo sapiens
agccctgagagtccgccgccaacgcgcaggtgctagcggccccttcgccctgcagctcccccacagtttgtggttcggccaagagatc

SEQ ID NO: 674084 - DNA, 88 bp, Homo sapiens
atattggcaaattcagaagctggtgaaatatttaaagatgagattgtggggaacctgggtgaaggcacctttggcaaggtggtggagt

SEQ ID NO: 674085 - DNA, 99 bp, Homo sapiens
cgctgcgctcgcgcccggatccctcagtgcaagagaagcctgagccagtgccgctggagagccgctcctgcgtcctcatccgccgcgacctcgtggccc

SEQ ID NO: 674086 - DNA, 87 bp, Homo sapiens
aaacaagtgtgtgcatctggctgttagaagaattcatgctcatccggttccagctcaaccaagataaaatgaatttttccacactga

SEQ ID NO: 674087 - DNA, 73 bp, Homo sapiens
tggcatcagcacagacaccgctttgccgatagctatcatggtgaacttacttcagattgtgcgggaccactgg

SEQ ID NO: 674088 - DNA, 80 bp, Homo sapiens
actcccgggcctgcggacgctatgcacagataactggagtgccaaggctaaaagacgaaataccaccggaactggtcgaa

SEQ ID NO: 674089 - DNA, 78 bp, Homo sapiens
caataaccaggtgcttggcaaaatcgagcgggccattgcctgtcctgggagctggagaggatgtcagcgagcctgaca

SEQ ID NO: 674090 - DNA, 75 bp, Homo sapiens
tggatattcctgcaaacccaacaggctctctaggaaacaccagaattatcagtgaagaatatattaaatggctca

SEQ ID NO: 674091 - DNA, 82 bp, Homo sapiens
cgcggcgcggcggccgggccctcgagacggggacggagagaacattgaaagtattctctaagctatttgaagagagtgacta

SEQ ID NO: 674092 - DNA, 75 bp, Homo sapiens
gcgggcggcgcgggggagatgatgatgcagtttgcttggcagagctataagcgttatgcaatggggaaaaacgaa

SEQ ID NO: 674093 - DNA, 100 bp, Homo sapiens
tcccgtgaatgacggctttcaggctctgcaaggcatcatccactcagccgaggacgatgatcccgccgggggagtgcacgtacgcgggccggaagcggag

SEQ ID NO: 674094 - DNA, 82 bp, Homo sapiens
ctcggcgtgcggtgatagccaagccatgggagacaagaagagccccaccagggtctccgtctctccaccgggggcttcatcc

SEQ ID NO: 674095 - DNA, 50 bp, Homo sapiens
caccgacatctgcctgctcaaaggtcatcatcagatttgaaatatttaaa

SEQ ID NO: 674096 - DNA, 76 bp, Homo sapiens
tcaagccagaagatatcaccgaggctctgaggacctgaaggagaagaaggagaaggtggaggagaaggcaagccgg

SEQ ID NO: 674097 - DNA, 75 bp, Homo sapiens
gctgatgaaataattcagtgtgacaattgtggcattacagtccatgaagccgttggacataccagatggtcgaag

SEQ ID NO: 674098 - DNA, 82 bp, Homo sapiens
ctttggagcggctaaaaacctgttttaaaatcaaagatgggaaaatcggagaaaattgcccttccccatggccagcttgttc

SEQ ID NO: 674099 - DNA, 90 bp, Homo sapiens
ttttatatttcagatttgtggaaggagtcttttagtcctgctatacagctgcaccttgtacatcaagctccatgtaatgttcctccttac

SEQ ID NO: 674100 - DNA, 104 bp, Homo sapiens
gaagagcgacaagccgctggcagccgcggatctcaccgccgctcagggtccctgtgcgttttattgcgacctgccggtgggaactttgtctccgagtcggagca

SEQ ID NO: 674101 - DNA, 82 bp, Homo sapiens
aaacatgtacatcaataccatgaggttcgagaaatggctgctactaccttaagcggtctgctacagtgtaactttcttacca

SEQ ID NO: 674102 - DNA, 82 bp, Homo sapiens
agttggaacctctgacaagaccaagtactaccttcaagggatttttgccaagcctgaccatgttaagatgacatatccaaag

SEQ ID NO: 674103 - DNA, 100 bp, Homo sapiens
ccactgcaagtccaggatactcgtgtcatggagaaactccagctgggcccagagattctgcagcgggaaaatccaaggcttatttatgccaggctgagtg

SEQ ID NO: 674104 - DNA, 83 bp, Homo sapiens
gagctcgtggcgtgcgacaacgcggcgcagaaaagacagcgacagctgtggcgcactgcaaacgcggcaatggtctcatcaag

SEQ ID NO: 674105 - DNA, 100 bp, Homo sapiens
tgccacagttggggtggctggttctggggctgggattggaactgtgtttgggagcctcatcattggttatgccagtacctttgtgttggatgaatttaag

SEQ ID NO: 674106 - DNA, 74 bp, Homo sapiens
acgatcaggtcattgccagcggttcagaggactgcacggtcatggtcttgggtggtgcctatgatgagttcatc

SEQ ID NO: 674107 - DNA, 144 bp, Homo sapiens
tgggggcgcagggagcgggagccgccgccgccgccgccgccgccggagctaacctcggggaccgagatgcaggtgctggagaatctggtaaaagcaccattgtgaagcagatgaggatcctgcatgttaatgggtttaatggag

SEQ ID NO: 674108 - DNA, 75 bp, Homo sapiens
ggcagctgcagtgacatgtccagcatgaatcccgaatagtgcaaattgagcatgacccagaattagaaaaagaaa

SEQ ID NO: 674109 - DNA, 82 bp, Homo sapiens
tgggccttaccatcttcatcatgcacatcttcaagcatgctcaggtgtgagatgcacaatgcgaaacctaggccccagcttt

SEQ ID NO: 674110 - DNA, 100 bp, Homo sapiens
ggacctgggcagtgagtccatgaaggtggccattgtcaaacctggagtgcccatggaaattgtcttgaataatcgtcctccagaggagcgtcccccgggg

SEQ ID NO: 674111 - DNA, 100 bp, Homo sapiens
tgcaagattctctcctgaagtcccagccactacttccttcattggactgcaaggtatttctgtttggaaaagtaatggagtccagtcaacttcattgatc

SEQ ID NO: 674112 - DNA, 100 bp, Homo sapiens
gctgggccctgtccttcgagcggctgttgcaggacccgctgggcctggcttacttcactaccagtatgatgtctgtgccatttgcctggatgaatatgag

SEQ ID NO: 674113 - DNA, 100 bp, Homo sapiens
ccgaagtgggctggttccgcaacaaatcaaaggaaggaaaatcacctcggcagtgtttgaaggaaggatactgcaactctttgaagtacgcattttttga

SEQ ID NO: 674114 - DNA, 75 bp, Homo sapiens
tcggttaagattaatcccatgcaggtaattaataaaatgtctccaacatctctaaagatcacactaaggcaactc

SEQ ID NO: 674115 - DNA, 75 bp, Homo sapiens
ctgatgccgtacaagagctgctgcctcagtacaaggagagggaaggattaatgaaaatcaagttccatcctcaga

SEQ ID NO: 674116 - DNA, 98 bp, Homo sapiens
gtgtgccctgtcctcatagagctgacagccccagatagcaatgatgatgtgaaaacagaagctgtggctgcgtctaaatactttaaacaaatgtgcgg

SEQ ID NO: 674117 - DNA, 111 bp, Homo sapiens
aaaaacttccagaacatctgggagaatatttaatggaaaatcgcttggttaaaacctgacacttttaacaggcctccccatggccacccatggaccagtcggcattcactt

SEQ ID NO: 674118 - DNA, 75 bp, Homo sapiens
tcccctgcttcaggggacacccactgtcagagtgaacgacaaagggtgaagttgaacaaattgctatgatgaaac

SEQ ID NO: 674119 - DNA, 100 bp, Homo sapiens
cagcaaccgaattccagtttaaaaccatgagctgttttccaagagcttcatctccatggaagtgcctgtcatggtagtaaatggcaaggatgatatgcat

SEQ ID NO: 674120 - DNA, 101 bp, Homo sapiens
tccacctactttcagtgacaagagagaacaaatatcagaaaatccaacagaagccacagatattgaaggtcataaatgcagcccctgtgacacaaactgga

SEQ ID NO: 674121 - DNA, 100 bp, Homo sapiens
gatgcctacatcaagatacatgcatagatggagagatggctggctacctcatgaatgctggcccctccagccagcgtcaggtgcagaatggcccctctcc

SEQ ID NO: 674122 - DNA, 90 bp, Homo sapiens
ggatattattggcctagctggagaatggctgacatcaacggccaataccaacatgtgtcccaatatggccatgaaggaggcagatgacga

SEQ ID NO: 674123 - DNA, 96 bp, Homo sapiens
cttgacaggttcttcagccaaaaagatcatagaagaagatgctgctcttgtagaaataggacctcgttttgtcttaaatctcataaagattttcca

SEQ ID NO: 674124 - DNA, 95 bp, Homo sapiens
ctctacaaggagaagatatgcagaaacgatcttcaagacacagaaataagtccaagacagaatcgccgcacaagagccgctgaaagtgctgagat

SEQ ID NO: 674125 - DNA, 80 bp, Homo sapiens
aactgaagatggtttgaaacagcttcacaaggttctagtaaataccgcttgctgtgttttgatgttggtggctaagctca

SEQ ID NO: 674126 - DNA, 74 bp, Homo sapiens
ttttccttgatggtcaaaagattaaggtctcagccaatttcttctccagtcatcctccagtttggtcatgcaga

SEQ ID NO: 674127 - DNA, 100 bp, Homo sapiens
atcctcacagcacagtacacgaccagttggcaaacatgaattgactgggcataaagtagctgtgaagatactcaatcgacagaagattcggagccttgat

SEQ ID NO: 674128 - DNA, 100 bp, Homo sapiens
tgcagatgatctagatgaaagagagccaccttccccttcagaaactgtgccatggtctccatgaactgatttttttgtgcagtgggcaggaagaacccat

SEQ ID NO: 674129 - DNA, 90 bp, Homo sapiens
ctttccgcaactctggcagctctccccaaggacccctgtgagacagatattctctaagccgctttcatcatgggagaaatagagcagagg

SEQ ID NO: 674130 - DNA, 50 bp, Homo sapiens
gaaaagcgtcattgatacttcaacaaatgagatgctggaggaaggacatg

SEQ ID NO: 674131 - DNA, 83 bp, Homo sapiens
cgccttttgaggacggcactccccggaggtcaaaatgcagatcttcgtgaaaacccttaccggcaagaccatcacccttgagg

SEQ ID NO: 674132 - DNA, 73 bp, Homo sapiens
ctcgccggggacccggccatggcgctggacttcttggctggatgcgcgggggcttcctgcctgacacagctca

SEQ ID NO: 674133 - DNA, 83 bp, Homo sapiens
ttgatgaggacgcggagccgcggcggagccggaggaagctgatggtcatcttttccaagatattagaaatggctactccccag

SEQ ID NO: 674134 - DNA, 95 bp, Homo sapiens
gaggtgctctgtggccgcgagtgcatcttccacactgcacctccagcggctggtgagcaatgagagccagaggcgccagctggtggggaagctgc

SEQ ID NO: 674135 - DNA, 89 bp, Homo sapiens
ccgcccgtgccctcccgctcggccccgccagcagcactgtggaggccgtcctcggttgttcctcaaagtcattcaagctgtactcgccg

SEQ ID NO: 674136 - DNA, 74 bp, Homo sapiens
ttccctttggaggggctgggctcctactgttcttagagatgtacctttctcagatcctcagtttgtggtctgcc

SEQ ID NO: 674137 - DNA, 90 bp, Homo sapiens
ggagaactatgggaacctggtctcagtggggccgcgatgggcctcttggaacattggtgtgttcatctgcattcgatgtgctggaatcca

SEQ ID NO: 674138 - DNA, 101 bp, Homo sapiens
atgttttgtccagggcagcatctctggtgcatgctgatgacgaaaaacatatatgcaagttgccgaaagacgaaggaacttgcagggatttcatattaaaa

SEQ ID NO: 674139 - DNA, 90 bp, Homo sapiens
cctcatctttgacatggacggacttcttctgggtgggtagtgtgcagccgccgcctccagaaccaaccggtgagccctctcctaagagac

SEQ ID NO: 674140 - DNA, 76 bp, Homo sapiens
ggaagctgtgcacctccctcactttgtggctctccaagttttcggctttgtgagaaaccttaccatcaaacacgat

SEQ ID NO: 674141 - DNA, 98 bp, Homo sapiens
gtcggtggagagcgcggggacgctgccgtgcgcgccagagatcccagactgcgtggagcagccttaaagcccactctcatcttgcaagcctctgaagc

SEQ ID NO: 674142 - DNA, 100 bp, Homo sapiens
caggggaaccgcctcaccgttctgcccccagaactagaaatcatgaccaccccaggaaaagagaactttcgcctgaaaagttacaagaacaaatctctga

SEQ ID NO: 674143 - DNA, 82 bp, Homo sapiens
cgcagcacttggagcgcagaaccggccgcgcccggccctgtttgtgctcttcgtcctggcctacatccacatcgtcttctcc

SEQ ID NO: 674144 - DNA, 127 bp, Homo sapiens
ccccgggaagatggcgaggaggagccgccaccgcctcctcctgctgctgctgcgctacctggtggtcgccctgggctttggtgagtttgtaagtgatgcccttctcgttcctgacaagtgcaaattc

SEQ ID NO: 674145 - DNA, 82 bp, Homo sapiens
ggatcgctgtgatcgtcacttgttgcagagtgggcaggatcttaagacccgataggtgcagaacccatctggacacggagac

SEQ ID NO: 674146 - DNA, 97 bp, Homo sapiens
acctgtgggacctgctggaagggaaggaaaaacctgtatgtggaaccacctattttgaagatgtaactgagtttctggaagaggtcattgaagcctt

SEQ ID NO: 674147 - DNA, 90 bp, Homo sapiens
cagcagcccaaatttgcttgtaatgtcggcgactacagttgagtggtgattttatgcaatggcttcaagccacagttcttcaccagtgcc

SEQ ID NO: 674148 - DNA, 100 bp, Homo sapiens
ctggtgtgtggggccggaggagtcagctgtgtgtccagaacgtgccatggagacgcttaacggaggagcatattatttaatatctagaagtctagggcca

SEQ ID NO: 674149 - DNA, 99 bp, Homo sapiens
gtacaggctcagtctgcggccaagactccgtcctgcaaggtatggctagccatcctccaatacccatcttggaacttgcagaccacattgaaagattga

SEQ ID NO: 674150 - DNA, 74 bp, Homo sapiens
agcggcggctccggggcagctccggcgggcgaatcgggaccagtattcacatctgctaagtgatcattttctgc

SEQ ID NO: 674151 - DNA, 74 bp, Homo sapiens
cggcgggcagacggctgggagccgctccgaaccaagagccactgagagaggaagactctgatttcatcctgacc

SEQ ID NO: 674152 - DNA, 74 bp, Homo sapiens
caccacaataatccacagccaaggaataatcggtggagatggattgtgaaatggaggtgcataaatatccagtt

SEQ ID NO: 674153 - DNA, 74 bp, Homo sapiens
cgtgctttcccattttgctcagcgactgtttgatgacgtcccgcagaaggtagaagatagcaccatgccgattc

SEQ ID NO: 674154 - DNA, 126 bp, Homo sapiens
ccctttgtggctctatgtggaccctgcggaatccaccggcgcagtttcatctagcgactgaacaaattggagctctggcagatcagcatatcattcatgtggcatgtggcgagtcccacagtctgg

SEQ ID NO: 674155 - DNA, 90 bp, Homo sapiens
gctcgctggtgacgtagtgagtgtgatggccgccgcgaggccgggaaggtgaaggcgaccatggccttgctgggtaagcgctgtgacgtc

SEQ ID NO: 674156 - DNA, 50 bp, Homo sapiens
cgtggggcaggatggacggcaattggagaatattggcaactttattaaag

SEQ ID NO: 674157 - DNA, 50 bp, Homo sapiens
cttgagcaagtcttgaatacgcagaaagtgaaattcgttattctacatgg

SEQ ID NO: 674158 - DNA, 99 bp, Homo sapiens
ccggcttctcccctacgcgctacacaagtggagctccttttcctccacctaccttcccgaatatacatcaggggatgtgagagtgtgggacacccgcac

SEQ ID NO: 674159 - DNA, 80 bp, Homo sapiens
ccccgcacccccgtgccccgctccggccagatccagacatttaatgtggatgcaccatgccagaccgtggaagatttaac

SEQ ID NO: 674160 - DNA, 83 bp, Homo sapiens
gtcaaaacagacaaaatccactataggagtcatggtaacagcgtcccacaatcctgaggaatctggtggacagtaacaaactt

SEQ ID NO: 674161 - DNA, 100 bp, Homo sapiens
ctcgcagaacgccatcaaccagctgctcagcttgtcaatcggaaacagaaattagagtctgtggaactttctagccaatcagaaattcaacacttaagca

SEQ ID NO: 674162 - DNA, 82 bp, Homo sapiens
ccccccaccgccgccccctccggcgtgttcatgcccccgggcaaaatgatgcttcaacacccaggccaggtctctgcctcgg

SEQ ID NO: 674163 - DNA, 90 bp, Homo sapiens
agaggacttccctttggatgtagcaaggaagaaattgttcagttcttctcaggatgaccattctgccccccttggagaaactgcggctgc

SEQ ID NO: 674164 - DNA, 90 bp, Homo sapiens
gtcttcagagagcaactatcctccccagtgccggtggtggtgtgcacattgagccccggtatagacagttcccccagctgaccagatccc

SEQ ID NO: 674165 - DNA, 100 bp, Homo sapiens
gaacagatgagaaacccggcaatgaaaatggagttttaacattgaatgcggagaacactaattatgcctatcaagttccaaacttccataaatgtgaaat

SEQ ID NO: 674166 - DNA, 90 bp, Homo sapiens
aatttttagtggagttgccatctatgttaatggatacacagaattctgcttggtcagaatcgtgatggcattgtgttcagcactgatgac

SEQ ID NO: 674167 - DNA, 75 bp, Homo sapiens
ggattttctgcagtgtggtttaccaggacggattttacggtgctgacctctattgcctccggagccagcgtggtg

SEQ ID NO: 674168 - DNA, 89 bp, Homo sapiens
atgaaagcaaacagaaatttgtgctcaaaacccccaaggacacattggcgtgagacctgggagtacgttgtgccaaatcattgccactt

SEQ ID NO: 674169 - DNA, 100 bp, Homo sapiens
gagcagaggacgacatgttgcttttcgtggagtgtacttttcccaacactggtgctcgtatcatgatgttcattggtggtcctgctactcaggggcctgg

SEQ ID NO: 674170 - DNA, 100 bp, Homo sapiens
tgcttggatgaagtgtgtgaagggacagcctcatgatcacaaacatttaatgccaacccaaattatacctggttctggccttcctcatcaggctgctaag

SEQ ID NO: 674171 - DNA, 82 bp, Homo sapiens
ctgaaacagggggaacgaattatctggcccctggggggctttcagatgaggtggaaagtgagaaatggtacctgtctacaga

SEQ ID NO: 674172 - DNA, 75 bp, Homo sapiens
ccagagttagtctgcccgaggaccttctggaggatgttgatccaatgctcaccccagaagagcgtcacctgaaca

SEQ ID NO: 674173 - DNA, 99 bp, Homo sapiens
ccgccgccccggcccggcgcgcaggcctcaactccatatagcatagattcagattctttgggaatggagtgtattatttcgggaagtgcctctccaact

SEQ ID NO: 674174 - DNA, 75 bp, Homo sapiens
ttctttacaatgacctgggcgcacagcaatctgcacatcgtgctgccacacgaggcttcattcgttatggctggc

SEQ ID NO: 674175 - DNA, 83 bp, Homo sapiens
ggcgggcagtcagagcatcgggagcaacgtcacgctcatcaccctgaactcggaaggctgcctgctgtttcccggggagatca

SEQ ID NO: 674176 - DNA, 100 bp, Homo sapiens
cggaggtcgataagctggaactgatgcaggcaggctccggagagttccgcacgctgcggaaaggcttctcgccctaccactcggagtcccagcttgcgtc

SEQ ID NO: 674177 - DNA, 90 bp, Homo sapiens
caaatacgacccctcctttcgaggccccatcaagaacagtgctcctgattcctgacaatgccaacgtcttctatgccatgagtccagtcg

SEQ ID NO: 674178 - DNA, 74 bp, Homo sapiens
tgacagtttggaaaatttggcagatgcacacaggtgaactccagaaagaagaagctatggccgcagtgattctg

SEQ ID NO: 674179 - DNA, 98 bp, Homo sapiens
ggcgccgctggcaggagcgcttggggatcctccaaggccatcgaggagggcacgctggaggagatcgaagaggaggtccggcagaagaaatcatcacg

SEQ ID NO: 674180 - DNA, 100 bp, Homo sapiens
tcaaacttgacattctgaaaaataaagctaagagatccttaactagctccctggaaaatatcttctcaagggaacttgccacatcagactcagattcccc

SEQ ID NO: 674181 - DNA, 50 bp, Homo sapiens
aagaaatctgttgcttcttgcatggctttggcgctgaccacaatgctgag

SEQ ID NO: 674182 - DNA, 75 bp, Homo sapiens
cagcagcctcccaaggagtctgcaagttgggccgttgctccagggagaactgcaaatatcttcatccacccccac

SEQ ID NO: 674183 - DNA, 76 bp, Homo sapiens
aaccagctcctggagatctggcatatcccgataagttagtcatgatggaggtgtggacactgcaagagacttgcac

SEQ ID NO: 674184 - DNA, 105 bp, Homo sapiens
cagagctgtgcctcccagcaccacagtccttctgcagtccctcgtccagccacccccaggctggaaatggaacatttaacagggcaaaactgttgaacgttgggg

SEQ ID NO: 674185 - DNA, 48 bp, Homo sapiens
ggcgcccggatgggcagctgagcacaagtgcatacaccttgatagcac

SEQ ID NO: 674186 - DNA, 96 bp, Homo sapiens
gcatcttagcttgccccatccccatttgaggtctgtcggagctgcccttcagtgtgatgtgaaatctggcaactatacagtgttacaagttgtgga

SEQ ID NO: 674187 - DNA, 75 bp, Homo sapiens
atatattgcatcttcctctggctctacagcggatgttctgctgcttagccagttcatccggcctcatggaggcat

SEQ ID NO: 674188 - DNA, 101 bp, Homo sapiens
tagttccacggaaacccgctcgcctgctgcagtacggagcctcaggcggacagatggactgtaagatactaaaatgtctgatgatgctggtgacaccttag

SEQ ID NO: 674189 - DNA, 80 bp, Homo sapiens
atattccatctactgtctttttcttcaatgggcagcatatgaaagtggattatgggaactgtggctgcaccatctgtctt

SEQ ID NO: 674190 - DNA, 86 bp, Homo sapiens
gaaacaagccgtggaataggtgtatcaagtaatggtgcaaagcctgaaccgaaggagtaaaggtgctgcaatgatgttagctgtgg

SEQ ID NO: 674191 - DNA, 74 bp, Homo sapiens
aaaactgtcataaagtcacctactgtaccagagtttcaggctccgtggtttccacgaggaaagaagagctgatt

SEQ ID NO: 674192 - DNA, 100 bp, Homo sapiens
tcaggacaattccatttggggaccagagatggacggtcactcagcctatggagaacattctagtatgccagtagaaaaaaatatcactttagaaaggcct

SEQ ID NO: 674193 - DNA, 82 bp, Homo sapiens
gattccaacaacaattccgatggcaaagccgttgccaagtgacagacatcacacctccagtgcaatccctgttcctaagaga

SEQ ID NO: 674194 - DNA, 100 bp, Homo sapiens
ctagctattgccttattttttctcatggatgttcttcttcgagtatttgtagaaggatttatgttgaaattgagcgtgcgcgactgactaaaacattagc

SEQ ID NO: 674195 - DNA, 82 bp, Homo sapiens
ccaggagagacctccggctgaggtcagcttcccagagaggaaggtggctgaatccacagaggagcctgctggttctaatcgg

SEQ ID NO: 674196 - DNA, 90 bp, Homo sapiens
ggagagtgtgcagccgagtcactactgcctgcctgcctgcctgctacgggcgccctgcgtccggcagaggaggcgagcatcccgctcagg

SEQ ID NO: 674197 - DNA, 74 bp, Homo sapiens
ggccccctctgtgagagactggacctagttcctgaaattaaagaagtggtgagccacaagtacaagacaccaat

SEQ ID NO: 674198 - DNA, 82 bp, Homo sapiens
ctgtacagggatgtgatgctggagaattataggaacatggcttccctggttgctgaacctgtttgcatgagttgctcctgac

SEQ ID NO: 674199 - DNA, 100 bp, Homo sapiens
tttgtcttctgttgggcttggaacagggctgcacacctttctgctttatctgatagaagatggtgagatttttgcaagtattaaccagaaggacggtatg

SEQ ID NO: 674200 - DNA, 100 bp, Homo sapiens
agcaaattgaagagacgttaaaatacttccgcatgattccaacagaactgcagcagctctggaaagaagtgacaagtgctcatactgcagaagaaaccac

SEQ ID NO: 674201 - DNA, 96 bp, Homo sapiens
ctagaagcattgctagaagcagcagccctggacccatccaaggacccctgcctgaaggtaaaatgcagccctcacaaagtgtgtgtgacccaggac

SEQ ID NO: 674202 - DNA, 51 bp, Homo sapiens
caagagaacacaagaagtgctttaagaggatgaagatgagctggattccca

SEQ ID NO: 674203 - DNA, 80 bp, Homo sapiens
ggagcctcagttggaagcagccgatccagcctgcggagcctgtggggcagatggagtcttgctctgttggccaagctgga

SEQ ID NO: 674204 - DNA, 100 bp, Homo sapiens
acagcaggacttccaaggagagcatgtcggaggctgatcgcgcccagaagacaatgcagatcttcgtgaagactctgactggtaagaccatcaccctcga

SEQ ID NO: 674205 - DNA, 97 bp, Homo sapiens
agaaagctgtagcaagtttatctgttaagcttgaacaagctatgaaggtagctgaaggtaaattaaatgatcattttcctctcgtggtatggcagac

SEQ ID NO: 674206 - DNA, 82 bp, Homo sapiens
gtgacagtaacagtacttgggatcccccagttccaaagtgtcttaaagaatccagaacccttgatgtgtccacagatgaaga

SEQ ID NO: 674207 - DNA, 90 bp, Homo sapiens
cccagcgaccactgcagcctgcggacgaggccgggacttggccgagcggatcctaataaggggaaaatgaaagatcaactgaaatcggca

SEQ ID NO: 674208 - DNA, 101 bp, Homo sapiens
gaaaagcgcgcgagcaagatggccaccaccaagcgcgtcttgttctgggccggagaaggggcgacgttcgggcaccccccgaatggacaatctttccttct

SEQ ID NO: 674209 - DNA, 98 bp, Homo sapiens
attgccaggatccatctataaagctggctggaggcgtgatcctgggtgtggccctgtggctccgccatgacccgcagaccaccaacctcctgtatctg

SEQ ID NO: 674210 - DNA, 75 bp, Homo sapiens
gtcatcatgctgaccaccaatcagatccgtaagcatcatcggctggttcgtgcgaagcttcaagtacttttacgg

SEQ ID NO: 674211 - DNA, 75 bp, Homo sapiens
gatgccctctctcttcatcttcacttgaaataccggatgattttggagatggagtgaaggtacctgagcgcagga

SEQ ID NO: 674212 - DNA, 100 bp, Homo sapiens
cgctagggaagatcgcaccgcggacgcccgctgagcttggcgcacgggccgaccagcatctgcctgcccttctgccatccgagcgccctgactgcgccac

SEQ ID NO: 674213 - DNA, 75 bp, Homo sapiens
cgcagaaagcaggcgaacccgcggcgcaataacgatgagcagcaccagcagtaagagggctccgaccacggcaac

SEQ ID NO: 674214 - DNA, 75 bp, Homo sapiens
acccatggatcatagagagtgagttgtcaaggtggatctacccagactcctcagacccctgcacaattgagagaa

SEQ ID NO: 674215 - DNA, 129 bp, Homo sapiens
gacaacttgacttctctggggactctgaacttccctggtcgaacagttttttctaatggctattcaagatttggatttgtccttaaacccaagtggagaagtgactagacagattggtgatgccctacc

SEQ ID NO: 674216 - DNA, 105 bp, Homo sapiens
aacactgggacaagttcttccgggtctgcagtctgtggtgtgtttgctgttcccagacaccattcgcttttcacccaagatgatttgatgtcttataaaactctg

SEQ ID NO: 674217 - DNA, 50 bp, Homo sapiens
ttatgtcatcaagaagaatgacgatgagttttgcggcctccaggtggtgg

SEQ ID NO: 674218 - DNA, 128 bp, Homo sapiens
cggacactttgttattggagaaacatgcagattatatcgcatcctatggctcaaagaaagatgattattccttcagctgtggaagaggatgaagatgaagatggtcatactgtggtggccacagcccg

SEQ ID NO: 674219 - DNA, 82 bp, Homo sapiens
ttacagtgatcatcataggcttatgtcttgctgcagatggctatatgcatccagttcatcctcatgtagttagaagacttgc

SEQ ID NO: 674220 - DNA, 75 bp, Homo sapiens
ctggtggggagatgaacccaacctagtgggtgtaatacatcatgaactgcagggaatgaagccaagagtgatgaa

SEQ ID NO: 674221 - DNA, 100 bp, Homo sapiens
ggactgggttgaagccctgaaccaagccagcaagatcaccgtaattcatttgcacacctgttagcaagaaacagaagttgaaggactggaacaagtgaac

SEQ ID NO: 674222 - DNA, 51 bp, Homo sapiens
tgacgacctgctacaacagaagacgtggtgggtcctctggtgcgaaattcc

SEQ ID NO: 674223 - DNA, 98 bp, Homo sapiens
ttatgaagatttttgatgctgccaaaattagtgacaagagctggggttaggatccggttggactctgacatcggatgccctcaaacatacagaacttc

SEQ ID NO: 674224 - DNA, 75 bp, Homo sapiens
gcgccacctgctgacggcgcaggacgagaacggagacacgaaaatgttggggcttttcaggaagcataataagat

SEQ ID NO: 674225 - DNA, 100 bp, Homo sapiens
ccttgaaagcgctgcgggccacgcgtcagcttttctttcgcaaaaagctgcttcactcatcccagatgcttcgggcggtctccctgggtcaggaccgcta

SEQ ID NO: 674226 - DNA, 98 bp, Homo sapiens
cgccccttcccaggacagcggaggtggaacttcgtcgcgctgcaacccccggctcgggttgctcgtgggggccccgcgggcagaagcgcttccactgc

SEQ ID NO: 674227 - DNA, 49 bp, Homo sapiens
acgccactcatcagattggctgccagtatcagctggacatcatctccat

SEQ ID NO: 674228 - DNA, 101 bp, Homo sapiens
gcagcaccggaggcccaggtctccgtgcagcccaacttccagcaggacaagctggacgcacagaacagtctctccgtgggaggagacattatggggcgtcc

SEQ ID NO: 674229 - DNA, 79 bp, Homo sapiens
atattccagtcgatgtatttgtacaccaagttgttggaagaggagcctttggagttgtttgcaaagctaagtggagagc

SEQ ID NO: 674230 - DNA, 50 bp, Homo sapiens
ggctctggcttcttcagcggagtacctccctgcacttggctattcaaaac

SEQ ID NO: 674231 - DNA, 50 bp, Homo sapiens
cgagagtatatgcgatgagtttggccaccagcccctcgggttccaagatg

SEQ ID NO: 674232 - DNA, 101 bp, Homo sapiens
ggatgaggaggggccatggccagcgacggggccaggaagcaattctggaagcgcagcaacagcaagctcccgggcagtttcaggcaatgaagtgaacataa

SEQ ID NO: 674233 - DNA, 100 bp, Homo sapiens
atgctgaccctgaaatccagcctatgaaggaagatgatgggacatttggagaatacagtgatgctgattctgaggacgatgccgactctgatgatgagga

SEQ ID NO: 674234 - DNA, 90 bp, Homo sapiens
aagcatgctttcttggcattatgtcttcggataaactcaaccaactgtcaactagaaaatgtttaaatttacctatagcctggaaaccac

SEQ ID NO: 674235 - DNA, 75 bp, Homo sapiens
ctcggagacaggccaagcaggaggagcttaagcggctgcatcgagcccagataaagcatatgatggctttcattg

SEQ ID NO: 674236 - DNA, 98 bp, Homo sapiens
ggatgtctgatctccgaataactgaggcgtttctgtacatggattatctgattgttaaaggaaatgggctggcaggaagacagtgaaaatgatgaaac

SEQ ID NO: 674237 - DNA, 100 bp, Homo sapiens
ctggagaagccccggccccagccgctgagctgggagaaagtgccccaagtcccaaagttgaagcatatgtcctgtgagcttaggggtgctacaagttgac

SEQ ID NO: 674238 - DNA, 98 bp, Homo sapiens
gaacatggactgaagtatccagcgctcattgggaatttagttaagctatgacatggtgcattacggccactccaaccagctgcgccaggcacgggcca

SEQ ID NO: 674239 - DNA, 90 bp, Homo sapiens
cccacatcccggattgtcctgtggggcttccggtggctgatcttcaggatcatgcttggagcagttatgaagacagtatggagtttccag

SEQ ID NO: 674240 - DNA, 100 bp, Homo sapiens
caagagagaaagagtggatttcagcctgcacggatggtcttgaaacacaaatggtttttggttttaaaatcaaagatgggaaaatcggagaaaattgccc

SEQ ID NO: 674241 - DNA, 75 bp, Homo sapiens
ctgatgaagagagagcagagacagctcgtctggactacaaatccctccaggatatcattgccatcctgggtatgg

SEQ ID NO: 674242 - DNA, 98 bp, Homo sapiens
tttgaaccactggaaagtgaggaattttgaagtacaccgtggtgacattgtatcattggtatgccactgccgccaggagccctgtaacatcagccatc

SEQ ID NO: 674243 - DNA, 100 bp, Homo sapiens
gaaaaacagtgctcggaaagcatctattgtgaaaaacctaaaggataccttagattcctggtcgggtggcttccagtggtcttcagtctgtcgtgcaccg

SEQ ID NO: 674244 - DNA, 75 bp, Homo sapiens
ccaaaatattctagaaggggaaaagctacttcaagttcgatcctttggtacagaagacagaccgacagatcgtcc

SEQ ID NO: 674245 - DNA, 83 bp, Homo sapiens
tgagagaggaagaatatattttgacaattatcggcgctgtgtcagcagatgtggaaactaaagcccagagagaaagtctgact

SEQ ID NO: 674246 - DNA, 100 bp, Homo sapiens
aagatgttgtcctgtgctggggctgacaggagatggcgtctaccagaaggggatggacttcattttggagaagctcaaccatggggactgggtgcatatc

SEQ ID NO: 674247 - DNA, 106 bp, Homo sapiens
ggcaaaatcctagatgtagaaataatctttaatgaacgtggctctaaggccaacatagccgaggtagaggtctccatccctgccaagctgcacaactccctcattg

SEQ ID NO: 674248 - DNA, 99 bp, Homo sapiens
ttcagccctcaagctcctgtgcctactacagtgccagtggttgatgtacgcatccctcaactagcacctccagctagctatcagttgagggatttgcag

SEQ ID NO: 674249 - DNA, 75 bp, Homo sapiens
cgacaccgacatcagcgatgcctactgctccgcggtgtttgcagtgtttggccagcgcttggatgagactgtggc

SEQ ID NO: 674250 - DNA, 116 bp, Homo sapiens
cctctctgaaatctgacacctgctctcccggcaaggaaacttcgcaggctgcttttctgggagaagaggctacaaggacttagtgcatcagatgtaacagaacaaattataaaaac

SEQ ID NO: 674251 - DNA, 83 bp, Homo sapiens
gattccaagtaactcttatttgaaaatgatgcatcctgttgccagcagtaatccagctttctgtgggcctggcaagccttcct

SEQ ID NO: 674252 - DNA, 75 bp, Homo sapiens
cacaaacaagaggagcaccagacctcctcttggcttcgagatggcttcgggtgataaaagaaaatgtggctgaag

SEQ ID NO: 674253 - DNA, 100 bp, Homo sapiens
tgttctatgctccctaatgaagatgctattaaggaggctggcagtgatggtgaaagcataggaaactgccccttttcccagaggctcttcatgattcttt

SEQ ID NO: 674254 - DNA, 100 bp, Homo sapiens
gggccctcgatgtgatacctgccgctctggtttctactcattccctatttgccaaggtgctggagaatctggtaaaagcaccattgtgaagcagatgagg

SEQ ID NO: 674255 - DNA, 89 bp, Homo sapiens
gtctcttgcaaattccagtcaaggccctaaaatatagattgaaggctttgacccaaaaagaatggatgactttcagctgaagggcatag

SEQ ID NO: 674256 - DNA, 50 bp, Homo sapiens
cgagatttgaaagagctcagacatctgatgacccgttggcttcctgacca

SEQ ID NO: 674257 - DNA, 100 bp, Homo sapiens
gctttttctaactatttcaagatgatatttattcaccaaacaaggagatgttaaacatgtctaagaaaacagtttcttgttttgtgaacttcaccagact

SEQ ID NO: 674258 - DNA, 88 bp, Homo sapiens
tttaaacttgtcattaataaaatagcatatgatgtgcagtgtccaaagagagataatctcagtgataccttgaagaagctgaagataa

SEQ ID NO: 674259 - DNA, 90 bp, Homo sapiens
cagagagatggagagagacctagttagataaagagttctatctgtcttctacgcgggaaaatctatgatgctctagataaccgaaccctg

SEQ ID NO: 674260 - DNA, 100 bp, Homo sapiens
gtgtgtaccccaagtgcacatggctgaccacccctaaaagcacctggccccgctacagcaaaccagtctcccgcattgacttcataaccaagttctgggt

SEQ ID NO: 674261 - DNA, 100 bp, Homo sapiens
tttggagcaagagtcgaatggcgagattgagcacgtgaccaagcgggccatcagcacccccgagagcagctgagtatgtcccagagaaggtgaagaaagc

SEQ ID NO: 674262 - DNA, 75 bp, Homo sapiens
cagacagcggcttctctgttggcctctcaggttttgcacactagggaccaagaagccctcggggacactgctgag

SEQ ID NO: 674263 - DNA, 75 bp, Homo sapiens
tgctgggtccgctgagcggggcgacccgaggtaaagagtgtgtacaacagttagctgaaaacaccaggtatttca

SEQ ID NO: 674264 - DNA, 100 bp, Homo sapiens
aattccccaggaggggaacactggagactgggagatggcagctgcacttcttgcggctggatcacagtttgaccttgtctgtgtcaatgcgtggatgctg

SEQ ID NO: 674265 - DNA, 75 bp, Homo sapiens
aagcagctttcttgaatgtctacaaaagattgattgacgtcccagaagcctccccagctttctgaggatgatatc

SEQ ID NO: 674266 - DNA, 98 bp, Homo sapiens
gtactgcatgtgaagctcaccgagacggcgatccgggcgctcgagacttaccagagccacaaggttatgaagacagtatggagtttccagaccatagt

SEQ ID NO: 674267 - DNA, 98 bp, Homo sapiens
cacactgccagtcaggcaagtcttgccaaggatctagtttgaagcactaagaagaataagacatcagtttgaaaagaggctctatcagaacaacacga

SEQ ID NO: 674268 - DNA, 101 bp, Homo sapiens
gaacgactgtggggacaacagtgacgaagagaactgtctcctggtgaccgagcacccgcctccgggcatcttcaactaattaaacaaccaccatgtcgagc

SEQ ID NO: 674269 - DNA, 100 bp, Homo sapiens
tgtcgtgtgaaaatctacactttcaatcaaagcagactcgagccttacgcagacccttattatgactatgaaattgagcggttttggcgtggcggacagt

SEQ ID NO: 674270 - DNA, 85 bp, Homo sapiens
actgaagcagaagccctggcatctagcaaactcttccacatagactttggatatattttgggtcgggatccaaagcctcttcctc

SEQ ID NO: 674271 - DNA, 98 bp, Homo sapiens
atctcttcaagtacatcataatcggcgacacaggcccgatgagagaaagggaaagttaaggatgctggagcagaacaatggatttctctttctctttc

SEQ ID NO: 674272 - DNA, 75 bp, Homo sapiens
acggtcacgtctacaaggcgaggcggaaagatgggtgaagactgatgagaagagtctgtgggtgaagacattgaa

SEQ ID NO: 674273 - DNA, 83 bp, Homo sapiens
ccacgcaaccccagatccatttacactttacaaatccacattcatctcaatggaaggatcctgccttaagtcaacttatttgt

SEQ ID NO: 674274 - DNA, 76 bp, Homo sapiens
acaagacctggatgtgtgacacacagttttggaaaaagggccgttgctccagggagaactgcaaatatcttcatcc

SEQ ID NO: 674275 - DNA, 138 bp, Homo sapiens
cccggatcccctgagctgcccgccatcccacgtgaccgcgccgccccccagctccaccgctgacccgcggcgccatggctcacgtcggctcccgcaagcgctcgaggagtcgcagccggtcccggggacgggggtcgg

SEQ ID NO: 674276 - DNA, 51 bp, Homo sapiens
attacaattcttctaatgccttgatacagtttatgtaacttgatggaagaa

SEQ ID NO: 674277 - DNA, 82 bp, Homo sapiens
gcggggtagcctcgggtggccaggcttgtttcctcctcgaaagaagcttccggttctgaggtcctggaggtgccatttccct

SEQ ID NO: 674278 - DNA, 100 bp, Homo sapiens
gcctcccgccggccgtctccttaacaccgaacaccgagatggaataaactgagactgcaggacaaagagaaacgtctgaagctggaggacgattctgagg

SEQ ID NO: 674279 - DNA, 80 bp, Homo sapiens
ggagcctcagttggaagcagccgatccagcctgcggagcctgtggggcaggaagatttcgatgtcgatcattttgtgtct

SEQ ID NO: 674280 - DNA, 100 bp, Homo sapiens
ctgcactgcatggttgctgctggatgtgttgtgttcctggcttccctctggatgctgacagaaacaagggccaaacctgaggacactttaaacctgtgcc

SEQ ID NO: 674281 - DNA, 75 bp, Homo sapiens
aaaggagacattgtcactgttgtgtcacctgcgctgctggaccgagagggctctgggtttgcagagagccgaaat

SEQ ID NO: 674282 - DNA, 90 bp, Homo sapiens
tcttatctgaaaactacaccgctgtggcccagactgtgaacctgctggccgagtggctcattcagacagcgggcagttgcaggagatgcc

SEQ ID NO: 674283 - DNA, 83 bp, Homo sapiens
cttccccatgatgatcctgccatgcaggcaggccctgagcacgctgctgtgtgagcagcagcacggggtcactctggtgccca

SEQ ID NO: 674284 - DNA, 83 bp, Homo sapiens
tctccttcgacttggagtctttgtccaggacggttgtgaccgagattcccgacgagagagactgaggggaagagaggaaggag

SEQ ID NO: 674285 - DNA, 97 bp, Homo sapiens
tttggcattgacatttaattttagggtcctttatatagaagggagagtagtgtgaacacagcaggtgtgagatgtcatcttggaagacaggccttgc

SEQ ID NO: 674286 - DNA, 74 bp, Homo sapiens
ctaagcaacaggtgtttcaaggaactaattctctgggacttccacagtcacctgacacggagtgaggtcgtggg

SEQ ID NO: 674287 - DNA, 76 bp, Homo sapiens
ctgggtgggttcgagcaactaccggatactcttggaagggcctggcacactgaagtttagcaacttttgcttggca

SEQ ID NO: 674288 - DNA, 100 bp, Homo sapiens
ggagagcccagagcgacccttcctggccatcctgggcggctctcagatctggctcgagaccaccatggctaaggtggaaggggctgccgcccagcttccc

SEQ ID NO: 674289 - DNA, 83 bp, Homo sapiens
cttgaaaccataatgctacaaactctagttattgccagtttccgaggaaccgttccatatggcctgtcattggaaattggaga

SEQ ID NO: 674290 - DNA, 98 bp, Homo sapiens
tagcggatcctagtaatctctttgtggtttcttctgatttctgccattggggtctaacttcaaacttgtggctgttaattcaaaactctatgccatcg

SEQ ID NO: 674291 - DNA, 75 bp, Homo sapiens
gggcctcccagctggaagaggcggtggcggcgggtcggggcgaggttaatttggagtggcccctggagtcagttt

SEQ ID NO: 674292 - DNA, 100 bp, Homo sapiens
tgaagtagctcctgaagcttctacgtctagtgccagccaagtgattgctcctactcaagtgacagtaaacctattgatggcaattttgctgactgtggaa

SEQ ID NO: 674293 - DNA, 100 bp, Homo sapiens
atagtcaactgcgtggaagagaagtatgaatctgatgaacaagaaaagagtgcctatcaagagtatgacagtgacagtgatgttcctgaggaactcaaac

SEQ ID NO: 674294 - DNA, 100 bp, Homo sapiens
tctgaattatacaccagcagattatgagacgagttgtactgctgtcacaggaaatggacgctggattacaagcatggcagctcaggcagcagaagttgca

SEQ ID NO: 674295 - DNA, 100 bp, Homo sapiens
cgccaggaggaaaagctttctcaggaaaaagtcccagaaatcctggatagaaagcactttgaccaagagggaatgtgtatatattataccaagttccaag

SEQ ID NO: 674296 - DNA, 100 bp, Homo sapiens
tgaattcacaacctcaaacccgttctccgacctctgctcttccaggcaagtgaacatgtagccagtagtcctgcattgggggatgtgattccgttcagca

SEQ ID NO: 674297 - DNA, 73 bp, Homo sapiens
aagtccagagctgagaaggactgcctgtttgcagggctgatcccttatccaacatggttctaaccttcagtac

SEQ ID NO: 674298 - DNA, 75 bp, Homo sapiens
tggaaacgaggcactcagttggaagagtccagcaagttctttatagctccaagctctacagattcttcaaatata

SEQ ID NO: 674299 - DNA, 100 bp, Homo sapiens
gtggagcacctgctgcgttgcggctactacaacacggctgtcaagctggcgcgccagagcggcatcgagtggttcagcactgagtcatgcttgcttctgc

SEQ ID NO: 674300 - DNA, 100 bp, Homo sapiens
ggagcagttgggaatcaggtctggaatactcctaaccaagaagttgcccagaatatgtgagatccaggctgttgactgtactacaatatcctcatttaca

SEQ ID NO: 674301 - DNA, 100 bp, Homo sapiens
tcctgggagttgtagtcgcgatcctgaggtaacggattggaaacctccacctgcacaaactggatgaacttgactgccttgtaaagggcttgctgtatat

SEQ ID NO: 674302 - DNA, 82 bp, Homo sapiens
gagccctgttccaaagcctcctggaccgtccaagaagtgagggttcagagtatggtgccagtggagaagatgcgctcagcag

SEQ ID NO: 674303 - DNA, 75 bp, Homo sapiens
caacgggagtgtcctggacccagctgagcgggcggtcattcgcatcgcaggcatgtcgggccccaggcctgtggt

SEQ ID NO: 674304 - DNA, 102 bp, Homo sapiens
tactcatcatggggctcctgtacaagggactttgaacatgtcggggatcgccctcagcagactcgcccaggagaggaaagcatggaggaaagaccacccatt

SEQ ID NO: 674305 - DNA, 100 bp, Homo sapiens
gatgtggtggtctactctgatgtcaatcttgagggctaggacttcatgtgcaagcgctttgccttaatgagtactgcagcaaatgcacagtgagggactc

SEQ ID NO: 674306 - DNA, 50 bp, Homo sapiens
gaaacatgtcattcaggtttatcaaaaggcctcccagtagcattggatgc

SEQ ID NO: 674307 - DNA, 100 bp, Homo sapiens
tgtaccccaatggggtcccctttaagacatcgctattgcggttccgaggcagtgggaagagatgcggcccctggacatcgtcgagctggcggaaccggag

SEQ ID NO: 674308 - DNA, 101 bp, Homo sapiens
tttgaatggaaagatcctttcatccagaaagtccaagatagccccaacggtaaactgactgatttcctgagcttctatacgctcccctccacggtgatgca

SEQ ID NO: 674309 - DNA, 90 bp, Homo sapiens
gcggggccttccacaccccctccgtgggtgtgtggcactcaaggagttgcccctggtcctgtaattggacttcaggcaccatctactggt

SEQ ID NO: 674310 - DNA, 74 bp, Homo sapiens
cggctctgtaggaaggaacttggttccccctccctcagcttccgccccaaaagccaaatttgtatcctactgtg

SEQ ID NO: 674311 - DNA, 90 bp, Homo sapiens
gggagggccaccaatgggacaagactatgatgatggatatggcactgcttatgatgaacagagttatgattcctatgataacagctatag

SEQ ID NO: 674312 - DNA, 96 bp, Homo sapiens
tgtaaaggaaaccatgccaaagaagccggatgcacaatcagaacccacctggctttcaaccaacttgggtattttgacctgtatagaatgttctgg

SEQ ID NO: 674313 - DNA, 100 bp, Homo sapiens
tgctgtttgacaaaaatggcaacatggcaggcatctcagaccaaaggatcgccatcgacctggcctcaggcccaggcccaaggccaagtgagagagccca

SEQ ID NO: 674314 - DNA, 115 bp, Homo sapiens
tgctgctctgggctgggaccgccttccaggtgacccagggaacgggaccggagcttcatgcctgcaaagagggtctaaaattcccaggactccacagctttgcaccagataagcc

SEQ ID NO: 674315 - DNA, 74 bp, Homo sapiens
tttctctctcgtcctcgctgctgtacttcgtctatgtggcgcccggcataggtcctatggcagcgtatacaaag

SEQ ID NO: 674316 - DNA, 50 bp, Homo sapiens
cgccgtcagagccgccctatcagcaaagttctcatatagatgtggttcgt

SEQ ID NO: 674317 - DNA, 98 bp, Homo sapiens
tggagatgattgagccgcgcacgctacagtacaaggatgccaaggatgggcgcttgttcaatgagcagaacttcttccagcgggccgccaagcctctg

SEQ ID NO: 674318 - DNA, 88 bp, Homo sapiens
ttggagaaggccaatttggagatgtacatcaaggcatttatatgagtccagtccagtccaggtgcagcagcaaggagaacattctcag

SEQ ID NO: 674319 - DNA, 101 bp, Homo sapiens
aaatatcggagaataatttctttctcgctgatcgcctaacttctactgacgaagcttggaagttgcagaaggaactgaaattaccattcacttttttaagt

SEQ ID NO: 674320 - DNA, 74 bp, Homo sapiens
cgaccggggcctgggtccacgccgagggcaggacgaacttcaccaggaatgtatcctgtcaggtataatgtcag

SEQ ID NO: 674321 - DNA, 75 bp, Homo sapiens
gtttacagttggctgatgattccacagataacccaggctctctactggcttctggccgcgctccgcgccgcgcct

SEQ ID NO: 674322 - DNA, 98 bp, Homo sapiens
tgcttggcatccccttgctggacagtggctgtgttgtctcaggcaaggctcctgacttccttcttgccggctcaacttctccgactctaccagctgat

SEQ ID NO: 674323 - DNA, 71 bp, Homo sapiens
cagacctgccttggtgtctgtgctgagcataaacaattgtggcaattaataaagacccagaagctccaatt

SEQ ID NO: 674324 - DNA, 141 bp, Homo sapiens
ggagaagctgcgggcgtcgggcgcgggcaaggccatcggcgtcctgaccagcggcggcgacgcgcaaggagatttcctctggaagacatcccgctggatgaaaaggaagcagctcagtggcttcataaactgtaccaggag

SEQ ID NO: 674325 - DNA, 51 bp, Homo sapiens
aaggattccaagtaactcttatttgtccaatatcagatggaaatgatgcgg

SEQ ID NO: 674326 - DNA, 76 bp, Homo sapiens
ggaggaggaggaagaggaggagaaggatggctggctttgatggctcagcatgggatgaggaggaggaagagccacc

SEQ ID NO: 674327 - DNA, 76 bp, Homo sapiens
gtgaaagtgtataactacaatcacctaatgcccacaaggacacatgacggaagtgtgtatttttgggccactccac

SEQ ID NO: 674328 - DNA, 132 bp, Homo sapiens
gcaactcggcctcgaacatcgtcagcccccaggaggccttgccgggccggaaggaacagacccctgtagcggggcgatgccagtccctccactccagaggagaacgaaaccacgacaaccagcgccttcacc

SEQ ID NO: 674329 - DNA, 82 bp, Homo sapiens
gctgctggaggaaacacctcaggacacggcctacaacaccaagagcttcggaaccaaaaagaagcttcccagagccggggcc

SEQ ID NO: 674330 - DNA, 100 bp, Homo sapiens
tacatcaaaaattcttcatctggctcagagtcaagctacaaggctttggccgaccaagtgtgtaccatgctgctattgtcatcttccttgaattctttgc

SEQ ID NO: 674331 - DNA, 74 bp, Homo sapiens
aagattcttccaggcagagttgcagatttgtcttagatatgtcttgtcgttcaagacttgcaacactaaacgag

SEQ ID NO: 674332 - DNA, 75 bp, Homo sapiens
gcaattatgaaagaagtcattccttttttgaagctaatggcagcattagccgctgttgggcctcctaatcctcgg

SEQ ID NO: 674333 - DNA, 75 bp, Homo sapiens
atattccgctccagaaattctgcttggtgatgagtatgatgcacctgcagtagaattaaacaaccaccatgtcga

SEQ ID NO: 674334 - DNA, 83 bp, Homo sapiens
tgactccattgcatgtgggaccttcagccgtgaactgtgggtaattccagaattgattggccataccattgtcactgtattac

SEQ ID NO: 674335 - DNA, 100 bp, Homo sapiens
atcaccatgaacgaggagtacgagacgaggttcctgtgcaactcttcacaggtatcttggagatggccgcttccatctggagtctgtcatgattgccaac

SEQ ID NO: 674336 - DNA, 82 bp, Homo sapiens
tgccattccagcactggactcatggaggctgagcatttattcaggtcagcccaaggccaaccccactgtcactctgttcccg

SEQ ID NO: 674337 - DNA, 100 bp, Homo sapiens
ctcccaagtagctaggactagagggacagagcagaatgggctgatatagatccggtgccgcagaatgatggccccaatcccgtggtccagatcatttata

SEQ ID NO: 674338 - DNA, 83 bp, Homo sapiens
aagcccgaagggcttttcagaaatcggtttgaagttagaaatgagcagcaagatgggcatggaggcggtgatggcgctgctgg

SEQ ID NO: 674339 - DNA, 100 bp, Homo sapiens
ccgtgctttccgcgggtctgtccgggggctccggaccctcggcgcaggccaaacgtaccaagaaagtcgggatcgtcggtaaatacgggacccgctatgg

SEQ ID NO: 674340 - DNA, 75 bp, Homo sapiens
tggatttaaaagacagtcctcgtcagcactgactttcagctatggaatcggctggagtgcaatggcgcgatctcg

SEQ ID NO: 674341 - DNA, 83 bp, Homo sapiens
aaaaagggatgctgaccagggaggccggatgctgggcttcgtgggacacatatgcaacatgcctatgatttttacaagcctga

SEQ ID NO: 674342 - DNA, 51 bp, Homo sapiens
gggagcggtctggcgctcccgccgcaggccatcaagccctgtcgtcctatg

SEQ ID NO: 674343 - DNA, 75 bp, Homo sapiens
cagggaaagggcgagaagcgcgccgtctccttccacaggggccagacacctgctgagtcggatttccaggtgctc

SEQ ID NO: 674344 - DNA, 100 bp, Homo sapiens
agctgaagaccactttagaaactcaattaaactcatcatattcagagcccccagatgttcagcagcagttgaaccactatcagtcagctgccctggcaag

SEQ ID NO: 674345 - DNA, 101 bp, Homo sapiens
gaaaccaccgtgctggaccgcttttacaatgcaggtactccaaagattcaggtttactcacgtcatccagcagagaatggaaagtcaaatttcctgaattg

SEQ ID NO: 674346 - DNA, 100 bp, Homo sapiens
gagatttgggagagacgctctgaactgactgccccgcatcaccggagcgtcccagctgcgaggagtttctgcagatcctgctttgtgacttcgagtgaag

SEQ ID NO: 674347 - DNA, 49 bp, Homo sapiens
ggctcatcaaggttgtgattgaggacggctggagtgcaatggcgagatc

SEQ ID NO: 674348 - DNA, 75 bp, Homo sapiens
attctacggggctttcagcaaatcaaagccagaaactggcgatggaatatgagaggagccctctggaaagaaaag

SEQ ID NO: 674349 - DNA, 50 bp, Homo sapiens
ccgacagccaggcccgggagaaggagaagaaatgggtgaccgttggtgac

SEQ ID NO: 674350 - DNA, 90 bp, Homo sapiens
caaattgataccacatttgtgtatcctgtttggagactccaacagtcagggaagcctatagcaaacttttgtctcaccttggacagatgg

SEQ ID NO: 674351 - DNA, 100 bp, Homo sapiens
gaagaggaagccatcgcctggccccggctctctggaccttgtctcgctcgggagcggaaacagcggcagccagagatccaggatgagaagactgataaaa

SEQ ID NO: 674352 - DNA, 89 bp, Homo sapiens
taacatgattacctgtattaatggaatatggacagagcttcctatgtgtgttgaaacatgttccaaatcaagtatagatattgagaatg

SEQ ID NO: 674353 - DNA, 96 bp, Homo sapiens
aaaacttgcaagaggatgaagacgatgcagttgcagattctgtatttcagagccacatcatagtctattgcgtctgcagacatggatttcaaccag

SEQ ID NO: 674354 - DNA, 75 bp, Homo sapiens
caggtgaatttaaaggagcagccctggtgtcacctatcagtaaaagtgagaaggcaaccaaagtgcaggacatca

SEQ ID NO: 674355 - DNA, 100 bp, Homo sapiens
gttcccagcttgcaaactccagctttgcctgtgagaggaacaagcgtccctgatccagaaggtggctgatgaattcatccgagcaaatgccaccaacaag

SEQ ID NO: 674356 - DNA, 95 bp, Homo sapiens
ctcaccgcgactggacttcgctcagcttcagaccctgggctgcagctgcctaatgaggtggaagcagggaaaggcctggagatgaggaagctggt

SEQ ID NO: 674357 - DNA, 74 bp, Homo sapiens
ctgggagagaggtacctctccttttccctctccctttccctaagggagatgcacttatttacatggaaccagag

SEQ ID NO: 674358 - DNA, 90 bp, Homo sapiens
cacctccccccggagccaggctggtttcggaaatgcccttacagcagcagaagaaaaagtcagcactttttgaagtgtctgaggttatac

SEQ ID NO: 674359 - DNA, 101 bp, Homo sapiens
ggattctgttcagaaggaagccgaattttaagtcatcgttctaggataggacactgcccatctctaagataagaacctggaaaggggactctgttggccat

SEQ ID NO: 674360 - DNA, 98 bp, Homo sapiens
gcacgataaaggaactcaggcgcctcttcttagttgatgatttagttgattctctgaaggacttctgccatgggcaagtgatgtggccacccctcagc

SEQ ID NO: 674361 - DNA, 82 bp, Homo sapiens
gatctcgagagacctgcgtacattcggggtgccagaaggaaagcatagtactgccaaatctgtcgaaagggagataatgaag

SEQ ID NO: 674362 - DNA, 83 bp, Homo sapiens
ctcgcgcccgggagcaggaggagctgctggcgcccgcagatgggagtggggaaggccagggccagattctgcagcgcttccca

SEQ ID NO: 674363 - DNA, 99 bp, Homo sapiens
tgcatcctacagatgtgctgtaaacatcaaaagaagacggtgggatcaggagatggaggagatgaccgccgggttctgctatggcacatggaacaagcc

SEQ ID NO: 674364 - DNA, 101 bp, Homo sapiens
ccgccagcgccgtctacgtgctggacctgaagggcaagagctgaggcttcgaagacctcagaggacttctctcagcactcacagaaacctcctacaccctc

SEQ ID NO: 674365 - DNA, 100 bp, Homo sapiens
gagagtgggcgtctggcggggtccgcagtttcagcagagccgctgcagccatggccccaatcaaggttatcaatactctggctgaccatcatcatcgtgg

SEQ ID NO: 674366 - DNA, 100 bp, Homo sapiens
gccggcgcgtaccgccccagcccgggtgcccacactggccgtcccggccatctcgctgcccgacgatgtccgcaggcgaatgtccgtctgtctgcccagg

SEQ ID NO: 674367 - DNA, 75 bp, Homo sapiens
gccaactgcagaggaactggaacagaggaacattttgaaacgtttcgcatcgccgaagatagattctgttgctgc

SEQ ID NO: 674368 - DNA, 100 bp, Homo sapiens
cccggagaacacaaccctcccgagaagcccaggccctgagcctgtgcaattatttcgagagtcaaaatgtggatttccgaggcaagaaggtgatcgaact

SEQ ID NO: 674369 - DNA, 90 bp, Homo sapiens
actagtgccggcggctctccaccccccaggctcgggttatgtatgattttgctgctgaacctggaaataatgaactgacggttaatgaag

SEQ ID NO: 674370 - DNA, 82 bp, Homo sapiens
ccccgagctgctggagaactgaaggcggacagtctcctgcgaaaccaggcaatggggccgagaactactggtggcgtggcca

SEQ ID NO: 674371 - DNA, 75 bp, Homo sapiens
ctatggcttcctggtggagcactacgtgcggaaggaggaataccagacgagacgggatttcaccgtgttagccag

SEQ ID NO: 674372 - DNA, 90 bp, Homo sapiens
gcattagccagattggacatatgtaaagggacatcagtatatctggatcatcagtttacagaagcacttgcagaactcatcagaagccac

SEQ ID NO: 674373 - DNA, 100 bp, Homo sapiens
tccagcgggagtacaacctgaacttctcaggaagcagtactattcaagagattagccgatgaattacatatgccatctctccctgaaatgatgtttggag

SEQ ID NO: 674374 - DNA, 83 bp, Homo sapiens
cgaaacacttacggatggaaagcagggatgacaggtgtcgtctctttgagtatggccaggacaatgcagatcttcgtgaagac

SEQ ID NO: 674375 - DNA, 146 bp, Homo sapiens
ctcaagaagcagatcctgcgcacggataacatcagcttcatgctaaaacgctgctgccagcccaagccccgaggtgtattacctgactgcttaaccgatggctctgatgtggtcagtgaccttgaacacgaagagatgaaaatcct

SEQ ID NO: 674376 - DNA, 75 bp, Homo sapiens
caacaccaaggtggacaagaaagttgcttcagctttagctgcagctgcctctgttcagccacttgcaacacaatg

SEQ ID NO: 674377 - DNA, 75 bp, Homo sapiens
acagcaaaggctttgatgaatacatgaaggagctagtgtgactgagattgattcagacctggacttgggacccag

SEQ ID NO: 674378 - DNA, 75 bp, Homo sapiens
gattttttgactttgagacatttgatgtggatgaatatgaacattatgagattgctgtgctaaggagacagcaac

SEQ ID NO: 674379 - DNA, 95 bp, Homo sapiens
ggaatatgatagcatcaaaaacaacattgaagaggaggaaaaagaggttggctcaggtacactggctttctcaaaggactattgcaagtctttgc

SEQ ID NO: 674380 - DNA, 74 bp, Homo sapiens
gcggcgccccgcggcatggcagcctcagtgaaaatgcctcgtgtaaaagcagctcaagctggaagacagagctc

SEQ ID NO: 674381 - DNA, 122 bp, Homo sapiens
gttggcggcagcctgggacgcgcttatcgtgcggccagtccggcgctggcgccgcgtggcagtggggacctcagcagccatgtcgaagccccatagtgaagccgggactgccttcattcaga

SEQ ID NO: 674382 - DNA, 82 bp, Homo sapiens
gtgagcatgacccccatgtgctcctggccgtggccaaatgtgaagttcatttccaatccgccctccatggtggcagcgggga

SEQ ID NO: 674383 - DNA, 83 bp, Homo sapiens
atggacctgtcagcaactaaggaacaaaagtaatgaagatttacacaaactttggtggtataagttgaaatccaaaccaggaa

SEQ ID NO: 674384 - DNA, 97 bp, Homo sapiens
tgactgccgtagatctaatggaagcaagccaactgtgtagcatggactcgaaagcaaatattgtacatggccataaaattttgagtagaaaaatcca

SEQ ID NO: 674385 - DNA, 100 bp, Homo sapiens
ccgggagtcgctgagcggccaggccgtgcgccggcctttggtcgcctccgtgggcctcaatggtatggtcatttttctggaataaatcgtaaggttcagt

SEQ ID NO: 674386 - DNA, 100 bp, Homo sapiens
tgctgaagtatttctgaaggcatttgctgttggtgtccagcaagcttcaacggaccacaccaaaatgccatctcaaatggaacacgccatggaaaccatg

SEQ ID NO: 674387 - DNA, 51 bp, Homo sapiens
tggagatccagcgggtggtggaaaaggcgaggccttcttgggcagctttgt

SEQ ID NO: 674388 - DNA, 83 bp, Homo sapiens
gtggatcgctgtgatcgtcacttggagcatcagatccatgctgctgctgactcggagccccacagcttggcacaggctctctc

SEQ ID NO: 674389 - DNA, 83 bp, Homo sapiens
ttaccatgggggctaatggtaaccgaaactcaaagttaatggagccaaatttaataaaggcatgttatttgaaagcaattgag

SEQ ID NO: 674390 - DNA, 75 bp, Homo sapiens
ttgcagagcagctgaagcaagctgaggagctcagtccagtgtgaaaaaagccagtattaaaatactgaaaaattt

SEQ ID NO: 674391 - DNA, 100 bp, Homo sapiens
gcaacaacctctcctcttcgtctccgccatcagctcggcagtcgcgaagcagcaaccatgagcgccatgctgcactgcccctactggaacaccttctcgc

SEQ ID NO: 674392 - DNA, 74 bp, Homo sapiens
caaaggtccagagcattcagctgtctcaaatgcagacttgggaagatccccatgaaaaagataagagcacgaac

SEQ ID NO: 674393 - DNA, 100 bp, Homo sapiens
ttagagttcagctgcacatatttactggaagatgccaaagtgcactggcaattttacaggtgagaacaacagctccagaaaaatacagagtcaagccaag

SEQ ID NO: 674394 - DNA, 51 bp, Homo sapiens
gaagagctgcagctcctcctgtgcgggtgaggtcgcaggagctggtgcagc

SEQ ID NO: 674395 - DNA, 50 bp, Homo sapiens
aacaatcggagttgcagccaaaaatcagatgtaaagaacctatatccatc

SEQ ID NO: 674396 - DNA, 96 bp, Homo sapiens
ggggtttggagggcagaaattcatggaagatatgatgccaaaggtggtgattctagatgtccgggttccctgcacacctgtcgccaggttaaacaa

SEQ ID NO: 674397 - DNA, 102 bp, Homo sapiens
tcgcattttggcattgacatttaattttagggtcctttatatagaagggagagtagaggcaaatttctggagatgtgcaatgatctcttagctagagtggag

SEQ ID NO: 674398 - DNA, 100 bp, Homo sapiens
tcgctgctcagccagctcctgcgaccgccctgcgcttcgtgcaccggggcggtccgttgccaaagccaggatggccaggccatgttatgggatctcaacg

SEQ ID NO: 674399 - DNA, 100 bp, Homo sapiens
ccgagtgctcccactggccccctgggaccccctggtcatggccaaaccctggtgcctccggagccagcgtggtggccatagacaacaagatcgaacaggc

SEQ ID NO: 674400 - DNA, 98 bp, Homo sapiens
tcatcagagagcattttactactgagctgcaaaggtgctggagaatctggtaaaagcaccattgtgaagcagatgaggatcctgcatgttaatgggtt

SEQ ID NO: 674401 - DNA, 80 bp, Homo sapiens
gcggaaggggaaagcctggagtcctggctcaggggggccctcagcctcttggccttgaacgggctgttcatcttgattca

SEQ ID NO: 674402 - DNA, 100 bp, Homo sapiens
gagtgatctctatggtgacaacagagtccatgaaactctcagaaattgagcccaatgtattccttcgaccttttctggaagtgattcgctctgaagatac

SEQ ID NO: 674403 - DNA, 101 bp, Homo sapiens
gccctgcagtacctgcagaaggtctctggagacatcttcagcagggtccgcaagcaggtggtgaacatcccgtccttcattgtccgcctggattcccagaa

SEQ ID NO: 674404 - DNA, 83 bp, Homo sapiens
ttgtctcccacggtcatccgctcagggctgaaagatctattccagaggggagcttcaccacttcattgacggctttaatgaag

SEQ ID NO: 674405 - DNA, 75 bp, Homo sapiens
cgcagtctcagcatgaacttgggaatgttttcttaaaattcggttcgggggtgattaaagctggctttgcaggag

SEQ ID NO: 674406 - DNA, 100 bp, Homo sapiens
cggcgctccgagagctccaggagaagcaggctctgatggagcagcagagacgatctgaagaagacacttgaatcatgggtgacgttaaaaattttctgta

SEQ ID NO: 674407 - DNA, 82 bp, Homo sapiens
cagccgctctgagggcgcctgctcagacagcacccaagaaaacctcatttggctcgctgaaggatgaagaccggattttcac

SEQ ID NO: 674408 - DNA, 100 bp, Homo sapiens
aacgaattcagtgatatcattaagtccagatctggttttgactggatcatctcgtcaaagttattcacctggctatcaggatttcagtaagtgggaatca

SEQ ID NO: 674409 - DNA, 100 bp, Homo sapiens
aaggatggtttagaaatggaaaaatgtatacaggtatccccgtttttacaacagatgttcatgcccctgcttcatgcaatttttgaagtgctgctccggc

SEQ ID NO: 674410 - DNA, 99 bp, Homo sapiens
cagattcgcagtggtcgcttcttctccttgcatttggccatccagtgtcattggtctcagaggccagcagttattggagatgtccttcaagtctacagt

SEQ ID NO: 674411 - DNA, 89 bp, Homo sapiens
gactccctcaccgagtacgaagcgggcgtttgcgaagcagggtaccaccatcttaaggacagaaaagctacaggactctaggaggccac

SEQ ID NO: 674412 - DNA, 97 bp, Homo sapiens
gctctcttcaacggagcccaaaagtgacagtactgcttttaaagagacagtgttagggatcttggaagcacagccaacatgtgtgacattgaagaag

SEQ ID NO: 674413 - DNA, 99 bp, Homo sapiens
cggcgtcttgccaccgggcctgtcagttgacctaccccttgcacacctaccctaagatctgtacccccgatttggtggtattcctggcttgtgctaatc

SEQ ID NO: 674414 - DNA, 109 bp, Homo sapiens
ccggagcagctgccacaatgggacatgtgcaagattaaactgcaaatatctcatgaagctgctgcctgtatcactggtctccgggcagccatggaggctttggttgttg

SEQ ID NO: 674415 - DNA, 82 bp, Homo sapiens
aaaatcggagacagagtattgttggggaactataccgaggatatatgagcaatttaatccagaccataaaaatatgacagtg

SEQ ID NO: 674416 - DNA, 96 bp, Homo sapiens
tcatgatgataatcatagcagcacttttcacagcatcagcagtcatctcactagttatgttcaaaaaagtgagttgggaatcagactcttgagttg

SEQ ID NO: 674417 - DNA, 100 bp, Homo sapiens
cacggattagaactgggccacaccctgaaccagttcgatgttgtgataagggaggaggccaaggagatgtgggaaaagagagaggcagagtgggcccgag

SEQ ID NO: 674418 - DNA, 101 bp, Homo sapiens
tctagtcctgagcttcccaccgaagatgaacagggttcctggggcatcgacgatctccatatttcattgcaagggaacattattacagcagccagacgatc

SEQ ID NO: 674419 - DNA, 80 bp, Homo sapiens
cggccccgcccgcgccggaagagccacgccgacctgcctagagctggaacgttacctccagagcgagccctgctatgttt

SEQ ID NO: 674420 - DNA, 83 bp, Homo sapiens
gtttccgttaagctggacaacagactggaaagctacccttgaggagaataggttgaattctgaaaaagatcgagctagggaag

SEQ ID NO: 674421 - DNA, 98 bp, Homo sapiens
tagagatatagttggcaacctcactgagttagaatcagagagtaaacatcagtctccaaagataactacatcccttcttcccatcaacaatggctcca

SEQ ID NO: 674422 - DNA, 75 bp, Homo sapiens
ctctgctcttcagtacaatcctgtctgctgagaacagacccagtccctgaggaaggagaagatgttgctgccacg

SEQ ID NO: 674423 - DNA, 100 bp, Homo sapiens
ccgccggctaccatgtccgcccaggcgcagatgcgggccctgctggaccagctcatgggcacggctcgggacggttgaaggggcccggccaggactcggg

SEQ ID NO: 674424 - DNA, 80 bp, Homo sapiens
gaccagagtatctactgacaaaagacaggttcttcacacacccccattcggcgtagtacccagagagctcaagatgtgtg

SEQ ID NO: 674425 - DNA, 83 bp, Homo sapiens
tgtatagggaaacctgggggctccctggacaactccgagcagtgcctgaagacgtacactggccacaagaatgagaaatactg

SEQ ID NO: 674426 - DNA, 100 bp, Homo sapiens
attggctcttcctcaatgcttgtgtgggccggatcatccagttctccatgtgtcctggaatgatgcggttgcctactgcacttgggcagggaagcggctg

SEQ ID NO: 674427 - DNA, 104 bp, Homo sapiens
gctattgtcatcttccttgaattctttgcgtggggccttttgacaactccaatgttgactaacattcagaagattctcggccttgccccttcacgagccgccac

SEQ ID NO: 674428 - DNA, 100 bp, Homo sapiens
ggggatatccacagttcgatcaagggaggaaataatgctggccatacagttgttgtggattctgtggaatatgattttcatctcttacccagtggaataa

SEQ ID NO: 674429 - DNA, 120 bp, Homo sapiens
tccttgctgggggttcggggagcgcttggaccccggcttctgggacgcgtcaggtgtgcggagatgatcatcagcatggacagcagccagatccacagcaaagacccccgttacggagcc

SEQ ID NO: 674430 - DNA, 50 bp, Homo sapiens
cggcgccttcggcaaggtttacaaggatggatagaatgacagaagatgct

SEQ ID NO: 674431 - DNA, 82 bp, Homo sapiens
cgaggcgttcggtcctgctgttgcggccgctgccccagggctgcggggacggtgctggagaatctggtaaaagcaccattgt

SEQ ID NO: 674432 - DNA, 98 bp, Homo sapiens
agcagaagtacctggaggagagcaccatccgacactttgccatgaatgccgcagccactgcagcagctgagagaaacaccctgttgcccaggctggag

SEQ ID NO: 674433 - DNA, 100 bp, Homo sapiens
ggaaaatgtccttccagcgctgcgcccggacagacaagagtttggttatctgggacaatgacaggctcacctgtatccagaagggagaaaagaagaacag

SEQ ID NO: 674434 - DNA, 100 bp, Homo sapiens
ctcgggacgctgcacctcccgcgccgcacggtggacgaggatgctgatatgctaactggtgatgagcaagtatggaaggaagttcaagaatccctgaaaa

SEQ ID NO: 674435 - DNA, 83 bp, Homo sapiens
cgacgccaaagatgacttccctcttaggaaaacagggctctttgtgatggatgaggacgccaccctccaggaccttcccccct

SEQ ID NO: 674436 - DNA, 90 bp, Homo sapiens
tggcctacccgggatacggaggaggggagatctattgggaaactgattataaccactcgggcaccatcgatgcccacgagatgaggacag

SEQ ID NO: 674437 - DNA, 102 bp, Homo sapiens
gcggacatcagcagagtttctaatgaagaactcggatttatatggcgccaagcctacaacacagcagtcccctcaggatgagcaggaaaagctcttggatga

SEQ ID NO: 674438 - DNA, 100 bp, Homo sapiens
aggtttgaaaagcagctggcctgcaaggtaaaataccatgaagattttgaaaaaacaaaggggagaggctttactcccgtcgtggacgatcctgtgacag

SEQ ID NO: 674439 - DNA, 98 bp, Homo sapiens
aacagagaaatcttgaaaaggactgaccagtttttgcagttctaaaaccatggcccatcacaacaccccgatcccccaaggaggcagaggagccatcc

SEQ ID NO: 674440 - DNA, 100 bp, Homo sapiens
ctgcctcagcctcctgagaagctgggactacagaatatgacagatacctagcatctagcaaaataatggcagctgcttaccttgaccccaacttgaatca

SEQ ID NO: 674441 - DNA, 75 bp, Homo sapiens
gacaccgggagtgggagagattggactgggagactcagcaggttgggggccgtcccgctcctaaggcaggaagat

SEQ ID NO: 674442 - DNA, 80 bp, Homo sapiens
ccagtgttcaccatcctggccccggaaggatgatcggctgaatgtaacagaggaactaacgtccaacgacaagacgagga

SEQ ID NO: 674443 - DNA, 74 bp, Homo sapiens
aataacgagttctctagcgctagtgatgtggagcctgaagaaataaatgcagatgatgagatagaggatacatg

SEQ ID NO: 674444 - DNA, 100 bp, Homo sapiens
ttgttcatgagcatttacacagtggagttactgttcatcatgggggtactgtggacaagcccagggctgctgtgaaactggaacgccaagctgaagaaga

SEQ ID NO: 674445 - DNA, 95 bp, Homo sapiens
gaacttccctggtcgaacagttttttctaatggctattcaagggcgtctctggccgagcctctttttgtggaaaacgacagcagcagcagtggcc

SEQ ID NO: 674446 - DNA, 109 bp, Homo sapiens
caagaacctccaaagagcattgaagaattcttaaagtttcaaaattgggaagatgaagtcctcagtacattctgaagaagatgattttgttccagagctacatagaaat

SEQ ID NO: 674447 - DNA, 51 bp, Homo sapiens
atcaattaccaaaggtgatcttgagctctggattaatcgaattacagctgc

SEQ ID NO: 674448 - DNA, 90 bp, Homo sapiens
ggaaggaagccggcgggcgggcggagcgtgctttggacaccatgaattttgatgttataaagggcaagccagtacgcatcatgtggtctc

SEQ ID NO: 674449 - DNA, 87 bp, Homo sapiens
cccaggacacagagactttatcaaaaacatgattacagggacatctcaggctctcagtgccaccacccccggcaggccttccctgac

SEQ ID NO: 674450 - DNA, 88 bp, Homo sapiens
agcggagctcggggcgcgctgctgctggcactgctgctctgctgggacccgaggctgagccaagcagatgacagtcatgtccctttcc

SEQ ID NO: 674451 - DNA, 75 bp, Homo sapiens
ccggcagccctgcggctacggagacaggtaatgagaggccctaagatcccagaggatgccataagaggaaaagtc

SEQ ID NO: 674452 - DNA, 50 bp, Homo sapiens
cgctcatcaagcagcaggtccttaagataacgaaggaggcccaacttcat

SEQ ID NO: 674453 - DNA, 96 bp, Homo sapiens
ctcaggctgtgctttggaagagtatgcctgggtcccgccgggtctgaagcctgaacaggctttacaggaagtatggtgctggcatctgcttggctt

SEQ ID NO: 674454 - DNA, 75 bp, Homo sapiens
cgacaccatgcatctcctcggcccctggctcctgctcctggaaattccaacagaatgggtttcctgaaacggatt

SEQ ID NO: 674455 - DNA, 99 bp, Homo sapiens
cgggagaggctgcagcggaggcggaagcaggactcggggcacttgggaaattggatacactcacatgaaaatagcggaaggagtgaactctcttttgca

SEQ ID NO: 674456 - DNA, 135 bp, Homo sapiens
tggagtaatagatttttccctctaccttaaggatgtgcaggatcttgatggtggcaaggatggctgaaggacccggggccgcggacggagaagcggacactgtgctgcgacatggtgtgtttcctgttcatcaca

SEQ ID NO: 674457 - DNA, 98 bp, Homo sapiens
gtttgcaaatgcagaggaagaatttttctatgaggaagctgcagtaaaggaagatgaagaagaagtttcagataagggcagtgattctgaagaagaag

SEQ ID NO: 674458 - DNA, 100 bp, Homo sapiens
cctggacagaaataaaactgggccaagatcaaggctcgagatcttcgcgggaagaagaaggaggagctgctgaaacagctggacgacctgaaggtggagc

SEQ ID NO: 674459 - DNA, 75 bp, Homo sapiens
ctcagatcagtggccgaggccccagaggtctgaaggggcgtctcgattacctgagctctctgaaggtgaagggcc

SEQ ID NO: 674460 - DNA, 73 bp, Homo sapiens
agttcatgtagatgggcatctctatgaattagcatttgatgaatacagaaatatcagccaaaaggacattgtg

SEQ ID NO: 674461 - DNA, 99 bp, Homo sapiens
tccagtacacagacgagcatggggaaggacactttgccaccatcaccttgaccttcatcgacaagaacggagagactgagctgtgcatggaaggtcgag

SEQ ID NO: 674462 - DNA, 50 bp, Homo sapiens
gcaccccccgccgacaaggaggctgcatcttcctcccgtgaggctggccg

SEQ ID NO: 674463 - DNA, 75 bp, Homo sapiens
gagtgggctcccctaaactggggcctggaaaaggatgtatcggcaagcagtgtaaacggaggacttggggaaaaa

SEQ ID NO: 674464 - DNA, 75 bp, Homo sapiens
gtttcaactgctgtattgcagaacagcctcagcctatctatccatactaatggaaatgtaactggaactgactct

SEQ ID NO: 674465 - DNA, 100 bp, Homo sapiens
caaatctgtttgctgatgaagattcacctgtgcatggctatggaaagggcaaatggaatggagctggatggtagaagaattcgggtggattattctataa

SEQ ID NO: 674466 - DNA, 121 bp, Homo sapiens
ccgccgcctccgcctccgcctccgccggcgcatcgcggacgcccagcagaaactgttttggctgggcctacttcacctataccttctctgggaaatgtgagtgaaactgcatctggatcag

SEQ ID NO: 674467 - DNA, 75 bp, Homo sapiens
ccgagctttgcgggaaagcagcggtgagaattatgaagatgatgacctagtaaattctgatgaggttatgaagaa

SEQ ID NO: 674468 - DNA, 100 bp, Homo sapiens
ctgggactaagccaagggattcaggtgtggtgccggtgggaactgaggaagcgcccaaggagacccgtgtacagtatcatctcagttggagttagaagaa

SEQ ID NO: 674469 - DNA, 83 bp, Homo sapiens
aaagcatttaaccagcatggctacttcatattttggaaagcagtttttaagacaaaaacctttcaacgaagtctaaaaatagg

SEQ ID NO: 674470 - DNA, 75 bp, Homo sapiens
ccggaatgggtgacagcgtcatcacggcattttattggatggagagcaatacatcatcatctttggagaatttag

SEQ ID NO: 674471 - DNA, 88 bp, Homo sapiens
aggctacaatcaaaaattcagagagctctataagattgggatcacgtttttgctacttgagaagatagaacatgatgacatctgcaat

SEQ ID NO: 674472 - DNA, 101 bp, Homo sapiens
gtggaaacgaaaacaaatttggatcacagaaagaatgtgaaaaggtttgcgctcctgagtatgtatgtaactgctctgtggttggaagcctgaatgtgaat

SEQ ID NO: 674473 - DNA, 110 bp, Homo sapiens
ggcggcgctggggcccccagaagtgatcgctcagctggagaacgcggctaaagttctgatggaaggaatcgtgtctcctagtgacctggaccttgtcatgtcagaagggt

SEQ ID NO: 674474 - DNA, 74 bp, Homo sapiens
ccccatcttcctggatgtgaagtcttcttggacacttaatgattgttggcaagaaatgtgctgctgatctgggc

SEQ ID NO: 674475 - DNA, 100 bp, Homo sapiens
tagcagttgtggtcatcggagctgtggtcgctgctgtgatgtgtaggaggaagagttcaggtggcctgtttgtaccggaagcaaagtcagattcagaacc

SEQ ID NO: 674476 - DNA, 51 bp, Homo sapiens
gttcctgttaccaaactcatagacttggcccacctgccgtttgctgtcatt

SEQ ID NO: 674477 - DNA, 119 bp, Homo sapiens
aagaagaggagccctgggtgatggaggaagaaatgtttgggaggcactgtccagcactattcctgatcagagaactccagttgcttcaacacacagtatcagtagtgcagccaccccag

SEQ ID NO: 674478 - DNA, 83 bp, Homo sapiens
gggagtgccgtgcgccgcagcccgggcccaggccccggcagcgcctgggacaagacaatgcagatcttcgtgaagactctgac

SEQ ID NO: 674479 - DNA, 131 bp, Homo sapiens
gaggacctctatctcgcttttcccctggccttctgtatcttcatggtgcggctcatcttcgagagagccttgaaaccagcgaaacaataatcaaagagcagttctgtcaaagaaaacaacataaatcaggt

SEQ ID NO: 674480 - DNA, 85 bp, Homo sapiens
agacacaggacttacaattctccaagtaaacaactgagctgaactagagaaacatggttataagatggagacttcatagcatcca

SEQ ID NO: 674481 - DNA, 49 bp, Homo sapiens
cggagctcgtccagctgcgtgcctaggtaaattaaaagatcttgggaac

SEQ ID NO: 674482 - DNA, 100 bp, Homo sapiens
gagaatccagtttgttggggcttgtaatccccccacagaccctggaagaaagcccctctcacacaggcgtatcagactctatttctgcttcagcacctat

SEQ ID NO: 674483 - DNA, 98 bp, Homo sapiens
gacaaccagtccatgctgatcacgctctatcacatcacactctggaccttcctccttgccctggggcatttcctctctgagttgtttgtctatggaac

SEQ ID NO: 674484 - DNA, 80 bp, Homo sapiens
atccagaaactggaggagtcccgctcgaagctaggtgagagagccatgtaatcatgccaacatcctgaccaagcccgatc

SEQ ID NO: 674485 - DNA, 99 bp, Homo sapiens
tgggaggctccgttgcctgctcccggagggagacgcgctgccgaggagaacccagcggggcaagtgtccagagaatggctgggatgaaagtacacttga

SEQ ID NO: 674486 - DNA, 74 bp, Homo sapiens
cggatcaacttcgacaaatactgcggttggatttctcacgatgtccagtgttatctccatgtctgcccctttct

SEQ ID NO: 674487 - DNA, 75 bp, Homo sapiens
tatcagagtcaatcctagacattataatgcatgtccaagtggtaagaagttcagaagcaagcctcagttggcaag

SEQ ID NO: 674488 - DNA, 82 bp, Homo sapiens
aaatcacaagattctctgccacaaaaaaatataataaggctgagtgcggagccaaggtttgggccccatggtatccctgtga

SEQ ID NO: 674489 - DNA, 100 bp, Homo sapiens
aatgagaaaatctccctgctccgcagcgacatcaccaagctggaggtggacgccatcgtcaacgccgctgaacaaaaggttcatcctcagttttctccat

SEQ ID NO: 674490 - DNA, 76 bp, Homo sapiens
gcagagccgcccagccctgccagctgcgccgggacggtaagtaaggaggtctctgtaccatggctcgtacaaagca

SEQ ID NO: 674491 - DNA, 100 bp, Homo sapiens
ggcggcagcacgaaagtaccatgcaaaccacagggaagctggaaaagaagcggccctggcagaagtggctgacgagaagatgcttagcgggctcacgaag

SEQ ID NO: 674492 - DNA, 51 bp, Homo sapiens
gaaaagtccaagcatagcaacaggaatgatcaccaagacacacaaagtaga

SEQ ID NO: 674493 - DNA, 96 bp, Homo sapiens
atctttgagcttctcagagacagcgagtacgagactgcagaaaccagaatgtcggattgcacaccctgttgtgaagtgcacctactgcaggactga

SEQ ID NO: 674494 - DNA, 83 bp, Homo sapiens
ctaaagcagcgtgcgttcagccctgggcattactctactgactggcagagacaggagaggtagatgtccacgcccacagaccc

SEQ ID NO: 674495 - DNA, 98 bp, Homo sapiens
cagcagtcctgctcctcgccgtaccaaacagaccagtgtgcttttcttggagaaagaagaaaagaagaaagaaggaagaagaagaagaaagaaaggag

SEQ ID NO: 674496 - DNA, 77 bp, Homo sapiens
caaagataagaagagaaaaagagaagatgaagaaacccagcttgatatgttgccacagaatatattactgagcagca

SEQ ID NO: 674497 - DNA, 100 bp, Homo sapiens
ttctgatgaagaagttattcaagatggcgcttcctcccatcaacacagtcggcggagacaaggttggctaaaggagatccgaaagcttcagaagagcaca

SEQ ID NO: 674498 - DNA, 91 bp, Homo sapiens
cgcagcaaagcgcccagcctgccgcctcgctgtccctgcggcttctggggcattttgaaagcgaagcagaagccgtagaatcagcggcgag

SEQ ID NO: 674499 - DNA, 100 bp, Homo sapiens
agatcgtcgagatgtctacttcgaagactggcaagcacggccacgccaaggtacgagcagtctacacagaaggcggttggtttgaggaagggatgaagct

SEQ ID NO: 674500 - DNA, 100 bp, Homo sapiens
cgggacgccttggttgacttcagtgaacagtatactccagaagccgatccctacttcatccaagaccgtacagagccagatggactccttcggacaaact

SEQ ID NO: 674501 - DNA, 100 bp, Homo sapiens
ggaaagggagcctggagagcggcggtgctgggaggcccggccagctcgatcgcaggcttccacctggcggccaggaaatcctcattgacgattcaatttg

SEQ ID NO: 674502 - DNA, 90 bp, Homo sapiens
gctgtttccacgtgcggtgctcgtcgggagtgatcacctaccctacaggtcctgtgggaatggccgctgctgctgctgtggcaacaggaa

SEQ ID NO: 674503 - DNA, 50 bp, Homo sapiens
cacctttccctttatttccggaggttttaaaatcaaagatgggaaaatcg

SEQ ID NO: 674504 - DNA, 75 bp, Homo sapiens
ggatggaaatcctaatgacagtctccaaattcgcctccatctgtaccatgtgccggtggtggtgtgcacattgag

SEQ ID NO: 674505 - DNA, 100 bp, Homo sapiens
ggctgtggtccatagcctctgttcgttttcactgcaggaccaggcacgaaagatacctacctggtttatattctaaatgaattggctggaaactccttta

SEQ ID NO: 674506 - DNA, 100 bp, Homo sapiens
accggatcccaggccccgtttgcaagatcgatgaggtcctgagacaggaagacaaagctgaagccatgtccggccatattgatcagtttctgatagccac

SEQ ID NO: 674507 - DNA, 98 bp, Homo sapiens
tgtaaagatatttcaaggaaatgtgcacaactttgaaaagtatgcagcctggctggtgctctgggttggctggaatgcatttatcatctgcttctact

SEQ ID NO: 674508 - DNA, 74 bp, Homo sapiens
gcacaagaaggaccttcacccattgtttgatgagacctttgaattgagttgtttaaaggctttgcccgccacct

SEQ ID NO: 674509 - DNA, 120 bp, Homo sapiens
cgccttgtgtccccacggctctcctagggacagggaaactgagtcatatcaaggtggaaggcagctgaaggtccaagctgaagatggaagatataaaagaagtgaaccaggcactgaagg

SEQ ID NO: 674510 - DNA, 74 bp, Homo sapiens
tgggatgtggaggagacggcgcccggggaggaggaggtgaatcaaaaactctggttttaagcaacctctcctac

SEQ ID NO: 674511 - DNA, 75 bp, Homo sapiens
ggtggtgcgcggctccgtgctcctgatccatttttcctatccatccctccttcagaatcattgccttggcagaac

SEQ ID NO: 674512 - DNA, 114 bp, Homo sapiens
ctcccctgctatccccaacaagaggaaagacacacctaccaagaagccagtcaagcggccagtgtactaatggtcacttgatgtgcgctggctgttttatccacctactagcag

SEQ ID NO: 674513 - DNA, 97 bp, Homo sapiens
ttgaaaatggagaaaaagagtgaggaactgagaaacatggatggccttgggaacgtggaaaaggtagctacagcaagctgggtagcaggcagatcca

SEQ ID NO: 674514 - DNA, 83 bp, Homo sapiens
tcagtgtggcaaccagatcggtgccaaggcacggtgacatgctgaagcgcaaggcggagctggaggagcgggagaaggtcttg

SEQ ID NO: 674515 - DNA, 88 bp, Homo sapiens
ttggggatggctataatgggtatggaggaggacctggaggtggcgaaactcttggatctaaagaaacagttggctgtagctgagggga

SEQ ID NO: 674516 - DNA, 73 bp, Homo sapiens
agaacaatcttgaatcatgaagctactaaccagagccggctctttctcgagcccacccacctttgggttcctg

SEQ ID NO: 674517 - DNA, 98 bp, Homo sapiens
ctcctacggcaccttcgcgggggagttctacgacctgcgctacctgtcggaggaggctgttggagccagcagacctgactggagagaactggatgatg

SEQ ID NO: 674518 - DNA, 90 bp, Homo sapiens
gctgaagtccttggaaaccctcaagtgtgtcggcccagtccttcctccactgtttcacgatggccagcaccgccttcaacctgcaggtgg

SEQ ID NO: 674519 - DNA, 100 bp, Homo sapiens
agtggacaaaagaggggaaactatgggagttcccaattaacaatgaagcagttgaagcttcttgtcatgacggggatgaaacaattgaaactattgaggc

SEQ ID NO: 674520 - DNA, 82 bp, Homo sapiens
ggcaagacaaggtgaagaggataatgagcacccgacaggaggatcctttattcgtccgaacaaggtaaattttggaacagac

SEQ ID NO: 674521 - DNA, 74 bp, Homo sapiens
aatatattctttcttgcagaccgaacagaaatgctgtctgagagcaagagctcaagtgcgatgccatataagcg

SEQ ID NO: 674522 - DNA, 75 bp, Homo sapiens
catgaagatggcgccaggacgaaggccctactgggcaagtttaagctatgaagaaggacatccctcacactctga

SEQ ID NO: 674523 - DNA, 51 bp, Homo sapiens
aatgaaaggagagcaagaatctcatagggtttttaatgaccacaacaagca

SEQ ID NO: 674524 - DNA, 101 bp, Homo sapiens
caggaagacccaatggatagatacaagctctaagcgaaagacatgaggcctcagcctgaaatgaggttgttttgaggtcatctgatttctgactagaaggt

SEQ ID NO: 674525 - DNA, 88 bp, Homo sapiens
gtatgagttggggcgcccagctgccaacaccaagatgaagactggcccatttgcagagcactccaaccagctgtggaacatcagcgcc

SEQ ID NO: 674526 - DNA, 51 bp, Homo sapiens
gccagcagcctctaagagctcctagacgaaatacctgcatgagtctcggca

SEQ ID NO: 674527 - DNA, 75 bp, Homo sapiens
cgtggagatatggcgcaactgcggcgcctgctgatgcaaggaatcccctgggctcccgtccactccactgctgac

SEQ ID NO: 674528 - DNA, 100 bp, Homo sapiens
cacagtttctgtcccatgacaaggaccagctgactaaggagctgcagcagcatgtaaagtcagtgacagccccatggtgatttctaacctagaagcaaga

SEQ ID NO: 674529 - DNA, 50 bp, Homo sapiens
tgggtctcctctcccaaccatcgagtggatggatagaatgacagaagatg

SEQ ID NO: 674530 - DNA, 100 bp, Homo sapiens
ccggtcccagaccaccctcctccaccgtcgcctcccactgcaaaaaggcctggatttgtctgcctctgctcattccaaggtggtgatcttcacagtcaac

SEQ ID NO: 674531 - DNA, 75 bp, Homo sapiens
tggccaagggcagtgacaagcgtcggggcggtcctccaggccctcccatcatggaggaagaagcgaatgcgcagg

SEQ ID NO: 674532 - DNA, 100 bp, Homo sapiens
ggacagagagagagatgtggatcgagaggatcgcttcagaagacctaggttgctcagacaactgctctcccggatgaggatgatgacctgtgagaatgaa

SEQ ID NO: 674533 - DNA, 83 bp, Homo sapiens
ctgcgtacattcggggtgccagaaggaaagcatagatatgcacccaatgtccagggagcgtgcaaaatttgtcaaaagtggcc

SEQ ID NO: 674534 - DNA, 51 bp, Homo sapiens
gagttgcgtctccctcgcgcgaggtactaggttttgacaagcttgcatcat

SEQ ID NO: 674535 - DNA, 98 bp, Homo sapiens
ataatgcagtacagaggcacagaagcacaattgtggactgtcttaaagatttggatgtctcaataaaacggaaatgcttccagactgcacacttttac

SEQ ID NO: 674536 - DNA, 100 bp, Homo sapiens
gaaaaggctgacatgcccgtcctatatgacaggtcaagaacttcactgaggtccaccctgactacgggagccacatccaggctcttctggacaagtacaa

SEQ ID NO: 674537 - DNA, 99 bp, Homo sapiens
ccgcgcgcagggcctgcagcgggagctggacggcgagcgcgagcggcgcgagaaagtgagcacctgcggatctgtccccagggctacacctgctgcacc

SEQ ID NO: 674538 - DNA, 98 bp, Homo sapiens
ccctgggcggccgtggacaacatgatggtcagaaaaggggacacggcggtgcttagaaatggtggagtcaatgaagaaagtagcagggatggatgtgg

SEQ ID NO: 674539 - DNA, 100 bp, Homo sapiens
gcaaatcgagaaaaacctcagcgacctgatcgacctggtgttttacaactgcagttgtttggaagtaactggtctccagaacagaaattactcagcccat

SEQ ID NO: 674540 - DNA, 95 bp, Homo sapiens
ctgcggtcgaagaaggggacgccgacaagatctgcgtggaaaaatgccccgaccgctacctcacgtacctgaatgctcgcagctcccgggacttt

SEQ ID NO: 674541 - DNA, 98 bp, Homo sapiens
ccactgaaatcacaatggaaagtcttgacttgactggtccttccatagtgacgccccccaaggacatctggaatgtcactggtgcccaggtgtacttg

SEQ ID NO: 674542 - DNA, 100 bp, Homo sapiens
gctgaggggcctccgcgccttgtgtcgcgtgctgctcttcctctcgcagttctgcattctgtcgggcggtggaataggaggccttcaagattttgtgctg

SEQ ID NO: 674543 - DNA, 75 bp, Homo sapiens
gcagctgaaaagcctccttcagcatcaacttgatacttctgtctccattgaggacttgcggtctttagatatgag

SEQ ID NO: 674544 - DNA, 90 bp, Homo sapiens
ttattgaaagatgtattgagtacattgaagccacaggcagcctgcttctgcaaagtggtacgatcgaagggactatgtcttcattgaatt

SEQ ID NO: 674545 - DNA, 135 bp, Homo sapiens
gctgcgccagcaagcggggccggtggcgcccgtgtcggagaccccgcgccggaccctgaggcagcgagtggtatggccaggacaacacatgtgaggagtaccacacagtggggccccactcctgccacatcccca

SEQ ID NO: 674546 - DNA, 98 bp, Homo sapiens
gcctgatcttattggagacaaacaggcaacagcaactgtacatttttaaagggagccatttctgggaggtggcagctgatggcaacgtctcagagccc

SEQ ID NO: 674547 - DNA, 82 bp, Homo sapiens
agtcaccaatgccacaggaaagagaacatcatcaagaaggtgatcgggcagaagtttgtgtacaagtttgtctctttcccgg

SEQ ID NO: 674548 - DNA, 80 bp, Homo sapiens
ggtcagtcacttagtcgtcagatcgcccgtcctggtatcacagtgcttctgttcaggattttttatcaagcagaaatgca

SEQ ID NO: 674549 - DNA, 98 bp, Homo sapiens
agatggcggccggcgaaaggagctggtgcctgtgcaagttgttgaggtgacctcacaaagttcggccgtggggatgcctcctccccagccccggccac

SEQ ID NO: 674550 - DNA, 100 bp, Homo sapiens
aggtggtgtaaaggaagctcaagtatatcaagcattcaaattgctcacagctgatcctaaggtggatgcccggagcataccagtgttagcaaaatggcaa

SEQ ID NO: 674551 - DNA, 74 bp, Homo sapiens
gcagatgttgtcaaggtggcctaccaggaggccaggggtgtcgccatgtttaattggttggggtcagataagaa

SEQ ID NO: 674552 - DNA, 100 bp, Homo sapiens
ttgcgaggggagcctgagacacagttgccgctgactcgggaggaggacctgatcaagactgatgatgtcctggatctgactgtgcggtcagagaagaaac

SEQ ID NO: 674553 - DNA, 75 bp, Homo sapiens
cagaagcggaacagccacagcagcctcccaaggagtctgcaagttggtgatgaaacttatcaggacatatttcgt

SEQ ID NO: 674554 - DNA, 100 bp, Homo sapiens
tgatatcagtgaaactcggacaggggtggtgcctgtcaccacggtgactgctgaggacgaggcccagatggaacattacaggggctactttggggatatc

SEQ ID NO: 674555 - DNA, 96 bp, Homo sapiens
tggctctggaggctgcggaggcgacgccggagagaacgaagcctcggctgggagcgatccggccagttattgaacaaacctttcctttttctaaag

SEQ ID NO: 674556 - DNA, 50 bp, Homo sapiens
cggccctgggagctggaggaaccgcgggggaaatttgcagtggtgagaaa

SEQ ID NO: 674557 - DNA, 74 bp, Homo sapiens
tggggcattcgtcttggtaaacttggtgtggaagttaaacgagctgagcctcgggacagcaagagccaagcgcc

SEQ ID NO: 674558 - DNA, 100 bp, Homo sapiens
cgtgagcgccggcaagggcagcgccacctccaactggaagaagacgcccctcagcacaggatgaccgagtgggagacagcagcaccagcggtggcagaga

SEQ ID NO: 674559 - DNA, 100 bp, Homo sapiens
gcgggaccccgggcactgttgctgctgcgggaggtggtaaattcactccagcagcaacctcaggctgcatccccttcagtaccagagccccactctttga

SEQ ID NO: 674560 - DNA, 100 bp, Homo sapiens
ttttgttcaagataaagtgattttttgcctttgttgattaactggacaaattcaggcgaggattaaatccaccacacagggtgaaatctatctccatgac

SEQ ID NO: 674561 - DNA, 50 bp, Homo sapiens
gtccctcaaagcgggaaatgcgtcaaagacggttacctggcacgctggcc

SEQ ID NO: 674562 - DNA, 100 bp, Homo sapiens
gagcaggtcaaatagttctaaaagccatggcccagacagacctggtagatgacaacgctaaatcttttagctcacagaaggcttacaagattgtacttgc

SEQ ID NO: 674563 - DNA, 100 bp, Homo sapiens
ggcggagttggacatcgggcagcactgccaggtggagcattgccggcagcgaggttgatgaaaagcccagaaccttgatgacagattgtctggttataaa

SEQ ID NO: 674564 - DNA, 127 bp, Homo sapiens
ctcttcagggatgagtcatgtggcagtggaaaatgcgctcgggctggaccagcaggtgctggagaatctggtaaaagcaccattgtgaagcagatgaggatcctgcatgttaatgggtttaatggag

SEQ ID NO: 674565 - DNA, 83 bp, Homo sapiens
cggaggacagctctgatgaggagagcccagccctgaccctgctgctggtggacgaggcctgctggctgaggacgctgccccag

SEQ ID NO: 674566 - DNA, 100 bp, Homo sapiens
atggaatgtaagaccccgactcttcctggtgaagcatctgatgcacgttccatccggcgctcagctgggcttgagcaaatggttatgagccttagagttt

SEQ ID NO: 674567 - DNA, 75 bp, Homo sapiens
cccgtgtccttcattgccacgtacaggtccctgtacccctacccgaccggcgtcgccgcttcctagccatgaagt

SEQ ID NO: 674568 - DNA, 103 bp, Homo sapiens
atctttgatgactttgcacattatgaaaagcgtcaagaagaggaggaagccatgcgtaggagacaaagcatggaggacacaagaatgggaggaaaggcggact

SEQ ID NO: 674569 - DNA, 98 bp, Homo sapiens
cctgggctctgagtcagactgtcgaaaatattggcctaatatatgtgctgtgattcagactttgtggcgaatttatacctaaaactggaagatgtgac

SEQ ID NO: 674570 - DNA, 100 bp, Homo sapiens
aagaaaatcgaaatgatgacatttggcttgtagatttccctgaccaagcaacacagctaaaatggaatgttcagttttgcctgacgatccctcccagcgc

SEQ ID NO: 674571 - DNA, 75 bp, Homo sapiens
gtcttgctggctgcccatgtagtcactacaaatttatcaaggttcatcatgcctagtggcgtataagaagacccc

SEQ ID NO: 674572 - DNA, 100 bp, Homo sapiens
cagaggtccccaggagctgctgctggcgagcccgctactgcagggacctatgaaatgcactcggtgatggaaagagagccactattctgaagaacacttg

SEQ ID NO: 674573 - DNA, 100 bp, Homo sapiens
cacttacaacacacaacttttctgttcggcacttgaagtactccttgtttaagaaatcactactgggcagtgtttcggataatggaatagtaactctctg

SEQ ID NO: 674574 - DNA, 88 bp, Homo sapiens
ggacttcatctcattgctcagcgcggacctagacctggaatcgcccaagtccctctactcgcgaggctgaccggttccctgatgtgtt

SEQ ID NO: 674575 - DNA, 100 bp, Homo sapiens
gtgacagcacaggtcacagtaaggccaaaaatgtgcatactcacagagttagagagagggatggtgcttttagtttggatgctgaacagcctgattatga

SEQ ID NO: 674576 - DNA, 100 bp, Homo sapiens
catctggcccaggcaagcttccagattgaagccttcggctccaaattcattcttgacctcatactgaacaaagaattttctctacatgtgcacccattta

SEQ ID NO: 674577 - DNA, 123 bp, Homo sapiens
gcagctgcgtcgctgcgagctcatcaaggagagcgaagtcaaggccctgtgcgctaaggccagcaccagtggctctgacagttctctctcagatggtcttcctgttcacctagcaaacatagc

SEQ ID NO: 674578 - DNA, 100 bp, Homo sapiens
cgagagacctgcgtacattcggggtgccagaaggaaagcatagttatcttcaggcagagtgagaagctgcagcaatgtctgattttgtggaaagcgaggc

SEQ ID NO: 674579 - DNA, 74 bp, Homo sapiens
tatgctgggtccagagcattgtccagactgaggctttctcagaaatggcaagttatcaaccaaaggagcctgct

SEQ ID NO: 674580 - DNA, 50 bp, Homo sapiens
gaactcagcaaaatggctcctccagaccctgctgctgaggccgcgccctc

SEQ ID NO: 674581 - DNA, 90 bp, Homo sapiens
tggactcatacaggtcggagaggtcagcaacagggacatcgtggagacggtgctcaacctgagcagtcattatggcgaaccttggctgct

SEQ ID NO: 674582 - DNA, 75 bp, Homo sapiens
ggtgcagcgaatcaagcgggagttcaaggaggtgctgaagagcgaggagttcacagacattgggaccttcgagac

SEQ ID NO: 674583 - DNA, 75 bp, Homo sapiens
gtgctggaggtggctgctgaggccttgaaggccacttctgcttttctgagattagtgggatggtttggccatgaa

SEQ ID NO: 674584 - DNA, 75 bp, Homo sapiens
gccttttccgttgccggtgccggcctagcgtcctggaattacttcaatcaaccacttccggctcctgcgtcgctc

SEQ ID NO: 674585 - DNA, 51 bp, Homo sapiens
aaaaacagaggagttctattaagacgctacaaggctttggcccaccaagtg

SEQ ID NO: 674586 - DNA, 50 bp, Homo sapiens
ctcgatttctcaatctctggcttaaattaaaagtggatctcttcagcctg

SEQ ID NO: 674587 - DNA, 74 bp, Homo sapiens
agacctattatcagatcaaccaccaaagtgggaaacattgaaatcaaggaaatctactttcttcaatgtgttaa

SEQ ID NO: 674588 - DNA, 73 bp, Homo sapiens
taggcaagcaggaggtgatccgaggctgggaagaaggggttgcccagatgatgtctaccgtagaaaagcctca

SEQ ID NO: 674589 - DNA, 75 bp, Homo sapiens
cgatgtgcgagactttggaaaggtcagcccaaggccaaccccactgtcactctgttcccgccctcctctgaggag

SEQ ID NO: 674590 - DNA, 98 bp, Homo sapiens
aaaaatctgatgaacacactgaataatttgcatcagcaattggcaaaatagatttaccgcattgtttctcagaagcaaatgtcagacagacgcgaaaa

SEQ ID NO: 674591 - DNA, 75 bp, Homo sapiens
acagttacactgcttgtagctcttaaggttttgaacgaagaatgtgatcagaactggtacaaggcagagcttaat

SEQ ID NO: 674592 - DNA, 97 bp, Homo sapiens
gtttagattgctaatggctagcaaaaaagatgatccgggtataataatgaagttaaaagagcagcactccaaggccattgaaaagtattgccgagtt

SEQ ID NO: 674593 - DNA, 82 bp, Homo sapiens
ctggccgaggacatcatgcgcctccgggagaagtctctcagccagggtagtacaaatgcaacagtgctagatgttgctcaga

SEQ ID NO: 674594 - DNA, 75 bp, Homo sapiens
tctaccaagtgcagtttaaatagcaattaagttggaatatgcaaggttggttaagttggcccaagaagacacccc

SEQ ID NO: 674595 - DNA, 100 bp, Homo sapiens
gaacaaattcagtcccttctccatgaaatggtacacgcagaacatggatgctttcattggatttggaggaaatgtgatcaggcaacaagtcaaggataac

SEQ ID NO: 674596 - DNA, 100 bp, Homo sapiens
cctatttctatctatcgttcccctgtttcccttcgaggaggacacgtgcctagaaagagccatgaagtttgcctttgaggaattccacctgtggtaccag

SEQ ID NO: 674597 - DNA, 90 bp, Homo sapiens
gcggccatggcggcgactactgccaaccccgatgatgttgaatttgaagtatcatcggaccgacggactgggaaacccattgctgttaaa

SEQ ID NO: 674598 - DNA, 98 bp, Homo sapiens
gaggggatgaggggagcatgggtgccaaggagtcacggatcggattcctcagctacgaggaggcgctgaggagagtgatgttacagcctttcgattat

SEQ ID NO: 674599 - DNA, 100 bp, Homo sapiens
gaagaaacaaaagtgccaccgaagagtggaatttcccgttggttatgctcatttggaagatagggcctgcactgagctgtggaaacacagtggttgtcaa

SEQ ID NO: 674600 - DNA, 50 bp, Homo sapiens
cactgctgcagccactagtcacacagaaaactttagaaactgttcctttg

SEQ ID NO: 674601 - DNA, 82 bp, Homo sapiens
ttcatttgcggagagctccctggtgactgccagcccaagctgaaacacttttccaggaaatctgccccaatgaagatttctg

SEQ ID NO: 674602 - DNA, 75 bp, Homo sapiens
gttcttacaacatggcagacattgacaagttcttgattattacagacctctttctgaaaagcccggaattggtac

SEQ ID NO: 674603 - DNA, 100 bp, Homo sapiens
aggggatccgacttgccggcagaacttacgctgcgggaccccgggcactgttgctgctgcgggagctggcgcctactatccagcccaaggggtgcagcag

SEQ ID NO: 674604 - DNA, 100 bp, Homo sapiens
ccatatcaggagacacagtatagcttctgacagtggagacactggcattggaacttcctgttctgatagcgtggaagaaactgcctcattgggagccagg

SEQ ID NO: 674605 - DNA, 100 bp, Homo sapiens
gcaggccaagaggaggccagagcccattatccctgtcactcagccccgtcaaggcggataagaaggcggcacaagaaaagatgatccagcaggagcatga

SEQ ID NO: 674606 - DNA, 117 bp, Homo sapiens
aaaaaggtggaagaggtgctgcagctggtggacgaggtggtacgaggggtcgtggccgaggtttatgatagttctcaatctcatgagagcttctcagactggcgaggtgaactactg

SEQ ID NO: 674607 - DNA, 100 bp, Homo sapiens
cttgcacaggaaggaattaaaggttggccttggggaggcactattagaggctgaaactattgaagaacaagaatctccagtgaactgctttagaaaatta

SEQ ID NO: 674608 - DNA, 74 bp, Homo sapiens
tgcatcgtcaagcagggccagaccctcttcatcccctcagttcaaatctgaacatcaatgatgtactagggaac

SEQ ID NO: 674609 - DNA, 101 bp, Homo sapiens
cccggcccagtcctccgggatatggccttctccaaggaccacgagcaactctacatcatgtcagagaggcaggctctagaccaagatagaacagcccttca

SEQ ID NO: 674610 - DNA, 100 bp, Homo sapiens
cttacatcctgcagggggtgctgaaggccctcgactacatccaccacatgggatatgtacacaggtgggagatgccatcccagcagtggaggtgtttgaa

SEQ ID NO: 674611 - DNA, 50 bp, Homo sapiens
gtcgaggggacgattggaatgacagtgcccaccagaagtatgtccgacaa

SEQ ID NO: 674612 - DNA, 139 bp, Homo sapiens
attcctatctttctcccggaagtcaccattggagctcatcagactgaccgtgtcttacatcagttcagagagtggaatgcagtagccctctgggcctgggatattgtggttgataactgtgccatctgcaggaaccaca

SEQ ID NO: 674613 - DNA, 100 bp, Homo sapiens
agacccggaaggcttcaaaggctgtcgcaaggaggaagattggtgctgaagacatggacggcttccaggcagacacggaggaggaggaagaggaggaggg

SEQ ID NO: 674614 - DNA, 50 bp, Homo sapiens
gcggagtcggggctcctgacggtttttggattcaaagcataaaaaccatt

SEQ ID NO: 674615 - DNA, 50 bp, Homo sapiens
agcacttaagcaaacgggaattctcgcggtggctacggaccacaacatgg

SEQ ID NO: 674616 - DNA, 82 bp, Homo sapiens
ttcgccaaagcgacaggagctacagacagtctagcagtgcttccttggagaccctgttagcacttcttcaggcagaaggggc

SEQ ID NO: 674617 - DNA, 90 bp, Homo sapiens
ctggccctgcccgccacggagcaggccgccacccagctccaattgattggtaacagaagatgaagacaacagcataactaaattatttta

SEQ ID NO: 674618 - DNA, 83 bp, Homo sapiens
gggcctcgcgccggctatggccgtgccctggggctgagccctcagagacacctatggctgccgatgaaggctcagcagagaaa

SEQ ID NO: 674619 - DNA, 101 bp, Homo sapiens
tctgttgctctgggacctgcaggtcccggaaggtccttagggaggaccccagacaccggagactgggaaatggctgaccaactgactgaagagcagattgc

SEQ ID NO: 674620 - DNA, 76 bp, Homo sapiens
tggcgctgcagctgcacttgctccgggcgctggcgcaaggaggcctcagcggggcaacagtcattgactccctcga

SEQ ID NO: 674621 - DNA, 101 bp, Homo sapiens
cagatgcagattgggagtcatgagcacttcaacagttggaaccaaggcttcatcattcatcattatgctgggaaggtgctctggggccaggtgccaccggc

SEQ ID NO: 674622 - DNA, 100 bp, Homo sapiens
gcggcggcggccgaaccaaccgagtcggatcctgaccctaaaacctagtgatgccacactcaatcagaaactatgctactgctgaagaggtatattgagc

SEQ ID NO: 674623 - DNA, 75 bp, Homo sapiens
cgagaacgtgcgggaagagaagatcatcgagcatttcaaacggaaaatgtttataggaggccttagctgggacac

SEQ ID NO: 674624 - DNA, 75 bp, Homo sapiens
ggtgacatctgcctgagagatctccaagaattacagctgtccgcaggcttgtccaaaaggaaacatcggaatgac

SEQ ID NO: 674625 - DNA, 51 bp, Homo sapiens
cagagttagctgggagtctaccaaggaactttatattgctgttggaatatc

SEQ ID NO: 674626 - DNA, 130 bp, Homo sapiens
tggacagctgggaattgctgaattagaactgcagaggttcctctacagcaaggaatcagagatcattgatttcttcctgggggcctctctcaaggatgaggttttgaagattatgccagtgcagaagcag

SEQ ID NO: 674627 - DNA, 75 bp, Homo sapiens
gcagagcaggaggccccccgagggccatgctatgatagtggaagcttatccaaaataatagatccagaagaagtg

SEQ ID NO: 674628 - DNA, 83 bp, Homo sapiens
ccggatcctgaggaggcagctgcggtggcagctgctgagttctcggtgaaggacgcgtgaccaaaaccaaagacggccatgaa

SEQ ID NO: 674629 - DNA, 75 bp, Homo sapiens
gccgcaggtggcggcgagcgcggggctcggcccgagctcaggagcaggttcaggagaagtggcacctggtggagg

SEQ ID NO: 674630 - DNA, 74 bp, Homo sapiens
aaggattgaaaatcgctgctaaacattaccaggtgctgtaaactgcaaaccataatcctgtcttaatactgcaa

SEQ ID NO: 674631 - DNA, 100 bp, Homo sapiens
agggccgtgttgacgtggagagataaagccgagcactggtgtaattgaaaagtgatcctctcttcagagatgtcaaaaacaaacaaatccaagtctggat

SEQ ID NO: 674632 - DNA, 74 bp, Homo sapiens
ttcgcgcgcgaacccggctttcgcatttgggaccctgcaggtgggttgccagcgttgatgtggtggagaatgaa

SEQ ID NO: 674633 - DNA, 100 bp, Homo sapiens
gccaagttccccaacggctccccgtcgtcctggtgctgcagcgattgtgcttgagaacagtagtcgagaagacaagcatgaatgtccctttggccgcagt

SEQ ID NO: 674634 - DNA, 75 bp, Homo sapiens
ggagtttcctgtgtccagcgctgccggagccgcctgaggtaccgaggagaaggcattgtatatgggacactagag

SEQ ID NO: 674635 - DNA, 99 bp, Homo sapiens
ctcttcaccagctcttcagatcaatatggcccagattattcatcagcatggctacctgctaatgaatcattgtggcaggccacaactgttccatctaac

SEQ ID NO: 674636 - DNA, 80 bp, Homo sapiens
caagcagctggaagatggacgtactttgtctgactacaatattcaaaagggaggagatatcaccaaacatgatggaacag

SEQ ID NO: 674637 - DNA, 83 bp, Homo sapiens
aagaactgaggagcaccaggagacgcaactcatcggatataacacgtgggaaccggaggagaacatcctggaccccaggctgc

SEQ ID NO: 674638 - DNA, 50 bp, Homo sapiens
ggagactcctgaccctcagaatgctgggcgccgtgtacacagaaggtggg

SEQ ID NO: 674639 - DNA, 83 bp, Homo sapiens
ggaaactgaagactctctgcttttgccacagcagttcctgcagcttccttgagctgcggttggatttctcacgatgtccagtg

SEQ ID NO: 674640 - DNA, 75 bp, Homo sapiens
tacatctcccacaggaagtgtcacacagcagtcaagtatgtcccaaacgtctgggttaagcatctgaaaggccag

SEQ ID NO: 674641 - DNA, 80 bp, Homo sapiens
cgaccggctcctgctcaagatctcagagaaggaggaggtgaccacgcgcgagttaccggtattgtaagaacaagccgtac

SEQ ID NO: 674642 - DNA, 87 bp, Homo sapiens
gtcaggacaattccatttggggaccagagatggacggtcactcagcctatggagtttgttgcatattctaaggacccagacataggc

SEQ ID NO: 674643 - DNA, 100 bp, Homo sapiens
tggctgaaccccacacgggtagaggagccagtgtcctgggctaaacacaagagtgctgattcccactgtaagttacagtgaagaacttctgctatctgag

SEQ ID NO: 674644 - DNA, 89 bp, Homo sapiens
tgatgtttgataaaactaccaacaggcacagagtctgacactggaggagcctttaaaggttttaaaggtttggtggtaccttctggagg

SEQ ID NO: 674645 - DNA, 83 bp, Homo sapiens
cgagtttccgatttaaagctgagctgcgaggaaaatggcggcgggagggaggataagacagagcagcttgtggacaccagaca

SEQ ID NO: 674646 - DNA, 97 bp, Homo sapiens
ccagtcctgacaatgggcagaacgaattcagtgatatcattaagtccagatctgtgatcctgccatgaagcagtttctgctgtacttggatgagtcc

SEQ ID NO: 674647 - DNA, 100 bp, Homo sapiens
cggctcctcggctggtggcaagtattgctgtgggtgctgggacttcccgtccgcggcgtggaggctagagaccgttggatggcagcttaaccttcagatg

SEQ ID NO: 674648 - DNA, 75 bp, Homo sapiens
ctggtgcagccgaggtcttcgggaattccagcgagggtgctggagaatctggtaaaagcaccattgtgaagcaga

SEQ ID NO: 674649 - DNA, 100 bp, Homo sapiens
agatgtgatgttggagaactacagaaacctggtctccctagtgttctacgcagaaatagaagagctgaaactggtgtatccttatcacggcgttctacac

SEQ ID NO: 674650 - DNA, 101 bp, Homo sapiens
gccctgggctggggcaggagccgacgtatttcattagctagtccacgtcagctttttaaggcttctaatatgacccagcgatggcaacacagagagatatc

SEQ ID NO: 674651 - DNA, 50 bp, Homo sapiens
agacattgcattgcctcttatgaaggagttctgtgctgagccgaagttca

SEQ ID NO: 674652 - DNA, 75 bp, Homo sapiens
caaggcgttcaagcgaaaacatgaccgctgagcccatgagctatatcgagaagtttactgactttcttcggctct

SEQ ID NO: 674653 - DNA, 98 bp, Homo sapiens
gaggatggcggagtcggggctcctgacggacgagattgaggagctgcgggccgagatgctggagatgcgggacgtctatatggaggaggacgtgtatc

SEQ ID NO: 674654 - DNA, 100 bp, Homo sapiens
gccaaggaaatgtgatttgactcccttcctggttttgaaagcaagaaagaaacaaaagttcacctctgcgaaggctgccttcgaccagcgcatgaagaca

SEQ ID NO: 674655 - DNA, 100 bp, Homo sapiens
ctcaatcccccagattttcaggggctgagagatgcattggattcagagcatacccgccgcaagctgagatctgtatctgtggacctgaatgttgatccct

SEQ ID NO: 674656 - DNA, 50 bp, Homo sapiens
gtatccttggggcactgtgcaggccatcaagttctctggagaccttcttc

SEQ ID NO: 674657 - DNA, 75 bp, Homo sapiens
aggaagtactgagcctgttggaggaactggcccggaaacaggaggacgggagtacatcaagacctggcggccacg

SEQ ID NO: 674658 - DNA, 75 bp, Homo sapiens
agccggccaattccccccgcaccaaattgcatcgtttcccaggctcttgatggaaatgtgtatgatcatctcaag

SEQ ID NO: 674659 - DNA, 50 bp, Homo sapiens
gttcttaatggcatctagaatgaaatggaagcggagtgtttatttctgac

SEQ ID NO: 674660 - DNA, 75 bp, Homo sapiens
gctggaggcacagctggagcggcgagctctgcagagggtcaccatgaagttcaatcccttcgttacctcggaccg

SEQ ID NO: 674661 - DNA, 80 bp, Homo sapiens
atccagcctgcggagcctgtggggcaggtgcggccgggtgtgtggcaacattacttcatgatgcagccatgaaccctgcg

SEQ ID NO: 674662 - DNA, 101 bp, Homo sapiens
gcccccgggaaatccagcgcagccagagctgggatgacagacgcgacagctggtgaaggacggcttcctggtggaagtgtcagagagctcccggaagctgc

SEQ ID NO: 674663 - DNA, 90 bp, Homo sapiens
cagagatttccacagaaggactgggatgatacaccttttccacagggaattgagttggagtgtcatgggccggcagacatgcctggagtg

SEQ ID NO: 674664 - DNA, 83 bp, Homo sapiens
cgcgcaggacagcgccttcctcaacgacgcggacatggtcatgagctttgtgaacctggactggtcgaattgacaaatcttac

SEQ ID NO: 674665 - DNA, 75 bp, Homo sapiens
ctgccgtcgccgccgccaccatgcccaagagaaaggaggctactcacagtcgaactacaactccccggggtccgg

SEQ ID NO: 674666 - DNA, 100 bp, Homo sapiens
ggatgataaagaaaatgataagaccgaagaaatgccaaatgattcagtccttgaaaacaagggaattgcaacccagtgaagaagttacctggaagtaaag

SEQ ID NO: 674667 - DNA, 100 bp, Homo sapiens
caaaatgtcaacaaattgatgggcttgttgattggtgctggctgtgccctctaccccttgggctgggacagtgaggaagtccggcagacttgtggctaca

SEQ ID NO: 674668 - DNA, 75 bp, Homo sapiens
ctggcattccctgatcctgcggccccagtatgagatccaagccatcatgcacatgggagctggtgaggtggccaa

SEQ ID NO: 674669 - DNA, 82 bp, Homo sapiens
gcagcctccgcggaggagcagaagctgtcccctttcctccaacccaacggcttactttcaaggaagtatttgagaatgggaa

SEQ ID NO: 674670 - DNA, 75 bp, Homo sapiens
cgccgagcacccaggcgactgcctcatcttcaagccaaaagaatgcaatggtgtaaagattccagttgatgccag

SEQ ID NO: 674671 - DNA, 98 bp, Homo sapiens
agtcaagaccctccagcttgcctgtgactacaattgcaaagtagaatttgctttgacacctgatgccaggacaatagtatgttaccatccttctatag

SEQ ID NO: 674672 - DNA, 97 bp, Homo sapiens
caattgttcagttgcaaaaagaaactggagccaccatcaagctgtctaagtccaaagatttttacccaggaagctcttcgtgggcggtcttgactgg

SEQ ID NO: 674673 - DNA, 75 bp, Homo sapiens
gtgggagttcccagttaacaatgaagcagaattctgcttggtcagaatcgtgatggcattgtgttcagcactgat

SEQ ID NO: 674674 - DNA, 100 bp, Homo sapiens
cctgcttttgtggcgctcttgctcctctctccttggcctctcctgggatcggcccaaggccagttctccgcaggtctctcaggcagctgcagagcttcaa

SEQ ID NO: 674675 - DNA, 100 bp, Homo sapiens
cctcagccccccaggtagctgagactacaggagtcaaattgactttatcagctttaatcgatgggaagaacttcagtgcaggaggtcacaaggttggctt

SEQ ID NO: 674676 - DNA, 77 bp, Homo sapiens
aaaaaactgtggctgttggtttgtggaacagacagctccttctttattgttactacatgatcatgctgtggagcatt

SEQ ID NO: 674677 - DNA, 100 bp, Homo sapiens
cgctggacttctgccacagctactccatctgccttggcaaatgcaacattatgtattcttgaacctattatggctgtggaagttgtagctccaaatgaat

SEQ ID NO: 674678 - DNA, 100 bp, Homo sapiens
ctccaggctctccagtttttcgtcgagagattcactatggaatcggatgtgaagagctggcaaaacttgacctgactgtgaatttcattggagagctgag

SEQ ID NO: 674679 - DNA, 100 bp, Homo sapiens
cagctccagacgtggacacattttcttccaatgagtgcctggaagagctgggatgtctggttgagtcctatggcatgaatgtttgccaaccaaccccagg

SEQ ID NO: 674680 - DNA, 95 bp, Homo sapiens
gccaccatcccatttgatcaggtcaacgatgactattgcgactgcaaagatggctctgacgagccaggcctagttccccgagagcgttcagacag

SEQ ID NO: 674681 - DNA, 96 bp, Homo sapiens
agaaacaaaatgtcaacaaattgatggatggaggagatgtataagaaagctcatgctgctatacgagagaatccagtctatgaaaagaagcccaag

SEQ ID NO: 674682 - DNA, 100 bp, Homo sapiens
ctgatattaaaaaggcttataagaagctcgcccgggaatgtgtgaaatggcctttccccgggtcaagccagcacctgatgaaacttccttcagtgaggcc

SEQ ID NO: 674683 - DNA, 78 bp, Homo sapiens
tggactctttcaggttctgaagttgcccccaagtttcctggcagtgtgtgatactgaggaggtgagcttgtttctgga

SEQ ID NO: 674684 - DNA, 100 bp, Homo sapiens
tggaggatattcagtctctctggcaccttggagacagtgcgaggccgaggggtagtgggcaggattacaatactgtgatgagactgttcctgtaactttt

SEQ ID NO: 674685 - DNA, 50 bp, Homo sapiens
ggaaatggcacaagcgcagtggacacgatgaggcgagtggtacgacagag

SEQ ID NO: 674686 - DNA, 50 bp, Homo sapiens
gaaagaccatcaagtttaccacataagctgtggccatgactactgaagta

SEQ ID NO: 674687 - DNA, 100 bp, Homo sapiens
ggcgcggcgactatgacaacctcgaggggctcagttgggtggactacggggagcgcgccgagctggatgactcggacgaaaaagcttgtggtgaaggggg

SEQ ID NO: 674688 - DNA, 83 bp, Homo sapiens
gaggaatgttccctgacaatttcgttaaggagatgttacagcccagatagctcttcagcctgcactgaagttcaatggtggtg

SEQ ID NO: 674689 - DNA, 50 bp, Homo sapiens
gcgcggcggccccgggaccaaggaggacgtggcccagtggaacatcggga

SEQ ID NO: 674690 - DNA, 75 bp, Homo sapiens
ctgtgaacgagtggcctccattgtagacggacagtaatcctctctacaaaagtgccatcacgaccaccatcaatc

SEQ ID NO: 674691 - DNA, 100 bp, Homo sapiens
gatagaaatgagatgcaaagaccacgtgagttacctgcccggtcccagtaagctctacgtctcctccgagagccgcttcaacaccctggccgagttggtt

SEQ ID NO: 674692 - DNA, 48 bp, Homo sapiens
cctccggagtagctgggattacagctgctgctggacacccactcgctg

SEQ ID NO: 674693 - DNA, 100 bp, Homo sapiens
gttcaaggatcttcacacctggatttaggcctacacctgcaactaccccagcttcatcactggtccagctgtaataccagggtacttctccgttgatgtg

SEQ ID NO: 674694 - DNA, 82 bp, Homo sapiens
gccgcagagcgccgaggaggctttcctgctggtggcaaccgcctacgagacactcaaggttggaagcgagatagagaaaaaa

SEQ ID NO: 674695 - DNA, 82 bp, Homo sapiens
ccggcaatggcggcgctgacgagagatgtggaagatgtcaagtttgtgatcaactatgactatccaaacagctcagaggatt

SEQ ID NO: 674696 - DNA, 90 bp, Homo sapiens
ttcagggggtcgaggtcgtggtggaccacgtggtggcaaatcctccatcagttctggaattacatgaatgacagtcttcgaaccaatgtg

SEQ ID NO: 674697 - DNA, 51 bp, Homo sapiens
cgagtacgaacacgagcgagacatgcactggtccgcaagcaggtggtgaac

SEQ ID NO: 674698 - DNA, 74 bp, Homo sapiens
gatccgaccggaagttgcacgctgagccgcggacaccatgcagtcggatgatggcgatgccagtccctccactc

SEQ ID NO: 674699 - DNA, 75 bp, Homo sapiens
cttccacattccagcccaagggaaagtccaagatgtatcggcaagcagtgtaaacggaggacttggggaaaaagg

SEQ ID NO: 674700 - DNA, 98 bp, Homo sapiens
tggccctgacggaggggaggaagtactccaaagattcaggtttactcacgtcatccagcagagaatggaaagtcaaatttcctgaattgctatgtgtc

SEQ ID NO: 674701 - DNA, 100 bp, Homo sapiens
ctttggcagacatcgagaagcataatgacattgtggacagtgacagcgatgctgaggatcgaggaacgttgtctggacaggctgcgggaggagctgcagg

SEQ ID NO: 674702 - DNA, 82 bp, Homo sapiens
actgcaattttggagcagctcctttatggaaatcatactattggactccatccaacttggctgcagccagactgacaggtcc

SEQ ID NO: 674703 - DNA, 101 bp, Homo sapiens
ataatgcattggaacatgacatgagattaagctgggatctagcaattgggaggcagcagacttgggtaatgaagagagaaaacaaaagttcttgagactta

SEQ ID NO: 674704 - DNA, 82 bp, Homo sapiens
atatgccagcaacaaggtcatcactgtgttagtgggccgtttgagcaaggaagacattgaacgtatggtccaggaagctgag

SEQ ID NO: 674705 - DNA, 100 bp, Homo sapiens
aggcagaaagtcttcctacgaccgtcttttcccttagaggcaccagccatcccaatggaaattgcttcgacaggaactgttgaagtacctggaatacttc

SEQ ID NO: 674706 - DNA, 83 bp, Homo sapiens
aggagacctagtggaagtggttctttcagatcagccgcatcgagtatatccactccaagaacttcatccaccgggacgtcaag

SEQ ID NO: 674707 - DNA, 80 bp, Homo sapiens
tttgtaaattctccttttaccaagacaatgcagatcttcgtgaagactctgactggtaagaccatcaccctcgaggttga

SEQ ID NO: 674708 - DNA, 75 bp, Homo sapiens
gatttcttcgaggtggagtcggagctgggacgtggccacagatgtctttaattccaaaaacctggccgttcaggc

SEQ ID NO: 674709 - DNA, 75 bp, Homo sapiens
ctccccctaaaccagctcacagaaatagcaaccctgtcattggatatgaattgtctcccacggcagcagctaact

SEQ ID NO: 674710 - DNA, 100 bp, Homo sapiens
ggagggacggcagtctcgcgcggcaccgcatcagcctgctcaaccctttaaatttacaatttccgaatcctgtgatcggattaaggaagagtttcagttt

SEQ ID NO: 674711 - DNA, 71 bp, Homo sapiens
ctgggaagctgaaggcagaaggttccgagatcaggttggccaaggtgcctgagatcatcagctccatccgt

SEQ ID NO: 674712 - DNA, 143 bp, Homo sapiens
ctcggagaagccgctggcggcagtcacttgtacagcgccggtcaacatcgcggtcatcaagtactggaaaatgggaagtccctctgcctaaagtacgtgcccagggagaaacagaagtattaaaagttattcgaacaggaaag

SEQ ID NO: 674713 - DNA, 100 bp, Homo sapiens
ctcggctgtacttcgcagccgtgacctgcagctggcgggcgagctggagcggcagctgctgcaggccaaccccatcctggaggccttcgggaacgccaag

SEQ ID NO: 674714 - DNA, 100 bp, Homo sapiens
gggaaactgagcatctgggcgattccatctctgaagcaacaaggggaatggggtcaaaatgagcaggtattgatgaagatgaccctactgctgatgatac

SEQ ID NO: 674715 - DNA, 75 bp, Homo sapiens
gcggcacatggaacagcatgtctccttcaagacattacaagaagcggtgccaaggccgcatgcggaagcacgtgg

SEQ ID NO: 674716 - DNA, 100 bp, Homo sapiens
aaggcagcgaggtggagagcgattgtgttcaattagaccttcaggacctctccaagaagcctccggactggaagaactcatcattcttcagactggaatt

SEQ ID NO: 674717 - DNA, 100 bp, Homo sapiens
atgaagtattaattcttccactgatatctcaaaaggtgatctggacaaaggaacaggtatctcaggagcagtctcacaggtgctggacagcctggaagag

SEQ ID NO: 674718 - DNA, 83 bp, Homo sapiens
cagattcgcagtggtcgcttcttctccttgacctgcttttttaaaggctgcagaaaacttcactcttttggttaagaacaaca

SEQ ID NO: 674719 - DNA, 98 bp, Homo sapiens
gtcatcgggaagatggaggcacggctgaatgagcagagccggctgctggagcaggggctactgttcccgtagacaaagacgtcttcgaaaaacactca

SEQ ID NO: 674720 - DNA, 100 bp, Homo sapiens
ttcaaaagaattggccaaagaagttgagaaaatgggagcagttttcatggatgcccctgtttctggtgggagaagcatgacactggccaacactgcgtcc

SEQ ID NO: 674721 - DNA, 74 bp, Homo sapiens
cccggcgctttccccgcaagatggacggtttcgccggcagtctcggaccgcagctgaatgcacagctagaaggt

SEQ ID NO: 674722 - DNA, 90 bp, Homo sapiens
ggctccacctgtgccttcacggaatgtatcctccgaagctatggcctgaagacgggattctttaggggcatatgggggcctctcagaccg

SEQ ID NO: 674723 - DNA, 98 bp, Homo sapiens
tttgaggggtctgaagactgaaagagtcgaatggtttgttggcagggagtggagcaactgctgtagtccaagcagcttattgtgcccctaaaaaggag

SEQ ID NO: 674724 - DNA, 87 bp, Homo sapiens
ctgcgctggccgggggcgcgggcggcggcgccggcaggaaggagcatcagatccatgctgctgctgactcggagccccacagcttgg

SEQ ID NO: 674725 - DNA, 100 bp, Homo sapiens
ttcttgaaccaggtcatgctccaaatgtgaaaggtgtagcagtcactcggcctacacccacagcatcgaccttgtgaacccagcgacctgactgccttgg

SEQ ID NO: 674726 - DNA, 100 bp, Homo sapiens
tccgtgtgcagttccaggacatgtgtgcaaccattggcgtggatccgctggcctggatgccagtaaaactgtgagcagcccacccacctccccaagacct

SEQ ID NO: 674727 - DNA, 75 bp, Homo sapiens
aaggattccaagtaactcttatttggcacggatgggcagaagcctttgcaggtatcagaagttcacatatcaaat

SEQ ID NO: 674728 - DNA, 136 bp, Homo sapiens
gagcgctcgaggtcgtatgaacgcacaggccgtcgctatgagcgggaccaccctgggcacagcaggcatcggagggttgtgagtcccggcccagcccctccacccccctgcccccccgatgcgaccatgggctctg

SEQ ID NO: 674729 - DNA, 100 bp, Homo sapiens
gacaactggtgccggagggacaaaaagcaatgcaagagtcgctttgttacacctttcaagtgtctcgaactgataaatttcaaacggaagagagtggcag

SEQ ID NO: 674730 - DNA, 82 bp, Homo sapiens
ggtggattgactacggcaaagtggccactcagggtcccctggaagtgacgctgactcagccagtgaggagcgggcctgtctc

SEQ ID NO: 674731 - DNA, 75 bp, Homo sapiens
ataccatatcagatgcctcgcagagcaccaggcccaccgtgaaagtgagcatttgtcctgtgctttcacattctt

SEQ ID NO: 674732 - DNA, 100 bp, Homo sapiens
agagtcttgtccacagctggcaaattcagtgcagatcagggcaattgaaggaacagactaaaaatcgtgtcctggaaggaaactacaggtactaccaggg

SEQ ID NO: 674733 - DNA, 83 bp, Homo sapiens
cgccctctccaccgtgacggccatcattgacgggacgggctctgtaggatcacccttggaaaccaactggatgggatccacct

SEQ ID NO: 674734 - DNA, 100 bp, Homo sapiens
gaaacagagtatggctgcagaggatccatctgtcttagcaaggctgtcatcacattggtagctggcagtgttgtgatggcttttgaagaagtatgcccgg

SEQ ID NO: 674735 - DNA, 90 bp, Homo sapiens
cgtgctgcttatggcggcgctggagagggggcgctgagctgttgggagtcctccctgctgctgtgtggacgacacgtgggcacaggcaga

SEQ ID NO: 674736 - DNA, 90 bp, Homo sapiens
gaagattccaagttcaggagaactcgaccggtatctgctcgctcgtgggaccacaatgaattctttgcccagtttgctggtgaccacact

SEQ ID NO: 674737 - DNA, 100 bp, Homo sapiens
atcagagaagatggcatgcctggaggccggaataagagcattgggccagtccagtcctcctgcatatgcccaagaggattgggagtggaatggacaccag

SEQ ID NO: 674738 - DNA, 75 bp, Homo sapiens
tttgccacccctcagtatcggggagtaagagcaggcatgcccaagagaatcgtaaatgcaaaaattgcttgcctt

SEQ ID NO: 674739 - DNA, 100 bp, Homo sapiens
tttcgctttgatgaatcaggtcccgaaagtgctaaaaaggcagcagtgaggatgccagagttcatgggtttctagaagacaagttttcaactgcagatac

SEQ ID NO: 674740 - DNA, 75 bp, Homo sapiens
gagcagaagatattcacagacatgcggaatttgaggctggttggaaggaaaatcatgcaacattcatgagcgaac

SEQ ID NO: 674741 - DNA, 100 bp, Homo sapiens
ggacctgcacgacatgctggcctcgctggctatcatggtgaacttacttcagattgtgcgggaccactgggttcatgttcttgtccctatgggatttgtc

SEQ ID NO: 674742 - DNA, 90 bp, Homo sapiens
gcccgcgggacctgacagccgggtcagagttccagctattcttcagatgctctggattttgagacggagcacaaattggaccctgtattt

SEQ ID NO: 674743 - DNA, 100 bp, Homo sapiens
atatccctgacccggagagagttttttacactggccagggtgcgatagcgaactcgctgacctgcgtgcagctgcacaagagagctgagaagatcgccgt

SEQ ID NO: 674744 - DNA, 90 bp, Homo sapiens
gaccaccgtggagagcgcggtcccagcccggccactgcggatccctgaaaccaaggtgtcttttatgaataatcaaaagcagcaaaagcc

SEQ ID NO: 674745 - DNA, 50 bp, Homo sapiens
cagatggtggctcccggagtccagggatagctgggagtatggccaccctg

SEQ ID NO: 674746 - DNA, 82 bp, Homo sapiens
gtttcatctgtggatggagtattggctgtgtctgcaccagaagaggctcccacagactctgctcccgagaagccaagtgatg

SEQ ID NO: 674747 - DNA, 100 bp, Homo sapiens
acggcccctttggcggtctcggggctgctgggctgcaagcagtgcggcgggggccgcgaccaggacgagctcaggaatcttgcttttaagaaaattcccc

SEQ ID NO: 674748 - DNA, 75 bp, Homo sapiens
aagacaaaaggaatcctaccagagggtgatgaagaagatgaagctaataaaattgaggccttacataaaagaagg

SEQ ID NO: 674749 - DNA, 80 bp, Homo sapiens
cgccgcgcgtggggctgtggtggccgcggctctcagttaaagccttccatctgaagtatgatgaagttcgtctggatcca

SEQ ID NO: 674750 - DNA, 83 bp, Homo sapiens
ctctacttaataaactgacaagtaagaatgaacctctacttaaacctggagacagaacatcaacgagtgtgatgaggccgagg

SEQ ID NO: 674751 - DNA, 100 bp, Homo sapiens
agacgttccgctttgaaatgcagcgggatttgcctctactcaatagtccccccagctttgtgtgctggtctcggggcttcatggagatgaatgggcgggg

SEQ ID NO: 674752 - DNA, 78 bp, Homo sapiens
ctcgcctcggatttgggggcttcctcactcgtggctttccgaaggctgctgccctgtatgatgagattcgtcagtttc

SEQ ID NO: 674753 - DNA, 98 bp, Homo sapiens
aaaggaagtaatccctagtgtcagcagattcagcggtactggtgtataataggtagcccagtgtgtctcaccaaagggacctcttgcttgttcgagaa

SEQ ID NO: 674754 - DNA, 76 bp, Homo sapiens
gtcccagaagatggcggaggcggggtggccataaaatgcagtaaaaacaaatccagttcccaagaagctgtacaaa

SEQ ID NO: 674755 - DNA, 100 bp, Homo sapiens
gctgggttccttccagtttggatatgacattggtgtgatcaatgcacctcaacaggcaatgggccggatctttgtgggcctttgccaggtgggtgcctgg

SEQ ID NO: 674756 - DNA, 100 bp, Homo sapiens
cagaccccaccgcagagtctgcagcagcccgccccgcccggcagcgagcggcgccttccaactccgggcacgtgtggttctcaaatataggcattctgat

SEQ ID NO: 674757 - DNA, 50 bp, Homo sapiens
agatttatcaactttgttgtcaaactaggagtccaatgtgctgattgctg

SEQ ID NO: 674758 - DNA, 74 bp, Homo sapiens
ccgctacttgacattggaccaggtgtttaaggacaatctctatgggaagcagaaggcaaggaccccggtcattt

SEQ ID NO: 674759 - DNA, 87 bp, Homo sapiens
tgagtcaaagaagatgcctcgaactaaacaaattcatcccagaaatctaagagtaagactttgaccccgacgcaggcttcagtgatt

SEQ ID NO: 674760 - DNA, 85 bp, Homo sapiens
ttgcctacaagcccatggaaggaaactttgaagaggttccttttttgccaggagattcagaccttgatcagctaacaagaatatt

SEQ ID NO: 674761 - DNA, 100 bp, Homo sapiens
acaccacataacccatctgagcctcatcttcctcatctgttttgagggtaagaagcgcaattccacactctacataaccatgttactcattgttccagtc

SEQ ID NO: 674762 - DNA, 100 bp, Homo sapiens
gggcgcgtgaatcctgtggagtacagcatcgtgatggaatttctcgaccctgggtggggcagctgcagctctcccacaatctgagtttggtgatcctggt

SEQ ID NO: 674763 - DNA, 90 bp, Homo sapiens
ttcaggaatgccaggagcaggatctgcagaagacgcagggctcaaggttggtcaaagaaaaagtgatgtatgaaaaagaggcaaaacaac

SEQ ID NO: 674764 - DNA, 100 bp, Homo sapiens
aaaccattattgcatgcatagaaagccatcagttccaagcaaaaaatttttgttatcaggaactgttgccgttattacatcagatgggagaatgattgtg

SEQ ID NO: 674765 - DNA, 100 bp, Homo sapiens
tcagaaagtatggaaagttttgcagaagagatgaagcatctggtttttgttatctcaatgatgctgtcctgggaatattacgattgcgacggaaatttga

SEQ ID NO: 674766 - DNA, 50 bp, Homo sapiens
ttaaagtctaactctccaaatgaaatacaactggagcacgcaaagcaagc

SEQ ID NO: 674767 - DNA, 97 bp, Homo sapiens
gaggctcctgggggccggggctccgaggcaggtgacagcagggacatgtctcgggagatgcaggatgtagacctcgctgaggtgaagcctttggtgg

SEQ ID NO: 674768 - DNA, 80 bp, Homo sapiens
ttatgcaacatgctcagcaggagcttcatcaacgatatatgtcagatctaaaggatttaagtgccctgtatgctcaaaat

SEQ ID NO: 674769 - DNA, 100 bp, Homo sapiens
gggctgagtaaatgccggcttaccatctctaccatcatccgggccttcctgatgcgcttgcctgctccctggtctctctgcatggggaaggagtgttccc

SEQ ID NO: 674770 - DNA, 90 bp, Homo sapiens
gcagatggcagggagtgataagttgatcatggccttgccaggttggtgacagtatattgtgagcatggtcataaagctgccaaaatcaac

SEQ ID NO: 674771 - DNA, 100 bp, Homo sapiens
tgagcacaagaagaaagtcctgaagcggctgtcgctaagcccagccctgcagagacgtctcccacaacctgctccgggcgctggacgttgggctcctggc

SEQ ID NO: 674772 - DNA, 100 bp, Homo sapiens
gagaaatcgaggagctgcggctctaccccccggaaggcaaatttctggagatgtgcaatgatctcttagctagagtggagccaccacttcgtagtgtttt

SEQ ID NO: 674773 - DNA, 100 bp, Homo sapiens
agggagacgcccgaggacagggaggtgcgtctgcagctggcgcggaagaggctgttgctgtcatggttgccaccagagaaggatctatccgctattggcc

SEQ ID NO: 674774 - DNA, 50 bp, Homo sapiens
ctggtgagtcggtgacctggcctgtgagcttgaaatggcgattgaaaacc

SEQ ID NO: 674775 - DNA, 96 bp, Homo sapiens
ggccggccgacccttcctgtcgctgacggcgactgcgggaggccagattacagagttgaaggctgattttcagtaccaggaatcgcagatgagagc

SEQ ID NO: 674776 - DNA, 90 bp, Homo sapiens
aagaggaccctgcggactactgcaaaggtcccgcggcagtgctggtggccatggttcccgtagccagaaggagttgcccacagagccccc

SEQ ID NO: 674777 - DNA, 76 bp, Homo sapiens
ccaatacctgcaaatgggcaacaggccagcagccaaaggcaacaaaccatggatttctcttccccgaggaaagggt

SEQ ID NO: 674778 - DNA, 90 bp, Homo sapiens
tggatctggaagctgagggcacgtgtttgcggttcagccctttgatgaccgcagcaggttttggctggtgattaaggaagatggacacat

SEQ ID NO: 674779 - DNA, 82 bp, Homo sapiens
aagcaacagtgctggtgtcgccaggctctggagcagttccatcagctcagccaggtcttgttttaaaatcaaagatgggaaa

SEQ ID NO: 674780 - DNA, 75 bp, Homo sapiens
ctgggcctaggtctgcgccctgtatgcagctgacccccaggataagcactggctggctgagcagcatcacatgcg

SEQ ID NO: 674781 - DNA, 100 bp, Homo sapiens
tggtgtctggaccagctagagaccctacagaccaggcactccgtcagtgagatggcctccaacaaggttaatgactccagagagtaagatcagattcgtc

SEQ ID NO: 674782 - DNA, 100 bp, Homo sapiens
ccacccccagctcttcagcattgtccgccaggcctgtgtccggagcctgagctgtgaggtgctggcccagcagggggagtacagtgaggccatccccatc

SEQ ID NO: 674783 - DNA, 97 bp, Homo sapiens
gcagggctacgcggccaagactgtgttcgaggcccagtactacggggagattggcatcgggacgcccccccagtgcttcacagtcgtcttcgacacg

SEQ ID NO: 674784 - DNA, 50 bp, Homo sapiens
agcctcccgagtagctgggtttacaggatcttttgccagaaatgagggca

SEQ ID NO: 674785 - DNA, 83 bp, Homo sapiens
gagagagccctttgcaggatgcagaagaagccaaaaacattctggtaagactttgaccccgacgcaggcttcagtgattgccg

SEQ ID NO: 674786 - DNA, 73 bp, Homo sapiens
cggcagactggtgacttcacttttgagtgcaactgccttccaggacttgcaattgtgaccaaatatattacaa

SEQ ID NO: 674787 - DNA, 125 bp, Homo sapiens
ctggagaacagcctcacttctttgattgaatacttacataatgcattggaacatgacatgagattaagagtgcctggaagagctgggatgtctggttgagtcctatggcatgaatgtttgccaac

SEQ ID NO: 674788 - DNA, 98 bp, Homo sapiens
cttcggccttggtcccagcgccttcccacggagcagcactcttcaccctgcacagccttgttaggagagggctgaacccccctcatcgtgtcaagtca

SEQ ID NO: 674789 - DNA, 103 bp, Homo sapiens
tgtccctttgcctcatcccaggttgccttggaaaatgccaacgccgtgtctgaaggggtcaccagtcgttggcacaccaagaagctgccccgcaagacccacc

SEQ ID NO: 674790 - DNA, 89 bp, Homo sapiens
tcggcatctagtctttccgcttcttgaatttctctctgtaaaggagggacagatatggcttttctaaagactgctttggaaatggcaag

SEQ ID NO: 674791 - DNA, 82 bp, Homo sapiens
ggacgagatctagaatcaactgagagagatgcttaaaaatcaccagttactttaatgagactcagtggcatttgaggatgtg

SEQ ID NO: 674792 - DNA, 100 bp, Homo sapiens
gccagtatctgtgtcgccgccgcccgcggcgtccccggtttggtgttgcggcgcccaccttcgggaggatcagatgagacaccaattattgcggtgatgg

SEQ ID NO: 674793 - DNA, 96 bp, Homo sapiens
gtccagcctccgtgcagccgtggcgtgcaggactcgggtggctctgaggtcgcctggggaccccagaagatcacagctgggctggacccagtgggg

SEQ ID NO: 674794 - DNA, 51 bp, Homo sapiens
ctgggacgtccggttgaccgcggttgtgggctgcacactgcagaaagatac

SEQ ID NO: 674795 - DNA, 100 bp, Homo sapiens
ctggtctctcacttcaggaaaatctactgccatagttcacatacagctaacccgtgatgctgatgagcgagagaagtggatccatgccttagaagaaaca

SEQ ID NO: 674796 - DNA, 98 bp, Homo sapiens
aaaaagaaactggagccaccatcaagctgtctaagtccaaagatttttacccagaattcgtacagatgatgactgcaaaatgaagacctactttcaac

SEQ ID NO: 674797 - DNA, 100 bp, Homo sapiens
ttgacacggctttggaaacgacgtcatgtgttagaaaaatggctacaaacttcctagcacatgagaagatctggttcgacaagttcaaatatgacgacgc

SEQ ID NO: 674798 - DNA, 71 bp, Homo sapiens
tatgccctgttggttccaatgctgggattggctgcttttcgaaccagtgaccttccgggatgtggctgtgg

SEQ ID NO: 674799 - DNA, 97 bp, Homo sapiens
gtttgatccagcaatattcactattggcaagcctgttcttggaatttgctatggtatgcaggatgtatggcttatttcaaacatcattttactttgg

SEQ ID NO: 674800 - DNA, 75 bp, Homo sapiens
atcactgttggggacttggaaggctgtatacattataaagttgactggggctgtggctgagatgtcacatggcag

SEQ ID NO: 674801 - DNA, 99 bp, Homo sapiens
ctagcgttcgccttcagccaccatggggaatgggatgaacaagctgaagaaatcaggggagaaacccctgcttggtggaagcctgatggaatatgcaat

SEQ ID NO: 674802 - DNA, 82 bp, Homo sapiens
cagagtcacacacggtcctaagagctgggcaccaggaagcgaaggctgcaattctgtggtgttcttggtcacacatttatgg

SEQ ID NO: 674803 - DNA, 95 bp, Homo sapiens
tttctccaaggtttgaaaagcagctggcctgcaagatatgcacccaatgtccagggagcgtgcaaaatttgtcaaaagtggccttttattgtaaa

SEQ ID NO: 674804 - DNA, 100 bp, Homo sapiens
ctggctggatggcaagcatgtggtgtttggagaggtcaccgaaggcctagatgtcttgcggcaaattgagaccatcatcaaagaggggatgctgaccaaa

SEQ ID NO: 674805 - DNA, 75 bp, Homo sapiens
caggttccctacacggtctcctgggtcaagatgtgtcttgctgaatcagggctctcttatccctgccatcgactt

SEQ ID NO: 674806 - DNA, 75 bp, Homo sapiens
cttgcagaaatcacattggaccctcctcccaactgtagtgacaatgtcagtgcctactgcctgcatattgctgag

SEQ ID NO: 674807 - DNA, 100 bp, Homo sapiens
tccgagtgccgcgcagagctcaaggactacctgcggttcgccccgggcggcgtcggcgactcgggccccggagaggtggtgaggatccaggaaagccaag

SEQ ID NO: 674808 - DNA, 90 bp, Homo sapiens
gagggcttcagtacccgagacctgctgaaggaactcactctgggggcctcacaggccaccacggaattacatgaacgacagccttcgcac

SEQ ID NO: 674809 - DNA, 97 bp, Homo sapiens
taagcgatgatgaatcttttcttcttgaaattaggcagactcttcaaaacgcactcattcagtttgctactaggaacccctgtttgctgctagagtt

SEQ ID NO: 674810 - DNA, 75 bp, Homo sapiens
cgccgcttgtgctgcagccatggcaccgcatcagcctgctcaaccctttaaatttacaatttccgaatcctgtga

SEQ ID NO: 674811 - DNA, 75 bp, Homo sapiens
cacctgtttctgtcctctaggaaccactggaatctactgtgaacaagcaattctgtggtgttcttggtcacacat

SEQ ID NO: 674812 - DNA, 90 bp, Homo sapiens
cttcggtggactccttcggcagtccacccaccgccgccgcctcccaggtacaggtttgcagattccgccagcagcacagcaagctctaca

SEQ ID NO: 674813 - DNA, 100 bp, Homo sapiens
ggacttgacagagaatgggcaagacctcaggaggaccctgactcatatcaaggaccagaaaggagggaagacaaaggcgctttggctaagctggtggaag

SEQ ID NO: 674814 - DNA, 50 bp, Homo sapiens
tcgcggcccggagctcgggaccgaggattccacagatgttggtgaggagg

SEQ ID NO: 674815 - DNA, 74 bp, Homo sapiens
gtaggagacatcgtagtgggacgaatcacagagtcctcctccgcctcctcctctctgcatgcgcgtcagagccc

SEQ ID NO: 674816 - DNA, 90 bp, Homo sapiens
aaggcccgcggaacagcggaggacgaagagcgggacccgagccctggtgtcatggagaaactccagctgggcccagagattctgcagcgg

SEQ ID NO: 674817 - DNA, 50 bp, Homo sapiens
cagaggctcccggtgtccaggcagggtgaaccatctgaaaagaccagtca

SEQ ID NO: 674818 - DNA, 92 bp, Homo sapiens
ggaaaacctaaccatgaagacttgaacttaatacagcaagaaagaccatcaagtttaccagtgcatggctgcctcctaatcccatagtccag

SEQ ID NO: 674819 - DNA, 83 bp, Homo sapiens
ctgactcttgcgccgccgccttccacccggagtccagttacaacacagggatcacaacaaacacaaccgccacagaagcacta

SEQ ID NO: 674820 - DNA, 74 bp, Homo sapiens
tcagcctccaggctctccagtttttcgtcgagagattcactatggaatcgggatctgaaacttgcccacccttc

SEQ ID NO: 674821 - DNA, 88 bp, Homo sapiens
aagcacaaagagcacatttttttgcagacgagccagatgaccaggatgccccagatgagcatgagccctctccatcagaagatgcccc

SEQ ID NO: 674822 - DNA, 87 bp, Homo sapiens
tgaattaaaggagccttttgacccaatcatatagtggggctcagggccagtgctcactcttattgccgatcaaagtccagatctcca

SEQ ID NO: 674823 - DNA, 80 bp, Homo sapiens
atcatggagccgctggggtcccttttgcctcagatactattttgaagatgcagagaggtgttcataaagagcaatatcag

SEQ ID NO: 674824 - DNA, 99 bp, Homo sapiens
gctgctgaccctggccttcaaccccgagccgctggtgctacaggccaagtcctgtatctgccatgtctgtggcgtccacctcaacaggctgcattcctg

SEQ ID NO: 674825 - DNA, 82 bp, Homo sapiens
aagaattttccaaatgaatttgcaaaacttactgtagctggagtacagtggcgcaatctcggctcaccacaacctccgcctc

SEQ ID NO: 674826 - DNA, 82 bp, Homo sapiens
cgagaacctcctgctggatggcaacatggacatcaagctggcaggcggaaggtgctctaccagcgtgcacccaggaatatcc

SEQ ID NO: 674827 - DNA, 50 bp, Homo sapiens
aagaacttgatgtatctgtaagccattcaaactcctccccacgacactct

SEQ ID NO: 674828 - DNA, 75 bp, Homo sapiens
cgcagaccagacttcgctcgtactcgtgcgcctcgcttcgccgccgccatgatcctgctggaggtgaacaaccgc

SEQ ID NO: 674829 - DNA, 74 bp, Homo sapiens
gcgctgaagcatcggaatggaggaacaatcagtggattatagacataagttctccttgcctagtgtggatgggc

SEQ ID NO: 674830 - DNA, 100 bp, Homo sapiens
gtgcgcctgggggcaccgctgccgttccgagcccgagcgggaagaagttccgcagcaagccgcagctggcgcgctacctgggcggctccatggacctgag

SEQ ID NO: 674831 - DNA, 82 bp, Homo sapiens
ggaacaggtaccggctgggccggaagatcggcagcggctccttcggagacatctatctcgattcccaacttcttctggagcc

SEQ ID NO: 674832 - DNA, 90 bp, Homo sapiens
gcctggacggaccctcgccagtgctctgcgcagaaaggcctaaagaatgtatttgacgaagcaatattggctgccctggagcctccagaa

SEQ ID NO: 674833 - DNA, 75 bp, Homo sapiens
cgccgcgcttctgctctcagtgtcccggacttcagtggagaccatcctgggcctcacaggagcgaccatgggaag

SEQ ID NO: 674834 - DNA, 100 bp, Homo sapiens
ggcctggcgacccggtggactcggcccgcggcggcgcgctcacccgccccgttcaggtacggttcctggagcagcagaacaagatgctggagaccaagtg

SEQ ID NO: 674835 - DNA, 100 bp, Homo sapiens
agttggaacacagcagagggtgtgtaataaaatacagggctgaaagacacacagaagtcttcatggatatagttgatacatttaatcatttaattcctac

SEQ ID NO: 674836 - DNA, 74 bp, Homo sapiens
tcaatttaagcctgatctaacccctagaaacaggtttgtgttgctagttaagctagcttgtattgttgtggctt

SEQ ID NO: 674837 - DNA, 100 bp, Homo sapiens
atcctgtccatcgtgtgcctgatgatcacgcagctggctggcttcagtggaccaacaggtgatttggcttctgcacagttaggaggagcaccaaaccgat

SEQ ID NO: 674838 - DNA, 100 bp, Homo sapiens
aacctctacaacgaaggtgaagccacggaagataagctcaccatggatgatgatatcgccgcgctcgtcgtcgacaacggctccggcatgtgcaaggccg

SEQ ID NO: 674839 - DNA, 100 bp, Homo sapiens
ggggctgtcgcccgaatgcaggaagaccgtgatgggagctgcagcacagtcgggggtgtaggttatggggatgggcttaggtcacgagcaaggatttgga

SEQ ID NO: 674840 - DNA, 100 bp, Homo sapiens
tgattgatggccatgcaggagaaatatccaactgaggggatctctcacgtcacttcaccgatttattgagagaacattcaattgatggcactggctgggc

SEQ ID NO: 674841 - DNA, 100 bp, Homo sapiens
agatacagggcagaggaaaatgcaagaagactgatggagcaggcttgcaatattaaatcccatgaagctgaggtcttgaagcagctggctgagaaacgag

SEQ ID NO: 674842 - DNA, 75 bp, Homo sapiens
cgggacctgggctgggaacccgcggtggagcgggacacgaacgtggtagctacagcaagctgggtagcaggcaga

SEQ ID NO: 674843 - DNA, 100 bp, Homo sapiens
catattttcatacattactgcagtaacactccaccatatagacccggctttaccttatatcagagcttgggaaagtcgaggtgacggtgtttgaccctga

SEQ ID NO: 674844 - DNA, 100 bp, Homo sapiens
caagtgggacaactttctggcttttgaaaggctccttcttcaggactcagcccaaaaccatgtttgcccaagttgaatctgatgatgaggaagcaaagaa

SEQ ID NO: 674845 - DNA, 76 bp, Homo sapiens
aactgaacagccagaagaaaccttccctaacactgaaaccaatggtgaatttgatccatcacaaagcgaagtcatg

SEQ ID NO: 674846 - DNA, 83 bp, Homo sapiens
gtgttaccggaacggcggcgacaagggtgttcccgaactagagtgggtgattgaattactcagatatgaagatcatcatctag

SEQ ID NO: 674847 - DNA, 98 bp, Homo sapiens
tggggaacctgctcaaagccctgggtcgcttggaagaagccaaggcctgctatttaccctgggttatccttggattcaactatatcatcggaggctcg

SEQ ID NO: 674848 - DNA, 50 bp, Homo sapiens
ggaaagaagttgcaaaacactgggaaattcttggtgcatcactttctgca

SEQ ID NO: 674849 - DNA, 88 bp, Homo sapiens
tgacctgaccatggacgacattcgaaggatggaagaagagacgaagagacagctggatgaaacatatctgaagagatggattaagaat

SEQ ID NO: 674850 - DNA, 90 bp, Homo sapiens
cctgctgctgctggcgtcgacagggtcctgccctccggaggagcagcctcgaggctggtggttttcagagcaggaggccgacgttttctc

SEQ ID NO: 674851 - DNA, 83 bp, Homo sapiens
ccggaccgcgcctcaggctcccccagtaagaagacatgttggataacaagaagaggtgtagagtttgcatatatcaactgtgg

SEQ ID NO: 674852 - DNA, 101 bp, Homo sapiens
aagtggccccagcccaggaacgaatctctcaggctgcatcaggatgaatgatgacccaagtatggaaattagctaatcatcagctggataaagagaaagca

SEQ ID NO: 674853 - DNA, 51 bp, Homo sapiens
cgaagtgacctcagcagggcatccaggttcgtcttggcaccagacataagg

SEQ ID NO: 674854 - DNA, 83 bp, Homo sapiens
tttcacattgcccacttatatgaaacccagacctgcctagagctggaacgttacctccagagcgagccctgctatgtttcagc

SEQ ID NO: 674855 - DNA, 50 bp, Homo sapiens
gcgctgcctgggctccgcgcagccgccacagcctggcagctctgatcagg

SEQ ID NO: 674856 - DNA, 100 bp, Homo sapiens
gtccccatcttgggcattcatgggggcgcatctatgatcatggctgacaaggtgaatggaattgacttgagaaaggccacacatgatgaagcaatcaatg

SEQ ID NO: 674857 - DNA, 50 bp, Homo sapiens
gagctttgcgggaaagcagcggtcaaaatgcagatcttcgtgaaaaccct

SEQ ID NO: 674858 - DNA, 98 bp, Homo sapiens
agagggagagagggagagtgacagcagcgctcgtaagactttgaccccgacgcaggcttcagtgattgccgcggatcagaagcctgagcactttggct

SEQ ID NO: 674859 - DNA, 100 bp, Homo sapiens
tcccgcgggccaggccgtggaggctgctgagaactagccctagacctctgcgtgagggttcttctgccgaagacatcaccagtgtgtggagcctgccaca

SEQ ID NO: 674860 - DNA, 135 bp, Homo sapiens
gtccaaagcagtcgtaagaagaggtcccaatcccccactctttccgccctaatggaggtctccagtttcggttgctgcttttgctcagaggacatccatgaccctaatggtctttttgttcaagataaagtgatt

SEQ ID NO: 674861 - DNA, 100 bp, Homo sapiens
ctaaatgtgttaccataccaagttggctggggaacagaccagggaattggtggatttggagaagagccgggaattaaatcacagctaatgaaccttattc

SEQ ID NO: 674862 - DNA, 113 bp, Homo sapiens
aagatgcaagcggtttgggaccttgaacaaggcaaatatggttttgggagagtcccgtattctcagagtaaaagttgtttctggaattgatctcgccaaaaaggacatctttg

SEQ ID NO: 674863 - DNA, 76 bp, Homo sapiens
tccgactgttgaccttgatgctcaagggagagccagagcaaggtatgaaaactttcaaagacgactagcacagaac

SEQ ID NO: 674864 - DNA, 75 bp, Homo sapiens
aaattacaaggtcgttgaacaaggcagtgaaatcaactgtgcagaccatcactgttggaggagtgagcacatcac

SEQ ID NO: 674865 - DNA, 100 bp, Homo sapiens
cggaaacatggcactgttgcctatcagaagtcaattcaaaggacctgcccccagagagaaaaacatagctctgctggcagaaacagctctgagattcctg

SEQ ID NO: 674866 - DNA, 82 bp, Homo sapiens
cggctgcgggaaatcgggctgaagcgactgagtccgcgatggaggtgtgaacccacatccctgcccccagggccacctgcag

SEQ ID NO: 674867 - DNA, 75 bp, Homo sapiens
ctcacacaccggcctcagcccgcaccggcaatgagaagcacgaccttcatgttacctcccagcagggcagcagtg

SEQ ID NO: 674868 - DNA, 100 bp, Homo sapiens
gccaaagaaaacacagcagttgcaccctgttttgcaaaaaccatcagtgtttgggaatgattctgatgatgatgatgagctgccactgcagagccccgcc

SEQ ID NO: 674869 - DNA, 100 bp, Homo sapiens
cgaggaggagtgcatggcgagaatcaagcacgcacacgagaacgacatcacccacttctacatgctcactatagacaagaggcaaggccagaggaactga

SEQ ID NO: 674870 - DNA, 75 bp, Homo sapiens
tgtcaccccaggatgatgaagcagaagaggatggggcattctcttctcccaccctcgggactttaccccagtgtg

SEQ ID NO: 674871 - DNA, 75 bp, Homo sapiens
aggcatacgctgaggagtttggcaacgagacgtggggcgtaacaaagaccatggaccgcgagttcaggaagtgga

SEQ ID NO: 674872 - DNA, 106 bp, Homo sapiens
gaatatcgagagcgtcatgaacccgagctatagagaaaggagatgagagacaagaggagcagcagcggcaccgcccctcaccctggagggtcctgtacaatctcat

SEQ ID NO: 674873 - DNA, 83 bp, Homo sapiens
ctcctctagaagatttcacagcaatgctggactgcagtgactatgttctagtaaagatgacggcgccttgaggtaagctacag

SEQ ID NO: 674874 - DNA, 80 bp, Homo sapiens
agcccaaggcaattgatcccaagttgtcgacgaccgacagggtggtgaaaggctactgcagcactggggtgtcagttgtt

SEQ ID NO: 674875 - DNA, 83 bp, Homo sapiens
ccgcgctggtgcagccaccctcgctccctctgctcttcctcccttcgctcgcaccatggaattacatgaatgacagtcttcga

SEQ ID NO: 674876 - DNA, 51 bp, Homo sapiens
attgttggattgccaaatgttggtgagaaagatcagtctaaagaaaaggag

SEQ ID NO: 674877 - DNA, 87 bp, Homo sapiens
gtcttggactcctatatgagagtcgcgagtgtgcagcaggtactgctataaccagaatttggtagaaaaaggatttacttgttgggg

SEQ ID NO: 674878 - DNA, 87 bp, Homo sapiens
aaccctgtctttcaggattcctgggacacagagacttcctagcatgggctgttgtgctggagagaacgagagctacgaagagactac

SEQ ID NO: 674879 - DNA, 98 bp, Homo sapiens
gcagacatctacaaccttcgatctcctgacgagggcacaagttgaccagtctgtcttcgaggagctcatcaagggtcatctcccagagctggcagagc

SEQ ID NO: 674880 - DNA, 100 bp, Homo sapiens
cgcctcaaggaaatcatggaggggaaaagccagtacagagcaactgattttgttgttcctgggcctggaaaagtagagataacctacacaccaagtgacg

SEQ ID NO: 674881 - DNA, 100 bp, Homo sapiens
ctggaatcacccgggtcgctgttcctgagagggtaaaactgattattatgctcggaaacgcttggtgatacaagataaaaataaatacaacacacccaaa

SEQ ID NO: 674882 - DNA, 100 bp, Homo sapiens
tcccaaacttcttaacccctagaccggtttttagtccattgactatgcagcctaatggttatcaggacaccccatgggagagacttcgatgactctttag

SEQ ID NO: 674883 - DNA, 143 bp, Homo sapiens
gattgctgcataatttaaatgaaacctatgtgtatataactttcaaaacttctttttcaagaaactaagaggtcgcacagtacttgcttgacaaagaccttatcatagatgaagatacgctatatgagctgtcactaaaaatt

SEQ ID NO: 674884 - DNA, 83 bp, Homo sapiens
tccaaagtgtgtggagtttgcaaacaaattattgacggtcaaggtatttcatgccgagggcccagagaagcgaggaactccgc

SEQ ID NO: 674885 - DNA, 100 bp, Homo sapiens
atgatgcctgcagtttttcatactgttgcttcaaggacacagcttgcattggaatccccatctctaatgtaagcttggagatccgggcccccgggggaca

SEQ ID NO: 674886 - DNA, 74 bp, Homo sapiens
atgtgcctttgcaggggagcctgagagccacaggaccgtataatagacgctggccccaaaggaaactactctcg

SEQ ID NO: 674887 - DNA, 75 bp, Homo sapiens
atacttcaagaatagcagaggagcagcctcaaggaataggttctcctagtgtctatcatgcagttatcgtcatct

SEQ ID NO: 674888 - DNA, 75 bp, Homo sapiens
cgcggaaggcctcccggcgctcttcctcccggagtatggagttcaaagaaggacgcagagccagccacacagccc

SEQ ID NO: 674889 - DNA, 100 bp, Homo sapiens
acagggcctcctggacaggaaagaggtgctgggaggtatcttgatgtcagccctgagcttgttgcttttgtcttccctggggaatgttttctttggatcc

SEQ ID NO: 674890 - DNA, 100 bp, Homo sapiens
gccgaccttgagctccaggagttcgtctcttacgtctgcggaagtgcagctgcctcagttcttagcgcaggttggaactcagtttatccgtggtgtgtct

SEQ ID NO: 674891 - DNA, 101 bp, Homo sapiens
attatcaggcatggagatgctactgatgtcaggctgttcgggggtcttgtctggattttggttgcctcctccaatgttcctctacctctactacaaggatg

SEQ ID NO: 674892 - DNA, 101 bp, Homo sapiens
ggctatatcgtggagaatgatgtcatcatgcatgctctcactaagcagttggaggctgtgtctggttacattgattacccacctagtacaacatcttacgg

SEQ ID NO: 674893 - DNA, 98 bp, Homo sapiens
agaagaagtaggggaagtacgcggggcgtctggaacttaaaggggcagcgtaccttggccgtcccgttccacaacaagagtctcgctcttttgcccag

SEQ ID NO: 674894 - DNA, 89 bp, Homo sapiens
tcaaggaggagtgtgaccgcctgggccctggcatggccgacataggtcctgaggacaccgtgagccagccaggcctggccgctgggcct

SEQ ID NO: 674895 - DNA, 82 bp, Homo sapiens
gatctacaagaaaatccacaagaacgcactttcctcccaggtgtcccgacccaggctaagcttgagcatggctgagcaggag

SEQ ID NO: 674896 - DNA, 74 bp, Homo sapiens
ctcatatgtctcaggcttccatgcagcctgccttaccggtcagcccttcataaacccagatgggagtccagttg

SEQ ID NO: 674897 - DNA, 74 bp, Homo sapiens
gctgctatgaatatgggtcgaccattccaaaaaaatcgaaagtgactgagaccgaagatgatagtgatagtgac

SEQ ID NO: 674898 - DNA, 83 bp, Homo sapiens
agaagagcaaagggccttctgcagtctctgctttctatccgtcaagatgataaagtcgtgtgcccgagaaccaaagaagtctt

SEQ ID NO: 674899 - DNA, 50 bp, Homo sapiens
gaagaggcctctctcccttgtgggacttcagtactagtgctaataacatc

SEQ ID NO: 674900 - DNA, 75 bp, Homo sapiens
cgctctgcggcgggtgtccctaaactagcagtttagggtgtcagcagcacaagccagcgaggaggcagtgtcatt

SEQ ID NO: 674901 - DNA, 83 bp, Homo sapiens
cccgactcaacgtgagacgcaccgcccggactcaccatggaatactcccccagttgcaagaggcgcaggaccgtggaagactt

SEQ ID NO: 674902 - DNA, 98 bp, Homo sapiens
acctggttaactttttcctagagctgagatctgtatctgtggacctgaatgttgatccctcgcttcagattgacatacctgatgcgctcagtgagaga

SEQ ID NO: 674903 - DNA, 76 bp, Homo sapiens
ggcgatagcccggcgctcatgacaggtgaatctggattgggaaagtcgacattaatcaactcattattcctcacag

SEQ ID NO: 674904 - DNA, 100 bp, Homo sapiens
cttgccatcgccccagacatggggaacgcggcgaccgccaagaaaggcagcgaggtggagagcgcgcctggcattggaagcggagaaagttcaagcagct

SEQ ID NO: 674905 - DNA, 74 bp, Homo sapiens
ctgatactaacagttttacgatttaaaacttcgccagaatttacctctcgggaactgaagattgcaggagccat

SEQ ID NO: 674906 - DNA, 83 bp, Homo sapiens
gtggacccgaaagccgctgggaaaattccagggtctccctccactgctgtagtaacccgggtccggggcctcggtggtgctcc

SEQ ID NO: 674907 - DNA, 88 bp, Homo sapiens
tcagttgttgcatcaaatacttcatatttggcttcaatgtcatattttgggttggacaccgaggaacagtaagagattatccagactt

SEQ ID NO: 674908 - DNA, 100 bp, Homo sapiens
atcgctgcaacctttagactaatgactgtccgaaacatcgcctccatctgtaatatgacacgaagatcgattgagaagttattagaatgggaaaacaata

SEQ ID NO: 674909 - DNA, 87 bp, Homo sapiens
aggccgaggagagctcccggactttcaagatgggaccaagccaagacaatgcaaactccagtgaacattcccgtgcctgtgctccgg

SEQ ID NO: 674910 - DNA, 75 bp, Homo sapiens
ctgtcttcggtggactccttcggcagtccacccaccgccgccgcctcccaggccatgaagtacttgtcatacctg

SEQ ID NO: 674911 - DNA, 75 bp, Homo sapiens
tacggcgagtacacccgaagaatcgaaagttttgcctgcactctccctggatgctggaggctggaggcagtgacg

SEQ ID NO: 674912 - DNA, 51 bp, Homo sapiens
cctcgcctcccgccgctaccgagatgcctttgagtaatggacagatgggcc

SEQ ID NO: 674913 - DNA, 74 bp, Homo sapiens
ccaaaaccgggacggacaagaccctggtgaaggaggtcgtacagatcaatgtccgagttaccaccatggatgca

SEQ ID NO: 674914 - DNA, 100 bp, Homo sapiens
atccgccctggatcttcacccaggaggccccggaggaggggaccgggggcttcgggcggcgactggcggcgcgatggacctgaccgggctcctgctggac

SEQ ID NO: 674915 - DNA, 97 bp, Homo sapiens
tgaagggaggaaatagtggcaggtgacagtctgcatgtgcagttttcaggttcgagaacttgtcttggacaattgcaaatcaaatgatggaaaaatt

SEQ ID NO: 674916 - DNA, 83 bp, Homo sapiens
ctgatgagctgtttccgggtctgtgccagcgacacgtgaaattcatcttagcttctgggattggctcctactcaacatgcaag

SEQ ID NO: 674917 - DNA, 97 bp, Homo sapiens
tcaaaaacaaaattctgaactcaggacttggcaaggtgaggacgcttgagcggaagttagaagcaaaaatgatcaaggaggaaagcgactaccacga

SEQ ID NO: 674918 - DNA, 75 bp, Homo sapiens
tcggaggagtggcagagtacgatctgaaggaggggcttctggttagcccagatcaatgtccgagttaccaccatg

SEQ ID NO: 674919 - DNA, 100 bp, Homo sapiens
cagccgtcggagcacttactggagtccaagatgctaatgtggaagaagaagatgatgatgatgatgatgatgacaacctcccccagctgaagaaggagtc

SEQ ID NO: 674920 - DNA, 75 bp, Homo sapiens
cagcacttccacagccaagtgcgggagtccacgattgtagaaggcatgaaacaaaaaatgtggagtattgaaaat

SEQ ID NO: 674921 - DNA, 90 bp, Homo sapiens
gaaaggattcgttacagccagagattggatggggctggtaagtagcaaaaagccggacaaggaaaagccgatcaaagagaaggacaaggg

SEQ ID NO: 674922 - DNA, 99 bp, Homo sapiens
ctgagccaggctgggccgcgtccctgagtcccagagtcggcgcggcgcgcatcccttcgtcagcagcatcaccagtaacaaggctctgcgggagctggt

SEQ ID NO: 674923 - DNA, 82 bp, Homo sapiens
tcctgggagcacagcagaagtgtgagaagccctaccactgcaactgggacggctgcggctggaagtttgcgcgctcagacga

SEQ ID NO: 674924 - DNA, 83 bp, Homo sapiens
cctgatgtctgtgggtaccctctatgaaaaacagaatggaaaagagtcttctgatgaggaagccaaggcccagcagagctgag

SEQ ID NO: 674925 - DNA, 75 bp, Homo sapiens
aggcctgaagctacccccagcatggcctctctgggcccagagatgctgcaatttgtcagtaatcaagtgggagag

SEQ ID NO: 674926 - DNA, 87 bp, Homo sapiens
gatcgtggcctctcgagagcaagcccgaccctgcccgccctggactggcagctgccgtcccactcaggcccgtatgagcttcggatt

SEQ ID NO: 674927 - DNA, 98 bp, Homo sapiens
gcaacagcggcagtcccctgcccaagattatgaagcaattgtgaagctttcggatggctttaatggagcagatctgagaaatgtttgtactgaagcag

SEQ ID NO: 674928 - DNA, 100 bp, Homo sapiens
ccagtacccggaccgcaccgacgtcatccctctgctctcggtgaacatggggacgacctgcacatcatggactccctagagctgcccaccggagacccac

SEQ ID NO: 674929 - DNA, 82 bp, Homo sapiens
ggccgccgtgcaggcggccgtcagcaacctcgtccggggggatatgagactttctactcggaatatcctgagtgttgcgtgg

SEQ ID NO: 674930 - DNA, 83 bp, Homo sapiens
acaaaggcgacccaagacacccagagagggacaggtcatcatcagatttgaaatatttaaagtggatacaaaactatttcagc

SEQ ID NO: 674931 - DNA, 74 bp, Homo sapiens
gaaaaggcaaaaatcccatctaccgcaactctcagttcgagagtaaagacatatgtagagtgtgtcggtcagaa

SEQ ID NO: 674932 - DNA, 100 bp, Homo sapiens
ttttctgccctgaaccagggcagaagcttatggtggttattaacttggtgatgcttttggctgaaatgaaaatacaggaccgcgctgttccatccttggc

SEQ ID NO: 674933 - DNA, 75 bp, Homo sapiens
catagttgactccacagatccgggaatggccgaggcatcccgaaagaagaaagaaaaccggaggaaatggaagcg

SEQ ID NO: 674934 - DNA, 100 bp, Homo sapiens
caagttcagggctcccactgattctacattatggcatgtggagaccccaaggcaaaaccatcctatcttatcgacaaaaacctggaatctgctgtgaaat

SEQ ID NO: 674935 - DNA, 83 bp, Homo sapiens
ttcacgcacgggatccagagcgccgcgcacttcgtcatgttcttcgcgccctgtgagaagcgccaccttcaagtgaacgtcac

SEQ ID NO: 674936 - DNA, 95 bp, Homo sapiens
cgaaaagcaaggcatgcggacacacgccgtctctgtgtcagatggaatcagtgtgagtggctttcccctgtccagtccttttcggcaggtcgttc

SEQ ID NO: 674937 - DNA, 99 bp, Homo sapiens
aggaaatgcatctttatgtcagaaacacaaagcagcccaaccaaaggcttgtacctccttttaaacctcaagtaacatctgagacagatactagatatt

SEQ ID NO: 674938 - DNA, 78 bp, Homo sapiens
tgtgtcacacagacatcactccgtctggtttccacttgagcggcacagtgacagaacctgcaatacaatcggagccag

SEQ ID NO: 674939 - DNA, 74 bp, Homo sapiens
tttcccggaggccagaagggaggttcacctgcagcgagtgtgcctcaggtgtgatccctcacatccacaaatct

SEQ ID NO: 674940 - DNA, 75 bp, Homo sapiens
ccagtaacagattgtgttatttcaagtgttgaatttcatgaaagaggaaagaatcataaggaaaatgtggcaaaa

SEQ ID NO: 674941 - DNA, 98 bp, Homo sapiens
gtcattgccgggaacgagcgagtcgccgctgcagccctagtgactgcggcctgcatcccgtataaccccgttttcacacgaatggccccttcacatat

SEQ ID NO: 674942 - DNA, 100 bp, Homo sapiens
aatggcacaactgtccacgtaggcattcaccccagcaaggtggttctggaatggagccgagatcaataccatgttttgtttgattcctatagagacaata

SEQ ID NO: 674943 - DNA, 98 bp, Homo sapiens
ttgaagccgattttgttattttctgccctgaaccagggcagaagcttatgatgttgccagaggacgattactcattttaatggaagccagattgtcag

SEQ ID NO: 674944 - DNA, 82 bp, Homo sapiens
agcaaagtgaggctgctggagggtgacaagctcctcgcacaggtggtctttgggaagaagcttcctgcctttgccaccatcc

SEQ ID NO: 674945 - DNA, 103 bp, Homo sapiens
gaagacgcgtgccgcggcgcctggttgcctgcagcggcccggacccgagaggtctctttaatgtggggaacaagctgctggtaagcctggacttgctttttgc

SEQ ID NO: 674946 - DNA, 100 bp, Homo sapiens
acggcaagctcgatctgctcagagcctatcagatcctcaacagctacaagccacaggcaagcaacagctgcgaatgcggatcaagcttacatataatcac

SEQ ID NO: 674947 - DNA, 98 bp, Homo sapiens
aagagatcagtcattacaatagcaacttctgttgataagttggcaatgaagcttggagatacatgggtggctttgcaaagagtgtttccttttctgat

SEQ ID NO: 674948 - DNA, 100 bp, Homo sapiens
agcagagaggagcggggagcaatgcaggttctaagctggtctatgtccatcaccttcttggagaaggagcctttgcccaggtgtacgaagctacccaggg

SEQ ID NO: 674949 - DNA, 75 bp, Homo sapiens
ccagagccacttctcaccgagatgattcatgaagtgtcactctgcaaacctgaatggtgtatactacagcggccc

SEQ ID NO: 674950 - DNA, 51 bp, Homo sapiens
tgtcaagtcatctttggctcaactgaagtgagtagtgaatatagtatggac

SEQ ID NO: 674951 - DNA, 90 bp, Homo sapiens
gttgaggcaagaagcagaacaactgcggaatcagattcaggtacaggtttgcagattccgccagcagcacagcaagctctacagatgagt

SEQ ID NO: 674952 - DNA, 100 bp, Homo sapiens
ggaagttctcccacatgttactatatttgaaagaagccatattttcaggtttgtggtaaatatgccagctctagaacacatgaatcagattttacacatc

SEQ ID NO: 674953 - DNA, 90 bp, Homo sapiens
atggccgtggtgttttccaccttggtgtgtctcagcaggctctacactgggatgcatacggtcctggattactacagcatcccatttccc

SEQ ID NO: 674954 - DNA, 98 bp, Homo sapiens
cagcttcagcggcggcgatctcagactgtgccctgtccacggtgcctcctgcatgtcctgctgccctgagctgtcccgagctaggtgacagcgtacca

SEQ ID NO: 674955 - DNA, 82 bp, Homo sapiens
cagagatgacatgccagcccagactttcatgaatggtagtgctattggccttccagtcccacctatcacagccttaatcacc

SEQ ID NO: 674956 - DNA, 78 bp, Homo sapiens
gctgctgtccaggctggtgtgctctctggtgatcaagatacagagagaaaattcatgaaccctttcaacatgcctaat

SEQ ID NO: 674957 - DNA, 98 bp, Homo sapiens
ggcgacccacggacagacttgcgcgcgtccattccaaaatatgcccggtgctatccgcccagctgctcctagaccaccatttagtactatgagaccag

SEQ ID NO: 674958 - DNA, 101 bp, Homo sapiens
aggaacgaagaaacagacattcaacatgattgcatttgaaacaacagcagttctgtagagagtttaaatatgaaggaatggcaggacgggctaagggcact

SEQ ID NO: 674959 - DNA, 82 bp, Homo sapiens
gcacagttttgcccagcgccgccttggacctgagaacctgatgttgttgttaaacgacaagaagctttagcagctgctcgac

SEQ ID NO: 674960 - DNA, 100 bp, Homo sapiens
aaaactcagcaagtttggatccatacgttataagcaccgctacaggtcattgcttcttgctgatcttgacaaagaagaaaaggaaaaagactggtattac

SEQ ID NO: 674961 - DNA, 100 bp, Homo sapiens
ggaaaggaccctccattggggacattgaggatgaggagcccgagtaattcgccaaaatgacgaacacaaagggaaagaggagaggcacccgatatatgtt

SEQ ID NO: 674962 - DNA, 97 bp, Homo sapiens
tcagccgcaagtacccgtccatcatagtcaactgcgtggaagagaaggataccatacttgcagagctccttcagatacataaagaacacattgtagg

SEQ ID NO: 674963 - DNA, 100 bp, Homo sapiens
gagatctgctatttctttgtggagacatcaatgtatttcttaccaaaagacactttcagaacaaaatccagtctcatagcagaggagaatataatgttta

SEQ ID NO: 674964 - DNA, 100 bp, Homo sapiens
acatctatcattatgaattggatatcaagccagagaagtgcccgaggagagttaacaggtcttgaggaccggcccagctcaggctcctggggcagcggcg

SEQ ID NO: 674965 - DNA, 100 bp, Homo sapiens
agcactttacaagcccagctcagccagacacaggcagagcaagctgcacaggatgtaagttgtccaataaggcaagttcccacaggtaaaaagcaggtgc

SEQ ID NO: 674966 - DNA, 50 bp, Homo sapiens
gtcacaattatcaccgggtatttaggactgtggaaactgaagtcattgca

SEQ ID NO: 674967 - DNA, 112 bp, Homo sapiens
gtctcgctccgtggccttagctgtgctcgcgctactctctctttctggcctggaggctatccagcaacccagcgggtgccgcttctccacccgaggcttccacctccaacga

SEQ ID NO: 674968 - DNA, 100 bp, Homo sapiens
agcaagccaacatgtgtcaaagttattcattttggacctggagaaagttcttcagaagatgctgtcatgatgaatacacctgtggttaaatctgccttgg

SEQ ID NO: 674969 - DNA, 50 bp, Homo sapiens
gaaatgttgaagaagctgcacagggaagaaatctttcctgttttctgctc

SEQ ID NO: 674970 - DNA, 75 bp, Homo sapiens
gcagtccccgcgcgtggtcatccaggtcatcatcagatttgaaatatttaaagtggatacaaaactatttcagca

SEQ ID NO: 674971 - DNA, 95 bp, Homo sapiens
gaaagtctgtcattctggactgcacccctacgggaacccacgaccattatatgctggaatggttccttagttcactgacttgaagtatactcagt

SEQ ID NO: 674972 - DNA, 75 bp, Homo sapiens
gaaggccatcaccacgcagaacgtcaacaccaagtgcatcaccatccccaggtcagcccaaggccaaccccactg

SEQ ID NO: 674973 - DNA, 74 bp, Homo sapiens
ggaatcgcccaggagacagacttcttgatttaggatctgtgccagttcagaagcaggcgagcctcttccctgat

SEQ ID NO: 674974 - DNA, 100 bp, Homo sapiens
cggatatgaacaccgtttctggctcccctaaagtgcatcctcctaatgggacccggttttacacttttcaagaagcagtcaattatagatttcttcaaac

SEQ ID NO: 674975 - DNA, 75 bp, Homo sapiens
ctttcctggtcagcagcgacttgattcctctctttggtgctgacactattggccagagaagtcctgatggaccgg

SEQ ID NO: 674976 - DNA, 49 bp, Homo sapiens
cgcgtcttctgcgtcagcgacagccaggcaaatcgtacttgcccaattt

SEQ ID NO: 674977 - DNA, 75 bp, Homo sapiens
gaagaaaaggtgtacttgcaagaaacctcaggacttgagtaacagcaacatgcagcaagatgaagagcgacgtcg

SEQ ID NO: 674978 - DNA, 80 bp, Homo sapiens
gtctgatgtggcatctagactttggtttacatacaggaaaaactttccagccattggtccctgtgcgttttattgcgacc

SEQ ID NO: 674979 - DNA, 74 bp, Homo sapiens
attgaggacactgtattatacggttactatatgaggagctggtttcacctgaggacctgctggagtggctgcgg

SEQ ID NO: 674980 - DNA, 100 bp, Homo sapiens
aagaacatccaaagtgtgaatgtaaggtcccccggaccccactgcgcccaaaccgaagtcatttcccgaggagagatggatgccgcgtccccttcgcagc

SEQ ID NO: 674981 - DNA, 100 bp, Homo sapiens
gcacttaagcaaacgggaattctcgcgtcctcttcctgatggatgggaacaagccatgactcaggatggagaaatttactatataaaccataagaacaag

SEQ ID NO: 674982 - DNA, 82 bp, Homo sapiens
cttaaagatgacaccttgcattccctatttagagctggaagtcgagtgtgctactcaactcaggagatttggagacaaactg

SEQ ID NO: 674983 - DNA, 100 bp, Homo sapiens
ggcggcggcaccagcagtaacaacagcgaggaagaagaggacgacgacgacgaggaagaggaggtttctgagaaatgcatcttctgcagacaccgggtta

SEQ ID NO: 674984 - DNA, 90 bp, Homo sapiens
gggcggccggccgacccttcctgtcgctgacggcgactgcgggaggccaggactcctagaagtaccccaccccacccctgctccttggag

SEQ ID NO: 674985 - DNA, 74 bp, Homo sapiens
aaggcaagactggcacccagcacagcaggtgctgttccagaattcaaagaagagaaactgcagctgcaaccaaa

SEQ ID NO: 674986 - DNA, 101 bp, Homo sapiens
agatctaaagtcacccggcggccaaaggccagtgactaccaacgtttggaccagaagtctccatgcagtaaacagacccagcagaacctgcccgtggtgag

SEQ ID NO: 674987 - DNA, 75 bp, Homo sapiens
tgttcctaaaccagaagaggaggttgcccagaagaaaaagatgactctgttagaccaaatatgactttaaaggcc

SEQ ID NO: 674988 - DNA, 97 bp, Homo sapiens
aattggcagagcttgacccaggcactatgctggacccaaaggagacaacatttatgaatggaggtcaactatattgggacccccaggatctgtctat

SEQ ID NO: 674989 - DNA, 82 bp, Homo sapiens
gaacgaggcaaggagctaaagcagcgtgcgttcagccctggggtgctttgcaagatatcaccttgtcacagcagaccccctc

SEQ ID NO: 674990 - DNA, 98 bp, Homo sapiens
cacctgccagggaggctccgggcgttgtacctgccaccacgggcttgccagcaaagcacggacagagaaggaggagaagctgagccaggcctatgcaa

SEQ ID NO: 674991 - DNA, 98 bp, Homo sapiens
cagaacatgcagtccctgcttcctgccatgctggcccgcgagagacattgatgcattttgctgtgcggctgggactgctgaggttgacgtggttcctg

SEQ ID NO: 674992 - DNA, 90 bp, Homo sapiens
gacgtgaactccaaagtcctcctgaacattgatgatggcacctcagatcgcccctacagccatgctctggtggctggaattgaccgctac

SEQ ID NO: 674993 - DNA, 98 bp, Homo sapiens
cttcagatagctgaagacaatcttcgggccctcctcatttatgccatttcagctacagtgttcacattggtgttggtattaggagatctgcacatccc

SEQ ID NO: 674994 - DNA, 100 bp, Homo sapiens
aaggagaagatgctggaggacctgcggcgggaacagcaggccacagagctgcttgcggccaagtacaagtcctcctcgccctctgactaatatgaatgac

SEQ ID NO: 674995 - DNA, 100 bp, Homo sapiens
actagacatcctctgcagccagaagaacaagaagtaggcattgaccccttgtccagttactctaacaagtctggaggtgtcatggagaaactccagctgg

SEQ ID NO: 674996 - DNA, 100 bp, Homo sapiens
ggagaagccggaggaggacaacgactaccaccgcagcgacgagcaggcgtccgacctccgatcatgaacgggcccctgcacccgcggcccctggtggcat

SEQ ID NO: 674997 - DNA, 87 bp, Homo sapiens
ccgctgcatctccgccagtccgcgcaggatatcctcagaccatctcaaaaaggaggaaaagatgactatgatggctcaccagtaccc

SEQ ID NO: 674998 - DNA, 78 bp, Homo sapiens
tggacttgattgatatatatgctgacgaggagttcaaccagatttggagcaagaggtggtggtggccttcccccgaag

SEQ ID NO: 674999 - DNA, 75 bp, Homo sapiens
actctttaaagaaggcaaggagagaatgtatgaagaacagtcacaggacagggctttgttcgcgggggtcacagc

SEQ ID NO: 675000 - DNA, 100 bp, Homo sapiens
cgaccaatacactgaggccctggcccagagggacaagtccctggatggccggttgcaggtgtcccatcggaaggggctccctcatgtcatctactgccgc

SEQ ID NO: 675001 - DNA, 88 bp, Homo sapiens
gccgacaagatggcggacggggagctgaacgtggacagcctcatcacccggctgctggaggggagtaatgtggtcattgcatcccgta

SEQ ID NO: 675002 - DNA, 90 bp, Homo sapiens
gtggcacctgcgcgaagctggccaaagcctgcccagacggctcacctgtgcgggatggaacaaaaggctctgtgtgctccgggatggagc

SEQ ID NO: 675003 - DNA, 100 bp, Homo sapiens
aggcccaggctgctttcttcggtagctaccgaaacgctctgaaaatcgagccgttactccacaggatccgctgaacataggatgttgccacaaaatctac

SEQ ID NO: 675004 - DNA, 95 bp, Homo sapiens
ggagcggccacctggttcctgcgtgctacggccctgtgggcctgggagctgcctctgaggaacacgccgcaggacttgaaaatactggaaatctg

SEQ ID NO: 675005 - DNA, 101 bp, Homo sapiens
caaagaagtaatccatctggaggcaggtggttaccattctcttgcacttactgcgaaatcccagttggagaatattggcaactttattaaagctattcagg

SEQ ID NO: 675006 - DNA, 100 bp, Homo sapiens
aaactcctgagctcaagtgatccacccaccgtggcctcccaaagtgctgagattaaagaaactggcgatggaatatgagaggagccctctggaaagaaaa

SEQ ID NO: 675007 - DNA, 90 bp, Homo sapiens
gcacagaattaccaaaaacttctgcatccatattctggtgtaactgtggacatcaccattcaggaaggtttgccagaacccaataaagat

SEQ ID NO: 675008 - DNA, 75 bp, Homo sapiens
ctagtcatggagatcgagaggaaataatgagattgatctcatttgccagcaaaataatattatagtattggaaga

SEQ ID NO: 675009 - DNA, 75 bp, Homo sapiens
ttgatagagactcagctgaaagcatgtgcctcttttatacgaaccagggcgtctctggccgagcctctttttgtg

SEQ ID NO: 675010 - DNA, 100 bp, Homo sapiens
acctcacctccttcggtgccgaccaggaggaattctaaggaaaggtgcaaagctgttcttccgccggcggcatcaacagaaagacccaggcatgagtcag

SEQ ID NO: 675011 - DNA, 75 bp, Homo sapiens
ggacatcatctgccatgccctcctggaccctgacaagatctggaaggtagaaaagggaccagatggaaaagccat

SEQ ID NO: 675012 - DNA, 74 bp, Homo sapiens
aaggactgttcgtctgacatacaaaaacagggatgtgtatggggtgttgcttacagattgccagtaggaaagga

SEQ ID NO: 675013 - DNA, 100 bp, Homo sapiens
cagccatggaatgaatatccacaatttagcatcaggcaaaggaagcaccgcacatttttcaggttcacgcaaagaatctgctccacaagttttgcttcca

SEQ ID NO: 675014 - DNA, 100 bp, Homo sapiens
accattggctgggaaggaaaaacagaatcagctgttccctgcgaaaggttggatggcaagcatgtggtgtttggcaaagtgaaagaaggcatgaatattg

SEQ ID NO: 675015 - DNA, 75 bp, Homo sapiens
agggaaaggagaaacaccagacactggaagtctcactgtctcgaggccccgagcacgacagccgcagtctccacc

SEQ ID NO: 675016 - DNA, 100 bp, Homo sapiens
ctcaaggaaatgtctcagcttatgctaaagtctttctctaatacacagaattctaggaaggaggctgttcttttagccaaaatgaaacaccctaatattg

SEQ ID NO: 675017 - DNA, 75 bp, Homo sapiens
aggacaaagaagattccttttctggtgtttgaagatactgtggaggagcgtgtcatcaatgaagaatataaaatc

SEQ ID NO: 675018 - DNA, 83 bp, Homo sapiens
aaatcatcaggaatccattatggtgtcattacatgtgaaggctgcaagggacttcaaaatgagcgtccctgactacatgcagt

SEQ ID NO: 675019 - DNA, 100 bp, Homo sapiens
tcaaaaataaggaaaccagtgttgccattgaggtacttacaatttcatcagaaattcctaaaagaattcgaagtgccttaaaaaatgcagaagaatcaaa

SEQ ID NO: 675020 - DNA, 82 bp, Homo sapiens
agacccctcggaggctgaagcgacgccggaggcagttgctggatttgtgcgactcggtgaaggatgatgcccggagggtgat

SEQ ID NO: 675021 - DNA, 90 bp, Homo sapiens
gacagagcgctactcctggcagtgcgtcaatcagagcgtcctgtgcggattttttatcaagcagaaatgcatcgaacaacgagaatcaag

SEQ ID NO: 675022 - DNA, 95 bp, Homo sapiens
agcagcaatggactttctcctggggaacccgttcagctctccagtgggacagcgcatcgctctttgaggagttgcaggagctgctgacccatgac

SEQ ID NO: 675023 - DNA, 83 bp, Homo sapiens
gcgacaagccgctggcagccgcggatctcaccgccgctcaggaaaaatggctacaaacttcctagcacatgagaagatctggt

SEQ ID NO: 675024 - DNA, 100 bp, Homo sapiens
actaaagactttgtagccatcaacccgagtgcagtttcgatggaaaatgaagttcaaaaggtgatgacctatcaacagccattctcaaacagaagaaccg

SEQ ID NO: 675025 - DNA, 100 bp, Homo sapiens
tgcagagctcccagggcggacagcagcctcgggtgcaatcctggagccccccagtgagggtcagctgttgccagcaaaccgcaatacaccaagtcccatt

SEQ ID NO: 675026 - DNA, 75 bp, Homo sapiens
atgtcaaatttaggaaattgatgggtattaagtttcgtgccttagcaccaatgtactatcgagggtcggctgcag

SEQ ID NO: 675027 - DNA, 74 bp, Homo sapiens
accaagaagccagtcaagcggccaggattttttatcaagcagaaatgcatcgaacaacgagaatcaagatcact

SEQ ID NO: 675028 - DNA, 83 bp, Homo sapiens
gagaatgggctgggcagcctgagtcccagtgatgtgaaaggtgtagcagtcactcggcctacacccacagcatcgaccttgtg

SEQ ID NO: 675029 - DNA, 109 bp, Homo sapiens
ctctcaaggaagcaagtggatgccctggggctgacaggaatcttctggtgtactctttttatgaaaaggtctccaattgagaaacatggcactgtttttcctgcactct

SEQ ID NO: 675030 - DNA, 98 bp, Homo sapiens
ggggcttcatgcagcagggctcggagatcatgccccgggcgctgtccacgcgctgtgtcagcggagtctggatttccagatgtgacttgcactcagaa

SEQ ID NO: 675031 - DNA, 75 bp, Homo sapiens
tgcaaagccagcgttacagtaatgttccaggccatcatctgtgcgatctctgcggtggacgaggtggactacaag

SEQ ID NO: 675032 - DNA, 75 bp, Homo sapiens
cccattcattctggattggtggatctgaagtacaaaatattttccagtgccaccatggcaactgcaccatacaac

SEQ ID NO: 675033 - DNA, 74 bp, Homo sapiens
ggcccgggtcttccagaaggctgtagaccagagtatcgagaagtaccttctccaggcaaattccgttcccctgc

SEQ ID NO: 675034 - DNA, 98 bp, Homo sapiens
gaacctcgagaccaacgtggaggagctgtgggtggaagcagccagacccggtccgtttggaatgcctgggatggtgccgccgcatgttcctcctcaga

SEQ ID NO: 675035 - DNA, 101 bp, Homo sapiens
atgacaactccgcagcaaacaactccgcaaacgaaaaagaacgacatgatgcaatcttcaggaaagtaagagggtgtgtcagcagcctgagtgtgggaaat

SEQ ID NO: 675036 - DNA, 74 bp, Homo sapiens
gttactacagccttctatgatccaagaagtctgggagttaaagttcctcgtaattttcgcttgttggaagaact

SEQ ID NO: 675037 - DNA, 75 bp, Homo sapiens
caaaacctcacctcaagccacgcatatgataatgagctcgaggccatgagcagatataccagcccagtgaaccca

SEQ ID NO: 675038 - DNA, 75 bp, Homo sapiens
agtccctggccatagctccgccgctgcccgagaggtggagaagagcgagtacttgagaaagaagaggaagaagat

SEQ ID NO: 675039 - DNA, 96 bp, Homo sapiens
cagccggcccctgccgctggcccctaccccagcatgcccagcactgcggctgccttcaagcccatcgacctgagtgacctgaagcgccggagcacg

SEQ ID NO: 675040 - DNA, 98 bp, Homo sapiens
ggttcaatctttattgaaatgtaaaagtgctgtttgtacgcaaccttgccaatactgtaacagaagagattttagaaaaggcatttagtcagtttggg

SEQ ID NO: 675041 - DNA, 83 bp, Homo sapiens
cctgattacctgccacccattgtgtcttctcaagaagattgtcctgggtcacataatgccagctgagcgtaaaaagccagcaa

SEQ ID NO: 675042 - DNA, 100 bp, Homo sapiens
gtagtgtttgccaatgttggagccgtctgcaaagtgtccccggcaagaagacaatgcagatcttcgtgaagactctgactggtaagaccatcaccctcga

SEQ ID NO: 675043 - DNA, 100 bp, Homo sapiens
catgccagggtcatcccgtccagtctctgatcgaaggggagtttccacagtgattgatgctgcctcaggtcagtcattggcaccatgaactggaataaag

SEQ ID NO: 675044 - DNA, 90 bp, Homo sapiens
tataccaggagacttacatcgatgaccttggacacctccatgttatggacacggtctttcttattcagtttgatgatgtatggcctatgg

SEQ ID NO: 675045 - DNA, 80 bp, Homo sapiens
aggaggggagtaaattgaaaatattggggccatttagtaacttctttgcaaggtgattgcccacagtgagtatcaaaagt

SEQ ID NO: 675046 - DNA, 101 bp, Homo sapiens
gacctgtccgtgtgggactacgcccaccagcacggcatccctgacgagacctgcaacaactaccaggccaaggaccagggatgggcaacactccagattca

SEQ ID NO: 675047 - DNA, 100 bp, Homo sapiens
tcctccatccaaccatgagctggtgacaatggcgatgaccactcagaaggaggcctggtggagaaccacgtggacagcaccatgaacatgttgggcgggg

SEQ ID NO: 675048 - DNA, 75 bp, Homo sapiens
gtcgagaggaccatcctgggtgctggccctgtgctggaggctcctgcaggagatgggtcacagacccgagggaag

SEQ ID NO: 675049 - DNA, 75 bp, Homo sapiens
ggaggagctgctgaccacgcagtgtgaccgcttctcccaggaggaggtgctggagaatctggtaaaagcaccatt

SEQ ID NO: 675050 - DNA, 75 bp, Homo sapiens
ccaaagatgagatttacctgtgagatgtttcatcccaacagagaaggaagccaacatccttttggagccatgaat

SEQ ID NO: 675051 - DNA, 98 bp, Homo sapiens
gagcgggccctgcgcgcctgatgggtcgaggcggacgcgcggctgcgtcagggaggcgcccagatcagcctggcggaggtctgccggtctggggagag

SEQ ID NO: 675052 - DNA, 87 bp, Homo sapiens
attgatctggagccagaaggaagagtgtatgtgatcatcgatctctcagggtcgtcgggtgaagacagcccacctgaggatattgac

SEQ ID NO: 675053 - DNA, 100 bp, Homo sapiens
accacaacaacacattttgcagagaccaaaatccacacccttatcacagcccagtgccaatggagtccagacggaaggacttgactatgacaggctgaag

SEQ ID NO: 675054 - DNA, 96 bp, Homo sapiens
tttccggatcaatccagatggcagccagtcagtggtggaggtagatgatgagctggagatcaaggcctactatgcaggccacgtgctgggggcagc

SEQ ID NO: 675055 - DNA, 90 bp, Homo sapiens
gcacctttgtggatcagtgcaagactgtgctcaagctggcctctgaggagcctcctgatgatgagctccagatgaagatgagtgagcggg

SEQ ID NO: 675056 - DNA, 100 bp, Homo sapiens
tggccaaagcctgcccagacggctcacctgtgcgggatggaacaaaagtgtggaaattggtgaaagtgtacgtggagaggatgtctacattgttcagagt

SEQ ID NO: 675057 - DNA, 90 bp, Homo sapiens
aaagaaggaggccagtatggcttagtggctgcgtgtgcagctggagggcagcatgccaatgaagatgtggaaagaatgttactaggaaac

SEQ ID NO: 675058 - DNA, 75 bp, Homo sapiens
gctatgcctgcggcggagactgcatcaggctctcgaggtggaggagacactgaagcgactgcagagccagaaggg

SEQ ID NO: 675059 - DNA, 51 bp, Homo sapiens
cataccatatgctggagagacattaaagtggacaggagagagtggcaagag

SEQ ID NO: 675060 - DNA, 75 bp, Homo sapiens
aaagtggacacttctgcaagagcgagtgaccaaagaccacgtgttctgcaaggtggcggtgcaggccgtgcaggc

SEQ ID NO: 675061 - DNA, 100 bp, Homo sapiens
cacaaggtgatagacttcgggccttgaaaagcagaagacaatccaaaacaaacgctattcctctcactgagatggaagattttcgaggtatagcagaaga

SEQ ID NO: 675062 - DNA, 74 bp, Homo sapiens
ctgaagtgagtcaggagctgtatgaccttaacgtggagctctccaagagcaaattggtcaggagatgttggaaa

SEQ ID NO: 675063 - DNA, 100 bp, Homo sapiens
gcagctggcgcacctggtgcgggccctctggaccctggagtacaccccgcagcacagccgcgacttcaaggaaaccacccctactcctaatcccccgact

SEQ ID NO: 675064 - DNA, 90 bp, Homo sapiens
tctccaatgacaaacgagatgtaaaagtgtcactgtttggaaagacttcaaatcatgcaatagttcttgcccagctcatcactaagggga

SEQ ID NO: 675065 - DNA, 100 bp, Homo sapiens
gcgggttgagttccctgttgcccttggtctcggggtcgctgtaggcgctgaggctgcagaaatggcacctcgaaaggggaaggaaaagaaggaagaacag

SEQ ID NO: 675066 - DNA, 100 bp, Homo sapiens
gatgcatttcatggctatcatctacacctgacatctgaaatgtttgaagcagatcttgagaaggcattgttactaagtaaactagaatatgaagagcaca

SEQ ID NO: 675067 - DNA, 80 bp, Homo sapiens
gacctcgggcggccccggcccgcgcccttgcccctcggccgggcggacggataccgaagtgtataaagctacagtaaaag

SEQ ID NO: 675068 - DNA, 98 bp, Homo sapiens
ggtgatctacgtgtgctttttcaagggagctgataaagaacttcttcccaaaatggaccctccgcctgtgttacgtgttgatgaccggcagcggctgg

SEQ ID NO: 675069 - DNA, 75 bp, Homo sapiens
ggcaagcaagtttaatcagacctgctcacacttcagaatagagaagtcccatgaagctgaggtcttgaagcagct

SEQ ID NO: 675070 - DNA, 97 bp, Homo sapiens
agctcgatctgaagaggcagaaggagcaggctctgcgggaggtggagcacctgaagagatgccagcaggtcaccgacgatgagggcgcacctgctgt

SEQ ID NO: 675071 - DNA, 82 bp, Homo sapiens
gagggagccgcagctgatgtcagatcgccaaactgaggcagcaactacaacgcagtaaacagagtagtcgtcacagtaagga

SEQ ID NO: 675072 - DNA, 83 bp, Homo sapiens
attctggaaactgtacattgaagcagagggttatgatcatagctactacttcattgcaacctttattactgaccacatcagac

SEQ ID NO: 675073 - DNA, 90 bp, Homo sapiens
attttgatacctgtggaagagcattttcagaccttaaatggaaagttcgatcctttggtacagaagacagaccgacagatcgtccaatac

SEQ ID NO: 675074 - DNA, 74 bp, Homo sapiens
gccttccagtacacagacgagcatggggaagtgctctggtctggggtctctctgtgaaacacaatcctcagaaa

SEQ ID NO: 675075 - DNA, 75 bp, Homo sapiens
tcacaagctcagcctggacagcaacagcctgattttccctacaaagatgacctcctggccttggactccagctgc

SEQ ID NO: 675076 - DNA, 97 bp, Homo sapiens
gggctatagaaaagacggcatctgctacctttgagagtgccagggacttgaagttggacggaggaagacaatcaactggtgcagtgagtttgaaaga

SEQ ID NO: 675077 - DNA, 112 bp, Homo sapiens
cagcagaggactgtttacagcaggatgagcatgccaatttaactgaggtaaggagagctgctttgagagaattgtgtcaaggtttggaaagaaagtcacatatgtagtgatt

SEQ ID NO: 675078 - DNA, 50 bp, Homo sapiens
caaggacccgactcagaaacccagattgaaacatcccaattagagccgga

SEQ ID NO: 675079 - DNA, 75 bp, Homo sapiens
cagaaacaaaatgtcaacaaattgatggggacctggaacggtaccaccagggtggccatcaaaaccctgaagcct

SEQ ID NO: 675080 - DNA, 100 bp, Homo sapiens
ctgggattggcatgctttagctatctgaacgaaacttccctttggggagttaagttttccaggcatgcccaagagaatcgtaaatgcaaaaattgcttgc

SEQ ID NO: 675081 - DNA, 100 bp, Homo sapiens
gagcagcccaagcgccttccctcacatgcctgaggaaacccagacccaagaccaaccgatggaggaggaggaggttgagacgttcgcctttcaggcagaa

SEQ ID NO: 675082 - DNA, 50 bp, Homo sapiens
gacgctcttctccaccacaccgggaggtgtggctttgatagctggtggtg

SEQ ID NO: 675083 - DNA, 99 bp, Homo sapiens
ctgctcttcgtctgcttcttcctcttcagtcaagtgttatccaagataaattctgtgggattataaacatttcagtagaaggcctgcatgatgtcatga

SEQ ID NO: 675084 - DNA, 101 bp, Homo sapiens
ggaagatgagttctaccagacgacttatgggggtttcacagagaaggccaatgatgaggccaatcagagtgatacaagtgtctccttgtcagaacccaaga

SEQ ID NO: 675085 - DNA, 74 bp, Homo sapiens
cgcagtaagagaaaccgaagtcctcaccactcaacagtcaaagtgaagcaggtggttatcactaggctaaaact

SEQ ID NO: 675086 - DNA, 75 bp, Homo sapiens
cgccagacggccagaaagttccgccatgagctggggcacggagctgtggttgtacacagaagaaagcccatatga

SEQ ID NO: 675087 - DNA, 100 bp, Homo sapiens
acttcagactggtggactgttcatcattctgttgaagaaacgcttaacccagcgtgccctgaattctttcttgggcgagatccacgaaccgtctcttggg

SEQ ID NO: 675088 - DNA, 75 bp, Homo sapiens
tcaaaaggaggtggcgcaggttcgcaagcgcataacccagtatttgattttcatcaagcagctgatggtatccag

SEQ ID NO: 675089 - DNA, 96 bp, Homo sapiens
ccagcgtccgaacgggcagaccccctcgagccgcgaaggagcccgagaagcagccacgatgtgcgagtcgtccttgtctactccactaccaaatgt

SEQ ID NO: 675090 - DNA, 100 bp, Homo sapiens
gaggatttctgtgcctggaaaatatctgttaacagactgcttttacacctacttgtctgagggaagtcaaaagcatgcaagcctacagaaaagcattgag

SEQ ID NO: 675091 - DNA, 82 bp, Homo sapiens
agattctctcccaggccacaagacatttcctgctcggaaccttgtttactaattgtcatgactgtccaaagtatgataatca

SEQ ID NO: 675092 - DNA, 76 bp, Homo sapiens
caagtcctatgagctcatccggaagattgaggcctacatggaagagcccataggcagcatgtcatccatggaagtg

SEQ ID NO: 675093 - DNA, 75 bp, Homo sapiens
acattcggggtgccagaaggaaagcataggtgcgagaagatgtactaaattcattgaataacaactttcttcaaa

SEQ ID NO: 675094 - DNA, 101 bp, Homo sapiens
agttgggcaggcatgcctcattcctggaattgacagtcattcctaatcattagtgccagcagtagttcccaagggctgtctcagccatccacccagacgac

SEQ ID NO: 675095 - DNA, 103 bp, Homo sapiens
gggagcctcagcaggattgctgtgtgaaaaccgagctgctgggagaaggctgctctttggcgtaaattgcaatcgattagggatcgtttctcagaatcaagtt

SEQ ID NO: 675096 - DNA, 100 bp, Homo sapiens
attggactgatccaggctggacccacgtctgtctggtgataccaggggcagagggaccactctgacagggacattgacaaggtagatgaactgatgactg

SEQ ID NO: 675097 - DNA, 100 bp, Homo sapiens
ggagagacaagaggagaaggagagcctgggacgggaggtggagagtttgcagagccggctgtccctgctggaggttctggcctataggaacaagacattt

SEQ ID NO: 675098 - DNA, 75 bp, Homo sapiens
aaccccgctggttataatccttcaatatgctcaagtggtcctgtcgaagtatttatcactgagactccgagtcag

SEQ ID NO: 675099 - DNA, 75 bp, Homo sapiens
gaatgtccatgacagctcattcacatggctagtgccttgaccatgctcgacagctgaccaaggccatgatgcgaa

SEQ ID NO: 675100 - DNA, 100 bp, Homo sapiens
gcaagatggcgcagacgcagggcacccggaggaaagtctgttactactacgacgaatcccaaggactgcagcaaagccaaaaagctggtgtgtaatatca

SEQ ID NO: 675101 - DNA, 88 bp, Homo sapiens
gcggcggccgaggaggaggagggggaagcggcggcggcaaaggtggtcccaggctgcacccatggcagaaggaggagggcagaatcat

SEQ ID NO: 675102 - DNA, 73 bp, Homo sapiens
ctccttcaatgaggccaccatggttctggtctcctggatcatgtggctatgtcttgcccagccacgtgactga

SEQ ID NO: 675103 - DNA, 75 bp, Homo sapiens
ggagaggagaagagatgctggcgtgaagggaaaatactgcagtttctacctgaacgaattttctttcgatggcat

SEQ ID NO: 675104 - DNA, 100 bp, Homo sapiens
tgaagatgaacacagtattgaaatgcatttgccttatacagctaaagccatggaaagatccgtgattctaactgcaactatgaggcctttatgaacatta

SEQ ID NO: 675105 - DNA, 88 bp, Homo sapiens
gaagatctccgcactctggagcataatgtctacttgaaggaaattttgccaaagaagtgagccatgaaatggatggacttatttttca

SEQ ID NO: 675106 - DNA, 82 bp, Homo sapiens
cagcactgactttcagctatggaatcggatgaaacgaggaggaagagatagtgaccgtaattcatcagaagaaggaactgca

SEQ ID NO: 675107 - DNA, 100 bp, Homo sapiens
ccttctgtgcatcgacttcaacaagaacctgaacgaggacacgaccttcctgcccttcacgctccaggagctaggtcaaaatgcagatcttcgtgaaaac

SEQ ID NO: 675108 - DNA, 98 bp, Homo sapiens
cgacggcatttaacaaggcggtgtggtttactccatgcagttgtcaggaggagtacgagagggcctccaaagtggaccagtttgtgacgcgcttcctg

SEQ ID NO: 675109 - DNA, 82 bp, Homo sapiens
gaagtctgtgtcaaacatccatatcataagtggaattttggagatattcaaagatgagattgtggggaacctgggtgaaggc

SEQ ID NO: 675110 - DNA, 75 bp, Homo sapiens
gctggacccgagccagcgaccgaagcagaaggaggaggagactctgtccttcatccgagacagcctggagaagag

SEQ ID NO: 675111 - DNA, 50 bp, Homo sapiens
gagaaatccaacgacctttctatccagttgttacaggatcttgcttgttc

SEQ ID NO: 675112 - DNA, 76 bp, Homo sapiens
aagagaggtgcctttatctgatgatgatgaaagttacacaggttcacagcatgtccgcctcggcccctgctgcgga

SEQ ID NO: 675113 - DNA, 101 bp, Homo sapiens
tccagcttcctcatcagtgcctgcttcaagcttatccaggacctgctctccttcatcaatccacagctgctcagacccctgacctggagcagctggagccg

SEQ ID NO: 675114 - DNA, 83 bp, Homo sapiens
caggtgcagagcatccctgacgcacacaggtttggtgcacctcgatttggaggaagtagggcagggcccttatctggaaagaa

SEQ ID NO: 675115 - DNA, 83 bp, Homo sapiens
tttgcagctcggagcctgtggcggatggtgggactctccggccctgtgcagtctacaccaaaattgcattgagccaaacttgc

SEQ ID NO: 675116 - DNA, 50 bp, Homo sapiens
cgcggctctaacggggctttctacaagggccaggtctggattaatggctt

SEQ ID NO: 675117 - DNA, 75 bp, Homo sapiens
cgcagatgttgtcaaggtggcctaccaggaggccaggggtgtcgccatggtattcctccacctcgtcctggcatg

SEQ ID NO: 675118 - DNA, 85 bp, Homo sapiens
actatccttgcagcccttgtggaaagaccacagcaagattctttcattcgtctcctcctagcctgggggaccaggctcgaactga

SEQ ID NO: 675119 - DNA, 74 bp, Homo sapiens
gctctgcgctggccgggggcgcgggcggcggcgccggcaggaagctgtctgtggaagcccgtaaagagatgact

SEQ ID NO: 675120 - DNA, 100 bp, Homo sapiens
cgccgccgggacccccaggacgacgtgtacctggacatcaccgttcctccgtgtcacaaagcagtacctgccccacgtggcgcgcctctgtctgatcagc

SEQ ID NO: 675121 - DNA, 102 bp, Homo sapiens
agagccctacaatgtgaagatacataagatcgtagccagacccccaggaaagctgtgtgaagagacaaagggagaatgccatgtgaagatggaggatcggag

SEQ ID NO: 675122 - DNA, 96 bp, Homo sapiens
cgaggaggcagccaagctcatggcctgccactgcgtgcgtgtcatggagaaactccagctgggcccagagattctgcagcgggaaaatccaaggct

SEQ ID NO: 675123 - DNA, 100 bp, Homo sapiens
agctgtttccatatgacccttatgaacgagctcgccaaaagatgttattggagctattttgtaagctccagtgatccacaagctcagaaatacatcgcgg

SEQ ID NO: 675124 - DNA, 82 bp, Homo sapiens
cgacaagccgctggcagccgcggatctcaccgccgctcagggctcccgagccagccgggaggacacttactacagctgctca

SEQ ID NO: 675125 - DNA, 116 bp, Homo sapiens
tgcctacatcaagaattcaaacccagcactcaatgacatggaatgcagtagccctctgggcctgggatattgtggttgataactgtgccatctgcaggaaccacattatggatctt

SEQ ID NO: 675126 - DNA, 101 bp, Homo sapiens
agaagatcgccaagagatcaaagataaaatcttttgtgaaagtgtataactacaatcacctaatgcccacaaggaatcctgcaatatggcgaacataagag

SEQ ID NO: 675127 - DNA, 75 bp, Homo sapiens
ctcccgctccgcagccccgggcacggcggaggcagcggagccctgggccatcgacactgccctaaccatcatgga

SEQ ID NO: 675128 - DNA, 111 bp, Homo sapiens
tgcgtacttacacagaaactaattgagacattgaaaccctttggggtttttgaagaggaagaggaactgcagcgcaggaccctgatgctcccataagacagaaaatgcccc

SEQ ID NO: 675129 - DNA, 98 bp, Homo sapiens
ccaacgacatcgtctatgactgcctccccctctaccactcagcaggacactttgccaccatcaccttgaccttcatcgacaagaacggagagactgag

SEQ ID NO: 675130 - DNA, 83 bp, Homo sapiens
ccctcatcctggttctggaatcctcagttcaaggttggacgtgataagtatgagcctgcagctgtttcagaacaaggtgataa

SEQ ID NO: 675131 - DNA, 108 bp, Homo sapiens
ctttgatgactttgcacattatgaaaagcgtcaagaagaggaggaagccatgcgtaggttttctgagtttaaccagtaatgccattcagttgccaatctcaagcaaag

SEQ ID NO: 675132 - DNA, 90 bp, Homo sapiens
aaatagacgcaccattgaagttaaccggtgtaggagaagaaatccgcagaagcttattaaagttaaggaaaattgcctaagaattatgac

SEQ ID NO: 675133 - DNA, 90 bp, Homo sapiens
cctcaatttaagcctgatctaacccctagaaacagtgtaaacaggaacatcgataagtagtgtaaaaacttgcacaatgaaatccgaagc

SEQ ID NO: 675134 - DNA, 74 bp, Homo sapiens
aagtcttcatctcagcaccgagaagtgagcctgagtatttgatttctgacactggaggacaacagctctcaata

SEQ ID NO: 675135 - DNA, 100 bp, Homo sapiens
aaatatgcagcaaagattacaccaagatctgtgctgaccacaggaattggatctactagtgcagttacaggtcggttcacccagaagccagggggcatct

SEQ ID NO: 675136 - DNA, 75 bp, Homo sapiens
gaagaagctgccgtttttcctgaagttgcatttgatggtagagtggtggcaaagcttccttttacccctctttct

SEQ ID NO: 675137 - DNA, 101 bp, Homo sapiens
gtgagaagggccggcggattcgggaactgactgctgtagttcagaagaggtttggctttccagagggcagtgtagagccgaaggagtaaaggtgctgcaat

SEQ ID NO: 675138 - DNA, 98 bp, Homo sapiens
tgagaactacaacaagttcatctcagccacagagcccacaggcggttttgtgagctgcttccccaggagcagcggagcgtggagtcgtcacttcgggc

SEQ ID NO: 675139 - DNA, 98 bp, Homo sapiens
cgaatattgcaagaagcaggcgcagacatctccaaaacagtcatgtcacacctggatagttggttgaatctggcgatgtggaacccatggatatggag

SEQ ID NO: 675140 - DNA, 100 bp, Homo sapiens
tgtgcacctgccatgcaggtttctttctaagagaaaacgagtgtgtctcctgtagtaagtaccaggtcatcagtacaccatctgatattttcatggtgat

SEQ ID NO: 675141 - DNA, 76 bp, Homo sapiens
atgaagtgcagaggtttttttctggagctgctgtggctttctttgaggagacagcccgccagctgggcctgggctg

SEQ ID NO: 675142 - DNA, 50 bp, Homo sapiens
gttgccggaagttgagcggcgatcaaaggtccatcatcaaaacaccaaag

SEQ ID NO: 675143 - DNA, 82 bp, Homo sapiens
accagcagtgcataaacgaggcgcagcgggtgaaggacttctgcacggacctggccgtctccagtgccaacttcattcccac

SEQ ID NO: 675144 - DNA, 75 bp, Homo sapiens
agtggatgtcgagaacggtgcttctatggcaggatatggttggaagcgagatagagaaaaaagggatgatcaaga

SEQ ID NO: 675145 - DNA, 50 bp, Homo sapiens
tcccagtactttgggaggccaagggtctcactctctgacctcagctggag

SEQ ID NO: 675146 - DNA, 58 bp, Homo sapiens
gccggagctgaccccggaggaggagcaggatcccggctactcaacagaaatgaaggag

SEQ ID NO: 675147 - DNA, 100 bp, Homo sapiens
acagaagtttatcaaggctgtcacacatcaagttaaatttggtcaacaaaatccacgtcagatacacattccagttttcctgatggtgaacaaataggcc

SEQ ID NO: 675148 - DNA, 74 bp, Homo sapiens
ccaggtcctggcggcccccagccgccgcccacgcagcagggacagcagcaggacctcagcaggaccccaggcta

SEQ ID NO: 675149 - DNA, 83 bp, Homo sapiens
catcgtcatcgagccggcccagcttctgaagggagatgtcatggtttggtgcacctcgatttggaggaagtagggcagggccc

SEQ ID NO: 675150 - DNA, 98 bp, Homo sapiens
gcgactgaggcacagagtgaaggggaggtgccagcccgcgaatccggccggagagcatccacaatgggtaccccagcctcggtggtcagtgagccacc

SEQ ID NO: 675151 - DNA, 101 bp, Homo sapiens
aatgtttgacgacactgatggtttgtgcacttggaggctcctcagctcttcatatcccagcttttccaggaggaggatgtctcattgattacgttcctcaa

SEQ ID NO: 675152 - DNA, 97 bp, Homo sapiens
agactacaaggacagcagcgactttggggcccgtcaccctcaggctagcttgtcactttctgcaaaggtttccctcagggagcctcctgctgccagg

SEQ ID NO: 675153 - DNA, 50 bp, Homo sapiens
gcagggaccagcagttactgggaagtagtttatgccaacgtgacttcatt

SEQ ID NO: 675154 - DNA, 82 bp, Homo sapiens
cgagaccgtcctggcgcgatgcgtcaagtacactgaaattcatcctgagatgagtgatcagggccaaagcggtcagtgagaa

SEQ ID NO: 675155 - DNA, 100 bp, Homo sapiens
aagaaccagatgtcaaaactgatttcagaaatgcatagttttatccaggaaatctgaaatagagtactatgctatgttggctaaaactggtgtccatcac

SEQ ID NO: 675156 - DNA, 50 bp, Homo sapiens
tcttcgagtatttgtagaagggcctggttggtttacacaacattggacag

SEQ ID NO: 675157 - DNA, 74 bp, Homo sapiens
gctgtgctcgcgctactctctctttctggcctggaggctatccagcatatcaacctgaattctcctaacaaagg

SEQ ID NO: 675158 - DNA, 100 bp, Homo sapiens
agtttttgtcttatttcaggcagctctgtccagtggagtgacccgttgccagagtgcagagctgaactgtcccaagcaataaacagtggtacattgttat

SEQ ID NO: 675159 - DNA, 75 bp, Homo sapiens
aacatcttctggacctttgtccagaggaggaagaaggtgggaaaggtgaaaagaggaagagagaaacagatgatg

SEQ ID NO: 675160 - DNA, 98 bp, Homo sapiens
cgagcggcaacggggctccgggccctaaggggaacgcggcaggcaaagatggcaaagagcgcttgggcggctcagtgctggggcagatccccttcctg

SEQ ID NO: 675161 - DNA, 100 bp, Homo sapiens
ctactgcacagcagaagctctgaatcgtgttcctgaatgaaagaagtcagctgggatctagcaattgggaggcagcagacttgggtaatgaagagagaaa

SEQ ID NO: 675162 - DNA, 107 bp, Homo sapiens
tgaaacttatcccagagctttgctacattggaacagggccgcctctcaaggtacaggtttgcagattccgccagcagcacagcaagctctacagatgagtggctctt

SEQ ID NO: 675163 - DNA, 100 bp, Homo sapiens
ggacgacaaagatggcggcagggaccagcagttactgggaagaaatctgggctgcaatttaattacaaaactgagccttggaacatttcaggcctggcac

SEQ ID NO: 675164 - DNA, 90 bp, Homo sapiens
tgacaaagcagtggaagtatccaattgagcttcatgggattgaagaaagcccccaggctctcccggctgtcccgccagatggtgccccag

SEQ ID NO: 675165 - DNA, 146 bp, Homo sapiens
tgaaagcctacattcgctctcagactggggttcagattttaatgaagattgaatatatgcagcaaaatttagtaagtgaggaacttcaagatgcactaggtgtgacagacaagagtcttccaccttttatctatcggatgcgccag

SEQ ID NO: 675166 - DNA, 83 bp, Homo sapiens
aagcagaaagccgcctcttggtttgcgtcctgcactgaaaggaaatgacggattttgctcctctggcccagcctgagtccccc

SEQ ID NO: 675167 - DNA, 50 bp, Homo sapiens
gaaatgtgcccaacatcatcattgcggagccaaggcaaagagggaccact

SEQ ID NO: 675168 - DNA, 78 bp, Homo sapiens
ggcgcagagctgctggtcgacgtgggtcagaggctgcgccgtgactcggtgaaatacctggagtgctcagctctcacc

SEQ ID NO: 675169 - DNA, 100 bp, Homo sapiens
cggagcgcaggcctcgtgccgttacggccatcacggcggccgcagtggcgtcctggagccctcctcagatacttggcatatcgaaattttatgattgaca

SEQ ID NO: 675170 - DNA, 100 bp, Homo sapiens
cctgccgtctccgccatcgagcgcccctccgagctggggttggacgctgccagtttgcacagcagcaggtgtggacactgccagcggctgcagccgactt

SEQ ID NO: 675171 - DNA, 100 bp, Homo sapiens
cggactcccgcggcgggaggagcctgttcccctgaggtcctcttcctgatggatgggaacaagccatgactcaggatggagaaatttactatataaacca

SEQ ID NO: 675172 - DNA, 83 bp, Homo sapiens
cgcgcagccccggcctctcggcctctgccggagaaacagcaaattgtggctactaatttgccccctgaagatcaagatggctc

SEQ ID NO: 675173 - DNA, 126 bp, Homo sapiens
gctgcagggccgagatccaggagaaccacgacgagacctacggcgtgccctccctggaggagctggtttaattggttggggtcagataagaagaggagtgacaatcaagccaacagtagatgatga

SEQ ID NO: 675174 - DNA, 82 bp, Homo sapiens
tttccacagtgattgatgctgcctcagctcctcaagagttactgatctatgaaatggcagagaatggaaaaaattgtgacca

SEQ ID NO: 675175 - DNA, 76 bp, Homo sapiens
tccttaacacaagccacagatggcactctgattcggcttgcaaaaaagagatcatcactggtatgccagcctcaac

SEQ ID NO: 675176 - DNA, 75 bp, Homo sapiens
gacctcatgtccctgtgggacacaatgcccccaagatgttcctcctgctgatcaagagaagctttttatccagaa

SEQ ID NO: 675177 - DNA, 97 bp, Homo sapiens
catcacttgacacagtactagtttggataagtttagcaaggtcattgaatctttgggaattattatttataaagcactggactatggtttgaaggag

SEQ ID NO: 675178 - DNA, 100 bp, Homo sapiens
tgtaggctggagggactgtgaggtaaacagctgagggggaggagacggtgggaagctgaaccatctatctccagaaatgtcttcagaaagtaaagagcaa

SEQ ID NO: 675179 - DNA, 82 bp, Homo sapiens
cccccggcctgcgctcccatccacacgctcggtgagaagccctaccactgcaactgggacggctgcggctggaagtttgcgc

SEQ ID NO: 675180 - DNA, 100 bp, Homo sapiens
gggaaggaagatccggcgcggggcacaggatccggagctggagcccccaggcgacgctctccgaaagcctcgcctccagaagcccatcacggggcacttg

SEQ ID NO: 675181 - DNA, 98 bp, Homo sapiens
ggatctcatatcttcacttggcaaactcaacaaggtcaaagaaagtatctgttccatcaactgtgatatccagagtgattggaagaggaggctgtaat

SEQ ID NO: 675182 - DNA, 95 bp, Homo sapiens
ggcatggaagagaagaacttctctgctgaagaagcatcttttagggatcagcctgtgttttttagaactgataaatttcaaacggaagagagtgg

SEQ ID NO: 675183 - DNA, 75 bp, Homo sapiens
cgcagccgcctcagaacccgaccaacatccagaacttccagctgcccccagaattggcagagggggtcgatttgg

SEQ ID NO: 675184 - DNA, 98 bp, Homo sapiens
cttctttgcctttatcagcttgtgaaaaattatgagccaggagtggtggctcacacctgtaatcccagctctgggaggccaaggccagtggattgctt

SEQ ID NO: 675185 - DNA, 82 bp, Homo sapiens
gtcacttgcctcccgggagtcgctgtggcaaaaggccaagtcctgtatctgccatgtctgtggcgtccacctcaacaggctg

SEQ ID NO: 675186 - DNA, 100 bp, Homo sapiens
caaggaacatcttgccaatttcaaatcgggtctctaattaacagaagatggcaaagcccagccacagcagctatgtccttcagcagctaaacaaccaaag

SEQ ID NO: 675187 - DNA, 75 bp, Homo sapiens
ctgaagcgcacgacctccgactactttctccttcaagggtgtgctgatctgcaaaccctggacacaatgcagcca

SEQ ID NO: 675188 - DNA, 101 bp, Homo sapiens
agtcgcctccaggccaagagggatccttcacccgtgtctgaattcctagaggacctgtgcaacaacctcttgaggatcgaatcttcactcccgctgtctca

SEQ ID NO: 675189 - DNA, 102 bp, Homo sapiens
ctgacttcaagaatgaagccgcggaccctcacggaccccagagcactttagcccacagtggtgaagcttgctgaatatcaagttcttactgcagagattggt

SEQ ID NO: 675190 - DNA, 51 bp, Homo sapiens
gaacagttgttgcagcaagcgattcagcatatagcactttctacattgtgg

SEQ ID NO: 675191 - DNA, 74 bp, Homo sapiens
acggcgtacgccctcatggggaaaatctccccggtgactttcaggccctcgggaccaaggatcacgtcatgact

SEQ ID NO: 675192 - DNA, 100 bp, Homo sapiens
gctgacgcggctaaagcagattggagctctgcagtaaccacaggaaagaccacagcaagattctttcattcgtctcctcctagcctgggggaccaggctc

SEQ ID NO: 675193 - DNA, 75 bp, Homo sapiens
tgagatggagcgaaagcacgccgccatccagcagcggagtgcatgctgaggctggtagactgtgccatggggact

SEQ ID NO: 675194 - DNA, 75 bp, Homo sapiens
cgcacaggccgtcgctatgagcgggaccaccctgggcacagcaggcatcggaggcagcctgcttctgcaaagtgg

SEQ ID NO: 675195 - DNA, 83 bp, Homo sapiens
tgtcagttaactggatatcaactacagcctccagcatcacagtttctgggattaccgccagcctcggaaatacctcaatattc

SEQ ID NO: 675196 - DNA, 50 bp, Homo sapiens
gccaacttctgctacagacgactcagtgaatgcatcccggcagggtattg

SEQ ID NO: 675197 - DNA, 101 bp, Homo sapiens
ccaggccttccagtacacagacgagcatggggaaggtctgtgcagacttttgcagacaaatcaaaacaagaagctctgaagaatgacctggtggaggcttt

SEQ ID NO: 675198 - DNA, 101 bp, Homo sapiens
cagcagcttcagtagcgcagaggcggcggtggcgagaggtgcggcgaaggaggcagaggcacttatgcttgtcagattttaacagcttctctgtggatgat

SEQ ID NO: 675199 - DNA, 78 bp, Homo sapiens
cagactccactccccagctgtgaaagggacctgctgaagctcacacccgtggaccacccagactgcctgccgctacag

SEQ ID NO: 675200 - DNA, 81 bp, Homo sapiens
cggagtatctggaaagctcgggacaggatggatgcttggatattaattcatctgtgaaaggggctcgttttgtcagattct

SEQ ID NO: 675201 - DNA, 83 bp, Homo sapiens
acttcatccaggcctacgaggaggtgcgcgagaagtacaaagtgcctccggagccagcgtggtggccatagacaacaagatcg

SEQ ID NO: 675202 - DNA, 97 bp, Homo sapiens
cctgcggctctctacgtccctgcggagcagccggtggaatatgtgatcaagtgtgacatgtcagctctgcagaagattctgtatcgccatatgcaag

SEQ ID NO: 675203 - DNA, 83 bp, Homo sapiens
cggaagcgcgcgtggccgccatggcgcggaatgtggtaaagtttcctacactactgaggtttaggggcactgtgaagcaaaag

SEQ ID NO: 675204 - DNA, 100 bp, Homo sapiens
cgacgagctgaccctgggagacatcgacgtattcatgtgattgaacggcgtgctcttcctgagttcttcaatggaaaaaacaaatccaagactccagaaa

SEQ ID NO: 675205 - DNA, 83 bp, Homo sapiens
catctttttgaaccaaattatgctgcaaatcccgtgcagcctgccaggactcttccagacacgggatttgtcggtgaacaacg

SEQ ID NO: 675206 - DNA, 100 bp, Homo sapiens
cggccaaagtcactgctgttaacaaggatgactacatttggtcaattttgtggaacctgtgggcctcaattactccatgtttattcctaccttgctgaat

SEQ ID NO: 675207 - DNA, 100 bp, Homo sapiens
tcgccactatgttgacaggctatttgaccctgatccccagaaagttctacaaggtgtcatgagtctactatgcaactgcatactggatgcctgctgaaaa

SEQ ID NO: 675208 - DNA, 75 bp, Homo sapiens
accaggatggagataaaggaactcaaagaatttgggaaacccttttccaaagagaaatgaagaagaaaactgtat

SEQ ID NO: 675209 - DNA, 100 bp, Homo sapiens
cgccagaaggaagatggcggatctggaggagcagttgtctgatgaagagaagggtggtgatgaagagtaaatcaaagagtttagcagaatgcttcccata

SEQ ID NO: 675210 - DNA, 100 bp, Homo sapiens
cgacctgcagcgcccggctgcctcgcactccgcctcccccggctcagcccccggccgcggcgggacccgagtatttgcaaccacgtggcttcacgagtcc

SEQ ID NO: 675211 - DNA, 75 bp, Homo sapiens
actcatccccgggagtgttgaatctcttccgttccctgctggcagttcatcagctggatcagccacatggtggcc

SEQ ID NO: 675212 - DNA, 88 bp, Homo sapiens
tcagatctgtgcaccattaatgtgagtggcctgaagttctccaagcagttccaagagcctctgagttcctgccttttttcatctctga

SEQ ID NO: 675213 - DNA, 90 bp, Homo sapiens
aaaagaacttctctgatatcatccctcagcactgatgttctcatgggagcagtgccgtgtctgcatggctcaggaagaggccaaagaagc

SEQ ID NO: 675214 - DNA, 100 bp, Homo sapiens
cggcacctggacttggcttccctcaagtctatccgagagtttgcagcaaagatcattgaagacgcaaacatgcagatctttgtgaagaccctcactggca

SEQ ID NO: 675215 - DNA, 82 bp, Homo sapiens
ctcagctgaaagatttactgcctgaacatctgaaattgacagatggctggctgtggtgaaattgatcattcaataaacatgc

SEQ ID NO: 675216 - DNA, 50 bp, Homo sapiens
ccgctgccgccgccgcgcgcggctatgacagagactccactttcaatgtg

SEQ ID NO: 675217 - DNA, 88 bp, Homo sapiens
catttcaactatccaagcacaccaccttctgaaagaaatggcacttcatcaacttgtcaagaatgccagctgatgaagaccgagaggc

SEQ ID NO: 675218 - DNA, 74 bp, Homo sapiens
gccccggcagttcgtgaagctcctactagaggaagatgcagccagttttaattgataaagaccagagtccaaaa

SEQ ID NO: 675219 - DNA, 98 bp, Homo sapiens
gtcaaatttgaaaactttgaggatgcagcactggaagaaaatggtttggctgtgataggagtatttttaaaggaacggttttccaaagcagacagcag

SEQ ID NO: 675220 - DNA, 98 bp, Homo sapiens
tggactctgagtcgtcttggtcccaggagccagtagtgaaggcaacagtctgcccacctgtggacaccagatcaatgagctgagcaatgttcctgttc

SEQ ID NO: 675221 - DNA, 75 bp, Homo sapiens
gctgtggaaagaagttgcaaaacactgggtgaatcaggtctaggaaaatcgactctcataaacagcctattccta

SEQ ID NO: 675222 - DNA, 51 bp, Homo sapiens
gcggcgcggggaccgctgtgctctcggttttacgagaggcgaaggagaaag

SEQ ID NO: 675223 - DNA, 96 bp, Homo sapiens
ctctctggaccttgtctcgctcgggagcggaaacagcggcagccagaggtgaagcaaaaaatttattgccatatcttggaccccacaaaatgagag

SEQ ID NO: 675224 - DNA, 100 bp, Homo sapiens
tcctggagtcaacggtgctcctggtgaagctggtcgtgatgcctcggcccccctggggctgtggacaggagctctggctgtcctacgtagcttgtggagc

SEQ ID NO: 675225 - DNA, 76 bp, Homo sapiens
ccccctgctgtaccggcagcaccagaaaggccttttccacctcatatccagctccctccagaaattcaagagtccc

SEQ ID NO: 675226 - DNA, 82 bp, Homo sapiens
ctccactttcgccagcccgtgccgcgagcgcggcctgcaggagggtgtcttttatgaataatcaaaagcagcaaaagccaac

SEQ ID NO: 675227 - DNA, 50 bp, Homo sapiens
tgcccatcctgccttcaagtacctggcccttgattatggaagattcccac

SEQ ID NO: 675228 - DNA, 98 bp, Homo sapiens
aaggattccaagtaactcttatttgatgccttcaattaagttgcagagttctgatggagagatatttgaagttgatgtggaaattgccaaacaatctg

SEQ ID NO: 675229 - DNA, 82 bp, Homo sapiens
gcagccgggcgctgcggccgggcgactgcgaaggttcatcatgcctagtggcgtataagaagaccccgccaccggtccctcc

SEQ ID NO: 675230 - DNA, 75 bp, Homo sapiens
atatgtggacaacacaaacctggtccccaggctctggttgaaaatcgatgactttaatgatgaactcaataagct

SEQ ID NO: 675231 - DNA, 82 bp, Homo sapiens
ctttaatatgctggatgagctgctgaagcccaccgaattaggattatatctgtccaagatgcgagtctggttttatcgagga

SEQ ID NO: 675232 - DNA, 75 bp, Homo sapiens
ttccatcatggcgtcaatgcaggtgtggatgaggtcaccattgtcaacattttgaccaaccgcagcaatgcacag

SEQ ID NO: 675233 - DNA, 51 bp, Homo sapiens
gggtaacatggcggatgcggaagattgatatgctgctgaaagaatatttac

SEQ ID NO: 675234 - DNA, 100 bp, Homo sapiens
ctcatggccgcagactgcaaacagatcatcgcacccccagagcgcaagtactcggtgtggatcggtggctccatcctggcctcactgtccaccttccagc

SEQ ID NO: 675235 - DNA, 75 bp, Homo sapiens
cttttggggggaaactaggtcgatggtcggcggcgcccggatgggcagctgagttcatagccctgatgaagcaag

SEQ ID NO: 675236 - DNA, 95 bp, Homo sapiens
cagataaaggtggatgaaaatgaaaactgttcctctctgggatctccaagtgaaccaccacagataaacaacttgatgcagatgtttcccccaag

SEQ ID NO: 675237 - DNA, 96 bp, Homo sapiens
tggataacgggaggtgaatttccatgtcaacatagtcctggaaaatatatgcagatgatgaacattcttaagccaattgcctttgatgttattcat

SEQ ID NO: 675238 - DNA, 98 bp, Homo sapiens
ctgaccgcaggctgttggaaactggaggactccctggaggaaaagcggaagcggcagcggtctgaacgcctggaacggattttccaacttagtgaggc

SEQ ID NO: 675239 - DNA, 83 bp, Homo sapiens
cagagaacaagaggagagttgaagagagcaatggacatcttttcagcagttgctctaggtcgtaaccagcctttgaaaaagga

SEQ ID NO: 675240 - DNA, 50 bp, Homo sapiens
ggcaccttcggcaaagtgaaggcctaccgtatgtgaacgggagctgtgtg

SEQ ID NO: 675241 - DNA, 75 bp, Homo sapiens
ttaaagactcccagctccgggagttgctgctgcctccaccagacaccaaaccagcatggggtcctgtcccagcaa

SEQ ID NO: 675242 - DNA, 82 bp, Homo sapiens
gctcaccgagacggcgatccgggcgctcgagacttaccagagccacaaggctgaccccgcactacatctacccaccagccat

SEQ ID NO: 675243 - DNA, 75 bp, Homo sapiens
tcaaggagaacaaaaatattaatgaggctatgaggattccggagtttgaatccacctttgacaattgtccgaaag

SEQ ID NO: 675244 - DNA, 74 bp, Homo sapiens
gttcgcgcccgccgacccgcgccctgctccctctcagcacctgggcggacgatatttggagttcttacaacatg

SEQ ID NO: 675245 - DNA, 98 bp, Homo sapiens
gttccctgtcttgggaaaaggagaactcctgactgattagcattcacaccagggaaacagtgcttcttagtcctacgtcagcagcagtttaatgtcca

SEQ ID NO: 675246 - DNA, 100 bp, Homo sapiens
ggccgcattcccgcccgtcccgcagcggcgcgcggagccagacactggctctgagaccccgactgcccgacggctctacactgccagcgggcctcctgag

SEQ ID NO: 675247 - DNA, 75 bp, Homo sapiens
gttcaaggaggccttccagctgtttgaccgaacaggttgggacagcgtcttcgctgctgctggatagtcgtgttt

SEQ ID NO: 675248 - DNA, 83 bp, Homo sapiens
gggcaagaggcggatggacacggacgtggtcaagctacattgtggatatcaagcctgccaatatggaagagctaacagaggtg

SEQ ID NO: 675249 - DNA, 100 bp, Homo sapiens
catcaaactcctcgaagagactgataaagcaccagaagtcatcagaatgcaagataaaaatccatacagctttcagtcagatgtatatgcatttggaatt

SEQ ID NO: 675250 - DNA, 50 bp, Homo sapiens
ccactccttcctccgagggctgtttgggtactgtgactgctttgccagtg

SEQ ID NO: 675251 - DNA, 100 bp, Homo sapiens
ctcaagctcaacaactgtggcatgggcattggcggcggcaaggaaagaccacagcaagattctttcattcgtctcctcctagcctgggggaccaggctcg

SEQ ID NO: 675252 - DNA, 74 bp, Homo sapiens
caccatcaacatcaacacctccacctccaagttctgcacagccatcatcacagaagagcatgcagccatgtgga

SEQ ID NO: 675253 - DNA, 83 bp, Homo sapiens
agaaggcggaagtggaggtggctgacgagctgctgggccctgggaggagcggggacactgaggacctctctccaaattggcct

SEQ ID NO: 675254 - DNA, 75 bp, Homo sapiens
caggcaacaaatatgaatgacttcaaacgaactgagcaagtggagtagcagaaccaggagcctcttccatacatg

SEQ ID NO: 675255 - DNA, 74 bp, Homo sapiens
agcgaagccgaaaaaggcagcagcgaaggactactgttcgaagatttttggaagaatactgagaacggcataaa

SEQ ID NO: 675256 - DNA, 87 bp, Homo sapiens
ctgccagcgcatccagagtcagctgcatgaagctggagggcagatagactgtcttcaagctcactgatattttcctctgcttgatcc

SEQ ID NO: 675257 - DNA, 50 bp, Homo sapiens
ccggagcctagaagtcagctgtctgcctcagccacctccctgacgctgtc

SEQ ID NO: 675258 - DNA, 109 bp, Homo sapiens
ccgagaggccgtgcgggacgcgggcgccaggaccggccgaacgcagagacaatgcagatcttcgtgaagactctgactggtaagaccatcaccctcgaggttgagccca

SEQ ID NO: 675259 - DNA, 98 bp, Homo sapiens
ttctgattcttgtcactttaattacttgagaatttataatggaattggagtcagcagaactgaaataggtgtgttccagagaacaagccttcagacat

SEQ ID NO: 675260 - DNA, 80 bp, Homo sapiens
gaggaggaggcttgggcttgcgccgttgaaggaatactcccccagttgcaagaggcgcaggaccgtggaagacttcaaca

SEQ ID NO: 675261 - DNA, 73 bp, Homo sapiens
agccaacaatagcagtattacatcggaccaagaatcgccttcagccctgtctggtgcatccttggcagaaagt

SEQ ID NO: 675262 - DNA, 104 bp, Homo sapiens
gtgggcgcgcggcacgcagccgggaggccgaggactcggagttcacctgcagctctacaaaaacctctggggcgctgtcctgcaggaaagcaaggtgttggagc

SEQ ID NO: 675263 - DNA, 100 bp, Homo sapiens
aagatggcagcagtgactctgctggctttggcgtatacacaggcttcctggactgggtccccaagaagatgcagcgggtgggctgtgtggagctgctcaa

SEQ ID NO: 675264 - DNA, 100 bp, Homo sapiens
cctggggaaggagctgattcacgaaggagagcgtttcaaccgtggcatttgctctctgcattccagttagcaaatggggacgtgttcctcatgatccggc

SEQ ID NO: 675265 - DNA, 90 bp, Homo sapiens
ggctccctgcagtttggctacaacactggagtcatcaatgccccccagaaggagctgacaagtacttgtagccctataatttcaaagccc

SEQ ID NO: 675266 - DNA, 100 bp, Homo sapiens
tgcgaatggacggcgtgggaagagccgccagagcagccaccctacccgcaccaccagggcggcccaccccactgccccccctggaacaacagccatgagg

SEQ ID NO: 675267 - DNA, 82 bp, Homo sapiens
gcactttgtggagaaagtcgtcttccacttgcacgaaagctttcctaggccaaaaagaggaaatctggcattttttaaagtt

SEQ ID NO: 675268 - DNA, 101 bp, Homo sapiens
cctgtccagtttgaaattctcagtgatcagtcagtcaactttggttttagtaatgagttattctccccacctcagaagtaccagcttttggtgtatcatgc

SEQ ID NO: 675269 - DNA, 51 bp, Homo sapiens
gtggatgatgccaaagttttattagtggagctaaatgaagtgggcttcaag

SEQ ID NO: 675270 - DNA, 100 bp, Homo sapiens
gccagcctacctgcgccgcctgcaggaatagccaggtctggctgggtcggcacaacctgtttgagcctgaagacacaggccagagggtccctgtcagcca

SEQ ID NO: 675271 - DNA, 100 bp, Homo sapiens
agactcacaattggagaaggacagcaacaccacctggggggagccaaacaggctggagtgcagtggcgcgatctcggctcactgcaagctccgcctcccg

SEQ ID NO: 675272 - DNA, 74 bp, Homo sapiens
cttgtgctggttgatgagttggacagcctctctcccattctgttttgccagctgtgtcagcgtgttatgatgcc

SEQ ID NO: 675273 - DNA, 100 bp, Homo sapiens
ggacacttggaaattgaacaagcgtcacttgacaagcctatagaatcggctgcactccccgaaagtgcggcagaggtgtcaccgatgtcgtcatcaccag

SEQ ID NO: 675274 - DNA, 74 bp, Homo sapiens
acagcatccaggcctcattggacagcattcgagacggagtttcactgttgttgcccaggctggagtgcagtggc

SEQ ID NO: 675275 - DNA, 50 bp, Homo sapiens
ctaaaccatatttgggaagacgaggttcacctaaggatcatgaacgtaat

SEQ ID NO: 675276 - DNA, 100 bp, Homo sapiens
ggacagatagctggcgtggataaagatggaaggctgtcggaaaaggtaacagaagatggaactcgaaatcccaatgaaaaacctacccagcaaagaagca

SEQ ID NO: 675277 - DNA, 100 bp, Homo sapiens
ttccttggagtgaaatcaggaacatctctttcaatgacaaaaagtttgtcattaaacccatcgacaagaaggcacctgttcaaatggaccacagtcattt

SEQ ID NO: 675278 - DNA, 100 bp, Homo sapiens
tgggcttctccagatgccggggctgggtccttcccaaggttgagctcgttctccgaaaatggtgtgaattgattcctggggctgagtttcgatgttttgt

SEQ ID NO: 675279 - DNA, 100 bp, Homo sapiens
ctgcaccggaaatgtgcctaccagcttggaagctcgaagtctggctgtggccatgggagatacagtagtggagcctgcccccttgaagccaacttctgag

SEQ ID NO: 675280 - DNA, 80 bp, Homo sapiens
gacgagagctccgtgcgggtggctgtcaggtcactgatatgatgcttcaggacaaaccctatcctgactggggaaaatca

SEQ ID NO: 675281 - DNA, 50 bp, Homo sapiens
gccaccacccactccggacacagaacattcctgatgtagatgaagaaggc

SEQ ID NO: 675282 - DNA, 114 bp, Homo sapiens
gagggagttgagccgcggcgtgtgcgccgagcgctactcgcaggaggtcttcggacacaatgtttgcacgaggactgaagaggaaatgtgttggccacgaggaagacgtggagg

SEQ ID NO: 675283 - DNA, 84 bp, Homo sapiens
agcgacaagccgctggcagccgcggatctcaccgccgctcaggaaatgaagctgttgtcatttctggaaggaaactggcccagc

SEQ ID NO: 675284 - DNA, 75 bp, Homo sapiens
gagaaagtcctacaacagtttggcgtgcaacatggggcttgagaaaggaaaacatcggttgtgaagagaaagcca

SEQ ID NO: 675285 - DNA, 74 bp, Homo sapiens
tagatgtacactgaaaactggacattataacattaagtgaactgcgccaggccactgtggccatgatgaacagg

SEQ ID NO: 675286 - DNA, 100 bp, Homo sapiens
gccaagtgatgtcatgcttgttcacttccgaaatgttgacttcaactatgctactaaagaacaagcgagtgagcatcaataaagatgagctgaagtcaac

SEQ ID NO: 675287 - DNA, 98 bp, Homo sapiens
ggggagcgtcctggggctgtgctccatggcgagctggatcaatgtccgagttaccaccatggatgcagagctggagtttgcaatccagccaaatacaa

SEQ ID NO: 675288 - DNA, 76 bp, Homo sapiens
ccctgacccatggcgctgaagaggattcagaaaatgtcctaaacgatgctatatttgatgaagatcatgatgagat

SEQ ID NO: 675289 - DNA, 83 bp, Homo sapiens
gctgacgtcgcaaaaaaattggatagctgggccagtaataaaggtgaaaattccaaaagataaggatggtaaaccaaagcagt

SEQ ID NO: 675290 - DNA, 114 bp, Homo sapiens
cgggggacgctgggctgagcggccggcggcgcgggcccggcggcggcggcagcggggtccgggtccggagcgccacagtcacgggaatccccatgaactgctctgtgaaactgc

SEQ ID NO: 675291 - DNA, 76 bp, Homo sapiens
ctaggttctgcggcacgggatggcggaggcgcctcctgtctcaggggctggttcacttctggttcttccacagcct

SEQ ID NO: 675292 - DNA, 100 bp, Homo sapiens
gctggtggaagcgctgtgcgccgcgggccaccgcgccgaactgctccggttcccgggcgtggtggaagtggaggagggcgaggtgaacgggcaggagctg

SEQ ID NO: 675293 - DNA, 51 bp, Homo sapiens
tgtagatacgttagccagtttacttaacaaagtgattccagttactcggtc

SEQ ID NO: 675294 - DNA, 101 bp, Homo sapiens
ggaaacctggcttctcctggctgtcagcctggtgctcctctatctatgctcccataatactctcagatagtgaagaagaagaaatgatcattttggaacca

SEQ ID NO: 675295 - DNA, 100 bp, Homo sapiens
gagacatgggagacccggggtcggagtcaggatggctaaaggtgaccccaagaaaccaaagggcaagatgtccgcttatgccttctttgtgcagacatgc

SEQ ID NO: 675296 - DNA, 100 bp, Homo sapiens
ctgttcctcgttatgaagaagggagagtacggtttccatgaatatacagaggtcaaaacagtcacagtgaaaatctctcagaagaactcataaagaaaat

SEQ ID NO: 675297 - DNA, 83 bp, Homo sapiens
cttcggcagtccacccaccgccgccgcctcccaggatattagaaatggctactccccagtcaattttcatctttgcaatctgc

SEQ ID NO: 675298 - DNA, 75 bp, Homo sapiens
aattcaaaaactacctcatccccaaggagtcatctgaaatcagagtcttcagatgaaagtgacactaacaaaaag

SEQ ID NO: 675299 - DNA, 100 bp, Homo sapiens
tcccttaatcaccattgcctacagtgacattgatatcaaagatgccaacagccagtctgtgaaggagtcttttagtcctgctatacagctgcaccttgta

SEQ ID NO: 675300 - DNA, 75 bp, Homo sapiens
agcaagacccacacgtccgttcgagctctgactgcagacctaccaaaacagacatatgtagagtgtgtcggtcag

SEQ ID NO: 675301 - DNA, 83 bp, Homo sapiens
gctgcagacactgaacgaggagccagtggtttttagaacttcagccataaaaatgggcagaattttccttgatcatatcggtg

SEQ ID NO: 675302 - DNA, 100 bp, Homo sapiens
aacttctatggtatggactacgcgacctccaaggatgcccgtgagcctgttgtcggggccagacctcctgccccccgaggtctgcagtctcctgaaccca

SEQ ID NO: 675303 - DNA, 80 bp, Homo sapiens
cgccagcaccatggccagcaccatttccggccaggtcagagcagcccaccatgggatggggagggggtggaggctgcacc

SEQ ID NO: 675304 - DNA, 138 bp, Homo sapiens
atgatgctagggaaattgtgaacaatgtcagacgaatgctagatggcctggatcctcatcccatgtgaagagtgaatctaccaagaacgttggcaatgaaaattgagcattttttctggaagaagaaagtgaaaactt

SEQ ID NO: 675305 - DNA, 82 bp, Homo sapiens
tgccacagttcagtgtattcgttctgtgcctgaactcaaagatgcccttaaaaggtatttctttaaatccagaacaatggag

SEQ ID NO: 675306 - DNA, 51 bp, Homo sapiens
gtgaaggaggcgaattttcagttgataggatgactgctcaggctgtagagg

SEQ ID NO: 675307 - DNA, 75 bp, Homo sapiens
tctctctgctgcggcgcggggaccgctgtgctctcgctcctggagtggatccggcgcaccatcccctggctggag

SEQ ID NO: 675308 - DNA, 80 bp, Homo sapiens
tgaggacttaaatgaagccactgattagcaatttaaagatcctctccaagaccctgcgggagattgtgattggcgtcctg

SEQ ID NO: 675309 - DNA, 96 bp, Homo sapiens
cggccggttttgagaggggaagatggggacaaagccgctccacctcccatgtcggcacagtctattgtgcaagtggagacattaggagaatttggg

SEQ ID NO: 675310 - DNA, 75 bp, Homo sapiens
aagacagagggttttcttttgagggagaacgtcatcagtgtcgctgagctcatcaacgccatgaagcaagtcaag

SEQ ID NO: 675311 - DNA, 75 bp, Homo sapiens
aaaaataagagcccggatgctgaagcaaaattcagagagattgcagaaggtgtgtgtctggggaagagacttaca

SEQ ID NO: 675312 - DNA, 130 bp, Homo sapiens
agccatgagctccacgcagttcaacaagggcccctcgtacgggctgtcggccgaggtcaagaaccggataccggggagaccacgacgctgcctcctgggcgccatgagttcctgttcagcttccagctgc

SEQ ID NO: 675313 - DNA, 86 bp, Homo sapiens
ataacggggttcgggtgtctcgtgtgtgaacatcacaggatattagaaatggctactccccagtcaattttcatctttgcaatctg

SEQ ID NO: 675314 - DNA, 80 bp, Homo sapiens
acatattctgtctgtccacgatagtgccaggcctatgttggaggcatctccttggaaacaatgccatctttgaatgtgag

SEQ ID NO: 675315 - DNA, 90 bp, Homo sapiens
tcaaggacagcagaactaaagaaagctttaaaagaaaaagaaaacagattattattgcaacaaagggttttctagtcttgaactactggc

SEQ ID NO: 675316 - DNA, 75 bp, Homo sapiens
gaggatccggcgccgaatcactgactggcacaggtgttgggactgcttttcaggaagccttggacgctgcaggtg

SEQ ID NO: 675317 - DNA, 80 bp, Homo sapiens
ttttgacacggctttggaaacgacgtcatgtgttaggttcaaaccttgtactactcagctgatcacaagctgcttgatgg

SEQ ID NO: 675318 - DNA, 101 bp, Homo sapiens
aaccgccagatcaacctggagctctacgcctcctacgtttacctgtccatggatgcacatgatggggaagtcaacgctgtgcagttcagtccaggttcccg

SEQ ID NO: 675319 - DNA, 75 bp, Homo sapiens
gtgcttccagctcagtatgttactcagattgaaaatattgaacttcccatggatacaaaaacaaatgaaagaaga

SEQ ID NO: 675320 - DNA, 100 bp, Homo sapiens
ctcactgcggcctcaaactcctgggctcaagtgatcctcctgcctcagcctcccgagtacctgagattagcccagggatctgaagggagccgagctcctt

SEQ ID NO: 675321 - DNA, 100 bp, Homo sapiens
cccacgctgctgccgccttcgctgccgctgctgctgctgctaatgctagggatggaagcttcctggcgccaggtggccggtggccgaggccgatcccggg

SEQ ID NO: 675322 - DNA, 97 bp, Homo sapiens
cctatcacctgccagctcatcacaaaatattgatgatgttaagaagttcaaaccgggttacctggaagctactcttaattggtttagattatataag

SEQ ID NO: 675323 - DNA, 97 bp, Homo sapiens
tatgacaacgtctctctgccgtgaatcattcctgcagatgaaaaagtgtgacttggcagctgtggtcccaggctgcacccatggcagaaggaggagg

SEQ ID NO: 675324 - DNA, 100 bp, Homo sapiens
cacttgcccttagtggccgtcttttgcctctttctctcaggctttcctacaactcatgcccagcagcagcaagcaggcaatttgaatcaacccatagaag

SEQ ID NO: 675325 - DNA, 132 bp, Homo sapiens
cgagaccgtgaccgagagcgtgaccgagagcgcgaatatcgtcatcgttagaaggtcccagctagtccacagggaccagcagtgccatggaaggatttaacatgtctcagagcatcccaagagtcaacagac

SEQ ID NO: 675326 - DNA, 100 bp, Homo sapiens
aagcttgaacgcttaaaacaacagaatgaagacttgaggcgaatggccgaatctctccgagagacaagagagacacctccaacttcgacaaagagttcac

SEQ ID NO: 675327 - DNA, 100 bp, Homo sapiens
ctgtaccgtgatgtgacgctggagaacctggcacttatgtcctccctgggagtaatggagtccaaagagaaacgagcagtaaacagtctcagcatggaaa

SEQ ID NO: 675328 - DNA, 101 bp, Homo sapiens
agctcagagtgtgaccaactggaaccctcaagaggaccgaggtattaatctctggagaagacacatccacagttagcactttcttcagatgctgacgctcg

SEQ ID NO: 675329 - DNA, 75 bp, Homo sapiens
ctggtgataccaggggcagagggaccactctgacaggtataatattgagcccagcctatattgcccgtttttctc

SEQ ID NO: 675330 - DNA, 100 bp, Homo sapiens
gccgcggtaccatgaggcgccggtgtcagttgtacccgaggcgttctcagcagcagcaagtacctgtggtggatttccaggctgaactgaggcaggcatt

SEQ ID NO: 675331 - DNA, 75 bp, Homo sapiens
ttcccaagtagaggagaggaagcggcagagggaggctggagtgcagtggcgagatctcgactcactgcaggctcc

SEQ ID NO: 675332 - DNA, 90 bp, Homo sapiens
gcgaccccagtcggtgctccggggaggtcacctgacgaggagttcaaggagcagggacaagttacaggaatgttctccaagcagcaatcc

SEQ ID NO: 675333 - DNA, 100 bp, Homo sapiens
ctgcagctttccatgaagtacttcacaagtaggcacgtctgagaatggtggatgtggtggagaaagaagatgtgaatgaagccatcaggctaatggagat

SEQ ID NO: 675334 - DNA, 74 bp, Homo sapiens
aaagtataaatgaagacttaaaagatatattacatgctgcaaagcagatagatgctgatggaaagttaagcgtg

SEQ ID NO: 675335 - DNA, 89 bp, Homo sapiens
ataatcggcttagaccaggactgggaggtgactctcctattccatctgtttcttcgggatcatcttcacctctttcagccacttctgcc

SEQ ID NO: 675336 - DNA, 100 bp, Homo sapiens
agcgctgctggactacaaggacgagttctcgggcagaggcgacctccccgcgttccatgcgcacagggacaggggctttacaggaagtatggtgctggca

SEQ ID NO: 675337 - DNA, 51 bp, Homo sapiens
gaaggaaccacaccctggtgtcaacaggcaagtatatcgcgtcaacacagc

SEQ ID NO: 675338 - DNA, 83 bp, Homo sapiens
acccagctggatcgtgtaaccagtctatgggaagtgaggttaatttggagtggcccctggagtcagtttcctacaccatccga

SEQ ID NO: 675339 - DNA, 73 bp, Homo sapiens
tcatctacaataataaatccaaagaggagccagttaccatgactcatccagaggctgacccgcggctgattga

SEQ ID NO: 675340 - DNA, 97 bp, Homo sapiens
cggttcatggagagcaaggagaaggatcgccaggtgctggaggacttcccaacgtatggctgtaccgcattacattatgcctgtgaaatgaaaaacc

SEQ ID NO: 675341 - DNA, 100 bp, Homo sapiens
aagtcccccgtggtcacatctgggttgaaggtgatcatcatggacacagttttgacagtaattcttttgggccggcagtcatggatcaggtaatgcagtt

SEQ ID NO: 675342 - DNA, 100 bp, Homo sapiens
gtcctacgaaagcctggtccacgccgtggccggagccgtgactcagcccacctgcacccaggtgaaataaacagctttattgctcacacgaagcctgttt

SEQ ID NO: 675343 - DNA, 100 bp, Homo sapiens
gatctacgagctagagttgccatttcgctgggatttttgggtggtgcaaagcgcaaatctgtccaaggctgcctggggagcattggagaagaatggcacc

SEQ ID NO: 675344 - DNA, 98 bp, Homo sapiens
cacatggtgtgggccgacatgaagagctgccagatccaacaggttggacgtgataagtatgagcctgcagctgtttcagaacaaggtgataaaaaggg

SEQ ID NO: 675345 - DNA, 80 bp, Homo sapiens
gaaacctggatctgcgatctgtttgtgagtgaagtcaccctgctgagaaatgaagtggcacagctgaaacagcttcttct

SEQ ID NO: 675346 - DNA, 100 bp, Homo sapiens
tttgagggactcatgtaaagtctctcccttaatgctcagttcttagaagaccgaggatcagggagcttccaaggcatttgatacctttttgatgggaaga

SEQ ID NO: 675347 - DNA, 74 bp, Homo sapiens
acagcgatgctgaggatcgaggaacgttgtctgtgtggacgaatgtggaacctcgctctgtggctgtgttccct

SEQ ID NO: 675348 - DNA, 96 bp, Homo sapiens
ggataattatccaaataaattgcaagcattctatccaaatgaagcctaaagaaactgttccaactcttgctccaaaaactctttcagtagcagcag

SEQ ID NO: 675349 - DNA, 100 bp, Homo sapiens
ccaggacaatggggacccgggacgacgagtacgactacctattcaaagctcgtgtcttcctgtgtggactccctctggagcgtggcccaggccctgttgg

SEQ ID NO: 675350 - DNA, 90 bp, Homo sapiens
ctgggagccgcggcggcctgggtaaaggcatgacttcctggcaccacagggaaaatcgggtgcaagcccagaaactatttccccaccacc

SEQ ID NO: 675351 - DNA, 82 bp, Homo sapiens
gcggcggcggcggcggcggcggcggcgctgctcccgggggcgacgggactggagactgatgcatgagggggctacggaggcg

SEQ ID NO: 675352 - DNA, 100 bp, Homo sapiens
cttcaccaagggtttcagccctgaggacaggtacagcacaggcagcgacagtgcgagctttccccacaccaccccgtccatgtgcctcaaccctgacctg

SEQ ID NO: 675353 - DNA, 90 bp, Homo sapiens
ggcggggcggcggcgctgacaggtaattttttctgcaggatgaattaagagaagagacacttgctcatcaggcatggagagcactttgtc

SEQ ID NO: 675354 - DNA, 75 bp, Homo sapiens
cgttaatctatgactatgccattgtgctattcaagttccggtgtctcgcccggtcctcaccctcagggctcccgg

SEQ ID NO: 675355 - DNA, 95 bp, Homo sapiens
tgctgaagagcagctcttgggagaggtgtgatccctcacatccacaaatctctgattggaaagaagggacagcagaaaactgcttagagggatgc

SEQ ID NO: 675356 - DNA, 51 bp, Homo sapiens
caaatcctcgatttcagagattatttcagcaactattggatgattatccga

SEQ ID NO: 675357 - DNA, 90 bp, Homo sapiens
gttccgttgcgagctgcagctgcgatctctgtggtaggcccagcgtggtaccatgcgacgacgctatgaagatgatggcatttcagatga

SEQ ID NO: 675358 - DNA, 50 bp, Homo sapiens
cgaatatcgtcatcgttagaagttggccagtcagtgctgaaagatgtaag

SEQ ID NO: 675359 - DNA, 50 bp, Homo sapiens
gcaactgctgaagctcgatgagcaaggggatggcacatttcctagaggca

SEQ ID NO: 675360 - DNA, 51 bp, Homo sapiens
cacagggctcctgagagccaaaaaagagctccgggaagcagtttgttcgct

SEQ ID NO: 675361 - DNA, 100 bp, Homo sapiens
ccaccagctggatttcgtgcaagtgaaagaagcagctcattatggatgtaaaggcactgaccagggtactattcctttatatcccattgcccatgttctg

SEQ ID NO: 675362 - DNA, 76 bp, Homo sapiens
cacttgtgaacattcaagtgaagcaaaagcctttcatgattatagcgtttcccaaagtgtattctgcggaactagc

SEQ ID NO: 675363 - DNA, 99 bp, Homo sapiens
actgccgcagccaggagatggttcgggcctagcggagccgggactggagctatgctaagaaggaatctgatcttaatggcgcccagatcaagcttcgag

SEQ ID NO: 675364 - DNA, 50 bp, Homo sapiens
ccgaggcaggcggatcacctgaggtcaggagatcgagaccatcctggcca

SEQ ID NO: 675365 - DNA, 75 bp, Homo sapiens
gtgtcctttgcctataaggtccaaggctcagggcatctcctcccaaccaggcaactccccgagtggcacagtggt

SEQ ID NO: 675366 - DNA, 87 bp, Homo sapiens
ccaacgtgggctcgctcttcgacgaccttcagcgccagtcagcaaagtaaataaatactgtgcttcttccaactttcattccacttg

SEQ ID NO: 675367 - DNA, 100 bp, Homo sapiens
agctggagccaagagttttccgagaggtgaccgtaaaaggaattgatgcttctgattaccagacagtccaggatgttgagaaagagaaggaaacccacag

SEQ ID NO: 675368 - DNA, 100 bp, Homo sapiens
ccagggataccaggtcctccgggaataaaagataacgaaggaggcccaacttcattcaataaggagcctgacggatttatcccagacggtagaacaaaag

SEQ ID NO: 675369 - DNA, 96 bp, Homo sapiens
cgagccggccggagcacgccaggcctgagccgattccacgactcttctttgcgggagaacatacgatccgtaactacccagccacagtgcatggtg

SEQ ID NO: 675370 - DNA, 50 bp, Homo sapiens
tttcctaaagttcgtgaatctcaacttatggacgaatgccttttccggtg

SEQ ID NO: 675371 - DNA, 75 bp, Homo sapiens
gcctcgcgccggctgctctttccggcacggggtcactctggtgcccattgaggagttcagcccggagttcgtgga

SEQ ID NO: 675372 - DNA, 100 bp, Homo sapiens
agaggtgatcttcaggctgcaacaaggagaagagccatggaaacaggaggaagaattcccaagccaaagctttccagaatacagtcgctttgaatcgaag

SEQ ID NO: 675373 - DNA, 74 bp, Homo sapiens
aagtgttatgatgcccttcgaaaaatgatcaactattgaccatatagcctttctgagaaaagtctacagcattc

SEQ ID NO: 675374 - DNA, 98 bp, Homo sapiens
tggaatgtgttcaagtcttggcagagccagattccagttcttcagacaaacaatggtccaagtctaacaggattgactactatagcagctcatctagt

SEQ ID NO: 675375 - DNA, 50 bp, Homo sapiens
cccggagaagcaggagccctactcggcagcgccatcatgaccgggtccta

SEQ ID NO: 675376 - DNA, 96 bp, Homo sapiens
aggaatcatcgaggcatgggggtccacactgcaatgtttttgtggaacatgaatgtatgacaacatgtccacaatggtgtacataaaggaagacaa

SEQ ID NO: 675377 - DNA, 90 bp, Homo sapiens
agttggagctttgtctatcttcttccttaggaaaccaaccctaaaaagtctgccagtcgccctgggagtcgggctgggagtcgagccggg

SEQ ID NO: 675378 - DNA, 87 bp, Homo sapiens
agaagctggatgagctgaggagagtgagcgtcccctatccaagtagcctgctgtcgcccagccgcgacacagaatgttcagcttaac

SEQ ID NO: 675379 - DNA, 75 bp, Homo sapiens
tgcatcgacagatagccgtcttcagcttgagccccatcactaggtttcaggcacagaactgtatatccaataata

SEQ ID NO: 675380 - DNA, 100 bp, Homo sapiens
gaggaggaggaggattcagggaataggagctggggagcccttctgcgccacagggacgtgtctcaaaccagtgtcactgcccttccatccaaaggcctgg

SEQ ID NO: 675381 - DNA, 75 bp, Homo sapiens
gagaaaagcccccaaaagcagctattcaggtattgaagcccctgggtgataatttgatggaggaaaacataaggc

SEQ ID NO: 675382 - DNA, 100 bp, Homo sapiens
gaacaggcacgtttgaaagctttaaagttcacacaaaagatgttggacaatttctacaattttgcttcatcatttgctgtctctcaggcccagatgacac

SEQ ID NO: 675383 - DNA, 100 bp, Homo sapiens
atcgggatttacgtggagatcaagcgcagcgatggatgaaacaggcgcctatttaatcgacagagaccccacctactttgggcctgtgctgaactacctg

SEQ ID NO: 675384 - DNA, 75 bp, Homo sapiens
ggctctgtaggaaggaacttggttccccctccctcagcttccgccccaaaagcggcccctttgttgctttatgca

SEQ ID NO: 675385 - DNA, 80 bp, Homo sapiens
gggaccgagaatcaaggcgttgagcctcaagaatcaggaaacccaggcccaacggcaggtggatgcaagaagaaatgttc

SEQ ID NO: 675386 - DNA, 83 bp, Homo sapiens
cggaggcagcggttgggctcgcggcgagcggacggggtcgagtcagtgcgttcgcgcgagataacgaaggaggcccaacttca

SEQ ID NO: 675387 - DNA, 106 bp, Homo sapiens
tcaatatctgtcttcggtggactccttcggcagtccacccaccgccgccgcctcccaggggacggcaaaacagaacagaaaggcggagataaaaagaggggtgtta

SEQ ID NO: 675388 - DNA, 101 bp, Homo sapiens
cttcaaagccgacggcctgtccggcactgctgaagcccccgatgaagcacccaccatcctctccgtgacgccccacaccaccacctccgtgctaatccgat

SEQ ID NO: 675389 - DNA, 96 bp, Homo sapiens
cccctcgtcgcagtttccagcccgacgagcttgttttgtcccggactcgcctccgggaggagttcctgggacacagccattgctgcccaattctat

SEQ ID NO: 675390 - DNA, 96 bp, Homo sapiens
agaagcagctgttgctattggaggaggatacaatgtctctttgctatatgaccttgaaaatcttccggcatccaaggattccattgtgcatcaagc

SEQ ID NO: 675391 - DNA, 88 bp, Homo sapiens
accaacttttcgttcagtgggacttgcttcacgatatgagggaaggcaccattggagatatggctatcctgggtataacagaaagttt

SEQ ID NO: 675392 - DNA, 97 bp, Homo sapiens
cccaaggcaattgatcccaagttgtcgacgaccgacagggtggtgaaagcctccacctcagatatatgacaagcagttggatgaaagagaacacaca

SEQ ID NO: 675393 - DNA, 100 bp, Homo sapiens
cctgaaactaaaagatgtcacaaaggaaaacgaggaaagtcccaggatgactactgtgtcaactgcagatctgggacacggccggccaggagcggttccg

SEQ ID NO: 675394 - DNA, 123 bp, Homo sapiens
tgagaactggctgccagtctcctatgtcccctattatctcccctgcccagagatcttgtactgcgtgggcatgtgcggagacggcgccaatgactgtggggccctgaaggcggctgatgtcgg

SEQ ID NO: 675395 - DNA, 134 bp, Homo sapiens
gcctgtgtgcgtgacgtcagttggcacccctttgaagagaagattgtcagcagttcggaagtggtaaggctatgtcgcctgtgccaaggtgtgctgggctcggtacggcaggccattgaggagctggagggagc

SEQ ID NO: 675396 - DNA, 74 bp, Homo sapiens
aagaaacccagcttgatatgttgattgtcagaagcttcagttctggtaaaagagaaggtggggactttgtttgc

SEQ ID NO: 675397 - DNA, 100 bp, Homo sapiens
gtcggaaactccgagacttcccgggcagcggctacgacctgacggacaccacccaagcaggtccctccagctacaaggtgggcaccatggcggagaagtt

SEQ ID NO: 675398 - DNA, 82 bp, Homo sapiens
cctctttgctgcaccaggtgtcctggagacagggactggtgattgcagctggaagtgcccatgaccgagctggcgtcctccg

SEQ ID NO: 675399 - DNA, 89 bp, Homo sapiens
atgtcatccccatggctgatgcagcaggcatcatccgctatgcaattggggacctgggctatcccttggagcttggctatcagaacttc

SEQ ID NO: 675400 - DNA, 100 bp, Homo sapiens
agcatgctgtcctatgtcagcaaaaactggagcagaaattggaggctcagcataggcatctccttggaaacaatgccatctttgaatgtgagagataaac

SEQ ID NO: 675401 - DNA, 75 bp, Homo sapiens
cggagcgcgggtacagcttttcgctgactacattcaggggtcggcaccaggaattattatagaaagatcggctac

SEQ ID NO: 675402 - DNA, 76 bp, Homo sapiens
tcaaatggatctctttctccacccatcccgagaacaggagattctacagtggttggaacgagtaggcttcgtgact

SEQ ID NO: 675403 - DNA, 83 bp, Homo sapiens
agagaagtggataaatcagtgctgctttctttaggacgaaaggtaaaatgatccattctatggtagctcacttggatgctgtt

SEQ ID NO: 675404 - DNA, 101 bp, Homo sapiens
gcagtgtggtgtccagccggatccagcatctctccaccatcgactacgtggaggacggtaatagcctgcagctggtgttttgagaagccctactgctgaaa

SEQ ID NO: 675405 - DNA, 75 bp, Homo sapiens
gtcgcctggaggaccagtatttcccatggagggaactggtgacactcagggatgtggtcatcaacttctctcagg

SEQ ID NO: 675406 - DNA, 75 bp, Homo sapiens
gcgcccctggggacgccgccctcccggtttctctcctgtcacaatggcatgatctcggctcactgcgacctctgc

SEQ ID NO: 675407 - DNA, 74 bp, Homo sapiens
ttcgggtgtctcgtgtgtgaacatcacagggccatcactgtgcatgtccccatgccctcagcaggagtcgtgga

SEQ ID NO: 675408 - DNA, 90 bp, Homo sapiens
cgcagcgacatcaccaagctggaggtggacgccatcgtcaacgccgttggaggagagcagattagtgccattggaaggggcatatgtgtg

SEQ ID NO: 675409 - DNA, 99 bp, Homo sapiens
caggaactgtgtgtctagatgtaattaatcaaacttggacagctctctatgatgatccagatcctgatgatggatttaactataaacagatgatggtta

SEQ ID NO: 675410 - DNA, 100 bp, Homo sapiens
gaattgggaggggggcagctggagcctcaggcggcagcgcttctaggaacaccagatgcattttcacaattactcacctgtccatattgtgatagaggct

SEQ ID NO: 675411 - DNA, 100 bp, Homo sapiens
cagcgtgaacatggtgcaaagataccagtctcctgtccgagtctacaagtacccgtttgagctggtcatggcgctcccggagccctgcctgttccctgtc

SEQ ID NO: 675412 - DNA, 75 bp, Homo sapiens
gacagaggggagcacagagaaagagaatgatgaagagaaaggcccggagactgatgaagtgatcaaagtccgaac

SEQ ID NO: 675413 - DNA, 82 bp, Homo sapiens
tggaacgaggacgcggactgcgaaggcaggtggcagtagagaagagcatcacagaagttgctcaggagctgacagagctggt

SEQ ID NO: 675414 - DNA, 75 bp, Homo sapiens
gatcgatgctgagcggcaggctgcagctgcagcctgccagctgttcaagatgcctgggaaccactcacctccttc

SEQ ID NO: 675415 - DNA, 83 bp, Homo sapiens
ctcgtagcctgccactccgtgcaagccccatgtgccactcccctgatctgcagcttcggtaggccggtggacctggagaagga

SEQ ID NO: 675416 - DNA, 100 bp, Homo sapiens
tatcttttaattattaaaacagagcttcctgctgctattgcagaatttttgactggagactatagtaggctgaggccgcggaaggagcagggcacatacg

SEQ ID NO: 675417 - DNA, 100 bp, Homo sapiens
ggcggccggcgggaccataagggcttaactcatatatttaacccccctccaaaaattccgagactactgtgctatctgcttaagatgggagtggcctggg

SEQ ID NO: 675418 - DNA, 51 bp, Homo sapiens
tgaagactgagaattgtgtggccaaaagagacaagagagacacctccaact

SEQ ID NO: 675419 - DNA, 104 bp, Homo sapiens
tcgcgtgtctaggtgagtcgcggtgggtcctcgcttgcagttcagcgaccacgaataccctctaccatctgctttggtcagggtgccgctcgaggatttaaaag

SEQ ID NO: 675420 - DNA, 83 bp, Homo sapiens
ctgggccagagctcttcccttacgcaaagctggactggccattatggaggaggagctgcagcattcccattgtgtgaattgtg

SEQ ID NO: 675421 - DNA, 95 bp, Homo sapiens
cagcaatccctttgagtttccaagtcaggatatgtgcctttcagctttaaagagaattgaagtaatctatgccagcaattatgacaatgttagca

SEQ ID NO: 675422 - DNA, 98 bp, Homo sapiens
ctggagaagagcttcaactctgttcacctgcttgcagcttggtgttgtggttgccccacatacattaaagttaccagaagagcctatcacacggtggg

SEQ ID NO: 675423 - DNA, 98 bp, Homo sapiens
cggcggccacggcatcctgtgctgtgggggctacgaggaaagtatccctctgaagaagatatgatcgaatgggccaagagggaaagtgagagagagga

SEQ ID NO: 675424 - DNA, 96 bp, Homo sapiens
gggagagtctgccggcggagaatataaggttatgatgtgattgctcaagcccaatctgggactgggaaaacggccacatttgccatatcgattctg

SEQ ID NO: 675425 - DNA, 83 bp, Homo sapiens
gaactttggtagcagttggggccaaatttgggcaagttggactttgtgatttggctgaaggggatgctaagggagataaagca

SEQ ID NO: 675426 - DNA, 90 bp, Homo sapiens
tgatggtgctggacaaggaggacggctactgcagcactggggtgtcagttgttggtccgacccagaacgcttcagttctgctctgcaagg

SEQ ID NO: 675427 - DNA, 75 bp, Homo sapiens
tagcgcctggcctgcgcgccgctgcccgcgccacaggttcctgggtggagctacccatgaacagcagcaatggca

SEQ ID NO: 675428 - DNA, 110 bp, Homo sapiens
agtggcgttggtctggccggagcccttgggtgaaattgttaggcgtggagagggagtgatgtcttccagactcggtgctgtacccgccgaacatgcttgccaactcagcc

SEQ ID NO: 675429 - DNA, 83 bp, Homo sapiens
cttgtttgtggatcgctgtgatcgtcacttgcaacaacaggagatgctggccatgaagcaccagcaggagctgctggaacacc

SEQ ID NO: 675430 - DNA, 98 bp, Homo sapiens
cgcgtgtctaggtgagtcgcggtgggtcctcgcttgcagttcagcgaccacggttgattcttcaccacactgaaaccattaggaaaaatccttgtggt

SEQ ID NO: 675431 - DNA, 97 bp, Homo sapiens
gccatgggtggttttgcagactgctgtaaatatatagctcagcgagattcaattagcagagcctcacagacaatggccaaatgtgtcaaagctgtca

SEQ ID NO: 675432 - DNA, 73 bp, Homo sapiens
tcagactgaccgtgtcttacatcagttcagagagggtctaggtgctggagtgcgcacggaggccgatgtagag

SEQ ID NO: 675433 - DNA, 80 bp, Homo sapiens
ggacaagctggtgcagaacattgcgcggcagcccccaggctccgctcttgccagagggacaggagccatggctcagaaaa

SEQ ID NO: 675434 - DNA, 100 bp, Homo sapiens
ctgctcaccttgggcttggtggcctgcgtgtcggcggagtcggtctcagctgagtctgctctgatcacccaacaagacctagctccccagcagagagcgg

SEQ ID NO: 675435 - DNA, 95 bp, Homo sapiens
cggaggcagcaaaggtggctgctaatgcaccaaagttgtctattcataagaaccccaacacatcggagccccaacacctgttggtgatgaagggc

SEQ ID NO: 675436 - DNA, 50 bp, Homo sapiens
aatattgacaactttttaagcagatgagctctgccagtgccggccgggag

SEQ ID NO: 675437 - DNA, 75 bp, Homo sapiens
tctcttcgctctttgcatcttaactgcagatttatcagcaagactgttgaacgcataactgcccaagatgcctgt

SEQ ID NO: 675438 - DNA, 98 bp, Homo sapiens
tgcttactatggaagatgaaggaaattctgacatgttagtggtgaccacaaaagcaggccttcttgaggtaatagcctgcagctggtgttttgagaag

SEQ ID NO: 675439 - DNA, 74 bp, Homo sapiens
ttcagaacagacaacaatagtaatacactcttacccttacaggtgtggagagagtatgctctgtgtcgtcccag

SEQ ID NO: 675440 - DNA, 93 bp, Homo sapiens
cggcgagaggcggcgagaggcgggctgaggcggcccagcggcggcagccgcggcgagtcctttgcacatgttggcaacacacgcatccgcatc

SEQ ID NO: 675441 - DNA, 75 bp, Homo sapiens
tccctttgtgcttgtctccaatcttatggctgtcaacaactgtggacagaatctccctctgtcacccaggctgga

SEQ ID NO: 675442 - DNA, 136 bp, Homo sapiens
ctgcaactatgccagcaaaggaacagcccggcttattgaacacatcagaatccacacagattgtcctgggtcacataatgccagctgagcgtaaaaagccagcaagtatggaagaaaaagactctttaccaaacaa

SEQ ID NO: 675443 - DNA, 50 bp, Homo sapiens
aggtactacccgtcttctatctgaggcgtggagctatttcctatgacagt

SEQ ID NO: 675444 - DNA, 97 bp, Homo sapiens
atgtcacccaagaccatgtcccggaactcatcggtcaccagcgaggcgcgcctacaaatcgaggacttcgaggctcgcatcgcgctgttgccactgt

SEQ ID NO: 675445 - DNA, 75 bp, Homo sapiens
cggagtccttggggacggagcagcgcgtcgtggggcgagcggcaggcctgacctctcgggacacacccagccctg

SEQ ID NO: 675446 - DNA, 98 bp, Homo sapiens
caggacactgctgtggacagtctcagtgctgcaactactactatgaactctggtaagctccaccatgaggcgaggtggatggaggaagcgagctgaaa

SEQ ID NO: 675447 - DNA, 100 bp, Homo sapiens
cagaggagcacgcagctgaacaagaagagagccatccccaatcagcaccctcatcacatgtgtggattctgggattctcagagtctggcatgacaaggac

SEQ ID NO: 675448 - DNA, 75 bp, Homo sapiens
cagaatattttgttcatgttattgaaaggagatttttgctgtgagaattaattaccagtaacagttcaatatggg

SEQ ID NO: 675449 - DNA, 75 bp, Homo sapiens
ttaaagggagcattccgatcatctgaggaacagcaggtaagaccattgcaattggaaaagttctgaaactggttc

SEQ ID NO: 675450 - DNA, 97 bp, Homo sapiens
tgaagaaagtgagcgaggagtcagaaactcagccactggttgccttggtaggcaataaaagtgatgatgaacagtctacacagatggctgcaagttg

SEQ ID NO: 675451 - DNA, 82 bp, Homo sapiens
tcgtaggaagaacacagtacagttttctggatatgccgcagaaggatccgtgccagaagcaagcctgtgagatacagaaatg

SEQ ID NO: 675452 - DNA, 133 bp, Homo sapiens
aatcgggagccgggcgcggggagctgcgcgaagccggggcggagcacgcgagctatggtcatcatcagatttgaaatatttaaagtggatacaaaactatttcagcaatgcagacaattaagtgtgttgttgt

SEQ ID NO: 675453 - DNA, 100 bp, Homo sapiens
gtcgcaggtttgtgagactgcgaggaacacgttctctgtcccacaccgctgaggcctgcacaggctcaggtggccttccttcagggagagaggaaagggc

SEQ ID NO: 675454 - DNA, 90 bp, Homo sapiens
aactccgactgatccacgctgacatcaatgtgatctggcatttccttgtgctcataatgagaatagttctccaattagccaagatgaacc

SEQ ID NO: 675455 - DNA, 75 bp, Homo sapiens
tgaagatgtgaaaggacgcatctatcaactgcttgccaaagctagttacaatgccggtggtggtgtgcacattga

SEQ ID NO: 675456 - DNA, 100 bp, Homo sapiens
ttggaatgaggaaaagtgaacttttcgaggcatttgacttgtttgatgttcgtgactttggaaaggatgaacgtgaagccagagaaaatgtgaagagaga

SEQ ID NO: 675457 - DNA, 75 bp, Homo sapiens
tagcccccacccctctccgtccatggccccagatgacacttcagaagtgctttggggacgagtactacggggccg

SEQ ID NO: 675458 - DNA, 75 bp, Homo sapiens
ggcttgcaagaaactcctcaagggcctcttccggcagggcctgcaatgcaaaggccataaaattttgagtagaaa

SEQ ID NO: 675459 - DNA, 98 bp, Homo sapiens
gattttgatgtggatgatgccaaagttttattaggtccagccctgctgggagttttctgccacacagatttgcggaagaacctgaccgtggacgaggg

SEQ ID NO: 675460 - DNA, 100 bp, Homo sapiens
gccaggcgggactaagagagccgaggtcgctccccatccactctcacaaggacatcaaccaggaagtttataatttcctggcaactgcaggtgccaaata

SEQ ID NO: 675461 - DNA, 87 bp, Homo sapiens
ttatcaagcgttttgagcagaaaggattccgccttgttggtctgaaattcatgcaagggtgctacaagttgaccactgcagcagtaa

SEQ ID NO: 675462 - DNA, 100 bp, Homo sapiens
gccacacgttggtacagggctccagaaattatgttgaattccaagaggttttaaaagactacatcaagccagatggggaatatttggagttgtttgctcg

SEQ ID NO: 675463 - DNA, 82 bp, Homo sapiens
gctcagacctgccaatttaccagagataattgataacaccctgtaacagctgagtgacttaagagattaaaattaatttggt

SEQ ID NO: 675464 - DNA, 83 bp, Homo sapiens
ctccaccatcgactacgtggaggacgctttcagagtccactgctgaatcccacttaatggagaaggaactggatgaactgagg

SEQ ID NO: 675465 - DNA, 83 bp, Homo sapiens
aggccgagaacaccattgaccagctacgcctcggggccaaggttggggaccagattctagaagtgaatgggcggagctttctc

SEQ ID NO: 675466 - DNA, 100 bp, Homo sapiens
tcgcgggaagacttcgagtgggtctacaccgaccagccgcacgccgaccggcgccgggagatcctgggttactcactataaacaatatccacccaacaca

SEQ ID NO: 675467 - DNA, 98 bp, Homo sapiens
gctgtcatggaccccaggcgatgacaacaatagccccattacaagtttccctaggacttctgcatgcccatgccacacatatcctgtggcccccagag

SEQ ID NO: 675468 - DNA, 76 bp, Homo sapiens
agagggagaaggacaggcagtgtcgtggcctggagctcattgcctcagaggacagttaatgattggacgtcatcca

SEQ ID NO: 675469 - DNA, 100 bp, Homo sapiens
cttggccccctcgtcgtctgccccagagcaagccatgggccacagccaggaccggctcaccaccttccaggagaaccaagcccgcactcacgtcctcagc

SEQ ID NO: 675470 - DNA, 97 bp, Homo sapiens
gagttaacacctctgccgctgctaaaaggaatcattaaccaatggcaacaggaatccaaggataaagtgatttccctcctgttaactcatctgcctt

SEQ ID NO: 675471 - DNA, 100 bp, Homo sapiens
ggaagggagctggaataacaaagatagcgagctggtgctcccggactgtctgcggccgcgctccttcaccgccctgcggcggccgtcgctgcggcgcgag

SEQ ID NO: 675472 - DNA, 82 bp, Homo sapiens
cggctgccattagtcatggagaagagcagtatagcatcaagttctagaggaattgggagccattgcaaatctgagggtcagg

SEQ ID NO: 675473 - DNA, 100 bp, Homo sapiens
cgagcccaaggcaattgatcccaagttgtcgacgaccgacagggtggtgaaaggttgatgccggcccaggatggatcagacctgtgaactacccagaaga

SEQ ID NO: 675474 - DNA, 100 bp, Homo sapiens
ttggaattgaagaatattcccaagtccttcacccgggcctccggtgtggctgtctctgatggtgtcatcaaggtgttcaacgacatgaaggtgcgtaagt

SEQ ID NO: 675475 - DNA, 100 bp, Homo sapiens
ccttccgggagcctagatcctgtgctttactctgaagactcactttatattcagagcaccaatcaaattaagcaagcctggggaacttcgtgaggaatat

SEQ ID NO: 675476 - DNA, 100 bp, Homo sapiens
taaactcttggcatttggctttgcctttctggacacagaagtatttgtgacagaacccgatcatcagccagttcttccccaccctcctgctctggtcctt

SEQ ID NO: 675477 - DNA, 100 bp, Homo sapiens
ttggagagagtggtattatggtgtaaacaacgattctttggaggtgaaaggtgtagcagtcactcggcctacacccacagcatcgaccttgtgaacccag

SEQ ID NO: 675478 - DNA, 98 bp, Homo sapiens
ctcccatcccattctcctcactaaccaaaggtaaagcttgcatttccttcaacaagaaggattacagaggagctcttgcttactataagaaagcattg

SEQ ID NO: 675479 - DNA, 100 bp, Homo sapiens
tagcgcctctctgatcttcctgcatggctcagactttctgctgacccctctgtcacccactgccagtcagggcagtccctcattctgcgttgggagtctg

SEQ ID NO: 675480 - DNA, 100 bp, Homo sapiens
cagcgtctgcattgctccggactcagccaagttccccaacggctccccgtcgtcctggtgctgcagcgatgtctcagagcatgtcttcagtatcttcaag

SEQ ID NO: 675481 - DNA, 138 bp, Homo sapiens
ttggcagcagaagcctctacaacctcagggggaacaaaagcatctccatgagtgtggctgggtcacgacaagagctcgtccgcatggtgctgaatggctgaggaccttcccagtctccccagagtccgtgcctttccc

SEQ ID NO: 675482 - DNA, 100 bp, Homo sapiens
ctgatccggaaatatggcctcaatatgtgccgccagtgtttccgtcagtacgcgaaggatatcggtttcattaaggccagaaatgtacacacaggagagc

SEQ ID NO: 675483 - DNA, 50 bp, Homo sapiens
agaacatggcaaccttgtttacaatttcatgcaatgatgctacctgttct

SEQ ID NO: 675484 - DNA, 82 bp, Homo sapiens
atttcaaccataaagacatcttaattgggcacgaaagaggtgttccaccaggtcctgcctatgggaagctgaaaaatggaat

SEQ ID NO: 675485 - DNA, 100 bp, Homo sapiens
ttcaactctagaggaaaaaattgaaagagaaaaggaattagcagaagacattatgtcagaaaacatccagtacagacctttctgatatccctgctctccc

SEQ ID NO: 675486 - DNA, 100 bp, Homo sapiens
gctaagtgaaaaatcatcaacctttctaatgaaggaaaatgtttcaacgtgcgcaagagttgcggtggcgggcagaggactaccacaaatgcaaagtaag

SEQ ID NO: 675487 - DNA, 73 bp, Homo sapiens
ttggagcacttcctattccactggattgggaaagaccatggcagctggaatgttctgaagaactgggtgatct

SEQ ID NO: 675488 - DNA, 80 bp, Homo sapiens
cgagtcaacaaccgcttcgagctgaaagaagatgctgatatgctacaacacggatgaacctggaggacgtggtgcagtga

SEQ ID NO: 675489 - DNA, 132 bp, Homo sapiens
aatgggccgggaccgaaacctagccccggacgagaagcgcagcaacgtgcggtgggaccacgagagcgtttacccaaggtccagcctagcccctaggcaccatgtcggacagtgatctaggtgaggacgaag

SEQ ID NO: 675490 - DNA, 88 bp, Homo sapiens
ggctgaatctatcccattgatcttaggaggaggtgatgtacttatgattagaggatttcctacaatcaagatatttcagaaaggcgag

SEQ ID NO: 675491 - DNA, 95 bp, Homo sapiens
ttggtatgtcagtgtggactccgtgttggcagcagtgctgttaccactctgggtgatccagccaaaggaacgagatcttgagctggaaatgggag

SEQ ID NO: 675492 - DNA, 82 bp, Homo sapiens
cgattggcatcgatctctccatcccttccgaggcccgacttcggatacaatgtctctttgctatatgaccttgaaaatcttc

SEQ ID NO: 675493 - DNA, 76 bp, Homo sapiens
gccagcgacccaccatggagacccgctacaacctgaagagtccgggtcagtcaccacgaacaggggcactcggcat

SEQ ID NO: 675494 - DNA, 112 bp, Homo sapiens
ctttgtcagtgcacaaaatggcgccctacagcctactggtgactcggctgcaggcatgaggatgacgttcaacacttcaaggtcatgcgagacaacaagggtaattactttc

SEQ ID NO: 675495 - DNA, 75 bp, Homo sapiens
cttctgggcccccacattaatgagacttaattcagtgcacaaatgagatgaatgtgaacatcccacagttggcag

SEQ ID NO: 675496 - DNA, 83 bp, Homo sapiens
cgtctgcggaagtgcagctgcctcagttcttagcgcaggacccgctacatcagcacggagctgggcatcaggcagaggctgct

SEQ ID NO: 675497 - DNA, 82 bp, Homo sapiens
agagattcagccagcacactcctcgcgagcaagtaccataacagcttgggggaaagaccatgaaaaagatgcttttgaacat

SEQ ID NO: 675498 - DNA, 82 bp, Homo sapiens
tcagaagaaggctgctattgaaagagagtatgcacagaaatgcactcggtgatggaaagagagccactattctgaagaacac

SEQ ID NO: 675499 - DNA, 100 bp, Homo sapiens
gttgagctttcccaatctaaaccaggtgggcaccatgtccttgaagcttcaggcaagcaatgtaaccaacaagaatgaccccaagtccatcaactctcga

SEQ ID NO: 675500 - DNA, 100 bp, Homo sapiens
gggacccatgccctgcatttcttcgctaccccacagcttctgctcatgagttgctggaattgtggccgtaaagcgagtgaaacctgcagtggctgtaaca

SEQ ID NO: 675501 - DNA, 100 bp, Homo sapiens
ttctgagtcaacactcccgacctggtaaacaacctgctcagggctctggtgaacaagctgtagaattctgagggggatgcccagacgctgacggaagtgg

SEQ ID NO: 675502 - DNA, 90 bp, Homo sapiens
gctgaaggatgaaggagccagtttggctgaaaataaaagaaaagagtctcatcgtggaaggcaagagggaaaagaaaaaagtagagaggt

SEQ ID NO: 675503 - DNA, 75 bp, Homo sapiens
ggactgttgttggaggaacactttccaggcaagaaaaatctcgttgggaagtcctccaacaagaacaacggctaa

SEQ ID NO: 675504 - DNA, 100 bp, Homo sapiens
ttttcggatcatgtctggtggctccgcggattataacagggaacctgatttgagatcaattcttggagaacacaaagaagtgtgatggtatgttccaggt

SEQ ID NO: 675505 - DNA, 100 bp, Homo sapiens
ctggcttcctgttctgcagatatgaccattaaactatgggattttcagggctttgaatgcatcagaaccatgcacgggtgtgaatctccagaagcttctg

SEQ ID NO: 675506 - DNA, 132 bp, Homo sapiens
gctctgcgttttgttttcccctcggcactaggcagcggaggagcccgaccgacccggcagggcaagaatcctttcgttccatcacaaggtcgtattacagaggtgcagcaggagctttactagtttacgata

SEQ ID NO: 675507 - DNA, 50 bp, Homo sapiens
ctgctgggcaggtcatgagtcaccatggcctcagagaaccatggctactg

SEQ ID NO: 675508 - DNA, 51 bp, Homo sapiens
gaagacaccaccagtttttgcttctggaacctggcttctgtatttaccatg

SEQ ID NO: 675509 - DNA, 100 bp, Homo sapiens
ccgggcttctgtgaaacatggcggtaggctgggaccataacacaagttgaagactgggatagtttccaagctattttggatcatacctacaaaatgcatg

SEQ ID NO: 675510 - DNA, 83 bp, Homo sapiens
ggactgaaaaaggaacctggtcacccatggaagtggtcaaatggcaaagaatttaacaactgttacttacacgccaagtcaat

SEQ ID NO: 675511 - DNA, 75 bp, Homo sapiens
ctgaggacggcgtacggagtgtggtcctcctgcccctgctcgagtcttgcagtgtgcggcccgacgccagcgttt

SEQ ID NO: 675512 - DNA, 82 bp, Homo sapiens
aaagaaaataatgggaaggaagaagtatccaaggtggccttgggggacttgcaggtctgagtagcttgggtttgaatactac

SEQ ID NO: 675513 - DNA, 100 bp, Homo sapiens
tcatcgagctcttcttcatcttcagtctggaggagcaccggaattcacagaagcagatgaagctcctacagaaaaagcagagccagctggtgcaagagaa

SEQ ID NO: 675514 - DNA, 100 bp, Homo sapiens
aacaaccgtggctcacaagatgaaagagcacggaccatggctaaacctcctggatcattagccagaagcagcagcctgtgccgttcacgccgcagcattg

SEQ ID NO: 675515 - DNA, 51 bp, Homo sapiens
atgatgatccacttctacttattaaataactgcagttcgtcatgaatcatg

SEQ ID NO: 675516 - DNA, 50 bp, Homo sapiens
ccggagaccttcaaccctgaaagccacaatatgagaacacttcactccag

SEQ ID NO: 675517 - DNA, 50 bp, Homo sapiens
aaagccattcgggttggagtaattggctcacgaggcccagggaatcctct

SEQ ID NO: 675518 - DNA, 96 bp, Homo sapiens
ccgcgaccactggcacattcttgctgacagactatgtcttcagcagtggtgcagttatatgcagcagatcggaactgtatgtggtcaaagaagtgc

SEQ ID NO: 675519 - DNA, 100 bp, Homo sapiens
aaaaaagagaggatttgcttttgtaacttttgatgatcatgatacagttgataaaattgttggtcgttccaggggtagaggaggcatgaaggatgaccgt

SEQ ID NO: 675520 - DNA, 51 bp, Homo sapiens
ctggggatggcgcatcacacaccaaaggctgattcaccccaagagtggccg

SEQ ID NO: 675521 - DNA, 98 bp, Homo sapiens
agacttcacagtttctgctctggttccagcaacagatagaaatgctttaagttcactctggggaaagctggcctctgaaatcttaatgcagaattggg

SEQ ID NO: 675522 - DNA, 100 bp, Homo sapiens
ctgcaatccaagccgactgatgactggagaggatggctactatttcaccaatctgtcatccgtccttggctcaggatttggagagcttgcaccaccaaaa

SEQ ID NO: 675523 - DNA, 100 bp, Homo sapiens
cagaaacagaaagacctccaggagaagatcagtgggaagactggcattgctcgggtaccacttgctggagctgctggaggccctggggttggtagggcag

SEQ ID NO: 675524 - DNA, 98 bp, Homo sapiens
acgtgaccgggaacacctttgagttttgcgtttggctccctaatatctgctgtcgatccagtggccactattgccattttcaatgcacttcatgtgga

SEQ ID NO: 675525 - DNA, 100 bp, Homo sapiens
ttcctgaaaccactcaagagtcataggattagatgatccaagtcaccaagaaattactgtctcaagtgatacgattctgctagcctaccaagaatccaag

SEQ ID NO: 675526 - DNA, 75 bp, Homo sapiens
agtcatcggacgccagaatctgatcctgggtttgagcagtttaaaatgtcagaaagattgcatgggaactggatc

SEQ ID NO: 675527 - DNA, 100 bp, Homo sapiens
cttgaggctccagtcaaaaaccattaagaaaccaaggtgtatgttggtaacctgggaactggcgctggcaaaggagagttagaaagggctttcagttatt

SEQ ID NO: 675528 - DNA, 76 bp, Homo sapiens
ctggacaagaatatgctgccaaaattatcaacaccaaaaagctttctgctagggccgagaccgacccgcccgcccg

SEQ ID NO: 675529 - DNA, 75 bp, Homo sapiens
gcgactgtgtctggctgccttatctttacacgctgcagctatggttgatactaaaggaggttttcccactatccg

SEQ ID NO: 675530 - DNA, 101 bp, Homo sapiens
caaatgcatggggcccatgacccactgtactggaaaggaaaaccactgcgtctccttatctggacacgtgcaggctgataagtatgctgtgcgcttcatcc

SEQ ID NO: 675531 - DNA, 96 bp, Homo sapiens
cagaacatggagaacaaggagcagtaccatgaggagcagaagcagtacatgaatttcttcacatggctcctggagaagtgaccatcacagttcgcc

SEQ ID NO: 675532 - DNA, 75 bp, Homo sapiens
tctcaccttgtatgctttacgtattctttaggtgatgctagaaggcctcttcatgaaacagcagttttggtagaa

SEQ ID NO: 675533 - DNA, 75 bp, Homo sapiens
cggccctcaccgccctcaccacccctatccagacggctgcccttcaagtaccaaatctgaattatccagaacaga

SEQ ID NO: 675534 - DNA, 96 bp, Homo sapiens
gcatttcatccctcgtcgaaaggattggattggcatctttagaggaagacccttcgcacagtggagccgctggacagccgggtgcccctgactgcg

SEQ ID NO: 675535 - DNA, 90 bp, Homo sapiens
gatatgtttcgttatgaagatgaagtgtttggtgattctgagcctgaacttgatgaagatatgagggaaggcaccattggagatatggct

SEQ ID NO: 675536 - DNA, 85 bp, Homo sapiens
gaaaatcttcttctatgactcagagaatcctcctgcatcagagatactaatggaccatactaccaaggaccagtccacctgaacc

SEQ ID NO: 675537 - DNA, 80 bp, Homo sapiens
ctctccatcggccccgacttccagaagggcctgaaggatggaactatcttatgcacgttaacacagaaatctgcctcctg

SEQ ID NO: 675538 - DNA, 100 bp, Homo sapiens
ccaagaatgaggacgagaaggagaagacgtttacaaaggacagcgacaaagacttgacaacagtgagctgggacggagacaagctccagtgtgtgcagaa

SEQ ID NO: 675539 - DNA, 90 bp, Homo sapiens
cgatttggttccattgaaaaatggtggagttggaataaaggccgagagtggtccgactggtccagcgagctgcgcatcccaggggatgag

SEQ ID NO: 675540 - DNA, 75 bp, Homo sapiens
ccagctttgacaatacaggaaatgtttaatctgatattgatgctgctgctgcaatgatgcttttaaatacttcta

SEQ ID NO: 675541 - DNA, 80 bp, Homo sapiens
aagagctgcggcggcagctggagacgctgagcgcccagcacttggagcgtgaggaatttggcctgtcactgctcctcatc

SEQ ID NO: 675542 - DNA, 75 bp, Homo sapiens
aaggaactctatcccaggaatacagctttgcattagcttatggaagtgacagggaaaaatcaggatgaatgcata

SEQ ID NO: 675543 - DNA, 100 bp, Homo sapiens
tggaactgtgtcattcaggactctgcaaattccctaaagtaggaggaaaaatgaccatgtccaaggaatatattaaaggaatctgtgaacctgaactaga

SEQ ID NO: 675544 - DNA, 89 bp, Homo sapiens
aaccactccactgcctttaaccctcagcctcagagtcagatgcaggctttacttttagaagcccagtcaacaccatttcaggtcacacc

SEQ ID NO: 675545 - DNA, 100 bp, Homo sapiens
cctcaccaagctcaagtgtgccgcagattttccacacgcaggccaagcagggcgccgtgctgcaccccacctgcgtcttcgctggcagccccgaggtgct

SEQ ID NO: 675546 - DNA, 88 bp, Homo sapiens
cgcgtccagcacctacgtcccgctgccgtcgccgccgccaccatgcccaagagaaagaaaaagcttgtggtgaaggggggcaaaaaaa

SEQ ID NO: 675547 - DNA, 74 bp, Homo sapiens
caaaccattcgaatctggagctgttctagaggccgagacatagggcctgattacattccaacagaggaagaaag

SEQ ID NO: 675548 - DNA, 98 bp, Homo sapiens
ttatatgaatggtacaaaagcgttggcgattgaggagttttgcaaatctctaggtcacgcctgcataagcattaaagggcagtatttaaagtcagttg

SEQ ID NO: 675549 - DNA, 100 bp, Homo sapiens
gagctttctctgctatctctcctggcttcccagctccgggacaaggagcggcagattatcaaggagcgttttaaggtgtgtgattccagaaacaagtgcc

SEQ ID NO: 675550 - DNA, 75 bp, Homo sapiens
aaattatggggcctcaacacagaatatgccagtaatgttaaagtagagactcagagtgatgaagagaatgggcgt

SEQ ID NO: 675551 - DNA, 100 bp, Homo sapiens
ctatattggacatatccatgatgactggctttgctccagacacagatgacctgaagcaggaagcaatgaggctccccaagaacacacctgaggaaaagga

SEQ ID NO: 675552 - DNA, 85 bp, Homo sapiens
cgaattgaaacactaagaagattggcgaaatttaacatttacagattagtaatttaacccaggagaatcgcttgaacctgggagg

SEQ ID NO: 675553 - DNA, 75 bp, Homo sapiens
catcaagagacctatcaagacctgtatccaggaaaagggcagacttcttggaggaagtgaaatttgaactgcgat

SEQ ID NO: 675554 - DNA, 90 bp, Homo sapiens
gtccggcttcggagcgggagtgttcgttgtgccagcgactaaaaagagaaataagcgggttttgaaaacaaaaaaaagaaggagtggaag

SEQ ID NO: 675555 - DNA, 100 bp, Homo sapiens
gagagaagtgccccgtgctgtcccgagactgtgccctggccatcaagcagaggggagcctgttgtgaacagtgcaaagagttagagaaggaacggcagcg

SEQ ID NO: 675556 - DNA, 90 bp, Homo sapiens
cgctagagacagagaaagctcagtactacctgcctgatggcagcaccattgaggtgctgtttcctctacttaccaagctcttggagaaca

SEQ ID NO: 675557 - DNA, 76 bp, Homo sapiens
cctctaggaagcgctagacacatcagcgtccgtctccaagagagtatgaagagagtgcgtctgtagggcagggaag

SEQ ID NO: 675558 - DNA, 75 bp, Homo sapiens
gaagaaaggagacagagtcaacaattcaattgaattcctagaggacctgtgcaacaacctcttgaggatcgaatc

SEQ ID NO: 675559 - DNA, 100 bp, Homo sapiens
gcaaagattcctgcaaattccaaagctgttggaataaataaaaatgactacttgcagtacttggaagagatgatctagagagcttccagcttgagataag

SEQ ID NO: 675560 - DNA, 75 bp, Homo sapiens
gaagatggtagacaaagaaatgaaccccctccccactcagctctccacagcgtccttgagactttgtgctgcgcg

SEQ ID NO: 675561 - DNA, 100 bp, Homo sapiens
ccgccaggacctccttcttcaggagagcgccccagggcaagccccgctccggccaacaagtagggaagacatatgagctactcaactgtgacaagcacaa

SEQ ID NO: 675562 - DNA, 90 bp, Homo sapiens
cgccgctggagaccgcgggacctggcgctgcagcgagaacccctgaacagtgcccaagtgttgtctctttgttgtcagagagttacaacc

SEQ ID NO: 675563 - DNA, 97 bp, Homo sapiens
agagctgccagcccctgcacagccctcagcagaggattcggacacagaggacgactctgggaactgcttttatgtcagcatgccatcaggacccccg

SEQ ID NO: 675564 - DNA, 100 bp, Homo sapiens
gtgcgacgcttgtaacaaacctgcaaggtgaatctggattgggaaagtcgacattaatcaactcattattcctcacagatttgtattctccagagtatcc

SEQ ID NO: 675565 - DNA, 73 bp, Homo sapiens
tcctatgtcccctattatctcccctgcccagagatcttgtctgtccagggttttggtggctggcgaagctgag

SEQ ID NO: 675566 - DNA, 100 bp, Homo sapiens
tcaaatcaaccacaagctggaggtagtggctctttatgactacacagcgaatcgatcagatgaactaaccatccatcgcggagacattatccgagtgttt

SEQ ID NO: 675567 - DNA, 112 bp, Homo sapiens
ctgaaagctgccgctgaagctgccgccgttgcctccgccgccaagagtgagcgagcggacccgcgatgggtaagaatgattgatgttggctgatattggagtgctcattcac

SEQ ID NO: 675568 - DNA, 90 bp, Homo sapiens
ggtgtcagtggcgcaccatctgaaaacaacatcatgcagtggaatgcagttatatttgggacacagcattgttggttttgccatgtacta

SEQ ID NO: 675569 - DNA, 103 bp, Homo sapiens
tatacatatactggaaagagaattgcattatatattggaaatctaacatggttttaaccgtgattggagataccacaaagaagaacgagtatggattaccagg

SEQ ID NO: 675570 - DNA, 100 bp, Homo sapiens
gaagagaagcagaattatacctagaagtctactaatggacagttagtcacccacctacatgttgagatggcagatgggaaaagtcgttccttgagtactg

SEQ ID NO: 675571 - DNA, 124 bp, Homo sapiens
agcagctatgaaaaggctctccgatgaagaaagggaggcagttttgcagactgtggatattcataaggagaaagtggcacgaagagagattggtattttgacaacaaataagaatacatcaaga

SEQ ID NO: 675572 - DNA, 75 bp, Homo sapiens
aaggctgccagcctcagctatcgccgctgactgtgcccctgtggaaggaggcaggggaaatggaaggtgatgcag

SEQ ID NO: 675573 - DNA, 75 bp, Homo sapiens
gcgccttccacactgtgcgctggcctgtcctcccaaagccaactctaaggagaggagaggaagagcagttcttgg

SEQ ID NO: 675574 - DNA, 96 bp, Homo sapiens
ctcccgccccgctcttccctggctgggctggcggaggccttgctgatgaacctgactgagcttcgcctcaacagcatcaagaagctgtccaccatc

SEQ ID NO: 675575 - DNA, 100 bp, Homo sapiens
tttgatgatgaaatcaatgcttttttggacaatatgtttggaccgcgagttttttcaagggggaacatggcaaaggtgttcagtttcatccttgttacca

SEQ ID NO: 675576 - DNA, 100 bp, Homo sapiens
gcagccgatccagcctgcggagcctgtggggcagaagctcattcacacagaagacccatttaatgatgaacatcaggagaggcaagaggtggaaatgttg

SEQ ID NO: 675577 - DNA, 110 bp, Homo sapiens
aagaaactggagccaccatcaagctgtctaagtccaaagatttttacccagactatctgttatagtccctgggtcaagacaacaatttttataccttcgtcgtggttcag

SEQ ID NO: 675578 - DNA, 75 bp, Homo sapiens
atctgcctaacgttcacttcactcacgggcctgcggcctcaccatggacccagaatgcgcccagctgctcccggc

SEQ ID NO: 675579 - DNA, 102 bp, Homo sapiens
attgacgccatgtcgggttattcgagtgaccgagaccgcggccgggaccgagggtgtggacactgccagcggctgcagccgacttggaatgacctgggagac

SEQ ID NO: 675580 - DNA, 100 bp, Homo sapiens
ataagattcctcaatcctgagagagagaattaaagtctaactctccaaatgaattgtggtgcttggaataaacagagcttatggcaaaaattcactcagt

SEQ ID NO: 675581 - DNA, 83 bp, Homo sapiens
ttctaccagctggcggcacttcgcggaggtggcttacattgtggaaggggactttactgtctggtagaagtggaaagacaatc

SEQ ID NO: 675582 - DNA, 99 bp, Homo sapiens
cagacgaggaatcagctttgaagtgggagcccagttggaagcccgggaccgtttaaaaaactgccacaatggtgcgcatgaatgtcctggcagatgctc

SEQ ID NO: 675583 - DNA, 90 bp, Homo sapiens
tttctcgattcgctgtcggaggagaatgagaccctggtggagtttgctattgaagattctagtgttccagaaactccagataatgaaaga

SEQ ID NO: 675584 - DNA, 75 bp, Homo sapiens
gtgtcgtttttccttgagctgaacgtcttgcaacagtggccgcacgcatagatcaaagaaatcggctggacagat

SEQ ID NO: 675585 - DNA, 100 bp, Homo sapiens
accctgctgaatagctggggctacaggcgtgtgtcactgcgcccaggtactaggttttgacaagcttgcatcatgcgtgagtataagctagtcgttcttg

SEQ ID NO: 675586 - DNA, 75 bp, Homo sapiens
atcaagcaccttcattctgctggaattattcatcgggttggcagtggcaatgacccctggtcagcctggagtgcc

SEQ ID NO: 675587 - DNA, 83 bp, Homo sapiens
caaagatgagatttacctgtgagatgtttcatcccaacagaaggagaccgcttaagtgatgaagatctctacaaattccttgc

SEQ ID NO: 675588 - DNA, 76 bp, Homo sapiens
gccccaatccccggcagctctctcagatgtttctttctcagcaaaatagaggagaagcttacccctcttccagaag

SEQ ID NO: 675589 - DNA, 74 bp, Homo sapiens
gcctcggcgagccctctgcagcggagccccctgcccatttggttttggcatttaaatcaaacggtattgagatg

SEQ ID NO: 675590 - DNA, 74 bp, Homo sapiens
ggacaaggtcctcgaggtgcctcctgttgtgcccttgtattttcacacatccctaaaccaccctcatatcgtgg

SEQ ID NO: 675591 - DNA, 90 bp, Homo sapiens
cggcttctgagacggcggcagcagcggcattcagggtgaggtggctttgaccccgggttgcccggccagcacgaccgaggaggtggctgg

SEQ ID NO: 675592 - DNA, 100 bp, Homo sapiens
gatctggcctggcatcccgagcccagagagcgagtttgaaggcctcttcaccacccacaagggtaacttccaggatcactactcttggaatcaaagataa

SEQ ID NO: 675593 - DNA, 97 bp, Homo sapiens
accttgccctcatcgagagcgcacacaagacgccactgtaaaaggtgtcatggagaaactccagctgggcccagagattctgcagcgggaaaatcca

SEQ ID NO: 675594 - DNA, 87 bp, Homo sapiens
cgaccgtgaggacaggcttttgctctgcgacggctgcgatgcggggtacatccagacactgaaggaccacaggccccggatggtgtg

SEQ ID NO: 675595 - DNA, 78 bp, Homo sapiens
agatggtgcagaagatggaggaggttgacatcatggacatatgtgagtccatcctggagaggaagcggcatgacagcg

SEQ ID NO: 675596 - DNA, 51 bp, Homo sapiens
gtctttcatgctattaaatctgtcaaggaaaggcgtaggaggaggagcagg

SEQ ID NO: 675597 - DNA, 98 bp, Homo sapiens
ccggctgcctgcgtggccgcgcgaccgacggccgcctcacctgcccgctgtgccaccgaggcctgcctggagccccagatcaccccttcctactacac

SEQ ID NO: 675598 - DNA, 74 bp, Homo sapiens
caagttgggagccaagattatcaaagcagagatgatggggaatatgacattatgatctcaaccagctgctggag

SEQ ID NO: 675599 - DNA, 90 bp, Homo sapiens
tccgggagctgggcggccatttaccagatctttgtagaatttgatggctgtaactggaagcaacactcctgggtaaaagttcatgctgag

SEQ ID NO: 675600 - DNA, 83 bp, Homo sapiens
ttggaaaccaagttaatcgaaaagttctcaattttgaacaagctatcaagcaattctgtggtgttcttggtcacacatttatg

SEQ ID NO: 675601 - DNA, 96 bp, Homo sapiens
ccgggacaacatgctgcggggcacaggttggatggcaagcatgtggtgtttggcaaagtgaaagaaggcatgaatattgtggaggccatggagcgc

SEQ ID NO: 675602 - DNA, 83 bp, Homo sapiens
cggccgccgccgctgccgcttccaccacagctgggacgacatatatctttagcaaaggtggtggacaaatcacgtataagtgg

SEQ ID NO: 675603 - DNA, 82 bp, Homo sapiens
ggatttccaaggaagaatttcctctgaagcaccggtgagccaccagctgggcagcatcatggacctcttcaccaccagcctg

SEQ ID NO: 675604 - DNA, 97 bp, Homo sapiens
cctccgccgctgcctcaggagcggaacaacgtcggcgagcgggggaagcagctcgagagtgtcgtagaaagaagaaagaatatgtgaaatgtttaga

SEQ ID NO: 675605 - DNA, 100 bp, Homo sapiens
cgcctgtcacccaatatctccagccgcgcagtcccgaagagtgtgctacagtgaagatcatccagatgctgcagcactttgaacacctggcacctgtact

SEQ ID NO: 675606 - DNA, 75 bp, Homo sapiens
gtcacacagggacagccgcaatccggacctggcggaatactctgaagatagtaactccgagccaaatgtggattt

SEQ ID NO: 675607 - DNA, 74 bp, Homo sapiens
atctttcagcagttggcacacatggttaaggaacaggaggaaaccattcagagatttattgccaaaccctgtgc

SEQ ID NO: 675608 - DNA, 50 bp, Homo sapiens
tctgaactcaggacttggcaagctccatctactctttgaagcttctgccc

SEQ ID NO: 675609 - DNA, 101 bp, Homo sapiens
ttcagtgactgctattgaaccaccaaaagtccattatgaaactggaaacctcgacctgtctcccagttggttgcacagcaggttactcagcagtttgtgcc

SEQ ID NO: 675610 - DNA, 100 bp, Homo sapiens
cctagttccggccagggtcgccccggcaaccacgagcccagccaatcagcgccccggactgcaccagagccatggtcgaaaccatcatagcctttgcctg

SEQ ID NO: 675611 - DNA, 75 bp, Homo sapiens
aaccccagctggaagccctggccctcagggacctctctgagcacaggggtatgggatgatgggatcattgatcca

SEQ ID NO: 675612 - DNA, 75 bp, Homo sapiens
aagcaggttactaatggtggagacggggttactgcatttgaaaatctgaacacagttgctgagtgtctgttttct

SEQ ID NO: 675613 - DNA, 75 bp, Homo sapiens
acaagatggcggcggtagcggcagtggcggcgcgtaggaggcggctatgactttgcagccgtcctggagtggttc

SEQ ID NO: 675614 - DNA, 98 bp, Homo sapiens
gtgaataccgacatcctggggcttctgaccgtccacagcctacagcgatgaattcagctcatcagattcaagagatgtttccccaggttccataccat

SEQ ID NO: 675615 - DNA, 83 bp, Homo sapiens
cgcggatctggggccgtcctcagggtttccaggcctgaggtgcccgccctggccccaggagaatgaaccagccgcagaggatg

SEQ ID NO: 675616 - DNA, 82 bp, Homo sapiens
cggaaatctggaaccgggatggcgacgtctacactgagtcggaggcgaagcgggctgacgcacgaggcacacaggaaggagg

SEQ ID NO: 675617 - DNA, 98 bp, Homo sapiens
cgccctggagctgctagagatccggaagcacagccccgaggtgtgcgaagccaccaaacaatgcagatcttcgtgaagactctgactggtaagaccat

SEQ ID NO: 675618 - DNA, 90 bp, Homo sapiens
cgcagcccccgccgtagccgcctccgagcccgccgccacatcctctgaggaattgaatgatctggcacgggaccctccagcacagtgttc

SEQ ID NO: 675619 - DNA, 78 bp, Homo sapiens
gggaccaccctgggcacagcaggcatcggagctatacacagaatgggattttacatatgctggacagaaataagagaa

SEQ ID NO: 675620 - DNA, 90 bp, Homo sapiens
gccgacggagcgcggcaggacttggctggacggcgcggccacggagaagggcgcgatactagagtaaaaggatggtttcttctggacaat

SEQ ID NO: 675621 - DNA, 75 bp, Homo sapiens
tgacctgtggagacacggccagatctgccctccagttgcaccattactcagacttctaaagagactatttgaagt

SEQ ID NO: 675622 - DNA, 100 bp, Homo sapiens
cgtggttgtggggaccataactgatgatgtgcgggttcaggaggtacccaaactgaaggataaggagccccgtggaatcatccctttagagaatctgagt

SEQ ID NO: 675623 - DNA, 76 bp, Homo sapiens
ggaataaaacagctccagtacaagcacctcctgctccagtaattggtgtcctagttgcctatgaaggtttgccact

SEQ ID NO: 675624 - DNA, 87 bp, Homo sapiens
tcctgctcctcgggtgcctgcacctcggccgtcccggcgcccctggggacgccgccctcccgggtacaccaggggttggaaaaacca

SEQ ID NO: 675625 - DNA, 100 bp, Homo sapiens
cctgtcccaagccctggtgccaggtgtccatccccgtgctgagactagggtatttaaattacttcaaaaccaaattcaacaacaaacttggactgatgag

SEQ ID NO: 675626 - DNA, 97 bp, Homo sapiens
gttttccacttcatgtgggtggctgtattactcatgtgtcagatgtaccagtgttcagcctcacaggcctacaacaaatccaaacacttctaaattt

SEQ ID NO: 675627 - DNA, 98 bp, Homo sapiens
atcccgctgtggtacttctcgcagtccccgcgcgtggtcatccagagttgcatgctgagaatttgaaaaatgaagatgatgtagacactggactatta

SEQ ID NO: 675628 - DNA, 100 bp, Homo sapiens
gcgccccgctctgctgtgggcgctgctggcgctctggctgtgctgcgcggcccccgcgcatggattaccgctggtggtggagaaatttcctagtctccgg

SEQ ID NO: 675629 - DNA, 75 bp, Homo sapiens
gactacttcgtgctggtggcgttcgggccgcacccgcgcgggtgcggggggcaatggcactgcagctctgggccc

SEQ ID NO: 675630 - DNA, 87 bp, Homo sapiens
agtcagtgcagtaaattcagtgtcagtatacagactagaccatacctttgagcaactagaagccatttgtgtcaaggtaacgtctgg

SEQ ID NO: 675631 - DNA, 50 bp, Homo sapiens
cgcgccgtgtaactgtgaatctttcaaagtgtggggctgccttccaggag

SEQ ID NO: 675632 - DNA, 76 bp, Homo sapiens
agctggcattggagcaagccaagaaagaatccgaagatcagaaacgtactaacattctgagagagcctgtgtgttt

SEQ ID NO: 675633 - DNA, 87 bp, Homo sapiens
gcgagaaggcccagcgcttcctgcagaaggccgagaagctctacccactgccctcggcccgcggcaccatgactcctgtgaggatgc

SEQ ID NO: 675634 - DNA, 133 bp, Homo sapiens
gtcgccgccatcctcggcgcgactcgcttctttcggttctacctgggagaatccaccgccatccgccaccatggcttctcacggcattcagcagcagcgttgctgtaaccgacaaagacaccttcgaattaag

SEQ ID NO: 675635 - DNA, 101 bp, Homo sapiens
ggggcgttccccagaccatggcatctacggaaggcaatggtacaacagctccatgaacgtgatctgcacctggttgacggaccggatggacttacagcttc

SEQ ID NO: 675636 - DNA, 50 bp, Homo sapiens
cttaagccagtcttcattcgaaatgggaggcgaaagtgcaacaaggggaa

SEQ ID NO: 675637 - DNA, 82 bp, Homo sapiens
gtgaggcttcccgtcatattccagtttaaggaagaaatctctaaacgttttaaatcacatactgaccaacttgtgttgatat

SEQ ID NO: 675638 - DNA, 90 bp, Homo sapiens
gacccgttctggaatcagcttctctcattttctttccctgcaccaactagcaggccaggaacctaccttgaaaactgtattaaataaaat

SEQ ID NO: 675639 - DNA, 121 bp, Homo sapiens
cagataaagaaggtggagcaaaaggagaacaacaacccattagttccccttgggatgtagtttttggaacatcagatcctgataacttaagtgactctctcttttccggtgatgaagaaaa

SEQ ID NO: 675640 - DNA, 88 bp, Homo sapiens
agctcaggggcccctggctatgctgcagcactttgatactatctacagcattttgcagcgccaagcccatctttgtgtgcttgcatcc

SEQ ID NO: 675641 - DNA, 74 bp, Homo sapiens
cggcgctctcctggctcccttctgccccagctccgtctcggcggcggcggatgtgaactatgaagactttactt

SEQ ID NO: 675642 - DNA, 101 bp, Homo sapiens
tctcaagtagctgggattacagattaaggtcaccgttgcaggcctggctggaaaagacccagtacagtgtagccgtgatgtggtcatttgtcctgatgcca

SEQ ID NO: 675643 - DNA, 100 bp, Homo sapiens
ttcccgttgaaggtgctaccgctgacgacacccctggtggatggcgaggatgagaggtgttgccacatctgcaaacttcctgggagagtaatggggattc

SEQ ID NO: 675644 - DNA, 100 bp, Homo sapiens
tggctggccaggatcctgcgctgagcacgagtcacccgttctacgacgtggccagacatggcattctgcaggtggcaggacaaccctccatatgataagg

SEQ ID NO: 675645 - DNA, 96 bp, Homo sapiens
attctttacaactgtacccggacagcgaccgtcaagaaaagtgaagtcactgcttttgctgtcttggatcaagaccagaaagaaattattgatacc

SEQ ID NO: 675646 - DNA, 82 bp, Homo sapiens
caaaaatagtgatagctttgataacatcaaagctaagccagaagatttatcacattttcatcatcagctacaggattagaaa

SEQ ID NO: 675647 - DNA, 82 bp, Homo sapiens
tgaggctactagtgccctagatgtgcagtgcgagcaggcccgtgagtgcatctccatccacgttggccaggctggtgtccag

SEQ ID NO: 675648 - DNA, 95 bp, Homo sapiens
cgcaagacacgtggccccggaaatcagggagctcttaacccagtttgaaacgtaactggttccctgaccaggacacaatgtttgcacgaggactg

SEQ ID NO: 675649 - DNA, 73 bp, Homo sapiens
ataggtcgaaggctggacttgcatatcacctgaggtcagagcatgggcctgaatactcccccagttgcaagag

SEQ ID NO: 675650 - DNA, 83 bp, Homo sapiens
catcctgccgtccttctccactttcgccagcccgtgccgcgagcgcggcctgcaggaggtaaagaagctaagtggaagagtgt

SEQ ID NO: 675651 - DNA, 100 bp, Homo sapiens
gcgagaggatggtcatccgcgtgttcatcgcctcttcctcgggcttcgtggcggcagatataatgcacctgactgactctgtggtgcgtcgccagctctt

SEQ ID NO: 675652 - DNA, 100 bp, Homo sapiens
gcaccaaccccataaagtgacacagtacaagaagggcaaggattctctgtacgcccaggggcgaaatgaccctgaatgtgacctgtgtggtggagaccca

SEQ ID NO: 675653 - DNA, 89 bp, Homo sapiens
gggggatatccacagttcgatcaagacatatctgaagagatggattaagaatgctttggattaaggattgtggagcacatttcaatcat

SEQ ID NO: 675654 - DNA, 89 bp, Homo sapiens
tgtatagagaacaaaaaacaccacagtactatcgtctatcattggatgaagtggctccggagatggttaaagcacgaattgggagctct

SEQ ID NO: 675655 - DNA, 97 bp, Homo sapiens
aaaaaaacaaaggtatttatggaattccactgagtggtaatggatgatgcagttcaaataactaaggactcagaattcatgattgaagaaatgcagg

SEQ ID NO: 675656 - DNA, 90 bp, Homo sapiens
gcctacaataaagggcaggagtttctgcacagcacatttcagttggactgcgatgcagttcttcagctcttcattgaaacgctgctccac

SEQ ID NO: 675657 - DNA, 101 bp, Homo sapiens
ccgccatgctgtctctagactttttggacgatgtgcggcggatgaacaagcggcagcctgagaaatgccagtggcctgacagcagcagacattgcacaaac

SEQ ID NO: 675658 - DNA, 75 bp, Homo sapiens
cctctttgctaagttgtgtttctcatgcaaaacctgcaattgcagattacgcataattctgcttggtcagaatcg

SEQ ID NO: 675659 - DNA, 100 bp, Homo sapiens
aacgagcagtgatggctgaaaaggatgctttagaaaaacacgatcagctcttagacagaatagctctccagacccccagctggccatgtggtgagttcag

SEQ ID NO: 675660 - DNA, 75 bp, Homo sapiens
gaagttataaggttccccatggatctttggcgttgccagttccttttaccttttgtgagtttaggtttgatgtgc

SEQ ID NO: 675661 - DNA, 99 bp, Homo sapiens
cgaaaatggagcacgtccaggctgaccacgagcttttcctccaggcctttgagagttgtctgcattcaaaagagcattctattaaagctaccttaattt

SEQ ID NO: 675662 - DNA, 100 bp, Homo sapiens
gagaacttagatttgacctgtgcaaggacctcagcagcttggacacagcccactgcagagctgagtccacctcaggacgaggccagtgcctgaaacgcat

SEQ ID NO: 675663 - DNA, 100 bp, Homo sapiens
tgcgggcccgtagctgggctctgcgaggttataaagttttagcacttttggatgtgcctgataagagtcaagaaaaagctgatttatacatccatgtgac

SEQ ID NO: 675664 - DNA, 50 bp, Homo sapiens
ttggtggtgtccaaaagctgaaacaaattccccgccactgtatgtctgaa

SEQ ID NO: 675665 - DNA, 75 bp, Homo sapiens
gtgaaagagaagggaatgctaagaactgctgggaggatgacaaaatatgttggtgaagtctttaacatcgtcagt

SEQ ID NO: 675666 - DNA, 50 bp, Homo sapiens
cagggaaccctggtcaccgtctcctcagtgactgtcgggcctccagaaaa

SEQ ID NO: 675667 - DNA, 100 bp, Homo sapiens
cttcaggatcaattacatgtttgcaaaatggatggtcagcacaaccaatttgcattaaaacctgtgaaggtcgaaacagctgcgtttcctgttttaatgt

SEQ ID NO: 675668 - DNA, 98 bp, Homo sapiens
tgatgaaaggcggctccaaggagtactggtttgtgctgactgccgagtcactgtcctggtacaaggatgaggaggcaaaatacatatctcagtgcatt

SEQ ID NO: 675669 - DNA, 100 bp, Homo sapiens
tggacaggcttacctttgactaccaccagaagctgcagggcaagccacagagccatgagctgatcttcgggccagtgatgcagatcctgaagttcaagac

SEQ ID NO: 675670 - DNA, 98 bp, Homo sapiens
tctgcccaaccgcacggtcaccctgactccagaagacctttccagattcgtggttgagctgcagcagagggagcttgccttgaaggacaagaacagcg

SEQ ID NO: 675671 - DNA, 90 bp, Homo sapiens
tacctcctgatatccagggctgccgatgggaaatcccaggctgccgcggctcctgtgtgctttgaagcgtggcccagggaagccaaaaga

SEQ ID NO: 675672 - DNA, 100 bp, Homo sapiens
gagctcctgctgttgattgtggaaaaggacacctcttctgctggaagtcaccaaagcagtacagcctctcttactgggaagaatcatagcttcctatgac

SEQ ID NO: 675673 - DNA, 75 bp, Homo sapiens
cagagtggctatggtgggcaaactaagccgattttccggaaaaaggtggaataacactcccatggatgaagcact

SEQ ID NO: 675674 - DNA, 100 bp, Homo sapiens
gcgaggaggggaatttccttgtgcctccattcccgggaggggggagcggcgttggaggccaccgtttccagtgcatctgggggaggtgttgtagccattg

SEQ ID NO: 675675 - DNA, 95 bp, Homo sapiens
ctttggtgttgagcttgatgtcttcagaggaactttgcccaacagctggtttgcctcagaggcagattgatgctggatgaaaaagaaagtcggcg

SEQ ID NO: 675676 - DNA, 90 bp, Homo sapiens
gcttcaccttcacgatgtttcccttggtcaaaagcgcactaaatcgtctccaagggccgcccaataactccagtatacacggtggctcca

SEQ ID NO: 675677 - DNA, 97 bp, Homo sapiens
ttccaaggtcctagaactcaggaagagtgatgtggttttggataaggagacaccccactggagctgggtgacgactgtagcctggctctcgtctggc

SEQ ID NO: 675678 - DNA, 82 bp, Homo sapiens
taggaatggtgcttttatgtgaagctgctacctctgacatggatattggaaagcgaaagaataaaatcagtggttctggaag

SEQ ID NO: 675679 - DNA, 74 bp, Homo sapiens
gaagtcattcaacgggaattgaatagatgtgtcttgctgaatcagggctctcttatccctgccatcgacttaca

SEQ ID NO: 675680 - DNA, 74 bp, Homo sapiens
ccggcccgcctccctggccggggcgcagttcggaggttcaggtgagcatgggtttatgcgtcttaggcattatt

SEQ ID NO: 675681 - DNA, 100 bp, Homo sapiens
atctcaagaaatatttggagcccaggtgtcctcggatggttttatctctgaaaggtatcatgaactgatcactaaatatgggaagttggagcctttggca

SEQ ID NO: 675682 - DNA, 101 bp, Homo sapiens
ctctacaacgaaggtgaagccacggaagataaggcctgagacctgggaggaagctggagaaaagatgccctctgaatctttgtgtttggctgcccaggctc

SEQ ID NO: 675683 - DNA, 100 bp, Homo sapiens
taaagcatctttaatctgccaggcggagggggctttgctggtctttcttggactattccagagaggtggcccacaaactctttaacaacttgaaataaat

SEQ ID NO: 675684 - DNA, 100 bp, Homo sapiens
ttagaagccctcacccaacgtctggagcgagagatggatgctcacccgaaggctgattactttggttctccagaagctggggaaggcagatgagaccaag

SEQ ID NO: 675685 - DNA, 82 bp, Homo sapiens
ggagcatggaggcgcacaacatcctcaggtatcgagaaccttccctgcgaacttcagaggaacttccagctgatgcgagagc

SEQ ID NO: 675686 - DNA, 98 bp, Homo sapiens
atccaccagctacatccagctccctgaggcaggagatacaactcgtcaacgaatcaaattcagtgatgacagagtatgcaagagtcaccttctcaact

SEQ ID NO: 675687 - DNA, 83 bp, Homo sapiens
gttggtcacttgaaccttgggaatattgaggcaacatttcatttgttgcatttccagtttccaataccaactcacctacaaag

SEQ ID NO: 675688 - DNA, 76 bp, Homo sapiens
ctctgaactgactgccccgcatcaccggagcgtcccagctgcgaggagggaaggatggagacgctgaaggataaga

SEQ ID NO: 675689 - DNA, 101 bp, Homo sapiens
cacagccggagacctgagccgacactgggggcagtccgcgagccccgcactctctcgatgagtcggagaagtcccaaaacctcggatcaattctcagctgg

SEQ ID NO: 675690 - DNA, 100 bp, Homo sapiens
gcggcggcgatgcactaggcctcgctcagggcggctgccccgggacccgcagttctggacatggcaagacatgtgccactctatcgggcactgctggaat

SEQ ID NO: 675691 - DNA, 56 bp, Homo sapiens
gaggaggctcatgcgggatttcaagcgagctcccagctcctccagcagccgacagg

SEQ ID NO: 675692 - DNA, 50 bp, Homo sapiens
gagaagctgaatgcaacaaacattgagggtctcctatggacagaagtgcg

SEQ ID NO: 675693 - DNA, 75 bp, Homo sapiens
cgggcagggctctaggaaacatatgttacgatagccgttctcctgaaaagaaagctgaacattcatctataaatc

SEQ ID NO: 675694 - DNA, 88 bp, Homo sapiens
ggagctaaagcagcgtgcgttcagccctgggaacccagtgacttgattgtaaaaatttacagagcggaatcatatgctggtctccaag

SEQ ID NO: 675695 - DNA, 82 bp, Homo sapiens
ttggctggaaaaccccaaaagtgtacataagacttaattcagtgcacaaatgagatgaatgtgaacatcccacagttggcag

SEQ ID NO: 675696 - DNA, 83 bp, Homo sapiens
gaagcttgtgtaatcgcagaggaaggacataacagtttggcttgggcactgtttaaaggaaagttccgagaaggcatcgacaa

SEQ ID NO: 675697 - DNA, 82 bp, Homo sapiens
aactttgacatcttgcaaagtgccatcagtaagcatttggttgaatcaagggattctttgaatagcatagccctgaagtttg

SEQ ID NO: 675698 - DNA, 100 bp, Homo sapiens
tggagatggcggctcagaagataaacgaggggctggaacacctcgccaaagcagagaaatatgagatggaagattttcgaggtatagcagaagaatcatt

SEQ ID NO: 675699 - DNA, 100 bp, Homo sapiens
cagaacattacgctgaaccccggctttggtgggcctgtgttttcctggagggaccaagctgtgctgcggcaggacgggtgctccaggaactgattttctt

SEQ ID NO: 675700 - DNA, 74 bp, Homo sapiens
tgtgcgtgcaggctgccaaggccagcgctgcttacgttggtgcactttgttgctccaggaagagacgcttagag

SEQ ID NO: 675701 - DNA, 50 bp, Homo sapiens
tatccttcgaaggaagcctgtggagtttaagaaaacccctcctaagatcc

SEQ ID NO: 675702 - DNA, 100 bp, Homo sapiens
tctgggttcgaggcttggacaggccggcaccccagcccggcacccgcggtgtagttgtccgcgacgtcaacccgtggggaagcgtgacagcaatgacagt

SEQ ID NO: 675703 - DNA, 88 bp, Homo sapiens
gcagcggagagcgagagaggggagcaggattggtagcttatgtcgatcttgatgaaagagcaattgatgctctcagggaatttaatga

SEQ ID NO: 675704 - DNA, 100 bp, Homo sapiens
ctaaagctagaaggagactctgaattcttacaacctctctacgccaaagaaatccagtcccgaccagtcaccatccttgtcagcctggccctagctttcc

SEQ ID NO: 675705 - DNA, 90 bp, Homo sapiens
cgcagaggacgccggaacaccctggaagccgagaaatgtatcagcagcgtcgccagcaggagaatatgcagcgccagagccgaggagaac

SEQ ID NO: 675706 - DNA, 50 bp, Homo sapiens
gcagcattgggactcctccagaagagaccaatttgaggcacacctgtaaa

SEQ ID NO: 675707 - DNA, 71 bp, Homo sapiens
aagaaacgcctaactgatgaggagtttcgaggcatggattccgtgaaggaacaacacctaaacccaagagg

SEQ ID NO: 675708 - DNA, 101 bp, Homo sapiens
tttgtatctgatgaatattttccttctgaaccagggttctgcatccactacaacattgtcatgccatcagcagtcagcagaggaccttgcccgagtacctg

SEQ ID NO: 675709 - DNA, 101 bp, Homo sapiens
ccgccgccagagaggcccgcccaccagttcgcccgtccccctgccccgttcacaatggaatgacagaggaagaggaagacaaacttctggcactgaaagac

SEQ ID NO: 675710 - DNA, 51 bp, Homo sapiens
gcgctcaggaatcatgggctatcaaaggactcgtgagctgaagtgcagatg

SEQ ID NO: 675711 - DNA, 75 bp, Homo sapiens
ctggaacttcatcatcatctacttcacaggaattgccatttaatacttcaaacattgtgcagaaaactgaggctt

SEQ ID NO: 675712 - DNA, 140 bp, Homo sapiens
gagggcggcgggcacgcacggcccgggccggcgctccaaggcccgcccgggagggccggggccgcgctcaggcattcccatcaagagcaccatggacaaccccaccaccacccagtatgccagcctcatgcacagcttca

SEQ ID NO: 675713 - DNA, 100 bp, Homo sapiens
agaaccccgagtggaagtggttcatcgagcagaggctgctcatgttctccttcgtcaacgaccggatctatcttgggatcccatggctttctttactggg

SEQ ID NO: 675714 - DNA, 51 bp, Homo sapiens
cgcaaccagccttctagggcggcggagaatgatatggaacctagcaaagct

SEQ ID NO: 675715 - DNA, 100 bp, Homo sapiens
gcctaatgaagaatgtctacagatacttgggaatgcagagtatgtgccaagagttgtaacctctgcacaacagaaagcaggaagaactattacagcccgg

SEQ ID NO: 675716 - DNA, 83 bp, Homo sapiens
gtcctacaccaggcagcccccaaatcccggcccagccgagcctcttgaagccattcttacagatgatgaaccagaccacggcc

SEQ ID NO: 675717 - DNA, 75 bp, Homo sapiens
gttcagcacaccagtggggcagtgcctcggccccttcacagatgtagtcactacaaatcttaaattgcgaaatcc

SEQ ID NO: 675718 - DNA, 83 bp, Homo sapiens
cagcgcctgttcccggggcagatccaggttcagcaattctgtggtgttcttggtcacacatttatggagtttctgaagggcag

SEQ ID NO: 675719 - DNA, 122 bp, Homo sapiens
tcctggaccccagttgagaaccctgaccctaaggattctgagcctgcaaaccctggagaaaagaagccgagccccgctgcggagctcccggcggcccagccccgaggctctgcggccgcgcc

SEQ ID NO: 675720 - DNA, 80 bp, Homo sapiens
ggggccagggaaccctggtcaccgtctcctcaggctactgcagcactggggtgtcagttgttggtccgacccagaacgct

SEQ ID NO: 675721 - DNA, 100 bp, Homo sapiens
gggaccgggacctgctgctggacccggcctgggagaagcagcagcgcaaggccatggacagccagaagcagttcagcggtccagaaatccagttcctgct

SEQ ID NO: 675722 - DNA, 50 bp, Homo sapiens
ctcggcagtcgcgaagcagcaaccatggttaatttggagtggcccctgga

SEQ ID NO: 675723 - DNA, 109 bp, Homo sapiens
ttatgtaatgtcaactttactgagaattttccacctcctgacacaacaccactcatgaagaatgcaaattgcacatcagattttgaggaatactttgccaaaagaaaac

SEQ ID NO: 675724 - DNA, 75 bp, Homo sapiens
cgacatgagtgatgtggaggaaaacaacttcgagggcagagatcaaaatacttgctggatggtggactcagagac

SEQ ID NO: 675725 - DNA, 100 bp, Homo sapiens
aggtaaccgaagcggctcaggaaggcagctgtcactgagcccctggaacagagcgagagtatcgctttcagtccagtgtaaagctgttggagcgcgggag

SEQ ID NO: 675726 - DNA, 75 bp, Homo sapiens
cactgggttcaggtggactcacaattccaaatattaccagaaagatgcttcttagagacaaggcctcactccatt

SEQ ID NO: 675727 - DNA, 82 bp, Homo sapiens
ccgcgaacccctctgggatccccgccgctctgtctacaacccgagaggctgggaggcggcagaatgcagccagaggagggca

SEQ ID NO: 675728 - DNA, 100 bp, Homo sapiens
caggaacaagagttgctttggatatgactacactaactatcatgagaattttgattcagctaaagttccatcagatgagtattgccctgcttgtagagag

SEQ ID NO: 675729 - DNA, 98 bp, Homo sapiens
gctcttcatcaccttcgtggtcgtctggtcctactacgcgtacgtggtggagctctgcgtgtgaatgtgttccagaagatctagaactgaagaagaag

SEQ ID NO: 675730 - DNA, 100 bp, Homo sapiens
gccaactacaacaaggaggatgacattgtattagaaaactactcggatgctccaatgacaccaaaacagattctgcaggtcatagaggcagaaggactaa

SEQ ID NO: 675731 - DNA, 100 bp, Homo sapiens
gaagtggtgaaacccaaacaacatctcctgctattccttgggctgcctttcctgcaggtgatgaacagcctccttctaaatcattgaccacatttcttat

SEQ ID NO: 675732 - DNA, 118 bp, Homo sapiens
gaggaaggcagctattctcaggatatgacaggggtaacacccttccagatgatttttgaggtacaaagtgaaatcacttcagcaaacacagaagatgatgatgacgacgatgatgagg

SEQ ID NO: 675733 - DNA, 82 bp, Homo sapiens
ggggcgccatggcgaccggagcgaacgccacgccgttggggctggaccccaatggagaacaggtggtgtggcaggcgagcgg

SEQ ID NO: 675734 - DNA, 82 bp, Homo sapiens
cgaagaggtacgattccggagaatcgcgaggcagagcgggagcgcgcagccaggagcagaagttctgccagcgctatgacca

SEQ ID NO: 675735 - DNA, 50 bp, Homo sapiens
atgagagagtggttgtaaaaatcctgaagaatgaagctgataggaccttg

SEQ ID NO: 675736 - DNA, 100 bp, Homo sapiens
acttcctgctcacagcccgacgaaaggatgccaaatggaactgctcgcagaaagaagaaggtggttcatagaacagccacagcagatgacaaaaaacttc

SEQ ID NO: 675737 - DNA, 97 bp, Homo sapiens
ttatggccagagccagaacagatatttggatgtttcgagctcgacttgtgaaaggagaaagaaccaatctttgaaatagccatctgctataactctt

SEQ ID NO: 675738 - DNA, 101 bp, Homo sapiens
tgaactttctggggaacagaccagttgtggaaggagtcaagactgagaacaacgatcatattaatttgaaggtggcggggcaggatggttctgtggtgcag

SEQ ID NO: 675739 - DNA, 100 bp, Homo sapiens
cccaggttggggacagtgccggaggggcctcctctgctgcagacatctggagcagcagccaagctggacagatgacctgcctctctgccacctctctggg

SEQ ID NO: 675740 - DNA, 90 bp, Homo sapiens
gtcctggagggagaactgtgaagccagcacctacctgggccctgcgaaaccagcctggacaccaagtctgtgtcagaaggccacctcaag

SEQ ID NO: 675741 - DNA, 75 bp, Homo sapiens
gctccagcctggcttaatttccctactccaccatcatcaacaaagagtacatccaagccattatgatgatggagg

SEQ ID NO: 675742 - DNA, 89 bp, Homo sapiens
ttcatctacaatttttagtggagttgccatctatgttaatggatacacaggtgtttcaggcctcacctgaagatcatgaaaaatacggt

SEQ ID NO: 675743 - DNA, 83 bp, Homo sapiens
cagaagtacagttttatctagccacatcttggagggtgcatctgagaaagacatcgtgcactctggcttggcatacacaatgg

SEQ ID NO: 675744 - DNA, 100 bp, Homo sapiens
tatttacagtcggaggagtactcggtgaaatcctgtcctgaagactgtaagtggtggtgctagagaatgaattgatgtatggggttccttttgaatttcc

SEQ ID NO: 675745 - DNA, 135 bp, Homo sapiens
aattagtttggcgctatggatttcaatccctccgtatgcacatgtgggtagaggacgtgttagacaagttcatgagagatgcccgagtggtaaaagacatggcaacaggaaagtctaagggatatggctttgtct

SEQ ID NO: 675746 - DNA, 85 bp, Homo sapiens
cgacacttagggaaaatagaacctacgctgaaattttgggggcaggttctcttgctaggggtgtttgcatttggactttttgcta

SEQ ID NO: 675747 - DNA, 100 bp, Homo sapiens
ggcagcggagccaagctgacccggcgagcggagccggggctggagagcggcgaccactgcggatctcggactatatcatcatgtacatagaaaaatccaa

SEQ ID NO: 675748 - DNA, 75 bp, Homo sapiens
ccaggcgaagctggccgagcaggctgagcgatacgacgatggctctgagtaaatcaatgcatgcaagaaatagat

SEQ ID NO: 675749 - DNA, 75 bp, Homo sapiens
tgagtttgttcgtaaaggacttcgtaatgatgtcaagagtcatgtctcacggatgataccatcggggaccttaag

SEQ ID NO: 675750 - DNA, 75 bp, Homo sapiens
tttgcagatcgggagcgcaaggtcgccctcaaggccatgatcaaaacggtcatccgagagttggctgcgagggcg

SEQ ID NO: 675751 - DNA, 101 bp, Homo sapiens
gggggacgccgctgctgaacggggctgggcctggggctgcgcgccaggccgtcctcatcgtcagcgggaacctcagcttcctgaactggctgactatggtg

SEQ ID NO: 675752 - DNA, 50 bp, Homo sapiens
tttggagtgtgcgtgcgcgccgagcgacgcaaacatgcagatctttgtga

SEQ ID NO: 675753 - DNA, 132 bp, Homo sapiens
aagttcagaaggccagggaggacatctttatggagaccctgaacaacatcatggagtattacaacgacggtaacgggacctcagaacagcatgtccggattcgagtcatcaagaagaaaaaggtcattatga

SEQ ID NO: 675754 - DNA, 83 bp, Homo sapiens
ccagcgctgcctggaggagaatcaagagctccgaggcaccgtctgcgtcctgctgtccttccccttcatcttcagcccctgcc

SEQ ID NO: 675755 - DNA, 75 bp, Homo sapiens
gaagcagctggacccgctcaccatctacggcatccggtatcttagcaaagcaatgtctcaagatggtgcttctca

SEQ ID NO: 675756 - DNA, 83 bp, Homo sapiens
agtttatcattggaggagccacccgcacagacatctgccaaggagccctggggccttctccagaagcaaaaggagttggaaag

SEQ ID NO: 675757 - DNA, 50 bp, Homo sapiens
gtcgcctctctttcagcagttacccaggccaagctataacatcagaaatg

SEQ ID NO: 675758 - DNA, 83 bp, Homo sapiens
ctcttccctggctgggctggcggaggccttgctgatgaacctgactgaggttaatttggagtggcccctggagtcagtttcct

SEQ ID NO: 675759 - DNA, 83 bp, Homo sapiens
cagatgcccctcctccaccagaggactgggaggagcatgtcaacagacagatgtgctggtgctgagctgtgatctgataacag

SEQ ID NO: 675760 - DNA, 75 bp, Homo sapiens
tccagccaaatacaactggaaaacagctttttgatcagatatatgtaatcgacagtgcagacagaaaaagatttg

SEQ ID NO: 675761 - DNA, 100 bp, Homo sapiens
cattgaagctatgcagtatttctttggcatcactgcagctagtaatttgccttctggattaggaagtatcattctgcaaaggaggcatatgaacaacttt

SEQ ID NO: 675762 - DNA, 75 bp, Homo sapiens
gccgagcatctgggccgagaccattccgtatggagagccgggttgcctgcctgattcgagttccatctgaagtgg

SEQ ID NO: 675763 - DNA, 75 bp, Homo sapiens
ctgctgtttacagtgcaaagatttgacagattttatttggagagaagcaagcatctttgcctctttggagtagga

SEQ ID NO: 675764 - DNA, 76 bp, Homo sapiens
cgagattaagacccaattcaccacccgggaagatggaattggctgctctagaaaaaattaaatctacttggattaa

SEQ ID NO: 675765 - DNA, 50 bp, Homo sapiens
ctccactccccagctgtgaaaggggaactctaatgatccaggacaaagaa

SEQ ID NO: 675766 - DNA, 83 bp, Homo sapiens
cggatgagtacgataccgaagcgggctgtgtgccccttctccacccagagacctgcctagagctggaacgttacctccagagc

SEQ ID NO: 675767 - DNA, 90 bp, Homo sapiens
ctcctaagcccacaatggctgatgagctttataaccaggggagccacagacatttacattaaaattcaagagagctgaagactatcccat

SEQ ID NO: 675768 - DNA, 75 bp, Homo sapiens
tacctttgcacaaagtgaaatctctgagtgtctaccatccccagctggcggcagcagctgaaattgatgaagaac

SEQ ID NO: 675769 - DNA, 75 bp, Homo sapiens
cgagggcgtcgcggactctccccgcgatgatgccgacacgatgaggcgagtggtacgacagagcaagtttcggca

SEQ ID NO: 675770 - DNA, 90 bp, Homo sapiens
caatgttggagccgtctgcaaagtgtccccggcaagaaggctcatgcacaattagttcgagaagttgatgtggagaaggtgtctgctttt

SEQ ID NO: 675771 - DNA, 96 bp, Homo sapiens
cctgctgcccctgcctgccttccagcccctgcccaccaggctgcgccctttggggggcccagaggcagagtgccactgggcagacacagagctgaa

SEQ ID NO: 675772 - DNA, 100 bp, Homo sapiens
taccacaaccagaccgccgagctgcgggagctgctggagttcacccacatgtacctgcagtcagatgatgagtagccacgatggaggtgatgaacctgat

SEQ ID NO: 675773 - DNA, 96 bp, Homo sapiens
gagcttttgccactgactcggccgtgtcctgacacctccaggaccttctaccgctttgaggctgtgtgggatagctctctgcataactcccttctt

SEQ ID NO: 675774 - DNA, 100 bp, Homo sapiens
cagaggctcagagcttggagacagacggtctgtatgagctgttggctgctctgccagcccagctgcagccacatgtggatagccaggaagacctgacctt

SEQ ID NO: 675775 - DNA, 100 bp, Homo sapiens
tgctcattggcgccgtgaagtgctcgtcaccgccccctcctgccccttcatgcatgcgcggaggccgcctgctagcaagctgtctgtggaagcccgtaaa

SEQ ID NO: 675776 - DNA, 100 bp, Homo sapiens
ctaccagccctgggcagcgagctgcaaaagtgcacacatcttgaccaactcagcagcaaggtggattttctttgtgtttaaagaaaaaaaatgtccctgt

SEQ ID NO: 675777 - DNA, 87 bp, Homo sapiens
aaggctgatggatttcagaaactgttggagtttatatacacaggaactttaaatcttgacagatcttgagccagatgattgtgcatc

SEQ ID NO: 675778 - DNA, 75 bp, Homo sapiens
tgctgaggctgtcctgtcctcgtccgtctcatcaaaggtgcaatggatgagcttcatagtctggatccaagaagg

SEQ ID NO: 675779 - DNA, 100 bp, Homo sapiens
tggaacactaaggatccttctcatcaggcaaagatgctggaaggagatctggtttcaaagatgctacgagctgttctgcagtctcataagaatggagtag

SEQ ID NO: 675780 - DNA, 75 bp, Homo sapiens
cccacccattcctttaaatccggagggggaaaaaatcccaaggtctgcaaagtttgatgaaggccggaacaactt

SEQ ID NO: 675781 - DNA, 100 bp, Homo sapiens
gccagggcagagggcacctgagcggctggagagcctgttggagaaacacaaagagctttccgcttggccctcatccagcttcagatttcttccatcaaat

SEQ ID NO: 675782 - DNA, 51 bp, Homo sapiens
gaactgcaggaacctggcctcactagaatgtgacagtgatgataacatggg

SEQ ID NO: 675783 - DNA, 100 bp, Homo sapiens
ccgaatcttccttcaggatatcaagactgttggtagagaaaatctttgctcagtatcttgtcccccacaacctggaaacagaagagagaatgaaatgctt

SEQ ID NO: 675784 - DNA, 90 bp, Homo sapiens
agcctggaggactccccagagaagcagccaccaccttgacagcctcatcaagggtaagaaatgagcctagtcaccaagaactccaccccc

SEQ ID NO: 675785 - DNA, 82 bp, Homo sapiens
cattgttgtctttctgggaactcattcccatgaggctgtgggtgagcgtggaggatgctcagatgcacaccgtcaccatctg

SEQ ID NO: 675786 - DNA, 74 bp, Homo sapiens
ccaggcccacagccgggagatccgagagctcttcaggcacgcaggctgaagaaagtcccttcgtgggcaaccca

SEQ ID NO: 675787 - DNA, 100 bp, Homo sapiens
ttggtggattaaatgtggcatatagtccctactacaaaatttttcaacctggtcgcgtggggcaggcagtggcgctgcgggccaaggccttcggcttcaa

SEQ ID NO: 675788 - DNA, 83 bp, Homo sapiens
ttcggcgtcggagtcatcctcggctccctgctgggcgggaccctggtctccgcgtacgggtggaaatgagttctcaacagttt

SEQ ID NO: 675789 - DNA, 95 bp, Homo sapiens
ctcccttgacaggcggctttgcatcggaaatcagctctacagttcaggatttttagactctgaggagcagttggagctaatccacattatggaaa

SEQ ID NO: 675790 - DNA, 75 bp, Homo sapiens
ggctgactgagagcgtctgcttgcagccgaatccagtggagcagcgttacatggagctcttagccttacgcgacg

SEQ ID NO: 675791 - DNA, 100 bp, Homo sapiens
tactgccccgtctgtcaggaggtgctcaaaacgcccgtgcggaccacggcctgtcagcacgtggccgcctgggcagaatgtcacgatggacgagggcggc

SEQ ID NO: 675792 - DNA, 100 bp, Homo sapiens
ctgtggtggcggatcacttcaagatatttaccatgatttagcatgtagactgctggggcaatcaatggatgaaagtggattaccacagctgaccagttat

SEQ ID NO: 675793 - DNA, 100 bp, Homo sapiens
ggcctaccatcgtttcttcctgcctttgggccgtcaggcagttggttgggacccgctccaaccctcggtaaaataccatgaagattttgaaaaaacaaag

SEQ ID NO: 675794 - DNA, 100 bp, Homo sapiens
acttgtgtctcccagagctggctgtgtgatggggaccctgactgccctgatgattcagacgagtctttagatacctattcatgcccaagcacaaaacaac

SEQ ID NO: 675795 - DNA, 82 bp, Homo sapiens
tggaaaaggagttcgagcagatcgacaagtccgggagctgggcggccatttaccaggcgttcccacagctgtgcagaactta

SEQ ID NO: 675796 - DNA, 100 bp, Homo sapiens
tttctttcttcatgaccctgcccttgccagaatttcctgcgctgttccacctcattcaacttcagaaccactcacgaattcttgtttggtgcccttgctg

SEQ ID NO: 675797 - DNA, 100 bp, Homo sapiens
cagcagacccagtccctgagagagctcatctcagatctggagcatcggctgcaggggtcagtgatggagctgcttcagcatcctgaggttagcattacac

SEQ ID NO: 675798 - DNA, 82 bp, Homo sapiens
gtgaccaagaacgtgagcaagcccaggcacagccgacgccgcgggatcgcaccccctccctccctggcggagcccctgaagg

SEQ ID NO: 675799 - DNA, 75 bp, Homo sapiens
aacaaaagaggtccagcccctcagagggattgtgtccacctgatccacatctcaaagaagtggggcttcaccaag

SEQ ID NO: 675800 - DNA, 83 bp, Homo sapiens
tactctctctttctggcctggaggctatccagcaaaaactgattgcttatcaacgagaattccttgctttgaaagaacgtctt

SEQ ID NO: 675801 - DNA, 90 bp, Homo sapiens
cgacttcgatgatcgtgtgtcggatgaggagaagtcaggttttccttgttcccgcatgttcagccaatcgtgtttaaggagaaactaaca

SEQ ID NO: 675802 - DNA, 75 bp, Homo sapiens
gaggcagaggtggaggcgctttgaaagcgtccgtctccaagagagtatgaagagagtgcgtctgtagggcaggga

SEQ ID NO: 675803 - DNA, 98 bp, Homo sapiens
tggttgataccattaagtgcctaattcaaatgggagcagcggtggaagcgaaggaaaaccagcattggaatcagctgattcaggatgctcagaagcgt

SEQ ID NO: 675804 - DNA, 96 bp, Homo sapiens
tgagaaataaggacaaaagccaagaggaggacagttcgctacacagcaatgcatcgagtctccggagtagagatgaagagagaatttctaaacctg

SEQ ID NO: 675805 - DNA, 90 bp, Homo sapiens
tccaggagaagtccatggccacctaaatcgaggagacgtggcgcctgtggcagaagtttttagacgactattctcgctttgaggactggc

SEQ ID NO: 675806 - DNA, 90 bp, Homo sapiens
cttagcagcgcgcggagaagaacggggagccagtgggtaattccagaattgattggccataccattgtcactgtattactgctcatgtca

SEQ ID NO: 675807 - DNA, 100 bp, Homo sapiens
cagcctgccgcctcgctgtccctgcggcttctgggggctaatggaggttggcaggatgctactaccccttcatcagtgacctcccctacagaaggccctg

SEQ ID NO: 675808 - DNA, 82 bp, Homo sapiens
cttacgccaccgccatcactttcatcacatggatcctcatccagtttgcatttagacttaattcagtgcacaaatgagatga

SEQ ID NO: 675809 - DNA, 51 bp, Homo sapiens
gaatcaggggaggcatgcttcaggtgccgtgagcgatgtggagatgcagga

SEQ ID NO: 675810 - DNA, 100 bp, Homo sapiens
ctgaagagcaatgaactcaagagccacatcctggaactggaggaaaaatgtcagggctcagcccagaaattgctgcaggaaattggccttgcctctctgg

SEQ ID NO: 675811 - DNA, 100 bp, Homo sapiens
ctaaagcagcgtgcgttcagccctgggatctttgtggagttcacctctgtgtttgactgccagaaagccatgcagggcctgacgggccgcaagttcgcca

SEQ ID NO: 675812 - DNA, 90 bp, Homo sapiens
acagacagaatccctgctaccatggtgccaccgaacatcgcagaactgaagaatttggaggtgctcaacttttttaataaccaaatcgag

SEQ ID NO: 675813 - DNA, 75 bp, Homo sapiens
ggcccaaggccatctacctggacatcgatggacgcattcagaagggaaatcctcattgacgattcaatttgttga

SEQ ID NO: 675814 - DNA, 95 bp, Homo sapiens
tgtcatataagatttaccttccgacacaggtcatctcaggaaatgccagcgccacagcccttcaatcattttggttgctatccagcttctccaca

SEQ ID NO: 675815 - DNA, 129 bp, Homo sapiens
gcagacaagctgctgtggtcagtgcaggtggatcaccagctctttgccctggagaaactggatgtcacctttaattggttggggtcagataagaagaggagtgacaatcaagccaacagtagatgatga

SEQ ID NO: 675816 - DNA, 100 bp, Homo sapiens
gcgggacgggacgtgcggcccagcgagttggtcggtcccggggtcacccgctacgggaagcaggcctcgccacaggcaccacctacctatgatgccgtgg

SEQ ID NO: 675817 - DNA, 75 bp, Homo sapiens
ctggataaggaccagtacctgcccaggaaactgacgggtggacttcccgctggatcgaatccaaacacaagtcag

SEQ ID NO: 675818 - DNA, 50 bp, Homo sapiens
tgcgagccaagtcttggatctcagaaacctgctcctccaaagccagagcc

SEQ ID NO: 675819 - DNA, 75 bp, Homo sapiens
gaaggggttcccagaagtcagaatccaagatggagtccaaaactacttacctggaagaccttccaccaccccctg

SEQ ID NO: 675820 - DNA, 100 bp, Homo sapiens
aataaattgcagaagttacttattcttttaagaggtctgcctggttctgggaaaacaacattgtctcggctcatgccaaagtctggcatctctacaatac

SEQ ID NO: 675821 - DNA, 100 bp, Homo sapiens
tgcatcatgctgtctggagaaacagccaaaggggactatcctctggaggctgtgcgcatgcagcacctggatctgcttcctggtcatgtcctcatcctac

SEQ ID NO: 675822 - DNA, 92 bp, Homo sapiens
cagtgacgggtctggagtgcgtgggggaccggctgttggcggatgagcgggatcgtgtgcagaagaaaaccttcaccaagtgggtcaacaag

SEQ ID NO: 675823 - DNA, 100 bp, Homo sapiens
cttggcacacaggcacaagggctggagcccagagatgagagtgcccaagggagaaaagaggcacagttagatgaagaaggacagtttcttgtcagaataa

SEQ ID NO: 675824 - DNA, 100 bp, Homo sapiens
gagctgaggcggtcgcggccatgaagttgattatggaagattcccacaagagtaccacgtcagagacagcacctcaacctggttcagcagttcagggagc

SEQ ID NO: 675825 - DNA, 88 bp, Homo sapiens
gacttatatgatgcaagatgtggcagaagaacaagaagttgagaccgagaatgtggaaacagctaaaagatggcggcaaggcagccca

SEQ ID NO: 675826 - DNA, 83 bp, Homo sapiens
cagctgcaaatattctcttctgttctacagacctctctcctcttcctgctcatggtttccaacatggctagatccatcagaaa

SEQ ID NO: 675827 - DNA, 75 bp, Homo sapiens
gcggaatgtcaactattcaacatggaggcggaggtcgataagctggaactgatggagacgttctcttccagatgg

SEQ ID NO: 675828 - DNA, 100 bp, Homo sapiens
actgttcatcctcacctatgcaaagaaagggaagctattgctgggattttgaggagttcctgcggatggtggatgcctgtgccagcttcctcactgaagc

SEQ ID NO: 675829 - DNA, 100 bp, Homo sapiens
agaagagatcgaggttgaggaggaactctgcaagcagttacctggtgatgccgttcatgggcaccgacctgggcaagctcatgaaacatgagaagctagg

SEQ ID NO: 675830 - DNA, 87 bp, Homo sapiens
gacccggcggacgcggcgtctggtgtgcgggcgctggggcgggactctgtctacatcttccgggaaggggccttgccaccctatcgg

SEQ ID NO: 675831 - DNA, 98 bp, Homo sapiens
cttctcccgctctacctcagcctgcgggactgctcggctcggcttctaggcggtgaacatcattccaataattgcaaaagctgacaccattgccaaga

SEQ ID NO: 675832 - DNA, 100 bp, Homo sapiens
agaagatgatacaaatgaatttgttagtgctgtgtgctggagggcactaccagatggggtaccaaccaagaagctgaagaaatatgagaaagaatatcag

SEQ ID NO: 675833 - DNA, 82 bp, Homo sapiens
atggcgaagcacgagcagatcctggtcctcgatccgcccacagacctcaaattcaaagagacaagaggagcagcagcggcac

SEQ ID NO: 675834 - DNA, 50 bp, Homo sapiens
cagccatttatattgcttaggctactgggctcagaaacacttatgggatt

SEQ ID NO: 675835 - DNA, 75 bp, Homo sapiens
cttagctgtgctcgcgctactctctctttctggcctggaggctatccagcagccctgaggatgatgacaggaagg

SEQ ID NO: 675836 - DNA, 82 bp, Homo sapiens
atcggacaggatttctccgcctcagcccaacggggagaggctgggaggcggcagaatgcagccagaggagggcacaggctgg

SEQ ID NO: 675837 - DNA, 75 bp, Homo sapiens
cacgcacgcggtgcagggtaacatggcggatgcggaagtttttggctttcacccccaaccagtgaccaaagactt

SEQ ID NO: 675838 - DNA, 100 bp, Homo sapiens
gtggtgggcgccgagcggaagcagctggccggcagtctcagcctctccgagacgcagacgtccttctatggccgcttcaggcacttcttggatatcatcg

SEQ ID NO: 675839 - DNA, 75 bp, Homo sapiens
caagcccgggcgccaccgctgccacctccgcgagctagaagaagtcttcacttcccaggagagccaaagcgtgtc

SEQ ID NO: 675840 - DNA, 107 bp, Homo sapiens
ctccgtcccgccccggccggctggcggtcacctggcacaccagcgcccgcaggatgcccaggttcagaaaatggtcttgcacagaagcatcgaacacctcgccgacg

SEQ ID NO: 675841 - DNA, 82 bp, Homo sapiens
aaaaagttgaagctttggggagcccaagccaggaagctggaggaaacaatgtgatgagaaccattcatggggtgggagagat

SEQ ID NO: 675842 - DNA, 58 bp, Homo sapiens
cgaggacacggtgctttcaacaacagagaagacagcgacagctgtggcgcactgcaaa

SEQ ID NO: 675843 - DNA, 75 bp, Homo sapiens
aaaaaaggaaaagctggaaaaagttcaaaataaagcagcatcacttattcagattggccatctgcaagcttccct

SEQ ID NO: 675844 - DNA, 100 bp, Homo sapiens
ccccagccagcgcagcgacggggcgctgcctggcccaggcgcacacggaagtgatcaagtctcgggttctcatgactcccttagccctctcacctccgcg

SEQ ID NO: 675845 - DNA, 75 bp, Homo sapiens
gcagaaaacacctttaataaaacccatacattccactttctgaatcagagatcattgatttcttcctgggggcct

SEQ ID NO: 675846 - DNA, 100 bp, Homo sapiens
cagcaatttgggcaactttaattatggtcaggagaggctcacggatcaggaaataggggatgggaaaggccttgacatggcaagacggtgtagtgtgacg

SEQ ID NO: 675847 - DNA, 97 bp, Homo sapiens
tgagggggcttggggggcctcgcctgagagagtgagagctggcctccaccctgctggacgccatcaccgataaggaccccctggtgcaggagcaggt

SEQ ID NO: 675848 - DNA, 90 bp, Homo sapiens
gtcacccaagtgcattgcctttggaaacgaggaactgattcatttggaagaaagattaggcaatgtcaatcgtggagcatcccaggggac

SEQ ID NO: 675849 - DNA, 100 bp, Homo sapiens
ggaggaggaggatgaatttgatagagaggtggatgaagacctgatcattgaagttcaccagttatttttctcaagaatgtgaataacaatgggatttgca

SEQ ID NO: 675850 - DNA, 90 bp, Homo sapiens
gagattatagctctgtatgagaaggacaacacctacttagacatatctgaagagatggattaagaatgctttggattaaggattgtggag

SEQ ID NO: 675851 - DNA, 80 bp, Homo sapiens
gcccaggagtcatcggacgccagaatctggtgaggatccagagaggcctaatggtgagaagccctaccactgcaactggg

SEQ ID NO: 675852 - DNA, 109 bp, Homo sapiens
caatgatgtagccacctcctaaccttcccttcttgaacccccaggcaacgcggtaaaaatattgcttcggtgggtgacgcggtacagctgcccaagggcgttcgtaacg

SEQ ID NO: 675853 - DNA, 100 bp, Homo sapiens
cagagacaacgagatgaactatggcagttaaacagggaaaccaactgcagatgcaagtccacgaagggcaccatgtcgttgatgaagccccacccccagt

SEQ ID NO: 675854 - DNA, 100 bp, Homo sapiens
agcccgggaggggccgcgccgccaccgtctgaactaggatgtcccgacatgaagctggtaatgaatcttgccctcagcctcagacatcggaacacctggc

SEQ ID NO: 675855 - DNA, 83 bp, Homo sapiens
tgttgtggataagactcctgtcatccgctcagtgatactgaaactgcttttgaagtacagacgcaaacatgcagatctttgtg

SEQ ID NO: 675856 - DNA, 96 bp, Homo sapiens
cgaggtggagctgcggggccctggcatgaaagcctgcctgctccgcttcagcggactctcgctggtctacctgctcttcctgctgctgctgccctg

SEQ ID NO: 675857 - DNA, 98 bp, Homo sapiens
cttgacgaggctgcggtgtctgctgctattctccgagcttcgcaatggtttatgaaggcgagcgtgccatgacaaaggataacaacctgcttggcaag

SEQ ID NO: 675858 - DNA, 75 bp, Homo sapiens
gaccaggaaattgctttgaagttgggttgtctagaaatacgtggctttgaagcgtatgttgaatttcaatgtgcc

SEQ ID NO: 675859 - DNA, 90 bp, Homo sapiens
ggaaatcaaggacttcctgctcacagcccgacgaaaggatgccaaatgtaacatctgccggcacctgctgccccgggtccagtgccccgc

SEQ ID NO: 675860 - DNA, 98 bp, Homo sapiens
cagctatgcaaatatagaacactaaagtgttacatgacagatgtatgagagtcctccctgctgctgtgtggacgacacgtgggcacaggcagaagtgg

SEQ ID NO: 675861 - DNA, 75 bp, Homo sapiens
gtggccacatactttctcagaaaccttcacatcttggtcaagatatgagatcctgactccaaactccattcccaa

SEQ ID NO: 675862 - DNA, 96 bp, Homo sapiens
caaaaggggacctgggggtgcctgggctgcagaagtgatcagcgatgccagagagaacgtccagagactcacaggagaccatgcagaggattcgct

SEQ ID NO: 675863 - DNA, 100 bp, Homo sapiens
gggcagcccggccccgctgagcgatcccaccgaagcagcgtgtcctccgtgggagcccgagaacagtaaatgtcctgagggaacaaaacccatgctgata

SEQ ID NO: 675864 - DNA, 80 bp, Homo sapiens
ctgctgaggagaggagcgtcaacagcagcaccatgggtatggcacagtcacaagggtgggtgaaaagatacatcaaggcc

SEQ ID NO: 675865 - DNA, 100 bp, Homo sapiens
ctttagacgctcatgaagaaatcagggatttcctcagaacacagaatgttcttggtgagaagggccggcggattcgggaactgactgctgtagttcagaa

SEQ ID NO: 675866 - DNA, 100 bp, Homo sapiens
caggccgggcacctccgagcgcaaggacagcgcgaggtccgcgcagcccagcgcagccatggtgtcaaattgagaaccaggtagatccccaccacctaca

SEQ ID NO: 675867 - DNA, 100 bp, Homo sapiens
ctgcaggcattcttctcagcagtgacccagttatcatagagacctgcctatttattctttggcgccatctggagtactacttgttacattgcatgcccac

SEQ ID NO: 675868 - DNA, 75 bp, Homo sapiens
cgctagtctgaccctccgccaggcaaaaggaaggacatgtattcctctgagaaaccttggacagcagattttggt

SEQ ID NO: 675869 - DNA, 98 bp, Homo sapiens
acctgtccttggtgcagagggaaagtctgaatcatcactaccatctgaactgtggctgccaagagtgtggggctgattgtgctaagttccagaagagt

SEQ ID NO: 675870 - DNA, 100 bp, Homo sapiens
gcggagtgactgggacctgggaacctactgtggggccgcggccggaccgagcgcctcgacctcggtctgagttcttggccaggctgactgagagatttgt

SEQ ID NO: 675871 - DNA, 100 bp, Homo sapiens
tgatgacctccctgcaagatttggttatagacttccagctgaaggtttaaaggttgcacgttttcaaaaaatacctaatggtgaaaatgagacaatgatt

SEQ ID NO: 675872 - DNA, 75 bp, Homo sapiens
acggagctcaatggcggcagtcgcgctgagggactcggctcagtttcattcattggctcccatgtactatcgagg

SEQ ID NO: 675873 - DNA, 100 bp, Homo sapiens
agccagcgaacatcacagattccttatccaatcgttctttgattgttaccaccattttgccaaaactggacaagccaaggcatctgtagccaaagtaaac

SEQ ID NO: 675874 - DNA, 99 bp, Homo sapiens
gaaacacttcctataaatctcgcccaaacaggaaaggtcctagcagaagatgtgactcagactgcctctgggtggggctggctggcccacagatcctgc

SEQ ID NO: 675875 - DNA, 90 bp, Homo sapiens
ggaaaatggaagagctcatcaaaaacgagccggaagtgttggaaaaccttggacagacaattgtccccgatttgggatcactggaaagtc

SEQ ID NO: 675876 - DNA, 118 bp, Homo sapiens
tgatcgcctgggtggttgttggcgtgtccctgcagcgaaggatcctggttgggacccagacatggagctgcgggaagaagcctggtctccggggccgctggattctgaggaccagcag

SEQ ID NO: 675877 - DNA, 74 bp, Homo sapiens
gcagggtggagcactggggcttggaccagccgctcctcaagcactgggacgccaaggcgccccgagaggcactt

SEQ ID NO: 675878 - DNA, 90 bp, Homo sapiens
gataaaattaaaacaggcttggctggtcttgaaatcggcatcttaggattcactccttctccagttgcacagccacacccttcagctggc

SEQ ID NO: 675879 - DNA, 75 bp, Homo sapiens
caacagggaagcagaggagaaccgggagccattcagaaaaggtcagttcaccgggacctggaggcccagattgcg

SEQ ID NO: 675880 - DNA, 101 bp, Homo sapiens
gtagaacgctgtgtatttcaagagtaagctctcgtttgaggagactaacaattcctgttttcgccaggttgcatctggaggtggtggggttggagatggtg

SEQ ID NO: 675881 - DNA, 96 bp, Homo sapiens
acaccttgcgagaaaccaggtcggcccagcaacgaggaaagctgagtaatcaagtcagaggattatatgacttttatctgcctagagaagaactat

SEQ ID NO: 675882 - DNA, 78 bp, Homo sapiens
caacatagccatcgacttcggggagcaggacttcattgacttaactagagagaccagaccaaggacaaaagatcgcag

SEQ ID NO: 675883 - DNA, 82 bp, Homo sapiens
ctcatgttctccttcgtcaacgaccgaagccccatgtgccactcccctgatctgcagcttcggtaggccggtggacctggag

SEQ ID NO: 675884 - DNA, 97 bp, Homo sapiens
aacctgggtgcgttcagcggcattcaacaaatggcagcgaaaacagtgttacaccagaagagcagccggcctcctgtaccgatctccaacgcgacca

SEQ ID NO: 675885 - DNA, 118 bp, Homo sapiens
gcggaaaggatgttggcggtccctgtgacctgtggagacacggccagatctgccctccaagactctgacctgtttttgttggacacccgtgtagtatgggcctcagaagaaggctggc

SEQ ID NO: 675886 - DNA, 100 bp, Homo sapiens
cccgccgagggcccggaccccgaatatgacggtcatgtccatcctgttgcatggggatgctgcatttgctggccagggcattgtgtacgagaccttccac

SEQ ID NO: 675887 - DNA, 75 bp, Homo sapiens
cggtggggctgcggcgcctgggactgcaccgcaccgagggcgagctccagaaaggaaggcagaggaagccacggc

SEQ ID NO: 675888 - DNA, 95 bp, Homo sapiens
gaaacgatcctctcatctcagcctccaaaagtgctggcattacaggttgtccttctattcaggccactcttcgttttccatgtactgcatgctgt

SEQ ID NO: 675889 - DNA, 100 bp, Homo sapiens
gagcaggccgcttggttctgacccagctgagtattggtaaaggttttcaaggtgtcatgaaaagatggggatttaaaggccagcctgctacgcatggtca

SEQ ID NO: 675890 - DNA, 100 bp, Homo sapiens
acggtcggactcccgcggcgggaggagcctgttcccctgagggtttcatcaccttaaatggttttgaaccaatgaaggtgtattcccttaaaaagacgga

SEQ ID NO: 675891 - DNA, 85 bp, Homo sapiens
gtatacaactgtagatgcaaatgggtatctgaaaaatggatcagtagagaaatggtcagaaggaacgacaccacagaagaaatta

SEQ ID NO: 675892 - DNA, 50 bp, Homo sapiens
ctttgagactgctgatattctatgtccaaacagagattgcgaagagactg

SEQ ID NO: 675893 - DNA, 80 bp, Homo sapiens
ctctttgtcactccccggcggcagcacgaaagtaccatgtgttgctctcttgccattcgtggatgagcgaaggctacgag

SEQ ID NO: 675894 - DNA, 97 bp, Homo sapiens
ggagctggaggagctttatttgtgaccgttacataactgaagactcccaccttcaggcaggattgggtagtacatgtttgtaactacctggcattgc

SEQ ID NO: 675895 - DNA, 83 bp, Homo sapiens
tactctctctttctggcctggaggctatccagcttccagctattcttcagatgctctggattttgagacggagcacaaattgg

SEQ ID NO: 675896 - DNA, 100 bp, Homo sapiens
agtctaagttaaagcagtcaaacatgctgaccgctcaagagattctacatcagtttggtttcactcagaccgaaagaagatcttctggagccacaggaac

SEQ ID NO: 675897 - DNA, 101 bp, Homo sapiens
cagactcgagtgcgaagcgcgcagtcgccgggtttgtgttgctagttaagctagcttgtattgttgtggcttccttcgttctctgctggctgccattcttt

SEQ ID NO: 675898 - DNA, 100 bp, Homo sapiens
agatttccaaaatccaggggatcaagaggaatcaaacattttaagtccagtgcaggatggaacaaagaaacctcagattgacagcaacaagagcaataac

SEQ ID NO: 675899 - DNA, 50 bp, Homo sapiens
cgtcactgaggttgcagttggcgtgaagaaccctggggttattagtaaaa

SEQ ID NO: 675900 - DNA, 98 bp, Homo sapiens
ctgctgccatgtgagacgtgcctttgaccttctgccatgattgtgaggcctccccagccacgtgaaactgtgacgcagctggaccagaggctggcact

SEQ ID NO: 675901 - DNA, 75 bp, Homo sapiens
cccggcccccatcctccccgccccatcggttgttgtctgggcggggtctggaacagaatctgacagtgatgaatc

SEQ ID NO: 675902 - DNA, 83 bp, Homo sapiens
cttttttcaagtcccttgtgggcaaggatgtggtcgtggaactaaagaatgacctgaggtgacatcagttgcaaggggatgac

SEQ ID NO: 675903 - DNA, 75 bp, Homo sapiens
cagacctccacttccaaggatatagagcaggacaccgagtttccaggtgtggttgcaagacccattggagaattc

SEQ ID NO: 675904 - DNA, 90 bp, Homo sapiens
cccagaccaaggaaaaatccaagtgatggagcagcattttcagggtatttgaagtataccatacaactgttttgaaaatccagcgtggac

SEQ ID NO: 675905 - DNA, 100 bp, Homo sapiens
aattgtcactggagctgcccccatgtccacttcagtcatgacattcttccgggcagcaatgggatgtcaggtctgggacctcagtgacattgacaaggat

SEQ ID NO: 675906 - DNA, 50 bp, Homo sapiens
agaccttgacacttatatcctccctggatcctgcactggatggatcagcg

SEQ ID NO: 675907 - DNA, 75 bp, Homo sapiens
catgaattccagagttttcaagaaaattcaaggtgtgttccagagaacaagccttcagacatttgctatattgac

SEQ ID NO: 675908 - DNA, 75 bp, Homo sapiens
cccgcttgaggctctctatgaatctctgagagtcttagagagccaggtgagaatttcaaggattatcgacttcat

SEQ ID NO: 675909 - DNA, 100 bp, Homo sapiens
attgcttaatgatataccacagtcaacagaacagggagacttatttcctccacggctatttagtagacactggagccacagtccagtgagctaatttaag

SEQ ID NO: 675910 - DNA, 82 bp, Homo sapiens
cccgcatcgcctcccgtggaagcccaggcccgcttcgcagggtcagcctggcagcaggcatggaaaccgaggaaggagacaa

SEQ ID NO: 675911 - DNA, 83 bp, Homo sapiens
caggccatgctctggcaaaaacataaacccactgccctacagccgcgtggtgcacacctaccgcctccccagctgtggctgcc

SEQ ID NO: 675912 - DNA, 88 bp, Homo sapiens
tgttggctgcatatttgcagaaatgtttcgtagaaagattaagttgtcatcattctgggaagaaaaaaaaaacattaatgaagaggcc

SEQ ID NO: 675913 - DNA, 76 bp, Homo sapiens
ggtgccaggtgtccatccccgtgctgaggaactaagcgtcttgtagaaggaactattaatccaggagaaacctgtt

SEQ ID NO: 675914 - DNA, 50 bp, Homo sapiens
ctaaatcgagagaactttccagaagacttgcactatctgccagatgctgc

SEQ ID NO: 675915 - DNA, 74 bp, Homo sapiens
atatccaacagcctttctggatttctcagagtcctatggatacagctgcagctactggaggttctgttctcaat

SEQ ID NO: 675916 - DNA, 100 bp, Homo sapiens
ccggatctggtaacatggcaaaagatctgatgtagcccagcagttccagtatgctgtgcgggtgattggcagcaacttcgccccaactgttgaaagagat

SEQ ID NO: 675917 - DNA, 100 bp, Homo sapiens
cggcagaagtgagctggaaggtcttggagcgaagagctcggaccaagcgctcagcttcgccgacacgaggtgaccatctgcaattacgaagcatctgcca

SEQ ID NO: 675918 - DNA, 100 bp, Homo sapiens
aggagagggctttgatgtcatgaagtcgggtgatgcccgtgtggcgctgattggatttccctctgtgggaaaatatatgcagatgatgaacattcttaag

SEQ ID NO: 675919 - DNA, 90 bp, Homo sapiens
ctaatcaggaggttgctaacccagaacactatattaaacatcccctacagaacagcatgctacaagtgaaaactgatgagaaactgaatg

SEQ ID NO: 675920 - DNA, 75 bp, Homo sapiens
gaacagctgaacgaaccctggccacactctcagatacactctgtgcagttttagagagagacacactcagtattc

SEQ ID NO: 675921 - DNA, 118 bp, Homo sapiens
caccaaataccaggctaccatggtctacaagactctcttcgctctttgcatcttaactgcagggggatatgagactttctactcggaatatcctgagtgttgcgtggatgtaaaaccc

SEQ ID NO: 675922 - DNA, 90 bp, Homo sapiens
ggcggactctttccggacagacaggagagggatttgtcatcagcgtgtctcatggagaaccactctgaaacatgttccaaatcaagtata

SEQ ID NO: 675923 - DNA, 100 bp, Homo sapiens
gagcaaggcatgatcctgaagcagacgttctggtcaatgagctgaaggagaaaggcaacaaggccctgagcgtgggtaacatcgatgatgccttacagtg

SEQ ID NO: 675924 - DNA, 100 bp, Homo sapiens
ggaaggagaactaaatgggagaagaggaatgttccctgacaatttcgttaaggaatgctgtctctgcaatttgagaggaggtgctcttaagcaaacgaag

SEQ ID NO: 675925 - DNA, 98 bp, Homo sapiens
cgggctggccagggcttcggcctccggcgtcgggaaatggcggcggggggcaggatggaggacggccaattcctgtccccccagcagcatggcatcgt

SEQ ID NO: 675926 - DNA, 80 bp, Homo sapiens
caccgacatcagtgagaaggaggctggctgcagagaccatggtgtgatgaatgcagactctgctaccattttggctgttt

SEQ ID NO: 675927 - DNA, 131 bp, Homo sapiens
aagcacctgactacgaagtgctatccgtgcgagaacagctattccacgagaggatccgcgagtgtattgacaagctggccaaggaggaacacaacagtgctctgaaccttaataagattaacacacagtgg

SEQ ID NO: 675928 - DNA, 75 bp, Homo sapiens
cggcaaggtctccaagtcccagctcaaggaaacacttcaagttgaagaagatgatcgacctgagttaccatggtg

SEQ ID NO: 675929 - DNA, 100 bp, Homo sapiens
ggccgatgaggaagtactgagcctgttggaggaactggcccggaaacaggaggacaaacttcagtgctctcaagaaggaaaatatttatgaaaacaataa

SEQ ID NO: 675930 - DNA, 90 bp, Homo sapiens
gtccttggaactgtggtccatggtaaagttttacagggccatgctatgatagtggaagcttatccaaaataatagatccagaagaagtga

SEQ ID NO: 675931 - DNA, 82 bp, Homo sapiens
tggggttttactctaaagggtggcctggagcacggagaaccattaatcatctctaagaagagccacgtggtgctttgctggt

SEQ ID NO: 675932 - DNA, 100 bp, Homo sapiens
cctgaaaaacaagattctcctcctccaaaaccaccaaggacccgcaggattatttcctatttagagatggtgacattcttggaaagtacgtagactgaaa

SEQ ID NO: 675933 - DNA, 75 bp, Homo sapiens
agtatttctactggaaaaaccattttcagttaaagcagaaagaagatcttctggagccacaggaacagcttcccc

SEQ ID NO: 675934 - DNA, 74 bp, Homo sapiens
gtgttcctgtggtctctgcacctcctttcttcacggaacagcaaatttctgagaagttgaagactatcatgaaa

SEQ ID NO: 675935 - DNA, 91 bp, Homo sapiens
gggcctgcagcgggagctggacggcgagcgcgagcggcgcgagaaactcctgccagggccatccaggtgaccgtgtccaacccctaccacg

SEQ ID NO: 675936 - DNA, 76 bp, Homo sapiens
aaagttggaacctctgacaagaccaagtactaccttcaaggaaaccgtatcatcatgggtaaaaaccatgttttcc

SEQ ID NO: 675937 - DNA, 75 bp, Homo sapiens
gaagaagctgccacgcaccttctgccagctgatcctggaccccatcttcaaggtaccaggatcatctatgaccgg

SEQ ID NO: 675938 - DNA, 100 bp, Homo sapiens
gaaggcgggtagtccttcgcgtcttcatttcctcggtttcctggggtcgcggctgcctccgctgcctagaccgaaggtatggcatgaattgccttattca

SEQ ID NO: 675939 - DNA, 100 bp, Homo sapiens
gaagagctgcagtctttgtgggacaagttgctgacggtgcacggacgcaccaaggagcagaaggggcccctgtcgggtgcagcgtcctgggagcatatca

SEQ ID NO: 675940 - DNA, 125 bp, Homo sapiens
agcggttggaggcttcgcccggctttgcagcggggacttcggcggcggcgcctcaggcacctcggcccggatctttaatctcatgaagtacgacagctacagccgcttcttaaagtctgacttgt

SEQ ID NO: 675941 - DNA, 75 bp, Homo sapiens
tttcagagaagatccttgggctccaggtccagcaggcggagcactgttcaatctacgcagaccccaccaagaggc

SEQ ID NO: 675942 - DNA, 75 bp, Homo sapiens
attttgtggttccagcagcttctgttccaggtaaactgtcttgagccccaccctcacctgcctgtgctggcaacc

SEQ ID NO: 675943 - DNA, 100 bp, Homo sapiens
aaaacgttggttacactacgtgagtttgcccagtatgcggagatcgtccacttcaccctcccagatgggactcagaggagcgggcaggtgcttgaggtgg

SEQ ID NO: 675944 - DNA, 100 bp, Homo sapiens
gccagtgtgacctggcgggagtggagacctgcaagtcattagagtcacaggcggtgagtcctgaggagaggttctggaatgcatctggggcggcctttgt

SEQ ID NO: 675945 - DNA, 100 bp, Homo sapiens
cctgctgcgggatcccaaatcggaagtgaattcggattgtttgctggatgctaatgaatgttggatacaaatgatgcgagtattgcaacagaaattggaa

SEQ ID NO: 675946 - DNA, 75 bp, Homo sapiens
aaggcggagatcgcccgccgagcgtccgtctccaagagagtatgaagagagtgcgtctgtagggcagggaagatg

SEQ ID NO: 675947 - DNA, 88 bp, Homo sapiens
ggctgcctccagaggacctggtccagaaacctccacagctgttgagaaaaaggagaaacctcttccaagacttaatatccattctgga

SEQ ID NO: 675948 - DNA, 100 bp, Homo sapiens
cagggatgctggaccaacctggctttcccgactgctccatcgaggcagccatggtgaaggttaaaaatgtgtctgcaggcacacaggacgtgccttcacc

SEQ ID NO: 675949 - DNA, 100 bp, Homo sapiens
gttggacatatctaccgtcttgagggctggcaaggaaatcctccgcccatttatgttgggtcttctccaactctgaaggatttgaagcattcattaccat

SEQ ID NO: 675950 - DNA, 74 bp, Homo sapiens
ctgcggcctgacccagagccacttctcaccgagatgattcatgaaaccatgctcgacagctgaccaaggccatg

SEQ ID NO: 675951 - DNA, 100 bp, Homo sapiens
gaacatccgagggtgcctgggaatcggtcgcctggaggaccagtatttcccatggagggatctgagtgatgagacgtgtccccactgaggtgccccacag

SEQ ID NO: 675952 - DNA, 100 bp, Homo sapiens
gctatgatggaaatagcttgtgctgctgctgctgctgctgctgcatgtctaccaggagaggagggaactgcggagcggatcatcacgggggaattctacc

SEQ ID NO: 675953 - DNA, 100 bp, Homo sapiens
ctcaaatctgaaagtactgaagttacattcatgtggattatcacaaaagagtgtcaaaatattggaatctccagaatctggtctccagaaacattattct

SEQ ID NO: 675954 - DNA, 75 bp, Homo sapiens
cctgtctcctggatgcaccgcattcagaacttgctactaccagcaccatgccctaccaatatccagcactgaccc

SEQ ID NO: 675955 - DNA, 100 bp, Homo sapiens
gaccgaggcctctataaacaaggacaacattggctagagaaaaaagatgttgtggggagagccagggggttttgatggtacagtccaggtctatgatgcc

SEQ ID NO: 675956 - DNA, 97 bp, Homo sapiens
agcgtatggccacagaagttgctgctgacgctctgggtgaagaatggaaggtgtttgtaaaatgtatgaagaacatctgaaaagaatgaatcccaac

SEQ ID NO: 675957 - DNA, 75 bp, Homo sapiens
tcagcccactagtagtgcgctggtaaatgctacggaatggggccatggagttggggagagaatgtctaaatctct

SEQ ID NO: 675958 - DNA, 51 bp, Homo sapiens
ctggagaacatggatctatggagttacattacttcgttcagaaccatttca

SEQ ID NO: 675959 - DNA, 100 bp, Homo sapiens
tgccacctgcctttgacctttttgaagcctttgcaaaagctaggcagctggaagagaaagaccgagtgctaaagaagcaggatgcattctacaaagaaca

SEQ ID NO: 675960 - DNA, 100 bp, Homo sapiens
gggtgccctccatggccaggaggacacccctggtggcctgcttgactcggtgaaatacctggagtgctcagctctcacccagagaggcctgaaaaccgtg

SEQ ID NO: 675961 - DNA, 100 bp, Homo sapiens
ttcagaagagccaaatccaggggaagtagcaggcttgcaatcttcaggtggagccgccaccaaaatgcagattttcgtgaaaacccttacggggaagacc

SEQ ID NO: 675962 - DNA, 87 bp, Homo sapiens
gaggtgttaccggaacggcggcgacaagggtgttcccgaactagagtggaatgacgtggccgcacttctgaaacccatatcggaaaa

SEQ ID NO: 675963 - DNA, 75 bp, Homo sapiens
cgcctttggcggtaaattcggattgacctgcgttacgaagctcagaatctagaacacttccaggtcaacttccgg

SEQ ID NO: 675964 - DNA, 100 bp, Homo sapiens
tggagctggaaatagtgtgtttccaattttgaacactttggaatgaagaagatgactttatgtgtaagaaggcggcctctaaatcaaaagagaatggaag

SEQ ID NO: 675965 - DNA, 90 bp, Homo sapiens
gcacattccagcagggaaacgaactccgatgtgcgcccattgtaaccaggtcatcagtcatggctccgatcttcatcttgaagaagagtg

SEQ ID NO: 675966 - DNA, 75 bp, Homo sapiens
ctggactggatagatgcccagggtgccacactgaattatatccagatcgagagacagaagattctgaaagggttc

SEQ ID NO: 675967 - DNA, 90 bp, Homo sapiens
tgatgtagttaagattgtgaatctagcttgcaaatataatctttgtatcataccaattggtgatgagcccattattgaagagccaagccg

SEQ ID NO: 675968 - DNA, 75 bp, Homo sapiens
cctaggcgaagatccggactctgggtgttttgctaccgtgaccgtttagctcctccatttacaacctacaaagat

SEQ ID NO: 675969 - DNA, 82 bp, Homo sapiens
tgattttaatcagttctgcgtttgaaaggaaacccggcaacaagcagtggtggtttggtggtggatgtgacctcactccaac

SEQ ID NO: 675970 - DNA, 75 bp, Homo sapiens
acacatggttaaggaacaggaggaaaccattcagagttggactaaatgctcttccttcagaggattatccggggc

SEQ ID NO: 675971 - DNA, 113 bp, Homo sapiens
attccaacacataaaaattatttatccaacagctcctcccagtttccacgggctcccttgctcagcagtatgcgcaccctaacgctaccctgcacccacatactccacaccct

SEQ ID NO: 675972 - DNA, 73 bp, Homo sapiens
ccccatcccggaggtctccgccggctcccggttgctgattgttggaggttcttttggtcttcgtgagttttct

SEQ ID NO: 675973 - DNA, 103 bp, Homo sapiens
cccggacatgctcagggctgcggccgcccgaagaggagagagcgcgggcctctaggaagggttaaagcacgaattgggagctctcagcgacatcaccagtcag

SEQ ID NO: 675974 - DNA, 100 bp, Homo sapiens
ccgagcaggctgagcgatacgacggagaagctgtctttgctcggtgcttatcatctctgaaggatgagagaattcaagctagcaaaaagctgaagggtcc

SEQ ID NO: 675975 - DNA, 74 bp, Homo sapiens
gcggcggcagcgacagcagcagcagcagccagtattcgggaaaggcagacagtgttacctggaatgtcagagag

SEQ ID NO: 675976 - DNA, 98 bp, Homo sapiens
gtggctttggtggatggggtattcttgaaccaggtcatgctccaaattatgactatgaatatgatgaaaatggtgacagagtcgttttaggaaaaggc

SEQ ID NO: 675977 - DNA, 90 bp, Homo sapiens
tgcagcttcaacttttacaacaacaacatgctggaaaacagcctaaagagaccagattatcaaaaattctcatgattaaaaaggaacata

SEQ ID NO: 675978 - DNA, 100 bp, Homo sapiens
ccccaaccatcgttgggaaatcatctctaaatcccatcctctttcgaggtgttgggacatgcacacctgaccgacttcaacattgccaccatcatcaagg

SEQ ID NO: 675979 - DNA, 130 bp, Homo sapiens
cttcatcctcacctgtacgcttggctatgtgacgctgctggaggaaacacctcaggacacggcctacaacaccaagagggagaagttgtggaatatgtggatgacctcttggaactggaggagaccagct

SEQ ID NO: 675980 - DNA, 50 bp, Homo sapiens
acacccggctccccggacgcctcgagatcctgaaggagctagacgagtgc

SEQ ID NO: 675981 - DNA, 104 bp, Homo sapiens
tttcacaccacgcctggcaatattacaggcatcccgggcccaaatcctagacaaagccacagaatatatccagtatatgcgaaggaaaaaccacacacaccagc

SEQ ID NO: 675982 - DNA, 75 bp, Homo sapiens
agctcaccccggacgagagcaaggagaggctagggacctcagcagccatgtcgaagccccatagtgaagccggga

SEQ ID NO: 675983 - DNA, 73 bp, Homo sapiens
cctctacgaaggcggctacttcaagcattgatctggtagccttgctccagaagcctgttcctcacagtcaagc

SEQ ID NO: 675984 - DNA, 100 bp, Homo sapiens
aagctcatcatgaccttccagaattacgggcaagcgctgttcaaacccatgaagaaggatcgagatcgagaccgggatcgtgaagatcggtctaaagatc

SEQ ID NO: 675985 - DNA, 75 bp, Homo sapiens
attgaagcagttggtggcaaattaaggccataaaattttgagtagaaaaatccagaaatttgaaaatcagtatcg

SEQ ID NO: 675986 - DNA, 51 bp, Homo sapiens
agtggtgaaacagttggatctggagcaacatggccaatctttcctaagctg

SEQ ID NO: 675987 - DNA, 100 bp, Homo sapiens
atccctcaagactggtccacggagtgtatgaccacaaacagccatcaaggcgcttgaagaggctcagaaagctatccaacaactctttggcaaaatcaaa

SEQ ID NO: 675988 - DNA, 100 bp, Homo sapiens
ctcggatccctgaatttgatccaggtaccaggatcatctatgaccggaaattcctgatggagtgtcggaactcacctgtgaccaaaacacccccaaggga

SEQ ID NO: 675989 - DNA, 90 bp, Homo sapiens
aacaaagagttatatgaaatcaatcctccaaatttcacggtccctcatggtgtctcactccagcagacagaggattgtgtcgtgccaatg

SEQ ID NO: 675990 - DNA, 101 bp, Homo sapiens
agtggtgtctggaggcctgtgtccagttctgctaagccaatattctctagaatgagcacaaaacaaatcgaataacagctaaacaaatcgaataacagcta

SEQ ID NO: 675991 - DNA, 87 bp, Homo sapiens
tgaaatttgatggccttagcatttcttactacaataatgagaaggggagccttagcatcatcaaatctaaaattccaacatactgct

SEQ ID NO: 675992 - DNA, 100 bp, Homo sapiens
agtaccaagtgaagactttgaacgcactcctcagagtccgactctcccacctgctaaggacacattcagctaacgtattttagcaggtggagtgaggttg

SEQ ID NO: 675993 - DNA, 100 bp, Homo sapiens
ccaagaaaaaggagggaaaaatatccagcaaaaccgctgctaaattgtcaactagtgctaaaaggcagtaacagagaagaattttgaaacaaaagatttt

SEQ ID NO: 675994 - DNA, 75 bp, Homo sapiens
cacgaagttcagcccagaggagaaactcgctcgccttcagaagacagagaccatcatgcagacatcagagactgg

SEQ ID NO: 675995 - DNA, 100 bp, Homo sapiens
ggctaggggcggctcggagtccgctggccacccagctgagaggagaggcgcccccggggacgaaataacatctgctttgctgccgagctcagaggagacc

SEQ ID NO: 675996 - DNA, 60 bp, Homo sapiens
ccccgaacgggggtcttcctcctccgccgttgacagcagcagcagctccaggcgcagcac

SEQ ID NO: 675997 - DNA, 75 bp, Homo sapiens
attttgttgaagatgactcggacattttacatgaaacgggctgtaaaggcagaaaaccacgtcgtgaaactaaaa

SEQ ID NO: 675998 - DNA, 75 bp, Homo sapiens
cgactctcatagaaaacgagagtatatgcgatgagtttggtaaaaatgcatttgcaaagggagaaaatgaaggcc

SEQ ID NO: 675999 - DNA, 90 bp, Homo sapiens
ccgccttccaggtgacccagggaacgggaccggagcttcatgcctgcaaagaggcggctatgagaggttttcctccgagtacccagaatt

SEQ ID NO: 676000 - DNA, 75 bp, Homo sapiens
atgtcagattttttttggaatcactgcctgcctttctcagttgctgcaatagtattattctgctccacttctagc

SEQ ID NO: 676001 - DNA, 100 bp, Homo sapiens
gcggcgccccggccgaggtggcggcggctcctcagatttctgcgccaggagatgaggggcggtagagccctggaatggagatgtccttgacgcctgggca

SEQ ID NO: 676002 - DNA, 100 bp, Homo sapiens
cacaccagcggctgcaggactgggcacagcatgagatccaaaggcagggcaaggaaactggccacaagtttacccaaggtccagcctagcccctaggcac

SEQ ID NO: 676003 - DNA, 75 bp, Homo sapiens
aatggctatatcagcaaggcagagatgctagagatcgtgcagggggcagctggcattttatgctatgtgggagcc

SEQ ID NO: 676004 - DNA, 73 bp, Homo sapiens
cccggccccggggaactagggagcgtctccggctgcacagcgctcagaattaaatatgggtgatgttgagaaa

SEQ ID NO: 676005 - DNA, 100 bp, Homo sapiens
ctctctttgtcctcgccggcttcaagtggcaggactttaagtggttgaaatacatcgtctacaaggagagagtggttgtgatcaattattcaatcgtgaa

SEQ ID NO: 676006 - DNA, 98 bp, Homo sapiens
tcaaccgcggcccctgtaggccaaggcgccaggcaggacgacagcagcagcagcgcgtctccttcagggtgattctgggggtccacttgtctgtaatg

SEQ ID NO: 676007 - DNA, 74 bp, Homo sapiens
ggcttttatgaagcgggccatggtgttcaagcagccctggccagggatcatgcgcacagtctatgggaaccacg

SEQ ID NO: 676008 - DNA, 99 bp, Homo sapiens
tgagctgctcaccatgtggtttggggagtctgaggccaatgtcagagaaatctttgacaagggaagaaggagaaagggccaacccctgaagaagcaata

SEQ ID NO: 676009 - DNA, 100 bp, Homo sapiens
ctccctctcagcacctgggcggacggtttatggctacaaatgatttgatgacggaactgcagaaagattccatcaagttggatgatgatagtgaaaggaa

SEQ ID NO: 676010 - DNA, 90 bp, Homo sapiens
gcctgatcacagattcaaaagttaaattaaagtatcagcatttaataacaaatagctttgtagagaattatatccagatcgagagacaga

SEQ ID NO: 676011 - DNA, 83 bp, Homo sapiens
aagagatcagtcattacaatagcaacttctgttgataagttgggaaagttcacatccttggctccttccaaaatatcaagatg

SEQ ID NO: 676012 - DNA, 75 bp, Homo sapiens
ccctcctcccagggccaggcgccgctcagaacgatataattggtgattacaactttcctctataaattaactctt

SEQ ID NO: 676013 - DNA, 100 bp, Homo sapiens
ggtctgaatcgtgcaggttccgggaagacacggtgaccagctgaatcgtgtggtctcggggaggaatctgaaattctcagaagacatagcttctttgatg

SEQ ID NO: 676014 - DNA, 75 bp, Homo sapiens
catggagagcaaggagaaggatcgccaggtgctggaggacttcccaacggaaaatcatcagcgtgttagcatttt

SEQ ID NO: 676015 - DNA, 97 bp, Homo sapiens
cccgagccatggctctcgccgtccgagtcgtttattggttgcccccaagtttcctggcagtgtgtgatactgaggaggtgagcttgtttctggagct

SEQ ID NO: 676016 - DNA, 50 bp, Homo sapiens
cagctttgacaatacaggaaatgtttgctgaccaactgactgaagagcag

SEQ ID NO: 676017 - DNA, 83 bp, Homo sapiens
tacagcatcaactacctgcactttggggagcctaagtcctgatgaaggatttgggggcagagcacttggcaggtcatgaaggg

SEQ ID NO: 676018 - DNA, 100 bp, Homo sapiens
ctgcagatgcctgcacacctcctggtcaatatccaacacagccaacctaccctgtgcagcctcctgggaatccagtataccctcagaccttgcatcttcc

SEQ ID NO: 676019 - DNA, 100 bp, Homo sapiens
gtccctgtgacctggccgatgaggaagtactgagcctgttggaggaactggcccggaaacaggaggacccgccgccatgtctgcgcatctgcaatggatg

SEQ ID NO: 676020 - DNA, 74 bp, Homo sapiens
acaggggttatcgcacttaagcctcggaacaactttaccaggagccaaaaacctgtatatcatctccgtgaagg

SEQ ID NO: 676021 - DNA, 75 bp, Homo sapiens
aactttgcagaagcatatgaattgccctggtacctgacagtgtaaagaaggagctcctacaaagaataagaacat

SEQ ID NO: 676022 - DNA, 50 bp, Homo sapiens
ttcccggaaccgcgattcggcgtgtcaggcggagtctcactctgtcaccc

SEQ ID NO: 676023 - DNA, 82 bp, Homo sapiens
cgccggcaccacgagagcccggcccgcctgtgtggacgctcggtgctgattatcacaactgtttggtgacctacttcactga

SEQ ID NO: 676024 - DNA, 73 bp, Homo sapiens
tttaaaaaaggatgaatttctagctgcattggaactagtgacagttgatggaatcattgcaatttagagatgt

SEQ ID NO: 676025 - DNA, 100 bp, Homo sapiens
aggaacggctccagcatcaagatccgtctgacagagatccgtgctcagctcacagagcagatgaaatgcctggaccagcagtgtgagcttcgggtgcaac

SEQ ID NO: 676026 - DNA, 75 bp, Homo sapiens
gctcgtggcctgcctctgcgtgcctgacatgggctcattgctccttctccaagccctctgaggacatcaaaagcg

SEQ ID NO: 676027 - DNA, 98 bp, Homo sapiens
cctcttgttttccaacatcatccccattagctatgagggcactggccggtcactgtccctcaagctaattcagcagctccgtcaacagagcgcccaga

SEQ ID NO: 676028 - DNA, 51 bp, Homo sapiens
gcaagagttcatacaagcagagctaaaggtcgtttaggccaattgggtttg

SEQ ID NO: 676029 - DNA, 100 bp, Homo sapiens
cccacaggtgctaaagagagcagtaccctgatggagtcccttgcagtggcgtgggtctggcacgagcacattttgagaagcagcctccctccaacctcag

SEQ ID NO: 676030 - DNA, 74 bp, Homo sapiens
cgaggccctgcggagctgcttcgccgctgcgagggcagctgtgtacaggatgaatcggaaccacagaggcctct

SEQ ID NO: 676031 - DNA, 97 bp, Homo sapiens
gaagaaacagttagcgcaagacacaggacttacaattctccaagtaaacaactggtttccgagcaggaaatggatgaagtcatagcacgcagcactt

SEQ ID NO: 676032 - DNA, 100 bp, Homo sapiens
aagtaggaggtggaaagaacagtcagaaagcctctccagtggatgatgaacagctgtcagtctgtctttctggtagttgatgtcacttggcgatattcct

SEQ ID NO: 676033 - DNA, 76 bp, Homo sapiens
aggaaggacacttggaaattgaacaagcgtcacttgacaagcctatagaatcgctcttcacagatggaatcacaaa

SEQ ID NO: 676034 - DNA, 83 bp, Homo sapiens
aaagaaaagccctgaatggttcaataagagcttactcacatagcatattggtatatcaaaatgaaatgcaaggaaccaaaaat

SEQ ID NO: 676035 - DNA, 75 bp, Homo sapiens
cgcggactctggcaccaacaaaactatctctttgagagtgtgaacatggctacgcctcttcattcccgtccatgc

SEQ ID NO: 676036 - DNA, 90 bp, Homo sapiens
agctgaatccagtaccaaaaacgtcaacaacagttttacggtcacgagaagagaatgccttctagatgcaaaatcacctccaaaccagac

SEQ ID NO: 676037 - DNA, 100 bp, Homo sapiens
catcgctcgggtgcagcgcagctcagcgcagcgctgcggcctttcggcagccgaacggccgcggcaggacctcagcagccatgtcgaagccccatagtga

SEQ ID NO: 676038 - DNA, 100 bp, Homo sapiens
ataacctgggcttgggatctgacaaaggactccaacagagcaagccggaagtcggtgcagcccacctcagaggagcgcatccccaagaccatcgagatca

SEQ ID NO: 676039 - DNA, 76 bp, Homo sapiens
tacttcctgtcggtcctggcggacccctacatgccacgccgatgtggaagtggccagattctgagccgcctgacta

SEQ ID NO: 676040 - DNA, 82 bp, Homo sapiens
ctggccctggccctgatcatcctgctgggcttcgtccagatcgggaagggccatcagcatcagcaaagccatcaacacccag

SEQ ID NO: 676041 - DNA, 75 bp, Homo sapiens
gacccaggatgaagaggttggagatgggaccacatcagtaattattcttgttccagccaaagaggaagctaatgc

SEQ ID NO: 676042 - DNA, 100 bp, Homo sapiens
caaaaagctgctaagcactgctccctccgtctctgtgaagagaccagcttctaacagcccatcatcttcgtttcggacagagcaaacagcaacaaggagc

SEQ ID NO: 676043 - DNA, 96 bp, Homo sapiens
cccattccaggctgtgcaggaaggtatccgttacagcactgatgtgagtgtagatgaagtaaaagctttggcttctctgatgacatacaagtgtgc

SEQ ID NO: 676044 - DNA, 74 bp, Homo sapiens
caggcacactacagaactaaatatgcataaatctctgcccctgttagaaaatcaaatcaaggagactcaccaga

SEQ ID NO: 676045 - DNA, 83 bp, Homo sapiens
cagcagagttctctcctgctgctcctcctggtacaagaaaattccccaggacacagagctggtttggagcctttctttgattt

SEQ ID NO: 676046 - DNA, 90 bp, Homo sapiens
atccagtttgagccatcggatctaagatccaaaagaatcttgtggaagaagaatgaagttgctgattatgaagctacaacattttccatc

SEQ ID NO: 676047 - DNA, 136 bp, Homo sapiens
tcaagcaggttttaaatcaagatttaacattccaacacataaaaattatttatccaacagctcctcccaggattaaactgcaaatatctcatgaagctgctgcctgtatcactggtctccgggcagccatggaggc

SEQ ID NO: 676048 - DNA, 100 bp, Homo sapiens
attatcaaatctcagggaacatcagcttaggtcatagcaaatgacagaagtcccttggtgggcaaaattcactgggagaaaatggttaaaaaggtgtcaa

SEQ ID NO: 676049 - DNA, 50 bp, Homo sapiens
gccgtctacactctcacctatggtgggagtgtggattgatgttggcagcc

SEQ ID NO: 676050 - DNA, 82 bp, Homo sapiens
gctcagctcctggggctcctgctgctctggctcccaggtgccagtgatgatgcagttagctgctcagtgatgctggaagtcc

SEQ ID NO: 676051 - DNA, 75 bp, Homo sapiens
caggaggccaggggtgtcgccatggatcaggagcgtctgggcaagcagctcaagttacgtgcagaaagggaagaa

SEQ ID NO: 676052 - DNA, 100 bp, Homo sapiens
tcaacctagacaggatccgtcattggattggctgcggggcccacctctctaagcctatggaaaagcttctggacacgatgaggcgagtggtacgacagag

SEQ ID NO: 676053 - DNA, 100 bp, Homo sapiens
cttcagccatagaaatgcagttgcgaagagtattacatgatattagaaactcactgcagaatctttcacaggccaaacgtaccaagaaagtcgggatcgt

SEQ ID NO: 676054 - DNA, 155 bp, Homo sapiens
ggcagcaaggtgtcggtgttccacgtgaagctcaccgacagtgccctgagggccttcgagagctaccgcgccagacaggcagcggaggaggagaaagagatggacctcccggactcggcctcgagggtcttctgcggccgcatcctgagcatggt

SEQ ID NO: 676055 - DNA, 98 bp, Homo sapiens
tcttgttatagccagtgtgcagctccctaatgatgatgctcagtttgatgcgtcacactacgacagtgagaaaggagagatctaccgcatcgtgtcac

SEQ ID NO: 676056 - DNA, 110 bp, Homo sapiens
ccccgcatcctgtttttcctgagcaaccagagaaaccacttgaccttgcacatatagtccaaaacctattgatgtacaagtcattacacaccacatgcagcgatatgcag

SEQ ID NO: 676057 - DNA, 113 bp, Homo sapiens
ggccaatgtgggatcgatgtttcaatattggaagcgctttgatttacagcagctgcagaaaggacctaagtgtgaaataccccgaagacgtccccatcacccttccaaacctg

SEQ ID NO: 676058 - DNA, 100 bp, Homo sapiens
tttgtggctgtgcttgccaggcctggctccagcatttattgaaatggcaaccacagaggatgctcaggccgcagtggattattacacaaccacaccagcg

SEQ ID NO: 676059 - DNA, 83 bp, Homo sapiens
aaaagaactcttaacggccgatgcagctcttccaaagctaaggtactccaaagattcaggtttactcacgtcatccagcagag

SEQ ID NO: 676060 - DNA, 74 bp, Homo sapiens
cagctaagacgccaggacccactggaagcctagaaatgctgccattcgatttcacatggaagatgctaaaggac

SEQ ID NO: 676061 - DNA, 100 bp, Homo sapiens
ccaagatgaagatgctgttagcctttgcagtctcgacataagtagatgtggtatggtgtattcctgtgggcactggtgtcttctctcttctttcatgtcc

SEQ ID NO: 676062 - DNA, 83 bp, Homo sapiens
cacagcggcttcgagctctcctctgatggcaggacctgccaagttaccggtattgtaagaacaagccgtacccaaagtctcgc

SEQ ID NO: 676063 - DNA, 100 bp, Homo sapiens
cggctatcccaccatcaagttcttcaggaatggagacacggcttcccccaaggaatatacagaggagaggagacgccgtgagcgggacgaccagatgtac

SEQ ID NO: 676064 - DNA, 82 bp, Homo sapiens
ttactatggtggaaaacaaaccattttgaaagtgcttacctttaactaggaataggaactctaatgaatcattgattgacca

SEQ ID NO: 676065 - DNA, 97 bp, Homo sapiens
cctgtgcgggatggaacaaaagaactcttcatcttggcttatacctatactgcctgatatgctccgacacatttttcagttctgtgttttggaaagc

SEQ ID NO: 676066 - DNA, 73 bp, Homo sapiens
ctaatatgggcagtaacacatagcgtcaaagagttctcagcacagatattctacacctcacgccttcaccttt

SEQ ID NO: 676067 - DNA, 90 bp, Homo sapiens
cgctgcgttacccggaaccgccgggccgaacagcatgacgtccgctttggagaactacatcaaccctgggcccaccttaccacatcctcg

SEQ ID NO: 676068 - DNA, 71 bp, Homo sapiens
acccgccaccgtcgccggccgcccgcacgtccgtccgggccgtccgggcgctgaggctcataggctgggct

SEQ ID NO: 676069 - DNA, 101 bp, Homo sapiens
gccccagtgagaaaggtcaccgcaagtacagagagtacagccccccatatgcgccgggtgtgggccgaagatatgctcatgtggtgttgaggaaagcagac

SEQ ID NO: 676070 - DNA, 100 bp, Homo sapiens
gcgacgtccgcgtccgcccgggtcgtggcggcgggcgcccagcgcgtggattacagtttaaagacaatttctgtgatcaagttgtcatttggaagattaa

SEQ ID NO: 676071 - DNA, 75 bp, Homo sapiens
ccttttccaagtaccaaaatgatgagaaaccttttatgtgtgcatgactcctacatggtggattatttcaaatcc

SEQ ID NO: 676072 - DNA, 128 bp, Homo sapiens
atgccctgctgtagtcacaggagctgtagagaggaccccggtacatctgaaagccgggaaatgtgccggtggtggtgtgcacattgagccccggtatagacagttcccccagctgaccagatcccagg

SEQ ID NO: 676073 - DNA, 90 bp, Homo sapiens
ggctttgggtcacgaggcttcacggaggaggtatcttggagatggccgcttccatctggagtctgtcatgattgccaaccccaatgtccc

SEQ ID NO: 676074 - DNA, 83 bp, Homo sapiens
ggctgtttggaaagacccaggagaagccgcccaaagaactggtttacccaaggtccagcctagcccctaggcaccatgtcgga

SEQ ID NO: 676075 - DNA, 100 bp, Homo sapiens
tgacctgaaagaccgaccattcttccctgggctggtgaagtacatgaactcagggccggttgtggccatggtgctggagctggcaggtaatgcttctaag

SEQ ID NO: 676076 - DNA, 98 bp, Homo sapiens
ctttgtctccccgatctacggggctgacatcagcggctctttgtatgatgacctacgagttccagggagctctgtcctggtgaccgtgcccgggttat

SEQ ID NO: 676077 - DNA, 82 bp, Homo sapiens
aatgttgattttgttggaggacttcactgtaaaccagccaaacccttgcctaaggaaatggaagagtttgtccagagctctg

SEQ ID NO: 676078 - DNA, 82 bp, Homo sapiens
gaccagagagggagccctgcctacatcagtcccgacgtgctcagcggctttatcctgtggataaacgcagagtgaacgagtt

SEQ ID NO: 676079 - DNA, 74 bp, Homo sapiens
cagaggatggaacacttcagtgcattcaaggattcctagatgaggttatgaagaagtatggcagtttggttcca

SEQ ID NO: 676080 - DNA, 51 bp, Homo sapiens
caaggattaaaagaatatgatcaagcattgcagaagaagatctttacaatc

SEQ ID NO: 676081 - DNA, 82 bp, Homo sapiens
agcctcagcaggagcctgttctcatcaccatggcaacagggactggtgattgcagctggaagtgcccatgaccgagctggcg

SEQ ID NO: 676082 - DNA, 51 bp, Homo sapiens
gttgccttggtaggcaataaaaacaagttggatggcttgaggactggtact

SEQ ID NO: 676083 - DNA, 97 bp, Homo sapiens
ggggagcggccaaccacgacctgacggacaccacccgggcggtgtcttgggacaaggtgcgcattcctggtgtgctgcagcgattgggagtgacata

SEQ ID NO: 676084 - DNA, 83 bp, Homo sapiens
ctcctcctgaggcaccacgtctctaccgagcacaaactccacgaagccaacgcccagcaaaatgatgcttcaacacccaggcc

SEQ ID NO: 676085 - DNA, 75 bp, Homo sapiens
cgccactcctaaaggctggtcctgccactgggacagggaaggggatgctgaggaaagcctgggatcacccagtga

SEQ ID NO: 676086 - DNA, 137 bp, Homo sapiens
catggcgctgagtgaacccatcctgccgtccttctccactttcgccagcccgtgccgcgagcgcggcctgcaggagctcaccatggatgatgatatcgccgcgctcgtcgtcgacaacggctccggcatgtgcaagg

SEQ ID NO: 676087 - DNA, 75 bp, Homo sapiens
ttgtttattcttctctggatctagaccagcaactagaagccatttgtgtcaaggtaacgtctggagaaacaaaag

SEQ ID NO: 676088 - DNA, 90 bp, Homo sapiens
agtgctgcggcgcccacagaaaggccggctggcagccctgcgagatgagccttccaaggaattgaatgatctggcacgggaccctccagc

SEQ ID NO: 676089 - DNA, 83 bp, Homo sapiens
ggaatccggaagggacacgctgaacagcaacgaatcagtattcagcagctcttcactattacctccaggcaggagctgtgtgt

SEQ ID NO: 676090 - DNA, 90 bp, Homo sapiens
aggagtatgaccagccctgggagtggaagaaggagcggatttccaaagcctttgcaggtatttcctgccaattcagacccagaaactcca

SEQ ID NO: 676091 - DNA, 74 bp, Homo sapiens
ggtagctggtgcagaagccattttttaaacttaggtatttaagtactgaaagcttcctggagatgatggaggct

SEQ ID NO: 676092 - DNA, 76 bp, Homo sapiens
tgctgtgccatggggagctgcggagcaagagtggacattcaccaggagactaaagtccatcaaaaacatccagaaa

SEQ ID NO: 676093 - DNA, 73 bp, Homo sapiens
agactggcaggcctcggcctaaaggaaccactcgttttgactattattttatcactctttgtgaaacttcaca

SEQ ID NO: 676094 - DNA, 100 bp, Homo sapiens
attcaagtaaaactggctaatccttttcgaataggacaggcacatacagtgaggggaccaaagcagtatccttacaataatctgtacctggaacgaggcg

SEQ ID NO: 676095 - DNA, 100 bp, Homo sapiens
gttcatcccgggtcgaccggccgctcgcgctgccctgaaactctagtcgccagacaatgcagatcttcgtgaagactctgactggtaagaccatcaccct

SEQ ID NO: 676096 - DNA, 75 bp, Homo sapiens
cttcttttttgagaaaggaaggaatatatcctgactgattgtgtgggaagctgctgatgtattgatcaaagctgc

SEQ ID NO: 676097 - DNA, 85 bp, Homo sapiens
ccctgcaacccgtgcttatgcagatagttactattatgaagatggagcctgcaagtattcctgccacaagaaatgtgaagccaag

SEQ ID NO: 676098 - DNA, 110 bp, Homo sapiens
ccacgaggtagaagggggccgaggcgacgagcagtacatgcagctcctggagtcaatctgtcccctttcctccaacccaacggcttactttcaaggaagtatttgagaat

SEQ ID NO: 676099 - DNA, 75 bp, Homo sapiens
cttccccagagaaggctgaagaggacaggaggctgccgggcagccagactactccaaaggattcggcgggaagta

SEQ ID NO: 676100 - DNA, 100 bp, Homo sapiens
aagattgtcatagctgatgtcaagttggttgctgatttccaaagatggagtcatcagaacccactgtgaggaagtgacttctccttgaggtcacccagac

SEQ ID NO: 676101 - DNA, 75 bp, Homo sapiens
ggcagaggtgaaggagagaacagaggaacctatggagacagagcccaaagaattacatgatgcgtaatgctgtgc

SEQ ID NO: 676102 - DNA, 100 bp, Homo sapiens
cagtttagttgaggataccacattagagccagaagcatgatggaagtggttcattgcatgatattcaactgtcattgccatccagtccagaaccagaaga

SEQ ID NO: 676103 - DNA, 98 bp, Homo sapiens
gtggcgctcggctgcgcgctgctcctcgccctcaagttcacctgcaggtggcagagatgcatggcgagctgattgagttcaacgagcgcctgcacagg

SEQ ID NO: 676104 - DNA, 80 bp, Homo sapiens
atcctatggctcaaagaaagatgattatgtcatgcaagacaagataatctgccttccgaaaagagtgcagcctgctcaga

SEQ ID NO: 676105 - DNA, 90 bp, Homo sapiens
cagaggcaagaccaaccaagatgagggcccaggacacagtgagcatacaatagacattagctgctgtggtgtcttgatttcaagcccagt

SEQ ID NO: 676106 - DNA, 85 bp, Homo sapiens
tgttagagctcagttggttgatatgaaacgactggaggtggaagatgcaatgctgatgtttgataaaactaccaacaggcacaga

SEQ ID NO: 676107 - DNA, 100 bp, Homo sapiens
gaacgagcacctcctcgaagtcatcccagtaggtcctgctgtactagccaccaaagcagctgctggtactaagaaatatgatcttagtaaatggaaatat

SEQ ID NO: 676108 - DNA, 100 bp, Homo sapiens
aaggatttcatgcaagattacaggaatttcagaattttgaacaaatctttgagtcttcagccaatgacttgcttgcatcagacatctttgctcctcccgt

SEQ ID NO: 676109 - DNA, 74 bp, Homo sapiens
aatttgtggctggctggatctctgagggctccacaggtaagacgtgcctgatgaaggctgtgctgaaccttaag

SEQ ID NO: 676110 - DNA, 100 bp, Homo sapiens
ctgggagatgggcctactcgcccgccaccctgcgctgccgccgctctgaggagttaaaggatgtgaagttaccccagatgtaaacatttcaggccaaaaa

SEQ ID NO: 676111 - DNA, 100 bp, Homo sapiens
cccggtgtaccgcggcgagaagccccagctgcactacgcgggtatttgaagtataccatacaactgttttgaaaatccagcgtggacaatggctactcaa

SEQ ID NO: 676112 - DNA, 99 bp, Homo sapiens
ggccggcgggaccataagggcttaactcatatatttaacccccctccaaaaaattctggctgtgactcagtcactgacactgagcctgaggacgagaag

SEQ ID NO: 676113 - DNA, 96 bp, Homo sapiens
cagagaagaaataatggcaaataacttttccttggagagtcataacatatcactgactggcctcccagtagcattggatgcaggaaaaaatacatt

SEQ ID NO: 676114 - DNA, 90 bp, Homo sapiens
gccgggggagcggggccttccacaccccctccgtgggtgtgtggctctgccaaggctgagaatgacaaacatctaagtgtagggcctggc

SEQ ID NO: 676115 - DNA, 100 bp, Homo sapiens
ggggacgagactgccgagcggacggaggctccgggcacccccgagggccccgagcccgagcgccccagcccgggaggatcccttttcccccagaaattac

SEQ ID NO: 676116 - DNA, 100 bp, Homo sapiens
cgaaccaccatgacccacttcaacaagggcccttcctatgggctctcggccgaagtcaagaacaagttacatgggaattggtctttctgctcaaggtgtg

SEQ ID NO: 676117 - DNA, 127 bp, Homo sapiens
atccaccaaagaaagtgacctctgagaaagtgagccagaaacatgctgagcctttgacaggtgctggagaatctggtaaaagcaccattgtgaagcagatgaggatcctgcatgttaatgggtttaa

SEQ ID NO: 676118 - DNA, 90 bp, Homo sapiens
acctctgtctccagctccgttgactttgaccaaagggacaatggtggccgtgaattaagtgattttattagctatctacaaagagaagct

SEQ ID NO: 676119 - DNA, 102 bp, Homo sapiens
tggcgcgctggttcccgggccacatggccaaggatagggatgaggaagaaatgaccaaacgagatgacaaaagagatatcaacagatactgcaaggagaggc

SEQ ID NO: 676120 - DNA, 100 bp, Homo sapiens
ctggatttatttctcgattcgctgtcggaggagaatgagaccctggtggagtttgctattgatgaaaggttgtatcaaagttcttaaggaccaacctcct

SEQ ID NO: 676121 - DNA, 97 bp, Homo sapiens
tgcttccttccaccgagtgcaggcccttaccactgacatttcactcatctttgcgttcccagaaatgaatgctatgatcatgcgacggttcagtttg

SEQ ID NO: 676122 - DNA, 75 bp, Homo sapiens
cttttctgtacaacatcacttcttctgtttgcagtggtggaaggtccatccgagtatatcatggagacagtggat

SEQ ID NO: 676123 - DNA, 118 bp, Homo sapiens
cagccacctgtgcccacccagaatcactgaagggtcagagcattttctctgtgccaccagagagtttcgtgtgcgttgattatggaagattcccacaagagtaccacgtcagagacag

SEQ ID NO: 676124 - DNA, 101 bp, Homo sapiens
agaaagctctggagacttgtggcggggacctcaaacagtcctggaaagacaagcatcatgcctctgaccagtgccttcagggctgtggacaacgaccctgg

SEQ ID NO: 676125 - DNA, 50 bp, Homo sapiens
gccgaaatgttattttaacgagtggtatgtgtgcaacagagagaaattat

SEQ ID NO: 676126 - DNA, 100 bp, Homo sapiens
cagggagctggacgagctgatggcttcgctgtcggatttcaaggaaacattaactggctttaagtggatgggaaacagagccaaacagctaatagaccag

SEQ ID NO: 676127 - DNA, 101 bp, Homo sapiens
tgcagctgattaaggactatcgggagaaagtggagtccgagctgagatccatctgcaccacggtgctgccagacgaggacagccggctgctgcccctgctg

SEQ ID NO: 676128 - DNA, 83 bp, Homo sapiens
gtcgccagaggcagtcccagcacaaagggtaatcactttgatcagtatgaggaaggacacttggaaattgaacaagcgtcact

SEQ ID NO: 676129 - DNA, 75 bp, Homo sapiens
gcgcagcctgcgttttctccggtacaggttgaggctactaagttgacttttgtgccctggtaattctgtatcctg

SEQ ID NO: 676130 - DNA, 75 bp, Homo sapiens
ctacgtgtgctttttcaagggagctgataaagaacttcttcccaaaatggtcacgtgaactggaaatttcagttt

SEQ ID NO: 676131 - DNA, 75 bp, Homo sapiens
cgaatggctgacagcctggcctccaaagtcaccaggctcaaatcggatgaccaactcttggatgatggcaagaca

SEQ ID NO: 676132 - DNA, 83 bp, Homo sapiens
actgtcttcgtgatgaataaaaacatttcaactccctacagttgtgccatgcgaattgaatgatctggcacgggaccctccag

SEQ ID NO: 676133 - DNA, 75 bp, Homo sapiens
gtcctgcttagtagctggaaccaaatgtgacaagtggtctcacgtgtgaaacatggctacagattggctgggaag

SEQ ID NO: 676134 - DNA, 90 bp, Homo sapiens
tcaagaagtgtgtaccacctctttttccacctccccaccatcccagggtaaagcccacagcttgaagccaagcataaaggagaagctggc

SEQ ID NO: 676135 - DNA, 101 bp, Homo sapiens
acctgtctgtaaagaagaagaggaggagggagacagcggggaggatccggtggcagtttaacaccagagcaggcagccgcgagacggccttcacatacgcg

SEQ ID NO: 676136 - DNA, 99 bp, Homo sapiens
aagattggctggagaaaatatgactggagctgctaagccgtactggcatcagtcaatgttctggctggatgacaccaaaatcctcccaggcaacatgaa

SEQ ID NO: 676137 - DNA, 100 bp, Homo sapiens
cagtgctgctgtgagtttgacgaagtggacatcacctgcagtcagtccagagctgcccagggtcctgtctttgtgatgtcagcgtgaagtggaattcgca

SEQ ID NO: 676138 - DNA, 75 bp, Homo sapiens
ggtgtgacgttgaagatgtcggccttctgagccgactgcggtggtcaagaggtatatgaatgacctaaaggtaca

SEQ ID NO: 676139 - DNA, 75 bp, Homo sapiens
gtcgggacaccccggaagctgggaaatggttcttcagatagatcctgaagttacagatgaagaaataaaaaagag

SEQ ID NO: 676140 - DNA, 100 bp, Homo sapiens
tctggacaagaagtcgtagggggtgagggtggaagctgggaaacccacaggaggcaaccacactagtttaggtatccagctcacatagaagacattgact

SEQ ID NO: 676141 - DNA, 74 bp, Homo sapiens
acagaaattctggaacacctatatgaattacctctggactacaaatttacaagattctcttcaagcaattcaaa

SEQ ID NO: 676142 - DNA, 100 bp, Homo sapiens
aaacattgcatctggaacttctgaacaaactcaagcagtagttcagtccagccttcccttcttcttggtggtgttcttgagtaagataatctggactggc

SEQ ID NO: 676143 - DNA, 90 bp, Homo sapiens
catccagtttgctacggtctacggggcagagcaggtgaccattgtgaggtagatattttgttctaattttccagatgaggaagctgagac

SEQ ID NO: 676144 - DNA, 98 bp, Homo sapiens
tatcacagcaaaagaaatagaaacatttgtcagtttactcaggagaaatcgggagccaaggtacggttcctggagcagcagaacaagatgctggagac

SEQ ID NO: 676145 - DNA, 100 bp, Homo sapiens
ggacttcagctcctggtagcagcagggcatggcctatctgcacgcgcagcactacatccaccgagacctagccgcgcgcaacgtgctgctggacaacgac

SEQ ID NO: 676146 - DNA, 75 bp, Homo sapiens
tccacgctaaggagggtgctggagtgagtcccccacttatcactcagaaaacccgctacgagacctacgtgcagc

SEQ ID NO: 676147 - DNA, 80 bp, Homo sapiens
gattgctcaggaagcaatggaggttacctgtgcatgacagatgagtggttctctgagtatgtctacgaagtggtggtgga

SEQ ID NO: 676148 - DNA, 100 bp, Homo sapiens
ggctgaggtctacattgacctgcttcaaaagaacaggaccccgtacgtcactaccactgtctctgctcacagtgccaagctcatgggcctcctgagtgac

SEQ ID NO: 676149 - DNA, 50 bp, Homo sapiens
cttgggactgggctcgatttgagactcagtggttctccatccttccggac

SEQ ID NO: 676150 - DNA, 100 bp, Homo sapiens
tggtttacctggcactcctggacaggatggattgccagggcttcctggcccgaaaggagagcctataatgtacaacggccagccaattaccaaaatggcc

SEQ ID NO: 676151 - DNA, 95 bp, Homo sapiens
caggtggagctccggcagccgccctggccagtctatccatatggggatggggaagccttggcattgtcctttttctgataacctttggacccttt

SEQ ID NO: 676152 - DNA, 100 bp, Homo sapiens
aagaatacctcggcaaattccgacgtcttgaagacttccgagtagatgggtggggctcgagttgccctgaagatcattaagaatgtggagaagtacaagg

SEQ ID NO: 676153 - DNA, 100 bp, Homo sapiens
cgggaccatatgaatgccagtgcccagggccacagttccagggtcacccccgagaggacaacaggcatctggaagtgctctctcgccactctgggtgctt

SEQ ID NO: 676154 - DNA, 75 bp, Homo sapiens
agcacacactatggcgctgaaacggattaataagtctcacagaaagttctccgctcccagacatgggtccctcgg

SEQ ID NO: 676155 - DNA, 76 bp, Homo sapiens
tcacctcaagaagtcacttaggcatggctgtaatatttcttttcactcccaggttgatggacggatggctacatgg

SEQ ID NO: 676156 - DNA, 87 bp, Homo sapiens
cggctttggaaacgacgtcatgtgttagcacttttccagccattaactccaggctctcgagaatttgaagatgttgtaaatattctc

SEQ ID NO: 676157 - DNA, 82 bp, Homo sapiens
aacggaagcgtctttgctcaaggatcccagttttctctggatgacgtgatgccatggacaatattaccaggcagaaccaatt

SEQ ID NO: 676158 - DNA, 100 bp, Homo sapiens
gcggaggaaggaggagcagcagactcggacgtggacgcctttttccggacagctcagtgagtactgggtatgtgtcacattgccaaatcccggatcacaa

SEQ ID NO: 676159 - DNA, 97 bp, Homo sapiens
ctcctaagggggtcattctctatggtccacctggcacaggagtcatctgaaatcagagtcttcagatgaaagtgacactaacaaaaagctcaaacaa

SEQ ID NO: 676160 - DNA, 120 bp, Homo sapiens
cgaaatctattgcagagtcaaggatctccagagcagaaaaaagaagaaactgttaatataatggtctatcagaattttgattctgacattagcagtgtgggaatagatggctgctggcag

SEQ ID NO: 676161 - DNA, 83 bp, Homo sapiens
gttttatttgcagctcggagcctgtggcggatggtgggactctccggccctgtgcagtagagttaattgttaaatccagtatg

SEQ ID NO: 676162 - DNA, 75 bp, Homo sapiens
tgatacagcaggcgctcaccatgttccctggagatgcctgaggaaacccagacccaagaccaaccgatggaggag

SEQ ID NO: 676163 - DNA, 100 bp, Homo sapiens
tgcccgttgtgtttgtgaaacagagaaagataggcggccatggtccaaccttgaagtgcttttttaggaccaaaggatatatttccttactcagaaaata

SEQ ID NO: 676164 - DNA, 100 bp, Homo sapiens
ttcggtctctcagcggccggtttctgcgtccgctgccgcaggttccaccgcgctccaggcaatttcttgcaaccaccaccgaggccccgaaaagcactgg

SEQ ID NO: 676165 - DNA, 95 bp, Homo sapiens
tcaggtgctcctccaccctggtgacgcccagctgcagctccagcaggtggcgctgcagcagcagcagcaacagcagcagttccagcagcagcagc

SEQ ID NO: 676166 - DNA, 75 bp, Homo sapiens
gacaccgcctgtgtggggcccaccctccgatggatctgtctgtagaaactctgttcagcttcatgcaggagcgcc

SEQ ID NO: 676167 - DNA, 83 bp, Homo sapiens
caaccccggttgccgctttctcctctcctaaccgttaagtgcgctaagtgtctccagaacgctatagctatggcacctccagc

SEQ ID NO: 676168 - DNA, 75 bp, Homo sapiens
cctatttgttcatcatttctcgtgttcaaggagatacaactcgtcaacgaatcaaattcagtgatgacagagtat

SEQ ID NO: 676169 - DNA, 82 bp, Homo sapiens
cttgaagcccattcaactcacagatccaggaaaaatcaaacgtattagaggaatggcagcagattttgaagcagtgggaaga

SEQ ID NO: 676170 - DNA, 74 bp, Homo sapiens
ctacatggccccctggtttagggaggagtgaagatagtccaagtcctaagagacagcgcctctctcattcagtc

SEQ ID NO: 676171 - DNA, 100 bp, Homo sapiens
cgtcggctgcggttctctctcgaccccttctgcccggcgcttcggcccgggccgctcaggtgcaggtgtgttccagagaacaagccttcagacatttgct

SEQ ID NO: 676172 - DNA, 74 bp, Homo sapiens
tgaagcctttaaatgcagcatctgcgatgtgaggaaaggcacctccaccaggcacgtggactccctttaatcca

SEQ ID NO: 676173 - DNA, 82 bp, Homo sapiens
ggtgcagatggcactttccaaagtggatgcctccggggaggttcgagaacttgtcttggacaattgcaaatcaaatgatgga

SEQ ID NO: 676174 - DNA, 74 bp, Homo sapiens
acatcaaacggcatacaaatgaacctcagtatctgtacatttgatggaatggtctcctgatggtgaatattttg

SEQ ID NO: 676175 - DNA, 95 bp, Homo sapiens
ttattaccctttgtgtcatcctccacagctccagggaaggcactcaaaagtggggggcaggaaagatataagagttcggaccgcccagcacacaa

SEQ ID NO: 676176 - DNA, 89 bp, Homo sapiens
gcggtggggactgcacgtagcccggcgctcggcatggctctcctggtgctcgggttcaggataagtttgaggtgctgaattacacaagc

SEQ ID NO: 676177 - DNA, 75 bp, Homo sapiens
atgagttagtcgcagacatggacaccaaacatttcctgccgctcggattttttatcaagcagaaatgcatcgaac

SEQ ID NO: 676178 - DNA, 98 bp, Homo sapiens
cccaatcccccactctttccgccctaatggaggtctccagtttcggctgaccggttccctgatgtgttacctgcttctgctactgatccaaactgcag

SEQ ID NO: 676179 - DNA, 98 bp, Homo sapiens
tggactccgtttcctgccttgctctttggaccacattgtcaattcacaccgatcttaccaatatatttgagtccttcctgcctcagttattggcctat

SEQ ID NO: 676180 - DNA, 87 bp, Homo sapiens
agatggtggccaggaagaacacgatgatcatcgagcccaccagcccttgccttctcccagaccctctgcaggaaccgtactaccagc

SEQ ID NO: 676181 - DNA, 75 bp, Homo sapiens
ggaaatcctaatgacagtctccaaattcgcctccatctgtaccatgggtcctgtattaataggaagttcacatgg

SEQ ID NO: 676182 - DNA, 127 bp, Homo sapiens
atgttcctacctcttgtatttactttgtttacttcagctggattgtggatagtattcacagagttcaacagcgtgttacaattaagaaagctttgactctaaaatatggagaagagcttgctcgggc

SEQ ID NO: 676183 - DNA, 82 bp, Homo sapiens
tacagactgcatctaaccccatcgagtgctaggcttcgtgacggagttatcagagacattgagaggcaaattcggaaaaaag

SEQ ID NO: 676184 - DNA, 83 bp, Homo sapiens
gtggggattgacagccacgggaagcattttgaaagcgaagcagaagccgtagaatcagcggcgagcctgttgaaagaacccac

SEQ ID NO: 676185 - DNA, 98 bp, Homo sapiens
caaagaggggttctccctcaggagaacgagtcatgttcatgggaaactcaatctgggtgtgaagcgggagcatccaatcaacttcgagagcgtaggcc

SEQ ID NO: 676186 - DNA, 107 bp, Homo sapiens
cgctgagggaccgcggggttagccactgctggctgcttccagtgttcgccgagaggtgagaagccctaccactgcaactgggacggctgcggctggaagtttgcgcg

SEQ ID NO: 676187 - DNA, 101 bp, Homo sapiens
gggccgccgagctggacccggaccggttttggggctcttccgtgggcggcggcttcgcgggcttggagttcgcgcggccgcaggagtcggagccgcgggcc

SEQ ID NO: 676188 - DNA, 62 bp, Homo sapiens
ttcaagtccaggggaaactggtgaggcaaaagaatggaccccagcaggaaaagcaaagcaag

SEQ ID NO: 676189 - DNA, 100 bp, Homo sapiens
gctcgctccgctcgtcccgctcgtcatggcctacccgggatacggaggagggaattaaggaagttcactggagtaaaatggaggcctcagtaatattacc

SEQ ID NO: 676190 - DNA, 83 bp, Homo sapiens
aggagcctttgagctcatctataagcaggctgctttgctggctctgcaagaaaatggactagacgcaactacagtgaaacaag

SEQ ID NO: 676191 - DNA, 96 bp, Homo sapiens
ctcctacttccagaaaaagtgctcctgggactccaggataccaggcccctggccccaacatggcccgtcgctctcagagctcctcgcagggggaca

SEQ ID NO: 676192 - DNA, 90 bp, Homo sapiens
ggaaatcatgactgagaaagatatggaattatttcgtgatatccaagaacaagcactgcaggagtcaaattgactttatcagctttaatc

SEQ ID NO: 676193 - DNA, 100 bp, Homo sapiens
actgaagaagtagagtatttcaaccataaagacatcttaattgggcacgaaagaggtgcagagcattgtagaccaaggagccatggataggagaagtatg

SEQ ID NO: 676194 - DNA, 101 bp, Homo sapiens
cctgtagacgttcgccaggtaaaggacattcatgctcatgacatcacatgctgagaggacagggaggccagtgtggggctggcctcgaagagaggcggcat

SEQ ID NO: 676195 - DNA, 75 bp, Homo sapiens
gagaaattccaagttcagattctccagatcaggatcctcatgaccagccaaagagaagaagaattaggaagcata

SEQ ID NO: 676196 - DNA, 101 bp, Homo sapiens
ccataaaccagtgggtcaaaggacagacagaaggtaaaattgcggagttgctctctccgggctcagtggatccattgacaaggctggttctggtgaatgct

SEQ ID NO: 676197 - DNA, 83 bp, Homo sapiens
gtctctagcatcacctctcagcacgattttcccgagagttcacaggagctgtggctaaaggaagtggaggggccgtgggatgc

SEQ ID NO: 676198 - DNA, 83 bp, Homo sapiens
ggtgtggccactgcatcggctacgcgcccacttggcgggccctggctggggatgtgcgagggtgcgtcagggaaatcatgcag

SEQ ID NO: 676199 - DNA, 50 bp, Homo sapiens
atgatctccttaacggacacgcagaggttatgatgatggctacgggggtg

SEQ ID NO: 676200 - DNA, 74 bp, Homo sapiens
tctccgacccggtctcacttcgctcctgggcagctgcgcggagaactggggcattgcttcagagtttggagttc

SEQ ID NO: 676201 - DNA, 100 bp, Homo sapiens
ctcagctccacattgagagcaaaatctacaagatgatgcagggaggagtttcttcagatgattctgaatcacacatgagtgaagaaaaaaaggaagaaga

SEQ ID NO: 676202 - DNA, 97 bp, Homo sapiens
tcatttctaagcaggttcatgccagcccagaacagagaatcagaggcaaaatcagtaaaggcttggaggatttaaaacgtgttagtccagtaggaga

SEQ ID NO: 676203 - DNA, 75 bp, Homo sapiens
cgtgttcggtgaccgcagcactggggaaacgatccgctcccaaaacgtcaggatctggtgattttgaagagaaac

SEQ ID NO: 676204 - DNA, 98 bp, Homo sapiens
tcggctcatgttctgggacttaggagggcaggaagagctgcagtctttgtgggacaagctgatggatgtgctgactagtgagagtgcttgggccctcc

SEQ ID NO: 676205 - DNA, 75 bp, Homo sapiens
gcaaacactacaagtccacggtgggagaaagacgagaatccaggacttgaatcgtatcttcccactttctgagga

SEQ ID NO: 676206 - DNA, 75 bp, Homo sapiens
acagcaaaggctttgatgaatacatgaaggagctagattcagaatctgataattcagataacaacacaatctttg

SEQ ID NO: 676207 - DNA, 83 bp, Homo sapiens
acctccctgccccccggagatacctccaaagccggtacgcctgttcccagagttcggttgcagaagatcattcaccgcaatga

SEQ ID NO: 676208 - DNA, 74 bp, Homo sapiens
ctccaggccggggaggtggtggatgtcatcgagaagaacgagagcggtatctgcccaaactggaacttatgctg

SEQ ID NO: 676209 - DNA, 75 bp, Homo sapiens
accgagaccgcggccgggaccgaggggaggaggtacaggagaactgtgtgcggtggcgaaagaggttcaccttcg

SEQ ID NO: 676210 - DNA, 80 bp, Homo sapiens
gttgctggggaatgcagaagaaccttcaataatcagttggccttatttcctcagtggaaatctactcactatgatgtggt

SEQ ID NO: 676211 - DNA, 82 bp, Homo sapiens
caattcgagaatcaaagggccgggagcgatgatgtctttggtggacttgggaaagaggttgctagaagcagcaagaaaaggc

SEQ ID NO: 676212 - DNA, 96 bp, Homo sapiens
cgccagtctcggaggtccacacaggaccctgctgccgaagctgattccctccggtgcaggccgggagtggctggagcggcgccgcgcgaccatccg

SEQ ID NO: 676213 - DNA, 75 bp, Homo sapiens
cagtgttactctccataagacacctgatggagctgtttacaagtccttccactttctctctgaggcagaaagagc

SEQ ID NO: 676214 - DNA, 90 bp, Homo sapiens
ctgttgtagaaactctagtcaaccataggaaagcgccaagaagagggagggcgagcttacggtggcccagggccgtgtgaaggacctgga

SEQ ID NO: 676215 - DNA, 100 bp, Homo sapiens
cagaattaaccagagaaggtgaaacgatcatcgagctaaaatatcgtgttgcggagcgtgctttggacaccatgaattttgatgttataaagggcaagcc

SEQ ID NO: 676216 - DNA, 90 bp, Homo sapiens
atgatatgcttgcttcattggagtgtgaacatggctacgcctcttcattcccgtccatgccgagcccccgactgcagcattcaaagcccc

SEQ ID NO: 676217 - DNA, 73 bp, Homo sapiens
gcccgccaccgtggctgacttttggcaggtgtcttataagactttgacacttcctgttttgtctgaaaaaaat

SEQ ID NO: 676218 - DNA, 87 bp, Homo sapiens
ctgcgctgctacagatgttaccacttctgtggctgctaccccactcctgggccgtccctgaagtaatctatgccagcaattatgaca

SEQ ID NO: 676219 - DNA, 82 bp, Homo sapiens
cgacgacgggggaatgtggcgctggatccggcagcagctggagaatgaagtttctagattagaagacataatgcagcattta

SEQ ID NO: 676220 - DNA, 83 bp, Homo sapiens
gaagagtgttttccttgagcaaatgaaaaagtttgtagaatggctcaaaaatgctgaagaagttgctctatatgcaatcagtg

SEQ ID NO: 676221 - DNA, 73 bp, Homo sapiens
atttttatcaagagcaccctgatttggctaggcgcacagcagaacaggaaatatagtggtcattatgattagc

SEQ ID NO: 676222 - DNA, 90 bp, Homo sapiens
tattcggccatcttggctcctccctcgtaagtacaaggtggactgtgcatgcctcaaagaaaacccagagtgccctgttctaaaacgtag

SEQ ID NO: 676223 - DNA, 100 bp, Homo sapiens
tagactagaaatcaaacaacttggaaatcgatcacaaccaggcattaagttcacatctggatgtggatagtgaagctaagaaactattgggtttaggaca

SEQ ID NO: 676224 - DNA, 83 bp, Homo sapiens
cagcgggagctggacggcgagcgcgagcggcgcgagaaagtcttgccccagaagctgcgggcacatccacgcctgaaatgcgg

SEQ ID NO: 676225 - DNA, 83 bp, Homo sapiens
cggatattcagttgcacatccccacatcaatgcactgccaatggtaaactgtcttgagccccaccctcacctgcctgtgctgg

SEQ ID NO: 676226 - DNA, 87 bp, Homo sapiens
ccagctccttggctcaagtgattctcctgcctgagcctccctagtagctaggactacaggcctccccatggccacccatggaccagt

SEQ ID NO: 676227 - DNA, 75 bp, Homo sapiens
ggcaccgctggaacactaatgagatcatggaagggaagtggttgctgtgtatgttactggtgcttggaactgcta

SEQ ID NO: 676228 - DNA, 97 bp, Homo sapiens
gcgcctgagcatccccgtcatggtggtcaccctgggctcctcacacatcctcaccccgacccgcttcctggatgacctgaaggcactggacaagaag

SEQ ID NO: 676229 - DNA, 102 bp, Homo sapiens
taattttatgctgtggattctgaacttaataatttggcctgtgagtcgatctttttagatcatgacaagatgtttaagatgagtgaaaagatattactcctg

SEQ ID NO: 676230 - DNA, 82 bp, Homo sapiens
gctccccgccccacccggcctgataaagcgcgccgactgggctacaaggccaagcaaggtcacgcatgaagggagcaccgtg

SEQ ID NO: 676231 - DNA, 90 bp, Homo sapiens
tttggatcggcatctagtctttccgcttcttgaatttctctctgtaaaggagttggctcacgtattacccacagaagagaatttcctgct

SEQ ID NO: 676232 - DNA, 51 bp, Homo sapiens
gcggaggcagaggtggaggcgctttgaaagttgtatcacggactgattcac

SEQ ID NO: 676233 - DNA, 100 bp, Homo sapiens
agacgaagtgaccccaacttcaagaacaggcttcgagaacgtccaagcatctcattttgaaggcctaatcacaaccatagttgggtatatacttttagca

SEQ ID NO: 676234 - DNA, 103 bp, Homo sapiens
aggaagggcatgagccgagcttgaggaatccgtgctccaaactctacactcaagctattgtggacgatgaaaggctctctgcagaggagatggatgagaggag

SEQ ID NO: 676235 - DNA, 96 bp, Homo sapiens
gatggtggagctggagggggagacagatcctctgctcattgccatgaaggaactcaatagcttccctctgtgtgaggaaaggatagaaatgttcag

SEQ ID NO: 676236 - DNA, 100 bp, Homo sapiens
cccataccagagaattatgatcaacttcaaccctcacttcgatttggaggacagagactgcaagtatgccttacactttcttgtacaaagtggaatttcc

SEQ ID NO: 676237 - DNA, 82 bp, Homo sapiens
aagctatcaaatatcagagcaaggcaagaaggcaacacggaggtagtcacgtttcccggaaatccgaacacttgagtgtcag

SEQ ID NO: 676238 - DNA, 75 bp, Homo sapiens
tgtgtgccccttctccacccagagagtggagactgctgcacggactctggaaccatgaacatatttgatcgaaag

SEQ ID NO: 676239 - DNA, 90 bp, Homo sapiens
cttcgtattcaaagtgggaaaccgcttccagacggcgcgtttctatcgggacgtcctggggatgaagcatgtattccactgatgagaacc

SEQ ID NO: 676240 - DNA, 75 bp, Homo sapiens
cttgcaagaagtttaccacaaggtgaacggcagcgagcagacagtggttgccttcttcatcatgccagcgcggac

SEQ ID NO: 676241 - DNA, 82 bp, Homo sapiens
ctttctccttcaagtacttggcagatcactctcttagcagctctagaggacaaaatcccagtccttggcacaaactcaggaa

SEQ ID NO: 676242 - DNA, 82 bp, Homo sapiens
ggactccctggaaacctagaaatgaatggcaacatcacagagctcctcctgaaggaaggtttcgcacgctgtgtggactggt

SEQ ID NO: 676243 - DNA, 83 bp, Homo sapiens
atgacatatttttggacctgaaacagaaattctggaacacctatatggagcaggccgggctctcgccatgggtcactgtcgcc

SEQ ID NO: 676244 - DNA, 82 bp, Homo sapiens
aacggctgaaggccctacgggagaaaaccgggcgcaaggtggttattaacttggtgatgcttttggctgaaatgaaaataca

SEQ ID NO: 676245 - DNA, 96 bp, Homo sapiens
ctgtaatcctgaagttctgcctattgtctcagaattattagagatggcaccaaaagcgaaggaagctcctgctcatcctaaagccgaagccaaagc

SEQ ID NO: 676246 - DNA, 100 bp, Homo sapiens
aagcgagcctcttctgataactcaggatttacttgaaacaaaaggagaccctaatcttcagtgagaaagatcagtctaaagaaaaggagaagaaagtgaa

SEQ ID NO: 676247 - DNA, 100 bp, Homo sapiens
catcaatcaaggaaaacccacaggctgagctcacacggttgaagcaggtgattggtctgttggacgtttttacacctgcaaggtctctggaggaattcaa

SEQ ID NO: 676248 - DNA, 100 bp, Homo sapiens
tggcattcatctgcctgtatcttgaagaatggactgatgacgacctggtagaatctctctaaccatttgaagttgatttctcaatgctaactaatcaaga

SEQ ID NO: 676249 - DNA, 100 bp, Homo sapiens
gttggagaactacagaaacctcgtctccctgggattttgatgtagattcccaaatccgtgctgagatgcacagaaaaacagctttcaaaattcaacaagt

SEQ ID NO: 676250 - DNA, 100 bp, Homo sapiens
tggacatcggggcagctgacctcgcccacgcccagcagcagcagcaacaggtcctctggtgatgttcttgagacgttcaatttcttagaaaatgccgatg

SEQ ID NO: 676251 - DNA, 74 bp, Homo sapiens
gctgtgtttgagaagctgcagacttacatagctcttcttgccttgccaagtgatgatgaacagtctacacagat

SEQ ID NO: 676252 - DNA, 80 bp, Homo sapiens
ttcgggaattcacagtctgcagcattggcgaggaggatggccgagaccagtccaggttggagacccaggtgtgggaggcg

SEQ ID NO: 676253 - DNA, 82 bp, Homo sapiens
ttcaggcccgcactcgacagccaccgccgcccccaacgtccatgcctgattgagccccatatgggggttggcaggcagcaga

SEQ ID NO: 676254 - DNA, 100 bp, Homo sapiens
aagatccaccacgaactgaaccagttctgcagtgtgcacacgcttcaagaggtctacattgagctgtttggcgttgacccggacgacacctataatgaga

SEQ ID NO: 676255 - DNA, 100 bp, Homo sapiens
cgccgccggctctcgggagcgcaacactgcaggccatcgaagacggcaatttggaggaaatggaagaggaagtacggcttaagaagcgaaaaagacgaag

SEQ ID NO: 676256 - DNA, 75 bp, Homo sapiens
ccagagccgcctgccatgccccagccagtccccacagcataacagggtgtgggccgaagatatgctcatgtggtg

SEQ ID NO: 676257 - DNA, 74 bp, Homo sapiens
gcgggtctgctctgtgtgccatggacgggacttgagcagccccagccagtacgacacaggtgttgcactgacgg

SEQ ID NO: 676258 - DNA, 100 bp, Homo sapiens
atgccgcagcccgagtcccagaaggcggcgatcctgggctgcgggcaaggcggtgtggccgacgacgatgccctcgctgaggagcgcatgcggagaggcc

SEQ ID NO: 676259 - DNA, 101 bp, Homo sapiens
tggagagatcctctacccttttgaggatatttcaacaagcaggtgggtggagccgctgactgccgagggcagagcctcgcttcggtgcccagcagcctccc

SEQ ID NO: 676260 - DNA, 74 bp, Homo sapiens
tttagttgcgctttcctgcctgcttctagcaagtgaccaagaatatggcccaggtgaccaaagccctggacaag

SEQ ID NO: 676261 - DNA, 82 bp, Homo sapiens
cccaggccggatggacgcttgttcctggttctgtgccccgtgagcgctcaacgccctggtactccaaagattcaggtttact

SEQ ID NO: 676262 - DNA, 90 bp, Homo sapiens
ggagaggcgagctcgcgatgagtggtctcggcaggctcttcgggaaggacatgtcatgctgcccaaggacatagccaagctggtccctaa

SEQ ID NO: 676263 - DNA, 100 bp, Homo sapiens
ccggaaggggtcccgaagccccctgcaggaactctacaacccaatccagggccctcctccccagttcagaatgcagcccacagccaccatggccacagcc

SEQ ID NO: 676264 - DNA, 100 bp, Homo sapiens
ttttaaccatgagggaaatcgtgcacatccaggctggtcagtgtggcaaccagatcggtgccaagaaagtgagtgagaaggttggaggagctgaaggaac

SEQ ID NO: 676265 - DNA, 74 bp, Homo sapiens
gctgccccaatccccggcagctctctcagaccagagtgaactccgagcaggaacacttcctcattgtccctttt

SEQ ID NO: 676266 - DNA, 80 bp, Homo sapiens
gctccggggaggtcacctgacgaggagatgcccagcctacagagtctgagaaggaaatttataatcaggtgaatgtagta

SEQ ID NO: 676267 - DNA, 90 bp, Homo sapiens
caaatgcacttgtggaaagaaaacaggagacaaagcttttgttgatttcctgagtgatgaaattaaggaggaaagaaaaattcagaagca

SEQ ID NO: 676268 - DNA, 100 bp, Homo sapiens
actcatcgaacagctggagcaaggcgacgaaccttggagagaggagaacgaacatcttctggacctttgtccaggaaatgggtcctgatgaatatgaaga

SEQ ID NO: 676269 - DNA, 83 bp, Homo sapiens
ttggggacaactaaagctgcgggatacaaagtcagcccaggcagacctccaggtctgagtgtacggtttgcagatatgcctgg

SEQ ID NO: 676270 - DNA, 50 bp, Homo sapiens
ctggtggtgaatcctccatagtctgggtttggaaatcccttgtctccagg

SEQ ID NO: 676271 - DNA, 74 bp, Homo sapiens
aactaagccgattttccggaaaaagctctgcaagatttgaagggtcccttaatatggaccttaatgaaatcagc

SEQ ID NO: 676272 - DNA, 71 bp, Homo sapiens
cagccatgctcccctacgcttgcgtcctggtgcttttgggagcttcccatcgacggtcagtgcgcacgttg

SEQ ID NO: 676273 - DNA, 48 bp, Homo sapiens
ttcttcaatagtagataatgaggtcattgacgagactctggatgttaa

SEQ ID NO: 676274 - DNA, 51 bp, Homo sapiens
aaggaattagcagaagacattatgtcagtagagacggggtttcgccatgtt

SEQ ID NO: 676275 - DNA, 74 bp, Homo sapiens
cggagactagaggctggataccaaatagcagtggaaaccggtatgccattttgaagactgagacgttggagttt

SEQ ID NO: 676276 - DNA, 98 bp, Homo sapiens
actggagtctgatggaaagagataggcgcatctctggagttgatcgttactatgtgtcaaaggtacaactccaaaaggagacattggagaagaaccaa

SEQ ID NO: 676277 - DNA, 82 bp, Homo sapiens
ttctcatcagggtcagtcacagccatgtgggctacacactctcctacaagatggccaggccatgttatgggatctcaacgaa

SEQ ID NO: 676278 - DNA, 100 bp, Homo sapiens
tgatatcagacaccgagcttcagcaagctctctccaacgcaataagagctaactgccatcaagagccatcagtatgtcttcaagctgcatgcccagaaag

SEQ ID NO: 676279 - DNA, 87 bp, Homo sapiens
aggcggcggacggctgcgtcgcccgaggcgaggaggagcgctggcggttcattttccagacactgaaagagcagaatggctaaataa

SEQ ID NO: 676280 - DNA, 100 bp, Homo sapiens
attgctgctcacctagataaccaggttccagttgagagtccgagagctatttcccgcaccaatgagaatgacccgattggctgcaatgccgtcagctggg

SEQ ID NO: 676281 - DNA, 100 bp, Homo sapiens
gaacacatagcaccaagagaggccatgctaaatctcgccctgtcagaggtatcctcaatgaacgggacaactgccagtacgtctacaatgtggaccagag

SEQ ID NO: 676282 - DNA, 100 bp, Homo sapiens
cggcgccccctcccccctccggcgcggaccccgcgtgcgccttgctcgcccgcagccccgagaccgcagttacagaatgtctgaaggggacagtgtggga

SEQ ID NO: 676283 - DNA, 83 bp, Homo sapiens
gaaggaacgaggcaaggagctaaagcagcgtgcgttcagccctggggacatgctctggagtcagaagacagcgaaaagagaag

SEQ ID NO: 676284 - DNA, 95 bp, Homo sapiens
aagtccatctcatcgaaaacacattggaagcataaatccaaactgcaatgtacttgaagttattaaaggaaactcattatctgcaatattagagg

SEQ ID NO: 676285 - DNA, 100 bp, Homo sapiens
tgcaaatacatttgggggcaaacgcgttccttcacctcgggcagaataactttgcagaagcccacaggttcttcacagagatcttaaggatggatccaag

SEQ ID NO: 676286 - DNA, 50 bp, Homo sapiens
ggacggtttctcattgatttcaaaaataatgttgagtttccatgaagaac

SEQ ID NO: 676287 - DNA, 90 bp, Homo sapiens
gcaggcccaaccgccgccagcaccatggccagcaccatttccgattccaaattacagaaatgcagtcattgtagctaagtctcctgatgc

SEQ ID NO: 676288 - DNA, 74 bp, Homo sapiens
tcatgggaatttccaaggggattcaaacttcaacagaatgtggcaaccaggcttcttctcatatcggtaattcc

SEQ ID NO: 676289 - DNA, 100 bp, Homo sapiens
agtgagcagtccagaaagcggcttatcgaacagagccgggagttcaagaagaacactccagagccggccaagctcgctgaggccttcaagtacttcgtgc

SEQ ID NO: 676290 - DNA, 99 bp, Homo sapiens
agcatgtccctcaaggtgcactcactgcagcactcaggggagaagccgttcagatgtgagtctcgcccaagaacttcaaggtgaaaatgatcatgaaga

SEQ ID NO: 676291 - DNA, 82 bp, Homo sapiens
cccaatttgtccgtaaccttgtggagaagaccccggcgctggtgaacgcccatcttcccagaaggaaagatgtaacctgact

SEQ ID NO: 676292 - DNA, 88 bp, Homo sapiens
ccatggaggtctacatcccgtcctttcgctatgaagagagcgacctggagcggggatacacggtgattactggtggtcactatgatgt

SEQ ID NO: 676293 - DNA, 83 bp, Homo sapiens
tgatcgagaggatctggtgtaccaggcgaagctggccgagcaggctgagcgatacgacgcaaaatgatgcttcaacacccagg

SEQ ID NO: 676294 - DNA, 90 bp, Homo sapiens
gaagacagacgtcccccaaaacccctcgcctggctcggacccacggagccggcagcccagcactccgcctgaactctttgcttccggaat

SEQ ID NO: 676295 - DNA, 75 bp, Homo sapiens
gctcaaccatgaccaagtgcagaagaatggactgctgaattatgaagtatttcagacccagtagtagaacatcac

SEQ ID NO: 676296 - DNA, 83 bp, Homo sapiens
atctgctgtcaaggatcttgtgtgctccatagtttatcaaaagaaaaggcgacggcggattgacagaagtatgattggagagc

SEQ ID NO: 676297 - DNA, 97 bp, Homo sapiens
tgacatgatctcactggaccgcagcgtcaatgacttacgccaagaagagcataatcaccagcaacacccgggacaataatacgggggccacctaccc

SEQ ID NO: 676298 - DNA, 100 bp, Homo sapiens
ttgaatcagaaattgagaagctggctcccacatcaggacgagaaggagccctcgagttaccgtgggagctgtgggagctgccctgtgactcttaggaaga

SEQ ID NO: 676299 - DNA, 90 bp, Homo sapiens
tactcagcccctgcgaacctgtatgtgcgagattatgatgatggcttttcaatgaagcatacagccaccgcccgtttccagagaaaccac

SEQ ID NO: 676300 - DNA, 75 bp, Homo sapiens
cccaaggccaaggggcggaagagcctccagcgcctggagaacaatgtcgtgatctcaacagcttgtcacccaaca

SEQ ID NO: 676301 - DNA, 98 bp, Homo sapiens
tggacgacattcgaaggatggaagaagagacgaagagacagctggatgaagtggccagcatcgaaatgttcagccttttagtgatgaagatgcatcaa

SEQ ID NO: 676302 - DNA, 74 bp, Homo sapiens
ctttacaagcttgtaaaatctcagctctctgacacagctggctattctagtcccagaagaaagaggagagactt

SEQ ID NO: 676303 - DNA, 98 bp, Homo sapiens
acgagaccgcggcgtctccagcctcggtaccatggccgggatcatcaagaaacaaatcttgaagcacctctccagccgtgctatcaagactaatcagg

SEQ ID NO: 676304 - DNA, 100 bp, Homo sapiens
cgacaaggagttcatgtgggccctgaaaaacggagacttggatgaggtgaaagactatgtggccaagatgctgtgagagaagtaaggaaatattcctcag

SEQ ID NO: 676305 - DNA, 75 bp, Homo sapiens
gacaaaccctttctatgtactgcgcctggatgtggccagaaatatcgacagtatatggcaggacttctggctcct

SEQ ID NO: 676306 - DNA, 82 bp, Homo sapiens
caatatttctgatggagtgaaggatgaattctgtaggtggtgcatccaaaacaggggcatatgatattttcctgaatgcaaa

SEQ ID NO: 676307 - DNA, 100 bp, Homo sapiens
ctgctccccaggacctgagcaggaacctggagttttcaggaaaatatatgcagatgatgaacattcttaagccaattgcctttgatgttattcatttcat

SEQ ID NO: 676308 - DNA, 90 bp, Homo sapiens
ggcgagcaggcgaggaatcgccgtggcgtcttggtgttctccacgctggttcgcaggtatgggctacgtgagttcgtggtgattgcccct

SEQ ID NO: 676309 - DNA, 100 bp, Homo sapiens
ctgctgcataatggagaacctctctacattccagtaacccagtgaagcctgcctacagttttcacaaatctgtatcctttcagtaaagaatggcttatat

SEQ ID NO: 676310 - DNA, 100 bp, Homo sapiens
cttatcaagtggtttaagtacttctgttgctgtgttctgtcatgagttgcctcatgaattagtgaaactgatgaaagttgtaagaagcaccttggaagag

SEQ ID NO: 676311 - DNA, 100 bp, Homo sapiens
ggatcaccatggaaacagcaacgttctctatgggcagcaccgtttctatggaacccaaaaaggtccttcttgtggatggaaacggggtactccaccaccg

SEQ ID NO: 676312 - DNA, 75 bp, Homo sapiens
ttttttttcagattactgagagtcttcagttactagctgtcacgaccaccacccagaggcccagcagcatgacta

SEQ ID NO: 676313 - DNA, 114 bp, Homo sapiens
tgtggatgaagctctagaacatttgatgagagttttagagaagaagactgaagatgttctcaaatagtgatgaagctgtaatcaataaaaaacttcccaaagaactcctgttac

SEQ ID NO: 676314 - DNA, 94 bp, Homo sapiens
gctttcagttctttggaattccattcttttccttattcttctgatgtggatccagctgtcaattccatgccagtggataacaggaaccacaatg

SEQ ID NO: 676315 - DNA, 75 bp, Homo sapiens
tcgctgaatcatcacagccctaggagataagaccatcatcatgtggaaactgaccagggatgagaccaactatgg

SEQ ID NO: 676316 - DNA, 100 bp, Homo sapiens
ccgtgatgtgacgctggagaacctggcacttatatcctccctgggcatagaatgtcaagctaaccaggcgtccgctacttcagaagagtgtactgtcgca

SEQ ID NO: 676317 - DNA, 99 bp, Homo sapiens
cgccgaggcgcttctgcatctgtgggccgaggcaactcgagatgtggtgctgagccgggtgccggagcaggaggaggaccggacagtgagcttgcagaa

SEQ ID NO: 676318 - DNA, 82 bp, Homo sapiens
tacaagttccctcctgctgctttgccccaggaattcagcgccttcttccaagaaccggccacaccgctgaaggccaaagagg

SEQ ID NO: 676319 - DNA, 82 bp, Homo sapiens
cccgcaactccgccgcccaccatggcttccgaggagctgtacgagacgcaggaggagggagacgcactgatgacatcgggcc

SEQ ID NO: 676320 - DNA, 99 bp, Homo sapiens
tggcggcgcggcccgcgcgcagccggccgctggcacacccataccgagcagcggtcctgagggccatggagagggtcctgagcagtcgcgccagtgagc

SEQ ID NO: 676321 - DNA, 100 bp, Homo sapiens
tttgtgaaggagactcgaggaaatttaagaccatttatatgttcaactgatgaaaacactggctgttataatggattagtttatgttctgaaaagtaata

SEQ ID NO: 676322 - DNA, 50 bp, Homo sapiens
ccagcaagaacgaggaggacgcgggattaactcaacagtgtcactccctg

SEQ ID NO: 676323 - DNA, 100 bp, Homo sapiens
gatcttcaggttgggaccaggtgaagagtcctggatggcagatggggggaccccggtacggacctgtgcagttgaaatggatgcagtcagaactgaatgt

SEQ ID NO: 676324 - DNA, 82 bp, Homo sapiens
gaaatcaggtgtagttctgctgaatcctattcctaagtgagaaggcaaccaaagtgcaggacatcaaaaacaacctgaaaga

SEQ ID NO: 676325 - DNA, 134 bp, Homo sapiens
tttaccttctttgcagactttggttggtggaggctgtggcaatggaacaggcttgagaaacaggaaagaccacagcaagattctttcattcgtctcctcctagcctgggggaccaggctcgaactgaccctgga

SEQ ID NO: 676326 - DNA, 100 bp, Homo sapiens
aaacctaccagggtattctgaagaagacaagagtcatggaaaaaaccaagtggctggatatcaaaggaaatcatgatgcctgaggaaacccagacccaag

SEQ ID NO: 676327 - DNA, 75 bp, Homo sapiens
ggtggaggcggcctctctggcagcagacatcagccacgcatctgaccttgttgacgttggtgatcaaagtgtccg

SEQ ID NO: 676328 - DNA, 83 bp, Homo sapiens
gacaagtgtttccggaagtgtatagggaaacctgggggctccctggacaactccgagcagcctaagttcgaggcccaggcgcc

SEQ ID NO: 676329 - DNA, 98 bp, Homo sapiens
ccaacctcctccagggctggcagaacagatcaacaggcggtccttcgggtcggagtggacatcggatggtggcctggaagagacaattgatcctgttt

SEQ ID NO: 676330 - DNA, 125 bp, Homo sapiens
ttctaccggaggcgggacatctccagcaccctcatcgccctggccgacaagcacgcaaatgtgaagttcatttccaatccgccctccatggtggcagcggggagcgtggtggccgcagtgcaagg

SEQ ID NO: 676331 - DNA, 100 bp, Homo sapiens
attacctttataatcatgtggctatgtggccggaacaaagaaaattttcgtgctctgagcactggagagaaaggatttggttataagggttcctgctttc

SEQ ID NO: 676332 - DNA, 97 bp, Homo sapiens
tctgctgtgggcgctgctggcgctctggctgtgctgcgcgacccccgcgcatggtgaaatgacaatggatgctctgttggctcgattgaaacttctg

SEQ ID NO: 676333 - DNA, 75 bp, Homo sapiens
tggtgaccctgccgctggcgagcgccaccgcatggcctcccgcgacgatgcccctcaacgttagcttcaccaaca

SEQ ID NO: 676334 - DNA, 71 bp, Homo sapiens
cagtggcgcttgagttggtcgggggcagcggcagtttctccttggaccaagatgactgatggaaaactctc

SEQ ID NO: 676335 - DNA, 109 bp, Homo sapiens
tggatattatggctaataacacaacaagtttagggagtccatggccagaaaacttttggggtattatacctgaagaaccttagccctcgggtgactgaaagagatcttg

SEQ ID NO: 676336 - DNA, 80 bp, Homo sapiens
aggtgcaggtgtctcttctcgccctggcggggaagatgagcgggatcgtgtgcagaagaaaaccttcaccaagtgggtca

SEQ ID NO: 676337 - DNA, 100 bp, Homo sapiens
atgaacataccaccctagtaaagttcctccaactcctctgccaaccaatgatgttgatgtgtatttcgagacctctgcagatgataatgagcatgctcgc

SEQ ID NO: 676338 - DNA, 101 bp, Homo sapiens
ctagaagcctgtcgaaaaatgggggtgcctgaggtattgttgcagcatctggcagtgagactgaggatgaggacagcatggacattcccttggacctttct

SEQ ID NO: 676339 - DNA, 83 bp, Homo sapiens
ggccgtcccagttcgcaatgagaaaggtattcctggagtggagagccactctttttgacctgccctacatcagaagtcaccga

SEQ ID NO: 676340 - DNA, 100 bp, Homo sapiens
cagaccaaaagaagtagcagaaaccctgtctttcaggattcctgggacacagaggagataatctgaatgctggctggggcagaaaattactaagatcctg

SEQ ID NO: 676341 - DNA, 80 bp, Homo sapiens
gcgatgtgtggcgactgtgtggagaaggaatatcccaaccgggatgaaaactttcggaagagaaagttgcctgtggtaag

SEQ ID NO: 676342 - DNA, 50 bp, Homo sapiens
ctggaatcccaacaagccctttgaccaagcggagattctggagctggctg

SEQ ID NO: 676343 - DNA, 100 bp, Homo sapiens
catttcaccccagcacttcaatatgcattgcattaactaagttaatattatgtgggccggacaccaaacacatcatagttctgaagactataacttatcc

SEQ ID NO: 676344 - DNA, 109 bp, Homo sapiens
gtttgccaatgttggagccgtctgcaaagtgtccccggcaagaagatccagacatttaatgtggatgcaccatgccagaccgtggaagatttaacgaatggggttgtga

SEQ ID NO: 676345 - DNA, 80 bp, Homo sapiens
gtatcaagaaaccccgatcacaaagatacgaatctcttaaggggaaatgattctggggaccattctgaccacatgcatta

SEQ ID NO: 676346 - DNA, 74 bp, Homo sapiens
gatactgacctgtaaatcatcctttagaatgtgacagtgatgataacatgggtgccaaaaatacttcaatagga

SEQ ID NO: 676347 - DNA, 75 bp, Homo sapiens
gttgagagacagaggcaccccggacagagacgtgaagcactgaatatcgaccttcagaagatgcccttggggaag

SEQ ID NO: 676348 - DNA, 101 bp, Homo sapiens
cttccctgcccccttcccccacccccgactcgggcttggcgcggcggccagaggaaccccgaggtaagaatgattgatgttggctgatattggagtgctca

SEQ ID NO: 676349 - DNA, 100 bp, Homo sapiens
gcaacagccacgatgtgaagcggggcagagccgggggagcccagcccagccagcctccagggcgccaatgcttcggcattagagaaagagattggtccag

SEQ ID NO: 676350 - DNA, 73 bp, Homo sapiens
tttgagaaaaacctgaaagatgtctcagacatggatttgattgacatactttggaggcaagatatagatcttg

SEQ ID NO: 676351 - DNA, 75 bp, Homo sapiens
gtcggagaagtggcctaaaacttcggcgttgggtgagaagccctaccactgcaactgggacggctgcggctggaa

SEQ ID NO: 676352 - DNA, 100 bp, Homo sapiens
ccgctcattggctgggtcctgcgtgcggccctggattcaggggccttccagaggaaagtatgcctcagactcctcccttttcagcaatgtttgacagcag

SEQ ID NO: 676353 - DNA, 73 bp, Homo sapiens
ggagctggagacggtcgtagctgcggtcgcgccgagaaagtgtgtcccggcatggatatccggaacaacctca

SEQ ID NO: 676354 - DNA, 100 bp, Homo sapiens
cttcgtctgcttcttcctcttcagtcaagggccaattcctgtccccccagcagcatggcatcgtgtgctgaaccctctgagccctctgccccactgcccg

SEQ ID NO: 676355 - DNA, 83 bp, Homo sapiens
ctaacttcagcggtggcaccgggatcggttgccttgagcctgctgtcacgggaagtctttttaggataaacgtaggcctgcgt

SEQ ID NO: 676356 - DNA, 100 bp, Homo sapiens
tcgccgccgccgccgccatgaacaactcgggcgccgacgagatcggggtgagaactctgtctcagtcgacgggaagtgcagtgactccacgctactgagc

SEQ ID NO: 676357 - DNA, 75 bp, Homo sapiens
tgaacattctgccgaagagaacaagacgtgtgaagactcagtcctcaagtaccgtaagggtgatgaagatagcct

SEQ ID NO: 676358 - DNA, 75 bp, Homo sapiens
cttcagcaccgcgcccatggcagagccagaccggcatacggagtggtgtccatgtgcatcgggactggaatggga

SEQ ID NO: 676359 - DNA, 100 bp, Homo sapiens
aggttcccgcccggaagaagcgaccaaagcgcctgaggaccggcaacatggtgcggtcggggaataagggatacccacccaccatcccagggtctacaac

SEQ ID NO: 676360 - DNA, 80 bp, Homo sapiens
cggactcagttccagatctttcctgacgcaaagtaccacatgcagcgctgcattgactctggcctctgggtccccaactc

SEQ ID NO: 676361 - DNA, 75 bp, Homo sapiens
ctttggtccacttacggtgcaatgattccaacacagctgatgtttggaccaggaagagagtacaacttcactcgg

SEQ ID NO: 676362 - DNA, 49 bp, Homo sapiens
cggaacaccctggaagccgagaaatgtaaataacagatgcgggtgaaag

SEQ ID NO: 676363 - DNA, 75 bp, Homo sapiens
gttggagttggaatttgtgcaatgtttagccaacccaaattaccttaattgctttgtggatttgaccctccatga

SEQ ID NO: 676364 - DNA, 92 bp, Homo sapiens
aagggcaaggtcagatggcagagcaaggagcttcggctggggcatctccctgagaagcagcatggagcagcctaacagtaaaggctatagcc

SEQ ID NO: 676365 - DNA, 100 bp, Homo sapiens
cgatccccgggcccagatatggacgcagcagagccggctgtcggcagtactcagtggaagggtgatattatgacactgacactgctattttgaaacctgg

SEQ ID NO: 676366 - DNA, 121 bp, Homo sapiens
ctgctatcagactgctctgtcgtctctacctccctagaggacaagcagcagagtcattcttatagaagagcatcagaggaagataaaaaagaatcctcaatgtcaggcccctgagcccaag

SEQ ID NO: 676367 - DNA, 100 bp, Homo sapiens
aaaagaaactggaatctcccaacagagaaattattattttacacaatccaaagggttacacatcattttggaatgactgtatatcatctggattacgtgg

SEQ ID NO: 676368 - DNA, 82 bp, Homo sapiens
cagtgacgggtctggagtgcgtgggggaccggctgttggcgggttaaacactttaagatgagaaaaattgatctctgtctga

SEQ ID NO: 676369 - DNA, 75 bp, Homo sapiens
aaataattctggagtcatgcctgaaatgccagaggacatggagcaggataacaaagccattgacctttgccgatt

SEQ ID NO: 676370 - DNA, 119 bp, Homo sapiens
tactttcgagtccttctcgggccgggaagcgcggagatgacggcgcccgccctcccgccgccgccctaagatccattacaagattttggcttttctgttgaaaagtgttccaagcaatt

SEQ ID NO: 676371 - DNA, 82 bp, Homo sapiens
gacgagcgcggaggaccgggaggctcccgggcttgcgtggccccctcggaaaaccacactgagagttgcattaaaaaccagc

SEQ ID NO: 676372 - DNA, 80 bp, Homo sapiens
cgtcgttgcctccacttggcccgtccatagagccaggtgctggagaatctggtaaaagcaccattgtgaagcagatgagg

SEQ ID NO: 676373 - DNA, 74 bp, Homo sapiens
ttgcagcccatggcaacagcctccggggcattgtcaagcatctggagggtttcctatcctgggagcaggagagt

SEQ ID NO: 676374 - DNA, 75 bp, Homo sapiens
gaaggtggcggcgctgctgctcgggctgctcttggaggatgccaagtttgtggaggaacggagaaagcagctcca

SEQ ID NO: 676375 - DNA, 89 bp, Homo sapiens
aggacctgtgctgcaatatcgcgttgtgtattctcctgtggatggcacaagaccctcagaatctgttttggcccgaaccgcgacttcaa

SEQ ID NO: 676376 - DNA, 128 bp, Homo sapiens
agatttcagatactctgactccacctttacttttacctacgttggcggccccagaaggggagcttttggaagagtcccagatggaagcgaccaggctccggcagaaggcagaggagctagtgaaggac

SEQ ID NO: 676377 - DNA, 96 bp, Homo sapiens
acagttaccatgggggctaatggtaaccgaaactcaaagttaatggagccaaatttaataaagatatcagttttagagaatgtggcgtggagaaat

SEQ ID NO: 676378 - DNA, 100 bp, Homo sapiens
ctgggctcgggcttcacctctcggagtctgtagaagaggcgacaccagggcttccaaatgaacaaccgaaaggaagatatggaaatcacgtcccactacc

SEQ ID NO: 676379 - DNA, 50 bp, Homo sapiens
gcagtttttggcaatcacgtattttcaaaagacgaggtctcactatgttg

SEQ ID NO: 676380 - DNA, 90 bp, Homo sapiens
ctggaggaccagtcagaccagcgcgtcatcatcaagctgaacatctccttcccagccactggctgccagaaactcattgaagtggacgat

SEQ ID NO: 676381 - DNA, 100 bp, Homo sapiens
gttttggagccggacttttgaagaatgattcgtgaatccggaatgggtgacagcgtcatcacggcattttattggcaaatgaaaacggtagcttaaactg

SEQ ID NO: 676382 - DNA, 87 bp, Homo sapiens
gccaacaggcaacatcagcagcgcccccaaggacttcgccgtctatatgtcctggagaacatgatggagccaccacagcgagactcc

SEQ ID NO: 676383 - DNA, 83 bp, Homo sapiens
gcggctgcgagagtggcagaggagctggcggagagcggcctgcgggcgatcgggccgaggaagctcttcgtgggcggtcttga

SEQ ID NO: 676384 - DNA, 100 bp, Homo sapiens
cccagcggctgggagagacgctgaatgaagaagagggaaggacggttagtcagtttgccaaggcacgagtaacaagctcacgcagttgggcacttttgaa

SEQ ID NO: 676385 - DNA, 101 bp, Homo sapiens
cggaagcctctggtccctgcccagcgaccagctggagctcgttgccacgggccaggagtggtggctcacacctgtaatcccagctctgggaggccaaggcc

SEQ ID NO: 676386 - DNA, 75 bp, Homo sapiens
ttcaaaatttcaggtcttaaatctgtttaaggaagaaatctctaaacgttttaaatcacatactgaccaacttgt

SEQ ID NO: 676387 - DNA, 100 bp, Homo sapiens
gagccggcgcccccgccctgtagatggagatgtaacagttaactttgaaaattcaaacgggcacatgatacccatcggagaggaatctacccgagaggaa

SEQ ID NO: 676388 - DNA, 82 bp, Homo sapiens
cgcccagcggattctacattgcctccggaggtctacgacgttcctccatcggtgagcaaggatgtgcccgatggcccactgc

SEQ ID NO: 676389 - DNA, 74 bp, Homo sapiens
ctgtactccagagcagtacaaggagtgtgcagatcctgctctggcacatgcttgactatctttggcagaggaac

SEQ ID NO: 676390 - DNA, 100 bp, Homo sapiens
ggcgggctgtggcaggagggcggcggcggcggctgcggtcgaagaaggggacgccgacaaggtcaaaaggctgagtttcaaattctggataatgtagact

SEQ ID NO: 676391 - DNA, 74 bp, Homo sapiens
aaaaaggaagaataagcaggcttttttagatgagctggtttgtggtaaatatgccagctctagaacacatgaat

SEQ ID NO: 676392 - DNA, 100 bp, Homo sapiens
gtgaactttcacggacaacctcagaggacaacgaagtgttcgaatagcctaacatggcagaccagagacagcgctcactgtctacctctggggagtcatt

SEQ ID NO: 676393 - DNA, 97 bp, Homo sapiens
gtaaacaacagaagaactgagctatttttgaaagaacatgaccaccttcgaaaatacttgaatacctaccaagtagaaggcactatgccagcactgc

SEQ ID NO: 676394 - DNA, 75 bp, Homo sapiens
tcgtgccggacgtgccaggagcagcggctgcagggcgaggtggtgcagcggctgacgcggatggtggggaagaac

SEQ ID NO: 676395 - DNA, 82 bp, Homo sapiens
cgggcgtgggaacccaggccccgccgaggcggccagcagaaaaatatggctcaggagactaaccagaccccggggcccatgc

SEQ ID NO: 676396 - DNA, 90 bp, Homo sapiens
ccctctgtcttttctgtgacgggagcaatgctgacctcggtttcctggacccattccgactcaggcaccactggatcataccagtgacaa

SEQ ID NO: 676397 - DNA, 95 bp, Homo sapiens
cttgggggtcagcatgctgaggatcctcttcctcctgggtgccagcgagatttcagattcctgtaaacctctaaagaaaaggagtcgcgcctcaa

SEQ ID NO: 676398 - DNA, 98 bp, Homo sapiens
cagcgcccggcccgggccgcacccgccggccccatgaggagggacgtgaacggagtgaccaagagcaggtttgagctcccgtcccccttccgccgcgt

SEQ ID NO: 676399 - DNA, 100 bp, Homo sapiens
cctgctgcccttcctggatgcgcagtatcagaaggtccccgtgctctttcacctggacgtgacctcctcaccttcaaatgtttatctggtgtgactgtat

SEQ ID NO: 676400 - DNA, 102 bp, Homo sapiens
aagagtgtgcagcggattaaagctaaagacatagttcctggtgatattgtagaaattgctgttgtgctgcatggaaacaacctgttagtatttggaggtacg

SEQ ID NO: 676401 - DNA, 78 bp, Homo sapiens
aagacccatctttatgcaaagccagcgttacagtaatgttccaggatcttcagcctgttaaacaagaaaacgaaaaac

SEQ ID NO: 676402 - DNA, 87 bp, Homo sapiens
aatctctgagtcaggatgtaatgcggagtttcaccaacttcagaaatggcaccagtatcattcagccaatggagatcttcgtggatg

SEQ ID NO: 676403 - DNA, 90 bp, Homo sapiens
aaaatgtctttcgggccgctttccaggaagcagcaggatgcgccgctccactgtcggtagcaacaagatgtccggtctgtgctacgacag

SEQ ID NO: 676404 - DNA, 83 bp, Homo sapiens
cggaggatcgcggagtcccaatgaaacgggcagccatggccctccacagcccgcagataacgaaggaggcccaacttcattca

SEQ ID NO: 676405 - DNA, 100 bp, Homo sapiens
cctggttccagctgcagcacgtggacgctgactcggaagtgcaggtgtgtggggagcagcaccgctttgaaaagctgatggaatatttccggaatgagga

SEQ ID NO: 676406 - DNA, 75 bp, Homo sapiens
aaatgcattccacgtgtatcagaactgatagtgcatcagctgacccaggtaatttaaaatattcttcatccagag

SEQ ID NO: 676407 - DNA, 73 bp, Homo sapiens
ggcggcgaggcgcgaggagctagacttaattcagtgcacaaatgagatgaatgtgaacatcccacagttggca

SEQ ID NO: 676408 - DNA, 97 bp, Homo sapiens
gaaggcgggcggcagaggcgatcagcgccactggcttcaccacgcggtcagacattgggcccgcccgtgatgcaaatgaccctgtggatgatcgcca

SEQ ID NO: 676409 - DNA, 50 bp, Homo sapiens
agccagcagctcgctcagtacaagagttgaaggcacagttaaatgaaaca

SEQ ID NO: 676410 - DNA, 100 bp, Homo sapiens
gtggtggacctgctggcgcaggacgccgacatcgtgtgccgctgccagtttgatgccgaccgcgatgaggatgaggtgttctatgacatcagcatggcag

SEQ ID NO: 676411 - DNA, 75 bp, Homo sapiens
gggatttccaccatctgtcccagactgtgcccatttccagttgagcagctttgatctccggagccgcctgtgccg

SEQ ID NO: 676412 - DNA, 50 bp, Homo sapiens
gcggatttcgaagagttgaggtggacagcggactgcagcgaaccgctgga

SEQ ID NO: 676413 - DNA, 100 bp, Homo sapiens
gggggtggtgctggctcagtacatattcaccttgaagaggaagacggggcggaagaccaagatcatcgagatgggaatatccccggctcggctgtgctgg

SEQ ID NO: 676414 - DNA, 90 bp, Homo sapiens
gatccgagaccctcgctcccccatcaacgtggagagcttgctgcctgcctagggtagttaaaagacgagtgaatgctctcaaaaacctgc

SEQ ID NO: 676415 - DNA, 100 bp, Homo sapiens
tcccccactctttccgccctaatggaggtctccagtttcggaaactacaagatccccggatcatgaccactctcagcgtcctccttggggtcgatctggg

SEQ ID NO: 676416 - DNA, 96 bp, Homo sapiens
ccgaggcggtgctgcaagagaaggcactcaagtttatggccaaccaggatctcccaacccgaagacagcaggcagcccaataatgtgatcagacag

SEQ ID NO: 676417 - DNA, 75 bp, Homo sapiens
tgtggcaaccgaaatgagactccctcagatccagtgataattgacagcggcaacctttggcactgcatccatgag

SEQ ID NO: 676418 - DNA, 100 bp, Homo sapiens
caagacatgcagcaccaaggaccagcaattcaagccttagaaaatttacgtgtatacctgtgtgagaaaatcatagctgagagacattttgatcatctac

SEQ ID NO: 676419 - DNA, 98 bp, Homo sapiens
tactggcaggcatggagccaacaaggagaacctggagctcaacggcagcatcctgagtggactcggagctcttcgacagcagtgtggaggccattgtg

SEQ ID NO: 676420 - DNA, 51 bp, Homo sapiens
gaggagaccagcaccatggaggaggacaggctttatcctgtggataaacgc

SEQ ID NO: 676421 - DNA, 126 bp, Homo sapiens
agagggcaaatcacgctgccaagacaactgtgtaattcgctcgaaaaagaaacgaaccagaagagtgtgttaattgcacagatgaatgccgagtgcttggtcattctgacaggtgctggatgccac

SEQ ID NO: 676422 - DNA, 75 bp, Homo sapiens
gagagacagaattctgtgtaccagtcggacctctttgccatgattggagcttgaggagcagctggaggaggagga

SEQ ID NO: 676423 - DNA, 82 bp, Homo sapiens
gcatctagtctttccgcttcttgaatttctctctgtaaaggagtttgcaggtcgaagtaagaaggaaaccaaatattctctt

SEQ ID NO: 676424 - DNA, 82 bp, Homo sapiens
gggagtcggggatagtgtcatcggttcgcaaaatgatgcttcaacacccaggccaggtctctgcctcggaagtgagtgcttc

SEQ ID NO: 676425 - DNA, 89 bp, Homo sapiens
aacaaaagatatacaagaaggagatacattaaatgcaatagcccttcagtactgttgtacgctgtgcaaccatattgcttctgggaaaa

SEQ ID NO: 676426 - DNA, 85 bp, Homo sapiens
cttagacacaccgtcagagaatagtaatgagtttgagtgggaaggccaccaggaaaccctccccgaagaatgggtagaatcaatc

SEQ ID NO: 676427 - DNA, 75 bp, Homo sapiens
agctgctcgacgaccaagaggcgaagaggtctctgaaagaagatgaatttggctgagatttgtgataatgcaaag

SEQ ID NO: 676428 - DNA, 97 bp, Homo sapiens
cagctgtacaacagcatcttcagcctgctcagcttcgagaagattggctacacaggcgctgtgtggctgcactgtgaacattcccactatcgacggc

SEQ ID NO: 676429 - DNA, 101 bp, Homo sapiens
ctgcacaatattaaaactttacctggggtgcgctacaaggaggagtttgagaagaacaagggcaaaggtttcagcgtagtggcagacacgcccgagctcca

SEQ ID NO: 676430 - DNA, 134 bp, Homo sapiens
ggcagaggtatggcagttattggcaggctgccatgacaaccaggcaatgctggatagataccgaattcttatcacaaagtattgaatttgaccgggattgtgactattttgcgattgctggagttacaaagaag

SEQ ID NO: 676431 - DNA, 100 bp, Homo sapiens
caagttttgtgcagattgccagtctaaaggtactccaaagattcaggtttactcacgtcatccagcagagaatggaaagtcaaatttcctgaattgctat

SEQ ID NO: 676432 - DNA, 75 bp, Homo sapiens
gcggagccggcgcggggtccacaaaggtccttgctgcgaaagtgctcaaccttgtgctgccaaacttgtccctcg

SEQ ID NO: 676433 - DNA, 51 bp, Homo sapiens
aatacttctggaatccagacagaatggtcaaggtcagcatctcctcgacga

SEQ ID NO: 676434 - DNA, 100 bp, Homo sapiens
gaagaagtctggaggcttccagtccatggcacaagctccgggtggataaggcagctgctgcagcagcggcactacaagccaaatcagatgagaaggcggc

SEQ ID NO: 676435 - DNA, 100 bp, Homo sapiens
gatagtctccagcgggcctggactgtgggctggtgtgtggaactggtaaggagtgccaatggaccgatgcctgcctgtctcatccctgtgcaaatggaag

SEQ ID NO: 676436 - DNA, 100 bp, Homo sapiens
ccagaaggctacaatctgaaagatgaggagggccggctccgggatcctgccaccatcacaaccctgcggatacagaattcgttgttgggaaggactgggg

SEQ ID NO: 676437 - DNA, 74 bp, Homo sapiens
cctgcagaaggtctctggagacatcttcagcagagtccactgccagctggttcgactctttgcacgaggaattg

SEQ ID NO: 676438 - DNA, 100 bp, Homo sapiens
aaggtggtcctggtgggcgacggcggctgcgggaagacgtcgctgctgatggtcttcgccgatggggccttccccgagagtgcctggaagagctgggatg

SEQ ID NO: 676439 - DNA, 87 bp, Homo sapiens
gagcgtgaccgagagcgcgaatatcgtcatcgttagaaggcaatgaccagagtgagattggatttcttggatcaactagcaaaattt

SEQ ID NO: 676440 - DNA, 75 bp, Homo sapiens
gtcaggcataaattgattattcctcgcccacatctgtgccaggaaagatgaatgggagggctgattttcgagagc

SEQ ID NO: 676441 - DNA, 76 bp, Homo sapiens
tatggtgggcaaactaagccgattttccggaaaaaggttatggatgatgaatcagatgaaaaagaagcaaactcac

SEQ ID NO: 676442 - DNA, 107 bp, Homo sapiens
tttgaaatcgacacacaaagaatagagttgagcctgtgggacacttcggaacatccagtcatggataaaaatgagctggttcagaaggccaaactggccgagcaggc

SEQ ID NO: 676443 - DNA, 74 bp, Homo sapiens
aatgttttaacaatagatcaagctagtgacttgaaaacgttgtgtgacgtgatcctcatggtccaggaaagaaa

SEQ ID NO: 676444 - DNA, 98 bp, Homo sapiens
gaatcatggcggctgcgctgttcgtgctgctgggattcgcgctgctgggcacccacggagcctccggggctgatgaaggatttgggggcagagcactt

SEQ ID NO: 676445 - DNA, 74 bp, Homo sapiens
tgacttcagtatctggagcatcctcagaaaatgtattggaatgaatgatatggaacctagcaaagctgttccac

SEQ ID NO: 676446 - DNA, 75 bp, Homo sapiens
gataggaactcttggttgggataaagcttttcatcctactataaaggaggatttgaacagaaaatgagtaggcga

SEQ ID NO: 676447 - DNA, 88 bp, Homo sapiens
ctgcacatactgccccaagagcttcaagaaacctagcgacctggtgagcatgaatgtcagcatcatcattcaaagaacaagaaacatt

SEQ ID NO: 676448 - DNA, 100 bp, Homo sapiens
tgtcggtgggcgagctctacagccaggtgatgatgccagggaggctgttaaacatggcttgaatgggatcttggtgtcgaatcatggggctcgacaactc

SEQ ID NO: 676449 - DNA, 73 bp, Homo sapiens
gaagtcatttctactggacttcatgcttagatacatgtataacaagaagtccattggaatattaagcccagga

SEQ ID NO: 676450 - DNA, 82 bp, Homo sapiens
ctcgggacggaggacgcgctagtacctgcctagagctggaacgttacctccagagcgagccctgctatgtttcagcctcaga

SEQ ID NO: 676451 - DNA, 100 bp, Homo sapiens
cgtgacaccagtccccgggcaggagaagggctcggccctggagggcagggccgacaccacaacgggcagatcaacaacccctccccgtcgtaaacgctga

SEQ ID NO: 676452 - DNA, 90 bp, Homo sapiens
tcaagataaagtgattttttgcctttgttgattaactggacaaattcaggcccagatgacaccaagcccatctgaaatgttcattccggc

SEQ ID NO: 676453 - DNA, 106 bp, Homo sapiens
gtggagtgatatcagacaccgagcttcagcaagctctctccaacgacaatgcagatcttcgtgaagactctgactggtaagaccatcaccctcgaggttgagccca

SEQ ID NO: 676454 - DNA, 83 bp, Homo sapiens
ctggacagctagctgcttatggctataaaattacaggtacaccaggggttggaaaaaccacactaggcaaagaacttgcgtca

SEQ ID NO: 676455 - DNA, 100 bp, Homo sapiens
acaactctttgggatcctcacagcagcagcccaagaagggcaccaatgcctctgctctggaaaaagacattggtccagagcagtttccaatcaatgaaca

SEQ ID NO: 676456 - DNA, 83 bp, Homo sapiens
ggacaaagagcccctcatcgagctcttcgtcaaggagcgtgaggatcatccccggagaggacgggaggatcggcagcacaggg

SEQ ID NO: 676457 - DNA, 96 bp, Homo sapiens
tcttttccttattcttctgatgtggatccagtttgcctgagaatacagatcaacccacagaacaaagcggatttccaaggcatctccccagagcga

SEQ ID NO: 676458 - DNA, 75 bp, Homo sapiens
gaggaaccggaccccggcagctactcggtgaaatacctggagtgctcagctctcacccagagaggcctgaaaacc

SEQ ID NO: 676459 - DNA, 75 bp, Homo sapiens
ctctactggacaaacatttcctccaaggttgctgcttttgctcagaggacatccatgaccctaatggtctttttg

SEQ ID NO: 676460 - DNA, 100 bp, Homo sapiens
cgttgctcttgcttttcctcgctggggtgtacggggatatcattttcaatgcccaatacccagaactgcctcccgattttatctttggagaagatgctga

SEQ ID NO: 676461 - DNA, 75 bp, Homo sapiens
taagttggcccaggctgaggagcagctagagcaagagaccagaatccagggcctgaaaacccagaatgaacttgt

SEQ ID NO: 676462 - DNA, 100 bp, Homo sapiens
catcaatcagggtcaagaagatgaaatgcttccaaaacatcacaacggacacgtcgtccacgtctcagaacaaaaaccacaccacgtcctgaagcacctg

SEQ ID NO: 676463 - DNA, 51 bp, Homo sapiens
ctgctgctacctcttagacaaggaaaaaccattgaagaattagggtctgaa

SEQ ID NO: 676464 - DNA, 100 bp, Homo sapiens
atcaaagctggattagaacatctggttccagcaacagatagaaatgctttaagttcactctggggaaagctggcctctgaaatcttaatgcagaattggg

SEQ ID NO: 676465 - DNA, 100 bp, Homo sapiens
ctttgatagtcgtaccatatgcagaaggtactctgtggatatccccttggacaaaactgtcgtcaataaggatgtcttcagagatcctgctcttaaacgc

SEQ ID NO: 676466 - DNA, 75 bp, Homo sapiens
tgtgtggcgctactttcgagactactttcccatccaggtttccactgtatccaaaaggaggggagaagttgcagt

SEQ ID NO: 676467 - DNA, 100 bp, Homo sapiens
cctgatgctgtgggacctattgttcagttacaagagaaactttatgtgcctgtaaaagaatacccagatatcaatgtccgagttaccaccatggatgcag

SEQ ID NO: 676468 - DNA, 114 bp, Homo sapiens
ggacgagcgggaccgggtgctggaggagctgcacaaggcggaggacagcctcctggccgccgaagaggccgccgccaagattatgtttgagaccttcaacaccccggccatgta

SEQ ID NO: 676469 - DNA, 83 bp, Homo sapiens
gcggtggtttggacgccggcggagacgcgggcgagagtctctggtaagaagagtgaaagcaaagaagccaagaagtctgaaga

SEQ ID NO: 676470 - DNA, 99 bp, Homo sapiens
gcagatgagaaggttcagttggcaaaccagatatatgacttggaagccctcaatctagaagagtagaggtccaaaggtgccatatgttcacactgtgag

SEQ ID NO: 676471 - DNA, 100 bp, Homo sapiens
cacagttgaagcctgattgcagagttgaagtattgataacaccaaggaactctatcacaatttgaaaagataagcaaaagtttgatttccagacactaca

SEQ ID NO: 676472 - DNA, 75 bp, Homo sapiens
gcttcgggctgcctgctgctgctccctgtcccaaaggctcctttggagacatcggacaagagtgtgattgagctg

SEQ ID NO: 676473 - DNA, 100 bp, Homo sapiens
gtctgcaccttccggaacagcgccgaggccttcaagtgcatgatgtgcgatgtgcggaagggcacctccacccgttggaatcgaagcctcttaaaatggc

SEQ ID NO: 676474 - DNA, 75 bp, Homo sapiens
acaggatctatctgcaacctggacggctggccaaacacttagaggcagaatattactgaagaatgatcctgttca

SEQ ID NO: 676475 - DNA, 75 bp, Homo sapiens
tcctgactgaaagctagaggcattgaggagcctgaagattctcagatcactgtgtccactactatgatcttcgta

SEQ ID NO: 676476 - DNA, 100 bp, Homo sapiens
cagcgattccgcggctcctctgagaactggcgcttgttctgtggacaatcacaatgggaatccaaggagggtctgtcctgttcgggctgctgctcgtcct

SEQ ID NO: 676477 - DNA, 90 bp, Homo sapiens
acttcgagtcctttattgtggagctttgctgcaagataacatcgctgatgctgtagcttgtgcaaagagggttgtccgtgatccacaagg

SEQ ID NO: 676478 - DNA, 87 bp, Homo sapiens
tgcagccatggtgcattgcagttgcgtgttgttcagaaaggggagtaggttgcatctttgttgaaatgatccaaggagttgctgctt

SEQ ID NO: 676479 - DNA, 75 bp, Homo sapiens
attgcttcctggcccacgagcagtgacaacagtttggcaactagaagccatttgtgtcaaggtaacgtctggaga

SEQ ID NO: 676480 - DNA, 83 bp, Homo sapiens
cgccagttactgcacggaaagcagcgtcaggagccatagtacctacagcagcactccagatctgttcagcctgtgtgcgctgt

SEQ ID NO: 676481 - DNA, 100 bp, Homo sapiens
ttcgacctggagctgggccaggccgtggagatcttcccagacccgtcagattttgaccgctgctgcaaactgaaggaccgtctgccctccatagtggtgg

SEQ ID NO: 676482 - DNA, 82 bp, Homo sapiens
gcgtgtcctgaaggagttccaccaggccgggaagcccatcgggagtgtggccatctggggccgtgtggtatttgccactcag

SEQ ID NO: 676483 - DNA, 100 bp, Homo sapiens
accagtccaggcccagcctctcgaatgggcacacctgtgtagctccttcccgaactcacaaatcctgacgagctcctgtcttatctggacccccccgacc

SEQ ID NO: 676484 - DNA, 75 bp, Homo sapiens
ggcagattctggaaactgtacattgaagcagaggatatctttgaccagctggccaagtcattggccccaagtatc

SEQ ID NO: 676485 - DNA, 75 bp, Homo sapiens
ctcttctcccgactatttggcaagaagcagatgcgcattttgatggcttccaaactacaaaaactttaaaggcac

SEQ ID NO: 676486 - DNA, 74 bp, Homo sapiens
aaaaacaaaattctgaactcaggacttggcaactagagatgatcgctatggaaaatcctgcagacttgaagaag

SEQ ID NO: 676487 - DNA, 100 bp, Homo sapiens
gaactcacaacgatactgggggctgctctcacatactcactttgcaggtcctagccataaatatcctgggtcgtttcttattgaacaatgacaagaatat

SEQ ID NO: 676488 - DNA, 88 bp, Homo sapiens
ggaactcagcagcggaggctggacgcttgcatggcgcttgaggttgcttataaaaagggagtcaaacatctttctgctcttcttgatc

SEQ ID NO: 676489 - DNA, 100 bp, Homo sapiens
cctcaaatttattgccaacactgaattctggaggccacagaaacactattcagaatgggtgtagcaagaggaaccatcacaacattaagaaatggagaag

SEQ ID NO: 676490 - DNA, 75 bp, Homo sapiens
cggcgccgagccgcggtccgattcaactttgtggggaaacttttgggtccacgtggcaattctctgaagcgttta

SEQ ID NO: 676491 - DNA, 75 bp, Homo sapiens
aaaacatctaccagtttgactttaaagccacaatggtgcgcatgaatgtcctggcagatgctctcaagagtatca

SEQ ID NO: 676492 - DNA, 100 bp, Homo sapiens
cgagttcaaagagaccctcggaacgtcctgaacgaggctgtgggggccctgatgtaccacaccatcactctcaccagggaggacctggagaagttcaaag

SEQ ID NO: 676493 - DNA, 100 bp, Homo sapiens
aggatgttcagcttcgaaggcgacttcaagacgcggcccaaggtgtcccttggcggcgcgagcaggaagggaagaatatttctcagccctccgttctcaa

SEQ ID NO: 676494 - DNA, 98 bp, Homo sapiens
ggaggaccgtgggcagccagggtcggtgaaggatcacctgctgttaccagctaccacccataacaagaccacaagaccaaaaatgtcaattgtgttac

SEQ ID NO: 676495 - DNA, 90 bp, Homo sapiens
caaagcctgaacaggcagggccagacccaggtcaccacctatttgcacaaggactacaacaacctgtggattatcaagaaacataacaca

SEQ ID NO: 676496 - DNA, 75 bp, Homo sapiens
cgaggacaacgtgcgcgccgctcagaagatgcagacaacatatgttttacagagtcttcatttgaggattccaga

SEQ ID NO: 676497 - DNA, 100 bp, Homo sapiens
agctacgagagacgcaacgagggtgctgcccgagttatcgggaccctgttgggtcggccacacacccggagcaccgtcatcacagcggtcaagttcctta

SEQ ID NO: 676498 - DNA, 75 bp, Homo sapiens
gaagaaaaagatacaacgaactagcacaacgaggggtatttgaagtataccatacaactgttttgaaaatccagc

SEQ ID NO: 676499 - DNA, 100 bp, Homo sapiens
tcctggaggaatccgagaagagcagagcggagggagccccagacacggcagaatccagagaccacatttgaagtatatgttgaagtggcctatcccagga

SEQ ID NO: 676500 - DNA, 100 bp, Homo sapiens
agagtacgatactcaggtcaaaggaaaatcctgccttgcttcgttgggcctatgcaagaacaataaatgtctatcctaatttcagacccactcctaaaaa

SEQ ID NO: 676501 - DNA, 75 bp, Homo sapiens
ggaacatgacgcaggtgcaggtgtctcttctcgccctggcggggaagctggctggaggcgtgatcctgggtgtgg

SEQ ID NO: 676502 - DNA, 98 bp, Homo sapiens
tgtagaagactctcaagaagtgtgtaccacctctttttccacctccccaccatcccaggctcccagatccagcacctgacacaggtggggattgccag

SEQ ID NO: 676503 - DNA, 86 bp, Homo sapiens
cgagcggccgcgagcagagccgcccagccctgccagctgcgccgggacgattcgacggaggcgccttgcacgacttgctggtggac

SEQ ID NO: 676504 - DNA, 90 bp, Homo sapiens
gcaacaagtgaaattgaggtcacaccttcagtccttcgagcaagaagatgatccctatgatcttgaagatgtttctgcacagaaatgagg

SEQ ID NO: 676505 - DNA, 59 bp, Homo sapiens
agcaatgacattgggggcctgtggaaattttcagtaatttttaaagagcaactatcacc

SEQ ID NO: 676506 - DNA, 97 bp, Homo sapiens
tcctgacagcagaggccgatggtgggatcgactggcccttaatttacaccagcacttgaagcgcctggaaccggcttgcattgatgacaatgttgat

SEQ ID NO: 676507 - DNA, 100 bp, Homo sapiens
cgggatctcggtgctgcagacggcgagacctcctgcacagatcatggaagggaagtggttgctgtgtatgttactggtgcttggaactgctattgttgag

SEQ ID NO: 676508 - DNA, 108 bp, Homo sapiens
ccaccatctccatcacccaccaacaacaccacaataatccacagccaaggttcaaaccttgtactactcagctgatcacaagctgcttgatgggaacctactagatgg

SEQ ID NO: 676509 - DNA, 98 bp, Homo sapiens
agcacctttcggcttctgagacggcggcagcagcggcattcaggttcacaaccagtatccaactgagtttgaattcaatctctattacttaaagttct

SEQ ID NO: 676510 - DNA, 98 bp, Homo sapiens
ctgccgcaaacatgctccgccagatcatcggtcaggccaagaagcatccgagcaaaaagcttgtggtgaaggggggcaaaaaaaagaagcaagttctg

SEQ ID NO: 676511 - DNA, 89 bp, Homo sapiens
gcaagagtaacagcagcgccgtcccgtccgacagccaggcccgggagaagcacgtggactccctttaatccagtgactgtcaggtcgat

SEQ ID NO: 676512 - DNA, 83 bp, Homo sapiens
ttaatggaacaatgattctgaaaagaacggagcttgaagcaaagctgcaggttttaaagtgggcctttggagtgacgctgtgg

SEQ ID NO: 676513 - DNA, 101 bp, Homo sapiens
aggaaggactcctcgctctatatagcacactgaagaagacttcaagggacgattcaaagctcgaccagaactggaagaactgttggccaagttgaagtagc

SEQ ID NO: 676514 - DNA, 82 bp, Homo sapiens
tcagcatttgcatggaacacatgctcgggctgtgctggggcaggggccacggctgtgggcaggaggccctgagcaccagcca

SEQ ID NO: 676515 - DNA, 98 bp, Homo sapiens
ctacttcctctgtatagagcaactgttgaactcagctgcctgtagaaccatctgctgcagaatcccaggggaaaggcagcatctccgaggatgagctg

SEQ ID NO: 676516 - DNA, 75 bp, Homo sapiens
tgctccttctcctggagacgcaactcaagattacgtctattttgagaactcttccagcaatccttacctggttag

SEQ ID NO: 676517 - DNA, 83 bp, Homo sapiens
ctggcgctgagcctgcagccggccctgccggttctccttactatgacaatgtccgccccctctcttaccctgattcggatgct

SEQ ID NO: 676518 - DNA, 74 bp, Homo sapiens
aggttatcagtgagctgaatggaaaaaacattgaagacgtcattgcccaggctcactgataaccttgttgagcc

SEQ ID NO: 676519 - DNA, 96 bp, Homo sapiens
gaccacaataaaagagacctctacttagctcagcaattcttacctttgatgtaaattggagtcaaccaggtgaaaagaagttaactgggggatcta

SEQ ID NO: 676520 - DNA, 82 bp, Homo sapiens
gatactcacacagtggcttctgctcaccaacagatgaagacagatgcaccaacgagcttaccctgaaagaagcagatcccag

SEQ ID NO: 676521 - DNA, 101 bp, Homo sapiens
agaatagcaacattacaggattgtacgcaactgctaaccctgttccaaggcactgggtgcaagttcctgtgaaatatgccacgaggtgttcaaatcaaaaa

SEQ ID NO: 676522 - DNA, 98 bp, Homo sapiens
agtcgcgaggttcgagtgttgcagagcctgcggggcaagatctactcatcttgacatcctggaaaagagtgtcaacctcaaagaggtctacttccggc

SEQ ID NO: 676523 - DNA, 100 bp, Homo sapiens
tacagcgcctccggctgatcaagtctcctgcagaaattgaacgaatgcagattgctgggaagctgacatcacaggtcatggaggcggagcagaccaagac

SEQ ID NO: 676524 - DNA, 100 bp, Homo sapiens
ctacatctacagatgtgtgtgggacaaagctagtagtttgggaagctgctcagaatggtgcagatgagggaactggtgtcaccaccccaataaacttaga

SEQ ID NO: 676525 - DNA, 82 bp, Homo sapiens
ttcgcgtctctctgctgcggcgcggggaccgctgtgctctcggtgcgcgcggagccatggttatcatgtcggagttcagcgc

SEQ ID NO: 676526 - DNA, 98 bp, Homo sapiens
ttctggagccctccttggagctggagagcacctcagagaccagtgacatgccagagatgtccagcgtctggctgcctgtggcctggagggaccccctc

SEQ ID NO: 676527 - DNA, 82 bp, Homo sapiens
agaaacagttggccaagctccacacgaagtttggtgccctggttgtcagatgttggaaagcagtaggacggaacatactctt

SEQ ID NO: 676528 - DNA, 96 bp, Homo sapiens
aaagttcttgggacaaacttcatttggagaactacgatgacccgcacaaaacccctgcctccccagttgtccacatcaggggcctgattgacggtg

SEQ ID NO: 676529 - DNA, 74 bp, Homo sapiens
ccggcctagcgtcctggaattacttcaatcaaagggaagcctggagccacagatagaggacctgattagccgga

SEQ ID NO: 676530 - DNA, 50 bp, Homo sapiens
ccagtcccgggcgggccgtcgcgggagagttcctctttggaatccatgca

SEQ ID NO: 676531 - DNA, 100 bp, Homo sapiens
ttaatggagttgctagtaaagcgaagctgattatcctggaaaacactatttacctattttccaagaacaagttgaaatcatcgcagaaggataaagttcg

SEQ ID NO: 676532 - DNA, 100 bp, Homo sapiens
ccactgaccttagaggactacttgcccgagactcgtggggctggatgggaatcgtagtcttcctaggagttggaacccgagcgtcatgttagggtgaagc

SEQ ID NO: 676533 - DNA, 50 bp, Homo sapiens
atcacagacaacagcctggtggcagcgtcttacctatttgatgaagatgt

SEQ ID NO: 676534 - DNA, 74 bp, Homo sapiens
agaggagctgtggataacgggaggtgaatttccatgtcaacatagtcctgattttgggaaccagtaggacattg

SEQ ID NO: 676535 - DNA, 75 bp, Homo sapiens
cacccagacacgacaccatgcatctcctcggcccctggctcctgctcctgggtcaagtctggcaccatctttgac

SEQ ID NO: 676536 - DNA, 51 bp, Homo sapiens
gttcccggagatgcggcgcgcaggtagctacagcaagctgggtagcaggca

SEQ ID NO: 676537 - DNA, 75 bp, Homo sapiens
gactgtattattccaggtcctatctccaagaatatcaaacagttggagtgcctcaagcttattgcctctcaaaaa

SEQ ID NO: 676538 - DNA, 100 bp, Homo sapiens
gctctccctcgagaagctccagatggcgtcttccgtgggcaacgtggccgacagcacagcctcctgacaaggtgatccgggcgggccccgcaggaatttt

SEQ ID NO: 676539 - DNA, 75 bp, Homo sapiens
taataaccctcttttccagtataagtatttggctcttaatatgcattatgtagataaagaactatatgcttggat

SEQ ID NO: 676540 - DNA, 100 bp, Homo sapiens
tactcaatgatgatgatattggtgacagctgtcatgaaggctttcttctcaagaaagaacatgaggttcccttggaaatcattcaagaggaagatggaag

SEQ ID NO: 676541 - DNA, 88 bp, Homo sapiens
tgattcttctatttcagctttctgagcagctaagactacagcttgtgaaaaaacagttgaagaagcacctttcaggagaggagcatga

SEQ ID NO: 676542 - DNA, 75 bp, Homo sapiens
cccaatgattcagatgtggaggagaatatatcctctaaatctgatgaagtagacttgatacgaagtcaagtacag

SEQ ID NO: 676543 - DNA, 82 bp, Homo sapiens
gtgctgggaccgggacggcaaggagagggtgacagcaaaccagtccagctacgggggcccagccagccagcagctgagtggg

SEQ ID NO: 676544 - DNA, 100 bp, Homo sapiens
ttgtccagggcagcatctctggtgcatgctgatgacgaaaaacgaagtaacagctagcagtcgccactatgttgacaggctatttgaccctgatccccag

SEQ ID NO: 676545 - DNA, 76 bp, Homo sapiens
agaagaggagtcctttaggaagagaccgtccaggctggacttgaactccttcctcggctgaagtgatcctcctgcc

SEQ ID NO: 676546 - DNA, 90 bp, Homo sapiens
cggggggaaaatggagcccttcaccaatggaagaacatacttcgtttcttagatgcagaacgagatgtgtcagtggtcaagagcagtttt

SEQ ID NO: 676547 - DNA, 75 bp, Homo sapiens
ttttctgtactggaggcctcctgaggccaggaacgtgcaaatttgcaggtgctggtgggtgtggtgaaggatgag

SEQ ID NO: 676548 - DNA, 50 bp, Homo sapiens
atcttgaaaagctgccagaaaggtcccaaaatggtagaagtccagaatca

SEQ ID NO: 676549 - DNA, 83 bp, Homo sapiens
gcgctctcgtcttctgcggctctcggtgccctctccttttcgtttccggaaacatgtccagttacaacacagggatcacaaca

SEQ ID NO: 676550 - DNA, 82 bp, Homo sapiens
ctggcttgttcgggctcagcggccgcgaggccgcagctcccgatagcctgggctggaagctcttctacgtcacaggctgcct

SEQ ID NO: 676551 - DNA, 97 bp, Homo sapiens
gaaaacttaatggaggaggctgagcccaatagaatcctgccagaatttctacaaagatttcacattacagatcgacatggctttcaacgtgttcttc

SEQ ID NO: 676552 - DNA, 98 bp, Homo sapiens
ttcggctactacttaataatgacaatctcctcagggaaggggcagcacagtatcttctcaacctgtcccatgggacttttatatcaacctcaagttaa

SEQ ID NO: 676553 - DNA, 100 bp, Homo sapiens
ccggaggctccgaggctcctgcgctcccgcgccgcgctcccctcgcccgcccgggccgccaggattcactccttctccagttgcacagccacacccttca

SEQ ID NO: 676554 - DNA, 98 bp, Homo sapiens
cctgggagcgctcgcctcgctgggcagcctcaacatcccctacaagatcgaggccgtgcagaggccgagatggacgaaaaaatgtggttccttgtgtt

SEQ ID NO: 676555 - DNA, 82 bp, Homo sapiens
caagatggaatttttagtcctacatcaaatctgcttcttttggaccttggtcatctaaagcattgtaataagcagagagagc

SEQ ID NO: 676556 - DNA, 83 bp, Homo sapiens
tggctggcggtgcctggacgtacaacttcccgtggaggatgacattgacctcagtgatgtggagcttgatgacttagggaaag

SEQ ID NO: 676557 - DNA, 97 bp, Homo sapiens
ttgaagcctgaatgcagtactgaagaactgctttcaattctaagtgtggagccgccaccaaaatgcagattttcgtgaaaacccttacggggaagac

SEQ ID NO: 676558 - DNA, 100 bp, Homo sapiens
agaatgatgatggagacacagttgttgtggttgagaaagatcatttcatggatgatttcttccatcaggaccctgatgctcccataagacagaaaatgcc

SEQ ID NO: 676559 - DNA, 96 bp, Homo sapiens
agtcccccggagcctggctcccggctcgggccgcaccgccagggactggggtgagcggcccaggtaccttaacatggggaatcttcttaaagtttt

SEQ ID NO: 676560 - DNA, 51 bp, Homo sapiens
tacctctatggttcatgagcttaatagttccgccacgctgccgctgatgat

SEQ ID NO: 676561 - DNA, 75 bp, Homo sapiens
ctatggtgacgctatcaactgcagagattgctgctacaggagctgagagaccctaccctcactttccgtctgctt

SEQ ID NO: 676562 - DNA, 90 bp, Homo sapiens
agttcattttttgcttggtttggaaaaatttcattagagtcctcctgcatatgcccaagaggattgggagtggaatggacaccagcagaa

SEQ ID NO: 676563 - DNA, 100 bp, Homo sapiens
gaatttgtatagagatgtgatgttggagaactacagaaacctggtctccctaggctggctacagcaaacatcattcaagatgtccagcaaagggagcagc

SEQ ID NO: 676564 - DNA, 75 bp, Homo sapiens
agttccacttgatgtcttgcagatcaagattgtagaaggcatgaaacaaaaaatgtggagtattgaaaatattgc

SEQ ID NO: 676565 - DNA, 97 bp, Homo sapiens
cacgacgacggtccctcagcccagccaccatgagcaccaagcagatcacttgcaggtgtggacgatggtgaggacattccccgtgagatgctgatgg

SEQ ID NO: 676566 - DNA, 76 bp, Homo sapiens
ccgcgctcgaccgcctggagaagctgctgcgctgctcgcgttgtgggcatccccaccatcagatggtgcggggcag

SEQ ID NO: 676567 - DNA, 50 bp, Homo sapiens
ggggacaggctacattccaacaggaaaatacctgaccctagagaatgtgg

SEQ ID NO: 676568 - DNA, 100 bp, Homo sapiens
atggggcccttgcagattttaagaaagatggatctcactttgagaaagttggtggggtgaccaagaatatggcccaggtgaccaaagccctggacaaggc

SEQ ID NO: 676569 - DNA, 100 bp, Homo sapiens
aaaagcgcagaccacagttacatgtatggagaatggctggtctcctactcccagatgcatccgtgtcagtactccaaagattcaggtttactcacgtcat

SEQ ID NO: 676570 - DNA, 83 bp, Homo sapiens
aatatatcctctaaatctgatgccaagaagcttgagagaagaaaaatttcagaaaaattgtctcaatttgactagaatatcaa

SEQ ID NO: 676571 - DNA, 100 bp, Homo sapiens
gaactggtacttggagtctggacatctgaaacttgcaaccaaccctgtcagatatgaccatgtatgagatgaatttctctctccttgttgaagacacgtt

SEQ ID NO: 676572 - DNA, 98 bp, Homo sapiens
gctcttcttcttcttccagggactcagcacctggcagaattatatccagatcgagagacagaagattctgaaagggttcaatgaaatgagagtcatct

SEQ ID NO: 676573 - DNA, 75 bp, Homo sapiens
gtcggtgctggcggcggcgcttgggctctaatcaaaggcatgggaggttgatacctgccggggccattacaacaa

SEQ ID NO: 676574 - DNA, 87 bp, Homo sapiens
tgcactccgcacctcggggacattattgcgcgtggaacggctgcttttggaaggataaaagaatcagagtgtctcaacccttgacaa

SEQ ID NO: 676575 - DNA, 100 bp, Homo sapiens
ggaagatcctggaggtggatctgaagaacgggccagcagccggatgcccgggcccactgggcgggccagtggccgcctgcgggatgagcagactgctggg

SEQ ID NO: 676576 - DNA, 74 bp, Homo sapiens
taaagttgtcatccgtggagcaggaaaccaggcctctcttctgtggaaactctgaagccgaccagttgggcaaa

SEQ ID NO: 676577 - DNA, 82 bp, Homo sapiens
ctctacttttcctactctcatctggtgtgccgcactgccatcgaagatggcgattttgctgacagctgccaagaaaatgctt

SEQ ID NO: 676578 - DNA, 75 bp, Homo sapiens
ctaatttgaaccatgtttggattgaagccgcctctgtattacttaccagggtttggaaatcccttgtctccaggt

SEQ ID NO: 676579 - DNA, 98 bp, Homo sapiens
agctatcattcttgatggtataaaaatggacactggagtagaagtctctgatattggaagccaagtaccttctccaggcaaattccgttcccctgcag

SEQ ID NO: 676580 - DNA, 51 bp, Homo sapiens
ggaggagatgactataagattaaggaaggcgcaatggcgaggaagttatct

SEQ ID NO: 676581 - DNA, 100 bp, Homo sapiens
agagacctgactgtggagatggcggctcagaagataaacgaggggctggaacacctcgccaaagcagagaaataagtgcaaattcacctgcaccagtggt

SEQ ID NO: 676582 - DNA, 50 bp, Homo sapiens
tgccgcacaaaaagctagagagtgatggggagctgggatccagatactcc

SEQ ID NO: 676583 - DNA, 100 bp, Homo sapiens
ctgacctcggtttcctggacccattccgactcaggttccagcaacagatagaaatgctttaagttcactctggggaaagctggcctctgaaatcttaatg

SEQ ID NO: 676584 - DNA, 74 bp, Homo sapiens
agacccggaatcagttccttgatgagctcatggagtacaaagccagctgcagtcgccacttcatctcagaggat

SEQ ID NO: 676585 - DNA, 97 bp, Homo sapiens
gccgtccttctccactttcgccagcccgtgccgcgagcgcggcctgcaggaggagcggtggtgccccccccgggcacggggccatgtacaacgggat

SEQ ID NO: 676586 - DNA, 100 bp, Homo sapiens
ggggcgcgcatcccgcaagtcggaacccggcggatcggatcccgcagatcggagacggggcctggaggtttatggctacaaatgatttgatgacggaact

SEQ ID NO: 676587 - DNA, 83 bp, Homo sapiens
accatgagcgacgtggctattgtgaaggagggttggctgcacaaacgagctgtggcggggccttcgtgggcccgcgatgccag

SEQ ID NO: 676588 - DNA, 75 bp, Homo sapiens
gctgggtccgctgagcggggcgacccgaggagccaaaaacctgtatatcatctccgtgaaggggatcaagggacg

SEQ ID NO: 676589 - DNA, 100 bp, Homo sapiens
tggaaactgacaagacgcggcttttatcttcacctttctctataggcagtaagctcctacaggacattttaaaactacataaatgtgccatccccagctc

SEQ ID NO: 676590 - DNA, 113 bp, Homo sapiens
atggggatccgggagaagcacccacaaaactagcatcctcctggaggagctcggtgctcatcttcaaactctatcagcgggcaaagcatgtgtacagcgaggctgcgcgagtg

SEQ ID NO: 676591 - DNA, 88 bp, Homo sapiens
ggcggccgcctaagtcccacagagacgggagtcgggtgggatcccaggctgggccccgcggcgggacagagcgggatgccaccagctt

SEQ ID NO: 676592 - DNA, 90 bp, Homo sapiens
aatatgttcaggtccagttcagactcttgatcccacagccacttcttgagtgaggtgtaaagaagacattccagtgtgagctttgcagtt

SEQ ID NO: 676593 - DNA, 100 bp, Homo sapiens
caacgaccggcccaacaaactggagagagaccagacctgcaagctctttgacacacagcagttcttgtcagagctggaagtcgagtgtgctactcaactc

SEQ ID NO: 676594 - DNA, 98 bp, Homo sapiens
tcctccttctcagctgctctgttctcgacagcttcggggaactgattccgcagccttccaatgaaggaaaagcaggtgatattctcagtggagaccag

SEQ ID NO: 676595 - DNA, 74 bp, Homo sapiens
attgaatatcaagaggaggagttgttggttaagaatagacccaccagcatttcgtgggatggtcttgattcagg

SEQ ID NO: 676596 - DNA, 82 bp, Homo sapiens
gagatggtggaggaggctgaagagttgtctgctggttctcagcttgaagaagattctgcagtccttattgatcctttttctt

SEQ ID NO: 676597 - DNA, 98 bp, Homo sapiens
caagtacatatgatttcagctgcaatggcaggttatggaggttttgatgactatggtggctataataattacggctatgggaatgatggctttgatga

SEQ ID NO: 676598 - DNA, 82 bp, Homo sapiens
ccagtacaagtagaaactgccaagaaatccaaaaagccgagtagagaagttatcagcgtttagtgggctacagatggcatgg

SEQ ID NO: 676599 - DNA, 95 bp, Homo sapiens
caatccagaagttacgaagcaaaatccacaaaaaagtagataggaaagccagcaaaggcaggaaacttcgtgtatcctactcagtacatgtatct

SEQ ID NO: 676600 - DNA, 100 bp, Homo sapiens
cgaagtgcccgctgccgggcgcgggcctcagcattagtgccagcagtagttcccaagggctgtctcagccatccacccagacgactcagtatctgagagc

SEQ ID NO: 676601 - DNA, 100 bp, Homo sapiens
caaataagctatatactttggttacctatgtacctgttaccactttcaaaagtcacgagaagagaatgccttctagatgcaaaatcacctccaaaccaga

SEQ ID NO: 676602 - DNA, 88 bp, Homo sapiens
agtggccgtcttttgcctctttctctcaggctttcctacaactcatgcccagcagcagcaagcagcggtcttgcgagtggctggttcc

SEQ ID NO: 676603 - DNA, 100 bp, Homo sapiens
agctctgtgatggcatcatggccagtggaaggaaggctgtgacacatggacacaatgtaggaagtcttttccacatggcagatgatttgggcagagcgat

SEQ ID NO: 676604 - DNA, 78 bp, Homo sapiens
agggtatccaagggttgtatcgaggctataaaagcacagttttaagagaggttgaagccatccttgtcaatatatttg

SEQ ID NO: 676605 - DNA, 100 bp, Homo sapiens
aacaaccttctgtgagcctagggacccatttctcctcctttgacagggacatcagtggagccttctcagacccacagtattggtaaaggttttcaaggtg

SEQ ID NO: 676606 - DNA, 101 bp, Homo sapiens
aattacaagtggaaatccacaaggattcttttcaatacatcctaaaacagattctggacaatcaggaagtccaagccacaatgatcctgccaagaatcctc

SEQ ID NO: 676607 - DNA, 97 bp, Homo sapiens
ggcccagtgcttagaacactatgaatttcttctccatcagagggttctcgcttcagcacaagatccggagttttgaagaagcgcgaggtctggaccg

SEQ ID NO: 676608 - DNA, 90 bp, Homo sapiens
cacagtgcgtcggggacgaattcctgaactgtaagctggctaccagggccaaggtgctgccatgcttactgagtcccttctctctccttc

SEQ ID NO: 676609 - DNA, 97 bp, Homo sapiens
aggaggggaatttccttgtgcctccattcccgggaggggggagcggcgttggaggccaccgtttccaggccgctgtgctcgctgtggagaaaacgta

SEQ ID NO: 676610 - DNA, 100 bp, Homo sapiens
cttatatagagacctattcactgcaatgattattgcgagtggcatcgtgttccagtgggggactggtttggcatcatgtggacgacggttgtgccctggg

SEQ ID NO: 676611 - DNA, 75 bp, Homo sapiens
cgtgggcacgcgctcctacatggctgtcttgcgatcagtggaccgctggtcagcagggactctggagaactccat

SEQ ID NO: 676612 - DNA, 102 bp, Homo sapiens
accagttcccagaggtgtatgtgcccacagtgtttgagaactatgtggcagatatcgaggtggatggaaagcagatgagtaacgaaagaggctttgaaaatg

SEQ ID NO: 676613 - DNA, 74 bp, Homo sapiens
actgggggattcgcagggaggatgtcgggacaccccggaagctgggaaatgaagctgcacacatacatgtaaga

SEQ ID NO: 676614 - DNA, 74 bp, Homo sapiens
aggttgccttggaaaatgccaacgccgtgtctgaagcatataggttgctgtagatgaatgttcttagctgtcat

SEQ ID NO: 676615 - DNA, 74 bp, Homo sapiens
acggaaacttcctctacgtgtgggggggctacgtgttgcaagaatgtagtaactctgatcagctacaaggaaag

SEQ ID NO: 676616 - DNA, 89 bp, Homo sapiens
ggaaatgctctgacagagaatgagatgaccacaattcactatgatagaattacttctctacaggatgattgtcttttgaaagtgtggta

SEQ ID NO: 676617 - DNA, 95 bp, Homo sapiens
gagttcaaggaggtgctgaagagcgaggagctttctaaaaccaatttttccaacaacaacgatttccgtgctcttctgcagtctttgtatgctac

SEQ ID NO: 676618 - DNA, 100 bp, Homo sapiens
acttctcactggtggcactctccctctacattgtctatgagagctcaggccccggggcctccagcggcaccagcggagaccacggtgagctcgtcgtccg

SEQ ID NO: 676619 - DNA, 73 bp, Homo sapiens
gcctacatcccacagagatacccagacaacaggatcgtctcgtccaagtttcgccgtgaggaagatgcggaaa

SEQ ID NO: 676620 - DNA, 71 bp, Homo sapiens
ctgataactgactctgatctcaacattttggctgaagtgcatgtgagggaaccctggcttgttcaacctgt

SEQ ID NO: 676621 - DNA, 76 bp, Homo sapiens
atagaaagtgaattttgtagaaggagaaggatgacatctgaactggagagcagcctaacgtctatggactggttac

SEQ ID NO: 676622 - DNA, 51 bp, Homo sapiens
cagctgcacactgacctgcagaagagaatgccacgggtgacctggccacca

SEQ ID NO: 676623 - DNA, 83 bp, Homo sapiens
gcaagaaggccctggacacagcaatatctctgggctttcacaggcatcctctggtatcacgattccaaaacccccaaagccac

SEQ ID NO: 676624 - DNA, 75 bp, Homo sapiens
gggcaaccccctgccacctcagatatttaatggcgaccgatactgtggagatggttcctacctggctgagttcct

SEQ ID NO: 676625 - DNA, 97 bp, Homo sapiens
gccatgagcgagcgcctccgtcccagagggtctcgctgttggagttggatttggggctatagaaaagacggcatctgctacctttgagagtgccagg

SEQ ID NO: 676626 - DNA, 83 bp, Homo sapiens
gccggacctcgaccctgagctctatctcagtgtacacgaattcagaaggagctggcggacatcactttagaccctccacctaa

SEQ ID NO: 676627 - DNA, 73 bp, Homo sapiens
gaatagactccatctatccatatgagaaatgctgagccgattatcaggattagcaaatgttgttttgcatgaa

SEQ ID NO: 676628 - DNA, 90 bp, Homo sapiens
acagagctattccagcaccagcagagagagaagacacggttcaatgtgtagaccttctccctctccagtgtctccagcctccaatcccag

SEQ ID NO: 676629 - DNA, 74 bp, Homo sapiens
caccacagccatctcacatttccaagtacattctcaggtggagacctattactttctatgaagacaaaaatttt

SEQ ID NO: 676630 - DNA, 100 bp, Homo sapiens
gagaattatatgcgatggatgtcaacagaggtagaagatgacggtgaaatgttccacacactggatgatggccacacaagatttacagatctaatacagc

SEQ ID NO: 676631 - DNA, 82 bp, Homo sapiens
cgcaccatgccgctcctaagcctgcacagccgcggcggcagcagcagtgagagggtgcggggggcaatggcactgcagctct

SEQ ID NO: 676632 - DNA, 83 bp, Homo sapiens
atggaaacagtgggatgacaaaggtgcttcaaaggagaatgcagaaccctggggttattagtaaaacgattggagaaaggtgg

SEQ ID NO: 676633 - DNA, 100 bp, Homo sapiens
ctgcccctcccgcccgcaactccgccgcccaccatggcttccgaggagctgtacgaggtccacattggccaactgtattcaactgacaagctgatcattg

SEQ ID NO: 676634 - DNA, 75 bp, Homo sapiens
tgagggcctggccactggcttctgcagggatgtgcacgggcaggttggactcttcacagaaattgggcccatgtc

SEQ ID NO: 676635 - DNA, 100 bp, Homo sapiens
gagcctgcgggcgggcggcgcgctgcaggcgagcgggcgagcgggcgcgccctgcaggggtacatgtcccagagcaagcacacggaggcccgggagctca

SEQ ID NO: 676636 - DNA, 132 bp, Homo sapiens
gccgccgcaggccgggaggagccgcagcgccgggcgaccccgcccgggcctcggccctttggagtgaatcaacctggaccttatatcatgtatacaactgtagatgcaaatgggtatctgaaaaatggatca

SEQ ID NO: 676637 - DNA, 100 bp, Homo sapiens
gtggggccgcgtatggagcccccgccccccggagctgccaacattgccaacgccaccgccacgctacacacaggagtttgttcatctggcaaagagactg

SEQ ID NO: 676638 - DNA, 75 bp, Homo sapiens
cgccgacctgcagccggccgggtccctgccccacggcagggcctggtcactgaccaagtctcactgcacgtgcta

SEQ ID NO: 676639 - DNA, 80 bp, Homo sapiens
cactttcgccagcccgtgccgcgagcgcggcctgcaggagtggagcggaggcggagggacaagatcaacaactggatcgt

SEQ ID NO: 676640 - DNA, 83 bp, Homo sapiens
ttttctagaagcctgtcgaaaaatgggggtgcctgaggagcatcagatccatgctgctgctgactcggagccccacagcttgg

SEQ ID NO: 676641 - DNA, 80 bp, Homo sapiens
gtcgtccgttctctcaggctcccgttcagctacgagagtacaaggtagtgggtcgctgcctgcccacccccaaatgccac

SEQ ID NO: 676642 - DNA, 75 bp, Homo sapiens
agcgagaccctgtggtggcttattactggcttacctgttgctttagacaaacatattcttggttttgacacagga

SEQ ID NO: 676643 - DNA, 100 bp, Homo sapiens
gataaacccgggacccacttcactccagtgcctccgacgcctcctgatgcaccagatactgctacaccatctcatcggcatggacctatatgtggcagca

SEQ ID NO: 676644 - DNA, 75 bp, Homo sapiens
gaagagttggatactcagcgtcgctggcagccgctgtacttgcaattctgtggtgttcttggtcacacatttatg

SEQ ID NO: 676645 - DNA, 82 bp, Homo sapiens
cgaaaaagaaccgcgcgggaagccccagcccgcagccctcggggggaacggcaggagcagctgatgggatatcggaagagag

SEQ ID NO: 676646 - DNA, 100 bp, Homo sapiens
ctcactgtcccacagggagctcaaagagtgggccagtgctgtcccacgtccccacccctgtggccagctccgcccactcagcctcagccttgctggggcc

SEQ ID NO: 676647 - DNA, 72 bp, Homo sapiens
gcagtcgggccagacccaggactctgcgactttacgcaccgaccgtcacgagctaacttcctggaagagctt

SEQ ID NO: 676648 - DNA, 100 bp, Homo sapiens
caagcacaccaccttctgaaagaaatggcacttcatcaacttgtcaaggaggtgtcattaacttgtcagtacctatagttctgactgcgactcatgaaga

SEQ ID NO: 676649 - DNA, 131 bp, Homo sapiens
gctgccgcggcggtggcgacggccgcggggactcggagctgagaggagctgctgctcggaccagcgcgattcgccatgaagtcagcgtaaataatgtaacacataaactgtgcagtaaccattgctttaat

SEQ ID NO: 676650 - DNA, 75 bp, Homo sapiens
cgccagggcttctcctatgactacgtgttcgactggaacatgctcaaattttgcatcatcgaggagtcgggagag

SEQ ID NO: 676651 - DNA, 100 bp, Homo sapiens
ctgaacaccatccagaagacacagagtattttaaggatggtgcagttaagaaaccttattctgcaaagacactgtccaacaagaagtcttctgcatcctt

SEQ ID NO: 676652 - DNA, 75 bp, Homo sapiens
aaagcctatcagcatagttaaggcacgtgggaaaaagcgccagataggctggttcccagctaattatgtaaagct

SEQ ID NO: 676653 - DNA, 80 bp, Homo sapiens
ctatggaattctaatttgaaccatgtttggattgaagccgcctctgtattacttaccagatcgcaccccctccctccctg

SEQ ID NO: 676654 - DNA, 100 bp, Homo sapiens
actgcggaaggcggcagggccccctgcctaggaaagccagcttcccagtgatcctgtccatcgaggagcactgcagcgtggagcaacagcgtcacatggc

SEQ ID NO: 676655 - DNA, 83 bp, Homo sapiens
ccgcgggtctgctctgtgtgccatggacgggatgagaaatactggagccggcggtacaagaacaacgaggcagccaagcggtc

SEQ ID NO: 676656 - DNA, 90 bp, Homo sapiens
tggcagctccagttttcaactatgctgacagcatttatcttcagatactatgtctgtagatggacggcagatccgagtagaccaggcagg

SEQ ID NO: 676657 - DNA, 51 bp, Homo sapiens
gatccagggggtcggctgccaggtacaggtaattaataatgcttgtgctac

SEQ ID NO: 676658 - DNA, 101 bp, Homo sapiens
gaatgcagccgtgtgacagtaactgaacattggtctaaagtctttccaaaaggtcaaggttcacaagcctgtggacatctctacagcaatgagtgaacggg

SEQ ID NO: 676659 - DNA, 95 bp, Homo sapiens
tggcggcggcgctggggcccccagaagtgatcgctcagctggagaacgcggctaaagttctgatggcctggcagctgcgattcagccacctcgtg

SEQ ID NO: 676660 - DNA, 101 bp, Homo sapiens
gctgctaccccactcctgggccgtccctgaagcggcgttgacattccccaggagaagaggcccctagaccggttacaagccccagaactggccaacgtggc

SEQ ID NO: 676661 - DNA, 101 bp, Homo sapiens
tggagaactacagaaacctggtctccctaggtgtattacctgactgcttaaccgatggctctgatgtggtcagtgaccttgaacacgaagagatgaaaatc

SEQ ID NO: 676662 - DNA, 74 bp, Homo sapiens
tcgtgttctgatcactactgacttgttggcgcagcccagcctcgaaatgcagaacgacgccggcgagttcgtgg

SEQ ID NO: 676663 - DNA, 100 bp, Homo sapiens
cctgctttctctcgatgaggataacatccctccagaagatggtcaaggtgaagatgttcttaaagggtcccagattacgtatgttacaggtgtagaaggg

SEQ ID NO: 676664 - DNA, 100 bp, Homo sapiens
gaagattttgaagacaatcgtcacttatacagagttttgcggcctccaggtggtggatccaatttttcattaggttttgatgaaccaacagaacaacctg

SEQ ID NO: 676665 - DNA, 73 bp, Homo sapiens
acttcatcatcatctacttcacaggaattgccatttgctatggagttactagtagagaaagcaatcagcagtg

SEQ ID NO: 676666 - DNA, 96 bp, Homo sapiens
aagatcaagcctgtggtggactccttgtgggctctggaggaggtaaatgagctggatggtatcccgttgatcctggacaactgcaacatcagtgac

SEQ ID NO: 676667 - DNA, 82 bp, Homo sapiens
ggacagaccaacctgtcagtgctgcaagaatgtatcctgtcaggtataatgtcagtgaatggcaagaaagttcttcatatgg

SEQ ID NO: 676668 - DNA, 98 bp, Homo sapiens
atgaggaagagtcaggggcacagagagatggagagagacctagttagatgcaaataatacggcactccgaacagacactaaaaacagctctcatctca

SEQ ID NO: 676669 - DNA, 100 bp, Homo sapiens
gtttttcatccgacataatcctacaggtgctaatggacatagggctaaggcaagaggtgaccctggagctgcagggggacgggtctgtgtccaatctgac

SEQ ID NO: 676670 - DNA, 75 bp, Homo sapiens
agcaactgtgggactttttgactacaattctcaacaacagaacttgaaggtgcacattcttgatactgaaagttt

SEQ ID NO: 676671 - DNA, 100 bp, Homo sapiens
ccgtgaggcccagcaagtcctgacttggcacagggcccagcacacgattgctgctaaaattgattcaattcctcacttgaataattccacacctctagtg

SEQ ID NO: 676672 - DNA, 113 bp, Homo sapiens
accctggagcctcagttggaagcagccgatccagcctgcggagcctgtggggcaggtggattctccacagttttcctcgtgcgtactcacggtggaatccgatgtgcattgaa

SEQ ID NO: 676673 - DNA, 96 bp, Homo sapiens
acgcagaggacgccggaacaccctggaagccgagaaatggatgtacagttacccagcacgtgtacctcctcctcctcctattgctcgggctgtagt

SEQ ID NO: 676674 - DNA, 80 bp, Homo sapiens
tggcccctggctccggcctggctcccacggcacagcccggggcaccgtccatggaaggctttgtgatacctgatgaaggg

SEQ ID NO: 676675 - DNA, 100 bp, Homo sapiens
agaaaacaaaaactgatgaccaagagaatgtgtcagccgatgcaccgagtccagcccaggaaaatggagaggtgaaatgacaatggatgctctgttggct

SEQ ID NO: 676676 - DNA, 102 bp, Homo sapiens
gttactggacctcacctctacagcatctatcctcatggatcaactgataagttgccttatgtcaccatgggtgtgatccctcacatccacaaatctctgatt

SEQ ID NO: 676677 - DNA, 75 bp, Homo sapiens
gtgaagaagaaattgctaaattatacaaacagcttgatgacaagatggtgagagatgagaacctcaagtttatga

SEQ ID NO: 676678 - DNA, 100 bp, Homo sapiens
gtgcctgagcccgtgcctgtcttcagatcttcacagcacagttcctgggaaggtggagccaccagcctctccctggtcatttattggggaggcagtgttc

SEQ ID NO: 676679 - DNA, 98 bp, Homo sapiens
cttttctacaaagtcacattcaacgccgccacactgaagaaaattctcattttgaacaacgcttcttcggtgaagttcttttgtacttccaaatgtcg

SEQ ID NO: 676680 - DNA, 75 bp, Homo sapiens
ccacgagtgcacattctgaaaacaggtgattgaacaagaaaagcttgaagctcaagattcaggagaagaggctag

SEQ ID NO: 676681 - DNA, 111 bp, Homo sapiens
acaattctaagccaaggcagctgcggcaacgttgaggcagaatcaaaacctggggaaagaccttaggtattcagagactccagtacttcacttatttgggaaaaaattgaa

SEQ ID NO: 676682 - DNA, 82 bp, Homo sapiens
ccatccccgagcagcggtggaagctggtgaagcaaatcatggaggaggctgtcaccaggaagtttgtgcatgaagacagcag

SEQ ID NO: 676683 - DNA, 50 bp, Homo sapiens
aaagcccaacaccttcccccactgccccccgaatccaagcccaacttcac

SEQ ID NO: 676684 - DNA, 80 bp, Homo sapiens
aggggccaaagccgccgccggtgacctcggcggcagaagtcaattcatctggaaagactatctctgagtcagacttaaac

SEQ ID NO: 676685 - DNA, 75 bp, Homo sapiens
ggctctcagaggtatctgtccagcttcgccgacacgaggtgaccatctgcaattacgaagcatctgccaacccag

SEQ ID NO: 676686 - DNA, 74 bp, Homo sapiens
ggattctcgacctgctaacagaactggaccttttcgtgattacagtggcgagatcttgaacaactgctgcgtca

SEQ ID NO: 676687 - DNA, 90 bp, Homo sapiens
gagatgtgattaatgtattccaccacctccgccagttaagaggaaaaagtggagagactttgctaaagaagtggatgggttacttcgaat

SEQ ID NO: 676688 - DNA, 100 bp, Homo sapiens
cttgtccaggcgggcctcccgtttctggctccgggctgagcttcctggagaagaggaaggtgaaagaaaagatgttgtcccggttaagagtagtttccac

SEQ ID NO: 676689 - DNA, 83 bp, Homo sapiens
ggtttcgggatctcggtgctgcagacggcgagacctcctgcacaggtagttgatgtcacttggcgatattcctgcaaacatga

SEQ ID NO: 676690 - DNA, 59 bp, Homo sapiens
cctgaaaggatgtgcaaccctccaagtggaagtgaaggttgtggatgaacgaaggtacc

SEQ ID NO: 676691 - DNA, 98 bp, Homo sapiens
cagcctcaggcgtgcgcggacggtgtgcggggttcacacctccaggaatggatagatcctctccagataacagcccagtgcacgggatgttacgtcaa

SEQ ID NO: 676692 - DNA, 51 bp, Homo sapiens
ggaagatgtcgaatgaacttgagactttccttatcccagttgattgtgcag

SEQ ID NO: 676693 - DNA, 61 bp, Homo sapiens
ctcacagggctcgacatgcaccagcagatgaggatggcattagccccctgggttggctgct

SEQ ID NO: 676694 - DNA, 51 bp, Homo sapiens
agcggccgggactctgaactatggcgaatttcttgaggttggcaaaaagca

SEQ ID NO: 676695 - DNA, 98 bp, Homo sapiens
tccggtacaagctcctgcgggccggcggggtgtgcttcccgcacagctgcagccatggggtctgaggaccacggcgcccagaaccccagctgtaaaat

SEQ ID NO: 676696 - DNA, 100 bp, Homo sapiens
atagagctaattacaactttcggggcatgtacaatcagagcaaagaccagcctgaagcagtgggagctgctgcccaagcggtagtgaactggagagaaac

SEQ ID NO: 676697 - DNA, 101 bp, Homo sapiens
caaggtgaccgttctggatgctagagtgagtgtgcccacctgcgtaagggggcagagacagtttgtcccgctggctggaagcctggcagtgacacgattaa

SEQ ID NO: 676698 - DNA, 90 bp, Homo sapiens
gcggggtgcgccggcagaggatccagtgttcaccatcctggccccggaagccttgatgacttacaagccctcaaggggaagcattttctc

SEQ ID NO: 676699 - DNA, 100 bp, Homo sapiens
tgctggaccagcagtatgacaccttccacaatggcagctgggtccacctcaccatcaacgcatggagatatggaccaaaaggaacgagacgtgattatga

SEQ ID NO: 676700 - DNA, 83 bp, Homo sapiens
ccgccgtctcttcgagttcttcgtgctgctcaaggttgagcttcagcgacagcgagagtgacaacagcgccgactcctccctg

SEQ ID NO: 676701 - DNA, 83 bp, Homo sapiens
attgacgccatgtcgggttattcgagtgaccgagaccgcggccgggaccgaggccccagtggacaggaaagctaaggcctcag

SEQ ID NO: 676702 - DNA, 87 bp, Homo sapiens
gtctctcgcgggcgggagaacggaaaactcccaacttcctgaaaatatttacaccagcagctccagttcataccaataaagaagatc

SEQ ID NO: 676703 - DNA, 87 bp, Homo sapiens
ctgaggatagtttagaaggatgcttggattgtctgcttcaagccctggctcaaaatagcaagaagttatgaaatggaatggatgggg

SEQ ID NO: 676704 - DNA, 60 bp, Homo sapiens
ggtgtcggtggccggcagtcatctcgcggccgttcagggttcatgtaatcaaagaagttt

SEQ ID NO: 676705 - DNA, 128 bp, Homo sapiens
atggatcagttatgcgccattcacttttgaagggaatttctgcccagatagtgtctgcagctaggcagcagttggggacagctgtagaattggaaatggccaagatgcttgaggaaaatacaaatatc

SEQ ID NO: 676706 - DNA, 97 bp, Homo sapiens
ccaatcccactgatgaggatcagcccatgccaaaatgaagtttaatccctttgtgacttccgaccgaagcaagaatcgcaaaaggcatttcaatgca

SEQ ID NO: 676707 - DNA, 100 bp, Homo sapiens
cagtcgccaactgatgtctacagaaagccaaacttggccctgctggcaacaaagtcatcagtccctctgaagacaggaaacaaccttccaacaaccttga

SEQ ID NO: 676708 - DNA, 75 bp, Homo sapiens
cccccaaactctacgagcctgatcagctccaggagctcaaggctgcttctgatgcttggaagatatcctctcagc

SEQ ID NO: 676709 - DNA, 83 bp, Homo sapiens
ggcccggaggcggcggagggcaccccgggcgggcggcggctgctaacccagcgggtgccgcttctccacccgaggcttccacc

SEQ ID NO: 676710 - DNA, 75 bp, Homo sapiens
gcagcaaaatgagctcttcagaagaggattatatgcgtcaggcaggagaagtgacttatgcagatgctcacaagg

SEQ ID NO: 676711 - DNA, 74 bp, Homo sapiens
agatgctggcatgaggaaagacaagatgaccaagcgagacgtgcctggcttcgccatcgggggcctgagcgggg

SEQ ID NO: 676712 - DNA, 100 bp, Homo sapiens
tttacggcatgtacttctgcatgaacatctccagccagggtgtcatggagaaactccagctgggcccagagattctgcagcgggaaaatccaaggcttat

SEQ ID NO: 676713 - DNA, 83 bp, Homo sapiens
cttccaggacgagacgggcaagaaccgagcttgtcaggaagatcggaggtgccaagtagcagagaaagcatcccccagctctg

SEQ ID NO: 676714 - DNA, 74 bp, Homo sapiens
ctcatgtccccgtctgccaaggagctggtgctgcggggggatatgagactttctactcggaatatcctgagtgt

SEQ ID NO: 676715 - DNA, 82 bp, Homo sapiens
gacagagccaaaatcagagctggaacctgaggagagaggttggaaacacttttactgtattatctatgaagaaacgtttttg

SEQ ID NO: 676716 - DNA, 99 bp, Homo sapiens
gggcaagaagatatgaacctgagccttcagtcaagaccctccagcttgccttgtcctctacaagcctggtgatgcccacacaccacttacttcgtgcgc

SEQ ID NO: 676717 - DNA, 117 bp, Homo sapiens
tgccccctcacatctatgccatcacagacaccgcctacaggagtatgatgcaaggtgtcagcggtgcccactgtgctggccatgaagaatggggacgtggtggacaagtttgtgggc

SEQ ID NO: 676718 - DNA, 101 bp, Homo sapiens
cttctgataactcaggatttacttgaaatgaaaggagattccaacctacttcaggaattgaatgatctggcacgggaccctccagcacagtgttcagcagg

SEQ ID NO: 676719 - DNA, 90 bp, Homo sapiens
caactatggaacaacaacttgcagctcatctctattgatggtcatactccctgtcacaaactccagctgaactaacttggaggaggatct

SEQ ID NO: 676720 - DNA, 87 bp, Homo sapiens
tttgtctttttgaggatgacaagaactcttgaagaccaggaataacaacctccgcgctctggcagctcctcttccgtgtgctctcgc

SEQ ID NO: 676721 - DNA, 74 bp, Homo sapiens
cgaacagctcttcaccatgaaatggatagatgaggaaggttccccacgtgtgaaagtcaagaatctgattgaaa

SEQ ID NO: 676722 - DNA, 98 bp, Homo sapiens
cctgggagacccgccgaattccgggagccggaccgggaccaggaccgggccccactttccaatgactccggaattgatgataaaagcctgtagctttt

SEQ ID NO: 676723 - DNA, 97 bp, Homo sapiens
tttggagaagttgaggaccttgtcgctcatttggcagaagacacctagctcccctgtttgacaaccctaagttggataaggagctgcgggcaatgct

SEQ ID NO: 676724 - DNA, 100 bp, Homo sapiens
tccctgtcccatcgcaaacccaaagatccccgttcctggagattctgattgagggaggagtctgctactagtcttatcagctcttaaaaacagaaactca

SEQ ID NO: 676725 - DNA, 48 bp, Homo sapiens
gcagttgcgtgttgttcagaaagctcaaggatctaaatttacttgatc

SEQ ID NO: 676726 - DNA, 48 bp, Homo sapiens
gcaccataggccgaagcacccgggtggaagaaagtgataacgagtggt

SEQ ID NO: 676727 - DNA, 100 bp, Homo sapiens
tgtcaggttgaaaatggaagagtaattgcctgctttgattccctaaaggtatgagaaagtgccagtcatcttggttgggaacaaagtggacctggaaagt

SEQ ID NO: 676728 - DNA, 75 bp, Homo sapiens
gcctcccaggtagctgggattacagagaaatgttctttactaccatggaaagccaccttctgcgctgcaaagtgt

SEQ ID NO: 676729 - DNA, 82 bp, Homo sapiens
gcataagaatgtcctggcagcattcagccagtattttagtttttgaatcagagccgacaggcacttgaattgaaaatggaaa

SEQ ID NO: 676730 - DNA, 83 bp, Homo sapiens
cggggactgtgcacgaggttggcgacgccgccccgccgggccccagatcagacaatgcagatcttcgtgaagactctgactgg

SEQ ID NO: 676731 - DNA, 100 bp, Homo sapiens
caaaatatggtgtgaaggttggcctgacaaattatgctgcagcatattgtactggcctgctgctggcccgcagggtgtctttcctgaagactatcttccc

SEQ ID NO: 676732 - DNA, 98 bp, Homo sapiens
tctgaactcaaagacgacttgcttttgtatcaggacgaggaggcgctgaacgactccattatttctgaaatttaaaagcctgttgattcaagaacttt

SEQ ID NO: 676733 - DNA, 100 bp, Homo sapiens
ttttgcttctccataacgagatggtgtctggagtgtacaagtccgcggagcagggggaggtggttgatgacccaagcctccccaatgatgaaggcatcac

SEQ ID NO: 676734 - DNA, 76 bp, Homo sapiens
cgcatcacgtgtctgcactcgctttcctcggattcccggatgtggaatgccagaggattcaacatgagcataccta

SEQ ID NO: 676735 - DNA, 90 bp, Homo sapiens
tctgtctgcaaatatccggaattccattgcagtatcggattaggaactgtggaaggtgcatcagtgaagaaatggaccaatgtgtataat

SEQ ID NO: 676736 - DNA, 75 bp, Homo sapiens
gtctgagactcctgctcagtgtagcattaaggcagaatccagagaccacatttgaagtatatgttgaagtggcct

SEQ ID NO: 676737 - DNA, 126 bp, Homo sapiens
acaaatcagagagccagtagacttacagaaaaagaagaagcggaaacaacgttctcccgcaaaagagacaaggacggcagcaaggtgacaacagtggtggcaactcctgggcagggtccagacagg

SEQ ID NO: 676738 - DNA, 99 bp, Homo sapiens
tgccaggcgctcgggggccgaactggccctggactacctctgcagacaatgcagatcttcgtgaagactctgactggtaagaccatcaccctcgaggtt

SEQ ID NO: 676739 - DNA, 98 bp, Homo sapiens
ggcgagcggtgacctggaccacggcgcagacgcgggcgagctgcggctcggacgccagcggacacgcgggcgaggcctctggctgtacctggcaggga

SEQ ID NO: 676740 - DNA, 83 bp, Homo sapiens
gtttccggaagtgtatagggaaacctgggggctccctggacaactccgagcaggccaccagcttgggctccccacggagggca

SEQ ID NO: 676741 - DNA, 100 bp, Homo sapiens
gggcctggtacaggtcaccacgcaccgactatgtcgcctgccaccgagccgggcccacctccccaccaaggaagggaagacccttcgcacagtggagccg

SEQ ID NO: 676742 - DNA, 82 bp, Homo sapiens
gcatcctggacagcgcgcccaccgttgcaggaagaggcagaggaagaggaagaggaagaggacgtggccgtggcagaggaag

SEQ ID NO: 676743 - DNA, 83 bp, Homo sapiens
ccgacatggaacagggactcactgggggtgtacgcatgatcagcctctcctattcccgaatctccttggctgacatcgcccag

SEQ ID NO: 676744 - DNA, 75 bp, Homo sapiens
gagctgaacctgaggaccattattttttaatgcttgctaagtactgtgacaacttactgaagaagtcagcgaaag

SEQ ID NO: 676745 - DNA, 50 bp, Homo sapiens
gccctaagccccggcccagcccgagcagaatggcgcatgatgaagaaccg

SEQ ID NO: 676746 - DNA, 83 bp, Homo sapiens
gcaaaggtccacagagcagtaagttgcggagcaggagctggccaacctggagaagtggaaggagcagaacagagctaaaccgg

SEQ ID NO: 676747 - DNA, 130 bp, Homo sapiens
tggacaagtttgcagatcgggagcgcaaggtcgccctcaaggccatgatcaaaacgagggcatcctggctgtttcacccgtggacttgaacttgccattggactgagctctttctcagaagctgctacaa

SEQ ID NO: 676748 - DNA, 98 bp, Homo sapiens
aggaatttaaaggcaatggacataacaggagcatcaggagtggagtcaacatatcaatggagcaagtcacagtcgtcgatgccagcttcttcttgaaa

SEQ ID NO: 676749 - DNA, 60 bp, Homo sapiens
ctggactaaagatgagttaaaagaagctctggatggtggtggaggtggatacagcagtcg

SEQ ID NO: 676750 - DNA, 98 bp, Homo sapiens
ggatctggtgtaccaggcgaagctggccgagcaggctgagcgatacgacgatcgaagcaaagctgagatggatttgaaggagctgagcgagtcggtcc

SEQ ID NO: 676751 - DNA, 100 bp, Homo sapiens
ctgctaccccagccagtgtcaacacgacaccggataaaccaaagacagcatctgagcacagaaagtgtccgagctgcaggaggagggaatgaacgccatc

SEQ ID NO: 676752 - DNA, 82 bp, Homo sapiens
gcggatagtactgccaccagagtatcccatgaaaccaccaagcattattctcctaacgagaaccatggagtctggcagtacc

SEQ ID NO: 676753 - DNA, 75 bp, Homo sapiens
taaagacccatttctctatgagaatacaaatcatattcccctgaagccctctggagatacctcacagctcgccat

SEQ ID NO: 676754 - DNA, 80 bp, Homo sapiens
gcgcgttgctgctgctgccggtcgagcagctttgtgacaacaaactgtgctctgcagttttcatcccgtggaatccgacc

SEQ ID NO: 676755 - DNA, 76 bp, Homo sapiens
gtcttggcctcggaggatgcagcctttggactcaaggcagaaggagaagacagcctgaagaagatgcagctgatgg

SEQ ID NO: 676756 - DNA, 97 bp, Homo sapiens
caaaaaagaaaagttgtttcctccaacattgatgttcctccagcaagatttagatggtgctctactctcggggccagatggtgataggaatgtgaat

SEQ ID NO: 676757 - DNA, 75 bp, Homo sapiens
accccgcctcttacagtcacgagaggagaggagacgccgtgagcgggacgaccagatgtaccgagagcggctgcg

SEQ ID NO: 676758 - DNA, 100 bp, Homo sapiens
taaaagagcgtgtttcttcggggcttgccgttcgttcgtttccagcctcaggaatttatggtcgcctttttgaatgagtgagaaggcaaccaaagtgcag

SEQ ID NO: 676759 - DNA, 51 bp, Homo sapiens
ccaggccccggcagcgcctgggacaaggtgtggaaacaggaagagaactag

SEQ ID NO: 676760 - DNA, 82 bp, Homo sapiens
tcaccaccaatcagatgtctgtctgccggttgtggagcgagtggactcctgcgcctccatgtacagccgctccatccagggc

SEQ ID NO: 676761 - DNA, 100 bp, Homo sapiens
ccgggctgatgtgtacgtgggcgtggatgtgtttgctcgagggaacgtggtcggaggccgattcgacacagacaaggattgtcagtggcttcgccccgag

SEQ ID NO: 676762 - DNA, 75 bp, Homo sapiens
acgctttactctaccagagcaaggcttagggagcacctggccaaggggcagcgcatgctggcaggcgagggcatg

SEQ ID NO: 676763 - DNA, 83 bp, Homo sapiens
cgacgccacctccgctgctgctgctgctcttcccgctgctgctcttctccaggctctgtgtttgcgtgtgaacttggacatgg

SEQ ID NO: 676764 - DNA, 75 bp, Homo sapiens
gacggctactatgaagcagaatttggacaagaacgcagacctttgttgggtccatctatggtcatgattctgacc

SEQ ID NO: 676765 - DNA, 82 bp, Homo sapiens
cgggagccccagggcagccgccccgccgagtcgcagatgaggagcgggaaggcctcctgcaccctggagaccgtgtgggaag

SEQ ID NO: 676766 - DNA, 97 bp, Homo sapiens
atcagcctcctccttaacttcctgcttgcagcgtttgatcctttgcgtgtgaacttggacatgggcaaagcggtgtatggatggatgatgatgaaag

SEQ ID NO: 676767 - DNA, 99 bp, Homo sapiens
ctgttgctgaaacttactatcagacagattcatgatgttgctatcaaaagttgagaaattgtcagaagaaatcatggagataatgcaaaatttaagtag

SEQ ID NO: 676768 - DNA, 100 bp, Homo sapiens
accgaaggcctagatgtcttgcggcaaattgagagtaatcaagtcagaggattatatgacttttatctgcctagagaagaactatggatctacaacatgg

SEQ ID NO: 676769 - DNA, 100 bp, Homo sapiens
ccctgtcgtctgtgttgtgactgctttggacgtgggagtcacctgaaagccaggaaatggctgacttcaaaatttctgaggagtgcatcgcacagtggaa

SEQ ID NO: 676770 - DNA, 100 bp, Homo sapiens
gcttgggaaggggaaggaaacctctctgaaatctgacacctgctctcccggcaaggaaacttcgcaggctgatagttttgaggcagctgtgccatcaaat

SEQ ID NO: 676771 - DNA, 101 bp, Homo sapiens
atgtggagaagatgttttcggtggctatgatgatggttggctatccagaagcagcaaggtctagcaattccaaaatcaccaccacgctgggtctggttgtc

SEQ ID NO: 676772 - DNA, 75 bp, Homo sapiens
ccagggaaccctggtcaccgtctcctcagaccaagatacttggtagtgaccgggtgaagctgatggagagtctag

SEQ ID NO: 676773 - DNA, 74 bp, Homo sapiens
tcctttggtatccgcaaactctacatgaaaagtctgttaaaaatctttgcgatacactctgtgcagttttagag

SEQ ID NO: 676774 - DNA, 98 bp, Homo sapiens
gataagctatctgaagacattgacctgctgaaatccaggatagagagtgaggacgagattgaggagctgcgggccgagatgctggagatgcgggacgt

SEQ ID NO: 676775 - DNA, 101 bp, Homo sapiens
accagtgggagagatggtggaagaacccagagcaagctttatcctgtggataaacgcagagtgaacgagtttggggagtcctacgaggagaaggccacgcg

SEQ ID NO: 676776 - DNA, 50 bp, Homo sapiens
caaggaaatcccttcgaaagggggagagcctggggatgtacaggagatgc

SEQ ID NO: 676777 - DNA, 50 bp, Homo sapiens
tgaaggagtgcagaggcatcacctgaaagatggagtctccttctgtcacc

SEQ ID NO: 676778 - DNA, 100 bp, Homo sapiens
aggaagtttacttatctgggtccttcaacaactggagtaaacttcccctcaccagaagaaactggcgatggaatatgagaggagccctctggaaagaaaa

SEQ ID NO: 676779 - DNA, 100 bp, Homo sapiens
ggcatcgtggcatttccgagattggagcctaacagtgtagatcctgagaacatcaccgaaatgatgtacagttacccagcacgtgtacctcctcctcctc

SEQ ID NO: 676780 - DNA, 100 bp, Homo sapiens
gttgccgaaagctacagcccagccatcccgattcccctggcgcggactctggcaccaacaaaactatctctttgaggttcttgggtgtctctggggagtc

SEQ ID NO: 676781 - DNA, 101 bp, Homo sapiens
gattttataggcacctattaaatcaagcagttggtgaagaggaagtacctaaatgcagctttcgtgaagccaggcacgagatgtgcgtaccaatgaagtgg

SEQ ID NO: 676782 - DNA, 82 bp, Homo sapiens
cagaggacgcgggctctgaggatgagctggaggagggggtttggtgcacctcgatttggaggaagtagggcagggcccttat

SEQ ID NO: 676783 - DNA, 97 bp, Homo sapiens
gcgacgttattctgatctcaccaccctggtggcctttccctccagctctgtctatcctaccaaggcctttgaactggccacaggtgactatttgttt

SEQ ID NO: 676784 - DNA, 95 bp, Homo sapiens
tgagaaccgtttacttccagaagattggtggagcttgatctgaagattccctataaggagcccctgctggtgcaccagaactaccgggggccatc

SEQ ID NO: 676785 - DNA, 100 bp, Homo sapiens
tggtagagccggccgagctgaggcggtcgcggccatgaaggttctggctccttggcagcaatggctgtatttgaagataagtttaggccagacatggagg

SEQ ID NO: 676786 - DNA, 101 bp, Homo sapiens
tgttccacattgctgcatttgttctgcctgacttggaccctggaaaacctggccctcttcaatttctgacaaaaggggataaaaacattcagatggcagat

SEQ ID NO: 676787 - DNA, 75 bp, Homo sapiens
acaggaactacgtcccggggaaggaatgcccaattcttctggactcatgaaccgtcgtgatgccattgccaaaac

SEQ ID NO: 676788 - DNA, 97 bp, Homo sapiens
ggagatgctggctaacaccgtggagaaatcagaagggccaagagtcgaagctaaaccagaagttcaatctcagccacctcgtgtgcgtgaacaacga

SEQ ID NO: 676789 - DNA, 100 bp, Homo sapiens
gagtcctccctgttcatcattgcctccaagcatacaatgttacagctgatgaaggaggcaggctgctataatggaatcacatccagggatgattttcctg

SEQ ID NO: 676790 - DNA, 98 bp, Homo sapiens
ccaattccggacacataacaagcagcagtgaggacaccaaagacctccaatggaagtccgggcacatggcggagagcctcaccaacatgccacggcac

SEQ ID NO: 676791 - DNA, 100 bp, Homo sapiens
ggaaaccccagggtctggaggagagcaaccaggaagctcttggggtgacttcgttttccttcagacccaacatgagtgaagtttcctgcaagaaacggga

SEQ ID NO: 676792 - DNA, 100 bp, Homo sapiens
tcagcatgaaagcagtaatcagatgtttgccatgaaagaaataaggcttcccaagctgagcaactgggggcatttgcagctggagtcaagcagatgttag

SEQ ID NO: 676793 - DNA, 98 bp, Homo sapiens
cttgtttgtgttgtgtgtggaaatggcgaactcggcaaatacaaacaccgtggatgtgatggagctgcttgaagaagatctcacatgccctatttgtt

SEQ ID NO: 676794 - DNA, 95 bp, Homo sapiens
acgtccgcggaggatctggggacatcttactggtccatgctactgagactgacaggaaagggtgtttgctttgatgtacctaccgcatcagtaac

SEQ ID NO: 676795 - DNA, 74 bp, Homo sapiens
gtagagatatagttggcaacctcactgagttagaatcagagtgatgtcttggcattgcccattttcaagcagga

SEQ ID NO: 676796 - DNA, 101 bp, Homo sapiens
cggcgaggggggagcctcagcaggattgctgtgtgaaaaccgagctgctgggagaagacaatgcagatcttcgtgaagactctgactggtaagaccatcac

SEQ ID NO: 676797 - DNA, 99 bp, Homo sapiens
aagggattaaaggctagtctcaggctggggatggctcctgtctatttcttctctctcagagactgcagactgtgccctgtccacggtgcctcctgcatg

SEQ ID NO: 676798 - DNA, 96 bp, Homo sapiens
aagagatgtggggggattctcgacctgctaacagaactggaccttttcgttttccagatttaggagacttcagaaaggtggggcagatagaatgga

SEQ ID NO: 676799 - DNA, 90 bp, Homo sapiens
gcgaggagtccatggacttcctggataagagcacagaaactggcgatggaatatgagaggagccctctggaaagaaaaggacagaccctg

SEQ ID NO: 676800 - DNA, 82 bp, Homo sapiens
atgggaatttccaaggggattcaaacttcaacagaatgtggcaaccaggtggctccgctgccggatgggagtgccccagtgt

SEQ ID NO: 676801 - DNA, 82 bp, Homo sapiens
agcgacagctgtcagaggggcaggagcttctgggagccaccgtctgaagccgccgccatgtctgcgcatctgcaatggatgg

SEQ ID NO: 676802 - DNA, 100 bp, Homo sapiens
gcccttggacaaagcctgaaaccaggtgtgaaatctaagaatcccctgccaactcttgagggctcaatccagaatgttgaattgaagtactgcagcacat

SEQ ID NO: 676803 - DNA, 83 bp, Homo sapiens
ggcggccttcatgctgggctcgctgctgcggacgttcaagcagaaagcacacctgagctgctcttaatatcatctcttgaaga

SEQ ID NO: 676804 - DNA, 97 bp, Homo sapiens
ggaggggttcacgcggtcccgccggatcccgaagacgagggcctggaggaaacaggtgctggagaatctggtaaaagcaccattgtgaagcagatga

SEQ ID NO: 676805 - DNA, 100 bp, Homo sapiens
gagaacgactctacaatgttgtagtagacacagaaggttatgtggtccgaatcagtggtgggaacgacaaacaaggtttccccatgaagcagggtgtctt

SEQ ID NO: 676806 - DNA, 100 bp, Homo sapiens
aagacgtcgaggggacgattggaatgacagaagtctcaggggatccagaactgcagccagtccttgctgggctgttcctgtccatgtgcctggtcacggt

SEQ ID NO: 676807 - DNA, 97 bp, Homo sapiens
aaacaagtaaaactggatgagcagctcatggagggtgtgctggagtatctgtctgccttcgatgaagaaaccacggaagtttgttctctggacactc

SEQ ID NO: 676808 - DNA, 100 bp, Homo sapiens
tagctcagcaattcttaccttgtgaccctggcaaagatgagagtgcacatttcgtcctgcctgaaggtccaggagcagatggccaactgccccaagttcg

SEQ ID NO: 676809 - DNA, 74 bp, Homo sapiens
gagaatatggtgcagaggccctccacgaaaatggtgtgaatggaacattaacttcaaatgtagcagactctccc

SEQ ID NO: 676810 - DNA, 82 bp, Homo sapiens
agagaagaggactcttgctatggttcaggtcagaaaaagagtgcacgccagtatcacgtacagttctttggtgacgccccag

SEQ ID NO: 676811 - DNA, 83 bp, Homo sapiens
gagcgcaacactcgcttggttggggagatcggcgcttggccggagggccctcctggacccgggagcggaccctggtggcggtg

SEQ ID NO: 676812 - DNA, 100 bp, Homo sapiens
gccgtcccccagctgcgcaaccctaggaactctcgggtttccctaggacttctgcatgcccatgccacacatatcctgtggcccccagagcgctggcaga

SEQ ID NO: 676813 - DNA, 100 bp, Homo sapiens
tacaacgcccatgcagcaaacattgtcaccgccatctacattgcctgtggacaggctgaattgcatcatcagcagatggcggatccagacttgttggaag

SEQ ID NO: 676814 - DNA, 75 bp, Homo sapiens
gaagagccatggatagtagaaggagaattcctacttcagagctatccagattggaggtggacacaaaggaagagg

SEQ ID NO: 676815 - DNA, 83 bp, Homo sapiens
gttggaagcagccgatccagcctgcggagcctgtggggcagacctgtcatttactccatcctttatagtgatgctacaggacg

SEQ ID NO: 676816 - DNA, 99 bp, Homo sapiens
ttggcaagaaaaccccgaggagccctgttccaaagcctcctggaccgtccaagaattccctgacatcgtggagttctgcgaggccatggccaacgccgg

SEQ ID NO: 676817 - DNA, 75 bp, Homo sapiens
gtaaaaatacgcagtacagtcccagaaactggcagacctttcacttcgtatccaacaaattgaaacaactctcaa

SEQ ID NO: 676818 - DNA, 90 bp, Homo sapiens
ctcatgggtagagtggaaaaggagcattggatatgatgatactgatgagtcccactgtgctgaggcaggcgacaagtcactctccaatgt

SEQ ID NO: 676819 - DNA, 90 bp, Homo sapiens
cagtttgatgcgtcacactacgacagtgagaaaggaggtcatcctgtacagttctacagcatgaataggcctgcctctcgccatactccc

SEQ ID NO: 676820 - DNA, 101 bp, Homo sapiens
ttgtggagaatgatctgtacatagattttggtggaaagtttcattgtgtatgtagaagaccagaagtggatggagaatttagatggtgctctactctcggg

SEQ ID NO: 676821 - DNA, 82 bp, Homo sapiens
tttggaaatgtcatccgatggcacaatcaggcataagatgcacatttttctgctctggagccgggaatgaaatattcttgag

SEQ ID NO: 676822 - DNA, 82 bp, Homo sapiens
ggctggggttgctgctttttcagggttatatggaaaagattaaaccaatggtgagagatggagtttattttctatatgaggc

SEQ ID NO: 676823 - DNA, 75 bp, Homo sapiens
ctcatgctcagtttggttctgagtctcctcaagctgggatcagtgtcacatttgaagacgagcactgaggatgag

SEQ ID NO: 676824 - DNA, 80 bp, Homo sapiens
ccagtgagtccagctcctctgacagcgaagactccgaaacagacctgcctagagctggaacgttacctccagagcgagcc

SEQ ID NO: 676825 - DNA, 90 bp, Homo sapiens
gccatgttgaagtcagaatggcctgtattcactatcttcgagagaacagagagaaatttgaagcggacaccagcagtgaaaacactgtgg

SEQ ID NO: 676826 - DNA, 74 bp, Homo sapiens
ttttttcaagaactgccgtcttctttgcctgcactaatgaaatgcatcttctgcagacaccgggttaagagggt

SEQ ID NO: 676827 - DNA, 98 bp, Homo sapiens
agcccttcagtactgttgtacggaaagatatgatccgccaaatgatgattaaaatatttcgctgcattgagccagagctgaacaacctaattgcatta

SEQ ID NO: 676828 - DNA, 96 bp, Homo sapiens
ttcaggaacttttgggaaaaggagcaagtgtgcttgcagtagatgaaaatgcataatttaccctcaaaacaaggatggtgaaccagaatacaatcc

SEQ ID NO: 676829 - DNA, 73 bp, Homo sapiens
ttacctttattggagacaaaaccgaaaatcaagaagatctgggcctgtgggaagagaaatttggaaaatttgt

SEQ ID NO: 676830 - DNA, 75 bp, Homo sapiens
ggcagaggagaccgaaaagtggatggaggaggcgatgcacatggtagctacagcaagctgggtagcaggcagatc

SEQ ID NO: 676831 - DNA, 78 bp, Homo sapiens
ctgaggaagcccaactcctatgagctcctctctggcagagccctcaggactgcccccggaccctgctctcacccctgg

SEQ ID NO: 676832 - DNA, 50 bp, Homo sapiens
acaagcgcacggagccctcaagttggatatgtcaagtgaccagatagctg

SEQ ID NO: 676833 - DNA, 74 bp, Homo sapiens
tcggaccccgactgccgctggtgcccggccccggactgcggtgtgggccaaactgaaattgcagaaggcttcag

SEQ ID NO: 676834 - DNA, 75 bp, Homo sapiens
tctgctcttctgcctcttgatctccgccaccgtcttcaggccagaacatccagtcatggataaaaatgagctggt

SEQ ID NO: 676835 - DNA, 83 bp, Homo sapiens
ctcaggaccatgatggctcagtttcccacagctatgaatgcatgccaatgaagatgtggaaagaatgttactaggaaacaagt

SEQ ID NO: 676836 - DNA, 100 bp, Homo sapiens
ccgcccgcgccccggggcagcagcgcgtcccaggaggagcaggacgaggaggattgttcaagtttagaagaatacaacattgccgcagcattactccctt

SEQ ID NO: 676837 - DNA, 100 bp, Homo sapiens
ccgctgccggctccagggagccccgtgtcaagcaagaacatccatgatagcagtcttctgtaaatcgaacttttcaagaattctctgaaggaaccaagta

SEQ ID NO: 676838 - DNA, 87 bp, Homo sapiens
cccaggccctgggacaagcactacagctcaacaggagcctcaccagcttagaaaaaggaaccagtgatttacttgcttgggaccccc

SEQ ID NO: 676839 - DNA, 82 bp, Homo sapiens
ctaaagcagcgtgcgttcagccctgggctgtgagaaacgaccgaaacaagaagaagaaggaggtgcccaagcccgagtgctc

SEQ ID NO: 676840 - DNA, 88 bp, Homo sapiens
agacgaagacagtccctggatcaccgacagcacagacagaatccctgctaccagacactgtaatttatgatcgactggcagagacgtc

SEQ ID NO: 676841 - DNA, 100 bp, Homo sapiens
gtacggaaagaagatatgacctatgcagttcgaaaactggataacactaagtttagatctcatgaggatgacagtgatgggattccgtggtcagaagaac

SEQ ID NO: 676842 - DNA, 100 bp, Homo sapiens
gtgtgccccttctccacccagagttacggctagatgaggctcaagaagcagaatgccaggccttgaggctacagctccagcaggaaatggagctgctcaa

SEQ ID NO: 676843 - DNA, 75 bp, Homo sapiens
accgagagcgtgaccgagagcgcgaatatcgtcatcgttagaagtgccctgtgggacatcgagaccggccagcag

SEQ ID NO: 676844 - DNA, 100 bp, Homo sapiens
gccggctcccctctcaggacaacccagatgtgcaacaaagtgcgatgagtttatgtggccgaggcagacaagtggaattaggccttgctgcaggggactt

SEQ ID NO: 676845 - DNA, 100 bp, Homo sapiens
tcggctccgtgttgtgatgacaggagaatgtgtgtgtgtcccgggcccagacgaattgagctgcctggagttcagcctcagaatccaggagttcattgaa

SEQ ID NO: 676846 - DNA, 75 bp, Homo sapiens
accgttcctccactgttcgctggttgacccgggcagcggagagaggaggcggggccactaaccaaagtgactata

SEQ ID NO: 676847 - DNA, 83 bp, Homo sapiens
ctgatgtgaaaaataccacgacaaaaccaccctaaagtcaatgaaaggattctattttgcaaagctgtattatgaagctaaag

SEQ ID NO: 676848 - DNA, 75 bp, Homo sapiens
gccccctaccaccccttcactcacattgataaggtgttcaaacataaggaactgcaacagcagctcgtggatgcc

SEQ ID NO: 676849 - DNA, 83 bp, Homo sapiens
agtttcctgaggccaccccagacctgcagaattgtgaatgaaaactttgccattgatttgatagcagagcagcccgtgagcga

SEQ ID NO: 676850 - DNA, 100 bp, Homo sapiens
gctcactgcacgccagaacctgaggagagaatggcatgccagatgaggccagaccatggacactacacccagcaatagagacgggactgcggaggaagga

SEQ ID NO: 676851 - DNA, 75 bp, Homo sapiens
cagccacgtcgctttgttttcccacgctaggagctaccacaacagttttgggaggtcatcagtgatgagcatggg

SEQ ID NO: 676852 - DNA, 75 bp, Homo sapiens
caacaccctgctcggccaggagaaggaaactgtcatttttattccagacatctttccaggaacagcgtgaggagg

SEQ ID NO: 676853 - DNA, 82 bp, Homo sapiens
gctagcctggcttaaggtcatggagaaagcccacatcaacctggtgaggaccatggccaacctggagcgcaccttcatcgcc

SEQ ID NO: 676854 - DNA, 50 bp, Homo sapiens
gttcagccctttgatgaccgcagcaggcagcctggcatcctcgctacaac

SEQ ID NO: 676855 - DNA, 75 bp, Homo sapiens
tttgtgttgatgaagatgaaagagactgcagtattcaagtcaaacaacgttgaaatggattgggtgttgaagcat

SEQ ID NO: 676856 - DNA, 132 bp, Homo sapiens
cacaagtctctgaagccgtgcccgttcttcctggagggaaagtgccgctttaaggagaactgcagaacggcgccggatcccaagctgaccgtgtccacggctgcagcccagcagctggacccccaagagcac

SEQ ID NO: 676857 - DNA, 75 bp, Homo sapiens
cctcacatctatgccatcacagacaccgcctacaggagtatgatgcaagattctgaaagtcaagaagacatcatc

SEQ ID NO: 676858 - DNA, 115 bp, Homo sapiens
aaatactttgcacttttgattgtgtattatggataccaaggaagagaagaaggaacggaaacaaagttattttgctcggcagaagcaacaaattacccacctgcatgagaggata

SEQ ID NO: 676859 - DNA, 82 bp, Homo sapiens
ggaaggaacgaggcaaggagctaaagcagcgtgcgttcagccctgggaaaccccagttagtgaccgggggtgagagtttcag

SEQ ID NO: 676860 - DNA, 101 bp, Homo sapiens
gcaagggacagagccatggatcatggagccaagcattccagtaggtacctgtgcagatgggaagcttgaacgtggggccaagacatcaagagtagagcagc

SEQ ID NO: 676861 - DNA, 97 bp, Homo sapiens
tggcttctttccctcagagctccagcgactgtaccccaatggggtcccctttaagacagggggggccttcgccctggaagcctggacgccgagatag

SEQ ID NO: 676862 - DNA, 74 bp, Homo sapiens
cggcggtgtgggcgcgtcaggccgcgacgagggcgctgagatctgaattccagagaacaggagacctgccagcc

SEQ ID NO: 676863 - DNA, 83 bp, Homo sapiens
ccgcgggtccgtgcgcccagcgtcccagggcccaggccgagcaggaattgaatgatctggcacgggaccctccagcacagtgt

SEQ ID NO: 676864 - DNA, 83 bp, Homo sapiens
caaagatctcgtacaagatccttcttttttggtgccctggttgtcagatgttggaaagcagtaggacggaacatactcttcgt

SEQ ID NO: 676865 - DNA, 50 bp, Homo sapiens
aaagggaaggataaccccatcacaggttgtcggggccaaagtggtaacga

SEQ ID NO: 676866 - DNA, 101 bp, Homo sapiens
ggttgctcaatgtctatgacacacgcaagatggctgtcctctctaaggaatatggttttgtgcttctaactggtgctgccagctttataatggtggcccac

SEQ ID NO: 676867 - DNA, 75 bp, Homo sapiens
aagagcgtccaccggcggctccgcaagaagtaccgagaaggtgcagattcactttataggaacagcttcagcttc

SEQ ID NO: 676868 - DNA, 109 bp, Homo sapiens
gccttcaattttggggctccctcgggcacctccggtaccgctgcagccaccgcggcccccgcgggttctcctgaaaagaaagctgaacattcatctataaatcaagaaa

SEQ ID NO: 676869 - DNA, 50 bp, Homo sapiens
gctggtcaccactccggcaccagggagtgcatccgccccaacccttttcc

SEQ ID NO: 676870 - DNA, 100 bp, Homo sapiens
ccgccggctccctcccccgcgtccctgcgaccgccgcggcgaagatggtacactgatgctgaagtactatgagccttcggaacttgtggagagactacaa

SEQ ID NO: 676871 - DNA, 82 bp, Homo sapiens
ctgttcctggaggaatccgagaagagcagagcggagggagccccagacacggttcgagaacatcatcgaaaattaagaaagg

SEQ ID NO: 676872 - DNA, 90 bp, Homo sapiens
gtgattgtgaggcctcctcagccacgtggaacttgtgaaggaagaagtgttctggaggaactacttttaccgcgtctccctgattaagca

SEQ ID NO: 676873 - DNA, 101 bp, Homo sapiens
ggctcgataagtgggttgacctgaccatggacgacattcgaaggatggaagaagagacgaagagacagctggatgaagttcctggtagagttacacagttg

SEQ ID NO: 676874 - DNA, 87 bp, Homo sapiens
actccctggaaacctagaaatgttactccacaggatccgctgaacataggatgttgccacaaaatctacctcgtgtatttttctctt

SEQ ID NO: 676875 - DNA, 98 bp, Homo sapiens
gccagcgcctcttctaccggggcaagcagtctgcgggccaggcatcgacatccgcaacgactatcagcagctgaagcgcctggagaactgcacggtga

SEQ ID NO: 676876 - DNA, 74 bp, Homo sapiens
cctcctccgtttctgtatccccacgagagagacaagagagacacctccaacttcgacaaagagttcaccagaca

SEQ ID NO: 676877 - DNA, 51 bp, Homo sapiens
tgcttatggctataaaattacaggttagcatggcctcattgaaagaactag

SEQ ID NO: 676878 - DNA, 82 bp, Homo sapiens
tctgattaaaattgaaacctggcacaaaccagatcttggcacgcaggagaatggaaggatcgaatcatatttgtaaccaaag

SEQ ID NO: 676879 - DNA, 100 bp, Homo sapiens
ccttctcatcagctacaccaccaacgcctttcccggagagtacatccccaccgtgttgacatcatggacatatgtgagtccatcctggagaggaagcggc

SEQ ID NO: 676880 - DNA, 51 bp, Homo sapiens
aaaattcacaaggcaaggtgactttgaaagcattcctgggagatggtcggg

SEQ ID NO: 676881 - DNA, 100 bp, Homo sapiens
ctcttctccctccccttcttgattttccatgatgtagcttataaagcaaaagacagaaatgacctcttatctggaattgatgaatttttagatcaagtaa

SEQ ID NO: 676882 - DNA, 100 bp, Homo sapiens
gtgcgcggtaagaagctgcgcggtagcgcggtgagattgtcaaaagagtggggaatggtgaggaaacgccgatgattggagacaaagtttatgtccatta

SEQ ID NO: 676883 - DNA, 82 bp, Homo sapiens
gcggcagtatccttggggcactgtgcaggtgttgtacatcagtacacagaagagacggatgtgaagacaccaagagagcaac

SEQ ID NO: 676884 - DNA, 90 bp, Homo sapiens
ggccctgcttgggcaggctcagaaagagactacacatacgaggagctggaagctgaagccactcatcgtgttatcaccattgcaaacagg

SEQ ID NO: 676885 - DNA, 100 bp, Homo sapiens
ccttgaaagaagaagatggagaagaaatagttacctatgatcagacaaattgatttatgcctggggcaccatcaccaaaagaagaggaaatggatgcaag

SEQ ID NO: 676886 - DNA, 100 bp, Homo sapiens
caacattctctttaccttagatggagatatcaaattggatcccttcccactggaggcatgtgatgagaggaaatcaccgaaaacgtggctgcttcaagga

SEQ ID NO: 676887 - DNA, 100 bp, Homo sapiens
ctgcaaagactatagttttggttaaaaatgttctttcccgacattatgttcatcttgagagggtattgcaggcaacaaggacctttcatacagggcagcc

SEQ ID NO: 676888 - DNA, 90 bp, Homo sapiens
cccctgctggcctctgcctgcccagactccgtgggaaggaggcttgtttaaactacggatgcttttcaaagatgattatccatcttcgcc

SEQ ID NO: 676889 - DNA, 51 bp, Homo sapiens
gtgacaacattggctacattacctttgaggcacagttgaatgctgttgatg

SEQ ID NO: 676890 - DNA, 75 bp, Homo sapiens
caagattatttcagagcaaggtcgtgcggtgtgtgtagaagatgtggttgccctgcttggctttccttatgcctc

SEQ ID NO: 676891 - DNA, 75 bp, Homo sapiens
ggggtcggcgccgagtgggaggatggcggaagtctacgtgttgaagcgtcctcacgtggatgagttcctgcagcg

SEQ ID NO: 676892 - DNA, 75 bp, Homo sapiens
ctgaagggaggaaatagtggcaggtgacagtctgcatgtgcagttttcagctcttagccccccacgacgtaaagc

SEQ ID NO: 676893 - DNA, 100 bp, Homo sapiens
gaaggagacagaagcagccatggaaaaattaatcaacagagtgggacctaatggtgagagatacttggtgcttgaaaaactgaagaaggaagacgctgac

SEQ ID NO: 676894 - DNA, 105 bp, Homo sapiens
gtgatgtccctctgaaaactgaggaatttgaagtgaccaaaacagcaggcccaaccgcttgcttatcctccacggcttcctggacgaaaacgtgcactttttcca

SEQ ID NO: 676895 - DNA, 100 bp, Homo sapiens
gcttgacgccttagataacagccatcctattgaagttaaagactcagtctctgagaaaacaattggactgatgcgaatgcagttttggaaaaaaactgtg

SEQ ID NO: 676896 - DNA, 71 bp, Homo sapiens
cgacggcagtccatgacggtgaagaagggagagggccgcgtgctccacccagagcagcaccgtgtggtgag

SEQ ID NO: 676897 - DNA, 101 bp, Homo sapiens
caggaggattttgtaatggaagggcatggcaagactccacctcctggtgaagaaagcaaacaattcccactggaaattcgttgtatgaatcttattacaag

SEQ ID NO: 676898 - DNA, 80 bp, Homo sapiens
gtaaattgaaaatattggggccatttagtaacttctttgcaaggttcgatacaagaggctgttttcctagcgtggcttgc

SEQ ID NO: 676899 - DNA, 101 bp, Homo sapiens
aggcccaaagaagatttatgttcaggaccatttagtctgttgaagctccattcataccaaagtttagaggctctggagataccagcaactttgatgactat

SEQ ID NO: 676900 - DNA, 98 bp, Homo sapiens
aaggtcgcggagcacatgcggagactccgaggtggaggaggagtccccaggaaagcgcctggacgcaggtcgcacggggcaggcggttgcagttcgag

SEQ ID NO: 676901 - DNA, 82 bp, Homo sapiens
cgagattgcctgacccaggcctgctcggccctcacagggtgacagagctgaatgaacctctctccaatgaagatcgaaatct

SEQ ID NO: 676902 - DNA, 78 bp, Homo sapiens
cacggcggaggacgacgcgctcaaccagatcgcgcgggaggaacttgctactaccagcaccatgccctaccaatatcc

SEQ ID NO: 676903 - DNA, 100 bp, Homo sapiens
ccagccgggaactccccatcgcgttttgccagcgataatacgcctcaggctgaccggttccctgatgtgttacctgcttctgctactgatccaaactgca

SEQ ID NO: 676904 - DNA, 83 bp, Homo sapiens
gcgcatccaccagctgcaggctgagcgcgcgcagggcttccgccgactggaggagagaacgtatttaccgggcagtcaaagat

SEQ ID NO: 676905 - DNA, 100 bp, Homo sapiens
ctttctggacagaccaacctgtcagtgctgcaaagaccaaatgagagggttgacactgtatcagaaaaaccaagggaagaaccagtactaaaagaggaag

SEQ ID NO: 676906 - DNA, 100 bp, Homo sapiens
gacatcccagaagagaacactaagtcttagctttcatcttacccctgaacttcccttcctctgaaggaaagaccacagcaagattctttcattcgtctcc

SEQ ID NO: 676907 - DNA, 75 bp, Homo sapiens
ccgctacccaggaggcggagcggacaaggctccggcctgcgaggagactggtcgaattgacaaatcttaccctac

SEQ ID NO: 676908 - DNA, 100 bp, Homo sapiens
agatggcggatctggaggagcagttgtctgatgaagagaagggggaaatttgcagtggtgagaaaatgtataaagaaagattctgggaaagaatttgctg

SEQ ID NO: 676909 - DNA, 83 bp, Homo sapiens
ctgaaattcatcctgagatgagcagtcagtcccctcttctgcaggtctgctgcaattcgctgggggtccactacagatactgt

SEQ ID NO: 676910 - DNA, 101 bp, Homo sapiens
agaaaacaatttctcctgctctgcagcttctgttcagcctctacggcagacacatgcaggccaacccagaaccaccgaagaagaataatgacaaatcgaaa

SEQ ID NO: 676911 - DNA, 100 bp, Homo sapiens
agctgcaaggagcatcccggctggagcagagccagacacgatgaggcgagtggtacgacagagcaagtttcggcatgtatttgggcaagcggtgaaaaat

SEQ ID NO: 676912 - DNA, 76 bp, Homo sapiens
ctcagctgaggaggacccccaaaggataagttctgaacgtcgaaaagaaaagtctcgagatgcagccagatctcgg

SEQ ID NO: 676913 - DNA, 75 bp, Homo sapiens
ctacgagcgctcgcgggacatccaggagttttgagagcaaaatgacaacacccagaaattcagtaaatgggactt

SEQ ID NO: 676914 - DNA, 101 bp, Homo sapiens
acctgaagaggacctggcagcaataagtttttggtgaaataacaaagagccctgggcgctgcctatggcacagccaagagcggtaccggcattgcggccat

SEQ ID NO: 676915 - DNA, 90 bp, Homo sapiens
ctttttctggtgtcctgaacctggaagttgtgctttttaagcaaatgcagccctgaggatttggctactgcatataacaacagggggcaa

SEQ ID NO: 676916 - DNA, 100 bp, Homo sapiens
attcaacaagaaatcacagtgctgagtcagtgtgacagtccatatgtaaccaaatattatggatcctatctgaagaatatcaacacctttgagaacagaa

SEQ ID NO: 676917 - DNA, 101 bp, Homo sapiens
gacaaaaggagcttcatctttcaagataacccgtggaattgaagcagttggtggcaaattaagggggcacccaagccaattgccattgaaccatgtgctgg

SEQ ID NO: 676918 - DNA, 83 bp, Homo sapiens
cgctcacctgcgctgtgatgcctgcagagctgtggcttaccagactatagggtatgaccccatcatttccccagaggtctcgg

SEQ ID NO: 676919 - DNA, 100 bp, Homo sapiens
gtgcactccgcacctcggggacattattgcgcgtggaacggctgcttttggaaggagaatggtgttgaacgcgtgtgtcctgagagcctgctgcagtcca

SEQ ID NO: 676920 - DNA, 100 bp, Homo sapiens
cccagaagcgaagtggagagcgccagagtaatggggaggttcccctgaaggatgctaaggaatacgctgaatccataggtgccatcgtggttgagacaag

SEQ ID NO: 676921 - DNA, 100 bp, Homo sapiens
ggaccagctgactaaggagctgcagcagcatgtaaagtcagtgacagccccatatggagtccactttctcatccaggctggagtgcagcagcgcaatctc

SEQ ID NO: 676922 - DNA, 100 bp, Homo sapiens
gggccatgagctcttcaaattggcccagatctttttcaacgggatagcactggctttcacagggattagccttctggtggtgggcacaactgtggtggga

SEQ ID NO: 676923 - DNA, 74 bp, Homo sapiens
gacctcctcctccacaggggagacagagatccaggatgagaagactgataaaagaagaagctagctgaacagct

SEQ ID NO: 676924 - DNA, 100 bp, Homo sapiens
cactgctttccactcggctcctgtcgtccgttctctcaggctcccgttcagtatgccaccacgggctgttccctgaccctgcaccatacggagaaaccag

SEQ ID NO: 676925 - DNA, 98 bp, Homo sapiens
gatggaaattttttgatcatgcggcacatcttgggggagctctttttggaatgcagcggaggaggagaaagagatggacctcccggactcggcctcga

SEQ ID NO: 676926 - DNA, 75 bp, Homo sapiens
agatgaatggacaccttgaagcagaggagcagcaggaccaggaattatgggcccaccgtgttagtgcaacaggag

SEQ ID NO: 676927 - DNA, 49 bp, Homo sapiens
gagatcctgctgacgccggctagggtttttagaacttcagccataaaaa

SEQ ID NO: 676928 - DNA, 96 bp, Homo sapiens
gaagaacttcttcaatgactggcgaaaggccgccatggcatcagatgaaggcaaactttttgttggagggctgagttttgacaccaatgagcagtc

SEQ ID NO: 676929 - DNA, 75 bp, Homo sapiens
acaacacctacagccgggagctgtttgaggaggtgtccggctttgctggcccagcaagcctgataagcatgaagc

SEQ ID NO: 676930 - DNA, 82 bp, Homo sapiens
cgacaagccgctggcagccgcggatctcaccgccgctcaggtcttccgtgtgtgctaagatcgtgcagctcctggggcagaa

SEQ ID NO: 676931 - DNA, 90 bp, Homo sapiens
cgaccacactcacctctctctgctcatgcagggctcggtgaaagaccagttgaaggcttacggtgctctgacagagagcgtgacccgaaa

SEQ ID NO: 676932 - DNA, 100 bp, Homo sapiens
gccctgatgtctgctttcagtcctgaaaagctgaacgagtttggaaattttagcattcaggtgccaggaatgcagatgggacagccagtgccagaaacag

SEQ ID NO: 676933 - DNA, 100 bp, Homo sapiens
ctgatcccgagcagcgtcatgtacccctacattgcctaagatactgagccatatcgccccagcattttgcatgagcagctgtagcttcgtagtggaaaaa

SEQ ID NO: 676934 - DNA, 100 bp, Homo sapiens
cgccggccatgtgtgccacctgtgccatccaaactgcacctacggatgcctgtgaggagccaccaacatttgaagctatggagctcattggtaaaccaaa

SEQ ID NO: 676935 - DNA, 51 bp, Homo sapiens
aaattcactgagtaatctttttaccagccaatggtggcagagtctacatag

SEQ ID NO: 676936 - DNA, 100 bp, Homo sapiens
ctcggctgagaaagctggaggtggaagccaacaatgcctttgaccagtatcgagacctatttgtcccatcagatgaaaagaagaaacaaggttgtcaacg

SEQ ID NO: 676937 - DNA, 90 bp, Homo sapiens
gccgccttttcagaagcggctgcgcacggactgctggagatggtggagtccgtcagtagctacagcaagctgggtagcaggcagatccaa

SEQ ID NO: 676938 - DNA, 100 bp, Homo sapiens
ccaggaggatgggcccgttgtggtactccaaagattcaggtttactcacgtcatccagcagagaatggaaagtcaaatttcctgaattgctatgtgtctg

SEQ ID NO: 676939 - DNA, 95 bp, Homo sapiens
aagatggacaccgcggaggaaggatcacgcagatttgcgaagccatttcttcacagttgggatgaagcttgagacagtgaatatgtgcgagccct

SEQ ID NO: 676940 - DNA, 100 bp, Homo sapiens
tttcctcgtggaatttgaagattctacagataaatcagcaggtattgctgtctctaagcaagacccgatcaccagtctagagcaagaaaaagagccctgg

SEQ ID NO: 676941 - DNA, 90 bp, Homo sapiens
acgttctgtttgataatcccaggccagagatcttggatgcagactataatgtaactgcaaactccaagctggtcattatcacggctgggg

SEQ ID NO: 676942 - DNA, 75 bp, Homo sapiens
aaggaacttggagttaatggtctaatttatgatagcctgatcctgcctgaagatggtgccactggtggctgtggt

SEQ ID NO: 676943 - DNA, 78 bp, Homo sapiens
gcagacatggacaccaaacatttcctgccgctcgggcgtgatggtgggcatgggtcagaaggattcctatgtgggcga

SEQ ID NO: 676944 - DNA, 90 bp, Homo sapiens
ttttaccgatgctttaacatacagccactagagtacaggggctcaggtccaggtggcaggggatatgctacccaactcaactgagcgggc

SEQ ID NO: 676945 - DNA, 90 bp, Homo sapiens
ctgcatcatgaattcaggagcatcgatttgtacacacagatatgacgaaagacttgaaagaagaacatttaaagaaaaatattcctcttg

SEQ ID NO: 676946 - DNA, 98 bp, Homo sapiens
ctggagcagtgagaaagcaaaggctgctctgaagcgcacgacctccgactactttctccttcaagtgggttgtcttctggcctcagagtatcccttat

SEQ ID NO: 676947 - DNA, 50 bp, Homo sapiens
gggcaagtgcgcttacatccgagtgtttcaacaaaagacagccagaagac

SEQ ID NO: 676948 - DNA, 75 bp, Homo sapiens
gagtcatttctgttccgcacaggcctgctgaactgggtgctttatataggaatactctggagcagtgcaatgtgt

SEQ ID NO: 676949 - DNA, 100 bp, Homo sapiens
gcgggaggctccgcggagccgaggcgtggaggcctggaaccgggaaccgaatatacaatttatgtcattgccctgaagaataatcagaagagcgagcccc

SEQ ID NO: 676950 - DNA, 83 bp, Homo sapiens
caaggcggtgcgctgggggccggggcgcgtcgcaggtgattgaattactcagatatgaagatcatcatctaggttttgtgtaa

SEQ ID NO: 676951 - DNA, 51 bp, Homo sapiens
gattcgcagtggtcgcttcttctccttggtggtccagctgctcacctgtga

SEQ ID NO: 676952 - DNA, 90 bp, Homo sapiens
ctctttgacgctgcctacttcgggcagaaggactctgtgtgtggcacatgaggatttcatgtatgacatcatacgagacaataaacaaca

SEQ ID NO: 676953 - DNA, 75 bp, Homo sapiens
ttgacagaggtgatataccagacctttcacagagacaggatcttactctgttttccaggctggagtgcaatgtcc

SEQ ID NO: 676954 - DNA, 100 bp, Homo sapiens
cgccgtgagcgcccggagcggtccgcgagccaccgaggcccagacaatgcagatcttcgtgaagactctgactggtaagaccatcaccctcgaggttgag

SEQ ID NO: 676955 - DNA, 100 bp, Homo sapiens
aatttattagatggtgacactgcagttgagtttttggtcatgaagaggaagagaggcaggcctaaggggtccacgaagaagtccagcacagaagaggagc

SEQ ID NO: 676956 - DNA, 75 bp, Homo sapiens
aagaaagaagatgttaactttcagataatatcgtctactgcattatttttggctgcaaaagtggaagaacaggct

SEQ ID NO: 676957 - DNA, 100 bp, Homo sapiens
cgataccaattggtggaaaggcacctccaaaggcaggactggactaattccaagcaactatggtgtggatgaagcaaccatcattgacattctaactaag

SEQ ID NO: 676958 - DNA, 83 bp, Homo sapiens
cttcagattttgaagaagggccgtcgaggaaaagtgttatagttttgccgctggactcttccctcccttcccccaccccatca

SEQ ID NO: 676959 - DNA, 124 bp, Homo sapiens
cagcagctccaagatgatttgatgaaggtcctgaacgagctctactcggtgccagatgtgacatccagatgacccagtctccatcctccctgtctgcatctgtaggagacagagtcaccatcac

SEQ ID NO: 676960 - DNA, 89 bp, Homo sapiens
cggaagatcgtcgccacctggatgctggaggtttacccaaggtccagcctagcccctaggcaccatgtcggacagtgatctaggtgagg

SEQ ID NO: 676961 - DNA, 87 bp, Homo sapiens
agaacgcggctaaagttctgatggcctgtatccggtgtccgaggcgaactcagtaagatgatgttaagaggaaacctgaagcaagtg

SEQ ID NO: 676962 - DNA, 82 bp, Homo sapiens
gtcgtctgggagatgctcaagtttgaagtggcgctcaggaatggtcctcgtccgaagtgagaatgggcagttgttaatgatt

SEQ ID NO: 676963 - DNA, 83 bp, Homo sapiens
ggtccagctgcccgcaggggtgtgtctttggtgcaacactaacaaggcttgtctggactacccagttacaagcgtcttgccac

SEQ ID NO: 676964 - DNA, 98 bp, Homo sapiens
agaaagtgaacttggcattttagatctaattcaagtccgcccgtctgcgcccctcacaggaagccggagggtcgctctgatcccgaatctcccacagg

SEQ ID NO: 676965 - DNA, 88 bp, Homo sapiens
tgttgctagtcctcgagtggaaagctctatgcggagtacgtctgggtcacctaggcctgcaggagagcacgttttcaatatcatagga

SEQ ID NO: 676966 - DNA, 100 bp, Homo sapiens
agtttcttccgtgctctggcctgagtgccacagccagggcctctgctctgtacacagccaaagatttcatccggcacttgatggagaaggacccagagaa

SEQ ID NO: 676967 - DNA, 51 bp, Homo sapiens
ctgaaactctacgaggataaccagacaggtgtcaaattgagaaccaggtag

SEQ ID NO: 676968 - DNA, 50 bp, Homo sapiens
aggacgcaaagttctccggcgaggcgtgtgctcgcccactgatatcggtg

SEQ ID NO: 676969 - DNA, 82 bp, Homo sapiens
gcccgctcacctgcgctgtgatgcctgcagagctgtggcttaccaggctctctggagtccacagaacccatatatgtctaca

SEQ ID NO: 676970 - DNA, 101 bp, Homo sapiens
atggaggcaaaatgggaggaagctgttctgaagcccagaaaattccatggacaccccctggaactgctctgcagttttactccaacctacacaatgctgaa

SEQ ID NO: 676971 - DNA, 75 bp, Homo sapiens
tggcaacattagatccacctcatacagagtgtgaacatggctacgcctcttcattcccgtccatgccgagccccc

SEQ ID NO: 676972 - DNA, 100 bp, Homo sapiens
ctctttgagatcgcttcagctcgcatcgaggagagaaaagtctctaagtttgtgagagacaagagagacacctccaacttcgacaaagagttcaccagac

SEQ ID NO: 676973 - DNA, 88 bp, Homo sapiens
gagactgggcggccggccgacccttcctgtcgctgacggcgactgcgggaggccagggcctccagccgtgtgccagccgcatcccaga

SEQ ID NO: 676974 - DNA, 96 bp, Homo sapiens
taagaacagatgagtcagaggtttctgcttaatggagcaatgcagtcttacacgtggtctctaacatacacagtgacgacggctgctgggtcccca

SEQ ID NO: 676975 - DNA, 82 bp, Homo sapiens
gagcgaacgaccaagagggtgttcgactgctagagccgagcgaagcactgtggtacagacctccatgagccggtcccaggta

SEQ ID NO: 676976 - DNA, 75 bp, Homo sapiens
cgtggcctaccaggtctacctcctacatcaagctacaacttcaagcagaagagagaggagttgtgtctatcaaag

SEQ ID NO: 676977 - DNA, 100 bp, Homo sapiens
ctggctcggctccctgcctccgcgtcgcagcccccgccgtagccgcctccgagcccgccgccacatcctctgagatggagcctcactctgttgcccaggc

SEQ ID NO: 676978 - DNA, 50 bp, Homo sapiens
tcacccaagcgcttcaccttcgtggctcctcctaggttgaatcagctgag

SEQ ID NO: 676979 - DNA, 74 bp, Homo sapiens
cggcagcagcagcaccaccggacgcctgccacagtgactcaggtcactcaaggaactatccgaccagctgccaa

SEQ ID NO: 676980 - DNA, 98 bp, Homo sapiens
acggcgcgtcctgctgaccccagccggcgccgagggcttggaatctcgagcgggaaaagcggcagtacatacctgtgaaaatgaagagcaaagccttc

SEQ ID NO: 676981 - DNA, 83 bp, Homo sapiens
gttcaagaaggaagtgtatcttcatacatcaccacacctgaaagcagacctgcctagagctggaacgttacctccagagcgag

SEQ ID NO: 676982 - DNA, 97 bp, Homo sapiens
tcaaacagaaaattcatcccacatcagttattagtggctatcgacttgcttgcaacggcctggatgaaagagcggacttcacctggggcgattcact

SEQ ID NO: 676983 - DNA, 75 bp, Homo sapiens
ggggacattggacactactctaggaccggggaggtagaagacatcgtagaaggagtgaaagaagaaaagaagact

SEQ ID NO: 676984 - DNA, 50 bp, Homo sapiens
ccaggagcagcagcctttctgtttggtgcacctcgatttggaggaagtag

SEQ ID NO: 676985 - DNA, 82 bp, Homo sapiens
caaacttctgcatatttattatcagaacagcattgacgacaaatttggagtcagcatatgaaaataagagtttacctacaga

SEQ ID NO: 676986 - DNA, 100 bp, Homo sapiens
gcacctgggaggagccgcagcccttcagacgcttgcacagcatctgtcacagctgcttttttctcaaccaggattcactccttctccagttgcacagcca

SEQ ID NO: 676987 - DNA, 51 bp, Homo sapiens
ttcgcagtggtcgcttcttctccttgacagtacaatgtagattataaactg

SEQ ID NO: 676988 - DNA, 50 bp, Homo sapiens
gaaacagaaattctggaacacctatatgctgtttggggctcagctaagtg

SEQ ID NO: 676989 - DNA, 74 bp, Homo sapiens
aggagatcttggagaaattacgtgatgggcagaatctgtttacgaaagacgtgacagtgatcgagggagaggtt

SEQ ID NO: 676990 - DNA, 100 bp, Homo sapiens
tgatcaggtttttctggatggaaatgagagcttactcacatagcatattggtatatcaaaatgaaatgcaaggaaccaaaaataacataattgaaggcag

SEQ ID NO: 676991 - DNA, 99 bp, Homo sapiens
aaggctttgccgcagttcatcttcctccctgtgtactttccatttgccttcctgggcagcacaacaagattcgcagcgtggaggggagccagctgaagg

SEQ ID NO: 676992 - DNA, 101 bp, Homo sapiens
agagaatggagaagaaggttgattccaggccagtttaatcctgtggaaaagtggtttgacaatgaagcccatggaggtttatatgggatctatatgaacca

SEQ ID NO: 676993 - DNA, 83 bp, Homo sapiens
ccctcgagagcccggacatcaagtacccgctgcggctcatcgaccgggaggttggagcaaaacgtcccactcactggaggcac

SEQ ID NO: 676994 - DNA, 75 bp, Homo sapiens
gctgtgtgtacatcacccccatggaggccctggcagagcagcaaaagcggcgccaggaaattgaacaaaaacttg

SEQ ID NO: 676995 - DNA, 100 bp, Homo sapiens
tgtgaacctggaactagcgtcaaccttgaaggcatcgtgtggcaggaaacagaagatggtcctcgatgggcttcctggaatattggtgtgtttatttgca

SEQ ID NO: 676996 - DNA, 88 bp, Homo sapiens
ccaaggctacccttactcagatgctgaacgtcattttcacccgcatggaaaaccaagtgaaaatgtggacacagacttgccaggcagc

SEQ ID NO: 676997 - DNA, 75 bp, Homo sapiens
ctcgggagcagttcatgcagcacctctacccacagaaacttgtggtggagaatgttgatgtgttaacacaaatga

SEQ ID NO: 676998 - DNA, 74 bp, Homo sapiens
gggctccggctggtctgtggtgagctgaagacgcagctggagtggacagaagccatcctggaggatgagcagac

SEQ ID NO: 676999 - DNA, 98 bp, Homo sapiens
atccacacactgctggacgccgccatgctgcagatcaaccagtacctcaccgtgctggcctccttggggtggaacggcacatgtgtgatggggacatt

SEQ ID NO: 677000 - DNA, 115 bp, Homo sapiens
gttcagcattgctgaattcttctctgatatcttcctgtcatggttccccttctactacatgctgaagataattctgaaataatcagcagaaacggaatggaatgccaagaatctg

SEQ ID NO: 677001 - DNA, 116 bp, Homo sapiens
ttgaaaaccctgctgatgtcagtgttatatcctccaggaatactggccaggtgttacgggtatgggatccaagaacatgtgcaaaactaatgaagcttaaagggcacacggataat

SEQ ID NO: 677002 - DNA, 100 bp, Homo sapiens
actcgagccaggctgcaaaaaggttctgtacagagtaatgagatgtgtgacggctgcaaaccaggtgtttttttctgaggctgtgttgacagctgctaat

SEQ ID NO: 677003 - DNA, 100 bp, Homo sapiens
tagaaaggagacccgactgcaactgctggattgctgcaaggctgagggacgagaacgaggtctggaaatctctccaggcaccctgctttggccctctaga

SEQ ID NO: 677004 - DNA, 83 bp, Homo sapiens
taagaagcaaaaaattcaagaaactgactaaagctatatgtggactgataaacatgatgctggcaaacctgtacaagaaggct

SEQ ID NO: 677005 - DNA, 86 bp, Homo sapiens
tctcctgcctcagcctcctaagtagctgggactacagggatgccgttctgagtgcctgactgcctcgccccgaaggatggcctcgg

SEQ ID NO: 677006 - DNA, 98 bp, Homo sapiens
ctattgaagacacctgctcagtatgacgcttctgagctaaaagcttccatgaagagttttccgtctgatgaaggttggccatttgcaaagtatcttgg

SEQ ID NO: 677007 - DNA, 90 bp, Homo sapiens
cgggcaccatgaagcacttcctgaggctaaagaacgtgccaatggaatggagcttgatgggcgtaggatcagagttgatttctctataac

SEQ ID NO: 677008 - DNA, 80 bp, Homo sapiens
aaggaagctattgctgctcacaagactttgagaagcccgagagcccccgagccgccagcagcagctccccaggatcacca

SEQ ID NO: 677009 - DNA, 100 bp, Homo sapiens
gtctactgaaggctgtcttgatcaggaaactgaagactctctgcttttgccacagcagttcctgcagcttccttgaggagtacttcttgcaagcagagct

SEQ ID NO: 677010 - DNA, 100 bp, Homo sapiens
gacagtgctacagagccaactcctgacagcaaccatgtccaagggacctgcagttggtattgatcttggcaccacctactcttgtgtgggtgttttccag

SEQ ID NO: 677011 - DNA, 83 bp, Homo sapiens
cactggcggactgcaatgacatccacctgctggagtcggaggccaacagtgctggacagtcattttgtttactcattcagccc

SEQ ID NO: 677012 - DNA, 97 bp, Homo sapiens
catcttccaccatgattgtgaggcctccccagccatgtggaactaaaatggacccaagtggggtcaaagtgctggaaacagcagaggacatccagga

SEQ ID NO: 677013 - DNA, 96 bp, Homo sapiens
gaggaatctcttgttggcatttgaagcggctgaaagtgtaggcatcaaacccagcctgacacagggaatatggaggttctgcacctgtatggaagt

SEQ ID NO: 677014 - DNA, 85 bp, Homo sapiens
tttgctggccatcggattgggaacaagagccccaagacccgggacatccaggaggaggagctggaggtgctgctggaggaggagg

SEQ ID NO: 677015 - DNA, 100 bp, Homo sapiens
aagaaaaccaaagctctcatcggagagatggggatgactttttccagtgctgaaccaaccggtgagccctctcctaagagacccaggggaagacccaaag

SEQ ID NO: 677016 - DNA, 89 bp, Homo sapiens
cttatttctccgttggcccaaccagtcccagcgctgtcgtgctcctctactcgagtcatcctttttgaacttccatgactcagactgcg

SEQ ID NO: 677017 - DNA, 83 bp, Homo sapiens
ctcgcaacaagatcccctatgagagtcccatcttcagcagagcggagctggagtttgttcagatcatcatcatcgtggtggtg

SEQ ID NO: 677018 - DNA, 75 bp, Homo sapiens
gtctccttccgaaaacactacccttgggtccagctttctggacatgctgagctccacgcaggagatcggtgagga

SEQ ID NO: 677019 - DNA, 101 bp, Homo sapiens
catcccggtcaggatcaaggagcaagtagtgggagaatcaaaggccacattggatatgacagaagacaagtgctgagatttgacattatacttcttagagc

SEQ ID NO: 677020 - DNA, 98 bp, Homo sapiens
aacaagcggcgcttcccggggctgcggctcttcgggcacagatcctgggcgcagtgatcctgggcttcggggtgtggatcctggccgacaagagcagt

SEQ ID NO: 677021 - DNA, 98 bp, Homo sapiens
tctggagaaggatcagatgaacttacgcagggttacatatattttcacaaggctggtggttcgtgagcacttctgaggagcagggctgggtccctgcc

SEQ ID NO: 677022 - DNA, 128 bp, Homo sapiens
ggttacatcagaggaaggagacaatgaatctagaagtgcaggcgatggaacagactgggatggttccaatccctatacattgaagctttgcttttctacatcatcccatttataagaagagaagagca

SEQ ID NO: 677023 - DNA, 90 bp, Homo sapiens
gaagcaagcagttcagaagagccaaggaataaacatgcaatgaacccaaaaggctccgccgcatgcaagagatgattgcaaggatgcagg

SEQ ID NO: 677024 - DNA, 100 bp, Homo sapiens
ggaggacagcctcaacaagctggcgctgcagtatggctgcaaatgtaaggagaggatgaggcccgtgaaaaaggcactgaaacagctcgacaaacctgac

SEQ ID NO: 677025 - DNA, 100 bp, Homo sapiens
ggaggggattttgtcagcttgtcgtcaagtgtgtcccggcatggatatccggaacaacctcactaggttgcatgagctggagaattgctctgtcatcgaa

SEQ ID NO: 677026 - DNA, 98 bp, Homo sapiens
taattatgaatcagaagaactggatcttaccttgcccaccaacttcagagatttgtccaagggtccacatatagcctcagttacattagctgcttatg

SEQ ID NO: 677027 - DNA, 75 bp, Homo sapiens
cagcaactaccccagtgccggggagggttctgctgcttcgaaagctggtaccagctggaggatgagtctgcgcat

SEQ ID NO: 677028 - DNA, 100 bp, Homo sapiens
gatctctaccgatgggaagtccttattattggccctccagatacactttagagtctgcactatggaaacaacctgtcaatccagctcaaggcacacatag

SEQ ID NO: 677029 - DNA, 88 bp, Homo sapiens
cagccagtactctatatgaacaatccgtctggatcacggatgtaggaagtgtttcgttggataccactagctgggaatatccagatgt

SEQ ID NO: 677030 - DNA, 100 bp, Homo sapiens
ggaaagatgtaaatctcccaagtccaaagggtttcaggcacagaactgtatatccaataatagtgaaatggatcccactaattatgacagaaatgatgat

SEQ ID NO: 677031 - DNA, 75 bp, Homo sapiens
cattaatgcaactaccattacactaagttagttgaatccatggacatgaaacccacagatatagagggttggccc

SEQ ID NO: 677032 - DNA, 87 bp, Homo sapiens
tcccggcgctctcctggctcccttctgccccagctccgtctcggcggcggcgggtgacagagttagtccttgataattgcctgtgtg

SEQ ID NO: 677033 - DNA, 97 bp, Homo sapiens
gaaaaactccaggctcagagaggttaaggaactcgtcctacgtaacacagccagttagatgccgacaaaaggatcaaggtggcgaagcccgtggtgg

SEQ ID NO: 677034 - DNA, 50 bp, Homo sapiens
cctggtgctgcccctgggcaagccagctgaggtgggtgtcctggttggca

SEQ ID NO: 677035 - DNA, 100 bp, Homo sapiens
actccccagggcagaaatagcgaccatggcgaggtgtcatggagaaactccagctgggcccagagattctgcagcgggaaaatccaaggcttatttatgc

SEQ ID NO: 677036 - DNA, 90 bp, Homo sapiens
agctaagacttcgcgacacccttgaagctgagaaatgggaggtgtcccaagcccctgaagaaccgtgatgtcatcaccctccgctcctgg

SEQ ID NO: 677037 - DNA, 74 bp, Homo sapiens
ggctgcggatgctgctcaaggccaagatggacgccgagcaggatcccagccaaaaagcaaatggatttccacct

SEQ ID NO: 677038 - DNA, 115 bp, Homo sapiens
caaataagctatatactttggttacctatgtacctgttaccactttcaaaaaaccatatttatttagagtcagaatggagcgatttgtagtaacagcaccacctgctcgaaaccg

SEQ ID NO: 677039 - DNA, 95 bp, Homo sapiens
ctccgaacatgatctgtctcttgggtccctcatacagagaaatgcatcttgagggctttaaggaagcagcggagaagtttcgaatggaatctgga

SEQ ID NO: 677040 - DNA, 75 bp, Homo sapiens
catgcatcgtcccctggactctctcaaggccaggaaggaatactgggagaatcttcggatagcctcaggccggcc

SEQ ID NO: 677041 - DNA, 75 bp, Homo sapiens
atccgaccaattgctcatcgtcgtgtccatcctagaaggtgtttaagatagaagtgctaatgaatggaagaaaac

SEQ ID NO: 677042 - DNA, 90 bp, Homo sapiens
ttccaaccagagcttgtgtagcgtcagatccttgagtgataaaggagtagagtagatctctggcttcctgctctgtttgttctggttgcc

SEQ ID NO: 677043 - DNA, 96 bp, Homo sapiens
caaatacttcatatttggcttcaatgtcatattttgggaggactcagagagagtaatgataattaccggaccaaacatgggtggaaagagctccta

SEQ ID NO: 677044 - DNA, 90 bp, Homo sapiens
agcttgcagccctgtgccttgacaagagcctcatccacaccgtgttgctgcaaaaggactatcagcaagcctgtggttatgagtttacca

SEQ ID NO: 677045 - DNA, 75 bp, Homo sapiens
gacgggagcaatgctgacctcggtttcctggacccattccgactcagtacctcctaaatggctctactttgaacc

SEQ ID NO: 677046 - DNA, 80 bp, Homo sapiens
ctgcaccctgaccattcgggagagcattctcatcagcaacggctcaaggtgatggcatcagctgagaagggaaggaagcc

SEQ ID NO: 677047 - DNA, 75 bp, Homo sapiens
ggccgggcagtaccttcttcaagagaaatggagcccttctccaagtgttttccaagcagtgaagcacttgccgtg

SEQ ID NO: 677048 - DNA, 99 bp, Homo sapiens
attacaaccaccagcgctttccctctatcagtgaagaaaaaaggtggcgtgaaaaaggagggaagaagcagagaccccaaaaagagaagcctagcgaag

SEQ ID NO: 677049 - DNA, 98 bp, Homo sapiens
ttcctcacactccccctgaagttcatctaagatcttcattcttcaaagaccattaaaaatctcaagtgacgactttgggaaactctggttatccttcg

SEQ ID NO: 677050 - DNA, 76 bp, Homo sapiens
tctgtgccatcgccaccaatggagccgtgcaggggggcggagcctactctacttgtttgcggccccctactactac

SEQ ID NO: 677051 - DNA, 98 bp, Homo sapiens
atccttttgcagacatctcaacgctggctctccagctgaagcaggagatgggcggcatcgtgactgagctcattcgagactacaacagcagtcgcgag

SEQ ID NO: 677052 - DNA, 82 bp, Homo sapiens
gaaggtgaacaggtgaccataactctgccaaatatagaagtggtgccaccaccacaacagaatgatcttgagattcctgaaa

SEQ ID NO: 677053 - DNA, 50 bp, Homo sapiens
tgaagatcttgaagttagtacctttgaattcacacaaaagatgttggaca

SEQ ID NO: 677054 - DNA, 75 bp, Homo sapiens
ctctctctgggcatctggaaagctatcttaatgacttggaccgcgtagctgaccctgcctacctgcctacgcaac

SEQ ID NO: 677055 - DNA, 102 bp, Homo sapiens
tgcttctgtggcagaaaataaaggactgtttgaagaggcagcaaagctgtatgaccttgccaagaatgacgagggtgcgacccacgagaagctggacttcag

SEQ ID NO: 677056 - DNA, 51 bp, Homo sapiens
gcatggcgctcaagtctgtgcgccgtagaaaatctttatcctcaaattggc

SEQ ID NO: 677057 - DNA, 100 bp, Homo sapiens
aggaagggaacgtggaaagcgcatacaggaccctaaacagatcccaagacaaaagcgtggttgaaggagcacgtggagcctgtgttcggcttcccccagt

SEQ ID NO: 677058 - DNA, 75 bp, Homo sapiens
atcaaagctcgacttctcaatcccaagtggccaaagataagcatggattcctggttcattcttgttctgctcggc

SEQ ID NO: 677059 - DNA, 97 bp, Homo sapiens
gatgcagtcagagagactttcgaaagaatatgatcaactcctgaaagaacactctgaacttcagagaaagcttcttgctatctacctccaccatgat

SEQ ID NO: 677060 - DNA, 99 bp, Homo sapiens
cctcgatctcttttcagagctcttgagctttggggggaagtcgagataacatgagtattgtactagtttgcttttcaaatgctcccaaggtctcagatg

SEQ ID NO: 677061 - DNA, 83 bp, Homo sapiens
gccgtcccgggcggcgtggacctcctcaccctgccgcagctgtgcttcccaggttatggaaacaaaggacatgctttacatcg

SEQ ID NO: 677062 - DNA, 83 bp, Homo sapiens
gcgacgttcggccaccggaggagcgggagccaagcaggcttgggcactgtttaaaggaaagttccgagaaggcatcgacaagc

SEQ ID NO: 677063 - DNA, 104 bp, Homo sapiens
cgaaggcggcggctcctgccctctcgctttccctctcgcgtctctggctgcaggtgtggacactgccagcggctgcagccgacttggaatgacctgggagacaa

SEQ ID NO: 677064 - DNA, 74 bp, Homo sapiens
aaggcggagcaggccaaagtgaagaaggtgcctctcttgaccagctaccctcccaggggaccatgaggaagctc

SEQ ID NO: 677065 - DNA, 82 bp, Homo sapiens
ttcgagtgaccgagaccgcggccgggaccgaggctacgagttccagggagctctgtcctggtgaccgtgcccgggttatgac

SEQ ID NO: 677066 - DNA, 50 bp, Homo sapiens
cacaggccctcgttgcccagatgaacaagatcactcaaggtgaaggataa

SEQ ID NO: 677067 - DNA, 100 bp, Homo sapiens
ggcgtacatcactgtcgtctcatgggagaaagacactgtttcacttgtctcaggaagaattcgaaaggagcagtcagggtattgcatgccatcattacac

SEQ ID NO: 677068 - DNA, 90 bp, Homo sapiens
ttaaatttttcccttctagaacgagaaggatgaagagatgagcacaaaggtgtacttagacctgcacatccgtgtgggctgggagcagct

SEQ ID NO: 677069 - DNA, 82 bp, Homo sapiens
ctgtatggaggatggcctagagggctgaactgatgcttgaagttggttgaagccatggataacagaacccacagatgcagag

SEQ ID NO: 677070 - DNA, 101 bp, Homo sapiens
gcagaaatgtgtgcagactacatggcatctaccataggggtccaagacaactttgacaagattgaattcaataggatgtgttggaccctctgtgtcaaaaa

SEQ ID NO: 677071 - DNA, 73 bp, Homo sapiens
acaggcacaagccattgaagctggaatgtcctgttgctgggacagaagatgagcctgtcggtcctggagggta

SEQ ID NO: 677072 - DNA, 75 bp, Homo sapiens
ctccacagaggctttttgtgtgttttatcatctaaaatccaatccctcgactcatgatagtaaagagcacctggc

SEQ ID NO: 677073 - DNA, 100 bp, Homo sapiens
ttgggcttttccaagtaaagctcttcatgcaaggaaacataagttggaggttctggaatctcagtctctgctggatgaaccgaatcctaacagtccagcc

SEQ ID NO: 677074 - DNA, 101 bp, Homo sapiens
cggcgccggcctccggggagaaacggcaccttttgatgtcccagcagaccctgaggaatgtgccaccgatagtgtttgttcaagacaagggaaatgcagct

SEQ ID NO: 677075 - DNA, 100 bp, Homo sapiens
aagacagccgtcctggggcttctggtcatccttcagaaagtttcctacactactgaggtttaggggcactgtgaagcaaaagccacgcctcagaatccca

SEQ ID NO: 677076 - DNA, 83 bp, Homo sapiens
tgcaaatattctcttctgttctacagacctctctcctcttcctgctcatgggtgtgtgtggtttcagcgcagcatggctgtgg

SEQ ID NO: 677077 - DNA, 75 bp, Homo sapiens
gaagcaaaatgaggccttccctggccccaaggccaccctggagaaatgtgccacgtgctcccagcccatcctgga

SEQ ID NO: 677078 - DNA, 75 bp, Homo sapiens
tccagtgtaatgattattgacaacaggaagaatgtggccattagccttcggttctggcatgggattaggaatggc

SEQ ID NO: 677079 - DNA, 83 bp, Homo sapiens
aagatgaagatgaagccagagaagcccagtcttccgaaatgcggtgctcagatttcagaggctttgaaaaaatttggtatctc

SEQ ID NO: 677080 - DNA, 78 bp, Homo sapiens
ccttaggaagtgagtcctgccaacaataacgagacctaatctgggagcctgcaagtgacaacagcctttgcggtcctt

SEQ ID NO: 677081 - DNA, 75 bp, Homo sapiens
cttcgagatgctgcagcagcacaccgtgctccaggggcagaggctcatagcgagccaaggcaaagagggaccact

SEQ ID NO: 677082 - DNA, 100 bp, Homo sapiens
ggctgctgggtacctgccccgctggtcccagattgcccctgcggaaggcccagacgtcagcgaaaggatggtcatcatcaccgggccaccggaagcccag

SEQ ID NO: 677083 - DNA, 75 bp, Homo sapiens
acctcatgcgggatgtggagcgggagggcctggactgggacctcatctccttcccgaactcacaaatcctgacga

SEQ ID NO: 677084 - DNA, 97 bp, Homo sapiens
ggaaatcgacttcggtttcagttggagttggaatttgtgcaatgtttagccaacccaaattaccttaattagctcttcagaaaccaggctgctttca

SEQ ID NO: 677085 - DNA, 101 bp, Homo sapiens
aaaagttgaatgatgtatttgatcctgattctacccaagtacatatgatttcagctgcaatggcagctgcagaaccttggcctgaaaatgctacattatat

SEQ ID NO: 677086 - DNA, 74 bp, Homo sapiens
cccggtgcaagaggcgcaaacaagccaatcccaggaggaaaaacgtgttcagactgcatcacagtgcttccgat

SEQ ID NO: 677087 - DNA, 97 bp, Homo sapiens
acttacagtatgcaacacattttcctatacctctgattcgagaaatgatggagtccttcgaaggccctcagcctgcggatgtgaggctgatgaagag

SEQ ID NO: 677088 - DNA, 83 bp, Homo sapiens
aaattctggaacacctatatgagtcttgctttgtcgcccaggttggagtgcagtggcacgatctcggctcagtgcaacctccg

SEQ ID NO: 677089 - DNA, 50 bp, Homo sapiens
gacagctctgcggctcgggccctgagggtgcagcagaagacccccagacg

SEQ ID NO: 677090 - DNA, 100 bp, Homo sapiens
gctcaagaagatcatcaagcgcaagcacaccctaccgaattacaagatcagatgtctttggtggacttgggaaagaggttgctagaagcagcaagaaaag

SEQ ID NO: 677091 - DNA, 100 bp, Homo sapiens
cgggagagagtcagaatcaactaggtttgggagaaagttcgtgctcagatggtcttacctccagctcgccattgtaggcacctgtgcggcctttgctccc

SEQ ID NO: 677092 - DNA, 50 bp, Homo sapiens
ctcgcacgcggatttggctggcgtcccgctcctgaagattatatagacac

SEQ ID NO: 677093 - DNA, 95 bp, Homo sapiens
tatttttggacctgaaacagaaattctggaacacctatatgggagagctggaaaagcagcttctacaagcaaacccgattctggaggctttcggc

SEQ ID NO: 677094 - DNA, 82 bp, Homo sapiens
gaagtgatttgcctcagcttgtactggccaccactgtacgttacaaagggcggaacctgcggatcaaagcgcccatgtgccg

SEQ ID NO: 677095 - DNA, 75 bp, Homo sapiens
ctaacacttttaggaacagaaatggactatgttgaagacaaattatccattcgcccattgagccgagagatcaca

SEQ ID NO: 677096 - DNA, 101 bp, Homo sapiens
agtatgtcagtgaggagacttgtcacatgcatcaggaccagagcttcagtatcagacacagcacagcagccatctgaagagcaaagcaagtctcttgaaaa

SEQ ID NO: 677097 - DNA, 100 bp, Homo sapiens
ctgcttctcttactcgtgttccctgccactgtcttgttccgaggcggccccagagattatacctttgccatgtacccgccatccatgatcgccacgggca

SEQ ID NO: 677098 - DNA, 96 bp, Homo sapiens
cacaccagacctacggagggagctggaaattcctgacgttcattgatctggtggcagtagagaagagcatcacagaagttgctcaggagctgacag

SEQ ID NO: 677099 - DNA, 98 bp, Homo sapiens
gtacctcagcacacattacaaggcccctcgaatggtgctggcagcagctggagccacggatgacatcgtgaaggttgaagtctgggatgtagtagaca

SEQ ID NO: 677100 - DNA, 100 bp, Homo sapiens
tgaggacgcggcagcccgtggagtcggctgagggaaaagcgaggcaaggcaggcgggtggccagcatcgaaatgttcagccttttagtgatgaagatgca

SEQ ID NO: 677101 - DNA, 83 bp, Homo sapiens
gaaagatggatttttgcatgagacgcttctggacagcatcacagaggaagtagactgatattaacaatacttactaataataa

SEQ ID NO: 677102 - DNA, 83 bp, Homo sapiens
caccaccctcgtgtctgccaccatcttcgacttgagcgaagttttatgcaaggtggcggtggaaatcgcaaaggcaaaagcaa

SEQ ID NO: 677103 - DNA, 50 bp, Homo sapiens
tacagatgtagcctcccgtgggctaggttcctgtgagaacaacatctcgc

SEQ ID NO: 677104 - DNA, 75 bp, Homo sapiens
ggatttttggcctcatactctgttatagataaacaaggagattttagttcctaaaaatgggaagaacctacattg

SEQ ID NO: 677105 - DNA, 75 bp, Homo sapiens
ctcctttctattttaaagagccaagcctcagagagtggatggaagtttgcttagttgaagaattgccaccaacca

SEQ ID NO: 677106 - DNA, 80 bp, Homo sapiens
gagctgtggataacgggaggtgaatttccatgtcaacatagtcctggagttagctgtgccagtggttcatgacgggggcg

SEQ ID NO: 677107 - DNA, 75 bp, Homo sapiens
agcccccggcccaagggcgacttctccagccgggcccgcgaagtgtgacagccagcagctgcagcttctctacct

SEQ ID NO: 677108 - DNA, 76 bp, Homo sapiens
actttaaccaccaatgcgctggacttgaattcagtgcttgggaaggcgggatgtagctcattttgggatacgagtc

SEQ ID NO: 677109 - DNA, 73 bp, Homo sapiens
gattgcgtacccactgcagagtgctgaagacggggtagccacgagagcagccagacacagtctccaacgccac

SEQ ID NO: 677110 - DNA, 100 bp, Homo sapiens
cgcggcggggacccctgatcggcagcggcatgccagggaagcccaagcacctgggcgtccccaacgggcgcatggttggtaacaaggaagatgctgagaa

SEQ ID NO: 677111 - DNA, 100 bp, Homo sapiens
ccggaggtcaccacgcagtacggcggccaataccggacggtgcacactggaggaagagcaagcaggccctgagggactataagaaggttcagatccagct

SEQ ID NO: 677112 - DNA, 80 bp, Homo sapiens
ggtgaggattgacaccaaccagaaatgtgtcttttcctggatcacctccaacaggtgagaagccctaccactgcaactgg

SEQ ID NO: 677113 - DNA, 98 bp, Homo sapiens
ttcgctgtggcatggcggacgaggggaagtcgtacagcgaaacgctaatggactccactacagcgactgctgagctgggctggatggtgcatcctcca

SEQ ID NO: 677114 - DNA, 83 bp, Homo sapiens
aaaaaatttgttctctgtcctgaatgtgagaatcctgaaacagatttgaatttaattccttttcgaccttcaatccagttcca

SEQ ID NO: 677115 - DNA, 90 bp, Homo sapiens
ctgggagctgaggaaccagatatcttgaaaagctgccagaaagctctccccacctggtgcaggttcgggagcggatccgcatcaatgggc

SEQ ID NO: 677116 - DNA, 96 bp, Homo sapiens
aaacaacttacagacttccacaagcaagtcactaggaaacatctttacacagcagccaagttactacagtgacctggatgaaaccctgcctaccat

SEQ ID NO: 677117 - DNA, 74 bp, Homo sapiens
agaactgccccatcgatgtgcggcgtccgctgtataagggtgactatgaccagagcaggaccaaagtgctgcac

SEQ ID NO: 677118 - DNA, 50 bp, Homo sapiens
ggaaaacctatttcttcaagggagacagtgagaaagatcagtctaaagaa

SEQ ID NO: 677119 - DNA, 74 bp, Homo sapiens
ggaagtgaccgtggtggcttcaataaatttggtggttggatggcaagcatgtggtgtttggcaaagtgaaagaa

SEQ ID NO: 677120 - DNA, 100 bp, Homo sapiens
aagcggaaaggccgcgtcgtgatcgactcggacacagaggacagcggcagcgacgagaacctggatcagtcttattgccagcagttttgaagatgactcc

SEQ ID NO: 677121 - DNA, 85 bp, Homo sapiens
cttctgcagaaaaatgttagagctcagttggttgatatgaaacgactggaggtggtatgcagatcttcgtgaagaccctgaccgg

SEQ ID NO: 677122 - DNA, 83 bp, Homo sapiens
aacagttttacgatttaaaacttcgccagaatttatatattggatgaactgaaaaaagaataccaagaaatagaaaacttaga

SEQ ID NO: 677123 - DNA, 100 bp, Homo sapiens
aaattttatcttttgaaacacgttctgattaaccaagggttcaaaccttgtactactcagctgatcacaagctgcttgatgggaacctactagatggaca

SEQ ID NO: 677124 - DNA, 74 bp, Homo sapiens
atttgttaaggattccaagtaactcttatttggttctcctgaaaagaaagctgaacattcatctataaatcaag

SEQ ID NO: 677125 - DNA, 100 bp, Homo sapiens
ggtctggctccttcggggacatctatttggcgatcaacatcaccaacggcgagtacttcctcgcgtattgctaaaggaggagttgaccacaccaaaatga

SEQ ID NO: 677126 - DNA, 100 bp, Homo sapiens
ttgagatccacatggagccaactctctgcgctggagaatgctggaggagaccttaaggatggccaccaccactatgaaggagctgttgtcattctggatg

SEQ ID NO: 677127 - DNA, 51 bp, Homo sapiens
caagtacagtgccatctaccacaaaaggattccatgcaatggaaaagcagc

SEQ ID NO: 677128 - DNA, 83 bp, Homo sapiens
ctccttttcgtttccggaaacatgaactgtaagagtaaatgggtccagtaattggaatgactccagataagagagctgaaacc

SEQ ID NO: 677129 - DNA, 100 bp, Homo sapiens
atgtagtgtatttgatgctttctgaatgtgatttcaaaggttggcacgttggatgtcttggttggcttgtcagatgaactggctaaactggatgcatttg

SEQ ID NO: 677130 - DNA, 75 bp, Homo sapiens
tttgtgctgattcctgaggactaggaaggtgccccgaaaagaattcagaacaaatttacatgtattggagaccag

SEQ ID NO: 677131 - DNA, 98 bp, Homo sapiens
ccgaggcgccggcctgctgcagtcaggtattatcgggggacccacggggtcattgtggtttacgacgtcaccagtgccgagtcctttgtcaacgtcaa

SEQ ID NO: 677132 - DNA, 100 bp, Homo sapiens
ggaagacgacgggcagccccggactctgttgacagagtctggcctctcgatggtagattggcatttaataaaggagatgaagccacctacaagccaagag

SEQ ID NO: 677133 - DNA, 74 bp, Homo sapiens
cagatggctttctcactgaaagccctgggaggagcggggacactgaggacctctctccaaattggcctctcaac

SEQ ID NO: 677134 - DNA, 75 bp, Homo sapiens
gaacaatagcttgccctcataaaatcaacaaactccatttatgtaaacccctaattagagcaattgacagctcaa

SEQ ID NO: 677135 - DNA, 75 bp, Homo sapiens
atggaaactcatctgattccagatatgatgatggaagagggctaccacatactgttgattgtgatgaaatgccag

SEQ ID NO: 677136 - DNA, 76 bp, Homo sapiens
ccgaggtcatggtggttcggagttgatttggagcatatgcgaacaataaaacctgaaaaacacttacggttttgcc

SEQ ID NO: 677137 - DNA, 82 bp, Homo sapiens
tcttcgctgtggcatggcggacgaggggaagtcgtacagcggataaaagaatcagagtgtctcaacccttgacaagaggacc

SEQ ID NO: 677138 - DNA, 75 bp, Homo sapiens
ccttccccgcgcagccccgcacggcccgggcccacgaaacaacagttccaggccaggtgcgatggctcatgcctg

SEQ ID NO: 677139 - DNA, 73 bp, Homo sapiens
ccatccaaactcttgccctttgagggaccaggaagcagtcaattatagatttcttcaaaccagcttcaaaaca

SEQ ID NO: 677140 - DNA, 83 bp, Homo sapiens
gaagaaaccagccgaacttcagggtttccaccgttcgttcaaggcaggtgacagcagggacatgtctcgggagatgcaggatg

SEQ ID NO: 677141 - DNA, 100 bp, Homo sapiens
agcagtttgaagcaacaccctagatggatgtacagccatcaagaggatcttaaagtgtggtctttagtggaaaaaaagtgttttccaagcagtgaagcac

SEQ ID NO: 677142 - DNA, 111 bp, Homo sapiens
tggaggcgcgcggccgcgacgactgcctgctgttcgaggccggcacggtggccacgctgggctcgggttatgtatgattttgctgctgaacctggaaataatgaactgacg

SEQ ID NO: 677143 - DNA, 100 bp, Homo sapiens
gatgggatctttccggatcaatccagatggcagccagtcagtggtggagaaccaaaaacttttgctagaaaatcagcttttacgagagaaaactcatggc

SEQ ID NO: 677144 - DNA, 100 bp, Homo sapiens
attctttttcacttcatggatcagttatgcgccattcacttttgaagggaatttctgcccagatagtgtctgcagctcttttgttaggagtgataaaccc

SEQ ID NO: 677145 - DNA, 100 bp, Homo sapiens
cagctctggaaaatgacagccttcatttctctgaacatactgccttatgggacagatcaaccttagattgtaagcaaaagaaatcaaggtcaagatctgg

SEQ ID NO: 677146 - DNA, 75 bp, Homo sapiens
aagaagctgaggatgaagaagatgatgtgggcgctatctccaactgtctttgcacttctgagtaagaatctgatg

SEQ ID NO: 677147 - DNA, 82 bp, Homo sapiens
ctttgccccaatcttgtgtgggcactgaagggggactacaggttcgagaatgatttgtcattaattcggaagaacagaatgg

SEQ ID NO: 677148 - DNA, 76 bp, Homo sapiens
aggggacgcggagggcgactgccgagggtctcagcgggatctggagtcagggctgtttgcagacaaggtcccaaag

SEQ ID NO: 677149 - DNA, 134 bp, Homo sapiens
cctcaggccggggcgagagcccggcacagcccggaccgaaattttgccgctgccttagagcgttagacagaatgaagaaaactttcttgagaacgagaacacatcaggaaacaactcaataagaagcagagctg

SEQ ID NO: 677150 - DNA, 74 bp, Homo sapiens
gcaagacctcaggaggaccctgactcatatcaaggaccagaaaggaggtctcagacttgatccgcagtggaaaa

SEQ ID NO: 677151 - DNA, 98 bp, Homo sapiens
cggcccacagccagagccatgcaagcgcagttctcttcggacagggtttgctactcaacaagcagaaatcattgtgtctgcattggtcaagatcctgg

SEQ ID NO: 677152 - DNA, 96 bp, Homo sapiens
agcttcaccacaaaagcgaaatgggcacaccacaggcccgccaagctgccccctgtgtgctattctttgatgagctggattcgattgccaaggctc

SEQ ID NO: 677153 - DNA, 75 bp, Homo sapiens
ccacaaacgccgcaccaggtcttgtagcagcgcctcctcggtaagccaagatgggtgcatacaagtacatccagg

SEQ ID NO: 677154 - DNA, 100 bp, Homo sapiens
gtgagctgcctaagaaatcatggcattcacacagcccataaagcaagacaggagtctcgctctcagtcaaaatctccaacgggaactcctgctcgtgtaa

SEQ ID NO: 677155 - DNA, 83 bp, Homo sapiens
gtgcggcccggaggcggcggagggcaccccgggcgggcggcggctgctcaaacggggattcagcgtccgatcctttggaacag

SEQ ID NO: 677156 - DNA, 100 bp, Homo sapiens
gaacgattgggctgagcagaggacgacatgttgcttttcgtggagtgagtttactgggacctgtgaccactcctgaacatcagcttctcaagactccttc

SEQ ID NO: 677157 - DNA, 90 bp, Homo sapiens
cagattcgcagtggtcgcttcttctccttgatccacagaccagcatggctgccactgctgctgtgagtcccagtgactacctgcagcctg

SEQ ID NO: 677158 - DNA, 50 bp, Homo sapiens
cctgaaccgcgcggccgaaccctccgtaagactttgaccccgacgcaggc

SEQ ID NO: 677159 - DNA, 83 bp, Homo sapiens
caggcaccatggaccgagcccccacggagcagaacgacaaatcctccacccctgggctcaagtccaacacaccaaccccaagg

SEQ ID NO: 677160 - DNA, 75 bp, Homo sapiens
gcgacctgggcaccagcaggacccgaggccaggagccaggggcccagaaggatgaccagtgtcccagtgaaggaa

SEQ ID NO: 677161 - DNA, 50 bp, Homo sapiens
ggcagctgccccgtctgagaactgtaccaaaaatgatgctgctgtctatc

SEQ ID NO: 677162 - DNA, 97 bp, Homo sapiens
cggccggctgcggtccgtgcggaggctgagccggccgcgggcgcgaccggaggcaggtgatgtgctctatgaactccttcagcatattctgaagcag

SEQ ID NO: 677163 - DNA, 100 bp, Homo sapiens
atgaagaggtgctactgagcaatatcaagcccattcaaacagaggcatgggttgcacgttttcaaaaaatacctaatggtgaaaatgagacaatgattcc

SEQ ID NO: 677164 - DNA, 75 bp, Homo sapiens
tggtttgaatccttccttgatgatgaagaggtaaaggttgacttaattgaactctctgaaaaatgctgtagtgac

SEQ ID NO: 677165 - DNA, 100 bp, Homo sapiens
cagaattatgcagttgctcgatgtgcctcctggtgaagacaaggggggatatgtgatcaaagcatcagaaggaacatcatttacagcgagcaatttcagc

SEQ ID NO: 677166 - DNA, 90 bp, Homo sapiens
gggtggaggagcagaatttactacagcatgtgatttcaggtttgagcacaaaatgaacataattagggaaaataaggatctggcatgttt

SEQ ID NO: 677167 - DNA, 129 bp, Homo sapiens
gcatgaacgcccctccagccttcgagtcgttcttgctcttcgagggcgagaagaagcaaaatgggcatatcaagtttttgaccaaaggagataataatgcggttgatgaccgaggcctctataaacaag

SEQ ID NO: 677168 - DNA, 96 bp, Homo sapiens
cccagccacacgccggcgggcagaagccgcccgctctccgggatatcacgggccccttgatttgtatccagaattttaccgaattgctacagaccc

SEQ ID NO: 677169 - DNA, 100 bp, Homo sapiens
gttcaaggcaagaccgaattcagaaggatatcgacgtcgtgatccagaagtccagagctgaggactgcctgtttgcagtgatgtcttggcattgcccatt

SEQ ID NO: 677170 - DNA, 101 bp, Homo sapiens
tgccaacattatgcgaagaactttacgtggacatcccatttaattctcagaagccgatcacaagagtgtgaacatggctacgcctcttcattcccgtccat

SEQ ID NO: 677171 - DNA, 100 bp, Homo sapiens
ttggaattcctcgaactccaatactatactggcaattgctggagaagattttgcaattgttgcttctgatactcgattgagtgaagggttttcaattcat

SEQ ID NO: 677172 - DNA, 75 bp, Homo sapiens
gtcagctgtgtgtccagaacgtgccatggagacgcttaacgatcctgcccggcctgtacatcggcaacttcaaag

SEQ ID NO: 677173 - DNA, 80 bp, Homo sapiens
cagagcgccgcgcacttcgtcatgttcttcgcgccctgccgagaggccccagcaacatgcagctacaattccagagaccc

SEQ ID NO: 677174 - DNA, 80 bp, Homo sapiens
agatcaccgtgacatccgaggtgcctttctccaaaaggggaggaacaggaagagaagagtgtggcctcctagaaatctag

SEQ ID NO: 677175 - DNA, 82 bp, Homo sapiens
agcacccgcctgccaggcgctcgggggccgaactggccctggactacctctgcagggctcattgtcatccccaagccaggcc

SEQ ID NO: 677176 - DNA, 116 bp, Homo sapiens
ctgaatgcgaatattaaaagctcttctagatatttgagaaataaggattgtctcaaagcttgccaggagcagattgaggcggtgctcctcaatagcctgcagcagtaccgtcagga

SEQ ID NO: 677177 - DNA, 100 bp, Homo sapiens
gtggcagatcattcaggccaagtaaagaccaagtgctttgaaatgacgattccacagtttcaggtggaacgtgtgatcaccattatgcagaatccacgcc

SEQ ID NO: 677178 - DNA, 100 bp, Homo sapiens
aaattatgttaacccagtcatcaaatggctatcagaagagcagaggtatggaggtggcttttattcaacccaggacattccctccagctggaccttccca

SEQ ID NO: 677179 - DNA, 76 bp, Homo sapiens
ccatgagcgagcgcctccgtcccagtcctgacacagctctccctgaggagcagccacattccagctcccagtgcgc

SEQ ID NO: 677180 - DNA, 75 bp, Homo sapiens
gactgatcaaattgtgagaggaaaacagcctacccgcacacagagactctgaatattgtgtttgtaacctacttc

SEQ ID NO: 677181 - DNA, 100 bp, Homo sapiens
ccggcaaattaaagcaattatgaaagaagtcattccttttttgaaggtaagaagagttcctgggtcaagtggtcaccttcataaaaccgaagacggggac

SEQ ID NO: 677182 - DNA, 100 bp, Homo sapiens
tgcctgatggtaaacaggttgatgcggaatcttggaaaactacaccatatcaaattgcctgtggaattagggcggcgactggcggcgcgatggacctgac

SEQ ID NO: 677183 - DNA, 83 bp, Homo sapiens
cgacgctatggcgcactggagtaccctgttcctggcagagcatcagatccatgctgctgctgactcggagccccacagcttgg

SEQ ID NO: 677184 - DNA, 75 bp, Homo sapiens
ggaggaggggctccggctggtctgtggtgaggtttttcgttggaatatacgttgcacatttatggcgattctgag

SEQ ID NO: 677185 - DNA, 100 bp, Homo sapiens
cggcgagcagtctcaggcctttagtgatgatgggtggttctcttcccaaagtggaagccaaattcatcaattatgtgaagaattgcttccggatgactga

SEQ ID NO: 677186 - DNA, 100 bp, Homo sapiens
atatgaatatcatcttggctggaggccaggtggacaacctgtcatcactgacttctgaaaaattcaagatttatggaaagttacctcttatttctttacg

SEQ ID NO: 677187 - DNA, 82 bp, Homo sapiens
gcgggtctgtcatcatgtcgcgttacgggcggtacggaggagttgatattcactgatggactccaaagaatcattaactcct

SEQ ID NO: 677188 - DNA, 98 bp, Homo sapiens
tcttcaccgccaggacctccttcttcaggagagcgccccagggcaagccccgctccggccaacaaggtgcaaatagctatgggcaacttggcctcggc

SEQ ID NO: 677189 - DNA, 76 bp, Homo sapiens
aatcaacaggctttcagccttgaggcaacattggatattattgagtcttcccaagggattgttgaagaaacttctg

SEQ ID NO: 677190 - DNA, 107 bp, Homo sapiens
caagaacctcttcccccgcagagaagagctgctcagtctggcatgcaggtgtccctggccagtgtccttccacctgtccacaagcatggggaacatcttcgccaacc

SEQ ID NO: 677191 - DNA, 100 bp, Homo sapiens
ctacaacgcctacccctcagagcaggagaagctgagcctttctggacagaccaacctgtcagtgctgcaatgtttcagctgaaccatccgttcatcttca

SEQ ID NO: 677192 - DNA, 137 bp, Homo sapiens
cgcagttaggcagcagcagccgcggagcagtagccgccgtgggagggagccatgaagcattacgagattgtaaaccatggctgtgtggatacaagctcagcagctccaaggagaagcccttcatcagatgcaagcgt

SEQ ID NO: 677193 - DNA, 75 bp, Homo sapiens
tggaatcgttcgatgtccccccggaggttttgattcccaccatggccatcacccagtttcggttatttaaatttt

SEQ ID NO: 677194 - DNA, 101 bp, Homo sapiens
gccggctgtacgcacacaccatcgcaggctgatttaaactgcaatattcaagatgatgctggggctttttatggtgtaaccagtcagtacgagagttctga

SEQ ID NO: 677195 - DNA, 90 bp, Homo sapiens
gtttccttgctgatctatttaccaagtggaaggtgtatgcagatcctgactgccttccccgaacactggactttggcctcaacgtgaagc

SEQ ID NO: 677196 - DNA, 74 bp, Homo sapiens
gggacttctgcaaatacagagactcggattaaagtccagcctagggtgaatgtttccccctccaagaaggggcc

SEQ ID NO: 677197 - DNA, 100 bp, Homo sapiens
gcagtagcggcagcagccccagcctcaaggccagtcattgaagtcaacaagagagacatagtcttcctggtggatggctcatctgcactgggactggcca

SEQ ID NO: 677198 - DNA, 83 bp, Homo sapiens
aggaggcccaagacaccacagaagccctccgagcccagcccaagctgacgcctcaggagaagctgaaactgaggatgcagaag

SEQ ID NO: 677199 - DNA, 50 bp, Homo sapiens
aggctggactcggattcgttgcctgagggcggccaggcggccaggctgca

SEQ ID NO: 677200 - DNA, 100 bp, Homo sapiens
gacgggtgcttcctcagatgtcactctggcattcacctctcttcaggaaagaccacagcaagattctttcattcgtctcctcctagcctgggggaccagg

SEQ ID NO: 677201 - DNA, 99 bp, Homo sapiens
ctctctgctactctcaatcgaagagatatgcctagaagtgaatttgaggatgttaaacgtctgaatgaaaaacttaaagaaagcaatacaacaaagggt

SEQ ID NO: 677202 - DNA, 100 bp, Homo sapiens
tgtgtgagcgcgccggaccaagcgggcccagaagcggctacgagttccagggagctctgtcctggtgaccgtgcccgggttatgacgactaatcccaaac

SEQ ID NO: 677203 - DNA, 100 bp, Homo sapiens
gtcgtccggagccgctgcgcgggcaacaggtttgtctatgctggctctaactcgggcgtggtccaggccccgctggccttctgtgggaagcacggcacct

SEQ ID NO: 677204 - DNA, 100 bp, Homo sapiens
ctgcatccagtaccaagagttggtgggagacgggtgaggtacaggctcagtctgcggccaagactccgtcctgcaaggagaacacaaagttatacctcaa

SEQ ID NO: 677205 - DNA, 88 bp, Homo sapiens
tgattggaccagacggccgcctgatcaggagccttgggcaggcctccgaagctgggcgtctctggccgagcctctttttgtggaaaac

SEQ ID NO: 677206 - DNA, 87 bp, Homo sapiens
gacaaatgaaagctctttatttcatcactccgacatcaaaggttgttggatatgggaagtatgaactggaagaggatggtacccctt

SEQ ID NO: 677207 - DNA, 100 bp, Homo sapiens
cgctgccgctatggatgatcgagaggatctggtgtaccaggcgaagctggccgagcaggctgagcgatacgacggacagaactgtaccgctctctttttg

SEQ ID NO: 677208 - DNA, 100 bp, Homo sapiens
accctgctgcgctcgctcctggagaccaacgaaatcccctcgcttatcctgtgggggccgccgggctgcggcaagagtgaagtcaccctgctgagaaatg

SEQ ID NO: 677209 - DNA, 74 bp, Homo sapiens
ggacctatgaatatccagtttgagccatcggatctaagatccaaaagatatttggtttccaggcaggactgacg

SEQ ID NO: 677210 - DNA, 75 bp, Homo sapiens
ggaagtctccacttccaagatctaggaagacggctacaaatgattccttcagctgtggaagaggatgaagatgaa

SEQ ID NO: 677211 - DNA, 101 bp, Homo sapiens
gcttgctttactctttcattgttgggacatgtatattgctgggaaaagcagatactgtctctcacaagttcagaaggaaatcaaaagtcaaagaagctaaa

SEQ ID NO: 677212 - DNA, 74 bp, Homo sapiens
acgcctatctcttcaagtacatcataatcggcgacacaggagctctttgttcaatgcctagccacctattccta

SEQ ID NO: 677213 - DNA, 90 bp, Homo sapiens
ccaacagcttcatatggacagatggacttcaaatgctgtttgtattccagagactagggggagagcaaggacctgctgtttatcttgaca

SEQ ID NO: 677214 - DNA, 98 bp, Homo sapiens
gcagaaacagaggactaattttggcagttctaaatttgaatttgaggcataccaatcccattgtggaaaatggacagactcatccgtgtcagaaagtc

SEQ ID NO: 677215 - DNA, 100 bp, Homo sapiens
gggctgcatggactccacgtccatcagtacggggaccttacaaacaactgcaacaggagtcgaggatggccagaccgtgaggatgcctgtgggaaaaagg

SEQ ID NO: 677216 - DNA, 100 bp, Homo sapiens
gccggcggcgaccacgaaaccgagagcaccagcgacaaagacacagcaagaggcaacattttggaagcagagggcaactctcactggaaaccaaatctcc

SEQ ID NO: 677217 - DNA, 80 bp, Homo sapiens
cctaaagtctgagagagggaagtcgcctctgtgctcgtgagtgcatggggtataagctcttttgaaacagatggtcacca

SEQ ID NO: 677218 - DNA, 100 bp, Homo sapiens
cctgacctccccaaggagatggcctctctgtttgtgacttctcaccaggagatttggtttgggccaagatggagggttacccctggtggccttgtctggt

SEQ ID NO: 677219 - DNA, 100 bp, Homo sapiens
catcctgtccatcgtgtgcctgatgatcacgcagctggctggcttcagtggaccatgtgcaacttgctttggtgtttgctgttttattgccacagatgac

SEQ ID NO: 677220 - DNA, 75 bp, Homo sapiens
ttagaatctattgatccagaattttacaattctctcatctgggttaaatcgagacatgtaagcagcatcatggag

SEQ ID NO: 677221 - DNA, 100 bp, Homo sapiens
tgaatttctagctgcattggaactagtgacagttgatgagtctgaaaagtgtcgaagagacagttttcaggaacaacaagcaattattcctactttccaa

SEQ ID NO: 677222 - DNA, 101 bp, Homo sapiens
gaactttacgtggacatcccatttaattctcagaagccgatcacaagaggctaagaatattgtacacaaagattcttgatgttcttgaggaaatccctaaa

SEQ ID NO: 677223 - DNA, 99 bp, Homo sapiens
tgacaactgaaatgagacatgcacataatataggaaggtgtcttgctgcaggtaactaatgaagaagtggtcaaccacagagtcttcaagaaataagaa

SEQ ID NO: 677224 - DNA, 50 bp, Homo sapiens
ctgaagccgctgcccctgctacagaatgtatgacaacatgtccacaatgg

SEQ ID NO: 677225 - DNA, 89 bp, Homo sapiens
ctcatgtacttgtacctgtctggattattcattattacatgaagtatcatgtttctcaatcatcctcttccagtggtagcgtgtttggg

SEQ ID NO: 677226 - DNA, 82 bp, Homo sapiens
catcatcatcctcaacaccgttgtgcccatttcactctatgtcagtttttgaatcagagccgacaggcacttgaattgaaaa

SEQ ID NO: 677227 - DNA, 101 bp, Homo sapiens
ctggttcataagggcaaacccaggcgaaatcattactataaggatggaaaggcagatgtaaagtccctcatggcgaaatataacacggggggcaacccgac

SEQ ID NO: 677228 - DNA, 98 bp, Homo sapiens
aacctgggactcggcgaatgcggattcgatcattcacatcgggcaacacaactatttatgtgctggaagaaatgattgcatcattgataagattcgac

SEQ ID NO: 677229 - DNA, 80 bp, Homo sapiens
ctcgttttaggtggaagactagtctattggttaccggtgtatacgccagaggtattcttggctgaacagtttgagttcct

SEQ ID NO: 677230 - DNA, 51 bp, Homo sapiens
cgagaactcggagggcaccggagctcactccatcactcgatgagataatat

SEQ ID NO: 677231 - DNA, 100 bp, Homo sapiens
cgtggaggcagaggtggcatggggaattacatgaacgacagccttcgcaccgacgtcttcgtgcggttccagccagagagcatcgcctgtgcctgcattt

SEQ ID NO: 677232 - DNA, 100 bp, Homo sapiens
tcagttctttggaattccattcttttccttattcttctgatgtggatccagccactgaggcggctcccagctgcgttggcgacatggccgacacccccag

SEQ ID NO: 677233 - DNA, 100 bp, Homo sapiens
gaggagaaggaaggcatggaaagttccagccggttcgagagctaggaaccagtgaccttccgggatgtggctgtggactttacccaggaggaatgggggc

SEQ ID NO: 677234 - DNA, 118 bp, Homo sapiens
atccattgcaaaccttattaatctcagggaactggatgtcagcaagaatggccgaatacatcaagcaatggtaacatctttaaatgaagataatgaaagtgtaactgttgaatggata

SEQ ID NO: 677235 - DNA, 100 bp, Homo sapiens
ggaaccgaagattaaaaaactggagccagtccttttgccaggtactaggttttgacaagcttgcatcatgcgtgagtataagctagtcgttcttggctca

SEQ ID NO: 677236 - DNA, 100 bp, Homo sapiens
acgaattcgtcctgcagaatcacgcggacatcgtctcctgtgtggcgatggtcttcctgctggggctcatgtttgaggcttttaaggataccggaaaaac

SEQ ID NO: 677237 - DNA, 101 bp, Homo sapiens
cctgggggcaccgctgccgttccgaggtacaggtttgcagattccgccagcagcacagcaagctctacagatgagtggctctttggcatttggtgctgtgg

SEQ ID NO: 677238 - DNA, 98 bp, Homo sapiens
gcttaccttcaacagactcaagaactggttatacttgaaaccataatgctacaaactctagctgccctggaaggattgtgttcagcttctgtcatcta

SEQ ID NO: 677239 - DNA, 100 bp, Homo sapiens
tgataattatgtgattcggaggacagctgttgatagtggaatccctctcctcactaattttcagggccgcctttttgcctatcctgacactcaccgccat

SEQ ID NO: 677240 - DNA, 95 bp, Homo sapiens
gagttttatggtgtgctttaagagccctgcagaaaaagaagcctgatgttactttggattttatgcttccaagaaaaacaagtttgtcatctgat

SEQ ID NO: 677241 - DNA, 74 bp, Homo sapiens
aacacccgcttctctgtggatgaaggtgctgttggcagcagcggtctgcacaaaagcaggaaaggctattgttt

SEQ ID NO: 677242 - DNA, 98 bp, Homo sapiens
attgaaaatattggggccatttagtaacttctttgcaaggtcttcccaaaagttatcttctgggaagatgccaatacatgatcacgactctggtgttg

SEQ ID NO: 677243 - DNA, 73 bp, Homo sapiens
agtgtcctttacaaatcttcagggaatggccaagtgacaaagcaactattctgtcaaccctggccaatttgga

SEQ ID NO: 677244 - DNA, 100 bp, Homo sapiens
aggtctcgtgggatacctgaaatgcacccgcttcccggcccatgcaggagggttatgtaccgaaggactctaccgtgtcagcgggaataaaactgaccaa

SEQ ID NO: 677245 - DNA, 100 bp, Homo sapiens
ccatgatagactttcacaaattctaacagatttccccaaattggattccacggtcgcggaccctctacctccgactgcaaagcaggattctcgcatctgg

SEQ ID NO: 677246 - DNA, 100 bp, Homo sapiens
tccgctcgtcccgctcgtcatggcctacccgggatacggaggagggtttctccttggaccaagatgactgatggaaaactctccacctctacaaatggcg

SEQ ID NO: 677247 - DNA, 98 bp, Homo sapiens
cgcgagtgtcgcctccacgagcgggcgctgctggatgccgagcgcctcaagcgcgaggcgccttggtgctgaattggggaagtctgttgtatatcaag

SEQ ID NO: 677248 - DNA, 97 bp, Homo sapiens
aggagagcccatggcaggaccggcacggcgaaaccttcaccttcagcactagaaagtttgggatttggctcttacatcagtgaagtaaaagaagtct

SEQ ID NO: 677249 - DNA, 100 bp, Homo sapiens
ctctaaaggtccttctaggagagaggtgaaagagcgatcgtcttctgatcaaaggaggtaaaattgttaatgatgaccagtcgttctatgcagacatata

SEQ ID NO: 677250 - DNA, 100 bp, Homo sapiens
gcttgtgaatctggtgtagaagatgatcaaatggcccaggaactgcaagcacatgttgaccagataactgaaatggcagcagtaatgaggaaagccattg

SEQ ID NO: 677251 - DNA, 83 bp, Homo sapiens
tacagctatgcaaatatagaacactaaagtgttacatgacagatgtatgagggtttgactgccgatgtggaaatttgttttgt

SEQ ID NO: 677252 - DNA, 75 bp, Homo sapiens
gggaaaaagcggccaaagaagtgaagctgctgctactcgaaactcagccacctgtgacaaatttgagtgtctctg

SEQ ID NO: 677253 - DNA, 100 bp, Homo sapiens
gcagatccagtcttgctcagctctcacaggagagggcgttcagttgctctaggtcgtaaccagcctttgaaaaaggagaaaccaaaatggaaaagcgatt

SEQ ID NO: 677254 - DNA, 100 bp, Homo sapiens
cactattgctagtttagttaatcttaaagaactcgacatcagtaaaaatgtttctccacagacactacccaaagcagtccttcactacagtggcagacag

SEQ ID NO: 677255 - DNA, 74 bp, Homo sapiens
cgcagcctcaaggaggaggagtgtccagcagcagatataatttctacagtagaatttaatcattctggagaatt

SEQ ID NO: 677256 - DNA, 100 bp, Homo sapiens
gaagtgctgggggcgctggaggccaagaccggggtggagaagcggtatctggctgcagacaggggcaagtgtccgagtggtgaatcagctacttacagag

SEQ ID NO: 677257 - DNA, 83 bp, Homo sapiens
acgcttagaaagagatcacatctttcgacttgaaaaagggccattaagtttaatgatggcctgagcttacaggaaagttgccg

SEQ ID NO: 677258 - DNA, 100 bp, Homo sapiens
ggtgcctacccccatcactgcttccctcagccataacaggtacacagcttctcctagcatgacttcgatctgatcagcaaacaagaaaatttgtctcccg

SEQ ID NO: 677259 - DNA, 125 bp, Homo sapiens
agcaattaactcagttagaaagaacacgtcagcgaaacccatctgatcgacatgttattatgtgtcgtggaggccgaatgtttgcaccaaccaaaacctggcgccgttggcatcgtagagtgaac

SEQ ID NO: 677260 - DNA, 90 bp, Homo sapiens
atagtttcataaaggaaggaaaattgaattatgaaggacttcccataggaaagggtccacatatagcctcagttacattagctgcttatg

SEQ ID NO: 677261 - DNA, 100 bp, Homo sapiens
ggagactgcccaggtgtggtcaccatgttcctctccgcggtcttctggcaactccaacaacattgccaccgtggacatctccgcaggcttcgtgggctta

SEQ ID NO: 677262 - DNA, 90 bp, Homo sapiens
accggagaatccgcatctggggcacggaggtcctgagaaacatctttgtcctcacctgcatcatcatcgtctgttccctgctcttccctg

SEQ ID NO: 677263 - DNA, 83 bp, Homo sapiens
catctgcagtacaggatatgaagaaattgagggttcttgccatggttggtactaagaagtgcctttcctgacgtctctgctgc

SEQ ID NO: 677264 - DNA, 74 bp, Homo sapiens
gagaggaccccggtacatctgaaagccgggaaatgcgagcagctgatgcagctgtacagtgcgcgccagcggcg

SEQ ID NO: 677265 - DNA, 100 bp, Homo sapiens
atttgggatcacttccaacagtgacgtgttctccaaataccagctcgacaaagatggggttgtcctctttaagaaggccaacgagacttttgcttttgtg

SEQ ID NO: 677266 - DNA, 100 bp, Homo sapiens
aatgactccaacgaattaggtggtctgactaccagtggctctgcagagagtcgacttcaatgttcctatgaagaacaaccagataacaaacaaccagagg

SEQ ID NO: 677267 - DNA, 98 bp, Homo sapiens
cctcccaaagtgctgggataacaggttatgcaatggtctctgcaagatggtttattcttgaattggacctttttaagactgacaaatgctggtacttc

SEQ ID NO: 677268 - DNA, 75 bp, Homo sapiens
aaaatagtaaaaattcctggagttgcaagttgctgcccattgaaagagctgctcggaagcagaaggcccgggaag

SEQ ID NO: 677269 - DNA, 78 bp, Homo sapiens
tgcagatctgggacacagcggggcaggagcgcttccgcaccatcacctccacgttatgaagacagtatggagtttcca

SEQ ID NO: 677270 - DNA, 105 bp, Homo sapiens
caaatgcatcattcagatgcaaggcaactcgaccaagatcctacagtaaggaattgtttgaagaagttatttcaaagatgcggaaggcagggatcaaatccacaa

SEQ ID NO: 677271 - DNA, 75 bp, Homo sapiens
atctccttcatgcagagtgacatgggtcgggaagcagcatatgctcgtattgttgctgttgagaagtcctggctg

SEQ ID NO: 677272 - DNA, 75 bp, Homo sapiens
gtttttcggatcatgtctggtggctccgcggattataacagcactgccagtgaaagatgtagaagataaacctga

SEQ ID NO: 677273 - DNA, 82 bp, Homo sapiens
acatcgcctcggtgcagggctccaccccgtcgcctcgacagtgttgttaataacagtactggtagtggaagggattgccgtg

SEQ ID NO: 677274 - DNA, 100 bp, Homo sapiens
caatggacaaatccattatgaccatcaaaagagtttcataatagaagagcagagtttcttactatgtgaagatcttctctatggaagaatgtcattcaga

SEQ ID NO: 677275 - DNA, 90 bp, Homo sapiens
gccgcttgtcagtgtgatgaagattggcacccaggtgcaggagaacccggggaggaggcccaggctctgctggagggcttcgagggtgag

SEQ ID NO: 677276 - DNA, 80 bp, Homo sapiens
aagacggtgcagggctccgggcaccaggagcatatcaataatagtagacgtcgccatgaaagtgaagaaggagatagtca

SEQ ID NO: 677277 - DNA, 96 bp, Homo sapiens
aggcccgggagctgcggaccgaggttggctcgatgctgttcccagcgggctgacgcacgaggcacacaggaaggaggtggagcaggtgtatctgcg

SEQ ID NO: 677278 - DNA, 75 bp, Homo sapiens
cctgagcctcgcgttgcagcaagagagatgaagaaacgcttcgttaagggactcaggcagtacgggaagaacttc

SEQ ID NO: 677279 - DNA, 106 bp, Homo sapiens
acgagagcaagctctataagattcttcaaggtggggttggcatcccccacatacgctgggtccatggctggcagtggaaatccctgatctgattcagaagggcgtc

SEQ ID NO: 677280 - DNA, 74 bp, Homo sapiens
tgattttcgagagccgaatgcagaggttccaagaccaattccccatgactgtccaagtgcctccaaagtgtaca

SEQ ID NO: 677281 - DNA, 95 bp, Homo sapiens
gacaatatcagcactttacatgatctcttgatgtcacaagtaatgtttaaatcagaaacctccacagctgttgagaaaaaggagaaacctcttcc

SEQ ID NO: 677282 - DNA, 75 bp, Homo sapiens
gcgggagcctttggggcaccacagagatgcggtgggtctgctatgaatgtggtattctctgaggatgagatgaaa

SEQ ID NO: 677283 - DNA, 100 bp, Homo sapiens
ggatggccgagtggtctaaggcgccagactcaagcgataccatctgtgatctagggggtgtcaacgagctggcaaactatggggagtactcaggcgcccc

SEQ ID NO: 677284 - DNA, 83 bp, Homo sapiens
gctcaagttgctactcgggacgctgcacctcccgcgccgcacggtggacgagacgagccaaactcaggctgtaccttgagcag

SEQ ID NO: 677285 - DNA, 87 bp, Homo sapiens
aacagagtatggctgcagaggatccatctgtcttagcaaggctgtcatcacatggccacagatgtctttaattccaaaaacctggcc

SEQ ID NO: 677286 - DNA, 80 bp, Homo sapiens
gcctggtcctgcattacggtctctataagaagatgatcgttaattaccatgctcagcattaccatctcactccatttaca

SEQ ID NO: 677287 - DNA, 74 bp, Homo sapiens
agaggaggttgcccagaagaaaaagatgggtttgtggaggctacagaaggtttgggggatgatgctcttggcaa

SEQ ID NO: 677288 - DNA, 110 bp, Homo sapiens
ggatcgaatccctcacgcgggcgcggatcgaccggagcagagagctggcgagcaaggtcatcatcagatttgaaatatttaaagtggatacaaaactatttcagcaatgc

SEQ ID NO: 677289 - DNA, 113 bp, Homo sapiens
gggaatttccttgtgcctccattcccgggaggggggagcggcgttggaggccaccgtttccaggtaagaatgattgatgttggctgatattggagtgctcattcacatgaagt

SEQ ID NO: 677290 - DNA, 80 bp, Homo sapiens
aaaccacatggctatctaaagaggttttgcactgattgcaaaaataaagtcctccgagcatacaatatccttattggtga

SEQ ID NO: 677291 - DNA, 83 bp, Homo sapiens
catggagaccctcacggagctgggcgacgagctgaccctgggagacatcgacgccgactgcaagtacaagtttgagaactggg

SEQ ID NO: 677292 - DNA, 75 bp, Homo sapiens
ccatatggctggagcatctcttgataaagatgccagcacgagccgccgcttcacgccgccttccaccgcgctgag

SEQ ID NO: 677293 - DNA, 100 bp, Homo sapiens
tttcacttccagccagctgtgaagaagctagaacaacagaggcagcagttgcttactgaacgccaaaacttccacatggaacagctgaagtatgctgaat

SEQ ID NO: 677294 - DNA, 100 bp, Homo sapiens
ggctgctctgcgcctcacggccagatcccagggctcctttcggatctaccctctgccggatgaccccagcgtgccagcccctcccagacagtttcgggaa

SEQ ID NO: 677295 - DNA, 90 bp, Homo sapiens
gagcacaccgggcgcccgaatccgccgggtcccactcacgcccgccggccgccggaaagaccacagcaagattctttcattcgtctcctc

SEQ ID NO: 677296 - DNA, 75 bp, Homo sapiens
tctacatgaaggaggccatccagctcatcgctcgcatcgctgccgccaacggggatgctgatatgctaactggtg

SEQ ID NO: 677297 - DNA, 90 bp, Homo sapiens
ctctgagggagggtccgagccagccgctgttttgccggaggagcccctcaggccactcacagatgaatgcttctcacccggaaacaaact

SEQ ID NO: 677298 - DNA, 100 bp, Homo sapiens
gccaaggaaaaactggagagcttcatcaaaaatagtgatagctttgataaatttggagcaagaggtggtggtggccttcccccgaagaaatttggtaatc

SEQ ID NO: 677299 - DNA, 75 bp, Homo sapiens
aaacttctcaaatgagccaacctgagtcacaaggaagccttaaaaatgtcatgctggtattgggctacaaccgga

SEQ ID NO: 677300 - DNA, 100 bp, Homo sapiens
cttaagcttaatttgttaaactccggatggcgatgttatagccccactcataacacctcaaaaaaaggaatggaacgacagtacttcagtccaaaatcca

SEQ ID NO: 677301 - DNA, 74 bp, Homo sapiens
tcctgctgccttcccgtcgccgctcccgaagcttttccaggtgggaatgatggttagatgctgccgaacatacg

SEQ ID NO: 677302 - DNA, 50 bp, Homo sapiens
acggggcctcgggaagaatgcacaagggttgcagcttcacaggattcaaa

SEQ ID NO: 677303 - DNA, 101 bp, Homo sapiens
cgcaacccatactattcggacagatggcacagaaaccgctgcgcctccgctgagggtcaacagccagcccggcccccagaagcgatgcctttttgtgtgtc

SEQ ID NO: 677304 - DNA, 99 bp, Homo sapiens
tggagaaggccaagaagcagctcctgcatctggcggaggagaagccaggcccagacatgtccgtccttgtaagttaaaagcttccatgggagccttcct

SEQ ID NO: 677305 - DNA, 83 bp, Homo sapiens
ccagaagaagactggtctctcccaccacacagaggcattgaacctggccacatcccaggtaccgtgaacatccccttcacaga

SEQ ID NO: 677306 - DNA, 100 bp, Homo sapiens
tgataacggagaatggaactgtatgccagcagcttgttgtacagtacaagcaagtcttctcgacactgttacaagaaggcattttttccccatttatact

SEQ ID NO: 677307 - DNA, 99 bp, Homo sapiens
tgggtctcgctttgacctgactgtccgcacgcagaagcagggggatgacagctctgaatgggggaactccttcttctgatttgggaatggatgatgaag

SEQ ID NO: 677308 - DNA, 99 bp, Homo sapiens
tgggagtgtccacttagaagcatcacatgacaatgcatctgctgtaggcggtagcagtttgcacgatgaacttgatcctgaggtgatatcagacttggt

SEQ ID NO: 677309 - DNA, 50 bp, Homo sapiens
acaggacccgctttctaccattaagtgcccatgacgcttccggagacaac

SEQ ID NO: 677310 - DNA, 75 bp, Homo sapiens
cttgttaagagtggacaggttaagggactcccaggaatatcaggaactgtggctgcaccatctgtcttcatcttc

SEQ ID NO: 677311 - DNA, 100 bp, Homo sapiens
aatggcagtaaccctgagacaaccacttctggtggttgccactcacctgaggattctccaaaaaaagttggtgatgacattgccaaggcaacgggtgact

SEQ ID NO: 677312 - DNA, 97 bp, Homo sapiens
gcggcggcgcccgcgggtggtataaaatggcggatttcgaagagttgagggttgcactgctgtgatccatcctcatctcctaaagatgcatcctgac

SEQ ID NO: 677313 - DNA, 74 bp, Homo sapiens
aagaaacagttctctcaatacataaagaacagcgtaactccagacatgcactatgagatgcttgctaatcgaac

SEQ ID NO: 677314 - DNA, 100 bp, Homo sapiens
caccctttgtttgactgatgaggaaatcaaggctgatgtgatcttccattgtttgaagcactggacctttaatccactgtaggtatggacagggaagaaa

SEQ ID NO: 677315 - DNA, 100 bp, Homo sapiens
ggacatcaaatgctgaaatatgtttcaacatctgaatcagatggtacagattgctgcagtggaaaatcagggtaaagttcaccttgaattaaaactgaat

SEQ ID NO: 677316 - DNA, 85 bp, Homo sapiens
ctgacccgcctgaagcacctgcgggcgctgctgggccaagtggcatcagagctgagtgatggacgacctgcagtcccagaacctc

SEQ ID NO: 677317 - DNA, 100 bp, Homo sapiens
gttttagaaaaacaagaattacagcagccaacctatgttgccctgagttacataaatagattgatcgtgtcctgtgctgaagatgtttccggaacaacag

SEQ ID NO: 677318 - DNA, 74 bp, Homo sapiens
cacagagttggcagaactgtttgaaaatgctgctaggtcccactcagctcaaaatcttcacttgtgaatactgc

SEQ ID NO: 677319 - DNA, 95 bp, Homo sapiens
gaacttcctcgcactgtgacatgtctgatcccttgctcccatccctgcagcatgaacaaggctatagaaagcgcaattggtggtaacgcttatca

SEQ ID NO: 677320 - DNA, 98 bp, Homo sapiens
acctgataggatttggctacccagcctacatctccttatagtgatttaggatactacattatcaataaactgcaccatgtggacgagtcggtggggag

SEQ ID NO: 677321 - DNA, 97 bp, Homo sapiens
tcctatgatcctaggaaacccactgtgaagatgattgcagtaatagcggccaccctcttccccctttggccagcagaaatgagagtaggtgtttatt

SEQ ID NO: 677322 - DNA, 75 bp, Homo sapiens
gatctccaagtgaaccaccacagtgtgcaacttgctttggtgtttgctgttttattgccacagatgacattactg

SEQ ID NO: 677323 - DNA, 100 bp, Homo sapiens
gctggatgaacaacctgctgatgagggaggtgcccctgcgttgtaccatccgcctgtgggacacctaccagagtccactgccagctggttcgactctttg

SEQ ID NO: 677324 - DNA, 74 bp, Homo sapiens
cattgatgaaatttatggcattcagaacaaaattggaatgggattaacaggatttggagtgtttttcctgttct

SEQ ID NO: 677325 - DNA, 89 bp, Homo sapiens
tctggagccactcaggtttttcctaagctcaactctagccagctaggttcctggtgctttggggcgcatcagagcagagtgacgatgat

SEQ ID NO: 677326 - DNA, 100 bp, Homo sapiens
acgctctttgttccagagcatggagatcagtgaaaggaaagcaagccaggatggatatttacgacactcaaaccttgggggttgtggtctttggaggatt

SEQ ID NO: 677327 - DNA, 74 bp, Homo sapiens
agctctgggggtcatcacagagaaggagacccaggtggactcaaatggatagtgaagtccaaaacggaaagcgg

SEQ ID NO: 677328 - DNA, 75 bp, Homo sapiens
acgacgccaggacggcaagtgtcggcactgtgggaagtagtgaccaaagatggagtctatgtccttgacttggcg

SEQ ID NO: 677329 - DNA, 100 bp, Homo sapiens
gcaaactgacacctcagggacaaagagatctggacagaatcgccggacaggtggcagaaagagcactctattattggaataatgaatacatcatgagttt

SEQ ID NO: 677330 - DNA, 90 bp, Homo sapiens
gagactggagacaaggcgcaaagagcccacaggcggttttgtgagctgcttccccaggagcagcggagcgtggagtcgtcacttcgggca

SEQ ID NO: 677331 - DNA, 100 bp, Homo sapiens
cggagcttatactcctcccagtgacgggtctggagtgcgtgggggaccggctgttggcggcgctgtgcttcgccgtgagccgctcgctgctgctgacgtg

SEQ ID NO: 677332 - DNA, 49 bp, Homo sapiens
tcattcaagaagtttgcttcatgggtggtgacttcacacgccataatgg

SEQ ID NO: 677333 - DNA, 74 bp, Homo sapiens
ttgactggaaacaatggcatttacagaaagagtcaacagcagtggcaacaggaggtgaagtgaaatctgcaaga

SEQ ID NO: 677334 - DNA, 75 bp, Homo sapiens
gctccaaagtcatcgtccggtttctcactgtgatgatgaagcatgggttccccactgaaggacttggtccagctg

SEQ ID NO: 677335 - DNA, 78 bp, Homo sapiens
ttgcccgtgaccgtcgctagaactcagttgtgcgttgcggccagtcgccactgctgcccggtggttctgggaagcgta

SEQ ID NO: 677336 - DNA, 74 bp, Homo sapiens
ctcagaagacagagggttttcttttgaggacactttcttcatgagcaacaaaccccaaagatacaaagacaagc

SEQ ID NO: 677337 - DNA, 73 bp, Homo sapiens
tgctcctccctgcaactaactccattcttaattgcctcagttttatgaccctgtggagccagtggactttgaa

SEQ ID NO: 677338 - DNA, 102 bp, Homo sapiens
actagatgacctgcttgattctgcacctgaaactaatgaaactgttatggaatgggagtacagtgccattaggaccagcaagtgacacaggaattctgaatc

SEQ ID NO: 677339 - DNA, 100 bp, Homo sapiens
ttcccaaaatgaaaatttctccaaaaaggatgtcatgttcctggcctggtctgaatttcctgctgctgttcacaaagatgctttttatctttaacttttt

SEQ ID NO: 677340 - DNA, 101 bp, Homo sapiens
cagggagtgcatcaaaggtgtgaacacagacctggagtggaagatcatttatgttggctcggctgagagtgaggaatttgatcagatcctagactcggtgc

SEQ ID NO: 677341 - DNA, 49 bp, Homo sapiens
aagagcgctcccaggagaaacaagcaacgcagttgctcaggtgcttcgg

SEQ ID NO: 677342 - DNA, 97 bp, Homo sapiens
ctcagtctgacatccacactcgaaaacctttccccgtcagcaaagcatcacaatcagatgtttttatacctatgccagagaacttattagtaaactt

SEQ ID NO: 677343 - DNA, 100 bp, Homo sapiens
caattgttcagttgcaaaaagaaactggagccaccatcaagctgtctaagtccaaagatttttacccaggttatacattggctcttcaaagacgttcacc

SEQ ID NO: 677344 - DNA, 75 bp, Homo sapiens
ttatttcaacactgacaagctagttactagagggcctacaaaggaccagtggttttggcgagtgagaaacaacag

SEQ ID NO: 677345 - DNA, 91 bp, Homo sapiens
tggggaacctgctcaaagccctgggtcgcttggaagaagccaaggtggagccttacaaagtaaacctctctcaagatttagagcatcagct

SEQ ID NO: 677346 - DNA, 100 bp, Homo sapiens
attactttaaaaatcgccaaaaattacttggagcaaagggcagtcggcggagcttcgccaaggctggcgcagtcggccctgggcagtgacggggttcggg

SEQ ID NO: 677347 - DNA, 75 bp, Homo sapiens
attcaaaggacctgcccccagagagaggtctggaacagaatctgacagtgatgaatcagtaccagagcttgaaga

SEQ ID NO: 677348 - DNA, 74 bp, Homo sapiens
tatgaggccagcaagcggaggtgctgggagcgagttggctgacaaagccacagacccaagcatgtcggaacagg

SEQ ID NO: 677349 - DNA, 90 bp, Homo sapiens
cgctgcagccgagatgccgggggagcggggccttccacaccccctccgtgggtgtgtgtaatctatgccagcaattatgacaatgttagc

SEQ ID NO: 677350 - DNA, 100 bp, Homo sapiens
gtgatttccgcatttccaactgagctattattcatggactatccagtctaacagcttgccagttgagaacgatatacatatgtcagtttttgacaagaat

SEQ ID NO: 677351 - DNA, 101 bp, Homo sapiens
aattcctggaaaaagaagtccaagaagcaaaaaagggactgctaagaagataccaccaggccccttcacagatgtagtcactacaaatcttaaattgcgaa

SEQ ID NO: 677352 - DNA, 74 bp, Homo sapiens
cgacccgaggcctccgctgcgcgccaggcgggcaccacggcaggggctgagctaccctcatggaagggagagga

SEQ ID NO: 677353 - DNA, 90 bp, Homo sapiens
gaaagtcagaaagaagaaaaagaagggaaccattacagcaaatgttgccgggacaaagtttgaaattgcagataatctcagtgatacctt

SEQ ID NO: 677354 - DNA, 83 bp, Homo sapiens
cgaggatatcgtgtctggagcagtggagcccaaagacccctggagacatgtgtactaatggtcacttgatgtgcgctggctgt

SEQ ID NO: 677355 - DNA, 71 bp, Homo sapiens
acactggagcagcccagcaagcccagaggttctagctgagggaggtggggctaagttcaagaagtacgagg

SEQ ID NO: 677356 - DNA, 51 bp, Homo sapiens
cttaaagagaccagttagcagatgcttggttggactccatgaaagaattgc

SEQ ID NO: 677357 - DNA, 85 bp, Homo sapiens
cagcagggcgttggctatgtgcccatcacaggtttacccaaggtccagcctagcccctaggcaccatgtcggacagtgatctagg

SEQ ID NO: 677358 - DNA, 97 bp, Homo sapiens
gcttttatatgccagagaaccctgagtgtgcccctgacatgacaaggagccgtcgtcgttagggcaaactctttgattctacaatagctgatgaggg

SEQ ID NO: 677359 - DNA, 74 bp, Homo sapiens
gcatctccaacatgctggatgtcaacggcctcttttgaaggatgacctctaggaagaaagtgttgctgaaggtt

SEQ ID NO: 677360 - DNA, 83 bp, Homo sapiens
cgccaccgcaggtcgaggacggtcggactcccgcggcgggaggagcctgttcccctgagattgttaaaggaaatgggctggca

SEQ ID NO: 677361 - DNA, 74 bp, Homo sapiens
gagaaggcggactccagacagcgaccccagatgaagcatccggaggggtttccaggtatataagcaggtgtgcg

SEQ ID NO: 677362 - DNA, 100 bp, Homo sapiens
ctggttgtcatgtttactgaatgctttcagcttatgtggagaagtcgctgtgaagccacctataaatccatttactgaatttatggagaaggctgtaaat

SEQ ID NO: 677363 - DNA, 99 bp, Homo sapiens
cctgactgtccgcacgcagaagcagggggatgacagctctgaatgggggaactccttcttctgtttccaggagactgacaaggcgtggcatgggggatg

SEQ ID NO: 677364 - DNA, 107 bp, Homo sapiens
ggtgctggacccgaagaaggacgtgctgacccgcctgaagcacctgcgggcgctgctgggagagtagatctggagaaaccaacagctgtgttgaagaaataatccgg

SEQ ID NO: 677365 - DNA, 50 bp, Homo sapiens
tgacaaccgacgttggagtttggaggaaaaacaccaccaggccataccac

SEQ ID NO: 677366 - DNA, 75 bp, Homo sapiens
cttaaaaaaacgtgtgcacacctttttacaggacagtcattttgtttactcattcagccctgttgcaggtcccaa

SEQ ID NO: 677367 - DNA, 100 bp, Homo sapiens
aataggctacttcaaatctgaactgtggatgaggatcgcagtacggaacctgaccgattgcaggtgtttcacaagagagccatcatgccttacggtgttt

SEQ ID NO: 677368 - DNA, 50 bp, Homo sapiens
ggaatcgatctgacaccgagcagatgatgtctttctacctaaagatattg

SEQ ID NO: 677369 - DNA, 97 bp, Homo sapiens
ggactgtaattccagctacatgagaggattgcctgaggccaggagtttgagaccagcctgaacaacatagttagtaactttggaaaacagtccatgt

SEQ ID NO: 677370 - DNA, 83 bp, Homo sapiens
ctcgtcgacatgagtgatgtggaggaaaacaacttcgagggcagaagagttgtggttgtagaagacataaaaagatggaaaac

SEQ ID NO: 677371 - DNA, 100 bp, Homo sapiens
ctgttctccaggagtttggtagagtatgcccaagaggacagagaacgaatgcacagaaatattgtcagccttgcacagaatctcctgaactttatgattg

SEQ ID NO: 677372 - DNA, 73 bp, Homo sapiens
gagaatagtgttttcttcatttgatgcagatatttgcacaatgagccagatgaccaagatgctccagatgaac

SEQ ID NO: 677373 - DNA, 101 bp, Homo sapiens
aaaggagccaggaattcccagtttgacaccacaggctgagctccctgaaccagctggaaagggctacccctgcaaaacatgtaagatagtgctgaactcca

SEQ ID NO: 677374 - DNA, 100 bp, Homo sapiens
tcctgcctcagcctccggagtagctgggattacaggtgctggagaatctggtaaaagcaccattgtgaagcagatgaggatcctgcatgttaatgggttt

SEQ ID NO: 677375 - DNA, 100 bp, Homo sapiens
atccagatatcaaggcacaatatcagcagaggtggcttgctattgatgctaatgctcgacgagaagtcaagaactatgcccatctgctaaacatcccgag

SEQ ID NO: 677376 - DNA, 100 bp, Homo sapiens
tctgatggtcagcgtcgttctatgatggaatggggagaagatattaaagcagtttcaaaagatgaagcagtgatgttggtgaatcatcaggcaacaggag

SEQ ID NO: 677377 - DNA, 75 bp, Homo sapiens
tgcatttcctcgtcgagcgcaacccaagtgggccccatgctgattgagtttaacatgcctgtggacctggagctc

SEQ ID NO: 677378 - DNA, 100 bp, Homo sapiens
caacggttagcggtggcaggggctgactgagagcgtctgcttggttgctgttgaagaaatctggttgcagaacaccacggattgaattggaagagatggg

SEQ ID NO: 677379 - DNA, 90 bp, Homo sapiens
tgggaggccggccggtgccagcacctttcggcttctgagacggcggcagcagcggcattcaggcaagtatatcgcgtcaacacagcgacc

SEQ ID NO: 677380 - DNA, 100 bp, Homo sapiens
gagctgctgagctggaagaggccgctgcggagcctgctcggcttcgtcgctgccaacctgctgttctgttgaaatggatgcagtcagaactgaatgttga

SEQ ID NO: 677381 - DNA, 98 bp, Homo sapiens
ggaagtcttgaagaatagagccataaagaaagcaaagcgcagaaatgttggatttgaagtggtgaagcagtattttccaatttgaagattcatttgaa

SEQ ID NO: 677382 - DNA, 50 bp, Homo sapiens
tacaccttttccacagggaattgagttgctttatgaaaactttatcagtg

SEQ ID NO: 677383 - DNA, 97 bp, Homo sapiens
acatggagattggcacaggaccagactcaagacacacaactcataacagttgatgaaaaattggtatgccattgcattggccttaagggaaaagcag

SEQ ID NO: 677384 - DNA, 100 bp, Homo sapiens
tccattgtgctgttgagagcctctagtaaatttttcagacacatagcatctttcctgtcagtcttcaaactagtattaataggcttaataattgttggca

SEQ ID NO: 677385 - DNA, 96 bp, Homo sapiens
gtgggtctcattgccctcaccatcgccctcttcaccatctatgtcctctggacgctggaacacagtggttccactgtaccttccattttgaacagg

SEQ ID NO: 677386 - DNA, 97 bp, Homo sapiens
catctgtggatctcaatcaagttagcatgctttctccagctgccctatcacctgccagctcatcacaaagccataggaaaaggatacagagtagagt

SEQ ID NO: 677387 - DNA, 100 bp, Homo sapiens
tacctgtgaacagtacgcagtgaatgttaccagcatctcagacatgtcgaaaaagatgttttgatccctaaaataatgagagaaaaggccaaagagaggt

SEQ ID NO: 677388 - DNA, 75 bp, Homo sapiens
gtcacttgtggctgcagaccctgcgggagatgctggagaagctgaatgactttgaagaagccaaggaaattttga

SEQ ID NO: 677389 - DNA, 90 bp, Homo sapiens
cgctggctgtggtcggtgctggcggcggcgcttgggctctgaggaagaaggcacctacgatcaaactctggagttccgtaggggaggtga

SEQ ID NO: 677390 - DNA, 100 bp, Homo sapiens
ttgaacagactcacccggaaatcagaaagcgctatgaccaagataagctcagcatgtcagccagatgaaccatggaaactggagaggaacacaggcgata

SEQ ID NO: 677391 - DNA, 50 bp, Homo sapiens
tatatattggaaatctaacatggccatgtctacttcccagagtcctactc

SEQ ID NO: 677392 - DNA, 117 bp, Homo sapiens
ccgatggtcttccgtaacctgcgggagaggtttggaattgatgatcaagatttccaggcacctgaatggacagaagaggacctcagccaactgacaagaagtatggttaagttccca

SEQ ID NO: 677393 - DNA, 98 bp, Homo sapiens
cacaactaaaccttctcttatcaacatcatgattgagccacaagccacacggaaggcccaggctgtccaggctcagggaggcgagagccagcaggagg

SEQ ID NO: 677394 - DNA, 89 bp, Homo sapiens
ggcccctgatcttctctgctcagggaccactcttatctgacccagagacagaatcgcctaccatttggtgcaagcaaaaagcaatcagc

SEQ ID NO: 677395 - DNA, 83 bp, Homo sapiens
cagtgttttgcagtttggattttcagaatggggatacttgaatgacaatgcagatcttcgtgaagactctgactggtaagacc

SEQ ID NO: 677396 - DNA, 100 bp, Homo sapiens
ggaacggggctcccaggacctccactaatcaccagaacaaaatgtgcagggtatttgaagtataccatacaactgttttgaaaatccagcgtggacaatg

SEQ ID NO: 677397 - DNA, 100 bp, Homo sapiens
gctgggggcccctgcgccgagtggacgcctaccgcatctacttgaatggacagcaaattatggatgaacctatgggagaggaggagattaacccacaaac

SEQ ID NO: 677398 - DNA, 100 bp, Homo sapiens
tgaagactattgtggaagaagcatccattaagtgactgtgaagtgctgaccacactcaccccagacactggccgtatcctgtccaagctacatactgtcc

SEQ ID NO: 677399 - DNA, 100 bp, Homo sapiens
tggaacccgaagaagaaaggattcgttacagccagagattgaggtttttcattagtcaatacagtgaaggctggcatgatcatcagcttcccatccaata

SEQ ID NO: 677400 - DNA, 110 bp, Homo sapiens
ctgaacttaaaaagcagtctaaacctgtgaccacccctgaagaaattgcacaggtctatgcctctcagcgaatgagagctggcaaaggcaaaatgagaaaccgtcgccgt

SEQ ID NO: 677401 - DNA, 74 bp, Homo sapiens
tgtcaaggtggcctaccaggaggccaggggtgtcgccatgtttttcccaggtcatgagtctcgggctacagaag

SEQ ID NO: 677402 - DNA, 100 bp, Homo sapiens
caagatgcggatccgggcctttccgattctcgctgaagtctgttaattctactttttgagtacttatgaataaccacgtgtcttcaaaaccatctaccat

SEQ ID NO: 677403 - DNA, 90 bp, Homo sapiens
tctccttccatctggatgtcaaaggagccatgtggctagaaatcctcctcacttcagtgctgggctttgccatctactggttcatctccc

SEQ ID NO: 677404 - DNA, 74 bp, Homo sapiens
tgttggacatgctgacacgggtttggagcatatacccaacttttctctggacataaaacgaccatcaccagctg

SEQ ID NO: 677405 - DNA, 98 bp, Homo sapiens
gaagtgttcctcgggggtgcagcgggagcatgctggaaacagcagatggcagttcttcaacaacgtttctctgcatcaccacatgcaggtgatggaag

SEQ ID NO: 677406 - DNA, 74 bp, Homo sapiens
ccttgcctcccagcctgacctggctctttcgcccctcggagaaccggcctcagacattccacagctacctagag

SEQ ID NO: 677407 - DNA, 98 bp, Homo sapiens
gagcagcaaaaaagactgcaggcgatcataaagaaaatcgacttggactcagatggctttctcactgaaatgggatgaagctctcttgactatgagta

SEQ ID NO: 677408 - DNA, 100 bp, Homo sapiens
atctgtctcctattggaacatctctggttggtcaaagaaaaagtgatgtatgaaaaagaggcaaaacaacaagaagaaaagattgaaaaaatgagagctg

SEQ ID NO: 677409 - DNA, 83 bp, Homo sapiens
gaaaatgcagatccactgagaaagggaataaggtattttgaaggtggcgtctcatctgtctacctctgggatctggatcatgg

SEQ ID NO: 677410 - DNA, 75 bp, Homo sapiens
catcaggtgactgtcccagaagtgaatcgcaggagctctttctgagatgaagagaattctcaatgtcaagatttg

SEQ ID NO: 677411 - DNA, 74 bp, Homo sapiens
cagacagaaacaggttcttggagtgctgagggatcgataaagtttcactgcagaaagtctccactgcggtatgc

SEQ ID NO: 677412 - DNA, 90 bp, Homo sapiens
cgcggaggaggctttggggaccgggaccgggatcgtgaccgtggaggtgagaaagatcagtctaaagaaaaggagaagaaagtgaaaaaa

SEQ ID NO: 677413 - DNA, 75 bp, Homo sapiens
agaattacgggcaagcgctgttcaaacccatgaagacggggaggtttactgcatcgacgcgcggttctacgggaa

SEQ ID NO: 677414 - DNA, 50 bp, Homo sapiens
cgccgctcatccccctctcccagcagggctgaagaagatgcagagcagcc

SEQ ID NO: 677415 - DNA, 75 bp, Homo sapiens
ctctgcgtcaacgccatcgcagtgctgcacgaggagcgattcctcaagaacagatttttacctcctataactcca

SEQ ID NO: 677416 - DNA, 73 bp, Homo sapiens
ggcggagcaccgccttccggcagaagctggtcagtcaaatgttgtcggggccaaagtggtaacgaacgcccgc

SEQ ID NO: 677417 - DNA, 101 bp, Homo sapiens
tgttcacgcacgggatccagagcgccgcgcacttcgtcatgttcttcgcgccctggctgaaggtgatgtggccgccctcaaccgacgcatccagctcgttg

SEQ ID NO: 677418 - DNA, 83 bp, Homo sapiens
tcacctcggtgtctgcagcaccctccgcttcctctcctaggcgacgagacccagtggctagggctcccactgcagcagctcgg

SEQ ID NO: 677419 - DNA, 74 bp, Homo sapiens
ccagaagatgagaccgcaattcgagaatcaaagggccgggagcgatggtgtttcagtcacctccagtaacacgg

SEQ ID NO: 677420 - DNA, 100 bp, Homo sapiens
acctcgatggcagcgacacaattgtctgtgacagtaacagtacttgggatcccccagttccaaagtgtcttaaagagctggaagtcgagtgtgctactca

SEQ ID NO: 677421 - DNA, 103 bp, Homo sapiens
ggccgctctgggcgactgtgctggcgctgggggcgctggcgggcgttggcgtaggagttccagggtctccctccactgctgtagtaacccgggtccggggcct

SEQ ID NO: 677422 - DNA, 101 bp, Homo sapiens
gaacgactagtggtcgtggctgaacattgtgaacgtagtctggaagacttgcttcgagaaaggaaacctgtgaggacaatgaaaagcgaaccccattgcac

SEQ ID NO: 677423 - DNA, 100 bp, Homo sapiens
cacctctgagaagggagacgacgctgctgggtccgctgagcggggcgacccgagaactctaagaaggagctgatgtggaggagcagctgagacagttcaa

SEQ ID NO: 677424 - DNA, 75 bp, Homo sapiens
agactgaaatgggggcgaccattcttagccaaatgatttctcagtatcactaaaagcacaagggaaaaacaagca

SEQ ID NO: 677425 - DNA, 100 bp, Homo sapiens
tgaaggatgtgctgtcggtggagagcgcggggacgctgccgtgcgcgccagagatcccagactgcgtggagcagcctaaattatacagatctgtgattga

SEQ ID NO: 677426 - DNA, 75 bp, Homo sapiens
accatttagtaagaagaattccagtcttataaacatttatgacattaacagagaacaggactatgtcaagaattc

SEQ ID NO: 677427 - DNA, 92 bp, Homo sapiens
ccgctggattctgaggaccagcagatggccagtcacgagaacccaggttttaaaatcaaagatgggaaaatcggagaaaattgcccttcccc

SEQ ID NO: 677428 - DNA, 100 bp, Homo sapiens
caagttccatgcaagttttgtggagcaagataatttctgcattatcacggagtactgtgagcaaaaatttctctgaagatgattttgcttctgcattgag

SEQ ID NO: 677429 - DNA, 88 bp, Homo sapiens
aggtgttaccggaacggcggcgacaagggtgttcccgaactagagtggaaatgcactcggtgatggaaagagagccactattctgaag

SEQ ID NO: 677430 - DNA, 90 bp, Homo sapiens
cagttcaaccgcatgaagcagctggctaaccagaccgtgggcaggaaactactttgcttcgcactttttcatgggaggagagaaattcga

SEQ ID NO: 677431 - DNA, 100 bp, Homo sapiens
tcagctgtttcctgagttgctgtttcttgggactgcgaagctatacaggctagaataacttgtctgactaccagtattcttggatgcagaagtgctgaag

SEQ ID NO: 677432 - DNA, 75 bp, Homo sapiens
ggcgaacgcggagagcacgccatgaaggcctcgggcacgaacttggagcgtgatgcccagaagtgtgtgaactgg

SEQ ID NO: 677433 - DNA, 96 bp, Homo sapiens
gcttgcattggagactgagcaaaaggaaatgtgaaacgaataacatgatggaatatttggaagctgaaggtgttcctgaagtatctgaaaaatatg

SEQ ID NO: 677434 - DNA, 75 bp, Homo sapiens
gtcagacctggaggtggcggacaggtgtcgtgaaaactacccctaaaagccaaaatgggaaaggaaaagactcat

SEQ ID NO: 677435 - DNA, 100 bp, Homo sapiens
ttgtgcctccaaggaaaatccacctcgcagcttgtaaatctacaggtccctggaatgcaggagattctgctcattggcttctaccaacctgatgagcccc

SEQ ID NO: 677436 - DNA, 115 bp, Homo sapiens
ggacgtcaacagcaatggcggaaggagaagatgtgccgccgctgccaacgtcgagcggcgacggctgggccgttgctccagggagaactgcaaatatcttcatccacccccacat

SEQ ID NO: 677437 - DNA, 100 bp, Homo sapiens
aagtcaacccggagcgtgaggacagtgagactcgaacatggaaagaggcaaaacctgatgaattaatggattccaaattgagatgcgtatttgaaatgcc

SEQ ID NO: 677438 - DNA, 100 bp, Homo sapiens
taggtcttacgaagtcgaaaagaggttcaggtataaatgaagattccaaggacataactgcctaccacacagtgtttcttacagccatattaggaggaac

SEQ ID NO: 677439 - DNA, 75 bp, Homo sapiens
caccgactcttgtatcatgagcattggatttgatcacatggaatgcagtaatagtggccttgtcttcaaaatcat

SEQ ID NO: 677440 - DNA, 75 bp, Homo sapiens
cgctgcatccgctcgacctcgtgaagatccgcttcgccggtggattcaccaatgaacttgaagcatcctcatgac

SEQ ID NO: 677441 - DNA, 100 bp, Homo sapiens
gtagccatctttgtgttcatggtggtggtaaatggaaatcccttctatgagtacgggcaccggcttcccctacagatggtcacccacctgcaagtggatg

SEQ ID NO: 677442 - DNA, 75 bp, Homo sapiens
ccagcaggtggtgcggaaagtggctggattggacaagcaggcaaagctgagctttgcagttcctgaccccttaat

SEQ ID NO: 677443 - DNA, 90 bp, Homo sapiens
gattgatagtctaatgaatgcggttggttgtctgaagtctgagacgctgaccggaaaggagattgagattgacattgaacctacagacaa

SEQ ID NO: 677444 - DNA, 131 bp, Homo sapiens
aaccaggcatctctgggtgggcaacttacccgagaacgtgcgggaagagaagatcatcgagcatttcaaacggtgctggagaatctggtaaaagcaccattgtgaagcagatgaggatcctgcatgttaat

SEQ ID NO: 677445 - DNA, 90 bp, Homo sapiens
ggaacatggggggaccatatggtggaggaacagattatcagtctggtcaatcagatctgcggcaaagtgtctggtaaaaacggcagcatt

SEQ ID NO: 677446 - DNA, 83 bp, Homo sapiens
aaccctgccagcacctggaccttggacattcagacttcagaatggtggatccataaagaacccagccaacccgcagagggagg

SEQ ID NO: 677447 - DNA, 98 bp, Homo sapiens
ttgctattaattaacagactttgtggggaaaaaaaggagcttgccttctgagctttgtaccaaagacctgggaaaaagtatctgactgtcttctctca

SEQ ID NO: 677448 - DNA, 130 bp, Homo sapiens
ttcgggctggttgttccgttgcgagctgcagctgcgatctctgtggtaggcccagagttgtggaaagtaaaaatgtagccctaccaaaaggaactattgtactggcttctccaggctggacaacgcactc

SEQ ID NO: 677449 - DNA, 97 bp, Homo sapiens
agctctgaaaaactcttcaacactgttattgtaaacaaagatggatagctcccagttgatccattgtcgggagcttgtggcacatcacctttctact

SEQ ID NO: 677450 - DNA, 75 bp, Homo sapiens
gagaaacctcgtggcctggtctccattatttgagatgagttacatcttggaggtaagaatgattgatgttggctg

SEQ ID NO: 677451 - DNA, 100 bp, Homo sapiens
actggagatcagcaccaaatcccacagaggcatctgagcctgtgaagccccgcgcaccaaatccctggttacaaagttcagtcccaggcctaaccacacg

SEQ ID NO: 677452 - DNA, 96 bp, Homo sapiens
tgcaggagcgcgagaaggatatcctgacggccatcgccgccgacctgtgcaaggaaactctgatgaggaagaaagtgcttcagaatctgaactttg

SEQ ID NO: 677453 - DNA, 83 bp, Homo sapiens
ccgacatgttcacgcacgggatccagagcgccgcgcacttcgtcatgttcttcgcgccctggctgaaggggatgctaagggag

SEQ ID NO: 677454 - DNA, 98 bp, Homo sapiens
ataggattaaatctgcctgcagggagacgtaaagctgccaacgttaccctgctcacatcactagtagaggcatttttttgagataactgatgaccaat

SEQ ID NO: 677455 - DNA, 100 bp, Homo sapiens
gttcttcatcacctatggcaaacagccacatttggacatgaaatacaccgtatttggaaagttgtgagaactgctttattggatgctgctggtgtggcct

SEQ ID NO: 677456 - DNA, 97 bp, Homo sapiens
gaaagttttactactcgccaggatctccaaggtgggctcggtggtggccgtgggctggatccgctcccgcaaggctgtggactggcgcctctttcgg

SEQ ID NO: 677457 - DNA, 74 bp, Homo sapiens
ggcagcacagagctacattcgagccgtgctggtatagaggactctaagaagtggggcatgctgtttctggtgaa

SEQ ID NO: 677458 - DNA, 100 bp, Homo sapiens
aaggggaggaaggccaaagccttatatgatttccgaggggagaatgaagatgaactttccttcaagggaagtgttcgccagttactacatgaaaagataa

SEQ ID NO: 677459 - DNA, 75 bp, Homo sapiens
gggcgctccggtggcggcggaggtattgacctgatggacatggcttcggacatcctgcagcccaaaggagatgat

SEQ ID NO: 677460 - DNA, 118 bp, Homo sapiens
actcagcccacatgcccgctcacctgcgctgtgatgcctgcagagctgtggcttaccaggaattgaatgatctggcacgggaccctccagcacagtgttcagcaggtcctgttggaga

SEQ ID NO: 677461 - DNA, 50 bp, Homo sapiens
acctaaagcctgactggggcaagcttatgtccctgatgccaaaaatgcac

SEQ ID NO: 677462 - DNA, 95 bp, Homo sapiens
gctcgtcccgctcgtcatggcctacccgggatacggaggagggtataaccccgttttcacacgaatggccccttcacatatttgaagactaccgt

SEQ ID NO: 677463 - DNA, 111 bp, Homo sapiens
ggaaagcaagggattgctggctacagcttcagaagaccgaagcgttcgtatctggaagggaacggcaggagcagctgatgggatatcggaagagagggccgaagcccaaac

SEQ ID NO: 677464 - DNA, 101 bp, Homo sapiens
tcaagatgtaggacatctccatcaattcaggaggctccctccgggttacccccactccagagttggaaatggaggatgaagatacaattgatgtgttccaa

SEQ ID NO: 677465 - DNA, 48 bp, Homo sapiens
acgaggatgtgctggagcggtacaaagtgtcgagatggctatgaaccc

SEQ ID NO: 677466 - DNA, 100 bp, Homo sapiens
ccctgggggagctgaaacagaacctgtccaggagctggcatgacgtgcaggtctctagcgcctcttcagtaggttacctgcaacatccaggatcagaaca

SEQ ID NO: 677467 - DNA, 75 bp, Homo sapiens
caggccagtcgcctccaggccaagagggatccttcacccgtgtctgactgattcttgctattccaaatcctcttc

SEQ ID NO: 677468 - DNA, 147 bp, Homo sapiens
ctaccatcagtgaatgacctgttgcagtgctttcattgaagtgttcttcgttccctcagcaatatgattgtatgcttcagaagtgtccttctgttgatgacttcgtaagtgccctcgtttccgacttggatctggacttcgaaactt

SEQ ID NO: 677469 - DNA, 75 bp, Homo sapiens
aagatgatggagatttgcctgtggtctatgttaacaatgaatgggcaaccagtgttggggaaggagggagctttg

SEQ ID NO: 677470 - DNA, 51 bp, Homo sapiens
aaaaatcagttccaaactaggaagagtgcacggcctggagatagagggcag

SEQ ID NO: 677471 - DNA, 83 bp, Homo sapiens
ccttagctgggctggatgagggagcccttcggaagctgggggatatgagactttctactcggaatatcctgagtgttgcgtgg

SEQ ID NO: 677472 - DNA, 90 bp, Homo sapiens
cacacgccctgtgaagaaggtctccagtactccaaagattcaggtttactcacgtcatccagcagagaatggaaagtcaaatttcctgaa

SEQ ID NO: 677473 - DNA, 75 bp, Homo sapiens
cgagcgcggcgatggggagcggcggcgatagcagaccccacgttagctgaaatgggaaaaaacttgaaggaggca

SEQ ID NO: 677474 - DNA, 100 bp, Homo sapiens
gattggcaggagattatagctctgtatgagaaggacaacacctacttagagtcttaccagcaaggggtcctgtctgccaccatcctctatgagatcttgc

SEQ ID NO: 677475 - DNA, 50 bp, Homo sapiens
ccgctgactgtgcccctgtggaaggaggattcagtggtcccaatttaaag

SEQ ID NO: 677476 - DNA, 100 bp, Homo sapiens
ctgcagcagtcagcccaaaggaagggaatgcagagagcaaccaatgtcacctaccaagcccatcatgtcagcaggaacaagagaggtcaggtggtgggga

SEQ ID NO: 677477 - DNA, 99 bp, Homo sapiens
catgagcgagcgcctccgtcccagagttgaagtattgataacaccaaggaactctatcacaatttgaaaagataagcaaaagtttgatttccagacact

SEQ ID NO: 677478 - DNA, 83 bp, Homo sapiens
atttctgttcactgtatgcacatattggtacgttgcagtcactttctatgtctgagcccccttacccaggaatggaacaacct

SEQ ID NO: 677479 - DNA, 75 bp, Homo sapiens
tggcggcccatcaccggcagaacacagcagggcggaggaaagtgcagccaaaacctattgatgtacaagtcatta

SEQ ID NO: 677480 - DNA, 75 bp, Homo sapiens
acctgtacagcatcaactacctgcactttggggagcctaagtcctgttgggccatatggtgctcttcccagtctg

SEQ ID NO: 677481 - DNA, 90 bp, Homo sapiens
gagtatcgaaaccgtttccttcatatgcatgagctgcaggaatgcaagtcaagccagagatctgttatcaaaaatgttagtgattgatcc

SEQ ID NO: 677482 - DNA, 98 bp, Homo sapiens
attgacccatagcctggtcctgcattacggtctctataagaagatgatcaaaatggacccaagtggggtcaaagtgctggaaacagcagaggacatcc

SEQ ID NO: 677483 - DNA, 100 bp, Homo sapiens
aagaatatcatcttcaacttgtagacacagccgggcaaaatagctgaaacctttggacttcaagaaaattatatcaaaattgtcataaataagaagcaac

SEQ ID NO: 677484 - DNA, 100 bp, Homo sapiens
ccagcccgccgaagccgcgccagaactgtactctccgagaggtcgttttcccgtccccgagagcaagggatattggagaagatattccactagacaaaga

SEQ ID NO: 677485 - DNA, 95 bp, Homo sapiens
agcagccggcagcagcagcggactgtatgaaaacaagggagaggctgacttcgtggaatctttgctgcagctcttcaggtccatcaatgacatga

SEQ ID NO: 677486 - DNA, 85 bp, Homo sapiens
gaagccaagtgccatcttcaaaatttcaggtcttaaatctgagagagtctacagggagattgaacaggtgattggcccacatcgc

SEQ ID NO: 677487 - DNA, 74 bp, Homo sapiens
aaaggagtggacattgctagcaatgagctcccaaagccatccaggaaggttgtgcaggaccagcgttccctgtg

SEQ ID NO: 677488 - DNA, 82 bp, Homo sapiens
gcggcggcggcgacggccggaggtgtacggaatgcccaattcttctggactcatgaaccgtcgtgatgccattgccaaaaca

SEQ ID NO: 677489 - DNA, 98 bp, Homo sapiens
cctcctctcctgccaggtgtgtggctgcacaggagtcttgctgatggttggacgtgataagtatgagcctgcagctgtttcagaacaaggtgataaaa

SEQ ID NO: 677490 - DNA, 83 bp, Homo sapiens
ctcggccgcgcggactgaaggagactgaagaaatattgctgacactgctgaagccagttgcttcttcagctgaccgggctcac

SEQ ID NO: 677491 - DNA, 97 bp, Homo sapiens
caatcaaaatgggacttccttgagggcaggcctgtcttgcatctgtttctccaccacctagcctggaatatagtccccttcccctgagcccatctac

SEQ ID NO: 677492 - DNA, 125 bp, Homo sapiens
gagtccactttgcgcaggaagtacaccctcattgacaggaatgactttgcagccatttctgctatccagaagtgacagaggccaagcaagaattaataacctaccctcagcctcagaaaacatcc

SEQ ID NO: 677493 - DNA, 90 bp, Homo sapiens
gtgccccggcgccacctggagagaggccgcgtcctgggcagaggacacagcattgttggttttgccatgtactattttacctatgacccg

SEQ ID NO: 677494 - DNA, 83 bp, Homo sapiens
cagttggaagcagccgatccagcctgcggagcctgtggggcaggtggttgtactacaatcccagagtcagacctagaagaaag

SEQ ID NO: 677495 - DNA, 82 bp, Homo sapiens
cctgttttcaacaaagacacatttatctgagctctattaccaggttttaaacttcgccatgatcgtgtcttctgcactcatg

SEQ ID NO: 677496 - DNA, 100 bp, Homo sapiens
gaaagcggcgggaagttcgtactgggcagaacgcgacgggtctgcggcttaggatccatcatgttacacaaaatggaggactatataaaagaccgtttaa

SEQ ID NO: 677497 - DNA, 85 bp, Homo sapiens
caacagtcgctcctccaggccacactgtatcgtcagcgtcaactatgtcctcacctccagtgatccacaagctcagaaatacatc

SEQ ID NO: 677498 - DNA, 100 bp, Homo sapiens
ttacattgaagctgcatataaaactgctgaactgcaagcacatgttgaccagataactgaaatggcagcagtaatgaggaaagccattgaaattgacgag

SEQ ID NO: 677499 - DNA, 75 bp, Homo sapiens
ctgttgctcctccttctgcccttccttctgtatatggctgcgccccaaatcagtgttctaagaacggaagcatct

SEQ ID NO: 677500 - DNA, 100 bp, Homo sapiens
aatatgcagcaaagattacaccaagatctgtgctgaccacaggaattggatctactagtgcagtgtcccagaagcttttgttgacaattccagtttccga

SEQ ID NO: 677501 - DNA, 101 bp, Homo sapiens
acgccgctgaccaccctcaacacggatatcagcatcctgtccttgcaggatttcagatgcatgccaggtttccactgattgccagaactcgagatcactac

SEQ ID NO: 677502 - DNA, 83 bp, Homo sapiens
cagagcctcgcctttgccgatccgccgcccgtccacacccgccgccagcgtttgcctcagcatggagggcggggccgcggcag

SEQ ID NO: 677503 - DNA, 50 bp, Homo sapiens
aacattggaaagaagagaatttgattaaagagtctattgttggggaaatc

SEQ ID NO: 677504 - DNA, 75 bp, Homo sapiens
tgatactgaaggggtcgtcactgtactggtatagcaatcaaatgcttcaaggttactgactttttatgatgtttg

SEQ ID NO: 677505 - DNA, 83 bp, Homo sapiens
caccgaggaccagctcaatgacagttaccagatgtatgctactcatggtgggtcctggcttccctaaagataattggaagact

SEQ ID NO: 677506 - DNA, 101 bp, Homo sapiens
caagttaaagaaggaggacctgcttttgaagctggattatgtacaggaattacatgaatgacagtcttcgaaccaatgtgtttgttcgatttcaaccagag

SEQ ID NO: 677507 - DNA, 74 bp, Homo sapiens
tgacatttaattttagggtcctttatatagaagggagagtaggaagacagaatctatgattcaaaaaaatgttg

SEQ ID NO: 677508 - DNA, 74 bp, Homo sapiens
gctggtgcggctcatcattctggtggttgtgtcaaaccgattggtgacatctccatgctgtattgtcacaagca

SEQ ID NO: 677509 - DNA, 75 bp, Homo sapiens
cctggcagtgcgtcaatcagagcgtcctgtgcgagtcctccggaggctgagagcaaacggctgcactaggaaccc

SEQ ID NO: 677510 - DNA, 75 bp, Homo sapiens
gcggacgaggccgggacttggccgagcggatcctaataaggggaaaatggagaagatgtatggtcttatgcaaag

SEQ ID NO: 677511 - DNA, 96 bp, Homo sapiens
aaactgtttaaccggatcccattgtacccagagtgcagagccgcctttccagcatgcaggggctgctcaggtggaaagtgagaccaacgtcctgca

SEQ ID NO: 677512 - DNA, 82 bp, Homo sapiens
aactgcttttatgccataatgaataagtacattcccagaacacgatgatgaacgcgttaatttccctcaaagaaagaagaaa

SEQ ID NO: 677513 - DNA, 101 bp, Homo sapiens
gggagctggagcgcatggctgaggtcttggtcaccggggaacagctacggtggctgctacaccccatgtaaaaagcggaaaataaaatgaagattttccag

SEQ ID NO: 677514 - DNA, 74 bp, Homo sapiens
gaaaatggatgtagaaaatgagcagatactgaatgtaaaccctgcagtgtttgaagaacctgaagatcccagta

SEQ ID NO: 677515 - DNA, 97 bp, Homo sapiens
tcgaatatatggattgggatctttaggagataattttatggagaaaagctcctgaaaaactgaggaaacagagaacaaactttcaccagcgatttga

SEQ ID NO: 677516 - DNA, 83 bp, Homo sapiens
ggcggtggcggcttggacgactcggagagccggagaactacgatgacccgcacaaaacccctgcctccccagttgtccacatc

SEQ ID NO: 677517 - DNA, 100 bp, Homo sapiens
gccgccgcccgggctggactgcgtggataaagcaacatttatggttggcagctatggacctcggcctgaggagtatgagttcctcactccagttgaggag

SEQ ID NO: 677518 - DNA, 83 bp, Homo sapiens
ttcaagctgaacgcacccgctggttgtggaccgtctgccaggcaccacacacatggattaattgatgtatgttgagtttatgg

SEQ ID NO: 677519 - DNA, 90 bp, Homo sapiens
ccgagactctccttgcttggaattctgcccactctgcggagttagcagtcacgacctccagcacagccaggcccagacatgtccgtcctt

SEQ ID NO: 677520 - DNA, 76 bp, Homo sapiens
tggacaacatcttcattctggtgcaggcctaccagcttgaagaagcaaacagcatgctaaccaaagatattgaaat

SEQ ID NO: 677521 - DNA, 56 bp, Homo sapiens
ggagacacggccagatctgccctccagctcctgctccagcccagcccccagagagc

SEQ ID NO: 677522 - DNA, 100 bp, Homo sapiens
cacctgtgcgggatggaacaaaagaatctcactctggtttgagacagaatctcactgtgtcccccaagttggagtgcggtggtgcgatctcggctcactg

SEQ ID NO: 677523 - DNA, 74 bp, Homo sapiens
cagtccctagggctcagggagcaggagcttcaggttgtccgagcatctgggaacacccagaggcctccattcag

SEQ ID NO: 677524 - DNA, 75 bp, Homo sapiens
aaaccttggaaatgttattgataactatgtttatgaacataccctgaagcctccccagctttctgaggatgatat

SEQ ID NO: 677525 - DNA, 90 bp, Homo sapiens
cgtggtctcagcccaggacctccaggggaacaatgaggcctacgcagagctcatcgtccttgccgaggcctgcctggagccccagatcac

SEQ ID NO: 677526 - DNA, 74 bp, Homo sapiens
gttcctattcggccatctttgctcctccctgcaactaactccattcttaattgctcggggacctgcttcacaag

SEQ ID NO: 677527 - DNA, 75 bp, Homo sapiens
cggcgatggtaggcgtccctggagcggccgccttccagcgatcagatgtggccgcccagcagttgtgcacatagg

SEQ ID NO: 677528 - DNA, 82 bp, Homo sapiens
gtcggcaagaagatcggctgcggcaacttcggggagctccgcctagaacccagtgacttgattgtaaaaatttacagagcgg

SEQ ID NO: 677529 - DNA, 88 bp, Homo sapiens
agactgtttgacttagaatcttcccttttttactccattcaagagcagcattcataaatttccagaccattactgggacttccacccc

SEQ ID NO: 677530 - DNA, 80 bp, Homo sapiens
agcttccccgagggctacaacacggtcgtcgttttaatcagctggatctgcctgcctatgagagctttgagaagctccgc

SEQ ID NO: 677531 - DNA, 100 bp, Homo sapiens
gccctggacattgcccgaggcctgcggtacctgcactccaaaggtgtatttcaccgcgacctcacatccaagggtgtgatcctggtctatgacattgcga

SEQ ID NO: 677532 - DNA, 90 bp, Homo sapiens
cttcgccagatcgtcatccagaatgagaacacgatgccacgcgcatctcgtccccggtgaagaagacagagatggacaagtcaccattca

SEQ ID NO: 677533 - DNA, 75 bp, Homo sapiens
acctggagacttgccggcttatggtttcaatgctggatggcctgcttccgcgaggccaacatcccaacccacttc

SEQ ID NO: 677534 - DNA, 100 bp, Homo sapiens
cagcgatctgtgtctgaggaatcggcaaactccctggtctctgttggtgtagaagccaaaatcaggaggatctcctgatgcagtccagcaaagaactttc

SEQ ID NO: 677535 - DNA, 100 bp, Homo sapiens
gtctggtcactcgctctcctctggggactgcagagaagcaggacctcgggccatggagtgatcagcagctggactgtgccttggacctaatgaggcgcct

SEQ ID NO: 677536 - DNA, 100 bp, Homo sapiens
gacaccgaggaattctatgatgcccctgaagatgtgcacctagggggcggctaccccgtggggtgattcgcaaggggtggctcaccatcagcaacattgg

SEQ ID NO: 677537 - DNA, 87 bp, Homo sapiens
cacagctacatatttgttattggggagaaaatcttcagaggagccagcaccgctctttgaccttgccatgcttgccttagatagtcc

SEQ ID NO: 677538 - DNA, 75 bp, Homo sapiens
ccggagcacccgacccctgagcctccaccgctatgtctggctggtttacgagcaggacaggccgctaaagtgtga

SEQ ID NO: 677539 - DNA, 82 bp, Homo sapiens
ctgtgctcgcgctactctctctttctggcctggaggctatccagcctggcaaaactcaaggctcagaaactgcagggccccc

SEQ ID NO: 677540 - DNA, 50 bp, Homo sapiens
tgaaactctacgaggataaccagacagattactacagcatcccatttccc

SEQ ID NO: 677541 - DNA, 100 bp, Homo sapiens
ccggacacttgttttccagtgtgatcttacccttaaagctgtgggatgtgtgtgggctgaaattccgagctgcggttgtgcatgagaatacacccttcgt

SEQ ID NO: 677542 - DNA, 75 bp, Homo sapiens
cacaaacttgttcaaagtggaataaaggtaagaatgattgatgttggctgatattggagtgctcattcacatgaa

SEQ ID NO: 677543 - DNA, 100 bp, Homo sapiens
ccggagctgggcgcggattcgccgaggcaccgaggcactcagaggagctccccttccaccccccggggaactgaagattgtcctggccgcgacctgagac

SEQ ID NO: 677544 - DNA, 100 bp, Homo sapiens
gagacttcgagagccctgtcatcttctaaacagagcagcagcagcagagatgataacatgtttcagccatcactggtgcaagctatatttaacggagatc

SEQ ID NO: 677545 - DNA, 75 bp, Homo sapiens
gccgaccgcagggcctctacgggggtgagcccctccagactccgaataggagatcaagagtttgattcattgcct

SEQ ID NO: 677546 - DNA, 100 bp, Homo sapiens
gaagccccttaccccgccccgggctgtggtctgtgggctgtgggacgagctgcggcgcggagccagtgcatcaatcagatgaaggaggtgaaggaacagt

SEQ ID NO: 677547 - DNA, 74 bp, Homo sapiens
ccaatgttggtgctggcaaaaagtcatttacaggtggaggatacagattgggtagttctttttgtaagcggtct

SEQ ID NO: 677548 - DNA, 100 bp, Homo sapiens
caggagccgcggagccggcgctgagaggggctgcggccggagcgggcggctgagacaaaggcgacgaacactctgctccagccaaggtggtgagggcagc

SEQ ID NO: 677549 - DNA, 90 bp, Homo sapiens
cttcgcctccaggatgcgctgagccctacaacacccccagcggccgccggctcccccacgagatccgctttatcctcatccagaaccggg

SEQ ID NO: 677550 - DNA, 90 bp, Homo sapiens
ggaggaggctgcagcagcggaagaccccagtccagacttaattcagtgcacaaatgagatgaatgtgaacatcccacagttggcagacag

SEQ ID NO: 677551 - DNA, 74 bp, Homo sapiens
ttcctggggcatcgacgatctccatatttcattgcaaggattgtcaccagacctgcaatctatggagcagattc

SEQ ID NO: 677552 - DNA, 82 bp, Homo sapiens
agaaggccaaggctgcagaagccaaagccacgattgacgagatgcctgaggctgccgtgaaatcaacagccaacaaatacca

SEQ ID NO: 677553 - DNA, 100 bp, Homo sapiens
ctctgacggtaacgcgtgcaacgactaacagggctgaccggcacccacgaccgacaagtgaagctcacctttcgagggatggtcctggctgtgctgctgc

SEQ ID NO: 677554 - DNA, 122 bp, Homo sapiens
cagctatgctgtcttccagttgggtgatctgcaccgtgccctggagctcacccgccgcctgctctcccttgggaatgcgttgaatatgtcaagagcttcaatatccctctactcgtgctggg

SEQ ID NO: 677555 - DNA, 75 bp, Homo sapiens
ggtcacaaggccacggcgctgcaggaggacagtcattttgtttactcattcagccctgttgcaggtcccaataaa

SEQ ID NO: 677556 - DNA, 98 bp, Homo sapiens
tgggaaactgcagcctgacttgggctgccctgatcatcctgctgctccccggaaacgcaaacatgcagatctttgtgaagaccctcactggcaaaacc

SEQ ID NO: 677557 - DNA, 118 bp, Homo sapiens
cttaggaaccggggactcaggagtgcccgcgccctgagcgctcagctccagaggcgacaatgcagatcttcgtgaagactctgactggtaagaccatcaccctcgaggttgagcccag

SEQ ID NO: 677558 - DNA, 100 bp, Homo sapiens
caacaagcaagcatgcagcttactgcttgaaagatctcagtgaatatcttccggactctgccgcccagtgagaaccctgaatttgaccctgaagaggatg

SEQ ID NO: 677559 - DNA, 75 bp, Homo sapiens
agcgaagtagaggatgccgaggagaaaacagcaggcacccaagcgggcggcagatggagtcccctgtttccacac

SEQ ID NO: 677560 - DNA, 75 bp, Homo sapiens
ccggttcagaggatcccccagtacaggctgttgctgacaggccgtcaccgatgggttgtatatactactgaaatg

SEQ ID NO: 677561 - DNA, 100 bp, Homo sapiens
ttgggagcaagtgaacaccttgactaaaccgacttctgatccatggatgccatcagcttgcctgggaccagtggcagggaccccggaacctgaaggtgct

SEQ ID NO: 677562 - DNA, 99 bp, Homo sapiens
tgtgtgctgagcgttctaaaggaaggcgtccgttggccttcgtacccgtcttgattgaggttcttctgtgtggcagttcagaatgatggatcaagctag

SEQ ID NO: 677563 - DNA, 51 bp, Homo sapiens
ctggaagacgcgctcctgcgccggatgaccgttcattaataaatttgcatc

SEQ ID NO: 677564 - DNA, 100 bp, Homo sapiens
gaaggtggagccaccagcctctccctggttgctacgatttctgcaaacggagacaaagaaattggcaatatcatctctgatgcaatgaaaaaagttggaa

SEQ ID NO: 677565 - DNA, 74 bp, Homo sapiens
tccacccaagcccagggctgtgaacgtggctttcctcgatgtgaagttcatttccaatccgccctccatggtgg

SEQ ID NO: 677566 - DNA, 80 bp, Homo sapiens
cagtaaagatggaaaaccagttattgaatatcaagaggaggagttgttgataagtttataccatggatagcacaaaggag

SEQ ID NO: 677567 - DNA, 100 bp, Homo sapiens
tatatcctccaggaatactggccaggtgaaatccgggtccccggccgtgctggcattcgcaaaggagaagtcttttgggtggcccagcttcatcacatac

SEQ ID NO: 677568 - DNA, 74 bp, Homo sapiens
aacgtccgactgcactcacacgacgtgcgctatgggtcagacagaccttccagaacttgatacaccagaatctg

SEQ ID NO: 677569 - DNA, 89 bp, Homo sapiens
ctcagtttcttcctaactgtgatccagatgatcctcacagagtcacctaaggtcctgcgagtacaagggtcgacccccaaaggcagggg

SEQ ID NO: 677570 - DNA, 100 bp, Homo sapiens
gccaatctgaatatcaaaatagcaggttatggaggttttgatgactatggtggctataataattacggctatgggaatgatggctttgatgacagaatga

SEQ ID NO: 677571 - DNA, 82 bp, Homo sapiens
aggagttccgggaattaaaagcagaacaacatcgaaaagagagggaagaagcagctgccagagaccaaatgagagggttgac

SEQ ID NO: 677572 - DNA, 99 bp, Homo sapiens
gtgctgtgtggatgtggtgggcgtcaacgccagctgcccaggcgcaagtctgtgtggtccaggtctgagcagagggcggggtgcaggcggaatggccct

SEQ ID NO: 677573 - DNA, 74 bp, Homo sapiens
aggaggagctactacctcaatggtggtgctgtggccatcccctcctgggggaagttctggctggctgtcctgaa

SEQ ID NO: 677574 - DNA, 51 bp, Homo sapiens
ctgagactcccctaaaggccagaaaggttctacaggcgcggcagggccccg

SEQ ID NO: 677575 - DNA, 75 bp, Homo sapiens
ccgcaagtacccgtccatcatagtcaactgcgtggaagagaaggttatcaatactctggctgaccatcatcatcg

SEQ ID NO: 677576 - DNA, 100 bp, Homo sapiens
ctattatccacgggttgaagggtgtcgtacatcatggaaactattatgggacacccaagcctcctagccagccagtcagtgggaaagtgatcacgacgga

SEQ ID NO: 677577 - DNA, 100 bp, Homo sapiens
aacaaccttatttcgtgctgtgaatccagagctcttcattaaacctgaagattcttacctctgaagacaatgttaggaccaagatatgatagtcaagttg

SEQ ID NO: 677578 - DNA, 83 bp, Homo sapiens
ctggccaaatttgaagagaatgcgcccgcacagtccatcggcatacggagacaggtgagcatgggtttatgcgtcttaggcat

SEQ ID NO: 677579 - DNA, 75 bp, Homo sapiens
ctgggttcaaatttgacaattcgttgatcaaccagatagaggcatcgttggcttcacagtatgactgatgatcct

SEQ ID NO: 677580 - DNA, 100 bp, Homo sapiens
tttctggacgcggatttttggcctcatactctgttatagataaacaaggctccgagctctgtccagtggtgggagtattacatcccctcctctttctcca

SEQ ID NO: 677581 - DNA, 82 bp, Homo sapiens
cgctgttttctgattccaagccacttgggtcagaggatatagataatcaaggaagtctggacagctgatcacctgaaagaga

SEQ ID NO: 677582 - DNA, 83 bp, Homo sapiens
tgtgtggagcggctctcccaaggaagataccgagtgggagaaaagatcctcttcattaggctgccactgcagagccccgccat

SEQ ID NO: 677583 - DNA, 75 bp, Homo sapiens
aaacaagatgcactggatttcaagaaggacaaaggagtggtaaaatttcagccttccctttggccttgggactca

SEQ ID NO: 677584 - DNA, 96 bp, Homo sapiens
gggacaactacgagtttgacatcaatgaagagagaagggccgtaaggagagagagtccctgcagcagatggccgaggtcacccgcgaagggttccg

SEQ ID NO: 677585 - DNA, 83 bp, Homo sapiens
gggcgctgggccgccagcctcggcaccgtcctttcctttctccctcgcgttagccctgggcgctgcctatggcacagccaaga

SEQ ID NO: 677586 - DNA, 83 bp, Homo sapiens
cctgagtcagcagaagcagcactacaactaccagaccatcctgcctgcaccattcaaatatgaagcaacagcatgtcatagaa

SEQ ID NO: 677587 - DNA, 100 bp, Homo sapiens
gcagtcaccagcattgcctcgaccacactcacctctctctgctcatgcagggctgatcccttatccaacatggttctaaccttcagtactaaagaagatg

SEQ ID NO: 677588 - DNA, 100 bp, Homo sapiens
ggacgtccggcttcggagcgggagtgttcgttgtgccagcgactaaaaagagagagaaaaggaacagttccgtaagctctttattggtggcttaagcttt

SEQ ID NO: 677589 - DNA, 101 bp, Homo sapiens
gaatacaagatggttgccgggtcatgttaattgggaaaaagtttcggagcaacatcccctgtcacctggttgatatctcttgcggattaccctgcagtgcc

SEQ ID NO: 677590 - DNA, 75 bp, Homo sapiens
acttcgaaccatggaccaggccctcaagtccctgatggcctcagaggaggagagttgggctacacagagcagctg

SEQ ID NO: 677591 - DNA, 96 bp, Homo sapiens
tagacacccgcccttgcctcagagaagtgtgctatttgaagtgccaaagctgaaaagtggaaagagtgcattggaagctgagagtgagagtctgga

SEQ ID NO: 677592 - DNA, 100 bp, Homo sapiens
gacttgtcctctgctacccatgatgaggcggtgcaggtcctcaagaagacaggcaaggaggtggtgctggaggggtgtcagatgcctgatacattcaatt

SEQ ID NO: 677593 - DNA, 99 bp, Homo sapiens
gccggagcttgagatacgccgctctgaatcttgccgccctgcactgccgcttcggtcactaaatgatctctgcctttcacaaagaccacctttgtgcat

SEQ ID NO: 677594 - DNA, 75 bp, Homo sapiens
gcggaagatgatcagccaggcacagaagttggtgtacatgggttttgatgcactcgtggccgaagctgcgctgag

SEQ ID NO: 677595 - DNA, 75 bp, Homo sapiens
ccacaggaggcaaccacactagtttagtctgcgctcctcagaccaccggcaggtgaacagcctgatgcagaccga

SEQ ID NO: 677596 - DNA, 95 bp, Homo sapiens
agagttttgctgggacgcctactccaaagcggccgggagtcgcgcttcttccccactcccgagacagctttcagcttatgtggagaagtcgctgt

SEQ ID NO: 677597 - DNA, 100 bp, Homo sapiens
cctccggagctcgcccaagccgcgtccccagagagcgccctgagagaacagggtggccgcttggtccagttgactatattgtggagtatgactatgatgc

SEQ ID NO: 677598 - DNA, 100 bp, Homo sapiens
gacacctatgaagatgacatctcggaaatcaggtgggctcttaggatcccccaggaccccatcgacgatgccatgggtggccctgtgatgcccggcaacc

SEQ ID NO: 677599 - DNA, 100 bp, Homo sapiens
tcttctgggagctgaggaaccagatatcttgaaaagctgccagaaaggttactaccggtactacaacaagtacatcaatgtgaagaaggggagcatctcg

SEQ ID NO: 677600 - DNA, 83 bp, Homo sapiens
gtattgctgtgggtgctgggacttcccgtccgcggcgtggaggaaatacaaacctggtcgatgtgatgatattttgaaatgga

SEQ ID NO: 677601 - DNA, 100 bp, Homo sapiens
ctgtgagacaggaatgctgtcttctcctcagtattctccgtgggaactgacggaactgtggaaactgaaggaacgagcttacaattgagactgctaaccc

SEQ ID NO: 677602 - DNA, 98 bp, Homo sapiens
gactgcgacggcctcgtcttgcaatccaagaactgcactgatgggctttgcatgcagagtgctggagaatctggtaaaagcaccattgtgaagcagat

SEQ ID NO: 677603 - DNA, 100 bp, Homo sapiens
gagatgtctcgctccgtggccttagctgtgctcgcgctactctctctttctggcctggaggctatccagcacccgggaaaaggagaagatgaaggaagcc

SEQ ID NO: 677604 - DNA, 119 bp, Homo sapiens
tgttaggtcacccacaccttataaaaagcagcttaatgaggaactccagcggcgctcttcagcattagatcctcgtggtcattgaaccgctattgattgatgaagattactatgctaga

SEQ ID NO: 677605 - DNA, 83 bp, Homo sapiens
acacccaggaaaagactcaggacggacaagcacagtcttcggaagagtttattaaccacttaacctctcagaactgaacaaag

SEQ ID NO: 677606 - DNA, 82 bp, Homo sapiens
tgctggggggatctgggcatgagaccccttctcccaggaggggagtcaccttcaggccattcagaggaggaaagagagggga

SEQ ID NO: 677607 - DNA, 75 bp, Homo sapiens
tctcagagaaggaggaggtgaccacgcgcgagattttgcaagaacgaggctcaaggatgtgagggacacagtatt

SEQ ID NO: 677608 - DNA, 88 bp, Homo sapiens
agaatacggctctgattgcccccctccaaacacgagcttctgcagaaagccgtcattacacctgattttgaaaaaaaccactgtgttc

SEQ ID NO: 677609 - DNA, 75 bp, Homo sapiens
cccctcggcggcgttcttctgtgtggcccgcctgcagtattgaatttgaccgggattgtgactattttgcgattg

SEQ ID NO: 677610 - DNA, 100 bp, Homo sapiens
ccgccatccccatttctatggtcctcctcacctatggccgctggcagatcaccatccatcttcaagaagctactttgaaagtctggccagtgtctattca

SEQ ID NO: 677611 - DNA, 90 bp, Homo sapiens
ctctggccagctgactgcacttcttttttgagaaaggaaggaatatatcctgactgattgagctttattgcagaaatgaccatttatatc

SEQ ID NO: 677612 - DNA, 82 bp, Homo sapiens
gtccgagcccaaggcaattgatcccaagttgtcgacgaccgacagggtggtgaaagtttggtgccctggttgtcagatgttg

SEQ ID NO: 677613 - DNA, 87 bp, Homo sapiens
gcggcggcggcgctcggcgatggtaggcgtccctggagcggccgccttccagcgttcttgggtgtctctggggagtccctgggccag

SEQ ID NO: 677614 - DNA, 96 bp, Homo sapiens
caggagctggaggaggagccgccgccgccagatccaggatgagaagactgataaaagaagaagctagctgaacagctgtaaaatgcccaaatctgg

SEQ ID NO: 677615 - DNA, 101 bp, Homo sapiens
tgcctttggatttcctgttattcttgctcgtgtggctgtgtgaaagagtttctagccaaagccaaagaagactttttgaaaaaatgggagaatccaactca

SEQ ID NO: 677616 - DNA, 90 bp, Homo sapiens
ggacgacctcaacgcacagtacgagcggcgggcccttaagtggcgtttaagtcccctgactattgtgtcctggctgaatgtatacatgca

SEQ ID NO: 677617 - DNA, 74 bp, Homo sapiens
aaggaacttccatgcctctaacactcatcttcaaaagactgggacgtccagatcggtgacatcgtcacagtggg

SEQ ID NO: 677618 - DNA, 76 bp, Homo sapiens
gtaatggtgcaaagcctgaagacaaggagagggacaaattccttcttggcatccttatggccctgtgacctgctaa

SEQ ID NO: 677619 - DNA, 51 bp, Homo sapiens
gaccagaggactagacctgaagtttcaaagatatgagatcctgactccaaa

SEQ ID NO: 677620 - DNA, 100 bp, Homo sapiens
agaaagaaatagaaaatttgaagggtattgttccagatcttaacagtgaggatttgacagctaaggatattgaagaaattattgatgagctcaaggctgg

SEQ ID NO: 677621 - DNA, 74 bp, Homo sapiens
ccccgcccggcccgggccatgtcggtgggcgagctctacagccagtttgaaggatgacctctaggaagaaagtg

SEQ ID NO: 677622 - DNA, 97 bp, Homo sapiens
cgaaacaagttgcagagctacgtggacgcaggaactccactgtgccgaagcgagtgccacttgtctgcagggccgtaccgcggaaccctctttgccg

SEQ ID NO: 677623 - DNA, 95 bp, Homo sapiens
ctcttaagaaagattccaacccaatggtccagaggtgtccttctaaagctggtagaggtttcacgagtcatcagggacccagaacccttctcttt

SEQ ID NO: 677624 - DNA, 99 bp, Homo sapiens
actagcatggtgctcaccaaggtgtctgccagcacagtccccactgacgggagcagcagaaatgaggaaaaccaattctgtgtcctcggaggaccacag

SEQ ID NO: 677625 - DNA, 100 bp, Homo sapiens
gattatgaagcaaacatgccagacagattcaattagcagagcctcacagacaatggccaaatgtgtcaaagctgtcacagagggtgcccaggcagtagag

SEQ ID NO: 677626 - DNA, 87 bp, Homo sapiens
agcgcagcccgacgttccgctgctgggccccatggctgggggttatggagtgatgggtgacgatggttctattgattatactgttca

SEQ ID NO: 677627 - DNA, 90 bp, Homo sapiens
ctatagatactactttaggaaaacactgtttgtgcaactgcagatagaagacctgactcgtaaactgcgcacaggagacctgggcatccc

SEQ ID NO: 677628 - DNA, 128 bp, Homo sapiens
catggccaacaacatcatcctctactgtgatactaactcggactctctgcagtcactgaagaacaatatgatgcgtttgtgaagtttacgcatgatcaaataatgcgacgatatggagaacagcctgc

SEQ ID NO: 677629 - DNA, 100 bp, Homo sapiens
ctttgctgccctgcgagtccccaaaagcccagcagctgtccctgcagactctcaggactgcccagatacgaaaaccggtgaggtccaaacattgtggtgt

SEQ ID NO: 677630 - DNA, 100 bp, Homo sapiens
ctgttagtagcgaatcgcttcagtctttgttctcagaatgggacaatccagtatttgcccgttatccagaggatgactcactggttgtgtggaaggaagt

SEQ ID NO: 677631 - DNA, 87 bp, Homo sapiens
acgcgcagccccggcctctcggcctctgccggagaaacagctgtgagccgtgagctttgaggcggtgggatgtgtcagcagaatgtc

SEQ ID NO: 677632 - DNA, 100 bp, Homo sapiens
tcagttataaactctagagtgaacttttgcgactttcaggaccagtcatgcagcagtcccagcagccccagcctctacagaagcagccaccacagcccca

SEQ ID NO: 677633 - DNA, 100 bp, Homo sapiens
ctaaaacccagtgcgtacgcattgctacaaaagatggcagcatggggacactgaggatgattggagatgttggacactcaggagcagaatgactctgaaa

SEQ ID NO: 677634 - DNA, 98 bp, Homo sapiens
gaacttaagcgcaaatttgaacagatgaaacaagataggatcaccagataccaggtgtggtatctgtgcgctttgaagaagatgaagacaggaacttg

SEQ ID NO: 677635 - DNA, 101 bp, Homo sapiens
cgctgatgttcctggcctggggggaagttgtatatgaacacagatcaagattagagaaatccttgcaaaaagaaagacttgaacataaaaaagcaaaggaa

SEQ ID NO: 677636 - DNA, 100 bp, Homo sapiens
aggaacagagacctcctgtccgaaaataaccgccttcgcatggagctggaaaccatcaagtttgggcttcctgtagacacccttttcctgcgcaacagag

SEQ ID NO: 677637 - DNA, 100 bp, Homo sapiens
ctactttgtgatgacagccaagaagcagtgcctgctgcggctgggggtgctgcgccaggaaatcaaagagcaggaggttgtggacaaagtcatggaaaca

SEQ ID NO: 677638 - DNA, 101 bp, Homo sapiens
cccgggaccccacccccgctggacagtgggggaaactgaggcctgagcggaaatgcgtgtactgccggaagcggatgaagaaggtgtcaggtgcctgtatc

SEQ ID NO: 677639 - DNA, 100 bp, Homo sapiens
ttactttgaagtgaagattgtcagcaaaggaagagatgggatattttgctcatcaacctcattatagaacatatgatttgtgatacagatcctgaacttg

SEQ ID NO: 677640 - DNA, 83 bp, Homo sapiens
caggactgcgccgcgtcttcctcaagggaaatcctcattgacgattcaatttgttgaaggccaatttgtggactcctacgatc

SEQ ID NO: 677641 - DNA, 83 bp, Homo sapiens
cagggatgagtcatgtggcagtggaaaatgcgctcgggctggaccagcagggcgtgatggtgggcatgggtcagaaggattcc

SEQ ID NO: 677642 - DNA, 98 bp, Homo sapiens
cacttggagaaacattagaggaggcttttcattatatttttaatgtgcaactagcctgtgagattcagggatttgtcttggctgttactatgacacgg

SEQ ID NO: 677643 - DNA, 100 bp, Homo sapiens
atacactccacagacagacacttctgatgatgggagctcggaatgtctgagctctgcagagcagatggagtccgaggacatgctgagcgccttaggctgg

SEQ ID NO: 677644 - DNA, 75 bp, Homo sapiens
gtgggcaccttgcgcttcttgcagtcggtggcccgggagagtggcccaccccacatgaagaactttgtgaccaag

SEQ ID NO: 677645 - DNA, 98 bp, Homo sapiens
ttgaagacccagaagatgacatatgcaaaatgacatcttcgagtggtccagggaccaccgagcccaccacaagtactcagagacggatgctgaccccc

SEQ ID NO: 677646 - DNA, 100 bp, Homo sapiens
aacgtatgtttctggaacattgcgatttggaatagactctacaggggcaggtaattcactggtccacaagcggtctcctttacgtcgaaaccaaaagacc

SEQ ID NO: 677647 - DNA, 98 bp, Homo sapiens
ggggacgcccgcgcgacgagcaggtggcggcggctgcaggcattttccctgaagatgagatcccagagaaggcctgcaggcgcctgcttgaagggagg

SEQ ID NO: 677648 - DNA, 75 bp, Homo sapiens
ggactacaacagcagccacaggaaccttgagtggataatattaatgcagctgtgatggatttgaaaaaaaagaag

SEQ ID NO: 677649 - DNA, 88 bp, Homo sapiens
gtgagcgacgcagaagacgggtgatttctgcatttccatctgaggggggaaaagtatatgggaatgtggcaagatgatgtgtgtcaag

SEQ ID NO: 677650 - DNA, 51 bp, Homo sapiens
gggagcggaccctgacaagttccaggttgagttgttacaacaaaagttgag

SEQ ID NO: 677651 - DNA, 95 bp, Homo sapiens
aggcagagaacaagaagcgttcccaggacgacagggcccggcagctgaagggtctcgagttgcacaggtgcttccggctacaagtagagagtttg

SEQ ID NO: 677652 - DNA, 75 bp, Homo sapiens
gccgcggctcccacgtgagaaatgagggctcttccgtgggcggcggcttcgcgggcttggagttcgcgcggccgc

SEQ ID NO: 677653 - DNA, 100 bp, Homo sapiens
agcaccttgatcttgaacttctcagcctccagaacgaccaagatcactccatggatgaaatgacagctgtggtgaaaattgaaaaaggagttggtggcaa

SEQ ID NO: 677654 - DNA, 80 bp, Homo sapiens
cgggaagatggcgccgccggtggcagagagggggctaaagagcgtcgtgtggcagaatttggagcaagaggtggtggtgg

SEQ ID NO: 677655 - DNA, 75 bp, Homo sapiens
gatctatcaggcaccagacttgggatcagttataaactctagagtgatcattgctgaaggtgccaatgggccaac

SEQ ID NO: 677656 - DNA, 100 bp, Homo sapiens
tgacagatgccagcgtagctgaatccagtaccaaaaacgtcaacaacagttttacgtgtaaacaggaacatcgataagtagtgtaaaaacttgcacaatg

SEQ ID NO: 677657 - DNA, 51 bp, Homo sapiens
ttagggtcctttatatagaagggagagtgacgcatccaaagaagacattga

SEQ ID NO: 677658 - DNA, 99 bp, Homo sapiens
tggacaccgtctccatgcccgagttcatggccaacctcaggctcagacctctgtgagtgaaagccttcagagggaagctgctaagaagcaggccatgaa

SEQ ID NO: 677659 - DNA, 98 bp, Homo sapiens
gtgcttctgtggattctcacttctgtcatctagcatgatgaagttggagcccttgtttttgacattggatcctatactgtgagagctggttatgctgg

SEQ ID NO: 677660 - DNA, 83 bp, Homo sapiens
cgccgaggcaccgaggcactcagaggaggcctgcattgatgagaacctggaggtggtgcgcttcttggtggagcagggcgcca

SEQ ID NO: 677661 - DNA, 97 bp, Homo sapiens
atcaaatcagaaaactatgggaagattttggtagagaagaatgaacattgtattgagaacaatatagatttgcagatctttgatgatgcgtacaaat

SEQ ID NO: 677662 - DNA, 74 bp, Homo sapiens
gttccacttgtaccttgtccccagcgacgccttgctaacaaaggagaatgtggattatattattcaggagctcc

SEQ ID NO: 677663 - DNA, 75 bp, Homo sapiens
aatcttggcgacattgacaatgatggctttgaagatataattgatcctgttgctttagaaattccattatccaaa

SEQ ID NO: 677664 - DNA, 96 bp, Homo sapiens
acagatgtgaacttccagggcaagaacctggacaccgtgaagggtgctgaggtgctgtcagagaatgatctgaaaagagtggccaagccagaggag

SEQ ID NO: 677665 - DNA, 100 bp, Homo sapiens
cctgagtgtgcaactgaagcctgaggtctccccaacgcaggacatcaggctgctgaatcaggaataataaaagttaaaacaattgctgcacgaaacactg

SEQ ID NO: 677666 - DNA, 100 bp, Homo sapiens
aaacgccactcctaaaggctggtcctgccactgggacagggtgataaaagaaaatgtggctgaagttacccgaagttcagcttgcagtgtaattcagaag

SEQ ID NO: 677667 - DNA, 100 bp, Homo sapiens
aaaattgccaaggaactgggatttcaacctgaaagtggaggctgcgaaaataggtgttgctctcttgccattcgtggatgagcgaaggctacgagctgcc

SEQ ID NO: 677668 - DNA, 75 bp, Homo sapiens
gtgaaatcagaggagatgtaactatcggaaagtggagaatgaggacatgaataaagaccagatcttgctggaaaa

SEQ ID NO: 677669 - DNA, 90 bp, Homo sapiens
ccctcattgactgtgaccctagttgcttggaaaagatgctaattaatgaagaggagcaactactattggtgtatttttcacagattggtg

SEQ ID NO: 677670 - DNA, 74 bp, Homo sapiens
ggagagggggcgctgagctgttgggggagtgcatccgccccaacccttttccccctcgtctcctgtgagaattc

SEQ ID NO: 677671 - DNA, 83 bp, Homo sapiens
tgcccgctcacctgcgctgtgatgcctgcagagctgtggcttaccaggactttgtgttttatgccccacgtctgagaatcaac

SEQ ID NO: 677672 - DNA, 74 bp, Homo sapiens
accagcggcggggatgctcaaggaacttgtaatagctggcatcgttgagaatgaatggaaaagaacgtgctcca

SEQ ID NO: 677673 - DNA, 120 bp, Homo sapiens
gcgcgaagctggccaaagcctgcccagacggctcacctgtgcgggatggaacaaaagaacatacatatgatagttgagaaagacacatattctgatcatgaagaaataaacacaagttaa

SEQ ID NO: 677674 - DNA, 96 bp, Homo sapiens
cggcaagtaacatgactaaaaagaagcgggagaatctgggcgtcgctctagaggtgtgatgaatgcagactctgctaccattttggctgtttggat

SEQ ID NO: 677675 - DNA, 100 bp, Homo sapiens
ttgcctggagaaggagaagaagcagaggctgaacctatgaattccgatgagccagaggcctgtttcacagatgcactattcctgatcagagaactccagt

SEQ ID NO: 677676 - DNA, 101 bp, Homo sapiens
ggacggtggaggcccagagcccgggcctgaagggggggacaaacctgggtgcccgcaggagcccggcagggctggcgcccatgcggctctacacgctctcc

SEQ ID NO: 677677 - DNA, 83 bp, Homo sapiens
caggagttcattgaactcatccggcagaataagagactggacgctgtgagattacagtacctatagccaagctgcagcgcagc

SEQ ID NO: 677678 - DNA, 76 bp, Homo sapiens
gtggtctggggcaacgcggaagtaatatatttggtctgcggcctgtcgattatacagatgatgaaagtatgaaatc

SEQ ID NO: 677679 - DNA, 148 bp, Homo sapiens
tcctcacctccgcactggcccgaggcgtctcggggatcttcgtgtggactgccctggtgctcacctgccaccagggtcttcctgtcacccaggctggagtacagtagcgtgatcacagctcactgcagccttgacctcccgggctcaa

SEQ ID NO: 677680 - DNA, 90 bp, Homo sapiens
gtgcaagtagtgattggagaacaaagaggtgaaggagtattggagcagtatgcagaggggaagatgagaggggctgccccaggaaagaag

SEQ ID NO: 677681 - DNA, 88 bp, Homo sapiens
tcggtggactccttcggcagtccacccaccgccgccgcctcccagcctgaactctttgcttccggaatccgggattgttgctgacata

SEQ ID NO: 677682 - DNA, 76 bp, Homo sapiens
gagtcaaaacagagcttttggaatctgaacaagggactttgaagattatccaatgagaattttatatgaccttcat

SEQ ID NO: 677683 - DNA, 93 bp, Homo sapiens
agaaaaacgagccatttctccgtcgattaaagagccatctgtggtgccaattgaaggcgtccgagctgggccacagcctgaacgagaacgtcc

SEQ ID NO: 677684 - DNA, 50 bp, Homo sapiens
cgcggatctcaccgccgctcagggttttgagcaaaattttggactgtgaa

SEQ ID NO: 677685 - DNA, 74 bp, Homo sapiens
actatgaatctctgttccaaatgctttgctggatgttcacggaagaccagggtgtagatgacaggctgctctat

SEQ ID NO: 677686 - DNA, 80 bp, Homo sapiens
ttcgtgttacctgatctacccaaatgggtcgcatggattgattaacgtatgctgtacccctcaaggatttaaactaacga

SEQ ID NO: 677687 - DNA, 100 bp, Homo sapiens
gtggggcgtacgggcctcttttgaaagcctgagttacgatgtattgagcgcgtcgtatgcggccagcactaagctttagccagggccctctgaaggatgc

SEQ ID NO: 677688 - DNA, 98 bp, Homo sapiens
aggtgattaaagatacggagtccctgttcaaaacccgggagaaggagtatcaggagaccattgaccagatagaggtgctggaaacatgcatgaagagc

SEQ ID NO: 677689 - DNA, 100 bp, Homo sapiens
ttgcccgcggccccccagccgctggagaaggagaacgacggctactttcggaagagttcctatcagactgagattgggcagaccctggacctcctcacag

SEQ ID NO: 677690 - DNA, 50 bp, Homo sapiens
ggcccaagtctgcacatcccaggctatggtgaactaaacggtaatgctgg

SEQ ID NO: 677691 - DNA, 100 bp, Homo sapiens
ggatctttacgaggaggacggcaaagacctggacttctacgacttcgagccgctgcccaccctccccgaggacgagccttcttcgccttctcctcggctg

SEQ ID NO: 677692 - DNA, 101 bp, Homo sapiens
tgctgcttttgatgtctgacaacgtggatcgttgttttgaaacggtgtatcaaccattttaaatctgccctcaaaagcacagaacaaatcagacagcattt

SEQ ID NO: 677693 - DNA, 111 bp, Homo sapiens
gggccaggaagcaattctggaagcgcagcaacagcaagctcccgggcagcgtccagaccaaagcatttactggtatttatcaacccgtttggaggaaaaggacaaggcaag

SEQ ID NO: 677694 - DNA, 100 bp, Homo sapiens
agggaagccgagtgctcctgcggctcccagactgcaaccaggtactggctcctgtatcacccagctctggagttgaaagagctcttcattcctgagtctc

SEQ ID NO: 677695 - DNA, 82 bp, Homo sapiens
tttgcattgtgggaagtctttcctttctcgttccccggccatcttagcggctgctgttgcccacatttttggattatgtccg

SEQ ID NO: 677696 - DNA, 82 bp, Homo sapiens
gcataatcttcatggagactctgaagtaggaaaatctggagagctgaagagttggagctattcacgagactgaacatcactt

SEQ ID NO: 677697 - DNA, 75 bp, Homo sapiens
tggcggctgaagaacgaaatccccaattctcacatcctagaccagggcgcaccctacgacgcgcacaccaccggc

SEQ ID NO: 677698 - DNA, 100 bp, Homo sapiens
gctatgaacccagaggtcgtggaggtggccgtggaggcagaggtggcatggggtcacggtctagatcacattctcgatccagaggaaggcgatactctcg

SEQ ID NO: 677699 - DNA, 83 bp, Homo sapiens
cggcgctggagagagacaagatgtccgccagagctgcggccgccaagcagaaaaatatggctcaggagactaaccagaccccg

SEQ ID NO: 677700 - DNA, 85 bp, Homo sapiens
gattgctttccgtgccaggacaaaaagagtttattaaccacttaacctctcagaactgaacaaagacaacattgttcctggaacg

SEQ ID NO: 677701 - DNA, 90 bp, Homo sapiens
gacgacggtccctcagcccagccaccatgagcaccaagcagatcacttgcagcttgcagttccccacaatgatgaatggacccgatttgc

SEQ ID NO: 677702 - DNA, 74 bp, Homo sapiens
ccgccaccgtgcacatccgaatgggctaatagctcgtcagcttgctaaaatccatgctattcatgcacacaatg

SEQ ID NO: 677703 - DNA, 100 bp, Homo sapiens
accttgaatttggtgtggaagaaataacatcagtagttcagatcattcccagtgaccccttctgggtgccaactactgaggaggaatacttgcactttgg

SEQ ID NO: 677704 - DNA, 100 bp, Homo sapiens
tttttccctgcactacgaggaagacaaaatgatgcttcaacacccaggccaggtctctgcctcggaagtgagtgcttctgccatcgtcccctgcctgtcc

SEQ ID NO: 677705 - DNA, 98 bp, Homo sapiens
tggccacttgcttgggatcctttatcctggtcatcttctatttccaaagtgagaagccctaccactgcaactgggacggctgcggctggaagtttgcg

SEQ ID NO: 677706 - DNA, 100 bp, Homo sapiens
tggtgttgctgctgtactccttctccgagttctaaagttcctgttgcttcagacaatggatgagcaatcacaaggaatgcaagggccacctgttcctcag

SEQ ID NO: 677707 - DNA, 100 bp, Homo sapiens
ctgcatcggatcaccggcgtgccccaccatgtcagacgcagccgtagacaccagctccgaaatcaccaccaagtcaccttcaggccattcagaggaggaa

SEQ ID NO: 677708 - DNA, 51 bp, Homo sapiens
gcctgggcctcccggtccgcaagcaggtcccagaatggtgcttagatgact

SEQ ID NO: 677709 - DNA, 98 bp, Homo sapiens
tggcctggcagccttccccaggtgagcagcaacaaggaacaggaaatatagtggtcattatgattagctatccaaaaggaagagaaattttggagctg

SEQ ID NO: 677710 - DNA, 82 bp, Homo sapiens
tcttaagaaggaaaatatggctgctctttgccggacagcagagtcccaggattcgcccgtccttccagttggagagttctcg

SEQ ID NO: 677711 - DNA, 83 bp, Homo sapiens
ctgaagagggctccaggcatccggtcctggtccctgctggttgacagcacccaagaaaacctcatttggctcgctgaaggatg

SEQ ID NO: 677712 - DNA, 100 bp, Homo sapiens
ccaagaattctggggagagatgatggtgtctgcagcagagtgacagcagtggagattgagagaaaaggttggtcaaagaaaaagtgatgtatgaaaaaga

SEQ ID NO: 677713 - DNA, 90 bp, Homo sapiens
cgccgccgccccctcctgaggaggacccagagcaggacagcggcccggaggacctgcctctcgtcagaagcagatgccacgctactaaag

SEQ ID NO: 677714 - DNA, 90 bp, Homo sapiens
ttaatttcagtgactgaattaaaaggtgtcaagaagctcagaatggaaacctcgacctgtctcccagttggttgcacagcaggttactca

SEQ ID NO: 677715 - DNA, 90 bp, Homo sapiens
cgctcggacggaacgttaggaaggccctggtattgttgcagcatctggcagtgagactgaggatgaggacagcatggacattcccttgga

SEQ ID NO: 677716 - DNA, 89 bp, Homo sapiens
ggaggtcatcgaaggctaccgggcccagcacagccagcaccgcacgccctgcaagggaggccaagatcaaggctcgagatcttcgcggg

SEQ ID NO: 677717 - DNA, 100 bp, Homo sapiens
gccatccagaacgagatcagctccctcaaaggtcaaaatgcagatcttcgtgaaaacccttaccggcaagaccatcacccttgaggtggagcccagtgac

SEQ ID NO: 677718 - DNA, 100 bp, Homo sapiens
ctgagaaacatattgtgatgaagtggaggtttaaatcttggccagaggacccctccctggcgatgccagattcactgggctggcagattctgcccccaaa

SEQ ID NO: 677719 - DNA, 90 bp, Homo sapiens
gaccagccagaggacgcgggctctgaggatgagctggaggagggggatggagagcaatacatcatcatctttggagaatttagcgacggc

SEQ ID NO: 677720 - DNA, 75 bp, Homo sapiens
cgctgcgccgacggctccacctacaagattcccgatgtgccaggattctcctgggtgactccctgtatatctgcc

SEQ ID NO: 677721 - DNA, 82 bp, Homo sapiens
cgggtacctgcggccaattcggtggaacgaggacgcggactgcgaaggcagggtcttgctctgttgcctgggctggagtgca

SEQ ID NO: 677722 - DNA, 95 bp, Homo sapiens
ggttcgagtgttgcagagcctgcggggcaagatctacctcctgccccccgaggtctgcagtctcctgaacccagcagccatctacgccaacaacg

SEQ ID NO: 677723 - DNA, 90 bp, Homo sapiens
tcctgcgcggctgcggggcttccctgcggctggaggttcttgggtgtctctggggagtccctgggccagaccttcctccagactccagcc

SEQ ID NO: 677724 - DNA, 120 bp, Homo sapiens
aagaccgcgcgcagggcctgcagcgggagctggacggcgagcgcgagcggcgcgagaaaaagctggcagggcggagatgctggaccacgccgtcctgcttcaggtgatcaaagaacagca

SEQ ID NO: 677725 - DNA, 75 bp, Homo sapiens
aggccaccgagagacctccatggtccatgaactcaaccgacatatctgaagagatggattaagaatgctttggat

SEQ ID NO: 677726 - DNA, 75 bp, Homo sapiens
atgtagtagaacaactggctatcaaatacttacacttgaaaaggatcagctgaaagtacccatggcagacaagcc

SEQ ID NO: 677727 - DNA, 97 bp, Homo sapiens
gggccgagatgtctcgctccgtggccttagctgtgctcgcgctactctctctttctggcctggaggctatccagccatatctttctgaagccatgaa

SEQ ID NO: 677728 - DNA, 99 bp, Homo sapiens
caggcaattgatgtgatactcgaaggctattctgctactcccagggccaagaaagcagagaactcatcaaatgaggaggaaacgtcaagtgaaggcaac

SEQ ID NO: 677729 - DNA, 82 bp, Homo sapiens
ttttagttttgctgtcatcaccatctcaggattaacaggagaaaattttgagcagacaccattgagaagaacattcaaatct

SEQ ID NO: 677730 - DNA, 82 bp, Homo sapiens
cctgactccggaaagcttcgatcagaagctgctctgttaaaagcgaaaatgaaacaattgcctgcggcaacagttcgactcc

SEQ ID NO: 677731 - DNA, 75 bp, Homo sapiens
ggctcttatctactttggaggcctgtctggctcctttctctacacaggagtgctcttattaaacaagtgaacaaa

SEQ ID NO: 677732 - DNA, 97 bp, Homo sapiens
agggagtggacatcagccccaaacaggacgaaggcgtgctgaaggggaacgcccttttgcttgtgactggcagggctgcgacaagaagttcgcccgc

SEQ ID NO: 677733 - DNA, 88 bp, Homo sapiens
cgaactacgaacccctggacgggagagtctgccggcggagaatataagggtgaagttgaacaaattgctatgatgaaaccaaaaggcc

SEQ ID NO: 677734 - DNA, 76 bp, Homo sapiens
ggttcctggtcatacaccagtactaccaaggacagcttttttcctgcaagccaaaatgaagtttaatccctttgtg

SEQ ID NO: 677735 - DNA, 100 bp, Homo sapiens
catcagactgaccgtgtcttacatcagttcagagaggaagtaccaccaagaacagggaaggacaagccagaggctggaggaagatacctgcagaacacag

SEQ ID NO: 677736 - DNA, 88 bp, Homo sapiens
caattttggacttgtatctgaagtgcttctctggcttgtgaaaaggtcttgggcgtctttggtactggcttttttaggggtctgcctg

SEQ ID NO: 677737 - DNA, 100 bp, Homo sapiens
tttgatgaaattgtagagaactagatcatgatgcagccgtccttttggatttctttttaataatgtgtgacccttcacctttgatcccctgacctgcatt

SEQ ID NO: 677738 - DNA, 75 bp, Homo sapiens
cttcgcagtctggaaagctttaggagttcacagtgccgactgaaccaagctaactcctccggaagagagtccaag

SEQ ID NO: 677739 - DNA, 100 bp, Homo sapiens
cgcgccccctgccccggaggcgacccctccgccggcctcggccgcggggaagagtggagcctttcaggctggcatggagagcttaaggggcaactgaagg

SEQ ID NO: 677740 - DNA, 100 bp, Homo sapiens
caagttttctgggggctcgtgacaagcggggcgcagactaggcaccagcatgcagagtagggcccagatcattgatctgatgatgctggtcatcgatgtg

SEQ ID NO: 677741 - DNA, 90 bp, Homo sapiens
cagcaattgctttaagttttctcatttattttatatctgcactctttgggtacctcactttttatggcttgcagatgggtcaagggttgt

SEQ ID NO: 677742 - DNA, 90 bp, Homo sapiens
tgaccgagaccgtgaccgagagcgtgaccgagagcgcgaatatcgtcatcgttagaaggagcggacaattgaacgcttaaaggagcagag

SEQ ID NO: 677743 - DNA, 100 bp, Homo sapiens
gcctgggtgcttctactgcagaaatatcagctagaaccatgcagtcaacccgtggaacacagagcattcctaatgacagtcctgcccggggtgagggcac

SEQ ID NO: 677744 - DNA, 101 bp, Homo sapiens
ggctgaggaaccatgtctccatccccgaccgccctcttctgtcttgccctttggagtgaatcaacctggaccttatatcatgtatacaactgtagatgcaa

SEQ ID NO: 677745 - DNA, 74 bp, Homo sapiens
cgcctgcctgctccgccccagacctgtcggcgaaaggacctctgtgagtgaaagccttcagagggaagctgcta

SEQ ID NO: 677746 - DNA, 82 bp, Homo sapiens
cagaggatgccgaaccactccaacaggggcaagtgtccgagtggtgaatcagctacttacagagatggatggtctggaagca

SEQ ID NO: 677747 - DNA, 95 bp, Homo sapiens
tttcaatgtccattccgctgtgttgattgaggacgttcccttcacggagaaagattttgaatatattcgactttatgggagaaaatttagcaaag

SEQ ID NO: 677748 - DNA, 87 bp, Homo sapiens
atatcagtggattatgaaatttttgggaaggtgcaaggggtgtttttccgtaagcatactcagtgtgtaaatatgttgctgtggagc

SEQ ID NO: 677749 - DNA, 100 bp, Homo sapiens
aagagcattatgggcagacagcggcatacagaatgcctatgaccggcgtcgagaatttcaactggactctcaaattgcagacatactgtcaacatctggg

SEQ ID NO: 677750 - DNA, 100 bp, Homo sapiens
ctctgcctttgaggttggcgggaactgaaactgggaaagcaggcaggatgggagagtcgccgatagaaccacctcttccctgcctcctgggcttggggga

SEQ ID NO: 677751 - DNA, 98 bp, Homo sapiens
ctacctcttgggtgaactctagcaattacaagaatgaaactagtgatcgagaagatggcctccccaaaggacatcatgtgacagactctgagaacgat

SEQ ID NO: 677752 - DNA, 100 bp, Homo sapiens
tgaaaaagtgtgacttggcagctgacaaatgtttatgggtcagcccagagacgaaaaatgagaccatttgaaggcttccagcgcaaagctattgtaattt

SEQ ID NO: 677753 - DNA, 75 bp, Homo sapiens
cttccaaagtgcccggacccaaaacaggaaataaccttctgttcggtgatgaaattatcactaatggttttcatt

SEQ ID NO: 677754 - DNA, 104 bp, Homo sapiens
caggagttcgtctcttacgtctgcggaagtgcagctgcctcagttcttagcgcaggaactgtggctgcaccatctgtcttcatcttcccgccatctgatgagca

SEQ ID NO: 677755 - DNA, 75 bp, Homo sapiens
gtaagatcgtcgagatgtctacttcgaagactggcaagcacggccacgccaagctgatgtagaaggccaatcctt

SEQ ID NO: 677756 - DNA, 100 bp, Homo sapiens
ttccaaagagatacagggcagaggaaaatgcaagaagactgatggagcaggcttgcaatattaaagtggatccataaagaacccagccaacccgcagagg

SEQ ID NO: 677757 - DNA, 75 bp, Homo sapiens
tgcgggatcgacgcggacagcgggctggagcctgacgagctggcggattcagaatggacagtttagaagaacctc

SEQ ID NO: 677758 - DNA, 83 bp, Homo sapiens
ggtcagtccgccgctcaccccgcggccgcaccttcccgccttctcaggtgattgaattactcagatatgaagatcatcatcta

SEQ ID NO: 677759 - DNA, 100 bp, Homo sapiens
ctgaggagtggcgtgtgggtctccggaagctcgtcgcaggccatctgtgtgactccggtgcgagtggagacaatgcagatcttcgtgaagactctgactg

SEQ ID NO: 677760 - DNA, 75 bp, Homo sapiens
acctgtgtcattggccttaacaaggacttaaaggaaacagagcaaatgcagcgttacaatcaaagacttattgag

SEQ ID NO: 677761 - DNA, 75 bp, Homo sapiens
accagcagcaaagaagtgctatctggaaagagagtttcgtgtggctgatcaaagaaagaaggcatacgcagattt

SEQ ID NO: 677762 - DNA, 75 bp, Homo sapiens
caaagtaaatgctgtcttttcccaaaagacaggctcttcacctgaagttgactatattgtggagtatgactatga

SEQ ID NO: 677763 - DNA, 75 bp, Homo sapiens
tctcggtctccacgcccctccctgctgtcacccagacccgcggtgcgacaggtgctggagaatctggtaaaagca

SEQ ID NO: 677764 - DNA, 82 bp, Homo sapiens
agctgtaatcaattgtgctgacaacacagtgtgtcccggcatggatatccggaacaacctcactaggttgcatgagctggag

SEQ ID NO: 677765 - DNA, 74 bp, Homo sapiens
cagcgcagccaatcggcttccgaagtaggagctgaagaagaagctgttcaaacgccggcgggtgttgaatcggg

SEQ ID NO: 677766 - DNA, 50 bp, Homo sapiens
gccactgccgcaggaggcgtgaggtttggtgcacctcgatttggaggaag

SEQ ID NO: 677767 - DNA, 90 bp, Homo sapiens
ctgttctcgggagccgtggccctgatccagacctgggcagatgcccaggcggaggtgcgcttgtctgtacccccgctggtggaggtgatg

SEQ ID NO: 677768 - DNA, 96 bp, Homo sapiens
ggagattgcgagggagcgatgcggtgcagcgcggtagattttcgttccgtcacccaggctggagtgcagtggtgtgaccttggcttgctgcaaccc

SEQ ID NO: 677769 - DNA, 108 bp, Homo sapiens
tcaattcggaaccgaagattaaaaaactggagccagtccttttgccaggtgagccggcctcatcctagtgactaccccctcctgatcctctttgtggtaggtggggtc

SEQ ID NO: 677770 - DNA, 82 bp, Homo sapiens
agtggtcgaatccagtagaaaactggtcaaggaagctgctgatcaggctgccaaggtagagaagatgcgccagagcgtcctc

SEQ ID NO: 677771 - DNA, 100 bp, Homo sapiens
cagcctacacagaacagagccaaatcaaaggctatggctgctgctggacacggagacccatgacctggtggctatccacacagacggcaatgaacagatc

SEQ ID NO: 677772 - DNA, 90 bp, Homo sapiens
catcatctcagtcaaggacatcggaacttggtcctgatgtctgaccatggagatgtgagcctcccgcccgaagaccgggtgagggctctc

SEQ ID NO: 677773 - DNA, 85 bp, Homo sapiens
ttggggatggctataatgggtatggaggaggacctggagagcaagctataccagagaatcagatagcaagccctccctcagaggc

SEQ ID NO: 677774 - DNA, 100 bp, Homo sapiens
aactgtcagaaaagagtagcctgggctgtctggaaatctgaggaacatcaggagagcattctgggtaataccatgcaaagtgtgattgcattactcagca

SEQ ID NO: 677775 - DNA, 50 bp, Homo sapiens
ctttggcttcagcgtgtcccacaatgcagatcttcgtgaagactctgact

SEQ ID NO: 677776 - DNA, 100 bp, Homo sapiens
caacgttatattttgtcttctgtgtggattcttcagaaagtgaacttggcattttagatctaattcaatgacactccattcagggtaatggacaagatgg

SEQ ID NO: 677777 - DNA, 90 bp, Homo sapiens
ttgccgaagcttatatcccaccattgccacgggcattctccatctccttgcagtaatagctcttcaagtctgcaataaaaaatggcctcc

SEQ ID NO: 677778 - DNA, 95 bp, Homo sapiens
tccccagaagcagaagcatgtaaagcccacagaaccacccagaacgctggacaaacattcctttgctggtcaagatcctaaagctgatcatcaac

SEQ ID NO: 677779 - DNA, 103 bp, Homo sapiens
caaaggccgcgtcggagcagcaggcagacacgtctggaggagacagccccaagacaatgcagatcttcgtgaagactctgactggtaagaccatcaccctcga

SEQ ID NO: 677780 - DNA, 90 bp, Homo sapiens
gttgggcgccccggacgagagctccgtgcgggtggctgtcaggttgcacagacagcagatggtgtggatgctgacctctggaaagacggc

SEQ ID NO: 677781 - DNA, 83 bp, Homo sapiens
agaagagaagatggacagtttcagtgcattacagtatgtccgtggttcagaccctgtattaaagcttttggacgacaatggga

SEQ ID NO: 677782 - DNA, 136 bp, Homo sapiens
agaacagcgtgggatcttcacaatcagtgaccacccagcagaacagcgtgggatgttcacaaagaggtcctgggcctatgtcaagaagtgcaaaaacaacatgtgtccaaatcggggattggtgagccagctgctg

SEQ ID NO: 677783 - DNA, 82 bp, Homo sapiens
tgaagaggacctggaggccatccggctgcgggaggaggccatcctgcagatggagggggatatgagactttctactcggaat

SEQ ID NO: 677784 - DNA, 100 bp, Homo sapiens
acaaaatgggtaatatactataggaggctgagagagaagaggttcgagactgggtgcttacagtctccatggaccagcggctggagcaggttctgcctcg

SEQ ID NO: 677785 - DNA, 98 bp, Homo sapiens
gtaatttttacaaaatttgatgaagtccagaaatctggaaacatgatacaatctgcaaatgcagcagccgctcttctaaaacattcaaaccaaagaag

SEQ ID NO: 677786 - DNA, 74 bp, Homo sapiens
gtggtagttaaaggcccagatgataggaatcccatctcatttagatgtcggtgcagatctcttgtccatgtgcc

SEQ ID NO: 677787 - DNA, 109 bp, Homo sapiens
aagacctacaaggggtgcccgagcggctgctggggacggcggggaccggtgtttgtaaaatgtatgaagaacatctgaaaagaatgaatcccaacagtccctctatcac

SEQ ID NO: 677788 - DNA, 90 bp, Homo sapiens
cggcgctcccatggcgcacattaccattaaccagtacctgcagcagcaatcagaaacggagactgttcatctgtttatcccagctctatc

SEQ ID NO: 677789 - DNA, 90 bp, Homo sapiens
gtaatttcaacagaagagtgagagatggaacccgaagaagaaaggattcgttacagccagagattgaacaagttgaaatcatcgcagaag

SEQ ID NO: 677790 - DNA, 100 bp, Homo sapiens
cggcggctgatttagaaggaggttcaggctacggtgagccgaaggtcggccctcctccacgctgacttccgggtctcactctcccacgcctgtaagaacg

SEQ ID NO: 677791 - DNA, 100 bp, Homo sapiens
ccaacagctgctgcttgtgctgccatgtccgcaccggcaccatcctgctcggcgtctggtatctggtattggtttgccttaaaaaggggttaccatgcag

SEQ ID NO: 677792 - DNA, 88 bp, Homo sapiens
tttcgccagcccgtgccgcgagcgcggcctgcaggagatgaggacggggacttggttgccttttccagtgacgaggaattgacaatgg

SEQ ID NO: 677793 - DNA, 119 bp, Homo sapiens
tgctggaggtttggttctcccggcagcagcccgacgcaaaccaaggatctggggatcttcgcactatcccaagttacagaatgtctgaaggggacagtgtgggagaatccgtccatggg

SEQ ID NO: 677794 - DNA, 100 bp, Homo sapiens
atagccatcgacttcggggagcagcttagcctgcgacgcttatgattagagccaacaatttgaaatggcctgctcacctgatgcagtcgtctctccgtct

SEQ ID NO: 677795 - DNA, 83 bp, Homo sapiens
ctcgcgctactctctctttctggcctggaggctatccagcgaaaacaagctcagggctcccactgattgtacattatggtgag

SEQ ID NO: 677796 - DNA, 112 bp, Homo sapiens
acggaggtcagaggggaggaggactctggagctgacagcgcgcacttcacccgcagttggaggcaacgcacgggccacaggcatgttcctgcagtatacagtgccggggacg

SEQ ID NO: 677797 - DNA, 80 bp, Homo sapiens
cctaaacccagaattctttcaattaaaagcacatcttcaggaactgtggctgcaccatctgtcttcatcttcccgccatc

SEQ ID NO: 677798 - DNA, 96 bp, Homo sapiens
tttggatatcctgaaagatcaatgaactgagatccagagagatgatgactttgcccatagaccaaacaaagaaatacatgtttcagtcctgtgtcc

SEQ ID NO: 677799 - DNA, 82 bp, Homo sapiens
gctgccagggtccctgaagagggaagacacgcggaaacaggtacatcaggaacgtctctatcaagaatacaatttcagcaag

SEQ ID NO: 677800 - DNA, 87 bp, Homo sapiens
ctgctggaagggaaggaaaaacctgtatgtggaaccacctgttggctatacagtgcgctttgatgatgtcacctcagaagacaccag

SEQ ID NO: 677801 - DNA, 100 bp, Homo sapiens
gccaagtacagaaaccagaaagttagaatcagtgtttttccactctttatctggatctaaaagctctagaaggttgccaggatacatccaggcaacaaag

SEQ ID NO: 677802 - DNA, 75 bp, Homo sapiens
tcctctatcacgggcttatccgtgaccagcactattcctgatcagagaactccagttgcttcaacacacagtatc

SEQ ID NO: 677803 - DNA, 82 bp, Homo sapiens
ttgttggccttcatcaactcctagaatctagaaaggcattaagaagaaatgcactcaccatgagcaccaacttctgcatctg

SEQ ID NO: 677804 - DNA, 75 bp, Homo sapiens
catcatcaccatggacctgcatgcttctcagatacagaagatgattgaagaatcactgaagattaaaataaaaaa

SEQ ID NO: 677805 - DNA, 100 bp, Homo sapiens
gaccttccggagcttctcagaagacagagggttttcttttgagctgtgccctcctggctgaagaagccccaagacagccagctggaggagggcaaacccg

SEQ ID NO: 677806 - DNA, 75 bp, Homo sapiens
ccgcccgctggccgggagcggagcccctgtgggactggagactgatgcatgagggggctacggaggcgcaggagc

SEQ ID NO: 677807 - DNA, 75 bp, Homo sapiens
cgcaagatggcggacagtgcggaactaaagatctgagtgggacatacttttgaaggatgtgcaatgttcaatcat

SEQ ID NO: 677808 - DNA, 75 bp, Homo sapiens
ggagagcagtcaggaagctgccataaccatctacatgagagagatcctgcccggcctgtacatcggcaacttcaa

SEQ ID NO: 677809 - DNA, 50 bp, Homo sapiens
agtgacgcagagaagtttccgggactgctatgcttctggtgaagtatttg

SEQ ID NO: 677810 - DNA, 75 bp, Homo sapiens
tgcacccaaaccaggacctctaaaaaaggcacctgctgctaagagttcagttgattccaccatctctagttcttc

SEQ ID NO: 677811 - DNA, 83 bp, Homo sapiens
ggatgctgttggcttcagccccaagaagacgccgcttcctccagagggctaaggtggttctcttcccaaagtggaagccaaat

SEQ ID NO: 677812 - DNA, 50 bp, Homo sapiens
cgaacatacagaaatccttaccgtcctctcaaactgtgagtaactaagtg

SEQ ID NO: 677813 - DNA, 74 bp, Homo sapiens
ctgaagaaaaagtactatgaggaaccgaggaaggggatacagactcagattgatggacaacttttcttaattaa

SEQ ID NO: 677814 - DNA, 98 bp, Homo sapiens
cgcctcttcagcttcctgtaccagagcagccctgaccaggtgtcttcaaaaacaaacatatttaaaagattttacttctcatctccaggaagaaccag

SEQ ID NO: 677815 - DNA, 100 bp, Homo sapiens
ggagccgggggaagctggccttgggctcagcaaaacccagcagctcagattcctgccaggcagcgggagattgaaatgaaccgacagcaacgcttcttcc

SEQ ID NO: 677816 - DNA, 98 bp, Homo sapiens
gcaggaacggctccagcatcaagatccgtctgacagaaataagcgggttttgaaaacaaaaaaaagaaggagtggaagagggggccaggatccaggcc

SEQ ID NO: 677817 - DNA, 100 bp, Homo sapiens
gtcatcatgagcgatgttaccattgtgaaagaaggttgggttcagaagagggatgttgcccatttaatgtggttcgaaagactctatgtttggcttcagt

SEQ ID NO: 677818 - DNA, 75 bp, Homo sapiens
gctagcgactcgccctagaggcgatagatatgaaggtggttattaacttggtgatgcttttggctgaaatgaaaa

SEQ ID NO: 677819 - DNA, 90 bp, Homo sapiens
gcggaagtgcagctgcctcagttcttagcgcagccaccttctgggtgaaccctcagttcaagatccggctggatgagacggatgacccgg

SEQ ID NO: 677820 - DNA, 50 bp, Homo sapiens
acctggcattgccttttgttgagatatttggagttcttacaacatggcag

SEQ ID NO: 677821 - DNA, 100 bp, Homo sapiens
acaaaatcaagcaaatttggagcaaagaaagttgctgaaaatgtcaaggcatgaaatccaagtgacccaaatcaaccagtccctcaagacacgaaattca

SEQ ID NO: 677822 - DNA, 89 bp, Homo sapiens
agagatttccacagaaggactgggatgatacaccttttccacagggaattgagttggagaaggaagccaacatccttttggagccatga

SEQ ID NO: 677823 - DNA, 90 bp, Homo sapiens
agtggactcaacttcaaagacgttctcaaggagaaggcagacctgggcccataaagagaggggatattttgcccccagaaaaaggccgag

SEQ ID NO: 677824 - DNA, 75 bp, Homo sapiens
cgctgcgggaccccacggtcacccgccgggggtcgggccccggctcagtggtcccaggcagctcgggtgtcggaa

SEQ ID NO: 677825 - DNA, 100 bp, Homo sapiens
aacagaaccatcctgggctacaagacgctggccgcgggctccatcagcatggctgaggccctccctatcctgaagacattagctgagagtctggcacctt

SEQ ID NO: 677826 - DNA, 75 bp, Homo sapiens
tatcgacatcacaacaagttgaggttatgctttaaggaattcatcatgaggcaattatttgggatatacctgtaa

SEQ ID NO: 677827 - DNA, 83 bp, Homo sapiens
aggcaggctgcggcagacggcgacagtggcggcggcgccatggcagggcttgcaggaatgtgggtgccggcaggacaggcgat

SEQ ID NO: 677828 - DNA, 90 bp, Homo sapiens
gctgctgcagagaagaaagtgtcagagccggagagcttgtttcatatccatatcccactgtattcctgctaatctgctaatgcagtaaat

SEQ ID NO: 677829 - DNA, 75 bp, Homo sapiens
cctttatatagaagggagagtagggcatccgtttccgaggctttagtatccctgaatgccagaaactgctaccca

SEQ ID NO: 677830 - DNA, 75 bp, Homo sapiens
gggggattctcgacctgctaacagaactggaccttttcggccacagatggtatctccagtgagtaaggatgccac

SEQ ID NO: 677831 - DNA, 89 bp, Homo sapiens
ttactcatagagtccgactataccacatacaggggaggttttacataaatggagtcctaaacaaataggagaacaccttctactgaaat

SEQ ID NO: 677832 - DNA, 75 bp, Homo sapiens
cgatgaccgtgcgctgaccctgactcactccagaggcggggtttcaccatgttgcccagactggtcttgaactcc

SEQ ID NO: 677833 - DNA, 101 bp, Homo sapiens
agtgatattgaccatgatggaatgcttgacagagatgagtttgcagttgctgagtatgcccatcgtggtttctccgaggtgaaaactcccacactgttttc

SEQ ID NO: 677834 - DNA, 90 bp, Homo sapiens
catctctcaagtacccatcttggagggtacggaccccacatgagggtgaggctctctgcacactccagacaagaaagtacgactatcagc

SEQ ID NO: 677835 - DNA, 98 bp, Homo sapiens
acaatgatccaatccacgaactgctggacgacctcggcgaggtgcccaccatcgagtccctgatagtacgttaaaggaccttgacacctctgacagaa

SEQ ID NO: 677836 - DNA, 73 bp, Homo sapiens
tatttgcacaccatccaggagtcagtttattactggaaagtttctaagcatgaattgaggaacagaagaagca

SEQ ID NO: 677837 - DNA, 75 bp, Homo sapiens
ggacacacagcatggagaaatccttcgcaatgtcaccatcctacgagagacgagttgtactgctgtcacaggaaa

SEQ ID NO: 677838 - DNA, 74 bp, Homo sapiens
gtcctatacattgcaggttcatgaagaggaccaagatgtggaaaggagccaggattacatcccagtagaccaag

SEQ ID NO: 677839 - DNA, 50 bp, Homo sapiens
gaaaccagtaacagattgtgttatttcagcaacatcagatgctgacctga

SEQ ID NO: 677840 - DNA, 75 bp, Homo sapiens
ggacactccaacacatttctttacacaggttgtaaagaagaaagttctaccctttctgtcaaaatgaagtgtgat

SEQ ID NO: 677841 - DNA, 90 bp, Homo sapiens
cgacgagctggagcgcctgtcaggctgggaggaggaggaggagagctgacaatgcagatcttcgtgaagactctgactggtaagaccatc

SEQ ID NO: 677842 - DNA, 101 bp, Homo sapiens
tcggaacccgccagggtccagggtccaggttccagcgcccggcggcccaggttttgatggtacagtccaggtctatgatgccacatcttgggatggaacac

SEQ ID NO: 677843 - DNA, 73 bp, Homo sapiens
tcgcagtggtcgcttcttctccttggctattgagggcacctacattgacaagaaatgccccttcactggtaat

SEQ ID NO: 677844 - DNA, 75 bp, Homo sapiens
cgcggacctccagtggccggctccggaggcttggtgactccagtggcccaggtaagaatgattgatgttggctga

SEQ ID NO: 677845 - DNA, 96 bp, Homo sapiens
gggcctggtacaagggaatgtcacaagcacaaaagagacaagcagtgccctgacccatgctggagcccatcttgacctctctgcattctcctcctg

SEQ ID NO: 677846 - DNA, 74 bp, Homo sapiens
actacagccagtacatccgggcctgcctggaccacctggcccccgactccaagcagggcctggtcactgaccaa

SEQ ID NO: 677847 - DNA, 99 bp, Homo sapiens
cctggctttcgtattcgttgttctcggcgggctgtggggcctccgcgccgcggccgttagtcatgtcggagagagactcccgtgagcacgaggagccca

SEQ ID NO: 677848 - DNA, 75 bp, Homo sapiens
cggaccgcacgcctcttctaccgggcgccccacgggccgaagccggggtttgccaacttgttaataagatggagg

SEQ ID NO: 677849 - DNA, 100 bp, Homo sapiens
gagcgaagagcaggcggaggaacaaaggcgacccaagacacccagagagggacagcaattctgtggtgttcttggtcacacatttatggagtttctgaag

SEQ ID NO: 677850 - DNA, 82 bp, Homo sapiens
cgcggtgacggtggcgccgcccggggcgaggcagggccagcagcaggcgggaggtttggtgcacctcgatttggaggaagta

SEQ ID NO: 677851 - DNA, 100 bp, Homo sapiens
gttggccctccaggccagcctgaggaaggagcagatgcgcatccagtcgctggagaagacagtggagcagaaggcaaagtttgagaacctctgcaagctc

SEQ ID NO: 677852 - DNA, 82 bp, Homo sapiens
gggggggagagccactgacgccgggaccgggaccgccgccgccgccgccaccatggcaagtgaaccggagcaaacgacttcc

SEQ ID NO: 677853 - DNA, 100 bp, Homo sapiens
tgtgaagaatggcaaaggatcagtgcttcctaactcaggttccgtcagccctggcgcccaggcgcatctgactcggcaccccctgcaggcaccatggccc

SEQ ID NO: 677854 - DNA, 74 bp, Homo sapiens
aaaaatgatgagaatgaggacccgggaagaaatgatgtgaaggagctcttagattctgacagtgataaaccctg

SEQ ID NO: 677855 - DNA, 75 bp, Homo sapiens
ttggcttctcccagcatagccccagttctgccttcccaggaccctgcccttccccagaaggagcaggagaaaatg

SEQ ID NO: 677856 - DNA, 82 bp, Homo sapiens
caccgcgctgcactacgcctttcaggacgagaaccacctggagtggagtcaacatatcaatggagcaagtcacagtcgtcga

SEQ ID NO: 677857 - DNA, 90 bp, Homo sapiens
cgcgtgtgagcgagcagccgtgggcagcggtggagcatgagtctggctggtcagccatgtcatctgagcctcccccaccaccacagcccc

SEQ ID NO: 677858 - DNA, 50 bp, Homo sapiens
cctgtcctcaggcatatcaaaggttttgagcaaaattttggactgtgaag

SEQ ID NO: 677859 - DNA, 100 bp, Homo sapiens
cctcaatgacaagatgtttgagcatgacttccgttggactgatggcagcacactgggattgaggagactgaagaatgctgaagacaggctgatgggctca

SEQ ID NO: 677860 - DNA, 99 bp, Homo sapiens
caagaagctggaacattattatccagcaagaatgttcgtgtcaactgtttggacgaggtgctgccacgggacctggagaaggaggatgccccccaggag

SEQ ID NO: 677861 - DNA, 100 bp, Homo sapiens
agattccctgaagctctgctgccccgcaggcaccttcgggccctcctgccttcggaactgcttttatgtcagcatgccatcaggacccccggactcaagc

SEQ ID NO: 677862 - DNA, 80 bp, Homo sapiens
cgacgctaagttgctgatcgtggcggaccatggccaacctggagcgcaccttcatcgccatcaagccggacggcgtgcag

SEQ ID NO: 677863 - DNA, 100 bp, Homo sapiens
aaacactccaagtgtggaccctgcaaatataaagctgagtgtgatgaagatgcagaaaatgttggatcatcattttctgggtggaagtattcagctaaag

SEQ ID NO: 677864 - DNA, 50 bp, Homo sapiens
ccgcctccgggcatcttcaactgtgaagccaaaaaccttccctcttaccc

SEQ ID NO: 677865 - DNA, 98 bp, Homo sapiens
ctctgcgtcctcatcgggcttatgttcgagggacagtatgatttggtgaaatgcctggctcctattcgagaccccaagaccgagcaggatggacatga

SEQ ID NO: 677866 - DNA, 100 bp, Homo sapiens
ggttcagccctttgatgaccgcagcaggcttggtggagccagtgaacgtggtggacaatggagatggcacacacacagtaacctacaccccatctcagga

SEQ ID NO: 677867 - DNA, 96 bp, Homo sapiens
tgctgcttatggagcaagacagaaacgaagaggccatcaaacttttggaatctgccaagttgctccttgagggcaggacagttcttatggctttat

SEQ ID NO: 677868 - DNA, 74 bp, Homo sapiens
cccactggccaagtcggggaccctggagaaaggatcatggaagggaagtggttgctgtgtatgttactggtgct

SEQ ID NO: 677869 - DNA, 51 bp, Homo sapiens
cgccctgcatcgagcagctggagaagttctgtggctcctgatggatctgag

SEQ ID NO: 677870 - DNA, 100 bp, Homo sapiens
gtggtgtatcgccggccacccacgtcccctcctctcggggggccacaggccctggacacagaggctgacccgcggctgattgagtccctctcccagatgc

SEQ ID NO: 677871 - DNA, 82 bp, Homo sapiens
cgagtgttgcagagcctgcggggcaagatctgctgaagctcagggccctgtctgctctgtggactcaacagtttgtggcaag

SEQ ID NO: 677872 - DNA, 100 bp, Homo sapiens
tgaaaatcaggatcgctacattaaggtgactgccagaaagcaactgattcagacctttcttctccacggcataaacaaagtccagggcaccaggattctg

SEQ ID NO: 677873 - DNA, 90 bp, Homo sapiens
taagaaagaatcttgtcactttagccactgctactacagtgtggcaaagcgctccctggcctttcaaagcaagaggactgctgtggaact

SEQ ID NO: 677874 - DNA, 100 bp, Homo sapiens
cgctgccactggagtgacatgttcacgggaaggctgcggaccgagatcccaccagccctgtgtgccctatttggacttgacttgaacgtgaatgcagcca

SEQ ID NO: 677875 - DNA, 99 bp, Homo sapiens
ctcacccgcatggggtgaagcgttcagcctccccagacgacgatactgaagcgttcccggctgaaggtgaggttctgcaccaacgagtcgcagaagtcc

SEQ ID NO: 677876 - DNA, 100 bp, Homo sapiens
ctgctcaaagctgcctgcctagatatcctggtgcgaaagggtttctggaaacagcctcccctcatctgggatgtcaatcctaaacagattcggattctca

SEQ ID NO: 677877 - DNA, 85 bp, Homo sapiens
tcctgaaggagttccaccaggccgggaagcccatcgggctctgacgcccgctctgcggcttcggtgtttgaacaggccacagtcc

SEQ ID NO: 677878 - DNA, 98 bp, Homo sapiens
agcgaacctcgagaccaacgtggaggagctgtgggtggaaggagttggcgatttcagcgtgtgggagttctctggaaatcctgtgtatttctgctgtt

SEQ ID NO: 677879 - DNA, 75 bp, Homo sapiens
agcctgcggacgaggccgggacttggccgagcggatcctaataaggggaaaatgtgaagaacagtccagactggc

SEQ ID NO: 677880 - DNA, 82 bp, Homo sapiens
cgtgagcgagcagaggcttaaggtcttcagcggggcgctccaggaggcactcacaggaaatctggcattttttaaagtttgc

SEQ ID NO: 677881 - DNA, 100 bp, Homo sapiens
cggccaaggaaactcccagggcccgcccaggacccccaagccgccgcggacgcagggaaaggaaaacctcttcagcgcaaggtgaaaccacctaagaagc

SEQ ID NO: 677882 - DNA, 80 bp, Homo sapiens
cctggctttctgcgccatcctgcaccgccaccggcccgacctcatacccaacatgagtgaagtttcctgcaagaaacggg

SEQ ID NO: 677883 - DNA, 100 bp, Homo sapiens
cgctttttggaattcagttatcaagctttagagcctggctactcacagttgaagcctgattgcagctcgtgcaagatttactgaaaactttgccacaaat

SEQ ID NO: 677884 - DNA, 80 bp, Homo sapiens
acggacataccagtggccatggggtcaactgctatgatgtgtttggagcccagtcaccctttggtggctacaagatgtcg

SEQ ID NO: 677885 - DNA, 82 bp, Homo sapiens
gagaagtatcgtaacccccaaagagaaaaagaaatgatgcaattgtatatcagagaacgaatgcaggaatttgggaactgag

SEQ ID NO: 677886 - DNA, 75 bp, Homo sapiens
ttctttgactgtcttaactggaggaaagtagctaaggctgctttgactctcccgcgaagacctttccttcactgt

SEQ ID NO: 677887 - DNA, 95 bp, Homo sapiens
gaagaaatttctgccatggttctcactaaaatgaaagaaaccgctgaggcttatttgggaaagaagatctttgaacaggtactaagtgaactgga

SEQ ID NO: 677888 - DNA, 75 bp, Homo sapiens
ggaagcgtcgggattaggtgaaagaattgaatgatctggcacgggaccctccagcacagtgttcagcaggtcctg

SEQ ID NO: 677889 - DNA, 83 bp, Homo sapiens
cacaatcccgggcatgggcggcaactctttgatgtactactataatgggaaagcggaagcagttcaggtacttttgaagcatt

SEQ ID NO: 677890 - DNA, 83 bp, Homo sapiens
gccgcagtcgccactggctgcctgaggtagttaacctgcagtacagtgaagttcaagatcgggtcatgctcactggccgccac

SEQ ID NO: 677891 - DNA, 100 bp, Homo sapiens
agattctccaaaatgtggccagattgcagggagtatcaaatatgagaaagctaggccatctgaataactttactaaggcagtagcagaatcccatggtag

SEQ ID NO: 677892 - DNA, 80 bp, Homo sapiens
cctcaagtgacttggtttagagaagggcacaagattattccaagcaacagaatggaaatcctcattgacgattcaatttg

SEQ ID NO: 677893 - DNA, 100 bp, Homo sapiens
atgtacgccgcgatcaaggctgaccctgatggtgacgggccggtgggaaagtcagcaggatgtatcccaaaccacagtttccagaggaatagctcctgcc

SEQ ID NO: 677894 - DNA, 76 bp, Homo sapiens
ccggagaccccgaaaacggaagcgcagggagaaggaagaggtgtttgaaaagactgaaatcgccaagagattgaat

SEQ ID NO: 677895 - DNA, 98 bp, Homo sapiens
atttctccaaaaaggatgtcatgttcctggcctggcacagaagatctctgatgatctgatgcagaagatcagtactcagaaccgccgggccctagacc

SEQ ID NO: 677896 - DNA, 50 bp, Homo sapiens
gcctcactgagcaaccaagagcacgtgtggttctcaaatataggcattct

SEQ ID NO: 677897 - DNA, 80 bp, Homo sapiens
gaccctggagcctcagttggaagcagccgatccagcctgcggagcctgtggggcagcctgaactctttgcttccggaatc

SEQ ID NO: 677898 - DNA, 90 bp, Homo sapiens
gtacagcgggccgggaaaagtggcactgaggctctggaacttctgcccagctctccttggttgaagatgaaatccactgaggagggaagt

SEQ ID NO: 677899 - DNA, 88 bp, Homo sapiens
cagccagtcggtctaatttgaaagtttccacgggctcccttgctcagcagtatgcgcaccctaacgctaccctgcacccacatactcc

SEQ ID NO: 677900 - DNA, 101 bp, Homo sapiens
ctggagagggatgtgtggctgcgatcctcggggaaaccgagaccaagatcactccatggatgaaatgacagctgtggtgaaaattgaaaaaggagttggtg

SEQ ID NO: 677901 - DNA, 74 bp, Homo sapiens
ggagagacgtcgctgaggggcttgcctgaagcgagggcagatccagtttgctgaccagaagcaagaattcaaca

SEQ ID NO: 677902 - DNA, 75 bp, Homo sapiens
cagccagttcagagtgtcatccaagagacctccttcagtagacttcctagcatgggctgttgtgctggagagaac

SEQ ID NO: 677903 - DNA, 76 bp, Homo sapiens
ctgaactggacggacataccagtggccatgggtttcctcaagcatctgcttcctacatattactacaatttgcaca

SEQ ID NO: 677904 - DNA, 96 bp, Homo sapiens
gaggcagaatttacatgaaatagggaagggcgacctgatcggctgtgagctgccccggcgggagcaggtggtaaaggccaatgccgacgtgaaggg

SEQ ID NO: 677905 - DNA, 75 bp, Homo sapiens
gcccttacctctcttacagctgccagcagcttctccaaggcacgggaggaagatttgatggtagagtggtggcaa

SEQ ID NO: 677906 - DNA, 98 bp, Homo sapiens
aagcaggaaaacggcgagaggactggaggggtgcctctgatcaaagcccccaagagaggctttggaatggatccatgacaatggcgagttctaccttt

SEQ ID NO: 677907 - DNA, 100 bp, Homo sapiens
ttgatgtccaggcagggagcctccagagtagacaagccctcaaggatgcccggtccccatcaccggcacacattgtcggatcgcttacacctgagacgaa

SEQ ID NO: 677908 - DNA, 75 bp, Homo sapiens
cgagcgaggaggatggcggagtcggggctcctgacgcttctccaaacaggctggtgtacagggagcaacaccgga

SEQ ID NO: 677909 - DNA, 75 bp, Homo sapiens
ggagtttggaattgaccctcaaaacatgttcgagttctgggatggtagcatcacgcccacagactacaccctctc

SEQ ID NO: 677910 - DNA, 82 bp, Homo sapiens
cctgttcataaaagatatcgaggatttagccggaaggagaaccagcagaaatccaccaatgtagtctatcaggcccaccatg

SEQ ID NO: 677911 - DNA, 96 bp, Homo sapiens
tggagattgacgcagagtgggcggcggtggtgaaacttgggaaccgtgggtgctgttgccttggactgcaaagggaatgtagcctacgcaacctcc

SEQ ID NO: 677912 - DNA, 74 bp, Homo sapiens
agcgcgaatatcgtcatcgttagaaggtctatcatctcatgaagaactgctgggagacagaggcgtcctttcgc

SEQ ID NO: 677913 - DNA, 100 bp, Homo sapiens
ccctcgttacacctggatacaccatcaaaattcctgtccaaggacaaactcttcaagccttcctttgatgtgaaggacctggagttgctggctaccttac

SEQ ID NO: 677914 - DNA, 51 bp, Homo sapiens
aatacggactcttgtagataaaatgctcttttcagttgcattagcagaaat

SEQ ID NO: 677915 - DNA, 100 bp, Homo sapiens
gggaggacccccagccacatgtggaccctcagcctggggtggcgctccaaccccctttgaccggaactatgggaccaagctgggggtgaaggccatgctg

SEQ ID NO: 677916 - DNA, 75 bp, Homo sapiens
ctgaaagtggtcttcagtttctccatagtggtgcttccgtcctccaggggaagtattacaaatggaagatgatct

SEQ ID NO: 677917 - DNA, 74 bp, Homo sapiens
tcagaactaaaggagctgctgacccgggagctgcccagcttcttgggggaagcagaatctggtaatataagtca

SEQ ID NO: 677918 - DNA, 100 bp, Homo sapiens
gccctccctgaggagatccgttggctcctggaaggtgaatctggattgggaaagtcgacattaatcaactcattattcctcacagatttgtattctccag

SEQ ID NO: 677919 - DNA, 82 bp, Homo sapiens
tctgttcaagggaattttgatctaaatagaaaatgctgctcaaattccagtggctactccacaggtctctcctaacacagtg

SEQ ID NO: 677920 - DNA, 76 bp, Homo sapiens
gcaggctgcggggcgcggagtcgggagacctgcctagagctggaacgttacctccagagcgagccctgctatgttt

SEQ ID NO: 677921 - DNA, 96 bp, Homo sapiens
gcgcgatggagcagcgaaaacgtggttgtagagttccgtgactcccagtgctcttaaagttccgtacagataaaggaagagatcccagttctgata

SEQ ID NO: 677922 - DNA, 100 bp, Homo sapiens
tccgcccggcagccaccccatctgggaagctacgcccaggaggaacagctgaaagaagaggaggaaataaaagaagaggaggaggaggaggacagcggtt

SEQ ID NO: 677923 - DNA, 101 bp, Homo sapiens
agagcctcgtaccaatctctctgtctttaaaagatgaggtgacttggtgattttcctggaaaattataggcatacactgattacagtgactctgtagcacg

SEQ ID NO: 677924 - DNA, 82 bp, Homo sapiens
ctccactccgtcccccgcgggtctgctctgtgtgccatggacggaggccacaagaggaagctgaatgaagaggacgccgcca

SEQ ID NO: 677925 - DNA, 100 bp, Homo sapiens
gccgccgcccgtaaaggagctgagccgagcgggggcgccgcccggggtccggtgggcaaaagtatgctcaggcttcagaagaggctcgcctctagtgtcc

SEQ ID NO: 677926 - DNA, 75 bp, Homo sapiens
atgaacgttctttacaaaatcaccaatttgaactaaagaagctgaaggcctatggatttgtcaactattaagaaa

SEQ ID NO: 677927 - DNA, 100 bp, Homo sapiens
gcacagattagaggaaggaagagaggaggagtatgatgaagatgctcaggtagtggaagacgaggaggacgaggatgaggaggaggaaggtgaagaggag

SEQ ID NO: 677928 - DNA, 83 bp, Homo sapiens
cgcggattcgccgaggcaccgaggcactcagaggaggcaccatgactcctgtgaggatgcagcactccctggcaggtcagacc

SEQ ID NO: 677929 - DNA, 82 bp, Homo sapiens
ctgatcaacttgatgtctttttacaaaaaggctatggaaagggcaaatggaatggagctggatggtagaagaattcgggtgg

SEQ ID NO: 677930 - DNA, 75 bp, Homo sapiens
tatctttggcttgcagccaacaatgggaaaggtggtggcgccctcctgcactcagtcaaggccaagacccaacca

SEQ ID NO: 677931 - DNA, 82 bp, Homo sapiens
gaggagccagacgacaagcacacactatggcgctgaaacggattaataaggtgtgataaagcggaattgggaatatatatgt

SEQ ID NO: 677932 - DNA, 82 bp, Homo sapiens
tgtgctgaacgggaagggcctcggcactggtaccctttacatcgctgagagcacccagtcagcttgaagagtttcaaatgga

SEQ ID NO: 677933 - DNA, 96 bp, Homo sapiens
aaagaacttgccaaaatcaacacattttattcaggttaatacaatctgttggaatgacactggagaatatattttatctggctcagatgacaccaa

SEQ ID NO: 677934 - DNA, 90 bp, Homo sapiens
ggaggctcagttcaaagacctgttcttaaaaaaagattcatgatgttgctatcaaaagttgagaaattgtcagaagaaatcatggagata

SEQ ID NO: 677935 - DNA, 75 bp, Homo sapiens
cctggcagaaggcagccatggagggcgatggctcagattcgccgaagtcaacgaaaggttccgttgtccttgacc

SEQ ID NO: 677936 - DNA, 96 bp, Homo sapiens
gaggacctgaacctgcggcctgacccagagccacttctcaccgagatgattcatgaaactattgcagatatcatccgaacatgtttgggacccaag

SEQ ID NO: 677937 - DNA, 50 bp, Homo sapiens
cattagaagaattgcgtatgagaaggttggtagctggcagtgttgtgatg

SEQ ID NO: 677938 - DNA, 100 bp, Homo sapiens
caggcctgctatatctttcaccaccgttgccgccttctcgagggcatacttttttgatgcaccagagatggaccatctcccaacaactacagctactcca

SEQ ID NO: 677939 - DNA, 98 bp, Homo sapiens
gagacacagtatagcttctgacagtggagacactggcattggaacttcctgttctgatagcgtggaagatattgatgatgttaagaagttcaaaccgg

SEQ ID NO: 677940 - DNA, 50 bp, Homo sapiens
accaggacccccaggcggcgttagagcatttcctgtgttacatctgcaag

SEQ ID NO: 677941 - DNA, 100 bp, Homo sapiens
gagtaacaacgcgcgcttgagttggtataaactcctgaaggtagaaaatctttatcctcaaattggctgggtagaaattgatcctgatgttctttggatt

SEQ ID NO: 677942 - DNA, 75 bp, Homo sapiens
aaacatcaaacggcatacaaatgatcaacaaactccatttatgtaaacccctaattagagcaattgacagctcaa

SEQ ID NO: 677943 - DNA, 82 bp, Homo sapiens
aactgagaagcgagggtgacaatatggccctgctgtggcaccagtgaccaacgggaacacaacggtgccacccctgaacgat

SEQ ID NO: 677944 - DNA, 98 bp, Homo sapiens
accacttaaggacattgtggcaatcatcctgaatgaatttagagccaaactgtccaaggctttggcagttctttggcatggacacaagttcagtggga

SEQ ID NO: 677945 - DNA, 99 bp, Homo sapiens
ggatgctgagctggaatttgccattcagcccaatacaactggcaaacaactttttgaccagtagtttatgccaacgtgacttcattcatacagatgaac

SEQ ID NO: 677946 - DNA, 90 bp, Homo sapiens
agagccagccgccctgcagccggccgtcggccccgcagccacagggagtgcatccgccccaacccttttccccctcgtctcctgtgagaa

SEQ ID NO: 677947 - DNA, 98 bp, Homo sapiens
tgggtgccagagaggcggaagaggaggcctgatggggtaatctttagatggtggaagatctctctaaggagtgagtatcgatcaacaaaacctggaga

SEQ ID NO: 677948 - DNA, 73 bp, Homo sapiens
gtattagaaatgagctgaagaccattcacagatatgattctataacagactcttccagaaatgatatgaagag

SEQ ID NO: 677949 - DNA, 75 bp, Homo sapiens
ccctgtcccagcccctggaaaggggcaggaacgacaaactcaaagtccaggaaaaaagagggggcatggctggag

SEQ ID NO: 677950 - DNA, 100 bp, Homo sapiens
cttttctctctgattctccagcgacaggacccggcgccgggcactgagcaccgccaccatggggaagggggtcagatgtaccaacagtaccagcaacagg

SEQ ID NO: 677951 - DNA, 100 bp, Homo sapiens
attgtattgatgatactaagcttgtgaagcagataatcatatcacttttagagctctttgacagtgaagatcctcgggagagagattttcttaaaaccac

SEQ ID NO: 677952 - DNA, 129 bp, Homo sapiens
gggagcgcgaagatggcagctgctgaggaggagccgaagcccaaaaagctgaaggtggaggcgccgcaagcgctgaggcaaaagtcaacaactctagcttaattggagtaggctatactcagactctga

SEQ ID NO: 677953 - DNA, 74 bp, Homo sapiens
gacggtcggactcccgcggcgggaggagcctgttcccctgagatgatcatgacgcagtcctgaggtttaatggg

SEQ ID NO: 677954 - DNA, 74 bp, Homo sapiens
gcgcagctgagcagcgtgagaagatcaagcaggacagtcattttgtttactcattcagccctgttgcaggtccc

SEQ ID NO: 677955 - DNA, 100 bp, Homo sapiens
ttggaggcaatgcagataagaaaaatctcgtggatccttttgtagaagtttcctttgctggaaaaaaggtgtgaaaatgaaaccaagttcaaaacagaag

SEQ ID NO: 677956 - DNA, 51 bp, Homo sapiens
tgaagatcggagccaaatccaagaaagtcccaggtgctgttcccactgaat

SEQ ID NO: 677957 - DNA, 112 bp, Homo sapiens
gatccaagtcaccaagaaattactgtctcaagtgatacgaatatcactttcctgattcctggtttctacagctacatggaccttgcgtacaacagctcattacagctcccag

SEQ ID NO: 677958 - DNA, 74 bp, Homo sapiens
atccgctgtacttgcgtccgctacagtatgtcaatcgcttgccccagcacagaatgacagcccatatcaaggcg

SEQ ID NO: 677959 - DNA, 82 bp, Homo sapiens
tcagctagtatgcaggctaggcaaactatggcggacttccaccacaaatggagggattttgactgtatctattgacaatcct

SEQ ID NO: 677960 - DNA, 88 bp, Homo sapiens
cctcagaggggcaggttacaagaacttcacatctctcaggctacatgttgcaaaggttaaattccagacggagtcttgctctgttgcc

SEQ ID NO: 677961 - DNA, 100 bp, Homo sapiens
tggctgcaccttcagatcatggcgttggcattgaacctgtatttccggagaacacagttgtggacatcggatacccaaggagacgaagctgaagcaggag

SEQ ID NO: 677962 - DNA, 100 bp, Homo sapiens
gtggccaatgcagatactaattaagtgccctaatcaaattgtgagacagctgaaggcctgaaaaacctgaagaagatgtgtttatttcatttgacccact

SEQ ID NO: 677963 - DNA, 98 bp, Homo sapiens
ttgggagccacgtgtaccagtgtgtgttgatcttggcttgattcagtctgccttgtaacaggtatattgaagcaagtcaaagattacattaaacagtg

SEQ ID NO: 677964 - DNA, 100 bp, Homo sapiens
agaccagtgcccatgaaggtcagactgaggtgaaaatggttctttccaaattgtatgagaataagaaaatagctagtgccacccacaacatctatgccta

SEQ ID NO: 677965 - DNA, 82 bp, Homo sapiens
ccaagatggtgaagcagatcgagagcaaggcttcagtttcacattcttggtacctcctggtggtgcctgggagggagccact

SEQ ID NO: 677966 - DNA, 100 bp, Homo sapiens
agtccctggatcaccgacagcacagacagaatccctgctaccagccaactgtgatttgagacggcagattgatgaacagcaaaagatgctagagaaatac

SEQ ID NO: 677967 - DNA, 100 bp, Homo sapiens
attttctttccccctttaacttagaggaacgaggattatacagaaatttgaacctgctcttgaggttcacagatgatacctttgatccagaacttgcagc

SEQ ID NO: 677968 - DNA, 75 bp, Homo sapiens
aagaccatgctggcaagtctgaaggtcaagtcaccatggctgttattggctcccttgctgtccccagctgttccc

SEQ ID NO: 677969 - DNA, 83 bp, Homo sapiens
gcaaacctccgggcccccaggcatggctagctcggcatggaagaggagatggttcgtgttacgcagtggccgtttaactggag

SEQ ID NO: 677970 - DNA, 110 bp, Homo sapiens
ctccagtcggtgttgagcacggcgagcagtctcaggcctttagtgatgatgaaccttctgaggaaaggaggccatacagaaattgaacctcagcacttctgtcaagcttt

SEQ ID NO: 677971 - DNA, 98 bp, Homo sapiens
tgttgcttaggatatgaatggctgagcggaggctgtaaaacctggcactctgcttgggtacggtggttgaggagagcaatggttctgatgagatggag

SEQ ID NO: 677972 - DNA, 51 bp, Homo sapiens
cagaggggcagccggagagcctgggaaagaacgacaaatcctccacccctg

SEQ ID NO: 677973 - DNA, 96 bp, Homo sapiens
ttcttattacacaagccacacctcatgttgctcctgtgatgccattagatcgtttcattacagcctggatttgtggtatcatttctatcactgtca

SEQ ID NO: 677974 - DNA, 90 bp, Homo sapiens
gaggagttctctgctcagcacagccaaggaacagaattagaagaaaaggaaccctggcctgagttgttggaattggaagcggaacaaaaa

SEQ ID NO: 677975 - DNA, 74 bp, Homo sapiens
ctccgccgctgcctcaggagcggaacaacgtcggcgagcgggggaagaaggagaaagggccaacccctgaagaa

SEQ ID NO: 677976 - DNA, 73 bp, Homo sapiens
tccatgtaccagaagtgtaccactgtggatgaagcagtacttcctcgcgtattgctaaaggaggagttgacca

SEQ ID NO: 677977 - DNA, 98 bp, Homo sapiens
catagacagtctgtgtaagaagtactccagggaaacctcccaggtccggcctctttggcctacccccgttggctccgctgccccaggtcgatgagtcc

SEQ ID NO: 677978 - DNA, 100 bp, Homo sapiens
ctggtgtttggaattagcaagaaatcctttggacccaagactgctgacttcagattatgcggatcaaacctcaccaaggccagcacataggagagatgag

SEQ ID NO: 677979 - DNA, 75 bp, Homo sapiens
gcgagagtcacgtcccggcgctagcccagcccgacccagggcttgctctcaattttgcgcaagttgaaaagtgca

SEQ ID NO: 677980 - DNA, 90 bp, Homo sapiens
cacagaggaggcggcggaggcggggaaaaagcttgtggtgaaggggggcaaaaaaaagaagcaagttctgaagttcactcttgattgcac

SEQ ID NO: 677981 - DNA, 79 bp, Homo sapiens
gaggactctttttgtcctcaatgtgcccccatactgcacagagggtttccaggtagcctacgtggtgttccagaagcca

SEQ ID NO: 677982 - DNA, 75 bp, Homo sapiens
ttgctgcaaggaacttccatgcctctaacactcatcttcaaaagactggtaaaaccttgttagccaaagcagtag

SEQ ID NO: 677983 - DNA, 75 bp, Homo sapiens
aggaagtggtcacaaaggaaaagctactattagaattgggacaggagagagtggcaagagtacgtttatcaagca

SEQ ID NO: 677984 - DNA, 101 bp, Homo sapiens
agtgctggaagctcatggacaagttggttcagcagtggccacaaatgcagaaatctgccatcaaggatgctgaggaagatgatgacacaggtggtatcaac

SEQ ID NO: 677985 - DNA, 100 bp, Homo sapiens
acaacatcagcgagttcacccgccggcatccagggggctcccgggtcatcagccactacgccgggcaggatgccacggagtctcaggagcaggggctgcg

SEQ ID NO: 677986 - DNA, 139 bp, Homo sapiens
attctgttggttttatgcatctttatccaatcaagtgcccttggacaaagcctgaaaccaggacccagatgatgtggtaccagttggccaaagaagagcctggtgttggtgcatgtgctttggactagcatttatgctt

SEQ ID NO: 677987 - DNA, 82 bp, Homo sapiens
gcggagctgtgcgagagcctcctcacttggatttaagtaagtcttccccaacaccgaatgggattccatcttcagacccagc

SEQ ID NO: 677988 - DNA, 76 bp, Homo sapiens
ttgccatccagcccaacaccaccgggaagcagctatttgaccagagccccaacggtaaactgactgatttcctgag

SEQ ID NO: 677989 - DNA, 75 bp, Homo sapiens
gcgtattgggcatcacagcccctgtgtggtcccggaacagcaagcccgtgcacaccaccatcctgaatccccaca

SEQ ID NO: 677990 - DNA, 50 bp, Homo sapiens
ctgtgcggccctctgtggatggacagtcattttgtttactcattcagccc

SEQ ID NO: 677991 - DNA, 100 bp, Homo sapiens
gtttgatactgacctgtaaatcatcctttaggaagttaaatgaagttcgaaagagattgaatgagctaagagaattagttcattattatgaacaaacgtc

SEQ ID NO: 677992 - DNA, 100 bp, Homo sapiens
gatagtgctgaagaggagggggcgttccccagaccatggcatctacggaagggtgatcccattaagatactaatgccatcactgtctcctacaatggaag

SEQ ID NO: 677993 - DNA, 90 bp, Homo sapiens
cggacacccggctctcacgcagaggtatttcgaaaaaagcctggttttggtacagctcttccagaacccacgggaagaacctgttcatca

SEQ ID NO: 677994 - DNA, 75 bp, Homo sapiens
ggttattcgagtgaccgagaccgcggccgggaccgaggaagctggcagggcggagatgctggaccacgccgtcct

SEQ ID NO: 677995 - DNA, 75 bp, Homo sapiens
caacgagatcttccgccactacgagggatgtggagacgctggtagcggggccaggaaggctccggacggagcagg

SEQ ID NO: 677996 - DNA, 101 bp, Homo sapiens
tacagcgccacggtggatcagcgcctacccgagtgtgcgaagctagccaagtgttcctttctgccgaaattctccattcatatagaaaccaagtatgagga

SEQ ID NO: 677997 - DNA, 83 bp, Homo sapiens
ctcctccttggtcgccgcgtccttggctggcgtatggtcagtaggacagaaggtaacattgatgactcgctcattggtggaaa

SEQ ID NO: 677998 - DNA, 50 bp, Homo sapiens
ctcggcagtcgcgaagcagcaaccatggagctgctctcgtttgaggatgt

SEQ ID NO: 677999 - DNA, 76 bp, Homo sapiens
aagatggcgaccgagacggtggagctccataagctaaagattcagaatggacagtttagaagaacctcagaaaaaa

SEQ ID NO: 678000 - DNA, 83 bp, Homo sapiens
gggcggctcagcctccagccagctggacgagggcaagtgcgcttacatccgagttgtacacagaagaaagcccatatgaggac

SEQ ID NO: 678001 - DNA, 80 bp, Homo sapiens
agcaaaagatcagcgaggagcagcagcagctccagcaggcgctggctcctgctcaggtcattcaacatttattcaaccaa

SEQ ID NO: 678002 - DNA, 82 bp, Homo sapiens
ctgcctctgaggaacacgccgcagggggatatgagactttctactcggaatatcctgagtgttgcgtggatgtaaaacccat

SEQ ID NO: 678003 - DNA, 50 bp, Homo sapiens
agcaagagtcctcagaaaacattcagtttgttttgacaccgattgaagtt

SEQ ID NO: 678004 - DNA, 100 bp, Homo sapiens
ctccatgcgcagtcatgagtcgcttcaagtttatcggctgcagccacgcccctgctgcagagcgagcccagcctcaccagcgacgagctgcacctgcccg

SEQ ID NO: 678005 - DNA, 82 bp, Homo sapiens
tgaagctcaccgagacggcgatccgggcgctcgagacttaccagagccacaaggagccttcacgtaaatgggtccagtcatg

SEQ ID NO: 678006 - DNA, 83 bp, Homo sapiens
ccctgagacgccaacggcagtcactgccccccattccagctcctgggtgctaccatattggggaaatcctcatgatagaaaag

SEQ ID NO: 678007 - DNA, 75 bp, Homo sapiens
ggaaggcgcttttcaccgcggccatcctgcaggcacagttgccgattacaggagtgtggccatctggggccgtgt

SEQ ID NO: 678008 - DNA, 102 bp, Homo sapiens
ggaccttccaatcagccatctacatcagctcgtgcccgtcttattgatcctggctttggaatatataagcattctcctggtgtgcagcctgcagatgtgaag

SEQ ID NO: 678009 - DNA, 100 bp, Homo sapiens
aacgtgtaatcagaaggcacagattagaggaaggaagaggaaagaccacagcaagattctttcattcgtctcctcctagcctgggggaccaggctcgaac

SEQ ID NO: 678010 - DNA, 50 bp, Homo sapiens
tgccttattggaaaaacatttcttacgtctctcaggcagctgcagagctt

SEQ ID NO: 678011 - DNA, 74 bp, Homo sapiens
gggccgccgccacccgcctcccaccatggctctgaagagaatccacaagcagctgcaggtggtgccccttttcg

SEQ ID NO: 678012 - DNA, 82 bp, Homo sapiens
tggagttttggcgagagtttgtggaagatggcgcctgttgtgacagggatctctctaggagctgacactcgaaccttcacga

SEQ ID NO: 678013 - DNA, 90 bp, Homo sapiens
ccacaataaaagagacctctacttagctcagcaattcttaccttgggcaagattcttgccaagagaattaatgtgcgtattgagcacatt

SEQ ID NO: 678014 - DNA, 97 bp, Homo sapiens
ggacttcttcttcaccgccaggacctccttcttcaggagagcgccccagggcaagccccgctccggccaacaagaccgtatccttgatgagcttgac

SEQ ID NO: 678015 - DNA, 50 bp, Homo sapiens
caactttctctcattccaaaaaagttactgtggcccatgtcctaaaaact

SEQ ID NO: 678016 - DNA, 50 bp, Homo sapiens
gccgggagcgagcccaggcggcagggaacttaggctgcggaactatgtcc

SEQ ID NO: 678017 - DNA, 49 bp, Homo sapiens
cggagctagctggatcctctaggcagggtctccctctgttgtccaaggc

SEQ ID NO: 678018 - DNA, 75 bp, Homo sapiens
gatatagtcaagctgttactttcctatggagcctccagaaatgctgtgaacggaaaacagttcttccttcaaagc

SEQ ID NO: 678019 - DNA, 75 bp, Homo sapiens
tttgggaagccacattttgcaggaagatgatccctatgatcttgaagatgtttctgcacagaaatgagggaaata

SEQ ID NO: 678020 - DNA, 76 bp, Homo sapiens
aggaacctagtaaaaagggagcacttaaggaagatgtcttaaagacttttctacatgatcctcttgtggaatggag

SEQ ID NO: 678021 - DNA, 100 bp, Homo sapiens
aggctgcggcagacggcgacagtggcggcggcgccatggcagggcttgcagcattactctactgactggcagagacaggagaggtagatgtccacgccca

SEQ ID NO: 678022 - DNA, 75 bp, Homo sapiens
gaagatccattggtaaattgatcaggatttttggcctaccctccaaagaaaagatctgtggctgctgcattttgg

SEQ ID NO: 678023 - DNA, 71 bp, Homo sapiens
gggatggaggcgaccttggagcagcacttggaagacacggccatgaagcccccaggaggagaatcgagcaa

SEQ ID NO: 678024 - DNA, 97 bp, Homo sapiens
caagccggactaaggaccggggacttcttgattgaggtctattctggataagcaggttttgtgaagacatttattctttcttggacctcagatttac

SEQ ID NO: 678025 - DNA, 100 bp, Homo sapiens
ttctgggcggtttttgtcttttgatttcaagagttaggagctcgagaaccgtttggcaatatgtacgacgcggatgaggactctcgctctgttgcccagg

SEQ ID NO: 678026 - DNA, 100 bp, Homo sapiens
ctgagcttgccgcacaaaaagctagagagcggggccttttccgaagtggttttagctgaagagaaggcaactggcaagctctttgctgtgaagtgtatcc

SEQ ID NO: 678027 - DNA, 82 bp, Homo sapiens
attggatatgaaactggaagacatcctggaaattcagttcatgaagataagaagtttcttgacaaatacatgccccagttca

SEQ ID NO: 678028 - DNA, 100 bp, Homo sapiens
gggcaacaattttctgtacaccaatggaaagtgcgtcatcctaaggaacatcgacagacttgcagccaatacaggaagcaaacagcgtagtcgcctctct

SEQ ID NO: 678029 - DNA, 100 bp, Homo sapiens
tcacaaagctatcatcctgccaaactccaggctcagatgtcacaggtgctggagaatctggtaaaagcaccattgtgaagcagatgaggatcctgcatgt

SEQ ID NO: 678030 - DNA, 99 bp, Homo sapiens
ccagtcaccaagacaggcatctcaaatcggctgattctgcatctggaaactgccttcatcttgaaagaaaagtgcacagccagagaacaacacatcaca

SEQ ID NO: 678031 - DNA, 100 bp, Homo sapiens
agccgtctgtggagggtgccgcggccctgcgcagctgccccatgtgccagaaggagttcgcccccagtctgtagatggacggcagatccgagtagaccag

SEQ ID NO: 678032 - DNA, 98 bp, Homo sapiens
ttccactgatatctcaaaaggtgatctggacaaaggaacaggtatctcaggttaaacccatccagagtaatggctgcggccttacccaggaccctggg

SEQ ID NO: 678033 - DNA, 90 bp, Homo sapiens
agccattggagggcgcggggactgcaaccctaatcagggcatccgtttccgaggctttagtatccctgaatgccagaaactgctacccaa

SEQ ID NO: 678034 - DNA, 75 bp, Homo sapiens
cagtgcgtaggagcggccggggcgggaggctccgcggagccgaggcgtggaggatgacgtagctttgccaaagac

SEQ ID NO: 678035 - DNA, 73 bp, Homo sapiens
caacatctatcaacagaagatcaaggtccagtgcacgtgccaacattacactgtcagggaagaagcgcagaaa

SEQ ID NO: 678036 - DNA, 83 bp, Homo sapiens
cgtcgctgcccccagctcagctcttactgcgggccgctccgacggcggtccatcctgccgcttacaaacacgcagatggcaag

SEQ ID NO: 678037 - DNA, 75 bp, Homo sapiens
aaacggcaagatgtccagtaatgtcccggcggatatgagatgaggatgacatcaatgatgtgacttctatggcag

SEQ ID NO: 678038 - DNA, 75 bp, Homo sapiens
ccagcgcccggagcaagcggagctcccccaagagccggaaaggatttggtgctatggagaaatttttggtagaat

SEQ ID NO: 678039 - DNA, 122 bp, Homo sapiens
ccagctttcttcacatcggggacatcgtctccctgtacgccgagggctccgtcaatggcttcatcagcactttgggatttttgatgaaattgagtcatgaaactgtaaccattgaattgaag

SEQ ID NO: 678040 - DNA, 75 bp, Homo sapiens
gcctccccttggattcagacgccgattcgcccagcgtcgtctcggagatgcagccaagaaagccatcagtaaatt

SEQ ID NO: 678041 - DNA, 100 bp, Homo sapiens
gtccacgggggcagaacctggtctggccagagacctgctggaagggtgaacaatgcaatattgtacctgacaatgtcgatgatattgtagctgacctggc

SEQ ID NO: 678042 - DNA, 103 bp, Homo sapiens
gcacacattactctgcgtacaaaacgattgaacaccagattgcagttcagagcaaattggtcaggagatgttggaaaaccttagtcatgacagagaaaagata

SEQ ID NO: 678043 - DNA, 99 bp, Homo sapiens
ctgaggaggcgagctagccgggagttacaccgccaccgccagaagaacatgagctgcctgtggacatggaaaccatcaacctggacagagatgcagagg

SEQ ID NO: 678044 - DNA, 75 bp, Homo sapiens
actggaaggatcataggtggcactcatgtctcactgccccactcagatgactccaatgatatgtgggaggaccag

SEQ ID NO: 678045 - DNA, 100 bp, Homo sapiens
cctaagcacacctggagcaacaacctggcggtgctcgagtgcctgcaggatgtgagggaggctcagagaagaatggaagcagaggctggaaacaaagctg

SEQ ID NO: 678046 - DNA, 74 bp, Homo sapiens
gctgtgtggaggtagccgcagcgccagcaccaggttgcccgaagctcagcagagagtcggaggctgctttttaa

SEQ ID NO: 678047 - DNA, 100 bp, Homo sapiens
tcaccagtgacccagtcagtgcccttcagttaaagaccaccaggagcacacttgattttttatcaagcagaaatgcatcgaacaacgagaatcaagatca

SEQ ID NO: 678048 - DNA, 100 bp, Homo sapiens
tcagcatgagcaaaaactccaaactcctctccaccagcgccaagagacccaacatgagtgaagtttcctgcaagaaacgggacgactatttggaatggcc

SEQ ID NO: 678049 - DNA, 97 bp, Homo sapiens
cgagcgggagaaggcgctgcgcaagcacgctgaggagatgatgaggagtctgatgaggaagctgtgaagaaaaccaacaaatgtgtactagtctggg

SEQ ID NO: 678050 - DNA, 100 bp, Homo sapiens
aagcggggacccagaccctggagcctcagttggaagcagccgatccagcctgcggagcctgtggggcaggtatggcgtcatcattgtgggcaacccgaag

SEQ ID NO: 678051 - DNA, 100 bp, Homo sapiens
tcttgagtgtgtatctctacatgcgctctttgaaagcgccccggaatgacctgtcgcctgccagctctgctgtcaataccagcaaatatgcagaaagcta

SEQ ID NO: 678052 - DNA, 83 bp, Homo sapiens
caaagatcctcagggagaaattcaaggggtggccgtgactggggagagcacaaccagcggctagaggagcaccaggcacgcgc

SEQ ID NO: 678053 - DNA, 100 bp, Homo sapiens
ttgcttccctcggccgggccgtcctcggcggcagtgtcaggaaaaatggctacaaacttcctagcacatgagaagatctggttcgacaagttcaaatatg

SEQ ID NO: 678054 - DNA, 100 bp, Homo sapiens
gaagcctttggccagaagatcggccacttccagaccattcccggagtaataaatccagttggagcagcagtgatgagaagaggggatcgacacgttccga

SEQ ID NO: 678055 - DNA, 73 bp, Homo sapiens
catgggcgtcatgaataacatgcggaaacaggcagtgctcggaatgtgaccaggcagggagcagtgacatgga

SEQ ID NO: 678056 - DNA, 98 bp, Homo sapiens
cagatcgtgggacttctcagcctccataattgagtgagccaattccctgccaacaagtcccaaatttggaaaagctgactcatatgaaaagctggaaa

SEQ ID NO: 678057 - DNA, 100 bp, Homo sapiens
actctctcagaatgttcctcaaatgatttgcttgtaaatgcatcacgaagaggcagcccagaatgaagaaagcaagcaggagtgttggctcagtgcctaa

SEQ ID NO: 678058 - DNA, 75 bp, Homo sapiens
ccgggctgcggcgtgtgcgcgcccgccagctgctccggagatacgcatggcgaggacaacatccttgctgcctcc

SEQ ID NO: 678059 - DNA, 97 bp, Homo sapiens
agcttcggagaatggagtcttccatcaatcatatctcacaggtcattcccaaaagcaagttcgtcttggtgaagttcgacacccagtacccctacgg

SEQ ID NO: 678060 - DNA, 100 bp, Homo sapiens
tgattgtcagcttcctgaggtctcctcagccatgctgaactagcagcccgacggccatggaggctgaagagacgatggaatgccttcaggagttccctga

SEQ ID NO: 678061 - DNA, 75 bp, Homo sapiens
ctttcagaaacttattcacagttaccaaagctgcaaccatgtccaagggacctgcagttggtattgatcttggca

SEQ ID NO: 678062 - DNA, 51 bp, Homo sapiens
tgcgtgtgggaattacagaaactggagcatgtaaaagtcacatctgaggct

SEQ ID NO: 678063 - DNA, 100 bp, Homo sapiens
accttagatggagatatcaaattggataatgagaagcccatgcgagtggtggatgatgaagacttggtagaccagcgtctcatcagcgagctgaggaaag

SEQ ID NO: 678064 - DNA, 100 bp, Homo sapiens
cacaactgagaaggatccctccacattcttggaaatatacacccattggaacccgtaagtgatttagaatctagaagagaagtaaaaaaagaagaaggtg

SEQ ID NO: 678065 - DNA, 98 bp, Homo sapiens
gcatgtgaagcaatggtatgggaaaattgtttgcagaaggatgaaaaggctttattgccaaactgagcatctttccttgaagaagtacattattgaca

SEQ ID NO: 678066 - DNA, 50 bp, Homo sapiens
tactcagtctctaaaaagctaaggaccctgctgccgaagctgattccctc

SEQ ID NO: 678067 - DNA, 125 bp, Homo sapiens
atttccttgcggaaaggatgttggcggtccctgtgacctgtggagacacggccagatctgccctccagatggaatcaaacaatatgcaaatacttcagtgcctgctatcaaaactgctttactca

SEQ ID NO: 678068 - DNA, 98 bp, Homo sapiens
cgggaccctgccagcagaggagacaggtatatgctggtcactttcgaagagccgccctatgctatcaaggaatcctatccatcttcttcaccgatatg

SEQ ID NO: 678069 - DNA, 76 bp, Homo sapiens
aaccgaaccgtcatttccatgggacgagattctgaactcatttgccgtggaggtcccagcccccgctgcggttctc

SEQ ID NO: 678070 - DNA, 100 bp, Homo sapiens
gtccgagttgccgccggagaggagtggcctcgcccgcttgatagctctttaaaatccatgacggagttctcatcaacagggcacggtaatacaggagaag

SEQ ID NO: 678071 - DNA, 90 bp, Homo sapiens
gagcagggagaggagctgtggataacgggaggtgaatttccatgtcaacatagtcctggtccttcgattctatgcaatctgggatgatac

SEQ ID NO: 678072 - DNA, 100 bp, Homo sapiens
caccaaaaccagtcacaagacctggagttgtctgtgcagatgtacgcccaagccgccctggatggagactcccaggaaaaggctgaggaggtgtatcgtc

SEQ ID NO: 678073 - DNA, 75 bp, Homo sapiens
gctcatcaagccagagctggagtatctcaggtttggaattacaagcttcggcgctgtcttttcacattgcttggg

SEQ ID NO: 678074 - DNA, 75 bp, Homo sapiens
cccaccgccagctccaccatcaacatcaacacctccacctccaagttctcatctaacattcacaagggaatttga

SEQ ID NO: 678075 - DNA, 75 bp, Homo sapiens
ccgtggaggcagaggtggcatggggatgaagcctgctgggagcgtgaatgacatggccctggatgccttcgactt

SEQ ID NO: 678076 - DNA, 100 bp, Homo sapiens
tgtcgactccagaagtgctttgaagtgggaatgtccaaagaatccacataaagaagatccctaatagtcatttctcaacaattatatagtcaactgatgt

SEQ ID NO: 678077 - DNA, 100 bp, Homo sapiens
agctacgaggaggccttcgaggctctggagtcctccacggctacggaggtggtccaggccacgctggtggtcctggccttggccatggtgcccatcctgc

SEQ ID NO: 678078 - DNA, 50 bp, Homo sapiens
gtgtatcaagtaatggtgcaaagcctgaaacgtgaacttatgaattcaac

SEQ ID NO: 678079 - DNA, 75 bp, Homo sapiens
ggcggaggcggaggcagaggtggaggcgctttgaaagatgatttgtcattaattcggaagaacagaatggctctc

SEQ ID NO: 678080 - DNA, 75 bp, Homo sapiens
ctcaacaatgtttttgttcaacaggagtaccagtaagtagccgggtgtcagcaaaaatccagcagcttgtcaata

SEQ ID NO: 678081 - DNA, 90 bp, Homo sapiens
tggagctgggtcagtccgccgctcaccccgcggccgcaccttcccgccttctcagagtctcactgtcgcccaggctgcagtgcagtggtg

SEQ ID NO: 678082 - DNA, 88 bp, Homo sapiens
gggagggtggcactggctctcctggtccagctctcaggacaagaacaaagtgtgctgggcaggaagatcccaacagtttgcgccataa

SEQ ID NO: 678083 - DNA, 96 bp, Homo sapiens
ttagctcaccccggcacttgaaatttccacttactaatacaaactgctcctcactcactgttaatgaagcggctgctcaactctgtgtgaaggata

SEQ ID NO: 678084 - DNA, 50 bp, Homo sapiens
aagacgatgaggctcctgcaaaaggttgggggccgtcccgctcctaaggc

SEQ ID NO: 678085 - DNA, 90 bp, Homo sapiens
ctcaagtcgacaggggatgggaccctagcttcgcagaatcaagaacggctatgtgcgtttaaagatccgtatcagcaagaccttgggata

SEQ ID NO: 678086 - DNA, 100 bp, Homo sapiens
gaacttcctcatacacgtgatctgtttctgattagagaactgcaggaggtgaaaattgggttcaaggtacggttcctggagcagcagaacaagatgctgg

SEQ ID NO: 678087 - DNA, 112 bp, Homo sapiens
aggccgtccagcagatggcggatgccctgcagtacctgcagaaggtctctggagacatcttcagcaggaccgccgggagagcctgcccacctccccaccctggacgccgggc

SEQ ID NO: 678088 - DNA, 83 bp, Homo sapiens
acaaaagagttgattgaaattatctctggtgctgcagctctgtgacgagagcagacgtggatgtccagccctatgcgttcaca

SEQ ID NO: 678089 - DNA, 82 bp, Homo sapiens
gaaaaatccttctaccagtttcagcattatagagcaattccaggagtagtagagagcttgttagcagtggcacaagatctta

SEQ ID NO: 678090 - DNA, 100 bp, Homo sapiens
ctttcatttctcagctccctggattccttcccctaaattaggacctattatttacctgtaggctgagggtaaaaagctgggattggtaggctgggtccag

SEQ ID NO: 678091 - DNA, 100 bp, Homo sapiens
gccgagctgtgccccccttcgtattcacgcgccgcggtgtggacaacagtgagtatatgcggaatggagacttcttacccaccaggctgcaggcccagca

SEQ ID NO: 678092 - DNA, 100 bp, Homo sapiens
gcgccggagcccagcggctggcgtgggaagatgtaaatgctgctgcctgtgacctcgccagggaagtggctggcaaaggtgatgctttggtagcaggggg

SEQ ID NO: 678093 - DNA, 100 bp, Homo sapiens
tatcctgcgcctttccactgctctggcagtggccttgtcgtcgaagtctggcctttcccgaggccggaaagtgatgctgtcagcgctgggcatgctggcg

SEQ ID NO: 678094 - DNA, 100 bp, Homo sapiens
accttccttgggaatttatggtcgatcgtcttcctactgtcttgttttttccctgcaacagaatgtaaccggaagactcctggtgggccttcgatggtgg

SEQ ID NO: 678095 - DNA, 76 bp, Homo sapiens
ctcgagtgcctgcaggatgtgagggagatgactttgaagaagccaaggaaattttgacaaagatgagatacttttc

SEQ ID NO: 678096 - DNA, 92 bp, Homo sapiens
gttctggaaggttcgccgcggagacaagtgagcaacaatgcagatcttcgtgaagactctgactggtaagaccatcaccctcgaggttgagc

SEQ ID NO: 678097 - DNA, 75 bp, Homo sapiens
caccttctgcacgggcatccgcgtggcccatttttttgctccactcaagcctgttagaatcaccatggaatacag

SEQ ID NO: 678098 - DNA, 75 bp, Homo sapiens
tctttcctactatcatcaagataaggagacccctgaatggttggacagtgattcctgccaaaagtgtgatcagcc

SEQ ID NO: 678099 - DNA, 96 bp, Homo sapiens
tcagggacgtgctggccgtgatcaaacactgcaaggaccccctccggctcaagtgtgtcaagcaagaaataagcgggttttgaaaacaaaaaaaag

SEQ ID NO: 678100 - DNA, 74 bp, Homo sapiens
acgaaagccagcgagctcctcagcctcagactgtgccctgtccacggtgcctcctgcatgtcctgctgccctga

SEQ ID NO: 678101 - DNA, 75 bp, Homo sapiens
ctatgaggaggaagatcaacgaagtcacagcatgttggcagataaattgaacatgactccagaagaagctgaaag

SEQ ID NO: 678102 - DNA, 100 bp, Homo sapiens
ttgtgacagaatatgccaaaaatggagaaatttttgaccaagatcactccatggatgaaatgacagctgtggtgaaaattgaaaaaggagttggtggcaa

SEQ ID NO: 678103 - DNA, 82 bp, Homo sapiens
cagagagaaagtttagaggatgaagtgacccctggactcccgacagcagaatcccaggtttccgttcagccgcccggagctg

SEQ ID NO: 678104 - DNA, 75 bp, Homo sapiens
gaaccagctcgtcctggagcacctgcagctggcgcctctgcagtgggacctggagtggaagatcatttatgttgg

SEQ ID NO: 678105 - DNA, 90 bp, Homo sapiens
aggagtgtgacagggatgatgaagaagacctgctggatgagtttatgtggccgaggcagacaagtggaattaggccttgctgcaggggac

SEQ ID NO: 678106 - DNA, 98 bp, Homo sapiens
ccacctcgtgaacgaagattcgaaaagccacttgaagaaaagggtgaaggaggcgaattttcagttgatagtttgcattgagactccttgcattccgc

SEQ ID NO: 678107 - DNA, 100 bp, Homo sapiens
ggaaagcaaagaagaaagcttctaatgggaattcaattcgtcataatctgtccctacacagcaagttcattcgtgtgcagaatgaaggaactggaaaaag

SEQ ID NO: 678108 - DNA, 100 bp, Homo sapiens
cggcggaggctttggcagctcgggactgagtgcaagcctcgtcacgtgttcaatatgctaaagaagtatgtccgcgcagaacagaaggacagacagcaca

SEQ ID NO: 678109 - DNA, 90 bp, Homo sapiens
atctccctaaatccctctgttcgctttaaggcagagaaactggaaatggtttgcccaaaggaccagccaaaacctcacctcaagccacgc

SEQ ID NO: 678110 - DNA, 82 bp, Homo sapiens
aagcccaggcacagccgacgccgcggggagaactacgatgacccgcacaaaacccctgcctccccagttgtccacatcaggg

SEQ ID NO: 678111 - DNA, 82 bp, Homo sapiens
cactagtagctgtgggcacattatgcatgcccattgttggcaaaggcagcctgcttctgcaaagtggtacgatcgaagggac

SEQ ID NO: 678112 - DNA, 100 bp, Homo sapiens
tcctggacaacctctttgaggcctctgacctgtctcgggaaacctccatctggaaggatatccaatatgccacaagtatctttgatgatgcgtacaaatc

SEQ ID NO: 678113 - DNA, 100 bp, Homo sapiens
aagccatccaatggatgcaggaaaactgggcaggaagatcccaacagtttgcgccataaatataactttatcgcggacgtggtggagaagatcgcccctg

SEQ ID NO: 678114 - DNA, 115 bp, Homo sapiens
gttgctggtgctgctgaagtccctagggaaccaccaattcttcccagtggacggcctgtttcatcttactatgaaaaagagaatgtggattatattcttcctattatgacccagc

SEQ ID NO: 678115 - DNA, 90 bp, Homo sapiens
cttgtatcatgagcattggatttgatcacatgggtttaacaatgcatgcatcaattcttgcatatatgtttaatttggttgaagaaggaa

SEQ ID NO: 678116 - DNA, 100 bp, Homo sapiens
ctgattaaatactggtttcacactccaccaagcatcccattacagatagaagagttctgctaagccaatattctctagaatgagcacaaaacaaatcgaa

SEQ ID NO: 678117 - DNA, 100 bp, Homo sapiens
gggggattgtgggagtctccgcgtcccgctcgctgggagagaggtacctctccttttccctctccctttccctaagaatacgccagacaccttttgaaag

SEQ ID NO: 678118 - DNA, 82 bp, Homo sapiens
cacgacagaaggcgtctcatggcgttggaataccggctctcagcggctctcaggcgctcaggactgccaggacccagaggat

SEQ ID NO: 678119 - DNA, 73 bp, Homo sapiens
gaaagccaaatggagctcagaaagctgtatggacctctgtgtggatccctgcatgtcactgagtccaccatgc

SEQ ID NO: 678120 - DNA, 58 bp, Homo sapiens
cgagattattgagttaaagaaggtctcctctgagcctccggcctccataagacccaaa

SEQ ID NO: 678121 - DNA, 74 bp, Homo sapiens
caacatccagagctgcatcattccttggggcaaaatgtggacaaggctgccactgcagagccccgccatggaag

SEQ ID NO: 678122 - DNA, 100 bp, Homo sapiens
ggaacacagccctgcacatctgtgccctctacaaccaggtgattttcgagggcgaaatcggaaaaggaaaccttggtgggattgctgtggatgacattag

SEQ ID NO: 678123 - DNA, 50 bp, Homo sapiens
gacaatctacctaatcaagctggtaaaatccagtacaaggaatatatcat

SEQ ID NO: 678124 - DNA, 83 bp, Homo sapiens
tgagcgctgccgccgccgcagcaggttctaaatgagaagaaacttcaagaggttgatagtttatggaaagaatttgaaactcc

SEQ ID NO: 678125 - DNA, 75 bp, Homo sapiens
atgaagttcctgatggaattaaatctgcgagctacaagccaatggagatcttcgtggatgatgagacgaagttga

SEQ ID NO: 678126 - DNA, 51 bp, Homo sapiens
ccaggtccctgtctgagccacatccgcagtgtcatgcagaagtacctggag

SEQ ID NO: 678127 - DNA, 55 bp, Homo sapiens
agcttcaaaaggggggacatcctcaaggtgctggagaaaatttggagaatacaat

SEQ ID NO: 678128 - DNA, 50 bp, Homo sapiens
cgtgggagtcacctgaaagccaggaaatgttgatattcactgatggactc

SEQ ID NO: 678129 - DNA, 74 bp, Homo sapiens
tttatccccaggatctaaaccagtgctggacaatagatgctcaggtgagaaggactggcagaaatacgagactg

SEQ ID NO: 678130 - DNA, 100 bp, Homo sapiens
gccaatcctaagaacgctgaaggctttggaatatgtgttcaagttcattgttcggtcgaggacattattttcacagtggctttctagaagatgaccatag

SEQ ID NO: 678131 - DNA, 98 bp, Homo sapiens
ctgcctccaccccagcccccaaccttcccagagaaagatgctggtttcgagttttggagatccttgttttttatggaacacagttctgtaaaattttc

SEQ ID NO: 678132 - DNA, 100 bp, Homo sapiens
cgagatgtctcgctccgtggccttagctgtgctcgcgctactctctctttctggcctggaggctatccagctactatactggcaattgctggagaagatt

SEQ ID NO: 678133 - DNA, 100 bp, Homo sapiens
cgttttccggagggattccatcataggcctcatgcattgtgcgtcagcagcaatgtttatggtgaaaaatggcaacgggaccgcgtgcataatggccaac

SEQ ID NO: 678134 - DNA, 74 bp, Homo sapiens
tgaatttcagtcagcctcagaggttgacttctacattgataagatggagtctcgctttgtcgcccaggctggag

SEQ ID NO: 678135 - DNA, 74 bp, Homo sapiens
tttgcgtcctagagtgggaaaaaagcagaggccagggcgccggagatacaactcgtcaacgaatcaaattcagt

SEQ ID NO: 678136 - DNA, 74 bp, Homo sapiens
ggagcgtcaacagcagcaccatggcaagatgagtatcatatggttcatctagtatgtacttctcggactcctcc

SEQ ID NO: 678137 - DNA, 100 bp, Homo sapiens
ctcccctctcggggcaacccagacgtgcaacaaagtgcgatgggaggccctgggggtcgtgctgcacaaggactccaagtggtaccagcagtggaaggac

SEQ ID NO: 678138 - DNA, 102 bp, Homo sapiens
ctacagaaacctggtctttcttgagacgagttgtactgctgtcacaggaaatggacgctggattacaagcatggcagctcaggcagcagaagttgcaggaag

SEQ ID NO: 678139 - DNA, 98 bp, Homo sapiens
attgtttgtcaccacaaaaaggacaggacaaggagcatccaagatacctgatcccagaactttgcaaacagttttaccatttaggctgggtcactggg

SEQ ID NO: 678140 - DNA, 99 bp, Homo sapiens
gaagggacttgagggcagcgagatggaatcagcaagagaaaacatcgaccttcaatataacaagaggattgcctgatccagccaagatgcagagcactt

SEQ ID NO: 678141 - DNA, 100 bp, Homo sapiens
ttctatgagcgattcagagcctatcaagattacattttaggtcacagatgtgacattgatgtgtccactgaagccatgtatgctgcaaccagacgagaag

SEQ ID NO: 678142 - DNA, 75 bp, Homo sapiens
ccgtaccgcagcccccgggcacgacctctcggacacggtgcaggcaggccaggtcagagcagcccaccatgggat

SEQ ID NO: 678143 - DNA, 75 bp, Homo sapiens
gagcggaggaggaggaggaggcgaggaggagagactgtgatgatgaacagtctacacagatggctgcaagttggg

SEQ ID NO: 678144 - DNA, 75 bp, Homo sapiens
cccaggatgtgagcaacacgggaccgttgtggaagctgatcgaggaagcctaagcaggctctgtgaagtgggaat

SEQ ID NO: 678145 - DNA, 90 bp, Homo sapiens
cacgctgatcctgcagcctccctccgagaaaggcaaactaggcgtggcaactgctggctgcgtgaatgaagttacagagatggagtgcgg

SEQ ID NO: 678146 - DNA, 78 bp, Homo sapiens
aacgacctgtttgagagtgggaacatgacgcaggtactccaaagattcaggtttactcacgtcatccagcagagaatg

SEQ ID NO: 678147 - DNA, 74 bp, Homo sapiens
ccaaaatgtttcatccaaatgttcattgactggctattcagcatcatggaaagccctaaagaagccctctcagc

SEQ ID NO: 678148 - DNA, 83 bp, Homo sapiens
cccgccgctgccgccgcgacccttggcgcctgcccctgcaacgggagggctgaaaacacagttaaatcactttcaaagttaaa

SEQ ID NO: 678149 - DNA, 113 bp, Homo sapiens
gcgctggaggagcgaggcagctgtactaggactgggaacgggtgcaatggatgagcttcatagtctggatccaagaaggcaagagttattggaagctagatttactggagttg

SEQ ID NO: 678150 - DNA, 82 bp, Homo sapiens
tcagggcaagctgtgttccatggcagggaacttttggcagagctcccactagtgtactagccctctcttggtacccacctga

SEQ ID NO: 678151 - DNA, 75 bp, Homo sapiens
atgatgaagaggatgatgatgaagagactacgccggctgtgctgttctggcagtggattaaccagtccttcaatg

SEQ ID NO: 678152 - DNA, 82 bp, Homo sapiens
cctccctcagcttccgccccaaaagacaggtgatttggcttctgcacagttaggaggagcaccaaaccgatgggaggttttg

SEQ ID NO: 678153 - DNA, 100 bp, Homo sapiens
aaaataggaaagatgaaagtcgtgcttttcatgagtgggatgaagatgctgacattgatgaatctggaaatgatttgcagctgagtgaatcaggaagtga

SEQ ID NO: 678154 - DNA, 58 bp, Homo sapiens
ggcgcggggactgcaaccctaatcaggcggcttcaatgatccatcctaaagaggtgcc

SEQ ID NO: 678155 - DNA, 100 bp, Homo sapiens
ccccatctcttgaagaacctagtggaggagccgaaaaaaagaaaagaagtacctaatcacctcctagaatcaaggacttaccaatttgggattcttccag

SEQ ID NO: 678156 - DNA, 100 bp, Homo sapiens
gaaaaatgtactctgacctgaatcctgaattttccttgatggtcaaaagattaagaatgttggctaccagggtatttagcctagttggcaagcgagcaat

SEQ ID NO: 678157 - DNA, 100 bp, Homo sapiens
ccacttcgacctgagctgggaggccactagcagccagttccggcccgaggacaccgactaccagcagagtccagtgtcgtgctgctgcaggagcacccct

SEQ ID NO: 678158 - DNA, 106 bp, Homo sapiens
aagcggcgacggcgtcctcaggagctgtggggtcccctgctagaagtgggggactcggcggggtactccaaagattcaggtttactcacgtcatccagcagagaat

SEQ ID NO: 678159 - DNA, 100 bp, Homo sapiens
gtcattccaatgtgactgtccactacatttcactggccgcttctgtgaaaaaggtctgtttctgtcgactgtggaccacttatgtgcgatccgtggacca

SEQ ID NO: 678160 - DNA, 83 bp, Homo sapiens
caagtcctcgcacctaaagtcgcacctgcggacgcacacaggactcctcctattttgaggacttctccaacatctccatcttc

SEQ ID NO: 678161 - DNA, 82 bp, Homo sapiens
gccccgcgagcacagagcctcgcctttgccgatccgccgcccgtccacacccgccgccagatctctggaaacatggctacag

SEQ ID NO: 678162 - DNA, 80 bp, Homo sapiens
ctcatcctgtccatcgtgtgcctgatgatcacgcagctggctggcttcagtggaccattggtcgcattatgtttcagctc

SEQ ID NO: 678163 - DNA, 98 bp, Homo sapiens
cagcttttatcacaaattccttaatgaatcctatatggatggttaaaacccgaatgcagctagaacagaagtggctccaggatgtatttaacgtgccc

SEQ ID NO: 678164 - DNA, 75 bp, Homo sapiens
gtggagaacaaggcgtgatcctaatgtcacagctctagaggacaaaatcccagtccttggcacaaactcaggaaa

SEQ ID NO: 678165 - DNA, 89 bp, Homo sapiens
gggcgagatcctggagagcctgcaggacggcgcggcagagtccccgtacgcctacagtaacgcttcggaaccaaaaagaagcttcccag

SEQ ID NO: 678166 - DNA, 82 bp, Homo sapiens
atagtaccatgtgcagggactatgtcttagactgcaatatccttccccctcttttgcattcctgttcccgacatccggacgt

SEQ ID NO: 678167 - DNA, 75 bp, Homo sapiens
caaccggcaaatccgcgaggaggtggcgagtgcagtgagcagctcctacaggacatagttgacggcaaggaaaaa

SEQ ID NO: 678168 - DNA, 50 bp, Homo sapiens
gaaaagggcatatattacattcagttgttgacctcctgtactggagagac

SEQ ID NO: 678169 - DNA, 100 bp, Homo sapiens
aaaggatatgaaagaacaccaaaagggaactctaaagatttagttggaaaagtagggagtttgaggacatcaccaatgcgagctttcatctggacatgtg

SEQ ID NO: 678170 - DNA, 100 bp, Homo sapiens
gagaactcggcgccgccaaacagcccagctcgcgcttcagcgtcccggcgccgtcgcgccactcctccgatacgctgggagcggactcttggagctattg

SEQ ID NO: 678171 - DNA, 100 bp, Homo sapiens
cagcacccggatctcactgtttggcaccttcctgttcaactcccctcaccagcgagtgaagcaaagcacggtcatctttctgtccaagggcaaggatgcc

SEQ ID NO: 678172 - DNA, 50 bp, Homo sapiens
ggacatttctgaagcgagcgtcttcgatgaacatccagtcatggataaaa

SEQ ID NO: 678173 - DNA, 113 bp, Homo sapiens
gaaggagaagatgtgccgccgctgccaacgtcgagcggcgacggctgatcattgagactgaaaatatgatggaccgaattgtgactggcttgtctgagtctagtgtcaaggtg

SEQ ID NO: 678174 - DNA, 83 bp, Homo sapiens
attcaagccaagctgaccaagaagccaaagaactggctaggcaaataagctttaagatgttttgagagattacagaagaggag

SEQ ID NO: 678175 - DNA, 75 bp, Homo sapiens
ctgcatgaagacagtggctggcggtgcctggacgtacaagtccagaggtgtccttctaaagctggtagaggtttc

SEQ ID NO: 678176 - DNA, 83 bp, Homo sapiens
gagaaatccccactcctccaagaaccaacccccaaattggctgggacagcaaaagctgatgaagcattgaaagccaaagaaag

SEQ ID NO: 678177 - DNA, 96 bp, Homo sapiens
gtctgggtgcggactcggagaagccctcgagcatccccacagcattgcagtgtcgagatggctatgaaccctgtgtaaatgaaggaatgtgtgtta

SEQ ID NO: 678178 - DNA, 100 bp, Homo sapiens
aaaatgtgaaggaaaaaaaaatcggagtccatcgcaacaatgatcatggaagggaagtggttgctgtgtatgttactggtgcttggaactgctattgttg

SEQ ID NO: 678179 - DNA, 98 bp, Homo sapiens
taactgcctgacgttttactgatgaaaactttcggaagagaaagttgcctgtggtaagttcagttgttaaagtaaaaaaattcaatcatgatggagaa

SEQ ID NO: 678180 - DNA, 100 bp, Homo sapiens
agacaatgccggtggaggaatttgtggctggctggatctctgcaaatcagccggcaccaggagcagttcatccagatgctgaacgagccccctggggagc

SEQ ID NO: 678181 - DNA, 75 bp, Homo sapiens
cctggcctcagactctaggacctgcagcgatggagattgcagagggaatggcatacatcgagcggaagaactaca

SEQ ID NO: 678182 - DNA, 51 bp, Homo sapiens
gggagccctcctggctgggggcaaggtctcatcacaactacgtcaaggaag

SEQ ID NO: 678183 - DNA, 90 bp, Homo sapiens
atctgttttcctaaaagactgaaatgggggcgaccattcttaggtgcagtagacattgttgcaatcatgatcggcaatctgaaaggcaca

SEQ ID NO: 678184 - DNA, 80 bp, Homo sapiens
agcagcctggcctgccatgtccgggagaagacaatgtgaagttcatttccaatccgccctccatggtggcagcggggagc

SEQ ID NO: 678185 - DNA, 100 bp, Homo sapiens
ggcatcggtggacaagatctcaatgaaggaaaccgcactctcacactggccttgatttggcagctaatgagaaggtccttcgattctatgcaatctggga

SEQ ID NO: 678186 - DNA, 98 bp, Homo sapiens
ttccacctctgtgtgtgtacgagctcatggttatgggtgctacatgtgtgctttcagagcagtagtgtgaggaagcttggagtgggatggcaggacgg

SEQ ID NO: 678187 - DNA, 85 bp, Homo sapiens
tgccttccccatgctcaacatcacggctgccagaggctgctcctacctcaattctgtggtgttcttggtcacacatttatggagt

SEQ ID NO: 678188 - DNA, 90 bp, Homo sapiens
gttactgaagcagccaaacactctattatgagagtctggataacacatggctaaacaggactgacaccatgattcagactcctggccccc

SEQ ID NO: 678189 - DNA, 94 bp, Homo sapiens
ccgacgcaaaccaaggatctggggatcttcgcactatcccaaggttgtgaccgagattcccgacgagagagactgaggggaagagaggaaggag

SEQ ID NO: 678190 - DNA, 97 bp, Homo sapiens
aaattctgaactcaggacttggcaagttgtaaagaagaaagttctaccctttctgtcaaaatgaagtgtgattttaattgtaaccatgttcattccg

SEQ ID NO: 678191 - DNA, 74 bp, Homo sapiens
caggaccggtggcagttggtggatccttctaaagtaaatattctggtacctggtgctggactaggaagactggc

SEQ ID NO: 678192 - DNA, 80 bp, Homo sapiens
ggggagatttcagtgcattgcctcccctgggtgctcttcatcttgggaccgggactttgtagccaagcagaaggaggacc

SEQ ID NO: 678193 - DNA, 73 bp, Homo sapiens
tcccgctcgtcatggcctacccgggatacggaggaggggttggtcaaagaaaaagtgatgtatgaaaaagagg

SEQ ID NO: 678194 - DNA, 88 bp, Homo sapiens
tttcatcattactaacaggatattcctcatgacattgctgtctggtgtgatgaatgcagactctgctaccattttggctgtttggatc

SEQ ID NO: 678195 - DNA, 103 bp, Homo sapiens
gttggagtagatgtcggatttgaaaatccaatgtttgcttgtctggaaatggattatgaggctcaggaagaggccaaagaagcagaaatgagcagaaaggagt

SEQ ID NO: 678196 - DNA, 90 bp, Homo sapiens
cagctctttgcatccggagagtggacaagaaagatgctggaggtcagcagattggcttcttgctaggaagctgtggtattgccttagctc

SEQ ID NO: 678197 - DNA, 50 bp, Homo sapiens
gaagcttacaaagctgcctcgaggctgctgatactttggctgtgaggcaa

SEQ ID NO: 678198 - DNA, 100 bp, Homo sapiens
gggaatggggctaagcgaggcggaggcgatcggtgctgattcggcgcgatttgaggagctgctgctgcaggaagatattcctcgtcagcttgtctacatt

SEQ ID NO: 678199 - DNA, 97 bp, Homo sapiens
aaaacatggtggccaaagtggatgaggtgaagtccacaatcaagttccaaatgaagaaggttgcagttgttctgatggatacccagggggcatttga

SEQ ID NO: 678200 - DNA, 50 bp, Homo sapiens
cgggcgtcccggagcctcgatggagccttcccctaggtcttcagaagcat

SEQ ID NO: 678201 - DNA, 100 bp, Homo sapiens
cgcttcttgaatttctctctgtaaaggaggtgaatgaaaactttgccattgatttgatagcagagcagcccgtgagcgaggtggagactcgggtgatagc

SEQ ID NO: 678202 - DNA, 82 bp, Homo sapiens
aagagcttctcctcatcaactggggatgattacagttcttcctaaaaaagtttctctgcaggtggatattgttcccagccag

SEQ ID NO: 678203 - DNA, 74 bp, Homo sapiens
caggcctggctcgcgcctctcccaggacccgcctggctgcgagatataactgatagtgcatcagccgacccagg

SEQ ID NO: 678204 - DNA, 89 bp, Homo sapiens
aaaatgtggccttccaaaccatcctgagctaaggatgtccggcttccagatcaacctcaacccgctcaaggagccactcggcttcatca

SEQ ID NO: 678205 - DNA, 100 bp, Homo sapiens
cacaggggccactcagagtcgcccgagaagtggaaaggagactatggaaccaggatccagcagtacttcccatccaactacgtcgaggacatctcaactg

SEQ ID NO: 678206 - DNA, 51 bp, Homo sapiens
caaatactgcatatcagaaacaacagactgttcgccatggatttccctatc

SEQ ID NO: 678207 - DNA, 82 bp, Homo sapiens
gcggcgggcctgaggcgaaggagcggccgggagcccgccgcgctggtagcgcatgacccatctgcctggcaccagcacctgg

SEQ ID NO: 678208 - DNA, 100 bp, Homo sapiens
ggctgttcttttgctgcaaatgaagttgatggaattacactgtgatacgactgactgaacctcgagccggttactcagctgtatgtcagtgtggatgcca

SEQ ID NO: 678209 - DNA, 83 bp, Homo sapiens
gaatcctgcggcagaagccgagttcaacatcctcctggccaccgactcctacaaggtgctcttacagcctgttccaagtgtgg

SEQ ID NO: 678210 - DNA, 90 bp, Homo sapiens
aaagcgcccagcctgccgcctcgctgtccctgcggcttctggggtctccagagaatacagagggcaaagatggatccaaagtaactaaac

SEQ ID NO: 678211 - DNA, 101 bp, Homo sapiens
cgcgacgctcacaggagggcccgcaagatcctggagagctcccagactttgctcagcgttctcaagagggaagctgggaacctgaccaaggctacagcccc

SEQ ID NO: 678212 - DNA, 74 bp, Homo sapiens
gagcagtggaagtcccacagaagctacagctgccaggtcaccaaggtcctgggcaggaccggttctcagggaca

SEQ ID NO: 678213 - DNA, 100 bp, Homo sapiens
cttcaccacccgcacggcgcagtgccggaacactgtggcggccatcgaggagaccatttaatttggcagagcggaaagctagcgcccattcaatagtaga

SEQ ID NO: 678214 - DNA, 88 bp, Homo sapiens
tttgcatgcattcttataattaaatctcctaacaaccctgtaagagaaacagcacccaggactatcttccaaagagttctggatatcc

SEQ ID NO: 678215 - DNA, 96 bp, Homo sapiens
cacatcttccggccaacttccattgaacttcccagcactcgaaagggaccgaaatggagagcaaaggtcatcatcagatttgaaatatttaaagtg

SEQ ID NO: 678216 - DNA, 97 bp, Homo sapiens
cttagtatcttgggctttctgtattctgaagacagcgccccagcatttgccatcttcaagtttgttcagcgctggctgacagagcagagagctcaat

SEQ ID NO: 678217 - DNA, 98 bp, Homo sapiens
tgaccacccctgaagaaattgcacagtgcccaccagaagtatgtccgacaagcctggcagaaggcagacatcaatacaaaatgggcagccacacgatg

SEQ ID NO: 678218 - DNA, 49 bp, Homo sapiens
gaaaaatattccacgcatcacggtgctggctgccagctgctgcgccccc

SEQ ID NO: 678219 - DNA, 74 bp, Homo sapiens
atatattgactactgccacaattccggaaaatctctaacttccaaggtcccaccaacagttcagaaacctacca

SEQ ID NO: 678220 - DNA, 98 bp, Homo sapiens
agacaatcattccaagggtacaacaaggtttaccacaatgtgagggactcagccattgcaaattgtacagatgaggacacattggcgtgagacctggg

SEQ ID NO: 678221 - DNA, 80 bp, Homo sapiens
cagcagagaatattttcaagggggagcgtgccaggaagatgtcgagcccgggcatcgacggcgaccccaagcctccatgc

SEQ ID NO: 678222 - DNA, 100 bp, Homo sapiens
aaacgccaggtgcttattaggccgtgctccaaagtcatcgtccggtttctcactgtgatgatgaagcatgatttccacaagacggcaccctatgtcgtca

SEQ ID NO: 678223 - DNA, 88 bp, Homo sapiens
aagctggagctggcagagaaaaaggccaccgatagagcatcagtgatgtcacgtttggagcaggggtcagttacatcgggacaccacg

SEQ ID NO: 678224 - DNA, 100 bp, Homo sapiens
atcggaccggccctgccgcccggcttcaaggcccgcggaacagcggaggacgaagagcgggacccgagccctgggcccgcactaagagcctaactgaaat

SEQ ID NO: 678225 - DNA, 90 bp, Homo sapiens
cgagaaaccgcagcactacacactcccaagacagctgggctgcgaccaatggaaacaaaggacattccagtagtgcaccagctcctcacc

SEQ ID NO: 678226 - DNA, 73 bp, Homo sapiens
tgatattaacagactagactccacaggaagcgctatagaaatgaagggagtcccagccctagacagtccccga

SEQ ID NO: 678227 - DNA, 73 bp, Homo sapiens
aacgcttcgcccgttggtgctatgttaattcctgtaccaatggtgggttttaaggaacttctccgaagactga

SEQ ID NO: 678228 - DNA, 75 bp, Homo sapiens
ccctcaaggactgcctttcctggtacatgtcccagagcaagcacacggaggcccgggagctcatgtactcgggag

SEQ ID NO: 678229 - DNA, 83 bp, Homo sapiens
cagaaatctgttctacaggaagatgctgagaaactgcggaaagaattgcatgaaggctaccaagcagtttctcgaagagatta

SEQ ID NO: 678230 - DNA, 100 bp, Homo sapiens
aagctgagggcacgtgtttgcggttcagccctttgatgaccgcagcaggagcgcctgccaacggtaccgctgtccggcatgtacaataaatctggaggaa

SEQ ID NO: 678231 - DNA, 83 bp, Homo sapiens
gatccagcctgcggagcctgtggggcagatgatggatttggacatgcttctatgaagaaatgccacatggtccgagagcaaac

SEQ ID NO: 678232 - DNA, 100 bp, Homo sapiens
ttgactcctgggcccaactgtgaccgatttaaactgcacataccatatgctggagagacattaaagtggggatctttggatgtatataggaaaatgccag

SEQ ID NO: 678233 - DNA, 100 bp, Homo sapiens
atctactcctacttccacttcgtgttcttcctagcttccctgtatgtgatgatgaccgtcaccaactggttcaaggcagctgcaatgactctccgcacgg

SEQ ID NO: 678234 - DNA, 74 bp, Homo sapiens
cttcaaagtaaaatcagtttaatttcagaaaaggatattgctgcatatcgagctaaaggaaagcctgatgcagc

SEQ ID NO: 678235 - DNA, 100 bp, Homo sapiens
tcttcatcgaagatgctattcagagatcctgaaggagctagacgagtgctacgagcgcttcagtcgcgagacagacggggcgcagaagcggcggatgctg

SEQ ID NO: 678236 - DNA, 100 bp, Homo sapiens
acttttcttcaatgataagagctgtcagttttctgtggatgaagagtacccaaaggcaagtggaacagctctaatggggttgaagaaaaggagacttggg

SEQ ID NO: 678237 - DNA, 80 bp, Homo sapiens
ctgccagtttccatcctcaacaattccaattgaccaggatgttgtcattactaactcttatgaaacagctatgcgaacag

SEQ ID NO: 678238 - DNA, 90 bp, Homo sapiens
ggaaactactatgcatgtaaacaaatgaagcagcgctttgaaagagggagacgtggtgggcggtccttcctgtgacacgacccttgagtg

SEQ ID NO: 678239 - DNA, 74 bp, Homo sapiens
ggcagcatggctcagactgcatgacagcaccaaccatgtgcctagagctaactgtgttaagaagagcatgcttc

SEQ ID NO: 678240 - DNA, 83 bp, Homo sapiens
tggaattctaatttgaaccatgtttggattgaagccgcctctgtattacttaccagacggaatcagtccccaatgcctggaaa

SEQ ID NO: 678241 - DNA, 97 bp, Homo sapiens
ggctgcagcagcaagtcccatcggaggacctccctgccctgtataccgagggaacaggcttgcattgatgacaatgttgatatggtgaagtttctgg

SEQ ID NO: 678242 - DNA, 75 bp, Homo sapiens
aagtatgtggagtgttctgcacttacacaggagcctgtggtgctgaccgacacaaatcttgtgtatcctgccctg

SEQ ID NO: 678243 - DNA, 82 bp, Homo sapiens
ccagacctgcaagctctttgacacacagcagttcttgtcaggcaactttgtccctaacaaaatgtggaagggattagtcaag

SEQ ID NO: 678244 - DNA, 50 bp, Homo sapiens
tcagggtgccagacctcatcgtggtgtgtaagaagtaccggggattcacc

SEQ ID NO: 678245 - DNA, 75 bp, Homo sapiens
gagccgccgacatgaagaaagacgtgcggatcctgctggtgggagaacatgagcaacaagcgttccaacagcttc

SEQ ID NO: 678246 - DNA, 100 bp, Homo sapiens
cagcagcccagacgcggcacagagagggcctgggagcttgctgcagcttcaggttggatttggtctagggagtcccagaaagaagtagaaaaagagagag

SEQ ID NO: 678247 - DNA, 82 bp, Homo sapiens
cgacgccgtgcagcgggcccgccagacaatgcagatcttcgtgaagactctgactggtaagaccatcaccctcgaggttgag

SEQ ID NO: 678248 - DNA, 100 bp, Homo sapiens
ggtgtcaggactaagagaagtcacaaaacagcagatttcccaagagcagcggaaaatgatccagtcacagacccgtgcctgtatattccacgctttgcgc

SEQ ID NO: 678249 - DNA, 74 bp, Homo sapiens
cagtgtgtttgctcaaagtgatgacctggatagtgaagcaggactctggactgtcttcacactaggtggtgtgg

SEQ ID NO: 678250 - DNA, 100 bp, Homo sapiens
agcccactgaccccgctcccacgggaaatgattaccctggaggttgttcggaatcctataattgaaaaacagtaaagatggaaaaccagttattgaatat

SEQ ID NO: 678251 - DNA, 100 bp, Homo sapiens
agtgtatgaccacaaacagccatcaaggtctgccaaaatgtctgaaagatcagatctccttcacttcaagtttgaaaattatggagattcaatgttacaa

SEQ ID NO: 678252 - DNA, 96 bp, Homo sapiens
cctccaggtgacagcaatcagctggcctggtttgatactgacctgtaaatcatcctttaggtgctaaagtcagagcagaaatttatgaagcatttg

SEQ ID NO: 678253 - DNA, 85 bp, Homo sapiens
taccttgagcaaagagatccgtccagtctgccgcaagttcatgcaagatattcatggtaccatgcgggtgatcctggaaccgttg

SEQ ID NO: 678254 - DNA, 78 bp, Homo sapiens
agcctcccgagtggctgggactacaggtatcactcctccttgcttcaatctctttgccctcttcgatgctcaggccca

SEQ ID NO: 678255 - DNA, 74 bp, Homo sapiens
tttaatgaagaaaagaaaggaatccgtaaagacccatttctctatgagccaatggagatcttcgtggatgatga

SEQ ID NO: 678256 - DNA, 100 bp, Homo sapiens
gtggccggcttcgttctgaaccgcctgcaatatgcaatcatcagcgaggcctggcggctagtggagaggagaggagacgccgtgagcgggacgaccagat

SEQ ID NO: 678257 - DNA, 100 bp, Homo sapiens
aaggtccggctgctggatggaggggattttgtcagcttgtcgtcaaggctatggagttactagtagagaaagcaatcagcagtgcttctagccctcagag

SEQ ID NO: 678258 - DNA, 136 bp, Homo sapiens
gtggaggcgtggctctcatcactggccttcctcccacagcccacagatgctatggtccacatgctgctgtgccaccctgggccgtaacccactccgcttcatcctgcactctgggcgtgtggcccacctgtgtccc

SEQ ID NO: 678259 - DNA, 90 bp, Homo sapiens
cagaccgagagcagcctgccggggcggaggttggatggcaagcatgtggtgtttggcaaagtgaaagaaggcatgaatattgtggaggcc

SEQ ID NO: 678260 - DNA, 51 bp, Homo sapiens
cttacctttattggagacaaaaccgttatcaatactctggctgaccatcat

SEQ ID NO: 678261 - DNA, 50 bp, Homo sapiens
cccacccaaggctaaaggcagagccagtgtgccccctaccaccggagcca

SEQ ID NO: 678262 - DNA, 80 bp, Homo sapiens
caggactattttcacgttttaatgccgagagataaatttgcgcctcattttggtaagcggaaaaacaaaagagttcctgt

SEQ ID NO: 678263 - DNA, 82 bp, Homo sapiens
ttcacagtttgtaacagacgtggatgaagaatagctctgcagacctgcctagagctggaacgttacctccagagcgagccct

SEQ ID NO: 678264 - DNA, 101 bp, Homo sapiens
acaagctccctggattcaagatgtaccccattgactttgagaaggttgatgacaacaagaaactaggagaatgggtaggcctttgtaaaattgacagagag

SEQ ID NO: 678265 - DNA, 83 bp, Homo sapiens
attcgatgtctatatttaagtatctccgctacttcactcgcactatccttgatgctaggaacagattatcagtctggtcaatc

SEQ ID NO: 678266 - DNA, 82 bp, Homo sapiens
tgccgctcctaagcctgcacagccgcggcggcagcagcagtgagaggtccggacaggccgagatgacgccgagccccctgtt

SEQ ID NO: 678267 - DNA, 83 bp, Homo sapiens
cgatggtcttcctgctggggctcatgtttgaggtagttgaattcagtgaattggacaaacccagagtccgttttttacgaaaa

SEQ ID NO: 678268 - DNA, 75 bp, Homo sapiens
ctgctacttcaagctttggccatcaatagctctgaggataaaagaatcagagtgtctcaacccttgacaagagga

SEQ ID NO: 678269 - DNA, 101 bp, Homo sapiens
gccgagctgaggcggtcgcggccatgaaggtgctggagaatctggtaaaagcaccattgtgaagcagatgaggatcctgcatgttaatgggtttaatggag

SEQ ID NO: 678270 - DNA, 83 bp, Homo sapiens
atggaatgtggattactgccagatcctgaaagacatcacggtggaggacatagactctgacctgtttttgttggacacccgtg

SEQ ID NO: 678271 - DNA, 75 bp, Homo sapiens
ctatgttcatgttgggaagaactgtgtgattaaagtgcagcggttttgaatgactacagtttaaccaaatctcat

SEQ ID NO: 678272 - DNA, 82 bp, Homo sapiens
ttcaaaggaccggacccagagaagaggaaaactctaccggtgcagcaaattgtggctactaatttgccccctgaagatcaag

SEQ ID NO: 678273 - DNA, 100 bp, Homo sapiens
caatgaaatgaagcacacaacagacttctattttaatattgcaggccaccaagccatgcattattcaagaatgttctgaaggatctggaaaagagaaaag

SEQ ID NO: 678274 - DNA, 106 bp, Homo sapiens
acgaaaggaacgcaagaacagaatgaagaaagtcagggggactgcaaaggccaatgttggtgctggcaaaaaggagaactacgatgacccgcacaaaacccctgcc

SEQ ID NO: 678275 - DNA, 96 bp, Homo sapiens
cggcttctgagacggcggcagcagcggcattcaggcacccaggcatgtggaatatgctcatagtggcgatgtgcttggcccttctgggctgcctgc

SEQ ID NO: 678276 - DNA, 82 bp, Homo sapiens
cgctgtgctaactggaccgcggcagaagagtgggtctcggcgcggaagatggccggcggcgtggacggccccatcgggatcc

SEQ ID NO: 678277 - DNA, 75 bp, Homo sapiens
gggatcattgatgaggaaagcagtggaaacaatgcccagttgctgtgagtctaggtactccaattatgaagccag

SEQ ID NO: 678278 - DNA, 96 bp, Homo sapiens
gtcctgccttcgcgctgaggagccctcgttttcgagatcaggcctgaccgggataagctccaggagtgcccgtgcgcagcggagatgccaccttcc

SEQ ID NO: 678279 - DNA, 75 bp, Homo sapiens
gttggacgtggggaatttctcctggggctcagagtggaacgcagctgttgttctccggagtcggctgaaggtcag

SEQ ID NO: 678280 - DNA, 75 bp, Homo sapiens
acgacatccacttctaccccaccttccgggaacaagactgccaatggagactgccgcagagacccccgggagcgg

SEQ ID NO: 678281 - DNA, 82 bp, Homo sapiens
tgatggtgctgtaaccacctcacagattccagcttcggaacaagagaccctgaaaatggccacccagcagaaagcctctgac

SEQ ID NO: 678282 - DNA, 100 bp, Homo sapiens
agccgctggggtcccttttgcctcagatactattttgaagatgggcactgtgccccgactgcggcctcgcctcaatgccattctcttcaagctacaattc

SEQ ID NO: 678283 - DNA, 100 bp, Homo sapiens
gtggacgtggcggcccagctgggcgagtatctggaggaggacaaggatagtgggaaaacctctgtggttgtcgggacatggaaccaagaagagcatattg

SEQ ID NO: 678284 - DNA, 75 bp, Homo sapiens
attggtctacaaagacagcaggatgcttcctttggaaattgcacttacaatctcaccattctcgactgtttgcag

SEQ ID NO: 678285 - DNA, 90 bp, Homo sapiens
ctttggtgctcaagtgattcttctatttcagctttctgagcagctaagactacagcctccacctcctggatgccctcccaatgctgctca

SEQ ID NO: 678286 - DNA, 80 bp, Homo sapiens
cgactggctgtggaaatgaaaactgatctcttgattgttctttcagatgtagaagctccaccagcccattggagaaaagt

SEQ ID NO: 678287 - DNA, 82 bp, Homo sapiens
ggggcttgccctggtcttgctcggccgatgaagtgcagaggtttttttctggtgtcatcaatcttacagaagaagtgctgtg

SEQ ID NO: 678288 - DNA, 100 bp, Homo sapiens
gccaagaacgggcacctggctgtggtcaatgagctgaaggagaaaggcaacaaggccctgagcgtgggtaacatcgatgatgccttacagtgctactccg

SEQ ID NO: 678289 - DNA, 90 bp, Homo sapiens
ttgttgtcagaggccccaaatgaaaaactcttcttcgtggacactggctccaaggaaaaagcttctgcagctactctgatcaacatccgc

SEQ ID NO: 678290 - DNA, 97 bp, Homo sapiens
gtacaggcagtcaaccctaaacagtggactcaacttcaaagacgttctcaaggagaaggcagacctgggttaaaaagatcaagtggcatgagcagcc

SEQ ID NO: 678291 - DNA, 117 bp, Homo sapiens
cccgggcccgagaggaggaggccggggctctccgggcctcccgccgcttagcctgatgctggaaggacgaaggctccttcgagagcagtggatccgggccaagtacgagcgacagga

SEQ ID NO: 678292 - DNA, 100 bp, Homo sapiens
aacctttaagcagcagaggagcacgaggatcgtgggagctaagaacaagcttcactgcctgcactttagttcttgggattcaagcaaagagtggataata

SEQ ID NO: 678293 - DNA, 114 bp, Homo sapiens
cgcgcccgggaggaaggaacgaggcaaggagctaaagcagcgtgcgttcagccctgggacttcccaagtaagaagcggaagaggagccgctggaaccaagacacaatggaacag

SEQ ID NO: 678294 - DNA, 100 bp, Homo sapiens
ctcacacacagttacttgccaagacgattgaaggagaagttatagcactggataaaatcttcaacaaagtagaaaaaatcaaacagaatgccttattgtt

SEQ ID NO: 678295 - DNA, 88 bp, Homo sapiens
agagagcgagctgagtggttgtgtggtcgcgtctcggaaaccggtagcgcttgcagcatggaagactatgaccgtctgaggcctttat

SEQ ID NO: 678296 - DNA, 100 bp, Homo sapiens
agctcgcggaagctgagcgggccgaaaggcaggaggctcagttgatcatggccttgccaggttggtgacagtatattgtgagcatggtcataaagctgcc

SEQ ID NO: 678297 - DNA, 100 bp, Homo sapiens
cggaggtttgcaggggtgcagtgtgtctggtcttatgagccttcaaatgtttatctggtgtgactgtattatgccctcagagagtactgtatgttgccca

SEQ ID NO: 678298 - DNA, 90 bp, Homo sapiens
attcatgtgctgggtgggggacgtgtaccctgtctaccagcctgtggttcagaattttcacagctgtattcaggtaactgaagattttgt

SEQ ID NO: 678299 - DNA, 90 bp, Homo sapiens
cttcgttgcttgcttgcctgtgcgcgcgtgcgcggacatggcctcaaacgagtttatgtggccgaggcagacaagtggaattaggccttg

SEQ ID NO: 678300 - DNA, 75 bp, Homo sapiens
ttgttccggagctgggccattcacacaggaggtggagcccatgtgcaaggagagcgaccacatccacatcattgc

SEQ ID NO: 678301 - DNA, 100 bp, Homo sapiens
ggcaacgccaaccgctccgctgcgcgcaggctgggctgcaggctctcggctgcagcgctggttcctctgtgacgagggtgcaggtatctctggggactac

SEQ ID NO: 678302 - DNA, 82 bp, Homo sapiens
gtcgtgagttgctaaggatagcagacaagttcacccaacataactttcaagagtagacccaaatgatttgtacattgtagaa

SEQ ID NO: 678303 - DNA, 100 bp, Homo sapiens
tgccgccaagatgccggcctattttcagaggccggaaaatgccctcaaacgcgccaacggaaaatggcattcctatgaagaaagcacgaaatgatgaata

SEQ ID NO: 678304 - DNA, 83 bp, Homo sapiens
tccgagagcgcctgccgcccctgcgccgccgagccagctgccagcaaaatgatgcttcaacacccaggccaggtctctgcctc

SEQ ID NO: 678305 - DNA, 50 bp, Homo sapiens
actgtgcactccggactaacgtgaaggggtcttttcaaacatagacaatc

SEQ ID NO: 678306 - DNA, 90 bp, Homo sapiens
caagtttcaggaaatgatagaaacaactttagatatggatcagatgcctttacaagccccctccagatgtggttcatggagaatatgaag

SEQ ID NO: 678307 - DNA, 98 bp, Homo sapiens
cgcagccaccgcggatgcaaagttggatttggtctagggagtcccagaaagaagtagaaaaagagagagaagcctaccgtcggagaactgctgctttt

SEQ ID NO: 678308 - DNA, 83 bp, Homo sapiens
ccttgcacttcctggaggtgaaactgggcaagaggccccagcccgtgaaaagtgagccatcactggtgcaagctatatttaac

SEQ ID NO: 678309 - DNA, 75 bp, Homo sapiens
tgagcagctttggataatgacgacagcaacccgaagacagggaaatttaggttcaacagaatccctcaatcctag

SEQ ID NO: 678310 - DNA, 128 bp, Homo sapiens
tgaaggagaaattcgactatggcaacaagtacaagcggcgggtgccccgggatattgactgggtacagacagagaagcacgtgtttgagcaggcatccagcaaccccttcctggtcggattacactcc

SEQ ID NO: 678311 - DNA, 100 bp, Homo sapiens
cgaggggagacgccgtgacaactttcgtttccctctgagggaattgggaggtcggcggccccaaaaagcaaaatctggagcggcaggtgttacagacaca

SEQ ID NO: 678312 - DNA, 83 bp, Homo sapiens
cggacccacggagccggcagcccagcactccgctgacatcctggagccctctccacacccagacatgctgtgctttgtggaag

SEQ ID NO: 678313 - DNA, 100 bp, Homo sapiens
ttctccctcgaagcactccccccagctccatgaatggaaatcggctccgcagagacagggcagggcattgttcatgcactgaccgacctcagcagccccg

SEQ ID NO: 678314 - DNA, 100 bp, Homo sapiens
aaaacgtaacaaatcagatcgcactcctgaaattaggaaaattgccactgctttataaggttcgtgctggccgtgggcagcgccgtctttgatgccatgt

SEQ ID NO: 678315 - DNA, 75 bp, Homo sapiens
gaatctgactgcggcgtgggagtggaaggaaagggtaagcttgatgattaccaggaacgaatgaacaaaggggaa

SEQ ID NO: 678316 - DNA, 100 bp, Homo sapiens
acaccgctatcacagctgctgcaatcgcttgggagagctcctgggccacccctcctttcaggtcaagtccaaggttcgagagctggaagagaaatgccgg

SEQ ID NO: 678317 - DNA, 75 bp, Homo sapiens
cgggaccacaaaaggtcacgaagtagagaaagaaggcggagcagagtgagtggctgagcgtccaggctgcgcgat

SEQ ID NO: 678318 - DNA, 100 bp, Homo sapiens
ataggatataaagagaaacctcaagatgtggatttaccttatcccctcaacaacttttcagtggcaatgccagggcaggggcccttggagtgacttggct

SEQ ID NO: 678319 - DNA, 100 bp, Homo sapiens
tgggcggaggccgccaagacggtcctttggagtgctgctatgggaaatcttttctcttggatatatgccataccccagcaaaagcaaccaggaagttctg

SEQ ID NO: 678320 - DNA, 100 bp, Homo sapiens
ctcgcttgcagttcagcgaccacgcgggtccatatggaatatttgctggtagggatgcctccagaggactggccacattttgcctagataaagatgcact

SEQ ID NO: 678321 - DNA, 75 bp, Homo sapiens
cgagaacctgggccaaggcgacaagaatggcttcagttctgtgcaggccacgcagttacagaccacacaatctgt

SEQ ID NO: 678322 - DNA, 100 bp, Homo sapiens
tgcgctcgcgcccggatccctcaggaacttgctactaccagcaccatgccctaccaatatccagcactgaccccggagcagaagaaggagctgtctgaca

SEQ ID NO: 678323 - DNA, 107 bp, Homo sapiens
gacatcattgcatgggttaatgacatagtatctttaaactacacaaaagtggaacagctttgttcagatggtgagaacaagaccaagattggaaagccagcttcaga

SEQ ID NO: 678324 - DNA, 90 bp, Homo sapiens
cttttccgttgccggtgccggcctagcgtcctggaattacttcaatcaagctgaagccgacgtagcttctctgaacagacgcatccagct

SEQ ID NO: 678325 - DNA, 51 bp, Homo sapiens
tatgctggaactgggttttagcaagaactacacgaaggccatgcggctgtt

SEQ ID NO: 678326 - DNA, 100 bp, Homo sapiens
ggaggagtcagctgtgtgtccagaacgtgccatggagacgcttaacgatattgatgatgttaagaagttcaaaccgggttacctggaagctactcttaat

SEQ ID NO: 678327 - DNA, 98 bp, Homo sapiens
ataggcctcggtctagcacaaagtctaaggggaggaggagaacggggctgaggaggaagaagaagaaactgccgaggatggagaggaggaagatgaag

SEQ ID NO: 678328 - DNA, 98 bp, Homo sapiens
tgaagagaactcttttaaatatttgataaaactactcacccattacataatcctcagtattaaaataaacagttgctgacattttggaagatgaagaa

SEQ ID NO: 678329 - DNA, 75 bp, Homo sapiens
gccttccgagtagctgggattacagttttggcttcgtgatcacgtaaaccaagagtcacaaactgaaatgccatc

SEQ ID NO: 678330 - DNA, 125 bp, Homo sapiens
tagatcctagtacagatagcacagggattgtcaacattcttgtcacactgaaatttccttctactgatctccaagaaaaactatttccaatgatgatgatgttcaaaaagccgatgtatcttcta

SEQ ID NO: 678331 - DNA, 100 bp, Homo sapiens
atggaggatgatttcatgtgcgatgatgaggaggactacgacctggctgcagtttgaaaagtttggatcttgatagctgcactctttcagaaatcctcag

SEQ ID NO: 678332 - DNA, 75 bp, Homo sapiens
cctggggctgacaggaatcttctggtgtactctttttatgaaaagatctggaatcgatgtgtgaaaccaagttat

SEQ ID NO: 678333 - DNA, 82 bp, Homo sapiens
gcctcccgagtcactgcagccaacccttcagcaagtaagactttgaccccgacgcaggcttcagtgattgccgcggatcaga

SEQ ID NO: 678334 - DNA, 100 bp, Homo sapiens
agagcaggccatgattggaccatcccccaatcctctcatcttgtcctacctgaagtatgccattagttcccaggccgggctgggatcagatgggaagtgg

SEQ ID NO: 678335 - DNA, 98 bp, Homo sapiens
ccatttgtggagttaaatagaatattagaggcattaaaggtcagagttctgagacctgctctggagaatctgtcttgaactatcgtttcgatcctctc

SEQ ID NO: 678336 - DNA, 100 bp, Homo sapiens
ggtccctgaagagggaagacacgcggaaacaggttggctcactattgccggctccgggatgttcagacactggcgatgctctgtagcgtgtttgaagccc

SEQ ID NO: 678337 - DNA, 98 bp, Homo sapiens
ctacatctcagactactgtgtgtggattcagaaagtcaagtaaaatatacccaggaccataaacagatgaaaggtagaccaagtctgattttagatac

SEQ ID NO: 678338 - DNA, 98 bp, Homo sapiens
gatgtgcagcaatcagatttatcattcggatcattatgtagaagttctggaatgcaaaatacagtgtgaagagaacctcaccccagttataggaggct

SEQ ID NO: 678339 - DNA, 75 bp, Homo sapiens
ccgcacgcggcgatatggaagaggagggcaagaagggcaagaaggtgaatctggattgggaaagtcgacattaat

SEQ ID NO: 678340 - DNA, 90 bp, Homo sapiens
acagaacctagcctatcagctggggctggatgagttaccttggccatgtagaagttgatgaatcaagaggaatgcacatctgtgaagatg

SEQ ID NO: 678341 - DNA, 124 bp, Homo sapiens
ggaagattcaaacaaccaaccctgatttcctgcttctccttttcatgagtgttcctgtggtctctgcacctcctttctggggatatgagactttctactcggaatatcctgagtgttgcgtgga

SEQ ID NO: 678342 - DNA, 82 bp, Homo sapiens
tttgagattgacgcggtgaactctgtccagttttcaaaccacacagactccatcaagaatgctggaggaagggtgtttgtcc

SEQ ID NO: 678343 - DNA, 74 bp, Homo sapiens
gacgccatctgctgccacaccagcaccagcaagcggcattggctgcggagtctgctacaccatttttgatttgg

SEQ ID NO: 678344 - DNA, 75 bp, Homo sapiens
aacctcctgtggataagggctcagaatagcaccattgctgggtatttctcaagctgccagatacgtttaccaacg

SEQ ID NO: 678345 - DNA, 100 bp, Homo sapiens
tgagattcatggccacgcagtgctttgcaacgctaattagactcatgccacttgagggatgatccaccaacacattctcagccagacagtgatgatgaag

SEQ ID NO: 678346 - DNA, 75 bp, Homo sapiens
caaggaataaacatgcaatgaacccaaaaggactatgaaaatgatgttagacaaaaagcaaattcgagcaatttt

SEQ ID NO: 678347 - DNA, 98 bp, Homo sapiens
cgagcagaagatatgaaaacaaggctggcagcttcatcactggaattgatgtcacctccaaggcctttgcccagtttgatgctgagggtgatgggaca

SEQ ID NO: 678348 - DNA, 100 bp, Homo sapiens
ttgcctttttctttctggaatcagaaggctttgctggcctgaaaaagaagacccttttgaggacttctttgggaatcgaaggggtccccgaggaagcaga

SEQ ID NO: 678349 - DNA, 88 bp, Homo sapiens
cctggcgctaggcaggcgttgaggaagaagccacccgagcggactcccgagcccatcatgttcagaggtgaggtccgtctgaatgtcg

SEQ ID NO: 678350 - DNA, 80 bp, Homo sapiens
tccttggctgttcaagtgtagagctgatgttctaatcatgtcagataaagatgatattgagactccactgctaactgaag

SEQ ID NO: 678351 - DNA, 51 bp, Homo sapiens
ggatgtgatgcctgctagccaaaaggggaggacatgtatgcccaggactct

SEQ ID NO: 678352 - DNA, 51 bp, Homo sapiens
ctgagatccatctgcaccacggtgctgagcacaaagttatcattgttgggc

SEQ ID NO: 678353 - DNA, 60 bp, Homo sapiens
gacaagaccatcgagctcatgtgtatcctactcagtacatgtatctgaagattacccagg

SEQ ID NO: 678354 - DNA, 98 bp, Homo sapiens
tgatctccaaagactggatggtatgggctgtctggagtttgatgaggagcgagcccaggtttcttcagtgctccggggattcctagacttgatgttgg

SEQ ID NO: 678355 - DNA, 115 bp, Homo sapiens
ctcagccaccgcccaggaagcttcatggctgggcaccaggccctgactaccaggttatcaatactctggctgaccatcatcatcgtgggactgactttggtggaagtccttggtt

SEQ ID NO: 678356 - DNA, 100 bp, Homo sapiens
aggaatgcaattctgccaccatgatggaagagggtcattttcaacattgttaacttcagtaaaaccaagagtctctatagagatgggatggcccctatgg

SEQ ID NO: 678357 - DNA, 98 bp, Homo sapiens
tggtgctgccgctgctccctggccggtcatttcaggtcacatatcctggagcaggaaaacttccacacatcattggaggatcagatctaatagctcat

SEQ ID NO: 678358 - DNA, 102 bp, Homo sapiens
atctttcttcactcctcttcacttcttcactagttaaaggccttcagcaagagctgaatcgattgtattcccttttctgttctcggaatccagactttgaag

SEQ ID NO: 678359 - DNA, 87 bp, Homo sapiens
gaagatcgcgatcctgggctaccggtctgtgggttattcagcttctcaaggctggaaaagcgaaggaagtttcctacaatgcactag

SEQ ID NO: 678360 - DNA, 87 bp, Homo sapiens
aggctgccagatgtccgtcactccccagggcggcatcgtcgtctatgggggctactcgaaacagtgctgctcacggccgtgaactgc

SEQ ID NO: 678361 - DNA, 88 bp, Homo sapiens
attccaaagaactcggagatgcctggaatacagtaagacttaattcagtgcacaaatgagatgaatgtgaacatcccacagttggcag

SEQ ID NO: 678362 - DNA, 100 bp, Homo sapiens
ctggcctgcacttgctcacctttcagcagccgcccaatacctcccagcctgacaaggttcctgaatatctacatcatgttaacaaacgtctagaagaaga

SEQ ID NO: 678363 - DNA, 96 bp, Homo sapiens
gaagcaggtggaattatgccctgttggttccaatgctgggattggctgcttttcatgccatggacaatattaccaggcagaaccaattctacgata

SEQ ID NO: 678364 - DNA, 83 bp, Homo sapiens
aaccgcagtatcatgctggccaagaagatcatcattaaggacggaggcacgactagacgcttgaagcaaagctgccatcccag

SEQ ID NO: 678365 - DNA, 94 bp, Homo sapiens
ccaccatcaagttcttcaggaatggagacacggcttcccccaaggaatatacagatcccagcatggtgagtgcctacatgtacccagcaggggc

SEQ ID NO: 678366 - DNA, 100 bp, Homo sapiens
ctggccccagtgtttctggtcagcccaactctcttgggcatcaccatgtccggcaagctggatgcgttcctggtgctggagcagctgcggtgcaatgggg

SEQ ID NO: 678367 - DNA, 99 bp, Homo sapiens
cctgaaaaattcaagaagttgaaaaacgcttttcacgtcacctggagagatgcacaggtgactattatatggttaaaaagattttggaggaaaacagtt

SEQ ID NO: 678368 - DNA, 90 bp, Homo sapiens
tatttcaagagtcacttctttacttggtgcaggaaggcagtctttgctacgtacagcaaaagatctaaatgagtgtggcctgaagccccg

SEQ ID NO: 678369 - DNA, 100 bp, Homo sapiens
agaacctctgctccccacctcagagagttttgattgtgccttgccagtacatgctgcagacaatgaaggatgagcaagttttctacattcaatacttgaa

SEQ ID NO: 678370 - DNA, 82 bp, Homo sapiens
agccggaggccgcgtggacccgaaagccgctgggaaaacatgatgccttcttctgtagagtgggcgctttgcagaatacgtg

SEQ ID NO: 678371 - DNA, 88 bp, Homo sapiens
aaacattggaaaagaaatcctgataagaactgctttgtgactgtggccttcccccagatgtacctaatgcccagccagctttggaagg

SEQ ID NO: 678372 - DNA, 100 bp, Homo sapiens
acccctgaattccgagcccacgtagccaagaagctgggagccctgctggacaggtttgctctggaattagtcacagaaaagggccatacatttgccgaag

SEQ ID NO: 678373 - DNA, 75 bp, Homo sapiens
ggccgagctgttgactggaagaacattgtttcctggtacagacctgctgacttgctcatcagttttgcacagtgg

SEQ ID NO: 678374 - DNA, 75 bp, Homo sapiens
ggagagattgttcctgtggagcaaagagctgcatcatgaattcaggagcatcaataatccagaatggctactctg

SEQ ID NO: 678375 - DNA, 100 bp, Homo sapiens
tccgcgacttcctggccatcgttttcttcgcctccataggatcttacacatttgttccatggcttctcagctttaaaaggggaagtgccctagaagaaaa

SEQ ID NO: 678376 - DNA, 75 bp, Homo sapiens
tcgatctggacctggcctggcggtccacaagaatcggaatgtcagttaatgctattcgcaagcagagtacagatg

SEQ ID NO: 678377 - DNA, 75 bp, Homo sapiens
tctctctaccactggatgaaaatatgactggaaaaccagtagattcccagacatcgcgaagtgaatctgaaattg

SEQ ID NO: 678378 - DNA, 75 bp, Homo sapiens
tgatcactggtttcgtggcctgaccaaggacctccaagatgttccagaaggagaaggcggtgctggacgagctgg

SEQ ID NO: 678379 - DNA, 75 bp, Homo sapiens
tgttagtgaacgtggacaaagctgttgtctcagggagcacagaagtgcgtatagcagcaaaattcatcattcatg

SEQ ID NO: 678380 - DNA, 90 bp, Homo sapiens
ggaagaagcacccgacattcccctaaggagagtccacagcagtgttggagagcacaatggctgaacaagtccttcctcaggctttgtatt

SEQ ID NO: 678381 - DNA, 96 bp, Homo sapiens
gaaagccttgcgagttttaaagcaaaagaggatggccatcactgtgcatgtccccatgccctcagcaggagtcgtggacatccccattgtggagaa

SEQ ID NO: 678382 - DNA, 80 bp, Homo sapiens
gacaatttgtcgtcaccacaaatccagtgaacaacgatggcattttgaaaacagcaaagatcctaagtgtgaacgtgaag

SEQ ID NO: 678383 - DNA, 87 bp, Homo sapiens
cagaacccggccctcaccgccctcaccacccctatccagacggctgcccttcaagtaccaaacattgatgatggcacctcagatcgc

SEQ ID NO: 678384 - DNA, 50 bp, Homo sapiens
agccccagccccaagggcagaggtggccaagactaagcagcagattgagg

SEQ ID NO: 678385 - DNA, 100 bp, Homo sapiens
atcagcatttctgtgcctaggaggactggcttgtcttattgtaatgtttcttccagaaaagaaagaaatccgtattattggcccggcacggtggctcacg

SEQ ID NO: 678386 - DNA, 110 bp, Homo sapiens
ctggttgttccgttgcgagctgcagctgcgatctctgtggtaggcccaggtgcgttccatggatgaactgaatcatgattttcaagcacttgctctggagggaagagcga

SEQ ID NO: 678387 - DNA, 116 bp, Homo sapiens
cctcttactacttctgcagagtcaacattcctgaagccccttcctgtcaagcctcctacagaatgccgtatatgtagtagcacttttcaaagaaggaagaaaggtgggagtcattt

SEQ ID NO: 678388 - DNA, 75 bp, Homo sapiens
atccaccgcacctcggtgcccgcaccgctcaacagctgtctcctcaaacgcagtgatggcccctatgccctggtg

SEQ ID NO: 678389 - DNA, 75 bp, Homo sapiens
aggaggcctggggaccatgggctccaggatcaagagccagatgaccaagatgctccagatgaacatgagtcgcct

SEQ ID NO: 678390 - DNA, 82 bp, Homo sapiens
tgtaccaggggatgctggactgcatggaggctgaagatgagaagtcagtcctgatggcagctgtgcagagtgggggtgagga

SEQ ID NO: 678391 - DNA, 90 bp, Homo sapiens
cggggtccgagcggggctctgtggctgctcctggctctgcgcaccgggctgtggcagtctgtccacatcgatgacctccggagatccacc

SEQ ID NO: 678392 - DNA, 83 bp, Homo sapiens
tcggcctctgcaggcttgccgaagaagggagcccgtggaccgggagcccgtggaccgggagccggtggtgtgccaccccgacc

SEQ ID NO: 678393 - DNA, 82 bp, Homo sapiens
ctgggtcagtccgccgctcaccccgcggccgcaccttcccgccttctcagaagagaaggaggcagagactggtgcagaaaat

SEQ ID NO: 678394 - DNA, 75 bp, Homo sapiens
tcgggagccgcccggggcagggctcgggagagcggatgcatggtcatggaggctatgattctgattttagtgatg

SEQ ID NO: 678395 - DNA, 100 bp, Homo sapiens
cccgattgatagaagacaatgagtacacagcaagacaagggaatgctggcctgctggccttggcagatgttttctcagaggattcatcctcctctctctg

SEQ ID NO: 678396 - DNA, 87 bp, Homo sapiens
gcagcccccgggaggccgagtgcatctgttggaccgtgcgaggcatgttatttgaaagcaattgagacgcaaccgaactttgcagta

SEQ ID NO: 678397 - DNA, 75 bp, Homo sapiens
gtgcgctcgatccagcaccatggggaagcgggacaatcgggtggtttatcttgcagattatggactttcctacag

SEQ ID NO: 678398 - DNA, 100 bp, Homo sapiens
cccgctgctgctgccgctgccgccctgagtcactgcctgcgcagctccggccgcctggctccccatactagtcgccggagacgcaggtcagaatggaaat

SEQ ID NO: 678399 - DNA, 100 bp, Homo sapiens
cgacattcgggagccaagcctttgcagtgcgtagtttctctgaaaagcatcacccaggtcagaatgaaaggaaactctctgtgcagaccgctgtatgtgg

SEQ ID NO: 678400 - DNA, 77 bp, Homo sapiens
ccatccctcactacagtgccacagacacaaggccagaccacaggacatggatttgattgacatactttggaggcaag

SEQ ID NO: 678401 - DNA, 75 bp, Homo sapiens
gtatcatgagagatatagcccacttagaaatcacagttgatggaagtagttccacattaagcatgagcactcatt

SEQ ID NO: 678402 - DNA, 87 bp, Homo sapiens
ggtctcatctttgaactactgccggagcttctgccagagtgatcagcagctggactgtgccttggacctaatgaggcgcctgcctcc

SEQ ID NO: 678403 - DNA, 75 bp, Homo sapiens
tgttcgagaacgaccccgagacggattatatctgtccaagatgcgagtctggttttatcgaggagcttccggaag

SEQ ID NO: 678404 - DNA, 75 bp, Homo sapiens
tttaccacatagcactgttcttggaatttaacatgcttgcacaaggaggagatgttaaagtaacccatcttgcag

SEQ ID NO: 678405 - DNA, 101 bp, Homo sapiens
gctgacttgcgcattgctgcctgccttctcaaactttggaacaaataccgaatttccaacattccatcactaatattcctcgacgccaccactgggaaggt

SEQ ID NO: 678406 - DNA, 50 bp, Homo sapiens
gaactttctgtcttgtgatccattgcctgacctgatggccaaaagaaagg

SEQ ID NO: 678407 - DNA, 100 bp, Homo sapiens
ggggtgcgccggcagaggatccagtgttcaccatcctggccccggaagattggttcgagtgagtaaaaactaccgatcagtcatcagagcatgtatggag

SEQ ID NO: 678408 - DNA, 100 bp, Homo sapiens
tgatgtcttccagactcggtgctgtacccgcccccacacatcttgctgacttcactcaagtgcaaaccattcagtattcaaacagtgaagacaaggacag

SEQ ID NO: 678409 - DNA, 100 bp, Homo sapiens
tgcgcccgctgtcaccgccatggctgccccgtgtttgctgcggcaaggacgagccggggcgctgaaggggccttcaagctctacgacttggacaatgatg

SEQ ID NO: 678410 - DNA, 107 bp, Homo sapiens
acatgctcagggctgcggccgcccgaagaggagagagcgcgggcctctaggaagtgctgcagggtgtggacaattcgctggtgggcctgcacaaccagagctttgcc

SEQ ID NO: 678411 - DNA, 90 bp, Homo sapiens
agtttctaggaaaggccggacaccagatgccatggacaatattaccaggcagaaccaattctacgatacccaagtcatcaaacaagaaaa

SEQ ID NO: 678412 - DNA, 74 bp, Homo sapiens
aggacatcaagttcttgccgttcaaggtgtcgtgaaaactacccctaaaagccaaaatgggaaaggaaaagact

SEQ ID NO: 678413 - DNA, 100 bp, Homo sapiens
aaattaagacaagaaacacaagaatggaatcaacagttctgggcaaaccagaatttgacttttagtaagagtaacacagcatctggtggaatgacacgac

SEQ ID NO: 678414 - DNA, 97 bp, Homo sapiens
gcaaccgcgagaaggcccagcgcttcctgcagaaggccgagaagctctacccactgccctcggcccgcgagcatctgctgcacccaagcctgagccg

SEQ ID NO: 678415 - DNA, 100 bp, Homo sapiens
tactcggaaggcgcgggcaggagcctggcgaggatgcaccttcccctgccttggaaagctccctcgtgaaagatgcttctgttcctctgattgatgttac

SEQ ID NO: 678416 - DNA, 83 bp, Homo sapiens
tggacaagcttaataaaataaccgtccccgccagtcagaagttgaggtgtttcccattaaacactaccaggacaaaatcaggc

SEQ ID NO: 678417 - DNA, 74 bp, Homo sapiens
agggagctcacatttctcatattgctcaacagtgccgtgttcacatggaccaacttgcttgtggtggttgtgga

SEQ ID NO: 678418 - DNA, 100 bp, Homo sapiens
cttcacacttggccccggcaaactccccatccagctccaggtagatgatgagctggagatcaaggcctactatgcaggccacgtgctgggggcagccatg

SEQ ID NO: 678419 - DNA, 96 bp, Homo sapiens
gtcagcacccctgcagatcatcctggcgatctacttcctctggcagggaaatgcaataccttatttccagatgactcctatcagcacttctctctg

SEQ ID NO: 678420 - DNA, 74 bp, Homo sapiens
cacgttgaaacagaatgaagtgcttcctggagctaagccctcacagatcaaatttagctgtttaccagtatcaa

SEQ ID NO: 678421 - DNA, 83 bp, Homo sapiens
aggcggagaaccgcctgggcgatgagtgagaacctcgacaacgagacaatgcagatcttcgtgaagactctgactggtaagac

SEQ ID NO: 678422 - DNA, 80 bp, Homo sapiens
acaagccgctggcagccgcggatctcaccgccgctcagggtacctaccagggccagtgggccggaggcatgcggcatggc

SEQ ID NO: 678423 - DNA, 100 bp, Homo sapiens
tctgaactcaggacttggcaagacactcaatcacttgtcggaagtccctcaacccgtatagcacctcatattattggagcagaagatgatgattttggta

SEQ ID NO: 678424 - DNA, 101 bp, Homo sapiens
gaagaaagcctattacctggcatgtggattttgtcgctggacgtctagagatgtgggcatggcagacaaatctgtagtgggatcttgtgtgtgataatgcc

SEQ ID NO: 678425 - DNA, 82 bp, Homo sapiens
ttacatacgagaatggcttgtgaaatcatgcctctgcaaagtgttggctgcaccaattctagaagtaagctctccaagttca

SEQ ID NO: 678426 - DNA, 80 bp, Homo sapiens
agacagaagtggggagaagcggaggttatgatggagggtggtcgcagcaaagggtttggttttgtatgtttctcctcccc

SEQ ID NO: 678427 - DNA, 101 bp, Homo sapiens
gaacaatggacagtcctggaaatcggcttcagctccccaggaatatgattgaaaacagcatgtttgaggaagaaccagatgtggtggatttagccaaagag

SEQ ID NO: 678428 - DNA, 74 bp, Homo sapiens
ctccgggccgctcggcccccatgcctgcccgaccgcgctgccggagccccaggagctatgaagacatgattggt

SEQ ID NO: 678429 - DNA, 100 bp, Homo sapiens
tggtcttgctcggccgatgaagtgcagaggtttttttctggaactcgtaacattcagggatgtggccatagaattctcccctgaagagtggaaatgtctg

SEQ ID NO: 678430 - DNA, 83 bp, Homo sapiens
tgaatatcatatgcctggcttctagagctcacggttttagatggagcaggattagatattgatttccatcttgcctctccaga

SEQ ID NO: 678431 - DNA, 100 bp, Homo sapiens
cacgactgccttgtctatgcatatatcataaagggcatttgcaagtaaaatcactggcatgttgttggaattatccccagctcagctgcttctccttcta

SEQ ID NO: 678432 - DNA, 83 bp, Homo sapiens
cttctaccagcccatgcccctgaaggcctcgctggagatcgagtaccaaatttatgtgatcagtttggctgaaccccgtctgc

SEQ ID NO: 678433 - DNA, 75 bp, Homo sapiens
aacattccaagtactctttgagagtggtgaaaccagaacaatatctcactttcattatactacctggccagattt

SEQ ID NO: 678434 - DNA, 75 bp, Homo sapiens
acagtgcagcgctccgtgtttgcatcggtggacaaggtgccaggatgccaagtttgtggaggaacggagaaagca

SEQ ID NO: 678435 - DNA, 98 bp, Homo sapiens
gaggcaggagagaggaggaggagtgcggcgcggcggccccgggaccaaggagggactttgaacatgtcggggatcgccctcagcagactcgcccagga

SEQ ID NO: 678436 - DNA, 82 bp, Homo sapiens
agaagtccagagctgaggactgcctgtttgcagggaaggtctgtttctctaacaactttttatcgaacagcgaggaatatca

SEQ ID NO: 678437 - DNA, 98 bp, Homo sapiens
ttgccgacgccatggccgagtcacctagccgggacgtcgtgggatccggaacagacaaggcgcctctgtcgaagagccttctgctggtccccagtgcc

SEQ ID NO: 678438 - DNA, 99 bp, Homo sapiens
ggtgggccgaggaacccagagaagatagaacgaatgtgtgccctttttacaccttcaaacttttccagccgtagcttgggctccaatcaagagtgtggg

SEQ ID NO: 678439 - DNA, 115 bp, Homo sapiens
caagatggcggcgcagccaccccgcgggatacgcctcagcgcgtgaacagcctgggcatcagtgaagagctgaaggagaagctgcgggatgtgatggtggaccggcacaaggtgg

SEQ ID NO: 678440 - DNA, 98 bp, Homo sapiens
cgcaggcctgtcttcctattcaccgtgggcagcagagggatggctgctcagctgctgactgatgaggcactggattggattcagcatcaaaatacatc

SEQ ID NO: 678441 - DNA, 82 bp, Homo sapiens
ctggtgcctctagtgaaaagaacaagaagtcttaccctcaggtcaaagtgatggcatcagctgagaagggaaggaagcccat

SEQ ID NO: 678442 - DNA, 100 bp, Homo sapiens
ttttttgctatgtttctcatgtatctgcttgccgccctctttggatacctaacattttacgcttgtgagaagaatgagttgatgacatgctccataccag

SEQ ID NO: 678443 - DNA, 51 bp, Homo sapiens
cagagctccttggccctccacaagaaaacttggaatataacgtggagcctc

SEQ ID NO: 678444 - DNA, 100 bp, Homo sapiens
cttcaggctcaggtccggatagggggcaaggtgttcagattttgcaaatctaaatgtcataaaaactttaaaaagaagcgcaatcctcgcaaagttaggt

SEQ ID NO: 678445 - DNA, 100 bp, Homo sapiens
attctccgggagccgtccgtgtcaccgccggaacctggcgcagattctcctgagaatgatattcctatggagatcaccacggcagaaccacaggtttccg

SEQ ID NO: 678446 - DNA, 83 bp, Homo sapiens
gattcgcagtggtcgcttcttctccttgtcgtcattgaattttgagaagcattctgaaaactttgcatggacagagaatcgtt

SEQ ID NO: 678447 - DNA, 83 bp, Homo sapiens
gaggtttacaaaatagacatgccgcccttcttcccctccgaaatttggatttaggtggcgagtagaaaaagaagtaatttcag

SEQ ID NO: 678448 - DNA, 100 bp, Homo sapiens
gtgaagctgtctcaaacattcaagaaaacacacagactccaactgtacaagaggagagtgaagaggaagaggtcggggtatgataggtcggggaagaggg

SEQ ID NO: 678449 - DNA, 98 bp, Homo sapiens
cgagctcaagccattctcccacctcagcctcctgagtagctaggacagcaggcaggtaccactctgtccaggccttacctatgagaaactaaatcggc

SEQ ID NO: 678450 - DNA, 82 bp, Homo sapiens
gtcgctgggtgcgtggggctgcctcgccgcgtctcgccacggtcaaaatgcagatcttcgtgaaaacccttaccggcaagac

SEQ ID NO: 678451 - DNA, 100 bp, Homo sapiens
tctaaacctggtaaaatttcacggcaggatcctgttacatacatttcagaaacagtaccgggaccctctggtgataatggcatcagtgttacaatgatct

SEQ ID NO: 678452 - DNA, 83 bp, Homo sapiens
ccgtgaccgagagcgtgaccgagagcgcgaatatcgtcatcgttagaagagctttcattgttgaggttcctcagtgctgaact

SEQ ID NO: 678453 - DNA, 101 bp, Homo sapiens
atgttttataagtattgacattacacagtgttaacaatgcatccacagaggtttttcgttggaatatacgttgcacatttatggcgattctgagtgtgagg

SEQ ID NO: 678454 - DNA, 95 bp, Homo sapiens
cgctgctctgtgccttactcctgttgcttgcctactcctgaccaggcctccggaatgccccccgctgctgggcagtgatccagcccctgctgtgt

SEQ ID NO: 678455 - DNA, 100 bp, Homo sapiens
cgggcactccacagattctgttgcgaaggcagccatctttagttcgtctttcctagagaggtggggtggcagttgaaaaatttggtgaatgcactacgag

SEQ ID NO: 678456 - DNA, 82 bp, Homo sapiens
tttctctgctgcaccgacctcgacgtcttgcctgtgtcccacttgttcgcggcctataggctgatcagctgaccgaagaaca

SEQ ID NO: 678457 - DNA, 98 bp, Homo sapiens
gcggaggctgccatggacgacgaggaggagacgtaccggctctggaaaatccgcaagaccatcatgcaggacgtggcccagtggaacatcgggagcct

SEQ ID NO: 678458 - DNA, 90 bp, Homo sapiens
agcctcctgagcagctgggattacagagagtggttagatacattctcaaacaagatgtcccatcttctttagaagatgctttaaaggtag

SEQ ID NO: 678459 - DNA, 100 bp, Homo sapiens
gaatgcagcagatatgcctgctaacatggataagcatgccctgaaaaagtatcgtcgagaagcctatcatcggtctctcgggtattgaggcagaagaaaa

SEQ ID NO: 678460 - DNA, 90 bp, Homo sapiens
ggaagcctgcgtaactttctcccttgatccgggagtctttccactggagcggagaagcatccttgtttgaggtgaacatccgctacatcg

SEQ ID NO: 678461 - DNA, 100 bp, Homo sapiens
gagactgcgggcccgtagctgggctctgcgaggcaattactaaagatatgtttgaagaagcactgcgtgccctggcagatgatgatttcctgacagtgac

SEQ ID NO: 678462 - DNA, 90 bp, Homo sapiens
cagattcgcagtggtcgcttcttctccttggaaaaccagtagattcccagacatcgcgaagtgaatctgaaattgtgccaaaagttgcta

SEQ ID NO: 678463 - DNA, 98 bp, Homo sapiens
tgaacccatttttcaggacatctttaaataccctcaagaggagcaacctcgtcagcagcgaggaaggaaacagcgactaatagggatgccaaaggaaa

SEQ ID NO: 678464 - DNA, 50 bp, Homo sapiens
cgcggctctaacggggctttctacaaggaaatggaagttccagtattacc

SEQ ID NO: 678465 - DNA, 100 bp, Homo sapiens
gagtatcaaagccaacccagtatttgattaccagctctacttccaagaaccagaataggactagcaacttcatagacggttgtgaagacaagctagacgg

SEQ ID NO: 678466 - DNA, 83 bp, Homo sapiens
acgggatccagagcgccgcgcacttcgtcatgttcttcgcgccctggtatgtgaggagcagcgctgtgaggaggaagtcttcc

SEQ ID NO: 678467 - DNA, 74 bp, Homo sapiens
ccggctggcgcacctgggcgtgcagcaaaagctggcaggctgacagaggcggcctcaggacggaccttctggct

SEQ ID NO: 678468 - DNA, 87 bp, Homo sapiens
cgggcccaggaaaaagaggaaagtggactgtccggggccgggctcaggagcagaggctgaccccgcactacatctacccaccagcca

SEQ ID NO: 678469 - DNA, 75 bp, Homo sapiens
gccacatcgggggcaccaccctccatgcctttgcagcggtggtgacgctgattgaagacgggaagaatgactccc

SEQ ID NO: 678470 - DNA, 100 bp, Homo sapiens
ggaaaggtggcaaaggatagcagcaggtgggagctgaatgccatgaccaccaacagcaatatcagtcgccccatcgtctcctcccatgggtaggaggaag

SEQ ID NO: 678471 - DNA, 100 bp, Homo sapiens
aaagaagccaaagagaaaggtacctgggttcaactaaagcgccaggaagggagaggaggagaggaacagtgttatttgggggtcacagctctgcgtttgc

SEQ ID NO: 678472 - DNA, 100 bp, Homo sapiens
aacagttaatcctcaatttaagcctgatctaacccctagaaacagttggaaaggtctttcaagttcatgagagaagctgaggaccaactgaaggccattc

SEQ ID NO: 678473 - DNA, 51 bp, Homo sapiens
gccagaattttcaaaccggccaccagaaccccagaatatcgaagatgaagc

SEQ ID NO: 678474 - DNA, 88 bp, Homo sapiens
gaagagcgacaagccgctggcagccgcggatctcaccgccgctcaggaaactagatgatggccatttaaacaactctttgagctctcc

SEQ ID NO: 678475 - DNA, 75 bp, Homo sapiens
ctcagttggaagcagccgatccagcctgcggagcctgtggggcagccaagaccgaggataggtgtggccattggc

SEQ ID NO: 678476 - DNA, 80 bp, Homo sapiens
tgcagggcctgattgaggactgccagctggcgctgcagatcacaaaatttgtccaggatagacatagagctagaagaaac

SEQ ID NO: 678477 - DNA, 75 bp, Homo sapiens
ctgggtgcgttcagcggcattcaacaaatggcaggtagtaacactctggtacagatctccagaagtattgctggg

SEQ ID NO: 678478 - DNA, 51 bp, Homo sapiens
caggactgcatccggcactgcaacaatgttctccaaggagaagtacatcct

SEQ ID NO: 678479 - DNA, 100 bp, Homo sapiens
aaactgaacagttcgagattgtcgtcatcctagaaggcattgtggaaacaactgggccttgggtgtctccgtgactgactacacgttcgaggactgccag

SEQ ID NO: 678480 - DNA, 75 bp, Homo sapiens
gtgatgtgtaggaggaagagttcaggtgattatcctgaaccatccaggccaaataagcgccggctatgcccctgt

SEQ ID NO: 678481 - DNA, 82 bp, Homo sapiens
ctccactttcgccagcccgtgccgcgagcgcggcctgcaggaggaaattcgaaatgagtcccatgactatcctcatagagtg

SEQ ID NO: 678482 - DNA, 74 bp, Homo sapiens
caggaatatccatgtcggcttgtagagagattgcagaaccctgattgctgtccttcaacgtgttcattatgaag

SEQ ID NO: 678483 - DNA, 90 bp, Homo sapiens
tgcaaaccttgctttggattttatgtgctacagtctgcggaacggagcagtatttcaatgtggagtgaacagagtatctgccaagcccgg

SEQ ID NO: 678484 - DNA, 142 bp, Homo sapiens
ataccaggatttgcatatccttcaagatgcctgaagacaatcggaggggtatacaagcaagcgagcccaaacaaattcgaatatcttctaaaacaggaatacctctcaatgtcttaccaaagaaaggactcacagcaaagca

SEQ ID NO: 678485 - DNA, 100 bp, Homo sapiens
gtcgcccccatgctggattcccgggctgcgtactccaacttctggtgtggaatgacttcccaggttggatggcaagcatgtggtgtttggcaaagtgaaa

SEQ ID NO: 678486 - DNA, 100 bp, Homo sapiens
catgctccacttcagcttctttgtcaccataggagacatggacgaagccttcaaatccatcaagctcatcaaaaggagctgaaggtggtggatcatcgtc

SEQ ID NO: 678487 - DNA, 75 bp, Homo sapiens
tcatggatcagaggtcattagaggaaggagaggggccaatagaggtactcaagacaattgacgagggagatgccg

SEQ ID NO: 678488 - DNA, 97 bp, Homo sapiens
cagagttgaatgtcttctatgaggaaagtgtgcattttgacagagatcttccagaatttggtctccccgagtgaaagaatcaatatcaaattctgag

SEQ ID NO: 678489 - DNA, 51 bp, Homo sapiens
cggggtgccagaaggaaagcataggtttgatgaacttgtgaaaaaattcaa

SEQ ID NO: 678490 - DNA, 90 bp, Homo sapiens
cacaattacactgccacatatccctaaactggcgatggaatatgagaggagccctctggaaagaaaaggacagaccctgtgctttcatga

SEQ ID NO: 678491 - DNA, 82 bp, Homo sapiens
tttataacctctccaaaggagtcaaccgattctgcctgtccaagcctggtgccttatgcccgctcagaggcccacctcacag

SEQ ID NO: 678492 - DNA, 100 bp, Homo sapiens
cacactcgcttgacccctgctgcaattggactggtcgaattgacaaatcttaccctacagtatgtggccacacaggaccagtgctggacatagactggtg

SEQ ID NO: 678493 - DNA, 75 bp, Homo sapiens
catggctccctgcagtaccctttaacgatgaggaaactgaggcttggtgaagttacgaaacttgtccaaaatcac

SEQ ID NO: 678494 - DNA, 96 bp, Homo sapiens
agtgttctcaactcccacacacaggatgtcaagcatgtggtttggcacccaagtcaggagtgatgagccctcctcttcagctaggaaaatgacggt

SEQ ID NO: 678495 - DNA, 100 bp, Homo sapiens
gtgaagctgcagaccttcgcggattctggactctacttataatatccctaactgctggattctcctgttgcagcttttcttggacagtgacttactttga

SEQ ID NO: 678496 - DNA, 90 bp, Homo sapiens
ttccaaggcattgctgcaaaagtgggaactggagaaccctgctgtgactggccaagctctactccaggaagtgaaaatgtgctgcctcga

SEQ ID NO: 678497 - DNA, 76 bp, Homo sapiens
cgcccggataaggcggcgctgaacgcactgcagcctcctgagttcagattgacaagtatctctatgccatgcggct

SEQ ID NO: 678498 - DNA, 74 bp, Homo sapiens
taaggattccaagtaactcttatttgaagatgcaagtggaccaggaggaaccacatgttgaagagcaacagcag

SEQ ID NO: 678499 - DNA, 101 bp, Homo sapiens
agccagtggtcacagctggatgtttgcgacatcccagagagcttccagattctcgaggctggacagtccaagatcaaggtgcctgcatctggcgtctagtg

SEQ ID NO: 678500 - DNA, 51 bp, Homo sapiens
ggggaatagactccatctatccatatgagaccaagatcactccatggatga

SEQ ID NO: 678501 - DNA, 113 bp, Homo sapiens
cgttgccagagtgtgggaggagagagcaagcagggaaagagagcgccaggtgcttagcaggaaaatactgaatgaactgtcctctgatgtgcctggtgttcccaagattgaag

SEQ ID NO: 678502 - DNA, 100 bp, Homo sapiens
agacttttctggagacatgtgcaagctcaaatgggtggagatttctaatgaggtgtgctggaggaagcggagttttacaacatcgcgtcccttgtgcggc

SEQ ID NO: 678503 - DNA, 90 bp, Homo sapiens
atggagcttaccgtgtctccaatgacaaacgagatgtaaaagtgtcactgtgtgaccattgtgaggtagatattttgttctaattttcca

SEQ ID NO: 678504 - DNA, 80 bp, Homo sapiens
gttcatgtgaagcctgagaacctgcgtttggcggaggggtggcctggaggccaagcagatgtggcagttctgcagcagaa

SEQ ID NO: 678505 - DNA, 71 bp, Homo sapiens
catcggctgtcttgaatcctttctacaaggagtgggtcactgattctactaccatctgtcagcgtggattg

SEQ ID NO: 678506 - DNA, 90 bp, Homo sapiens
cccaactgttcacgcagacctcgcctgtggcagatgcaccgctctgggttcccttcattatcctgtggaagtagcggtagcagttcatcc

SEQ ID NO: 678507 - DNA, 101 bp, Homo sapiens
cagctgaacgagaaccaagtgcggacgctgtgcgagaagacgcaaacatgcagatctttgtgaagaccctcactggcaaaaccatcacccttgaggtcgag

SEQ ID NO: 678508 - DNA, 100 bp, Homo sapiens
accacatgttcctgagcttgagatgctaggaagacttgggaatccaggtaaaaatggcttgtctaatagctgcattttgttagataaatgtccacctcca

SEQ ID NO: 678509 - DNA, 82 bp, Homo sapiens
agaagaaccgccgagtggtgctggcctccttcctgctcctgctgctggggctggaatgcgatgctggtggcagagaaggcag

SEQ ID NO: 678510 - DNA, 50 bp, Homo sapiens
cggaaaccggtagcgcttgcagcatggttgaagaagcctcagcggaggcg

SEQ ID NO: 678511 - DNA, 51 bp, Homo sapiens
aggagaacgacggctactttcggaagataacaacgaacttgatgcaagtga

SEQ ID NO: 678512 - DNA, 75 bp, Homo sapiens
ggaccctggtggaggaagaaagggtcaagactgacaatcccgtgtaaggtgtttctgggaaccggcacaccctta

SEQ ID NO: 678513 - DNA, 73 bp, Homo sapiens
aaaactcagagaaattccaactgctgctcttgttcttggtgtggtggctggaggtggccgaattgacaaaccc

SEQ ID NO: 678514 - DNA, 82 bp, Homo sapiens
tccctcccctctccgggctgccgggacaactcggggcggccactcttgccaggaggcggaactactggagaccacgtgccgc

SEQ ID NO: 678515 - DNA, 100 bp, Homo sapiens
tgaagattactggatgcacgtacagaatacattcagccgtcagaacttcctcaacaatttccaaactgctaaagaagctttgagtacagccacagtccag

SEQ ID NO: 678516 - DNA, 98 bp, Homo sapiens
ggagcaggacgcgccggggccgcctcctcccgcacggacccatgaaccagccgggcggcgcggcggctccgcagcgacatctcgaatcagcgatgcac

SEQ ID NO: 678517 - DNA, 50 bp, Homo sapiens
caagcccgcgcccaacaccttctatgtagcccgtggaccgggagcccgtg

SEQ ID NO: 678518 - DNA, 74 bp, Homo sapiens
aattagaaaggagctgcttcccaataaggaaacagaactgtggctgcaccatctgtcttcatcttcccgccatc

SEQ ID NO: 678519 - DNA, 83 bp, Homo sapiens
cagaggtttcgattcccttcacccatcttaaaagtccaatatcatccacgagatcatggtggtgaccgcggtggcttcaaaaa

SEQ ID NO: 678520 - DNA, 96 bp, Homo sapiens
tttaagagagctctggacaagctggaatgcatccaagagaatccctcaacatgctggtgagaagccctaccactgcaactgggacggctgcggctg

SEQ ID NO: 678521 - DNA, 83 bp, Homo sapiens
atattgtgctgcttgaagggattacaccaaatatacagaaggtgggagtcaatcattttgacaagtctcctgaaaggaacagc

SEQ ID NO: 678522 - DNA, 82 bp, Homo sapiens
aatatggtgaactcattgtcttagggactttgtgttttatgccccacgtctgagaatcaacaagcggatcctgcagctctgc

SEQ ID NO: 678523 - DNA, 75 bp, Homo sapiens
gtttgagaaaaggcctaagaattttggcattggaggaatgccagctcctgagcaggcctcattggtggaggaggg

SEQ ID NO: 678524 - DNA, 75 bp, Homo sapiens
agattccattagctgctgtcatcaagccctttgccaccattccttcaaatgaggatccggagtgttggaacagca

SEQ ID NO: 678525 - DNA, 100 bp, Homo sapiens
agaactggggagggactcccggaggctgacgggaaagccaaagagcagaaacgtatgtttgtgggatactcttgtagcacctgccaatagtttagtccat

SEQ ID NO: 678526 - DNA, 90 bp, Homo sapiens
ttaccactgcctggttgcagaagtgccgaaagagcactggactccggaagaacaagtttgccttctcctatgttttccagaaatgacttc

SEQ ID NO: 678527 - DNA, 82 bp, Homo sapiens
agagcgtgaccgagagcgcgaatatcgtcatcgttagaaggttgtctgcattcaaaagagcattctattaaagctaccttaa

SEQ ID NO: 678528 - DNA, 100 bp, Homo sapiens
gaagcctttatgcctttctcaataggtacaccaggggttggaaaaaccacactaggcaaagaacttgcgtcaaaatcaggactgaaatacattaatgtgg

SEQ ID NO: 678529 - DNA, 100 bp, Homo sapiens
accccctgtccccgcttcatcaagcacaaagatccagtttgctgaccagaagcaagaattcaacaaacgtcccaccaaaattggacgtcgctctttgtct

SEQ ID NO: 678530 - DNA, 75 bp, Homo sapiens
caacaaagtcaaggtccccctgcagggggaagacgttttcatcccgctaatcttgggaataagaggaggaagcgg

SEQ ID NO: 678531 - DNA, 76 bp, Homo sapiens
attgttttggcctaggatcatccaggtgtgggcccatcgctggatggatctgtcagaacacggctttgggctggcc

SEQ ID NO: 678532 - DNA, 100 bp, Homo sapiens
aattgaggacgctctggatgactcaattggagatgtttgggatttcaatcttgatcctatagcattaaagaggttggaaagaaccatgactgtattcagg

SEQ ID NO: 678533 - DNA, 75 bp, Homo sapiens
aaaatcacagtggatgggccccgagaacctcgaagaagagctgaagagagacctgaaaattaagaaagaaaaaga

SEQ ID NO: 678534 - DNA, 75 bp, Homo sapiens
gcggcctcacatcggcggcgcctgccggcggggacaagaaggtcatcggttttaaaatcaaagatgggaaaatcg

SEQ ID NO: 678535 - DNA, 100 bp, Homo sapiens
cagaagctgaaatgacagcagtggtactgcctgaagttttcatgggctgagctgctgagttcagcctgggaactgaggccaacaagggagtctcctcggc

SEQ ID NO: 678536 - DNA, 50 bp, Homo sapiens
aggaaacgctgtcactgtggaaacgctttgcccgaagtttttacatacaa

SEQ ID NO: 678537 - DNA, 96 bp, Homo sapiens
aatgaagttgacctggatgaactcatccttcaaaccgacgcatactcaggagcagaggttgacaggactgaggtgattcgcacctgcataaaccca

SEQ ID NO: 678538 - DNA, 75 bp, Homo sapiens
agggtcacgagatgagcgctatcggtcaggtatccgttacagcactgatgtgagtgtagatgaagtaaaagcttt

SEQ ID NO: 678539 - DNA, 96 bp, Homo sapiens
tttccaccgaggaaaaggaatcgtatcgtatgtccgctatccagaacctccactctttcgtaacaacatgctgtaccccaaggaagacaaggagaa

SEQ ID NO: 678540 - DNA, 80 bp, Homo sapiens
gcggcgggaggagcctccgggagccgacagttagaatcagaaactgggaccacagaggagcacagtctaaataaggaagc

SEQ ID NO: 678541 - DNA, 51 bp, Homo sapiens
ctgactttcagctatggaatcgtcaaggatgctatctaaatgggcctttta

SEQ ID NO: 678542 - DNA, 75 bp, Homo sapiens
aagccgacaaggcgttcaagcgaaaacatgaccgctgagcccatgagtctttgagtgattgcagtatgactccat

SEQ ID NO: 678543 - DNA, 82 bp, Homo sapiens
aggaggaggtcctggagatggagcgcaaggaggagcaggccgaggccatatccgagcggaccaagaatcgccttcagccctg

SEQ ID NO: 678544 - DNA, 74 bp, Homo sapiens
ggcaggagctgttggagctttgcagctgacctacatctcgaaggatggcaatggttatatcagtgcagcagaac

SEQ ID NO: 678545 - DNA, 75 bp, Homo sapiens
gctgaacaagagaaaaaaaggaaaatgctttggcagggcaagaaagaagggatttaatccagagactgacttcac

SEQ ID NO: 678546 - DNA, 96 bp, Homo sapiens
gcgaatatcgtcatcgttagaaggtgcggtggctactaaagttcgaaggcacgatatgcgtgtccatccttaccaaaggattgtgaccgcagaccg

SEQ ID NO: 678547 - DNA, 90 bp, Homo sapiens
atctgtcctccacagaggctttttgtgtgttttatcatctaaaatccaatccctcggttggttcattctggctccggatgtcgatccccc

SEQ ID NO: 678548 - DNA, 75 bp, Homo sapiens
gaaagtcttgtggaagatctggaagaaacagacagcacttcaaatgcaggcggggcgaaggcggagccccgggac

SEQ ID NO: 678549 - DNA, 48 bp, Homo sapiens
gagggctcgcagcctcggcctggtcctccagcagcctgacctgagtgg

SEQ ID NO: 678550 - DNA, 50 bp, Homo sapiens
tgtgatggcccaggttcttcaaaagatggatcgaaaattgtacaatttgg

SEQ ID NO: 678551 - DNA, 90 bp, Homo sapiens
ggtttggattccatcagtctgttcggcctgccatgtggaaaatgatgcttaatatcgatgagtgatagattcgtgtggcctttcaaatga

SEQ ID NO: 678552 - DNA, 75 bp, Homo sapiens
agagaggatgctggtttcttactaccgatacagattgaagatctcaaacagacaaatcatggcttggaagaatat

SEQ ID NO: 678553 - DNA, 100 bp, Homo sapiens
cactaaaaattatccctactacaggactgcggacaagggctggcaggttggtgttcgaggaagagacattgttgttcttggtgtggagaagaagtcagtg

SEQ ID NO: 678554 - DNA, 75 bp, Homo sapiens
gatattcccaggacagcttcagcaaacactacaagtccacggtgggagatgaagattatggaagagattcgggcc

SEQ ID NO: 678555 - DNA, 100 bp, Homo sapiens
tcaggaaaactcgtgtccatcaaaatccagatgctggatgacacccaggaggcatttgaagttccatccaagtggtaagaagttcagaagcaagcctcag

SEQ ID NO: 678556 - DNA, 100 bp, Homo sapiens
cctactacgcgtacgtggtggagctctgcgtgtgatggattggatgctttggtatatgatttggattttcctgccttaagaaaaaacaaaaatattgaca

SEQ ID NO: 678557 - DNA, 90 bp, Homo sapiens
cggatgccctgcagtacctgcagaaggtctctggagacatcttcagcagggctgcacaaagatgttcagggataactcggccatgagaaa

SEQ ID NO: 678558 - DNA, 50 bp, Homo sapiens
gctgcctattctatttataacacgggcttatttcaaaacctttgtccctc

SEQ ID NO: 678559 - DNA, 96 bp, Homo sapiens
ccgctcttccaaacagtgccggaatcgctacgagaatgtcatcattccacgagaggaggggaagaaaagttgccagacggccagcattgccactgc

SEQ ID NO: 678560 - DNA, 83 bp, Homo sapiens
ccgacatggcccggaggcagcagaagatgaagttggtatgtggcttcattctggaacctcggctgttgattcaacagagaaag

SEQ ID NO: 678561 - DNA, 88 bp, Homo sapiens
gccctggggctcctgggcgcgggcagccctctgccttcctggccgctcccaaatataggcacacgactgtgctttcataagggaagca

SEQ ID NO: 678562 - DNA, 82 bp, Homo sapiens
gaaggcgcatcactcccagctgcgcaaagcttgcgaggtggcgttaggttgtggcagcactgcctgaaggtatgagaccaga

SEQ ID NO: 678563 - DNA, 98 bp, Homo sapiens
gagaacccccagtacttccgtcagggacacaactgccacaagccggacacgtgaatctgtcttgaactatcgtttcgatcctctcggcattgttgatg

SEQ ID NO: 678564 - DNA, 100 bp, Homo sapiens
ctcgcgctcctgggactgggcgtcgtgctcgtgctctccagcttctttgcactggggttcgctggaactttcctaggccaggacagctgatggttgtggc

SEQ ID NO: 678565 - DNA, 50 bp, Homo sapiens
ctccaagttctaccagccctacggaagcacactgagaaagcggaagatgt

SEQ ID NO: 678566 - DNA, 83 bp, Homo sapiens
atttacaagatgatatacctacaacattccagggtgctacggccagtacatcgaactgaagatgtgtggctacaatggctctg

SEQ ID NO: 678567 - DNA, 101 bp, Homo sapiens
aaaggaatcatcaagaaatgtcgcacgagcccagacgcctttgtgcagctggccctccagctggcgcactacaaggctggagtgtagtggcatgatctcgg

SEQ ID NO: 678568 - DNA, 82 bp, Homo sapiens
cttatactcctcccagtgacgggtctggagtgcgtgggggaccggctgttggcggatgtggacgagtgctcactagcagaaa

SEQ ID NO: 678569 - DNA, 100 bp, Homo sapiens
cattgtggacagtgacagcgatgctgaggatcgaggaacgttgtctggaaccctcagtgctgcgtctagattctgcaggggaggtttgctgggaccttgg

SEQ ID NO: 678570 - DNA, 125 bp, Homo sapiens
ttccaggtagacatggaggccgtcggggagacgctgtggtgtgactggggcaggaccatcagagccccccaagatgaacccagtggtggagccactgtcctggatgctgggcacctggctgtcgg

SEQ ID NO: 678571 - DNA, 75 bp, Homo sapiens
ctggaattttggcatcaaggacaaacccaccttcatcaaaggggatacacacctgctaaaactgcttaaaacatt

SEQ ID NO: 678572 - DNA, 100 bp, Homo sapiens
gtttggacaatggcaatagcttggatgttttaaagaaggaatggatttcagtctttttaaagaggtctttgagtcttccaaaatggatttcattttgtct

SEQ ID NO: 678573 - DNA, 82 bp, Homo sapiens
ggggcgaggctgtggtggcccgagacaatgcagatcttcgtgaagactctgactggtaagaccatcaccctcgaggttgagc

SEQ ID NO: 678574 - DNA, 74 bp, Homo sapiens
cgagaccagctgcgttcagcagccgccctgcttcccgctcaagatccttcaaacatgatgtgagaggaaatgcg

SEQ ID NO: 678575 - DNA, 73 bp, Homo sapiens
ccctggcctcttgggatgcaaagccaggacggcaaccttcccaccctcatatccagcgtccaccgcagccgcc

SEQ ID NO: 678576 - DNA, 104 bp, Homo sapiens
gcggatctagcttctcctcgccttcaggatgaaagctcagggggaaaccgagggccttctttcaaggcaaattgaaaatcactggcaacatgggtctcgctatg

SEQ ID NO: 678577 - DNA, 87 bp, Homo sapiens
gagcccaggccacagtaccctattcacgctctgtgcttgtgccaaggtcagatgtggaggcactgaagcgagagctgcaggtgctat

SEQ ID NO: 678578 - DNA, 100 bp, Homo sapiens
cagcccagagcctttgccaagaacccccatttgcgttatatgtgaaaggtgtagcagtcactcggcctacacccacagcatcgaccttgtgaacccagcg

SEQ ID NO: 678579 - DNA, 100 bp, Homo sapiens
tgttgtcagaatgctcttaatgagagtgtgaacatggctacgcctcttcattcccgtccatgccgagcccccgactgcagcattcaaagcccccacggag

SEQ ID NO: 678580 - DNA, 75 bp, Homo sapiens
taaccaacctcagctttacaaaccctgaatttataactgagtattgataacagaacatggcgacttgggaaatgg

SEQ ID NO: 678581 - DNA, 50 bp, Homo sapiens
ctgcccttcgacgggcacaacctcaagacgaaggggaggaccaggctggc

SEQ ID NO: 678582 - DNA, 98 bp, Homo sapiens
cgggcaccagagtgccgagcccaggacgcccccggcccaggcccttggtattaaaggtggaagaaggtccatatctttttctgtgggtgcttcaagtg

SEQ ID NO: 678583 - DNA, 75 bp, Homo sapiens
caatgagcagttcttcgggccagggacacggctcaccgtgctaggaatatattaaaggaatctgtgaacctgaac

SEQ ID NO: 678584 - DNA, 100 bp, Homo sapiens
gcagggcccggcagccgagcagcctggcaacggcggtggcgcccggagcccgagcttcctgcctgacacagctcacttcaagaagtgcacaatgtcagaa

SEQ ID NO: 678585 - DNA, 83 bp, Homo sapiens
caagaagcacgtgcctgaagacttctggccgccgcagcccaagctgtacaaggcgttcccacagctgtgcagaacttagcgcc

SEQ ID NO: 678586 - DNA, 100 bp, Homo sapiens
tcccgctgttgctcctccttctgcccttccttctgtatatggctgcgccccaaatcaggaagtgggaaaactcttgcctttgccatcccaatgattcatg

SEQ ID NO: 678587 - DNA, 83 bp, Homo sapiens
cgcaggctttaagatgatgagcaaagcctgccttgctctgccaggaaccatgagtgaggcccgcagggacagcacgagcagcc

SEQ ID NO: 678588 - DNA, 75 bp, Homo sapiens
agccaagctcgtagcctgccactccgtgcatgtgaagttcatttccaatccgccctccatggtggcagcggggag

SEQ ID NO: 678589 - DNA, 50 bp, Homo sapiens
gcctccaccccccactcgcagtccccaagacaatgcagatcttcgtgaag

SEQ ID NO: 678590 - DNA, 73 bp, Homo sapiens
aacagcagcaagaaatcctggcggcgaagccctggactaaggagaagatgagaagtttttgtctgaagttttt

SEQ ID NO: 678591 - DNA, 51 bp, Homo sapiens
agggccttactccttcacagatcgaatgtgtgtaagaactgcagcggaacc

SEQ ID NO: 678592 - DNA, 96 bp, Homo sapiens
aaagaggatgagaaggacgacaagcccatccgagtgtttgccagctctgagcctgtgccaggattccagggggataccctgcagctagcattcatt

SEQ ID NO: 678593 - DNA, 75 bp, Homo sapiens
agaagaagaagcaggatgaactgaaacggattgccagagaattggcagaagggtccagtgtccatcaaagtccag

SEQ ID NO: 678594 - DNA, 99 bp, Homo sapiens
tgccctccgggtcacaggataaggaactgcaagcacatgttgaccagataactgaaatggcagcagtaatgaggaaagccattgaaattgacgagcaac

SEQ ID NO: 678595 - DNA, 75 bp, Homo sapiens
ggctggacctgaaggaggccggtgactttcacttccagccagctgtgaagaagtatgtgggtgccccggtggctt

SEQ ID NO: 678596 - DNA, 75 bp, Homo sapiens
gtgattctcctcatcagaatctctcaagatgagggccccaaggctgttgcagctcctcgacctgatcggttggtc

SEQ ID NO: 678597 - DNA, 100 bp, Homo sapiens
acttggtcattcttcgtgggaaagatgtgcaaagtgcagatgtggggagaaaactggttgtcctggatgtttgaaaagttggtcgttgtcatggtgtgtt

SEQ ID NO: 678598 - DNA, 96 bp, Homo sapiens
cggagttcagactgacaccccacatcgacaatttggaggtggcaaacagcttcgcagtcactaatgcttattggaaaatgccttttatgaacatgc

SEQ ID NO: 678599 - DNA, 75 bp, Homo sapiens
ataacattggtattgctggtatgattcctctcccttagtgctttctcctgctcaagacagccacacgaacacgga

SEQ ID NO: 678600 - DNA, 100 bp, Homo sapiens
aagggagagaagtggatttgggagacatttaggagatgttttctggcaaaggccttcctgcatttatgaattctctctcaagaagcaagagaacacctgc

SEQ ID NO: 678601 - DNA, 82 bp, Homo sapiens
cttggactgagtcctgcaggacacaggcacaattcagattcagaagcgtcaacagttagtcagaaagatacatgaagatgaa

SEQ ID NO: 678602 - DNA, 97 bp, Homo sapiens
cgctcagctttatcggccgcatccggcctttggcggagaaaaccggcatctgcaaaattcggccgcccaaggagccagcaccgctctttgaccttgc

SEQ ID NO: 678603 - DNA, 101 bp, Homo sapiens
agaaagaggggaatgttggaaaactgcattcttcttagaataactgaagtgaagtgatggactccgatttggagagtagtaagacgtgaaaggaatacact

SEQ ID NO: 678604 - DNA, 75 bp, Homo sapiens
tcaaagatgcccaggagaagctggagctggcagagaaaaaggccaccgattgtgttgcctgtgagtgtgacctcg

SEQ ID NO: 678605 - DNA, 100 bp, Homo sapiens
cgtcatccttgaagccgaccagaatgatagccagtccctggagctggtgcacaggttccaggctttaaaggagatagatgaagttggggacctattgcag

SEQ ID NO: 678606 - DNA, 100 bp, Homo sapiens
aaaaaagattcagattacgaggattatggatgaacgtaacagacagaaaaggcgacggcggattgacagaagtatgattggagagcccacaaactttgtg

SEQ ID NO: 678607 - DNA, 75 bp, Homo sapiens
atgctcaacttcggtgcctctctccagcagactgcgagtttatgtggccgaggcagacaagtggaattaggcctt

SEQ ID NO: 678608 - DNA, 97 bp, Homo sapiens
gcgcgcctgcgccgccggggccgctgcaaggggaggagagaggccgcctcaggttgaaatcacaaagattagacacctttttagataggtgttcttc

SEQ ID NO: 678609 - DNA, 82 bp, Homo sapiens
cggcggctcctccgggggacccgcggtccccaccgtgcagcggggcatcatcaagatgagacggtctcgccacattgcccag

SEQ ID NO: 678610 - DNA, 75 bp, Homo sapiens
aaaccttgcttctaggagataaaaaggtggaattctactaagtatcagtcggccctacaagacaaagcccaccca

SEQ ID NO: 678611 - DNA, 75 bp, Homo sapiens
caactcagaatgcttctgagaagatggcccactgcgtgaccttggttcagctgtccatttcctgtgaccatctca

SEQ ID NO: 678612 - DNA, 82 bp, Homo sapiens
ccaacaccttcctgtgcagtcctgttggaatttattgctagtgcaactactgctccatcgatcccttcacatttgtctcctg

SEQ ID NO: 678613 - DNA, 75 bp, Homo sapiens
taagtcccccaaagatgagatttacctgtgagatgtttcatcccaacaagagagcaggagattcggatgggtcag

SEQ ID NO: 678614 - DNA, 100 bp, Homo sapiens
gctgttctcgctccggagccgctgcacatttcgttggttgaatctggcgatgtggaacccatggatatggagggctgactatatacaccatgttttttcc

SEQ ID NO: 678615 - DNA, 76 bp, Homo sapiens
ctacatcccgcagtacaagaactggagagatttgaggcttaagcaacttcttccggggaagagtgccagtgcagcc

SEQ ID NO: 678616 - DNA, 100 bp, Homo sapiens
ccagagctattgccttagatccttcaagtggatacgtaggtaacctttccagagatgtgacagaagtccttatacttcagttgttcagtcagattggacc

SEQ ID NO: 678617 - DNA, 50 bp, Homo sapiens
cacagaccagcccagcattcagtgtaaacaggaacatcgataagtagtgt

SEQ ID NO: 678618 - DNA, 83 bp, Homo sapiens
gctcgctctgggagcctagaatgcatcagtgcccttgtggcgaatggggctcacgtcgagtatttataacagcaatgatgtag

SEQ ID NO: 678619 - DNA, 105 bp, Homo sapiens
cccacaggattattctacaggtgaaaaagcatccccagacatccagttcaggagatccttgtcaagatggtatattcatttcaggacagcagaactactcatcag

SEQ ID NO: 678620 - DNA, 98 bp, Homo sapiens
gcagccggccaccgccgagacccagcacatcgccgaccagccaatggagatcttcgtggatgatgagacgaagttgacgctgcatgggttgcagcagt

SEQ ID NO: 678621 - DNA, 100 bp, Homo sapiens
catccctcgtcgaaaggattggattggcatctttagagtgtgggcccatcgctggatggatctgtcagaacacggctttgggctggccctgctcaacgac

SEQ ID NO: 678622 - DNA, 100 bp, Homo sapiens
ctgggggtggctcaccgggcagcgtgggtgagcggcgcagcggcggcagcggagagcgagagaggggagcagaattcctggaaaactcaagcaattcgta

SEQ ID NO: 678623 - DNA, 74 bp, Homo sapiens
cgagtgggagcaccaggatctcgggctcggaacgagactgcacggttcgtgctggccgtgggcagcgccgtctt

SEQ ID NO: 678624 - DNA, 100 bp, Homo sapiens
gagctcgccccgaacgggggtcttcctcctccgccgttgacagggtgccaagaagagtgctattggtcagcgcattgtggcaactctaccatatatcaag

SEQ ID NO: 678625 - DNA, 100 bp, Homo sapiens
ctcctctctccttggcctctcctgggatcggcccaaggccagttctccgcagtgtttcatcattacgattagcctataaggatcttgaaattcaaatgaa

SEQ ID NO: 678626 - DNA, 83 bp, Homo sapiens
ccggggaccaggacagtcgcgagcttccccgggcgctgcctggacaggcctgcctgcgtgctgggacatgtctggcctccaag

SEQ ID NO: 678627 - DNA, 98 bp, Homo sapiens
gatcaagaccagaaagaaattattgataccaatggagctggagatgcatttgttggagggcgaggaggcttccgaggaggcagaggaggaggaggtga

SEQ ID NO: 678628 - DNA, 75 bp, Homo sapiens
gataaactcaacatcgacagcattatccaacggctgctggaagattgatgactacagcatggttcgatttttacc

SEQ ID NO: 678629 - DNA, 96 bp, Homo sapiens
atggtcgggacccctccaaggacagcagcaccaccttgtggagtacatggaacgccgactagctgctttagaggctctaagtatgcagtcatctcc

SEQ ID NO: 678630 - DNA, 100 bp, Homo sapiens
taacagccagccactgccctggaggaccagggggagagtttggagtgaagtttaatgttgccaatggaggcacagaaaactgaatctgtagataacgagg

SEQ ID NO: 678631 - DNA, 75 bp, Homo sapiens
gtttttccaaatattcatctgtacagagacttcagatggattttaaaattgaacacacttgggatggttttccag

SEQ ID NO: 678632 - DNA, 90 bp, Homo sapiens
ggaaagccagtgttgtggaccctagcacagagggtggtgagcagctggatcgagaggcgcaaggtgcagtcggagaaggccaacctgatg

SEQ ID NO: 678633 - DNA, 80 bp, Homo sapiens
gtgcggcgggctgtcttgcagcttccaggctggccatgggcaagatgatggagcaggggccggtgctgatcatcaccttc

SEQ ID NO: 678634 - DNA, 82 bp, Homo sapiens
ggaagatcatccgcaaggaaataccagccaaaatcatttttgaggatgaccgggtgtcgtgaaaactacccctaaaagccaa

SEQ ID NO: 678635 - DNA, 50 bp, Homo sapiens
ctggtggagacctcgctgaaagtggtgatcgccgctcgggaatgcgggcg

SEQ ID NO: 678636 - DNA, 101 bp, Homo sapiens
aggttattctggtacaagttaacccaggagaagcatttacaataagaagagaagatggacagtttcagtgcattacagctttgaaactcagaggaatggac

SEQ ID NO: 678637 - DNA, 83 bp, Homo sapiens
acgcgcggcgcatcacggtgcgcgtggccgcttcggaaccaaaaagaagcttcccagagccggggccaggagccccaagcgcc

SEQ ID NO: 678638 - DNA, 75 bp, Homo sapiens
aaaacccttctaccaatgtctcagttgttgtttttgacagtactaaggatggtgttcattgtactcatggcttca

SEQ ID NO: 678639 - DNA, 90 bp, Homo sapiens
cacatcttcagtatatggttcccttgcatctgttctagcacaggaaaggcgtaggaggaggagcaggagttcttccagatcgccaagaac

SEQ ID NO: 678640 - DNA, 75 bp, Homo sapiens
ctgccatggagcccagcagcaaggacgaatgccttagtttccactttccagcctggatcccctcacactgaaccc

SEQ ID NO: 678641 - DNA, 76 bp, Homo sapiens
aataaaaggcctgacatatctgagggagaagcacaagatcatgcacagaggggtggcctggaggccaagcagatgt

SEQ ID NO: 678642 - DNA, 100 bp, Homo sapiens
aggagctgaaggagctgatccagaaggagctcaccattggctcggatggatagaatgacagaagatgctcttcgcttgaatctgttgaagcggagcttgg

SEQ ID NO: 678643 - DNA, 75 bp, Homo sapiens
tgtattgggcgcaagaagttcaacatggaccccgccaaggcttcctgttacctgaaacagggcaaatatgctgag

SEQ ID NO: 678644 - DNA, 75 bp, Homo sapiens
cccctctccgccccccaggaggggcgagagggagccgcagctgatgtcagtgctatgaagggaaatcctccaaag

SEQ ID NO: 678645 - DNA, 100 bp, Homo sapiens
tcctgcatgctgcgttccatgaaggttcagcagactgtacaggatctttttggcagagccccaagtaaagctgtcaatcctgatgaggctgtggccattg

SEQ ID NO: 678646 - DNA, 74 bp, Homo sapiens
ccgcgccgacggctgctcaaacatcaggtgctgagcttgcaagacctctgctgccgggcggtcgtgtcctgcac

SEQ ID NO: 678647 - DNA, 82 bp, Homo sapiens
tctcagcatgattgcttcccattttgtgcctcgtctcccatccatggccggggtcttttctgtaagagaaacattgatgcag

SEQ ID NO: 678648 - DNA, 100 bp, Homo sapiens
taaaatatggaggctttgttgtgagaagaactactgaattaactgttacaggtcagtcaccacgaacaggggcactcggcatgctgccccagcactggag

SEQ ID NO: 678649 - DNA, 99 bp, Homo sapiens
ccaacacctgagcacaaagaagaggaagcagggggcttcattgcaaacctggagatcgccacatcacagaatcgtatctatctcacagctgacaacctt

SEQ ID NO: 678650 - DNA, 83 bp, Homo sapiens
gtggagcagaatggtgagaagtttgtggtctctcaggcagctgcagagcttcaacagtactgtatgcagaatgcctgcaagga

SEQ ID NO: 678651 - DNA, 74 bp, Homo sapiens
ttgtattaatggatcacattttgaatttgaagggaatctaagggaggaaattatcaactgtgcacaaggaaaaa

SEQ ID NO: 678652 - DNA, 82 bp, Homo sapiens
cggcgcgggaggtgaagttgctgctgttgggctttatcctgtggataaacgcagagtgaacgagtttggggagtcctacgag

SEQ ID NO: 678653 - DNA, 75 bp, Homo sapiens
gacaagaaggacagagacccccccaaaagttcgctgagtatgaagatggtgatctgtcatcatggatcaacaggg

SEQ ID NO: 678654 - DNA, 99 bp, Homo sapiens
ctattagaaagataatgctcttggaatttagaactttacagactagcatggcaaagcttctctccgatcttagtgtggacagtgctcgctgcaagcctg

SEQ ID NO: 678655 - DNA, 82 bp, Homo sapiens
accctggaaggattatacctgcttgttgtccctggagcaactataatggatttccagttcttaggaacaatttatttgaaag

SEQ ID NO: 678656 - DNA, 75 bp, Homo sapiens
caacgacgttccatctgtggaaggacctaccaaccagaactgtcatacataaagtacacagaaatgaagagaaaa

SEQ ID NO: 678657 - DNA, 82 bp, Homo sapiens
tttcatctaacttgtcatgttccaacactacttagctttccaagatcctgataacttaagtgactctctcttttccggtgat

SEQ ID NO: 678658 - DNA, 82 bp, Homo sapiens
agatgtgggtgggatggaggagacccggatgagggcttccacattgctctctaagcacacagagaccggtgaggaggtgtta

SEQ ID NO: 678659 - DNA, 87 bp, Homo sapiens
ggcgctcatggaggtgtctgtgtctgaggaattacggaggttgagctggtccggaatccctaagccagtgcgtccaatgacgtggaa

SEQ ID NO: 678660 - DNA, 89 bp, Homo sapiens
cgtgatcaagtaccttgagacactcctttactcacagcagcaggcattgtgtccagatctggcaccctgacttatgaagcagttcacca

SEQ ID NO: 678661 - DNA, 100 bp, Homo sapiens
gttcgacacccaagagcagcttgtgcacgtcctctcagggtgcgccatcattgtccgaggtcagcctcgtggtgggcctcctcctgagcggcagatcaac

SEQ ID NO: 678662 - DNA, 83 bp, Homo sapiens
gcggcaccaaggcccccaagccctccttcgtgtcgtacgtacgccctgagataaaaatctggataatgccgcagaagcagctg

SEQ ID NO: 678663 - DNA, 50 bp, Homo sapiens
ttttgcttgcagttaggtcaagtggaggcttgtccagccggaagccctga

SEQ ID NO: 678664 - DNA, 88 bp, Homo sapiens
ttgttttttcctgtatgaagcggttggcaccactgaagtgaccgaatgagaggtgagagctacatggaagaggagataattttggaca

SEQ ID NO: 678665 - DNA, 100 bp, Homo sapiens
gaaaaccccgaggagccctgttccaaagcctcctggaccgtccaagaagttatgaagacagtatggagtttccagaccatagtagacatttgctacagtg

SEQ ID NO: 678666 - DNA, 76 bp, Homo sapiens
ccaactccaatgggcctttccagcccgtggtccttctccatattcgagggcaaagagattgaaagaggggagtcac

SEQ ID NO: 678667 - DNA, 98 bp, Homo sapiens
gccgtgctatggccctgtaccacactgaggagcgcggccagccctgctcgcagaattaccgcctcttctttactgttccatttcctccaagtcaccgg

SEQ ID NO: 678668 - DNA, 75 bp, Homo sapiens
cacggtgtggctggcggcctacggactcttcaccctctgcgagctgctaaatcctgaagatgacctcttaccagg

SEQ ID NO: 678669 - DNA, 88 bp, Homo sapiens
gctctttgcatccggagagtggacaagaaactataatgatccagccttttatgaagaatgcaaaatggaatacctgaaggaaagggaa

SEQ ID NO: 678670 - DNA, 100 bp, Homo sapiens
gcaggtggaattatgccctgttggttccaatgctgggattggctgcttttcgaagaaaacaggcagattttggcgcggcaaaagtcaaactcacagtcgg

SEQ ID NO: 678671 - DNA, 100 bp, Homo sapiens
ctgcacctcccgcgccgcacggtggacgagaaaattgtgttaaggaatggtactgaggcatttgactcctgggagaagccccctctgcctgtgtatactc

SEQ ID NO: 678672 - DNA, 51 bp, Homo sapiens
gacctggcaaatgacatcatgacactgatgctgtgggccctgagggaaagg

SEQ ID NO: 678673 - DNA, 100 bp, Homo sapiens
accaggcccagaggtccgtgcggcagcagctccagagctttgtcaaagagtgtggcacattggttgacctttgccagggcccccaccttcggcatactgg

SEQ ID NO: 678674 - DNA, 75 bp, Homo sapiens
acagcactgaggacaaaaccaatgaggtcttcaaagcttcacctttctccaaaggcagatgtgaagaacttgatg

SEQ ID NO: 678675 - DNA, 100 bp, Homo sapiens
ctgtctctccaaggaaaactaggcccctgcgcggccaacgcccaggatccgcaagctgcgcgcccacgagggcgatgccagtccctccactccagaggag

SEQ ID NO: 678676 - DNA, 82 bp, Homo sapiens
ggaagcagccgatccagcctgcggagcctgtggggcagtgttggctgcaccaattctagaagtaagctctccaagttcagac

SEQ ID NO: 678677 - DNA, 90 bp, Homo sapiens
cccgttctctcggctggatgttctcatcgtccctgccaactttccaagtctggggatggccaggtattcacttacaagcagagcacaatt

SEQ ID NO: 678678 - DNA, 75 bp, Homo sapiens
cagaaatgaagcagagtggcctaggttgattgcactgccaacactaacacctgtaataaatatggagtcagtgga

SEQ ID NO: 678679 - DNA, 80 bp, Homo sapiens
ggcgccgcgccgcacgagcaccagcctagagccaggtgagaagccctaccactgcaactgggacggctgcggctggaagt

SEQ ID NO: 678680 - DNA, 100 bp, Homo sapiens
gcctgagctgagtgaggccgaggccgggaggccgtgcccggagagcttacaagaccctatgaaaaaattagttgagaaagaagagaagaagaaaatcaac

SEQ ID NO: 678681 - DNA, 75 bp, Homo sapiens
ccgatccagcctgcggagcctgtggggcagggctctctttacctatgaaggcaacagcaatgacatccgcgtggc

SEQ ID NO: 678682 - DNA, 98 bp, Homo sapiens
gtggagagctactcaaaattctacgttagagagactgaaaagacatctaatttcattgctcggcagcaatcttcctgagctcttttcgggtgccatat

SEQ ID NO: 678683 - DNA, 100 bp, Homo sapiens
ggccaggtggctccaaggagaggaagcagtgatgcattgagactttctaagaagatcactaataatattgtttattttcttccaagaaatgctgatattg

SEQ ID NO: 678684 - DNA, 90 bp, Homo sapiens
gcggttggaggagcgagcagccatggatgccgtttgtgccaaagtggacgctgccaacaggaacggcatcatcactggcgtgtacccggc

SEQ ID NO: 678685 - DNA, 75 bp, Homo sapiens
aaggcttacgccagccccgccaagctcgagtccatcgatgagagccttctccatggacgaccgcattgcctggac

SEQ ID NO: 678686 - DNA, 75 bp, Homo sapiens
gggagatccacagctaagacaccgggacctcctggaagccaaaaatgaccaggatatgaaatgatttcaaatcct

SEQ ID NO: 678687 - DNA, 100 bp, Homo sapiens
gttcaagacccgacatgagggaaaagggacgtaggaagaagggcaggacctgggcggaggccgccaagacgtgcggcgagggaactccccaggccaccgg

SEQ ID NO: 678688 - DNA, 88 bp, Homo sapiens
gattttatgggaaaattaagcagatgctccagtttgagaaacctggatctgcgatctgtttgtgaatatggttgagccccttataccc

SEQ ID NO: 678689 - DNA, 112 bp, Homo sapiens
gtcaccatcaaaattgcaccgaacacacctcagctggctgacattattgcaacagggtggccggcattcacaagaaggtggcccggaccatcggcatttctgtggatccgag

SEQ ID NO: 678690 - DNA, 75 bp, Homo sapiens
gggaaccctggtcaccgtctcctcagattcaaccctatgaaaagataaaggccaggggcttgcctgataatatat

SEQ ID NO: 678691 - DNA, 101 bp, Homo sapiens
cgggggcccgacggcgtctgcattccctgccagccagtcctggcccagctgctgccgctcctgcacggcaatgtgaacgggagcaaggtcatcatccggga

SEQ ID NO: 678692 - DNA, 83 bp, Homo sapiens
ggagctctgatcgccgggaacccttgccgctgctgtcctgcgaccccaagcaggtgtggacactgccagcggctgcagccgac

SEQ ID NO: 678693 - DNA, 74 bp, Homo sapiens
cgagcacaacaggagctacgaggagttggactatacaggctccaacccaagttccagtggttgtgtctcctagg

SEQ ID NO: 678694 - DNA, 82 bp, Homo sapiens
ttaaaccaatgtttgtcatcaatgagatgcggcttgctctatatgcaatcagtgctgtctactttgctggagtgatggtgcg

SEQ ID NO: 678695 - DNA, 89 bp, Homo sapiens
gacgaggaatcagctttgaagtgggagcccagttggaagcccgggaccgtttaaaaaactgagctcatctcctgtcctgggtgtgaacg

SEQ ID NO: 678696 - DNA, 49 bp, Homo sapiens
gggtgagaccctcacttcatccggaagtgaccgcacaatgactcaagct

SEQ ID NO: 678697 - DNA, 97 bp, Homo sapiens
gctcaatgtacatcttatttcattgaacctgtacagtggatggaatctgctttgttgggagtgatggatggacagtagagacggggttttaccatgt

SEQ ID NO: 678698 - DNA, 101 bp, Homo sapiens
aagctctctcttgagccgctgccttgttaccagctggagcttgacgcagattatgactgtaccttttaactttgtagctggaacacaagaagtgtttgttt

SEQ ID NO: 678699 - DNA, 98 bp, Homo sapiens
cgcccaggtccccttggacaaatgggtgaactggcacaaaggttaatctcaagatgccgctagtgaaaagaaacatcgatcctaggcacttgtgccac

SEQ ID NO: 678700 - DNA, 90 bp, Homo sapiens
gggctcctgggcgcgggcagccctctgccttcctggccgctcccaaatatagctcgcaaaggatctccttcatccctctccagaagagga

SEQ ID NO: 678701 - DNA, 75 bp, Homo sapiens
agaggcgcctcctccacaccccccgccgcagcagcaccggcgacagagatgccctgtatccaagcccaatatggg

SEQ ID NO: 678702 - DNA, 96 bp, Homo sapiens
atctattgggatgtcgattgcactttactgggggatttgcctcagatggagttacaggaaattgagaggctgactgagcgactagaagaaaaagag

SEQ ID NO: 678703 - DNA, 75 bp, Homo sapiens
gggctgtatgagctctcagcaagcaactttgagctgcacgttgcacaaggtggataatattaatgcagctgtgat

SEQ ID NO: 678704 - DNA, 75 bp, Homo sapiens
cctgccttaactcctctttacttgctgtcagctgcggagatataccccatggctgtggtggcaactgcagagagg

SEQ ID NO: 678705 - DNA, 102 bp, Homo sapiens
taaattatgagaaagaagaagaattcctcactaatgagctctccagaaaattgatgcagctgaacaggagcctttggagagaacgctctggaccggtgagtg

SEQ ID NO: 678706 - DNA, 128 bp, Homo sapiens
ctcgaccagtgaccgatggccagccccatagcatcaatatcacccgtgtttaccggaacctcttcatccagagaggctatgatgaccttcagaccatcgtccccacttgccagcagcaggacttctcc

SEQ ID NO: 678707 - DNA, 90 bp, Homo sapiens
aggaacacaagttggggtgtggtccagatcagcgtggaccgcggcctgaagtgggaggacgcctttgccaagtcgctggcgctgacgggc

SEQ ID NO: 678708 - DNA, 96 bp, Homo sapiens
ctcggcaccgtcctttcctttctccctcgcgttaggccttccggagcagtactacagcctcacctggttcctgagccccatccttggcctcatctt

SEQ ID NO: 678709 - DNA, 90 bp, Homo sapiens
cctgctgttcggatttaacttcatcttctggactatatcatcatgtacatagaaaaatccaaaggattctgcaaaaaagctactagaacc

SEQ ID NO: 678710 - DNA, 75 bp, Homo sapiens
agtacccgatagaacatggcatcatcaccaactgggacgacatggaaaagtttattaaccttgcaagaactcttc

SEQ ID NO: 678711 - DNA, 83 bp, Homo sapiens
cgcattttttaaccctagatctcgaactccatccggcacaacctgtcactgcatagtcgattcatgcgggtccagaatgaggg

SEQ ID NO: 678712 - DNA, 74 bp, Homo sapiens
gcgagggcctcaacaagacagccattggtacctacctgggggagaggaacctggagcaagagatttcttttgac

SEQ ID NO: 678713 - DNA, 80 bp, Homo sapiens
ccaaagattaaaacttgaagcaacccttaatgtgcatgatggttgtgaggctgtaggagtgcaattggaacctgagcgct

SEQ ID NO: 678714 - DNA, 97 bp, Homo sapiens
gtttttctgccacttttgcaagggcgaggtcagccccaaactaccgcgggagatacagatgacccaccaagaattactcagaaccctgtgatcaatg

SEQ ID NO: 678715 - DNA, 90 bp, Homo sapiens
ctcagtctctgtcagaggaagatcccttgaacttcagcgagagggaagcatcgagactctgagtaacagctcaggctccaccagcggcag

SEQ ID NO: 678716 - DNA, 50 bp, Homo sapiens
tcgtgatgagattgactgtagccgaggagccgagactgtctgaagctggg

SEQ ID NO: 678717 - DNA, 99 bp, Homo sapiens
cccaaaacgtcccgggttcacctaatagtgcaaggttctttcagagcacggcttcggccccatcactaccgacatccgggagggacagactttctacta

SEQ ID NO: 678718 - DNA, 73 bp, Homo sapiens
ctgcagggagcagaggggacagaggcaccaaggacctccaagacagagcagcccgacggccatggaggctgaa

SEQ ID NO: 678719 - DNA, 98 bp, Homo sapiens
tgcctgtgcttccggagcgagcaggaggacgagttctctcctgcgctatggtggaaacctgtccctccaaagtgccatgagtgtacgattcaacagca

SEQ ID NO: 678720 - DNA, 98 bp, Homo sapiens
gggagaagtttcccagaaaaaatgcccagcgcggcgcggggctgcggagtcgtccggagccgctgcgcgtgtgccgtgcaggtgaagctggagctggg

SEQ ID NO: 678721 - DNA, 100 bp, Homo sapiens
tcgggagcgacccggatttccagccagagctgagcggcgcgggctccagactcgccgtggtcaagttcaccatgagaggtggtggacttgctttgtgaag

SEQ ID NO: 678722 - DNA, 76 bp, Homo sapiens
agtcaaaagagagtgatgaacctcaccattctaagaatgaaaggccagcacgctgtctgaaaacgtggtgaaccgc

SEQ ID NO: 678723 - DNA, 100 bp, Homo sapiens
cgccagccccgccatggctgcgccctgcgcggaactggttgagtgggtgctggaagaggtggcccagaggtcccatgctgtgggatccccaggcagcccc

SEQ ID NO: 678724 - DNA, 90 bp, Homo sapiens
gcgctgctgctggcgctgctgctgcacgggcggctgctggcggaatatgtttatccagaagccagagacagacaatacttactatttttc

SEQ ID NO: 678725 - DNA, 82 bp, Homo sapiens
caagtatacagaaaatcggtgaagagaggttttgaattcacgcttatggtagtggtttttcagaagaagtgaagtcaagatg

SEQ ID NO: 678726 - DNA, 100 bp, Homo sapiens
cgagcgttctgcacaccgaggaaatgcgcttcctgagggagtgggtggagaggtgcggtggctactaaagttcgaaggcacgatatgcgtgtccatcctt

SEQ ID NO: 678727 - DNA, 98 bp, Homo sapiens
cgtggtgaaggtccggggcttgccctggtcttgctcggccgatgaagtgcagaggtttttttctgattgaggtggtgccttctgcctctgccctgatc

SEQ ID NO: 678728 - DNA, 100 bp, Homo sapiens
gaggacccaacatggggcagaagcttgaaatcctcattaaagatactctcggtagttcgaggacactacaaaggtcagcaaattggcaaggtagtccagg

SEQ ID NO: 678729 - DNA, 75 bp, Homo sapiens
agcagaaagtggtagcgctgctgcggaggttcaaagtgtccgacgagatctttcagcagagatgacagaagacga

SEQ ID NO: 678730 - DNA, 90 bp, Homo sapiens
tcatctctgagacccggaggaggttcgaagctgagtatgtgacagtttggaaattttagcattcaggtgccaggaatgcagatgggacag

SEQ ID NO: 678731 - DNA, 78 bp, Homo sapiens
accgccccacactggcggatgaagcagctggtggggctctactgcgacaagtcacccacaaaagctgtatataatgcc

SEQ ID NO: 678732 - DNA, 100 bp, Homo sapiens
cacccagaaggacgttcaacctccaaagcagcaaccaatgatatatatctgtggaggtgtcattccacacatccacaaatctctgattgggaagaaagga

SEQ ID NO: 678733 - DNA, 50 bp, Homo sapiens
ttctttacaatcagtgccatcattgcagatatgaggccccaggattcctg

SEQ ID NO: 678734 - DNA, 75 bp, Homo sapiens
cgggaccccagcgcgggcggcggcggctgggcgggagccccagagagagaagaagaaggaggttcctgctgtgcc

SEQ ID NO: 678735 - DNA, 74 bp, Homo sapiens
gagatggatattgaaatggacagtggagatgaagcctaagaatatgatcaggaatgtctgatcacagatacggg

SEQ ID NO: 678736 - DNA, 100 bp, Homo sapiens
tactgcccctgcattgttggtattgaaaatggatgggaaagtaccagtctcagtgaggaggaggatgctgatggtgaatggattgatgtgcaacactctt

SEQ ID NO: 678737 - DNA, 75 bp, Homo sapiens
ctggcctcaagtacagggtcatcaagggcacactgagcaagaaccctggctacatcaaacttcgcaagattcgag

SEQ ID NO: 678738 - DNA, 102 bp, Homo sapiens
gggtggagaagaatctgcttgtctatgggactgataattctatcaaaaatcattggaattctactatgcgaagaaaagtggaacaggagggctatttacaag

SEQ ID NO: 678739 - DNA, 80 bp, Homo sapiens
cgagatcttccgcaacctggagaacgccaagcgcttcgccatcgacataggtgtggacactgccagcggctgcagccgac

SEQ ID NO: 678740 - DNA, 75 bp, Homo sapiens
ccggcgggggcggcgtgcggcctagcgtctcaggtgagcgagtgctgtgctttcatgggcctcttctttatgaag

SEQ ID NO: 678741 - DNA, 50 bp, Homo sapiens
gaaaggagctgcttcccaataaggaaacaatgatgcagtttgcttggcag

SEQ ID NO: 678742 - DNA, 95 bp, Homo sapiens
gcgccgagcccccgaggacggccgtgcggcccatcacggagcgcagcctcctgcagggggacgaagccatcctccagcagcagggctcacccgtg

SEQ ID NO: 678743 - DNA, 83 bp, Homo sapiens
ttcctggcctgggcgctccggtggcggcggagggtttgccttcccggattgggcctacaagccagagtcgtcccctggctcaa

SEQ ID NO: 678744 - DNA, 100 bp, Homo sapiens
ggtcggcgtgccccgacgtacagcgggccgggaaaagtggcactgaggctctggaacttctgcccagctctccttggttctggctccttggcagcaatgg

SEQ ID NO: 678745 - DNA, 74 bp, Homo sapiens
tatcacaaagctatcatcctgccaaactccaggctcagatgtcacagagaaagtctattcgtgtgaccaggaga

SEQ ID NO: 678746 - DNA, 100 bp, Homo sapiens
gtgtggctgacttcaaaagagtagtggattttctgaaagagaagtcaacggcagagacttatccagagcaactcatgaccaggctgtggaagctttcaag

SEQ ID NO: 678747 - DNA, 100 bp, Homo sapiens
tgatgaacaggttccgaaagtggctctacaaacccaaggttcagcagctggacatggagaaccaacgctcatcacctctgtcgttccccagtgttccaca

SEQ ID NO: 678748 - DNA, 95 bp, Homo sapiens
tacgctgtgggaggctttgatgggagtacagggatgaggagaatttctgtgccactgtgcccaaggatggacgttcctattccccaactctcttt

SEQ ID NO: 678749 - DNA, 75 bp, Homo sapiens
tggagcccaaagacccctggagacatgcactctgaataaccctgctgatcaaatggatgtgattggagtaggcgg

SEQ ID NO: 678750 - DNA, 75 bp, Homo sapiens
ccaggacggagataacaccatcttcaaggtggacccccaaaagtacaagggcatatttaacggattctcagttac

SEQ ID NO: 678751 - DNA, 76 bp, Homo sapiens
gcacctggagcaggtgctcaccactggccgccatggcatcagatgaaggcaaactttttgttggagggctgagttt

SEQ ID NO: 678752 - DNA, 75 bp, Homo sapiens
gttcatcatggtgcctggctgccaggcagggtctcttgcaacgtgtgagctgcctcttgccaagagtgagtggca

SEQ ID NO: 678753 - DNA, 96 bp, Homo sapiens
tggaggtcgttgcacccagctgccctcccgggaggctgcctgcctggaaattcaactactgaggaggttacggcacaaaaatgtcatccagctggt

SEQ ID NO: 678754 - DNA, 74 bp, Homo sapiens
gtagaagcactgaaaaaggatcacgggtaatgagaggccctaagatcccagaggatgccataagaggaaaagtc

SEQ ID NO: 678755 - DNA, 85 bp, Homo sapiens
ggacctggagaaactgggaagaatatgggagtacatgcattcaccctcagagaattccaaagaagctgaaattctggaagttcta

SEQ ID NO: 678756 - DNA, 83 bp, Homo sapiens
gtggactaagaacgcattgccgccggtcctgaccaccgtgaacggacagtcccccccagttgttgacctcctgtactggagag

SEQ ID NO: 678757 - DNA, 133 bp, Homo sapiens
atcctctttacatcatagactttcagctacttgaagatagccatcagccgctacgtgactcttttctccaggtgcaaatagtctacaaaccagttgacctgagcaaggtgacctccaagtgtggctcattagg

SEQ ID NO: 678758 - DNA, 100 bp, Homo sapiens
gaaattagaagctgcagaagaaagacgcaaggatcccatgacagattctgttgtcacgtctccttacagagtttgagcggtgctgaactgtcagcaccat

SEQ ID NO: 678759 - DNA, 100 bp, Homo sapiens
gtcagaccagaccgtccgggtgaagagaaccatggagtctggcagtaccgccgccagtgaggaggcacgcagccttcgagaatgtgagctctacgtccag

SEQ ID NO: 678760 - DNA, 98 bp, Homo sapiens
ttgggccgccgagctggacccggaccggttttggttgctctacaccctgaccttctggctcctgctgcgccagtttgtgaaagagaagctgctgaagt

SEQ ID NO: 678761 - DNA, 75 bp, Homo sapiens
cgtggatccaagatggcgacggcgatgatcaagatcatctggataaagaaatagaaaaactgcggaagcaactta

SEQ ID NO: 678762 - DNA, 82 bp, Homo sapiens
accaggagcagcgaggcactcatcctgcacgccggcgagtgccagcggtgtcgtgaaaactacccctaaaagccaaaatggg

SEQ ID NO: 678763 - DNA, 75 bp, Homo sapiens
aggacttgagtaacagcaacatggacatgctgctcagttcctccaggacatgagaagatatatgccaccagctca

SEQ ID NO: 678764 - DNA, 106 bp, Homo sapiens
agttttttgatgacctttcagattctttctctggaactgaaccagaggttcacaaaacaagtgtagtagcatccagccatgccctgatgtgaagtacggcaaacgt

SEQ ID NO: 678765 - DNA, 98 bp, Homo sapiens
ggagacgagaccagaggccgaactcgggttctgacaagatggccgggctgccccgcaggatcatcaagatgtaccaaagcttcagcctcatccgggat

SEQ ID NO: 678766 - DNA, 100 bp, Homo sapiens
agtgggcagatgctggccatcatagggagctcagatctcacttccctgctaaccggtgggcggcccgccggggtgcacctctcaggcctgcagccctcgg

SEQ ID NO: 678767 - DNA, 87 bp, Homo sapiens
tccctgtattggtctcctgctcctagagcatcaagatggtgctcatgtggaccagtggtgacgccttcaagacggcctacttcctgc

SEQ ID NO: 678768 - DNA, 90 bp, Homo sapiens
ggcaaggatttggacggtttctcattgatttcagaccgtataatagacgctggccccaaaggaaactactctcgatttatgaatcacagc

SEQ ID NO: 678769 - DNA, 90 bp, Homo sapiens
ggaggttcaggctacggtgagccgaaggattcctacatccagagtcgggcagacaccatgcagaacattgagtcgacaattgttgagttg

SEQ ID NO: 678770 - DNA, 50 bp, Homo sapiens
ctcagcgccctgcagaaggcccaggtgagcatgggtttatgcgtcttagg

SEQ ID NO: 678771 - DNA, 90 bp, Homo sapiens
caggactctgcagcgaaaaatccggctcagttcggggaagctgcaggagttcggcgtgggtgatggcagcaagctgaccttggtacccac

SEQ ID NO: 678772 - DNA, 90 bp, Homo sapiens
tctattacctttgccttggaatacaggagatgtacttgaaggatataatggaacaatatttgcatatggacaaacatcctctgggaagac

SEQ ID NO: 678773 - DNA, 80 bp, Homo sapiens
tttgatgctgcctggactggtgatgccccctgctggtctgcctcagtgtggtttattgacaatcatttacaatgccgaag

SEQ ID NO: 678774 - DNA, 82 bp, Homo sapiens
ggccagccctgctcgcagaattaccgcctcttctttagaagatgatccctatgatcttgaagatgtttctgcacagaaatga

SEQ ID NO: 678775 - DNA, 87 bp, Homo sapiens
aagaatacaggtgcggcagttggctgagatgcaggctacagtcagatccctggaggatgttgagaaagagaaggaaacccacagtta

SEQ ID NO: 678776 - DNA, 75 bp, Homo sapiens
ttaaggattccaagtaactcttatttggtggaccaaggaggatttggagctaattaacaagtgggccttccaagg

SEQ ID NO: 678777 - DNA, 75 bp, Homo sapiens
gatttgcctttgtatattttgaaaatgtagatgatgccaaggaagtgggcaaacgcagaggcgggaacaaactag

SEQ ID NO: 678778 - DNA, 75 bp, Homo sapiens
aggggactatcctctggaggctgtgcgcatgcagcacctgcgccagccagcctttgacacctttgatgggtccct

SEQ ID NO: 678779 - DNA, 100 bp, Homo sapiens
tgactcggactgggacaatgacagcagctcggcccgcctctttgagaggtctcgcattaaggctctggcagacaaagacctgcggaccaagggcttcagc

SEQ ID NO: 678780 - DNA, 50 bp, Homo sapiens
cggcacgatgccctttgacttcaggagcgtcgtctcggagatgcagccaa

SEQ ID NO: 678781 - DNA, 108 bp, Homo sapiens
gaatccttcctgccttgacagccagtctgtgaaatgatggtgaggtgggcacttctttgtgttcactgagacttttttgacggagagggacaaacaatccaagtggag

SEQ ID NO: 678782 - DNA, 100 bp, Homo sapiens
gagggtcggctctaccaagtagggaccagttactctccacaagaaaattcacacaaccacagtgctcttcatagttcaaattcacattcttctaatccaa

SEQ ID NO: 678783 - DNA, 100 bp, Homo sapiens
ctatgtacgccctcttcctcctggccagcctcctgggcgcggaggaaggtgcatccagttcctcatgctcggaaacctactgtggactttatcctgagtc

SEQ ID NO: 678784 - DNA, 89 bp, Homo sapiens
cacgcccagaataaagccaagctcatctctgagacccggaggaggttcgaagctgagtatgtgacaggcgcccaattcccagatgccta

SEQ ID NO: 678785 - DNA, 82 bp, Homo sapiens
agctcggggccgagcgggaggcagccgtggccgaggtgaagcggtgagtgctggagatgcattatgtgaaattgagactgac

SEQ ID NO: 678786 - DNA, 100 bp, Homo sapiens
ggagcctgcagagggtcccacggtggaagcgagagaggagggtgtcgtgaaaactacccctaaaagccaaaatgggaaaggaaaagactcatatcaacat

SEQ ID NO: 678787 - DNA, 75 bp, Homo sapiens
aggacccaggagaaattcgccctcaaagcagaggtgtccaggacctgcctgctcacggttcgtgtcctgcaggcc

SEQ ID NO: 678788 - DNA, 82 bp, Homo sapiens
ttccctgcggtgtgcaagtccgactggaacaggtcaaaatgcagatcttcgtgaaaacccttaccggcaagaccatcaccct

SEQ ID NO: 678789 - DNA, 100 bp, Homo sapiens
agacccatttccagtcatgattctccagtgctgatgaagcggctttaaaagagcccatcattaagaagtttgaagaggaaggaaacccttactattccag

SEQ ID NO: 678790 - DNA, 75 bp, Homo sapiens
ggcttagggaacctcaccatcatcattgaaaccatggagtacatcgatgcccaccctgagaccatcgtcctggac

SEQ ID NO: 678791 - DNA, 100 bp, Homo sapiens
ggacgtggtccaagccgtgcgcgaccatgccttcacgcttgagatcttcttagcccagagagcagtggagttgagtgaggaggcagatgtcctgtctgtg

SEQ ID NO: 678792 - DNA, 76 bp, Homo sapiens
ggagtggaaagagactctgaaggtgctaagagtttggttatctgggacaatgacaggctcacctgtatccagaagg

SEQ ID NO: 678793 - DNA, 50 bp, Homo sapiens
tgctggtgtccgtggcgtgcctgggtctagcacataccgctccaagggct

SEQ ID NO: 678794 - DNA, 88 bp, Homo sapiens
agataccgaattcttatcacaaagatcctcacagccaccgtggacaatgccaacatcctgctacagattgacaatgcccgtctggctg

SEQ ID NO: 678795 - DNA, 100 bp, Homo sapiens
cgccgctccgaggcctcgcgaccgccgagcctgcagcctgccccgcggccaacatgagcttcttgttaaaggagcagggtatcacttggatctcttttgg

SEQ ID NO: 678796 - DNA, 98 bp, Homo sapiens
gcagggaaacagaagcttactttgctgacctgataatgaagaattattttgcaccactggatgttgtttactggtctggagcccccaactcccttgac

SEQ ID NO: 678797 - DNA, 100 bp, Homo sapiens
caagttcttggcaagagaggcatcctccttgaagtatttggctgaggagttttcaatcccaggtgactgttggatctgtatggaactcatgtctacctcg

SEQ ID NO: 678798 - DNA, 100 bp, Homo sapiens
caaccaagtagaactggctcttcaaattgaagttatcttgacgaatcagattacaacccatctgagtggagccctggcttctcaggcagacctggtgtct

SEQ ID NO: 678799 - DNA, 75 bp, Homo sapiens
tgaggaacttggctaggctggccccgagcggaaccagagaatgctgagggtctcccacgtcttcaccaactttgg

SEQ ID NO: 678800 - DNA, 99 bp, Homo sapiens
tcctggcgcgatgcgtcaagtacactgaaattcatcctgagatgagtcgggaacatgccctgtgtgccgccgtcatttcccacctgcggttattgaagc

SEQ ID NO: 678801 - DNA, 135 bp, Homo sapiens
gaaggaggaggcggcgaatcacttataaatggcgccgaagcaggacccgaagcctaaattccaggaggacaatgcagatcttcgtgaagactctgactggtaagaccatcaccctcgaggttgagcccagtgaca

SEQ ID NO: 678802 - DNA, 99 bp, Homo sapiens
ggcaattgaaaagctgcaggccggtgctcttgcaactgacgcagtcactgcagcactggtggaacttgagcactattcctgatcagagaactccagttg

SEQ ID NO: 678803 - DNA, 100 bp, Homo sapiens
aaaaaacttccagaacatctgggagaatatttaatggaaaatcgcttggttaaaacctgacacttttaacagatcaacgtaagagtaactacaatggatg

SEQ ID NO: 678804 - DNA, 119 bp, Homo sapiens
tgcagggagtatcaaatatgagaaagctaggccatctgaataactttactaaggttcaaaccttgtactactcagctgatcacaagctgcttgatgggaacctactagatggacaggct

SEQ ID NO: 678805 - DNA, 83 bp, Homo sapiens
taaatacattgcgttctaagaaagtttgcaacgtggctcccattgcaggtgaaacaaagaagtggtccaaaggcaaagttcgg

SEQ ID NO: 678806 - DNA, 50 bp, Homo sapiens
ccgagacccagcacatcgccgaccagaaagctgtagaggaaccccttaat

SEQ ID NO: 678807 - DNA, 90 bp, Homo sapiens
gatgccttcaatactacctttatttccaccataggcaagaagttatgaaatggaatggatggggatataatgattctaaattcatcttca

SEQ ID NO: 678808 - DNA, 100 bp, Homo sapiens
gagtacaacctgaacttctcaggaagcagtactattcaagaggtaaatattccggattggattgttgaccttcgccatgagttgacccacaagaaaatgc

SEQ ID NO: 678809 - DNA, 102 bp, Homo sapiens
cttgggacccaccgctgccctcagctccgagtccagggcgagctgcctgtggaggaaccgattgtgtccacagatgaggtcatcttcccactcaccgtttca

SEQ ID NO: 678810 - DNA, 100 bp, Homo sapiens
ttctcccggcagcagcccgacgcaaaccaaggatctggggatcttcgcactatcccaagcatattattaagtttcaccgtgcatcaaaagcaaataaaaa

SEQ ID NO: 678811 - DNA, 100 bp, Homo sapiens
cggtgattcatctggggccttatttccactttgtaattccagtgaattgacttcccatcagaaggacagaataacgggctcccagattcacaagccccac

SEQ ID NO: 678812 - DNA, 83 bp, Homo sapiens
ctcactggttcgaggaaggcggcctcagaggagagggaaggtgcaacccagtttatgcctgaccccaagctcatggatcacgg

SEQ ID NO: 678813 - DNA, 74 bp, Homo sapiens
aaagctgccctgagacggtgtcccgccgaaaggtggaagatggtatcttgaagttgaggaatgctggcaatgaa

SEQ ID NO: 678814 - DNA, 100 bp, Homo sapiens
ggacaccacatcatttgaagcattctttcaatccaaggcatcgaattcttggacaggaaagtcatcagtgagttctgcctcagtcagctcccaagtgagg

SEQ ID NO: 678815 - DNA, 83 bp, Homo sapiens
cgccaatccacttcctgtggcaactacagggtgggttgtatcccctgcagaaaaagctaaatatgatgaaatcttcctgaaaa

SEQ ID NO: 678816 - DNA, 75 bp, Homo sapiens
tgacttgtgcttggcagcaacatgaagatcattttgataaggagggttcctgcccccaggtgaacattaactttc

SEQ ID NO: 678817 - DNA, 90 bp, Homo sapiens
acgcacctctgtttgggggtcctcagagttgaagtattgataacaccaaggaactctatcacaatttgaaaagataagcaaaagtttgat

SEQ ID NO: 678818 - DNA, 75 bp, Homo sapiens
cagcatctctccagcggccacttcttgcgggagaacatcaaggccagcaccgattagtgatgatgaaccaggtta

SEQ ID NO: 678819 - DNA, 100 bp, Homo sapiens
gcagcctcaacttcttgtcctcaagtgatcctcccaccttagcctcctaagtagctgggaccacaggggatgatcaaaaagttatgactgctgaaccatt

SEQ ID NO: 678820 - DNA, 100 bp, Homo sapiens
accggctgctgcaacacgagcagtgtcaagtgccagccctcccgcgtccaccaccgcagcgtcaaggaggaggagaacggggctgaggaggaagaagaag

SEQ ID NO: 678821 - DNA, 75 bp, Homo sapiens
gcccaccactgccacaaacgccgcaccaggtcttgtagcagcgcctcctcggcgccaggaactccgagagcttcg

SEQ ID NO: 678822 - DNA, 85 bp, Homo sapiens
agaaattcaggactgggctaaagaaaaacaacacacacgtctctgaagagtcacctaaggtcctgcgagtacaagggtcgacccc

SEQ ID NO: 678823 - DNA, 83 bp, Homo sapiens
ccaaactggaggatgcctatgtattccctggggatggcgcatcacacaccaaagacaatgcagatcttcgtgaagactctgac

SEQ ID NO: 678824 - DNA, 82 bp, Homo sapiens
ggagaccacagctcgactggagcggtaggagggcacccacgggggcctggaggttacctagggtatgaattaatacagactt

SEQ ID NO: 678825 - DNA, 100 bp, Homo sapiens
ctgctggctaagatcaccaacacagacgtgaaatgttcccactgccaggaggcaggcgccaccttgggctgctacaacaaaggctgctccttccgatacc

SEQ ID NO: 678826 - DNA, 100 bp, Homo sapiens
catcacggacgagaactggagagaactgctggaaggagactggatgatagaattgtcgccactgggacactgtgaaccaggagtgagtcggagctgccgc

SEQ ID NO: 678827 - DNA, 96 bp, Homo sapiens
ctgcagcccaggagcctcaaggcggcccggcgggcgactggacggccggacaggtcatcatcagatttgaaatatttaaagtggatacaaaactat

SEQ ID NO: 678828 - DNA, 100 bp, Homo sapiens
gacaaggaagtgaagaaggcgcatcactcccagctgcgcaaagcttgcgaggtggcgttagtttgacggtgagaacatgtatatgagcatgacagagccg

SEQ ID NO: 678829 - DNA, 90 bp, Homo sapiens
gcaacagcgattttgggagcagtttcctggcagtgattcgcctttgccagtctcatctcgtgtctgctttgttaagttccatgatccaga

SEQ ID NO: 678830 - DNA, 89 bp, Homo sapiens
ggagtttgagcggctgcagagagagagagaagagaggagattgcagcagcgaaccaatcccaaggagcagccaccatatcctagctaca

SEQ ID NO: 678831 - DNA, 120 bp, Homo sapiens
ggttgttttccttctctccgtgcaacgctggcaagtctcaaagtcgccacagcaaacggggattcagcgtccgatcctttggaacagggactcacgtgaagcttccaggaccagctcccg

SEQ ID NO: 678832 - DNA, 89 bp, Homo sapiens
acggctccaattttcagctggaggaaatttcccgggctcagcttgtgcctgttggtctttgcaaaggttctctgactcgaacacactgg

SEQ ID NO: 678833 - DNA, 100 bp, Homo sapiens
gagatccttgttgccgtcccttcgcctccttcaccgccgcagaccccttcaagttctagtcatgggatgaataagagggaacccccacacggagacactg

SEQ ID NO: 678834 - DNA, 98 bp, Homo sapiens
ctgattggcatagtttgtggtgttttctatcccagttctttggcttttactaaaaatggacgcctggcaaccaaggtgtcaaattgagaaccaggtag

SEQ ID NO: 678835 - DNA, 82 bp, Homo sapiens
aggtgccgcgcggctcggagccctggaagcagcagctcaccgaggacggggactcgaaatctggcattttttaaagtttgcg

SEQ ID NO: 678836 - DNA, 100 bp, Homo sapiens
gttgaacctctgcactttacttgtgtgtcaactagtgatggaaccagaatagaaagggatgatgcaagtacgtttactgcttcttggacacttaatgatt

SEQ ID NO: 678837 - DNA, 88 bp, Homo sapiens
gctgatatcaacacggtcaacgtggacggcttgacagccctgcaccagctggacagtgccacatcgcttatccaggcagctaaaaacc

SEQ ID NO: 678838 - DNA, 75 bp, Homo sapiens
ggaaaaccacgcagaagcaggagctgaagacctcagaccggcaccagggaagggccctccaaagcccacacaaaa

SEQ ID NO: 678839 - DNA, 96 bp, Homo sapiens
cctgccccgcgctgacaggggggcctggccgcgcagccggtcgagtttgagtggctgaggcagttttggtttcaaggcaatcgatacagaaagtgc

SEQ ID NO: 678840 - DNA, 75 bp, Homo sapiens
aaggagcccatcgtgcgggtcttgcaaaggtggattcaccaatgaacttgaagcatcctcatgacctagtcatat

SEQ ID NO: 678841 - DNA, 75 bp, Homo sapiens
acttctgccgacaacttttctcctgatttgaggctacccactgctgaaactccccttgccaggaacaggacctgt

SEQ ID NO: 678842 - DNA, 95 bp, Homo sapiens
cttccaactccacccccatcgcccggcacccaggccgcaccaaaggggccttggacaagttgttactgactatgttcatggggatgccttgcaga

SEQ ID NO: 678843 - DNA, 99 bp, Homo sapiens
tggtgaagctggaacagccagaattggacccgaaaccatgcctcactgtcctaggcaaggtggacaagatcgaggaacttgatcaagaaaacgaagcag

SEQ ID NO: 678844 - DNA, 90 bp, Homo sapiens
ggtcgcctttgctactaccgcgactggctgctgcggcgcgaggtggaattgcggagtgcagtggagcaagtcgttaaggaaactccagaa

SEQ ID NO: 678845 - DNA, 100 bp, Homo sapiens
ctagcacaggacagccacctgctgtcgggccagctgcccacggatgttgttttccagtggctcacgacaggagacatccacctaaaccagattgatgctg

SEQ ID NO: 678846 - DNA, 101 bp, Homo sapiens
agaaactgactaaagctatatgtggactgtctgttcggcacttgaagtactccttgtttaagaaatcactactgggcagtgtttcggataatggaatagta

SEQ ID NO: 678847 - DNA, 100 bp, Homo sapiens
ctttttatatggtcttggtttggtctacttccattataatgcatttcagtggtgtcctggggaagtgtcgctacgtttactatgggaaaaactcagaggg

SEQ ID NO: 678848 - DNA, 90 bp, Homo sapiens
gcccaagaaaggacatcttatctttgatgcttgctttgaaagtggtgagcagtaggtcatccagtcccagtgtcagaatgattactacct

SEQ ID NO: 678849 - DNA, 75 bp, Homo sapiens
tgacaccttcagaatcgactcaagagttacatgcatcaggtctggtgagctgtaccttctttctggcagtgaatg

SEQ ID NO: 678850 - DNA, 50 bp, Homo sapiens
acctgggcgtccccaacgggcgcatggtgcgggcattctatgtgaacgtg

SEQ ID NO: 678851 - DNA, 75 bp, Homo sapiens
gcaatttgccatttatttgtaataaggctgttgaagctcaaatccgaagttttggacagactccttctcaactac

SEQ ID NO: 678852 - DNA, 109 bp, Homo sapiens
ctgcaggactgggcacagcatgagatccaaaggcagggcaaggaaactggccacaacctcccagtgcaacgtcagcttaaagaagcagaggagccgcagcatccttagc

SEQ ID NO: 678853 - DNA, 100 bp, Homo sapiens
ggagctcaagcctacactatctgtggcactcttcagtacatgggtgagagaggttaaagctgatggggccttcaaggagagcgaggtctcacgggcctga

SEQ ID NO: 678854 - DNA, 90 bp, Homo sapiens
catcagcatttacatgacagaaatcacctatgtttacagcgacagaataactgaagtgaagtgatggactccgatttggagagtagtaag

SEQ ID NO: 678855 - DNA, 100 bp, Homo sapiens
gttcgtctcttacgtctgcggaagtgcagctgcctcagttcttagcgcaggctccatctactctttgaagcttctgcccagcttgcattgtttctaggag

SEQ ID NO: 678856 - DNA, 100 bp, Homo sapiens
gagaaattgctcaggactttaaaacagatctgcgcttccagagcgcagctatcggtgctttgcaggtggtatggtcaggaaaaagactacaatgtactag

SEQ ID NO: 678857 - DNA, 50 bp, Homo sapiens
ttttacctacgttggcggccccagaagaaattccaacagaatgggtttcc

SEQ ID NO: 678858 - DNA, 75 bp, Homo sapiens
gaagaggtggcagcgcgagctgggaccagcgtctcggaggcgccgcagacttaattcagtgcacaaatgagatga

SEQ ID NO: 678859 - DNA, 82 bp, Homo sapiens
ctgggagatgctcaagtttgaagtggcgctcagaacatccagtcatggataaaaatgagctggttcagaaggccaaactggc

SEQ ID NO: 678860 - DNA, 82 bp, Homo sapiens
cctggagctgcatttgggtgccctccatggccaggaggacacccctggtggcctgcttgggggatatgagactttctactcg

SEQ ID NO: 678861 - DNA, 98 bp, Homo sapiens
cccggacggactacgagtaccagcactccaatttgtatgccatatcagttccctgtattgaacactgatatacaaggaatgaatagaagtcaagaaaa

SEQ ID NO: 678862 - DNA, 89 bp, Homo sapiens
tgagaaaattctggaactatggatcttgaccccaaggatatattattttattccaagaaagatcagactgctttgccagcaacatgctc

SEQ ID NO: 678863 - DNA, 124 bp, Homo sapiens
cctgtttcgccacagttcctaccttatgagctcggttttcttatgcttataagagtggaacaggtgtcttggtttgcagtgggatgttactatctcatggtcggtcataaaaatgaacatgcca

SEQ ID NO: 678864 - DNA, 75 bp, Homo sapiens
ccaccaaaccaatttctcctgcaaaccagggtatcagagcgatgaagaacgatacagatacagggaatatgcaga

SEQ ID NO: 678865 - DNA, 100 bp, Homo sapiens
aaaatgtgctggttgatggtgttaagaaactctcagtttgtgtttctgagaaaggaagaggaggctgcaaaatgggcccgggaagaagaagaagcccagc

SEQ ID NO: 678866 - DNA, 80 bp, Homo sapiens
cccacgtgcccggcccccgggctacactcggagcccctgtcacagtctcggccggggaagcctacctggtgtacacagac

SEQ ID NO: 678867 - DNA, 50 bp, Homo sapiens
aaagatttttagtggccccaaacggataacaacgaacttgatgcaagtga

SEQ ID NO: 678868 - DNA, 51 bp, Homo sapiens
agagaatagtaggctgcatctctgcagaaccttggcctgaaaatgctacat

SEQ ID NO: 678869 - DNA, 99 bp, Homo sapiens
ggcgagatgcctttgttcaccgccaaccccttcgagcaagacgtgggaggacggagtcccagagaactacaactcccatcaagcacttgggggatcgcc

SEQ ID NO: 678870 - DNA, 75 bp, Homo sapiens
ttatgctgtggattctgaacttaataatttggcctgtgagtcgatctttttaggatttggtgctatggagaaatt

SEQ ID NO: 678871 - DNA, 98 bp, Homo sapiens
gaggaggcggcgggtagctggcaggcgccgacttccgaaggccgccgtccgggcgagcactattcctgatcagagaactccagttgcttcaacacaca

SEQ ID NO: 678872 - DNA, 96 bp, Homo sapiens
gccaccaccggccgcctcagccatggacgcgtccctggagaaggctgaccggttccctgatgtgttacctgcttctgctactgatccaaactgcag

SEQ ID NO: 678873 - DNA, 51 bp, Homo sapiens
ggatttctaagcaggaactccccaggtatgagggtgctggttgatgctcga

SEQ ID NO: 678874 - DNA, 98 bp, Homo sapiens
gaaggaaaaggaggaattcgccgtgcccgagaatagctccgtccagcagttacggcagtcccagtcctactgcacagacacagagtgtcttcaggaat

SEQ ID NO: 678875 - DNA, 90 bp, Homo sapiens
ttgcctgctaaccaacggcaagctgccactgtgggcaaagcggctgaccatagtgctgctcaacctgtaccggaatccacagaacacagc

SEQ ID NO: 678876 - DNA, 101 bp, Homo sapiens
gtacaggctcagtctgcggccaagactccgtcctgcaaggaagctgcacaagccttaatttatgctgagatggcaggatcaagcctagaaaatattcaaga

SEQ ID NO: 678877 - DNA, 75 bp, Homo sapiens
cagcgccttgatcgagtacttgagagatcccgctgtgcgctggctgtgaccagcacatcctggaccgcttcatcc

SEQ ID NO: 678878 - DNA, 100 bp, Homo sapiens
ccgcgcctcctccgggaccctccccttggaccgagccgatcgccgcggggcagttcgggccggctgtcctggcgcgatgcatcaaattgcaatttggagg

SEQ ID NO: 678879 - DNA, 101 bp, Homo sapiens
cagttggagttggaatttgtgcaatgtttagccaacccaaattaccttaattgccccttcacagatgtagtcactacaaatcttaaattgcgaaatccatc

SEQ ID NO: 678880 - DNA, 97 bp, Homo sapiens
ctcaaaccttgcttctaggagataaaaaggttggaatacacaccaaggcttggtttattgctggaatctttttgctgttgactattcctatatcact

SEQ ID NO: 678881 - DNA, 97 bp, Homo sapiens
aaagaggtggtgcggaagatgatcagccaggcacagaaggaccaagaatcgccttcagccctgtctggtgcatccttggcagaaagtgaggaggaaa

SEQ ID NO: 678882 - DNA, 75 bp, Homo sapiens
attgggagatccacagctaagactccaggaccctctggaagcctagaaatgtctgcgggccaggcatcgacatcc

SEQ ID NO: 678883 - DNA, 90 bp, Homo sapiens
agtcctagcgcctggcctgcgcgccgctgcccgcgccacaggtgggcaccatgtccttgaagcttcaggcaagcaatgtaaccaacaaga

SEQ ID NO: 678884 - DNA, 89 bp, Homo sapiens
gcctgaatggcgggaagtgtgaagcggccaatggcacggaggcctgcgtccaacacaagccatcagccccatgctcagctcccagcagg

SEQ ID NO: 678885 - DNA, 51 bp, Homo sapiens
cgcgaatatcgtcatcgttagaaggtggaagagattagaaactcatgatgt

SEQ ID NO: 678886 - DNA, 75 bp, Homo sapiens
tgtttgtggatcgctgtgatcgtcacttggctgaaggcgtgaaggctgagccctttgaaaaccactcagccctgg

SEQ ID NO: 678887 - DNA, 75 bp, Homo sapiens
tggtggcctttccctccagctctgtctatcctaccaagggagctgagcacataacgacttacacgttcaatactc

SEQ ID NO: 678888 - DNA, 89 bp, Homo sapiens
cggagctggtctgaagctggtagtttcctcacccaccagtccggtccttctggcactcctctggtggaccgcccccatcggccacactt

SEQ ID NO: 678889 - DNA, 100 bp, Homo sapiens
ctgcggctgtcggctggtgcttggcggcagggacgattttctatgtgctctgccaagaagggaaggttatgagttttttgtaggacaatggacaggtact

SEQ ID NO: 678890 - DNA, 83 bp, Homo sapiens
ctgcaacttgggccccttttcagtgtacttttcccaacactggtgctcgtatcatgatgttcattggtggtcctgctactcag

SEQ ID NO: 678891 - DNA, 100 bp, Homo sapiens
acaaaatctgaagattattacagtaaaaacaaaagaaaggcaagagaatacttactagttaaagggcggcgactggcggcgcgatggacctgaccgggct

SEQ ID NO: 678892 - DNA, 80 bp, Homo sapiens
acaccgtatttcatctgtagcattcaagacttcaaactggaaaaatcagttgctgccgtctgacaaggtggatggtgagc

SEQ ID NO: 678893 - DNA, 100 bp, Homo sapiens
gccgttcctggctttgtagctcgctcaagatggcggcgcagccaccccgcgggatacgcctcagcgcgcatcctaatgtcctatgatcacgtggaactca

SEQ ID NO: 678894 - DNA, 128 bp, Homo sapiens
cctttccagttttgaggagaccagtgctgatgattttgccatggagatgggattggcctgcgttgtttgtaggagaaatggtagccttaaaaaaagtacgtctggataatgaaaaggaaggctttcca

SEQ ID NO: 678895 - DNA, 103 bp, Homo sapiens
ggaagaccgcgcgcagggcctgcagcgggagctggacggcgagcgcgagcggcgcgagaaaatgcatcactgtaagcgataccgctcccctgaaccagacccg

SEQ ID NO: 678896 - DNA, 113 bp, Homo sapiens
ccgacctcgacgtcttgcctgtgtcccacttgttcgcggcctatagggggatatgagactttctactcggaatatcctgagtgttgcgtggatgtaaaacccatttcacaaga

SEQ ID NO: 678897 - DNA, 74 bp, Homo sapiens
ggtggcctggacagtgaagggagagaagtggatttgggagacatttaggaggacccacccgaggatgggtcacc

SEQ ID NO: 678898 - DNA, 82 bp, Homo sapiens
caaaccccagcacttaagcaaacgggaattctcgctgtcaacagcatctccaccctggagcctgtgagccggtgccagcgcc

SEQ ID NO: 678899 - DNA, 119 bp, Homo sapiens
ccgggcatgggcggcaactctttgatgtactactataatgggaaagcgggtaaaccagacttgaatacaacattgccaattagacaaacagcatcaattttcaaacaaccggtaaccaa

SEQ ID NO: 678900 - DNA, 100 bp, Homo sapiens
cgaagaagaaaccagggcagaagaagtctaaaaatggaagcgagcattggggagtcagcaatgtccgttgtgttaaatcagctgctgcccatgattaagc

SEQ ID NO: 678901 - DNA, 51 bp, Homo sapiens
ctttgttcctgaagatgggtctccgctagaaagagacatgtccaatgtcag

SEQ ID NO: 678902 - DNA, 78 bp, Homo sapiens
actcagagggctctagccttcctgtgcaacctgaggtggcactgaagaggatttcaaatatgcgtgcattagagaatg

SEQ ID NO: 678903 - DNA, 98 bp, Homo sapiens
gcgaatggcacgagctggagggagaatttcaagaactgcaggagtgctacctggagggtgaccagacgagcctgtaccacgcagccaaggggctgatg

SEQ ID NO: 678904 - DNA, 96 bp, Homo sapiens
cgggcgcatccctgccccggcgccgtccgtgcccgcgggacctgacagccgggtcagaggactccagaagacctttccagattcgtggttgagctg

SEQ ID NO: 678905 - DNA, 100 bp, Homo sapiens
gtcagatgacaaaaccacgcgactcgaggctgtgcgggaaatgtcggagacccatcactggcatgctccaaaaccaacgccctcaatgtctcccagaaga

SEQ ID NO: 678906 - DNA, 87 bp, Homo sapiens
gctgcgcagggcctgccaggtggcgctcgcacctggctgcagtggaagaaagaaagatcaagtccctggtagctctcttggttgaga

SEQ ID NO: 678907 - DNA, 50 bp, Homo sapiens
ggggttgaactgtggagtgtgtgggtcatcatcagatttgaaatatttaa

SEQ ID NO: 678908 - DNA, 100 bp, Homo sapiens
tcagccttcccagtagctgggaccacaggtcacagatgtgacattgatgtgtccactgaagccatgtatgctgcaaccagacgagaagggtttaatgatg

SEQ ID NO: 678909 - DNA, 88 bp, Homo sapiens
ctcctcgccagcagccgtccggagccagccaacgagcgatatgtgcagcgggggctacagcgagtggggctagatccccagctgccac

SEQ ID NO: 678910 - DNA, 51 bp, Homo sapiens
tccgacactactgattctagtcaaggtgagagcacagtaaggactattgct

SEQ ID NO: 678911 - DNA, 96 bp, Homo sapiens
acgcacagccaggacatcctggaacctgggaaagggtatgcacctgtgggcatcctgttcctgattgctgggaagattctggagatggaagacatg

SEQ ID NO: 678912 - DNA, 82 bp, Homo sapiens
gcattgcctgcaagctctgcgaggccatctgccccgcccagctgctggagccagttctgcttctcggcaaggagcgatttgc

SEQ ID NO: 678913 - DNA, 100 bp, Homo sapiens
gagcacagagcctcgcctttgccgatccgccgcccgtccacacccgccgccagatgggcccaaaagcacaagaactggaggtttcagaagacgaggcaga

SEQ ID NO: 678914 - DNA, 90 bp, Homo sapiens
cgtccaccaggtccctctctctgtccccggccgccatggagcagccgccggcgcctaagagatctcccttgagtttagaaatctggctga

SEQ ID NO: 678915 - DNA, 74 bp, Homo sapiens
ggtcttggagcgaagagctcggaccaagcgctcagggttattggggctgtgccatcggcaaagccaggcaagct

SEQ ID NO: 678916 - DNA, 75 bp, Homo sapiens
tgcgtgggggaccggctgttggcgggtatagctgtggaccaactgtatatgatcatgcgcaccttggccatgctt

SEQ ID NO: 678917 - DNA, 101 bp, Homo sapiens
ctgccgttgccaatggaaccagccggccacaaggaagcaaccagctcatgaacaccctcagtgcctgattattacaaaataattaaaaatccaatggattt

SEQ ID NO: 678918 - DNA, 98 bp, Homo sapiens
ctgccagcatcgccgccgccagaacccttaggagaaatcttgagagtggacagcaattgtgaagatcgccagagagttctgtgtttcatcaccgccga

SEQ ID NO: 678919 - DNA, 74 bp, Homo sapiens
acttccagccagctgtgaagaagtggatatgctgctgatgaaatcactcactgcatacggcctcaggacatcaa

SEQ ID NO: 678920 - DNA, 96 bp, Homo sapiens
agatggcgtcctcggagcaggcagagcagccgagccagcgtgttgtgctcctacagactgcaaccctgctaggggtccttctcctgggttatggct

SEQ ID NO: 678921 - DNA, 75 bp, Homo sapiens
ttgaaaacttcgaggcactcaagtcctggctcagcaagactctcgagcccatgtatgataagtattatcagcaac

SEQ ID NO: 678922 - DNA, 100 bp, Homo sapiens
ccaaagagttgtaccgagactataaccacggtgtgctgaagataaccatctgtgtgaatatgagaagggcgtagaccatctgacaaatgcaattgctgtg

SEQ ID NO: 678923 - DNA, 75 bp, Homo sapiens
ccagctccgtctcggcggcggcggtcgcaatgtatctgctgagcaaaaagatgaaaacaaagaagcaaagcctcg

SEQ ID NO: 678924 - DNA, 100 bp, Homo sapiens
caagattgattgaaacatattcaatggctggttcgatgcccagaactgaatgctgtgctccagctgtggcctcaccggtgctgaatagagaggaagagcc

SEQ ID NO: 678925 - DNA, 75 bp, Homo sapiens
aatggaaaatcgcttggttaaaacctgacacttttaacaggatagcagtgagattcacttcaaagtgaaaatgac

SEQ ID NO: 678926 - DNA, 100 bp, Homo sapiens
cagaaggcttatgaggatggctgcaagactgtcgacctaaagcctgactggggcaagtacaagattctgctgtactcattggatggccggttgttgtcca

SEQ ID NO: 678927 - DNA, 50 bp, Homo sapiens
gcggagagcaacagcgcgccggttgtaaacatgttaaaggcatcctgtta

SEQ ID NO: 678928 - DNA, 82 bp, Homo sapiens
aagacccctggctctataagctgaattatggcagcccagtcaagacaatgcagatcttcgtgaagactctgactggtaagac

SEQ ID NO: 678929 - DNA, 83 bp, Homo sapiens
ccccactccgagggcgacatgcacgtataatgggtctctcccaaatggcgatagaggaaggaggaaaagtaggtttgctttgt

SEQ ID NO: 678930 - DNA, 100 bp, Homo sapiens
gcggcggcgccccgctccgggtgaggttgccggggccgtgcgcgctgtaagtacaaggtggactgtgcatgcctcaaagaaaacccagagtgccctgttc

SEQ ID NO: 678931 - DNA, 100 bp, Homo sapiens
gggagacggcacaggacactaaaccaggagactcctgtgctgaccagaatagaaaaacaaaagcgcaaagaggaggaagaagagcgtcagattcttctag

SEQ ID NO: 678932 - DNA, 82 bp, Homo sapiens
ggcgaagcagttgctgcaggcggcccactggcagttcgagatataattggtgattacaactttcctctataaattaactctt

SEQ ID NO: 678933 - DNA, 100 bp, Homo sapiens
ttttcattcctagtcattctctgtaaagattctgcttctcagaagatgcactattatagatactctaacgccaaggtcagctgctggtacaagtacctcc

SEQ ID NO: 678934 - DNA, 98 bp, Homo sapiens
cccgaagccgcggagccggtggtgccttcgctcgtggatcgatacttcactcgctggtacaaaccgggaaatgattgaagccatccgcgaagcggtgg

SEQ ID NO: 678935 - DNA, 116 bp, Homo sapiens
cggcgggggcggcccctccttgggcctgcggctctctacgtccctgcggagcagccggatctagtttgaagcactaagaagaataagacatcagtttgaaaagaggctctatcaga

SEQ ID NO: 678936 - DNA, 73 bp, Homo sapiens
aaaaactagatccaggttggaatcctcagactgacttccttttggtagtactgcgtgatgttgttcaggctta

SEQ ID NO: 678937 - DNA, 82 bp, Homo sapiens
tcgtcgccgttcgccacccaagcaaaacaagctatcgatcagggaagatctccagttataatagataacactaatatacaag

SEQ ID NO: 678938 - DNA, 100 bp, Homo sapiens
cgtggagatatggcgcaactgcggcgcatttggagtccaggaatgagactaagcatttatctgtaggaaaagatattattcaaaacactggttctcagtg

SEQ ID NO: 678939 - DNA, 51 bp, Homo sapiens
cctggaccagcctcttctgaaacactgggatccccctgaggtgaccgtgtt

SEQ ID NO: 678940 - DNA, 90 bp, Homo sapiens
gggagacacagtgtcagaattacaaggtgagatcagccgcccggccaagctatcttctcgctagcaggactgatcctttgaaatactcca

SEQ ID NO: 678941 - DNA, 83 bp, Homo sapiens
ccatatatgattttctttaaggatggtttagaaatggaaaaatgtgggcaagattcttgccaagagaattaatgtgcgtattg

SEQ ID NO: 678942 - DNA, 100 bp, Homo sapiens
cgtctccggtatgactgaatctgtctgctggcctctcagctaccaactctgcccgaaatctagatcccagacctgacggagtttccctcttgttgcccag

SEQ ID NO: 678943 - DNA, 76 bp, Homo sapiens
atggcatccgtcctaccggaaacctaggaaaagcgcaaatccagaaaaaccctgtgcatcatcattcttatccttg

SEQ ID NO: 678944 - DNA, 100 bp, Homo sapiens
tcagccaggcccggttcgcttcccggacaggaggcaagaccaagatcactccatggatgaaatgacagctgtggtgaaaattgaaaaaggagttggtggc

SEQ ID NO: 678945 - DNA, 83 bp, Homo sapiens
tgcgggtgaagatggcggcagccgaggccgcgaactgcatcatggagcgtcgagggcgaggcccccagcagtgagactggcac

SEQ ID NO: 678946 - DNA, 50 bp, Homo sapiens
atcatgaaggacgtgcccgactggaagctggagaagaagcaggcgctccc

SEQ ID NO: 678947 - DNA, 100 bp, Homo sapiens
gaaaagcgaggcaaggcaggcgggtgccgtggccagcacagaagtgaagatgaagttacaagaatttgtcctcaataaaaagaaggcgctggcccaccgg

SEQ ID NO: 678948 - DNA, 111 bp, Homo sapiens
ccgggcacagccttcctgtgtggttttaccgcccagagagcgtcatggacctggacaatgcagatcttcgtgaagactctgactggtaagaccatcaccctcgaggttgag

SEQ ID NO: 678949 - DNA, 50 bp, Homo sapiens
gcgcgaccgggagctggacctccgggaatttctagaaggaggagttggcc

SEQ ID NO: 678950 - DNA, 100 bp, Homo sapiens
cttgggatcctttatcctggtcatcttctatttccaaagatctcatctggccaccgcgttctggaagaggcgagagggagagcgtgcgcgagaggagaga

SEQ ID NO: 678951 - DNA, 98 bp, Homo sapiens
gcggagggtctgaggcggcgcggccatggctcacctccggggatttgccaaccaggctcatcatatgcccgaagctcagtggttacggctgtgaaatt

SEQ ID NO: 678952 - DNA, 100 bp, Homo sapiens
ggcggccgcgaggcgagcggcgatggtagctacagcaagctgggtagcaggcagatccaaaggatatcatgaagtttccagggcctttggaaaaccagag

SEQ ID NO: 678953 - DNA, 50 bp, Homo sapiens
acgccctctgccttcgaccggatcctgcctcgaccagtgaggagagctgg

SEQ ID NO: 678954 - DNA, 50 bp, Homo sapiens
tccttcacagtaaagtggctgcccttgaaggtagtggacccagatcatcc

SEQ ID NO: 678955 - DNA, 111 bp, Homo sapiens
cctcctcccagggccaggcgccgctcagaacgatctttaatctcatgaagtacgacagctacagccgcttcttaaagtctgacttgtttttaaaacacaagcgaaccgagg

SEQ ID NO: 678956 - DNA, 100 bp, Homo sapiens
ctgatttgtccccatgttggagggtctgcctgggctgtgtggtctttgaggatgtgtttgtatacttctctcgggaagaatgggagcttcttgatgatgc

SEQ ID NO: 678957 - DNA, 100 bp, Homo sapiens
gctccctcccaccaaccatcatctggaaacacaaaggccgagatgtcatcctgaaaaaagatgggcttcaagatgggctgcgctccagttccaacagccg

SEQ ID NO: 678958 - DNA, 90 bp, Homo sapiens
ctttccgccctaatggaggtctccagtttcgaacccagtgacttgattgtaaaaatttacagagcggaatcatatgctggtctccaagag

SEQ ID NO: 678959 - DNA, 82 bp, Homo sapiens
gcttttggcagcatgaaagttagcagccctgggaggagcggggacactgaggacctctctccaaattggcctctcaactcac

SEQ ID NO: 678960 - DNA, 108 bp, Homo sapiens
cgcgcgctgagggtctcggggcgggcgccgcgggacctctccgggccatggggtttccaggcctgaggtgcccgccctggccccaggagaatgaaccagccgcagagg

SEQ ID NO: 678961 - DNA, 75 bp, Homo sapiens
ggcgtacgccctcatggggaaaatctccccggtgactttcagattgcagaaggcatggcattcattgaagagcgg

SEQ ID NO: 678962 - DNA, 97 bp, Homo sapiens
caggagtccagggctggagagaaaacctctgcgaggaaagggaaggagcaagccgtggtgtctgacttccagcaactgctggcctgtgccagggtgc

SEQ ID NO: 678963 - DNA, 50 bp, Homo sapiens
agaaagaccatcaagtttaccagtcaaaatgcagatcttcgtgaaaaccc

SEQ ID NO: 678964 - DNA, 74 bp, Homo sapiens
cctgcatctactcggccctcattctgcacgacgatgaggtgacagtcacgagtttgaaaattttgcgaaacatg

SEQ ID NO: 678965 - DNA, 98 bp, Homo sapiens
cgccgtacatcgtgggcttctacggggccttctacagtgacggggagatcagcatttgcatggaacacatggtgcgcacacggtcagtgggcgagtgt

SEQ ID NO: 678966 - DNA, 112 bp, Homo sapiens
cttaatctgggccaaaaggaatgaccctagccagactcagggatcaaagagcaaacagattcagtggcctgcattgggaccagttactctccacaagaaaattcacacaacc

SEQ ID NO: 678967 - DNA, 82 bp, Homo sapiens
gaccgaaacctagccccggacgagaagcgcagcaacgtgcggtgggaccacgagagccacagacgcagtcttcagcaaggaa

SEQ ID NO: 678968 - DNA, 78 bp, Homo sapiens
gcaccggtcccccagcggcagccgagcccgcccgcgcgccgaaaatggacccaagtggggtcaaagtgctggaaacag

SEQ ID NO: 678969 - DNA, 80 bp, Homo sapiens
agggacaaagagatctggacagaatcgccggacaggtggcctgtggattaaaccacactttggcagtgtcagcagatggt

SEQ ID NO: 678970 - DNA, 95 bp, Homo sapiens
gtgatgtgacgctggagaacctggcacttatgtcctccctggcacgagtacacgagacaggattgagaaaggagagattcaaattgtgacttcag

SEQ ID NO: 678971 - DNA, 115 bp, Homo sapiens
cagacccttccccgtgctcagacagtgcaccgctgtcccatctaaagaaacctgtcaggaatacgagcttctggatcactttgccagctgtgtggaggatggatttgagggagac

SEQ ID NO: 678972 - DNA, 83 bp, Homo sapiens
ttgggctgcaggccagcagtttgcctggtggtggaagaatgtctccttgctcgggggggatatgagactttctactcggaata

SEQ ID NO: 678973 - DNA, 98 bp, Homo sapiens
gcatatctgctctgagaagggtactcacagcttatgcatacaggaatcccaaaattggatactgccagagctccttaataagcatttatagtcagttt

SEQ ID NO: 678974 - DNA, 100 bp, Homo sapiens
cgcgtggctggaagacatggccactccagtcggtgttgagcacggcgagcagtctcaggcctttagtgatgatggttatacattggctcttcaaagacgt

SEQ ID NO: 678975 - DNA, 49 bp, Homo sapiens
tgcagagcgcgcagtacctccgagtgcacatttggccatgatcgatacc

SEQ ID NO: 678976 - DNA, 100 bp, Homo sapiens
gtgattcttataaatctggatatgtctattctgaactcaacttctgaaatttacagaaacaaactacatctcaggaacctcagagtgacagagccaaaag

SEQ ID NO: 678977 - DNA, 97 bp, Homo sapiens
atgaactacttacatgatgaggcaattgttcccatcatccaccgcgaccttaagtccagcaacaatatgtacaaggatatccacaacactgttcgca

SEQ ID NO: 678978 - DNA, 50 bp, Homo sapiens
cttgaccctaagcaggaggcagtgcaacactctgctccagccaaggtggt

SEQ ID NO: 678979 - DNA, 100 bp, Homo sapiens
cctgctcgttggaggctgtgcagcagaagatgcagtgcaagctgtttgtctttgacaagacctcacagtcctgggtggagagaggccgggggctgctcag

SEQ ID NO: 678980 - DNA, 100 bp, Homo sapiens
ttgtaagaggtggtatcgcctagcgaggacgaatccatgaaccaaccaggaccaatcaaaaccagactggctattagtcagtcacatttaatgactgcac

SEQ ID NO: 678981 - DNA, 50 bp, Homo sapiens
cgctgacagggatggtgcctgaccaaacctggaccacccaaaaagccgaa

SEQ ID NO: 678982 - DNA, 100 bp, Homo sapiens
cagtggtgaaaaggagcaggtagatgagtggacagttgaaacggttgaggtggtccattatggctgacatgcaaaatctggtagaaagattggagagggc

SEQ ID NO: 678983 - DNA, 82 bp, Homo sapiens
gcgtgtcctgaaggagttccaccaggccgggaagcccatcggggaggaaataatgctggccatacagttgttgtggattctg

SEQ ID NO: 678984 - DNA, 98 bp, Homo sapiens
cgccgagggaccgccgggcggcggaaagcagacgttacatccaagaggaaataatccaggcaaggaagcacaagctgatcaagatgtgtagttctgtg

SEQ ID NO: 678985 - DNA, 75 bp, Homo sapiens
ccagggacctgcccgcctgcggctgctccggatgctgcagttggagaagaaacttgaacgtgaacttgaggatga

SEQ ID NO: 678986 - DNA, 50 bp, Homo sapiens
agagcctccagcgcctggagaacacagatggactgctcccccacggccag

SEQ ID NO: 678987 - DNA, 71 bp, Homo sapiens
cagtgcccttgtggcgaatggggctcacgtcgatcctgtccaagaacagcaagcctatccataccaccatc

SEQ ID NO: 678988 - DNA, 75 bp, Homo sapiens
cggcagtggtggaaaagatccatgccaaggagaacttgaggctctcaggggttgtgacatcaaggctcaacctgt

SEQ ID NO: 678989 - DNA, 100 bp, Homo sapiens
aacaatgcttcatcttcatgccagtcgacccccaggaaaggaaaaacccacaaacatgttcacaacgggcatgttgtatcacggactgattcaccgagcc

SEQ ID NO: 678990 - DNA, 76 bp, Homo sapiens
gggatcacagagaccatattctacggggctttcagcaaatcaaagccagaatacgagccatcatgggaagagcagc

SEQ ID NO: 678991 - DNA, 50 bp, Homo sapiens
cagcctcaagccgctgctcttcggtctctaattaacagaagatggcaaag

SEQ ID NO: 678992 - DNA, 100 bp, Homo sapiens
ctccgaataactgaggcgtttctgtacatggattatctggatatcactactttaactggagttccagaagagcatataaaaactagaaaagtcaggatct

SEQ ID NO: 678993 - DNA, 75 bp, Homo sapiens
tttcaatctgggttacctcaacctgttttagcacagatatgaaatgcactcggtgatggaaagagagccactatt

SEQ ID NO: 678994 - DNA, 100 bp, Homo sapiens
caaacttgacactcaccctgaccgttcacatgagagatcctaataatcaacttcacgtaattaaaaatttgaagatagcagtaagcaacattgtcaccca

SEQ ID NO: 678995 - DNA, 98 bp, Homo sapiens
tccgctccacttcgtcttcaacgacaccaagctggacgctgtcctggaggaattcaagcgagatatggaatgtgcagatgtcccactattaactccaa

SEQ ID NO: 678996 - DNA, 109 bp, Homo sapiens
cgggtctggagtgcgtgggggaccggctgttggcggtaaaatgtttattggaggcttgagctgggatacaagcaaaaaagatctgacagagtacttgtctcgatttggg

SEQ ID NO: 678997 - DNA, 75 bp, Homo sapiens
gtggtgttatagcaaccatagccttcctaatgggccctcctcgccaaagacagcctagagaggacggcaatgaag

SEQ ID NO: 678998 - DNA, 100 bp, Homo sapiens
attacggtctctataagaagatgatcaatctccctggaaaaggagacatgaatgtctgcaatgatacttcctgacaagaagttgatacaagaaaaggaaa

SEQ ID NO: 678999 - DNA, 75 bp, Homo sapiens
acaagaaagtggctgagattcccttcaattccaccaacaaataccaggacatacagcagctcctccagctccagc

SEQ ID NO: 679000 - DNA, 96 bp, Homo sapiens
tgagagagtccgggagcccgagcttgagtccaagtggtaagaagttcagaagcaagcctcagttggcaaggtacctgggaaatactgttgatctca

SEQ ID NO: 679001 - DNA, 101 bp, Homo sapiens
tggagccctgcgcgcgcctgctggagcaagcgctggagctgctgcccgggttcttggccaggctgactgagagatttgtgctgggagtggatatgttcgtg

SEQ ID NO: 679002 - DNA, 80 bp, Homo sapiens
ggtgaaattacagagaccggggaactctactcttcctacgagatggtaacctgcacctcaatgtgacggcggaggccttc

SEQ ID NO: 679003 - DNA, 98 bp, Homo sapiens
aggaagtgcgttcctgaagttctcagtgtttacaaaggagttgacagcacttttcaaaaacctggacgattactgagagccaatcagattagtttcaa

SEQ ID NO: 679004 - DNA, 74 bp, Homo sapiens
catgctaagaacaacagtcaggccaagccttctgcctgtgatggctccaggaggccagagctctactgaagcgg

SEQ ID NO: 679005 - DNA, 83 bp, Homo sapiens
cagatcctggtcctcgatccgcccacagacctcaaattcaaagggcttaaaagacaaccttcttgcttctgggacatccagcc

SEQ ID NO: 679006 - DNA, 100 bp, Homo sapiens
tgggaacacctggagtctccgcgggcagaacctgcacttgttgccaagtcttccatcttactagatgtgaaaccttgggatgatgagacagatatggcga

SEQ ID NO: 679007 - DNA, 85 bp, Homo sapiens
acaggagaaagtttcaactacactgaatgtggctcagtttggatttaggtggcgagtagaaaaagaagtaatttcaggaaaaggt

SEQ ID NO: 679008 - DNA, 75 bp, Homo sapiens
gtctcctgccagtcagtctcctcctctctgttgcagataagatgctcccaagtcccttgcagctctcttcagaag

SEQ ID NO: 679009 - DNA, 75 bp, Homo sapiens
tcagttacgtgggtaaagttgccacaggaagatatggaccatcacttggtgcattttcattgctggcagaagcca

SEQ ID NO: 679010 - DNA, 74 bp, Homo sapiens
ctggagaagtatgctttcagcgagaacaccttcaaccgccacccgtgggaaactgttacaacagctgcaatgca

SEQ ID NO: 679011 - DNA, 80 bp, Homo sapiens
aattggagaaatctccattcaaatggcccaagaagatgaaaggattgttcttgttgacaacaaatgtaagtgtgcccgga

SEQ ID NO: 679012 - DNA, 82 bp, Homo sapiens
aaaatacgatcttatttcaatatgtgaagctgtggtctaccaatctagacaactcagtggcaagcattgaggcaaaggctaa

SEQ ID NO: 679013 - DNA, 97 bp, Homo sapiens
agaaagatggatttttgcatgagacgcttctggacaggacccttcaaagttgtacaagaaagcagatgatgttgcagccattgaatgccagtctgaa

SEQ ID NO: 679014 - DNA, 100 bp, Homo sapiens
tgcacactcttggggctctacctctttttcaaagttaatacaatctgttggaatgacactggagaatatattttatctggctcagatgacaccaaattag

SEQ ID NO: 679015 - DNA, 74 bp, Homo sapiens
gaaactcgctcgccttcagaagacagtttcaccagtgatcattaaagaatgggcagcttacaaaggaaagtctc

SEQ ID NO: 679016 - DNA, 75 bp, Homo sapiens
cgcccccccagacaagatggacaccgcggaggaaggaatatattaaaggaatctgtgaacctgaactagaagaaa

SEQ ID NO: 679017 - DNA, 100 bp, Homo sapiens
gacgtgcggggccctgaagcccccggcgggcgcgcgctgcgggacgcgaccaagatcactccatggatgaaatgacagctgtggtgaaaattgaaaaagg

SEQ ID NO: 679018 - DNA, 98 bp, Homo sapiens
ccggtcaaaggatgctgagtccggagcgcctagccctaccggactacgagtatctggatggagatggacacatggatcatttactgccaggctgtgaa

SEQ ID NO: 679019 - DNA, 80 bp, Homo sapiens
gactgagagaaacccactgaagacgtctgcgtgagaatagagaccaccgagggactggtgattgcagctggaagtgccca

SEQ ID NO: 679020 - DNA, 74 bp, Homo sapiens
tggggttgtgatggcccaggttcttcaaaagatggccccgtgaagcacgtgtacagagtcctgcagtgtcagga

SEQ ID NO: 679021 - DNA, 76 bp, Homo sapiens
gtggagtttaagtctggagcaggcactgagctgtctgtgcgcggtgcgtataacccgtatatagagataattgaac

SEQ ID NO: 679022 - DNA, 75 bp, Homo sapiens
gaaaatgtgatctcccttaaaaaggtttttctctgtcagtgcagttgctatgttgcagaagatcaacagtatcag

SEQ ID NO: 679023 - DNA, 82 bp, Homo sapiens
gctcttccaaccaggggctgagcttctgcgctgtggagaagccaggactggaagcaaccccaaaattagacgcaacaaaatc

SEQ ID NO: 679024 - DNA, 50 bp, Homo sapiens
catggtggagaggcaagcacggattccagatattctatagagtagttgca

SEQ ID NO: 679025 - DNA, 83 bp, Homo sapiens
gtgtctggctctggaattgctactgctgcctctgtcactcctggtgaccagcattcaagttgcagaggaaagtggtcgcttat

SEQ ID NO: 679026 - DNA, 97 bp, Homo sapiens
caagaccaacaccgtcatcaactggttccacaactacagggtaaagcatcaagtcgaatatttgggtctgaaagagaacattcgagtgagaagagct

SEQ ID NO: 679027 - DNA, 75 bp, Homo sapiens
acgaggaggagacgtaccggctctggaaaatccgcaagaccatcatgcagggatttcatgcatcaccctgacagc

SEQ ID NO: 679028 - DNA, 75 bp, Homo sapiens
accgtggggggcaagcagtacctcctaggactctatgacacggccggacaggctgaccaactgactgaagagcag

SEQ ID NO: 679029 - DNA, 82 bp, Homo sapiens
ccgaggccaggagccaggggcccagaaggcctccggtgtggctgtctctgatggtgtcatcaaggtgttcaacgacatgaag

SEQ ID NO: 679030 - DNA, 92 bp, Homo sapiens
gaaaagcaggtgccggtgcctgtccccgggggcgccatggcgaccggagcgaacgccacgccgttgggtgctggagaatctggtaaaagcac

SEQ ID NO: 679031 - DNA, 83 bp, Homo sapiens
ctccagcgtgtctccagccgtgatgaggagcgggaaggcctcctgcaccctggagaccgtgtgggaagacaagcacaagtatg

SEQ ID NO: 679032 - DNA, 75 bp, Homo sapiens
gaacttgccggtgccagctgaggtaatggtttttacaaaggaccaaacagaaaaggaaatagatgaaatccacag

SEQ ID NO: 679033 - DNA, 80 bp, Homo sapiens
tgttaaggattccaagtaactcttatttgctatcgccaagcccaggccgcagtgcttgcagtcttaccccgcctccatca

SEQ ID NO: 679034 - DNA, 75 bp, Homo sapiens
gaagtctataagctttgcaacagaattacagagtatgataagccctgtcaatgaagacaatcaagatggtgtcac

SEQ ID NO: 679035 - DNA, 75 bp, Homo sapiens
gaagcaggcggcttgcctggaacagatacgggagatggaaaagcagtctcttgttttcagcagccactgtaaagc

SEQ ID NO: 679036 - DNA, 100 bp, Homo sapiens
ggcaggaagactgaggaggaagggatggctgtggatctgctgtctgctcaggtggccaccttccactgtggaagctcatggactccattgggtcttcagg

SEQ ID NO: 679037 - DNA, 100 bp, Homo sapiens
gggcagtcccgggagaacctgcggcggccggagcgtactatactggcaattgctggagaagattttgcaattgttgcttctgatactcgattgagtgaag

SEQ ID NO: 679038 - DNA, 75 bp, Homo sapiens
agtgtggcaaccagatcggtgccaaggtgaactggcacaaaggttaatctcaagatgccgctagtgaaaagaaac

SEQ ID NO: 679039 - DNA, 100 bp, Homo sapiens
gggattccggcgccgctctccgagctcgatccgctgctcgcacgggagccagctgggtggtgtgttccagagaacaagccttcagacatttgctatattg

SEQ ID NO: 679040 - DNA, 100 bp, Homo sapiens
ccacactgcaggcctccgcgctcagtggggatatcattttcaatgcccaatacccagaactgcctcccgattttatctttggagaagatgctgaattcct

SEQ ID NO: 679041 - DNA, 75 bp, Homo sapiens
tgcgggttcaggaggtacccaaactgaaggctcctgggaccacattatcattctcttcactcgagagatgaggac

SEQ ID NO: 679042 - DNA, 74 bp, Homo sapiens
cctgtactggctgctgctgccctgcgcgctgctggctggtggtctttgggaagaagcttcctgcctttgccacc

SEQ ID NO: 679043 - DNA, 89 bp, Homo sapiens
tggcttctcctggctgtcagcctggtgctcctctatctgctgtgggtgagcgtggaggatgctcagatgcacaccgtcaccatctggct

SEQ ID NO: 679044 - DNA, 75 bp, Homo sapiens
gtgagtggcggtcgccatcagacccgcgaagaggtggggctggtgtccgagcacttctcgcaggccccgcagagg

SEQ ID NO: 679045 - DNA, 90 bp, Homo sapiens
cattgagcttgggtcaggacaattccatttggggaccagagatggacggtcactcagcctatggagaaaaattggaagctccaccaccca

SEQ ID NO: 679046 - DNA, 90 bp, Homo sapiens
ggcaaactgaaaaatgtacagtctgaaactaaaggcagggcgaaaggatacaatgtctctttgctatatgaccttgaaaatcttccggca

SEQ ID NO: 679047 - DNA, 80 bp, Homo sapiens
tgggggccacaccatttgccgtggccaggctagagatcctctccttcatcctgcacacaatcgtgcgaggattcatccac

SEQ ID NO: 679048 - DNA, 100 bp, Homo sapiens
tgcctcctggaaccacagagtcggttcagtctgtggattactactgtgatagcaagaaaaactttgactgcagataaattggagcatttgaaatctcagc

SEQ ID NO: 679049 - DNA, 87 bp, Homo sapiens
ttagctgtgctcgcgctactctctctttctggcctggaggctatccagctgatgaacggcagcagccactcaccaacagccatcaat

SEQ ID NO: 679050 - DNA, 50 bp, Homo sapiens
ctccgggctccctcctgcattgttcctgacaggcagcgatcggattccca

SEQ ID NO: 679051 - DNA, 49 bp, Homo sapiens
tggagcttttcccctccccggggcaattgaaggaacagactaaaaatcg

SEQ ID NO: 679052 - DNA, 51 bp, Homo sapiens
cgggctacgctcctccatcacgtgttgcttgtatcatgggatactttgctg

SEQ ID NO: 679053 - DNA, 98 bp, Homo sapiens
tcatgtgtctcttctaagctgaataaagctgttttggaactgtcaggtacctcaaagcattataagcacaccacagagactaaccagttcaggaagtg

SEQ ID NO: 679054 - DNA, 75 bp, Homo sapiens
cccaccttgtccggccctatgtgggcattcatctgcgcattggctctgactgggcagaaaacattgtgctgttag

SEQ ID NO: 679055 - DNA, 100 bp, Homo sapiens
aaaaaactactaggatcacgcggcatgtattgaggacgctgtttgtgactgtagtacccagtctctcacctcctgcttcgcccgatcgtcccgctctgcc

SEQ ID NO: 679056 - DNA, 97 bp, Homo sapiens
tggacttctacaaggcccgcatggaggtctgtgcagacttttgcagacaaatcaaaacaagaagctctgaagaatgacctggtggaggctttgaaga

SEQ ID NO: 679057 - DNA, 100 bp, Homo sapiens
taatggtggagccaaaatgctattgccctgtcttcatcaacatttaatcactctaaccatggaatactgggaatgtccctttctgtgaaggaggtttgtc

SEQ ID NO: 679058 - DNA, 75 bp, Homo sapiens
agggcctgggccgcggttcggccgcgccggccggtcccagtagggatggcacaatcagcgaggacaccatccgag

SEQ ID NO: 679059 - DNA, 100 bp, Homo sapiens
gcctgcgcttgtagagactgcatccccgagacgatggcggagggagataatcgcagcaccaacctgctgcgaagtttcttgggctatgccagttttaaag

SEQ ID NO: 679060 - DNA, 50 bp, Homo sapiens
agcgggttcaggaccgcggatcggaaggacccgctgcagctgggagggga

SEQ ID NO: 679061 - DNA, 90 bp, Homo sapiens
agaatgcaggaaagctgaccaccactactggaatcagccattttaccaagaaagttgggtttcttttactggcaaatagtacttcaagag

SEQ ID NO: 679062 - DNA, 100 bp, Homo sapiens
gggggcgcggagaagaggatccaggaaagggaaaggagacctgcagccccagctggacagtgccctgcaggacgtcaacgacatgtacctgctgctggag

SEQ ID NO: 679063 - DNA, 50 bp, Homo sapiens
ggaagaagggctccaccatggagcgctggccttcctggatgctctgcaga

SEQ ID NO: 679064 - DNA, 83 bp, Homo sapiens
acaaacttcagaccttatctccctctcataaagggatagcagcccctcatgcagggattttgcctaccattttacagtatttg

SEQ ID NO: 679065 - DNA, 100 bp, Homo sapiens
gggaggggaccgcgcccgcctcatttgcgccttgcagcactgctggaccaggaggagacatcacagctttcccagatcgggaggaaaaatatggaatgtg

SEQ ID NO: 679066 - DNA, 75 bp, Homo sapiens
tctgttacgctaggaatatggcaaacattttacatcctgaagtccaaactctagatctacggagctgcgatatat

SEQ ID NO: 679067 - DNA, 101 bp, Homo sapiens
ttgttggggagaagaggattggaggtgtcagtgttaaaggaacctctacaacgaaggtgaagccacggaagataagttcctggtccagaactttacacaga

SEQ ID NO: 679068 - DNA, 50 bp, Homo sapiens
ctgaaggaggacgtgggaccaggcaaggcagcgcccggttaccacatggc

SEQ ID NO: 679069 - DNA, 89 bp, Homo sapiens
ccaatgcccaagacattataaacacccatccaaatgtggataaaaaacttttcactgcagagtctctaattggcctgaagaatccagag

SEQ ID NO: 679070 - DNA, 87 bp, Homo sapiens
gaagagcgcgccgccctctcgtcccactttccagatggctctgagagattcctctgcgaatctgtttttagctatcaagtggcatcc

SEQ ID NO: 679071 - DNA, 100 bp, Homo sapiens
cgtctcatgggagaaagacactgtttcacttgtctcagttggtgagtttgtaagtgatgcccttctcgttcctgacaagtgcaaattcttacaccaggag

SEQ ID NO: 679072 - DNA, 82 bp, Homo sapiens
agggaggacgccgggacacctggaagccgagaaatgggagagtcccgtattctcagagtaaaagttgtttctggaattgatc

SEQ ID NO: 679073 - DNA, 74 bp, Homo sapiens
aagaggaaagaaaaggagtcagggatggctcttacacagtctcgaagatatgactccaggaccactatattttc

SEQ ID NO: 679074 - DNA, 73 bp, Homo sapiens
ttggctgcaacaagtatgttgattactcaaggattaattagtaaaggaattgcagtgcaacaaagtacgtgaa

SEQ ID NO: 679075 - DNA, 99 bp, Homo sapiens
gatgggttgcgacgggggaacaatccccaagaggcatgaactggtgaaggggccgaagaaggttgagaaggggctaagccagctctaccataaccagag

SEQ ID NO: 679076 - DNA, 90 bp, Homo sapiens
ctcaaaagtcaaccgctgaagagcagtattaaaggtggaagaaggtccatatctttttctgtgggtgcttcaagtgttgttggaagtgga

SEQ ID NO: 679077 - DNA, 51 bp, Homo sapiens
agctatggcctgaagacgggattctttagctttgtgtccctggtgatgttg

SEQ ID NO: 679078 - DNA, 100 bp, Homo sapiens
gagcgttggagaatggaaatgaggacagtcattttgtttactcattcagccctgttgcaggtcccaataaactcttcataaggttgacagaagcaccctc

SEQ ID NO: 679079 - DNA, 75 bp, Homo sapiens
gaagtctgcttctgcttccaaaggagaaccgcagtgaaaggtatcagcagatgttgcacacaaacttggtatacc

SEQ ID NO: 679080 - DNA, 88 bp, Homo sapiens
gtgtctgtgcaccacaaggactacagtgatgatgtggatgaggcttccaagaaggagatcaaagacatcctcatccagtatgaccgga

SEQ ID NO: 679081 - DNA, 100 bp, Homo sapiens
gtcaaccccgctgcccgccatcgtgcccgccgcccggaaggccaccgctgcgtccacaagaatcggaatgtcagttaatgctattcgcaagcagagtaca

SEQ ID NO: 679082 - DNA, 82 bp, Homo sapiens
cgtctgcagtgattggcagctcctgcggggtgagtcagatgattccattctccgattggccaaggccgatggcatcgtctca

SEQ ID NO: 679083 - DNA, 95 bp, Homo sapiens
ccattcatacactgtgttacatgagagagccaatcttggacctaccacttgaaaccattagtgagctgaccgtctatgaccagtatttcatcacc

SEQ ID NO: 679084 - DNA, 124 bp, Homo sapiens
aaacaagagtgatctggaggaccagagagtagtgaaagaggaggaagccatagcactcgcagagaaatatgggtggtgatagtggactggatgggttaggaggaccaggtgtacaactaggaag

SEQ ID NO: 679085 - DNA, 76 bp, Homo sapiens
ccgagtcagattggagcatttgtgttgatgaagatgaaagagactgcagatgtgtcatccccacaccagcgagcct

SEQ ID NO: 679086 - DNA, 94 bp, Homo sapiens
cccggacgcgcccgcgcccccgcggctggagggtgggggatatgagactttctactcggaatatcctgagtgttgcgtggatgtaaaacccatt

SEQ ID NO: 679087 - DNA, 50 bp, Homo sapiens
ggtggccatggcccgcaagctccagctctctattggaggcatcatcattc

SEQ ID NO: 679088 - DNA, 90 bp, Homo sapiens
cagcaaaaagccaccaccgtcaaaggaagaactccttaaactaactgaggaagctgtaacgaagttcctgagctctagcccccacctgcc

SEQ ID NO: 679089 - DNA, 101 bp, Homo sapiens
ccttttaccatgaatagttctactccttctacaggtgtgtatgacatgaagaggagcatcggcggcgtgaggaagaaatgatccgacacagagaacaggag

SEQ ID NO: 679090 - DNA, 82 bp, Homo sapiens
cgatgtcaccattgttcagctgggtggccaagggcagctgcaatgactctccgcacggtattattgtcattgcaagcactat

SEQ ID NO: 679091 - DNA, 100 bp, Homo sapiens
tgggaaagagagttgtgagtctctttcctgtttacctccagtgtcccttcttccacatgaaaaggataagggaaggtggccatccagaaggaggacttgc

SEQ ID NO: 679092 - DNA, 116 bp, Homo sapiens
aaactgcccttccatctacaaaagctgagtttacttctcctccttctttgttcaagactgggcttccaccgagcagatttggactgagcaacaaatttgaatctgaattcccttct

SEQ ID NO: 679093 - DNA, 75 bp, Homo sapiens
gatctcctcaaagaagtttgtccttctgctattgatcctgaaggttagctcccagcgatgccagatgggatcagc

SEQ ID NO: 679094 - DNA, 75 bp, Homo sapiens
tggccaacacggtcttgctgaaagccagggaaggttctttgcatggaggtttgtgactgcactgtatatgacaga

SEQ ID NO: 679095 - DNA, 50 bp, Homo sapiens
tgtttatgaagcactgagaaatgaacatcatcttcagcgggctatttcag

SEQ ID NO: 679096 - DNA, 75 bp, Homo sapiens
ccgaggtctccgcccgcaccatgcggctgggcaggtgctggagaatctggtaaaagcaccattgtgaagcagatg

SEQ ID NO: 679097 - DNA, 100 bp, Homo sapiens
cccctggccagcaggacggcgcagcctccttccccgcaggggtggcggtggtggcagcagtgatcctctgaacctgcagaggccccctccccgagcctgg

SEQ ID NO: 679098 - DNA, 82 bp, Homo sapiens
gcagaggatcctggaggcctgggaagccaacgaccacacgcagtctcaccaacggctttgggggtgcgaggagcgagcagga

SEQ ID NO: 679099 - DNA, 58 bp, Homo sapiens
cacgccgccgcttgtgctgcagccatggtgtcttatctgacttggggtgtgctgcagg

SEQ ID NO: 679100 - DNA, 100 bp, Homo sapiens
gacaacaggatttggtctccacggtcaacgtggtatactcgcagacaacccaaccggtatacaatgcctcctgacaaggtgatccgggcgggccccgcag

SEQ ID NO: 679101 - DNA, 75 bp, Homo sapiens
gtggttgaatcataggcaagtggtgtgtggcacaaaatgcaacacggtatgcatcgtgcagaagcgagacactaa

SEQ ID NO: 679102 - DNA, 80 bp, Homo sapiens
cctgctctcgggcggcgccgccaggacgcccggggcgcccagcaggagggtactccaaagattcaggtttactcacgtca

SEQ ID NO: 679103 - DNA, 100 bp, Homo sapiens
gcatcagcaagagcaacagtagctacagccccggcggcggtgcctgttccagtctttgctgctgcaaaatctctaccccaaatttgcgtcaccctgggca

SEQ ID NO: 679104 - DNA, 74 bp, Homo sapiens
ttgccctggtcttgctcggccgatgaagtgcagaggtttttttctggtcagcccaaggctgccccctcggtcac

SEQ ID NO: 679105 - DNA, 100 bp, Homo sapiens
ccgagcactgtggaggcctttgacttggcgcagtccaatagggagtgcctgcagggcaccatccgcaacagccaggaggcggaggtctcctgccccttca

SEQ ID NO: 679106 - DNA, 100 bp, Homo sapiens
cccccggcgtggggcgggacagcggccccctggagggggcagtcccgggagaacctgcggcggccggagcgaaacgggtatgcaggagattagaagccag

SEQ ID NO: 679107 - DNA, 82 bp, Homo sapiens
ccatgagggcaagagcttccagctgagacaccgtgagaagaggactgtcagaaggacgtagaaggcacggttttactgtgag

SEQ ID NO: 679108 - DNA, 82 bp, Homo sapiens
cgccggcgaggggaagccgcgcggccggccggccgactaggggaactccaaattcagctaatacccaaggaaattcaacacc

SEQ ID NO: 679109 - DNA, 75 bp, Homo sapiens
aacctcctgcaaaagtggaagcgaagccgaaaaaggcagcagcgaagttcccagtgacctgacagcagaggagcg

SEQ ID NO: 679110 - DNA, 87 bp, Homo sapiens
ctccttggtcgccgcgtccttggctggcgtgaccatgaatggcacctacaacacctgtggctccagcgacctcacctggcccccagc

SEQ ID NO: 679111 - DNA, 100 bp, Homo sapiens
tttagccggctgcccagattcctttttgcaccatccgtactaccagttttcacctctgacagagcccagacaccatgaacgcaagtgaattccgaaggag

SEQ ID NO: 679112 - DNA, 75 bp, Homo sapiens
ttgcagaaggaataaccttcatcaagttttatgctccatgcaggttcacaactacatgatgccacccctcgaccg

SEQ ID NO: 679113 - DNA, 100 bp, Homo sapiens
cgcgcggcgtttacccagcgcagcgttccaccgctcgggtttggctgggtctacttccccagcaggacagcatcattctcctatatcttctagacatcac

SEQ ID NO: 679114 - DNA, 75 bp, Homo sapiens
ctgggattcgcgctgctgggcacccacggagcctccggggctgcatcaagatggtgctcatgtggaccagtggtg

SEQ ID NO: 679115 - DNA, 98 bp, Homo sapiens
cgaaatcaaagcgagagcgcctcggcctctccagctgtccgcggttctctacttttagagtcgaaaataaatcctaacactgcataccagaaacaaca

SEQ ID NO: 679116 - DNA, 50 bp, Homo sapiens
gattcattcctcactgcacacaggtactttaacccaagcggtgagcccct

SEQ ID NO: 679117 - DNA, 100 bp, Homo sapiens
caagtcgcctccagaccgcagacatgaaacttgtcttcctcgtcctgctgttcctcggggccctcggaatcggggctgtctgtatggattggtgggcagc

SEQ ID NO: 679118 - DNA, 135 bp, Homo sapiens
tgtgagcaacccgcaaacggtgggggtcggccggggccgcttcaccacttacgaaatcagggtcaaggagtcaaattgactttatcagctttaatcgatgggaagaacttcagtgcaggaggtcacaaggttggc

SEQ ID NO: 679119 - DNA, 100 bp, Homo sapiens
ctaatatgttgatggcattccagaatatctcagatgagcagggcttttttccagacttcaagctcccattccaacagtaagagcttcttccacatcacag

SEQ ID NO: 679120 - DNA, 50 bp, Homo sapiens
gacaccccggaagctgggaaatgtgcaagcagctaatgactcagtctgta

SEQ ID NO: 679121 - DNA, 50 bp, Homo sapiens
cacagacgtcacaaggtttttacagatttctctatgaatcatcatcaaga

SEQ ID NO: 679122 - DNA, 80 bp, Homo sapiens
gcggggtcggggccggctgaccaggaacctgggcgagcagcggcgggggcccgagggttactccacaggatccgctgaac

SEQ ID NO: 679123 - DNA, 59 bp, Homo sapiens
gccctcaagtcgacaggggatgggaccctaggttgcccgaagctcagcagagagtcgga

SEQ ID NO: 679124 - DNA, 75 bp, Homo sapiens
gctgctgacgctctgggtgaagaatggaaggtgtcattccacacatccacaaatctctgattgggaagaaaggac

SEQ ID NO: 679125 - DNA, 100 bp, Homo sapiens
ctcgagttgttgcacagtatgctcaacgaaatgcaaagttccgccatggagtcatagttgcagctgactccagggctacagcgggtgcttacattgcctc

SEQ ID NO: 679126 - DNA, 120 bp, Homo sapiens
cttgtgcctccattcccgggaggggggagcggcgttggaggccaccgtttccaggtgattttacaacgagatgctgctctccatagggatgctcatgctgtcagccacacaagtctacac

SEQ ID NO: 679127 - DNA, 100 bp, Homo sapiens
ctcttctacatcggtttctacctcaaggacatggagcgcttgaaagagccaatggagatcttcgtggatgatgagacgaagttgacgctgcatgggttgc

SEQ ID NO: 679128 - DNA, 96 bp, Homo sapiens
caaactagtgctccgcgctggcagtctggaaaaggcagatgtatacaattggaaccaagccagttgctcatattgaccaatttactgctgacatgc

SEQ ID NO: 679129 - DNA, 74 bp, Homo sapiens
cccagtcgcaagaaccagggtgacttctcgctctccgtcagtgacaaccatgagtggaaaaaactaattatggt

SEQ ID NO: 679130 - DNA, 100 bp, Homo sapiens
ccatggctgagagtaggctccgggccccggacctagagaactggaccccatcctgactgaggtcaccctgatgaatgcccgcagtgagctatacttacgc

SEQ ID NO: 679131 - DNA, 137 bp, Homo sapiens
gaatcccacattaggatggtgaaccagcagctactagggagaagtctgcaagatgtcaagggccaagaagtcccagaggaaaactccctcttcgtcatgaccaacgtgatcctcaccatgaaccagacacagggcct

SEQ ID NO: 679132 - DNA, 51 bp, Homo sapiens
ctggctccccagaatacctgacagagagagaaaaggaacagttccgtaagc

SEQ ID NO: 679133 - DNA, 74 bp, Homo sapiens
gtgtggacgccactacagttcatcaacatcaactacgtccctctgaaggaacgaatgcaggaatttgggaactg

SEQ ID NO: 679134 - DNA, 100 bp, Homo sapiens
ttctgtggagaataacggctgcacctggagattgacgcagagtgggcggcggtggtgatgttccatttaagcagacctcttccatagctgtagctggagc

SEQ ID NO: 679135 - DNA, 74 bp, Homo sapiens
gcagtggtcgcttcttctccttggtgactctcctattccatctgtttcttcgggatcatcttcacctctttcag

SEQ ID NO: 679136 - DNA, 100 bp, Homo sapiens
gaagagggcagagccgtgcatggggctgctccccaggacctgagcaggaacctggagttttcagttggttgaatctggcgatgtggaacccatggatatg

SEQ ID NO: 679137 - DNA, 130 bp, Homo sapiens
ccgctgcgcccgacgctccctgtctgggaccttctccctgcctggacccctactattgcaacaaggtttcccacaagaaactggactgcaagattcatcggagaatggtggctcccaggttccatcaagc

SEQ ID NO: 679138 - DNA, 98 bp, Homo sapiens
acacccccattttcttcatcagggatcccatattgtggaagatagatgataagcctgtaaaaattgacaagtgggatggatcagctgtgaaaaactct

SEQ ID NO: 679139 - DNA, 96 bp, Homo sapiens
ggagagaggtacagccctcggcctacaagctctttagaccccaagactgcttctgagacagaaacagatatctgtgctgaatgggagataaagacc

SEQ ID NO: 679140 - DNA, 100 bp, Homo sapiens
caggatttggtttcagcatgtccttctctgaatgatgaatacttttactactgtgacaacattaacgacagaagccctgggggatgcggaggaagatgag

SEQ ID NO: 679141 - DNA, 98 bp, Homo sapiens
cagtggtgtgaacgggcatctcctcccagcagctcatgcaacatctcctctggggaaatgcagaagcttttcaggctgcctttcgagctcaggggccc

SEQ ID NO: 679142 - DNA, 82 bp, Homo sapiens
ctccttgccaggccttcaaccactatctcagtgcaatggaactccatccggcacaacctgtcactgcatagtcgattcatgc

SEQ ID NO: 679143 - DNA, 99 bp, Homo sapiens
tctccctccagaagttctggcagcaccgcatcaaggactatcacagttacatgctacaggatgctcacaactgtattcctgagctggacagtgagacag

SEQ ID NO: 679144 - DNA, 82 bp, Homo sapiens
ctgcgcgggaagaaaatgtcccaaaggatcctcaagaggagatgatggcggggaatgacggagtctcactgtgttgcccagg

SEQ ID NO: 679145 - DNA, 90 bp, Homo sapiens
gtcctactcaaaggagacccagactcctcttgccacgcatcagtctgaagacagagtcttgctctattgcccaggctgcaactggtgtga

SEQ ID NO: 679146 - DNA, 100 bp, Homo sapiens
cttgcttggagatcaggacgcaaaggcttgcattgatgacaatgttgatatggtgaagtttctggtagaaaatggagcaaatattaatcaacctgataat

SEQ ID NO: 679147 - DNA, 100 bp, Homo sapiens
aaacatgtactacagccagtcttctatgtttccacatcggtcagaaaaagatactctatcaagaagaatatctaatccgtaccttgaacatacgccttcc

SEQ ID NO: 679148 - DNA, 74 bp, Homo sapiens
tgatctgggaatgtctggcaactctggttgcaacaaggacagtgtcagagcaggctgtaaaaaatgtggctacc

SEQ ID NO: 679149 - DNA, 83 bp, Homo sapiens
cgaagatgggcgacccggatctcctggaagtgttggcggaggaaggtactgtgagaatagagatgtttcgaaatatgcagaat

SEQ ID NO: 679150 - DNA, 97 bp, Homo sapiens
tgagagctttattaccagacatgatctttcagatcccatgagctgcgttccaaggtggtttccctgcagctgctcctctctgtgttgcaaaatgctg

SEQ ID NO: 679151 - DNA, 51 bp, Homo sapiens
ctccccagccacgtggaactgccagacggttttgctgtctcagcctactgt

SEQ ID NO: 679152 - DNA, 73 bp, Homo sapiens
gactggagacaacctgcagcctcctggcaccaaagatgcctgtgaggagccaccaacatttgaagctatggag

SEQ ID NO: 679153 - DNA, 74 bp, Homo sapiens
gctggtccgatggttgtgcactgcagcgtgttcccgagggagctgaaggaggtgtttgcttcgtggcggctgcg

SEQ ID NO: 679154 - DNA, 75 bp, Homo sapiens
cacttggcgtgacttcactacttttaagcaaaagagtcgtttatacgcaatgcagactggaatgaagatcgatag

SEQ ID NO: 679155 - DNA, 51 bp, Homo sapiens
gtcgtcgatgccagcttcttcttgaaatccaaaacctattgatgtacaagt

SEQ ID NO: 679156 - DNA, 82 bp, Homo sapiens
gtgagcagggctgagatgggcaccgcggatctggggccgtcctcaggttttaaaatcaaagatgggaaaatcggagaaaatt

SEQ ID NO: 679157 - DNA, 83 bp, Homo sapiens
gtcgcggttgccaagcgctcggcgcttggcgctggcgctggccaaggcgtaagactttgaccccgacgcaggcttcagtgatt

SEQ ID NO: 679158 - DNA, 90 bp, Homo sapiens
gccttcattgaccacttcggcttcaatgatgaggagtttggggagcaggaggagagtgtgaagagattaagtgagagagagagaattgga

SEQ ID NO: 679159 - DNA, 71 bp, Homo sapiens
cagcccgcccaactcccagcggagagcaaggtgaatgaaaactttgccattgatttgatagcagagcagcc

SEQ ID NO: 679160 - DNA, 75 bp, Homo sapiens
gcgtctgctcaggttgcagcaggagagagatgagaccctttttgctcttcctgctgcatctgagcctgtgatacg

SEQ ID NO: 679161 - DNA, 85 bp, Homo sapiens
ttccaatctctgttgcttcatcccaggaaaggaaagcaagcaagtggagaccaagacagatgccaagaatggagaggaaaggggc

SEQ ID NO: 679162 - DNA, 101 bp, Homo sapiens
tcccaaaaagacccagctggagcaggaagctgggaaaccacaaaggaatgagtgcctggtgaagaatgtgatgggatcactagcatgtctgcggagagcgg

SEQ ID NO: 679163 - DNA, 95 bp, Homo sapiens
gatccgagctcgccatccagtttcctctccactagtccccccagttggagatctgaacactccatcaaagtactcgaactgatctccaccatctg

SEQ ID NO: 679164 - DNA, 100 bp, Homo sapiens
attatatccgttttcctcggagtgagagaaaactctttttagatatcatctgagaggctctctaggaaacaccagaattatcagtgaagaatatattaaa

SEQ ID NO: 679165 - DNA, 103 bp, Homo sapiens
ccggggagtggtgcctcatggaaagcgaccccggggtcttcaccgagctcattaaaggattcggtaagaatgattgatgttggctgatattggagtgctcatt

SEQ ID NO: 679166 - DNA, 100 bp, Homo sapiens
caacctggggcccaaagggaccataaagatgtggagctgatcagaataatgttcagcatcaaccccctggagaacctgaaggtgtacatcagcagtcggc

SEQ ID NO: 679167 - DNA, 83 bp, Homo sapiens
gaagaatttcctctgaagcaccggccggatcacctcaacagtcacgtcagacaagtgcactcaacagaacggcccttcaaatg

SEQ ID NO: 679168 - DNA, 76 bp, Homo sapiens
cctgccccgccggagcagcatcatcaagggtgtcgaagtgcagacagactacgtgcccctgctgaactcgctggcg

SEQ ID NO: 679169 - DNA, 96 bp, Homo sapiens
cagtagttaaaaaactagatccaggttggaatcctcaggtcaatgatgccttccttcatgtgatacaggggaaatccgtgggcaaggtgcttctcg

SEQ ID NO: 679170 - DNA, 100 bp, Homo sapiens
ttcaagaatgaagccgcggaccctcacgttttttggaccatatacaaacaacactctttttgaaactgatgaacgctaccgacatttaggattctctgtt

SEQ ID NO: 679171 - DNA, 100 bp, Homo sapiens
caacagcggaatcatcgatgcaggggcctcaattaatgtatctgctgctgtgacttactcgaagcctcgattggccacattttggtactacgccaaggtt

SEQ ID NO: 679172 - DNA, 95 bp, Homo sapiens
ggaacttttaagtggagtggtggatcagaccaaagatggtgaacagcagagaatttcaaaggaccttgctaatatctgtaagacggcagctacag

SEQ ID NO: 679173 - DNA, 74 bp, Homo sapiens
cagacttgagtcctggtccttctgcagaggcctgagcagtcgaaagaaccctcttggtcttatcattgccctag

SEQ ID NO: 679174 - DNA, 100 bp, Homo sapiens
ggatttgcgacgctgtcacaggttccagggtataccccgcgaatgaaggttgcagatctgagcatgggagacctgcttttgcacactaccgtgatctggc

SEQ ID NO: 679175 - DNA, 75 bp, Homo sapiens
cagttaatcctcaatttaagcctgatctaacccctagaaacagtggaaagaggcaaaacctgatgaattaatgga

SEQ ID NO: 679176 - DNA, 75 bp, Homo sapiens
ccagttccaattctttcaagaggcagttccacccaatgactactatgcaaggttcacctttccttgccagtgaag

SEQ ID NO: 679177 - DNA, 90 bp, Homo sapiens
tggcgaccgagacggtggagctccataagctaaagccactcccatggttcaagctttgactacaaccagaattcagaggcaggcagaagg

SEQ ID NO: 679178 - DNA, 51 bp, Homo sapiens
cttcctgcccaacaaacagaggacagtgcaaccgcctccacgtttgataaa

SEQ ID NO: 679179 - DNA, 107 bp, Homo sapiens
aattgttttttctacctgttgacgtgtcaagcactaactagcatgcaagcggcaagatgtcctacagatgaattatctttaaccaattgtgcagttgtgaatgaaaa

SEQ ID NO: 679180 - DNA, 100 bp, Homo sapiens
attgttgcaaagggcattttgagagcaggtcctacacctacgatagctactatagcaggagtcggagtcgaagtagaagccagagaagtgacagttacca

SEQ ID NO: 679181 - DNA, 74 bp, Homo sapiens
ccaatctgccttcatcccttcgccgtgtgaattcctttcagatgtgttcagagcaacattgttttgttgacaca

SEQ ID NO: 679182 - DNA, 83 bp, Homo sapiens
agccaaacagagagaccttgaaggggcagtcagtagggggattttggcaattgcttggagcatggcagatcctgaattgttac

SEQ ID NO: 679183 - DNA, 100 bp, Homo sapiens
actgccccggcggggaggacgagaatcggtgtggccagcgatctgtacatgagacccaggaattatttccaaagcaagattcatatgctgaaggggtaac

SEQ ID NO: 679184 - DNA, 75 bp, Homo sapiens
acgattcgcggcttgtggggccgaggacagacacaattgttcaggagacaacttttgatttgggaggagatattc

SEQ ID NO: 679185 - DNA, 100 bp, Homo sapiens
ctattaggaatacaggaacttctaaatgaaccaaatatccaagacccagctcaagcagaggcctacacgatttactgagacggagtttcactcttgtcgc

SEQ ID NO: 679186 - DNA, 101 bp, Homo sapiens
atagtgaagcttggaatccctcagaacactattttggtgcagactttgctgagggtgacccaggagaggcgggagatttttgagcagcacctgaagagcct

SEQ ID NO: 679187 - DNA, 75 bp, Homo sapiens
atcagaaagctgctgaagaggtggaagcaaagttcaagaccgccgggagagcctgcccacctccccaccctggac

SEQ ID NO: 679188 - DNA, 108 bp, Homo sapiens
ggggagggggcagcggctgtctcacggaccacggcggcgcccgcagctcctcaccgtggatgaggatcgcagtacggaacctgaccgattgcaggtgtttcacaagag

SEQ ID NO: 679189 - DNA, 83 bp, Homo sapiens
gtctgggcagccacggccgggggcgtctttcagagcattacgtgcctccggagccagcgtggtggccatagacaacaagatcg

SEQ ID NO: 679190 - DNA, 75 bp, Homo sapiens
acggcccgaggatccggaaccaggttcttcacacacccccattcggcgtagtacccagagagctcaagatgtgtg

SEQ ID NO: 679191 - DNA, 83 bp, Homo sapiens
tactctgactccacctttacttttacctacgttggcggccccagaaggggcctttacaacaactaaacggacaggcattccag

SEQ ID NO: 679192 - DNA, 83 bp, Homo sapiens
tggagcggtacatcgcctcggtgcagggctccaccccgtcgcctcgacaggattttttatcaagcagaaatgcatcgaacaac

SEQ ID NO: 679193 - DNA, 100 bp, Homo sapiens
tgtgactgctttggacgtgggagtcacctgaaagccaggaaatgtgaaggagaacgacctgctcagaatgagaagaggaaggagaaaaacataaaaagag

SEQ ID NO: 679194 - DNA, 50 bp, Homo sapiens
ggcggcggcgggtgttgtgagcgggaagaatgtcgtactctcaggaggct

SEQ ID NO: 679195 - DNA, 75 bp, Homo sapiens
gagaggctgcagcggaggcggaagcaggactcggggcacttgggtaccgggaagccagtgttgaagtgatggaga

SEQ ID NO: 679196 - DNA, 83 bp, Homo sapiens
ggacgaagccttcaaatccatcaagctcatcaaaaggcataatcaccagcaacacccgggacaataatacgggggccacctac

SEQ ID NO: 679197 - DNA, 82 bp, Homo sapiens
gcccttgttcccccaaatgtctgactctgactctcggactgagaaacgcaagaacatccagtcatggataaaaatgagctgg

SEQ ID NO: 679198 - DNA, 83 bp, Homo sapiens
acgaggaatacgatgtgatcgtgctggggaccggtctcaccgtcagtgacttcctgtcgggccgttcgccactgacactggcc

SEQ ID NO: 679199 - DNA, 90 bp, Homo sapiens
cgcgggaggtgttcgagaacgaccccgagacggatgagacttctgtgagcagcgaggattttgatatgagcgactccacatggatgtcag

SEQ ID NO: 679200 - DNA, 50 bp, Homo sapiens
ggaccgcgcggaggcagcggggtggaagctgaccccaagccacccttcac

SEQ ID NO: 679201 - DNA, 100 bp, Homo sapiens
cttggtacaaggagtatatcatgaaaattctacttcaaagcctcgtggcaatacagcttcactgatagctgtacccgctgtgcttcccagtttcactcca

SEQ ID NO: 679202 - DNA, 75 bp, Homo sapiens
cgactgtgcaggaagaaaacgagccagtgatttacaatagagcaagaaaattggagattcataccgtggctactg

SEQ ID NO: 679203 - DNA, 76 bp, Homo sapiens
ccttcaagatttcctacatcccggatgaagaggtgccgacgccaccgccgagcccatgatcctggaacagtacgtg

SEQ ID NO: 679204 - DNA, 98 bp, Homo sapiens
tattcggttctctacttccaacagaagccttcacagttgttgatcacatagcatggtcatccactcacagcttaaaaaaatacagggagcatcggaga

SEQ ID NO: 679205 - DNA, 83 bp, Homo sapiens
tgccggtggaggaatttgtggctggctggatctctgggttttcagagaaagatgctgatgaggtgaaaggaatttttgtagat

SEQ ID NO: 679206 - DNA, 87 bp, Homo sapiens
cacaactgtcctcttgacagcatggatggccctggccaacgtcaacattgggagcctcatctgcaatgtaggggccggtggacctgc

SEQ ID NO: 679207 - DNA, 82 bp, Homo sapiens
cggagctgggcgcggattcgccgaggcaccgaggcactcagaggaggcagccagataagctggtggtggtatggacccgtcg

SEQ ID NO: 679208 - DNA, 51 bp, Homo sapiens
aaacttttcctccctgaacctgagggaggaagtcttcagtgcctactctgc

SEQ ID NO: 679209 - DNA, 95 bp, Homo sapiens
atttccgtggcaaccaaagacgggcgcctatcagtacacaataaggcgttttacagggaaccaaattgcaaaaatttaccagcagaaccccgagg

SEQ ID NO: 679210 - DNA, 100 bp, Homo sapiens
agaagatatcttctctttgcaagacagtttaaacccaaggtttgcctgcaatgagatttcattctctacatttaaaggacatcctttctgagctgctgtg

SEQ ID NO: 679211 - DNA, 98 bp, Homo sapiens
acggggcgccggcgccgccgcccccgggctcgcggcctgcaggtgctggagaatctggtaaaagcaccattgtgaagcagatgaggatcctgcatgtt

SEQ ID NO: 679212 - DNA, 100 bp, Homo sapiens
tgaccgcagcactggggaaacgatccgctcccaaaacggtgaccctggcagcaaccccaacaaacgccagaggcagccccctctcctgggagatcacccc

SEQ ID NO: 679213 - DNA, 100 bp, Homo sapiens
cccggacgagaagcgcagcaacgtgcggtgggaccacgagagcgcaaaagaatgcatgtgcagttgtccacaagccggcttcggactgcccctggtatgg

SEQ ID NO: 679214 - DNA, 82 bp, Homo sapiens
gtcccgaccctggccgccccgagcggagcctggagcgggagatacagatgacccaccaagaattactcagaaccctgtgatc

SEQ ID NO: 679215 - DNA, 75 bp, Homo sapiens
gattctccctctcctagaggcgcagcagtgttgtactgctacttctataaacggacagccgtaagactaggcgat

SEQ ID NO: 679216 - DNA, 75 bp, Homo sapiens
gggagtcacctgaaagccaggaaatgatgtgaagttcatttccaatccgccctccatggtggcagcggggagcgt

SEQ ID NO: 679217 - DNA, 74 bp, Homo sapiens
caacaccaccaaatgcaacgagggcccaaatgatgataattccgaagaaggcttccacactattcattcaggaa

SEQ ID NO: 679218 - DNA, 75 bp, Homo sapiens
ttttagtagtcgcagacctcgaaatgatagacgttgccagacattagtggataagtttatgaaactggatttgga

SEQ ID NO: 679219 - DNA, 106 bp, Homo sapiens
aacaggggtcacggggcaaggagcacgtggcagcgcaggaaacagggcgaagctgtgctcaggcccgggctggacgcagagccagagctgtccccagaggagcaga

SEQ ID NO: 679220 - DNA, 89 bp, Homo sapiens
gagagacgtcgctgaggggcttgcctgaagcgagggacaaaacttacctggggtccctacttatggttttacatgcttcgggctgctac

SEQ ID NO: 679221 - DNA, 100 bp, Homo sapiens
tggagtacgtgttcagcagccctgcaggagtggacggcaatgtttggtgcacctcgatttggaggaagtagggcagggcccttatctggaaagaagtttg

SEQ ID NO: 679222 - DNA, 100 bp, Homo sapiens
agcagctgcccgtcctcctgcagacgcttctcggaaacgaccatttcgccagggtttacaaagatgagcaggtggtggtgataaaggataaatacccaaa

SEQ ID NO: 679223 - DNA, 90 bp, Homo sapiens
agccatcagcttcagctccagctccgctctcttcggctgccccaatccccggcagctctctcagaatacagaaactgcagccatgaccac

SEQ ID NO: 679224 - DNA, 75 bp, Homo sapiens
ttttttggaacagaagatcataacaatgatgatgttatgttgatttctgtggaaagtcctaatttgacaactcca

SEQ ID NO: 679225 - DNA, 75 bp, Homo sapiens
ccttcaatactacctttatttccaccatagaagaggatgtggagaactttgacgtgaccaacttgtctcaagaca

SEQ ID NO: 679226 - DNA, 75 bp, Homo sapiens
agctcacttgcacccaggaaggatgggatttccagcctcccctctgcaaagggcaagactggagagttaaatcag

SEQ ID NO: 679227 - DNA, 100 bp, Homo sapiens
cagaccctggagcctcagttggaagcagccgatccagcctgcggagcctgtggggcagttgatgaaacttctgagcaggaacaaaaacataaagaaacca

SEQ ID NO: 679228 - DNA, 100 bp, Homo sapiens
gtcattacatatgagatgagtctcttgaagactacagatggtgttgactttaaggtgaaaacaatttcagtggatggaaataaggctaaacttgcaatat

SEQ ID NO: 679229 - DNA, 90 bp, Homo sapiens
cttctagtttatgtgcttccaaatcagacgaaggtctcccagatggtctaaggcaaaagaatgcatgtgcagttgtccacaagccggctt

SEQ ID NO: 679230 - DNA, 117 bp, Homo sapiens
ccgcgagcacagagcctcgcctttgccgatccgccgcccgtccacacccgccgccagatgagcgggatcgtgtgcagaagaaaaccttcaccaagtgggtcaacaagcacctcatca

SEQ ID NO: 679231 - DNA, 100 bp, Homo sapiens
tcaaacagcagtgttagcaagacctgggggagagggaacactgactatgccaaatggagactacattgaaggttattttagtggagaatggggatctggg

SEQ ID NO: 679232 - DNA, 80 bp, Homo sapiens
ctgtgttggtgatattatcaagctagaaaataaccagtttgtggcgctcctggagcagaatggaggctacgggagcgcca

SEQ ID NO: 679233 - DNA, 87 bp, Homo sapiens
gatttcttaaaggatagccaattgcagtttgaggctgtgaagtggatcctaaagagaggatagcacgccaacgaaaattattacaga

SEQ ID NO: 679234 - DNA, 75 bp, Homo sapiens
tctcccttcatgtctgggtcatggttatccaggtacctcaagggaagtacaaagttttgccaacagagcgaacaa

SEQ ID NO: 679235 - DNA, 82 bp, Homo sapiens
gcggattcgccgaggcaccgaggcactcagaggaggacaggaagatgtcacccaagcgcatagctaaaagaaggtccccccc

SEQ ID NO: 679236 - DNA, 74 bp, Homo sapiens
agacatctacaaccttcgatctcctgacgaccagttgtttggggaagaagatgctgatcaagaagtatctcctg

SEQ ID NO: 679237 - DNA, 89 bp, Homo sapiens
agtttgctgcggtcagcatcacaactaatcaggctgtgttccttgcctgtatctccccttggttcaatagctaccagatttttggaaga

SEQ ID NO: 679238 - DNA, 100 bp, Homo sapiens
ctttgcagaaatgtgtgcagactacatggcatctaccatagggtttcctccagcttatggaggcatatctgaggtgaatcaacctgccgaattgatgccc

SEQ ID NO: 679239 - DNA, 100 bp, Homo sapiens
cttaactagagaaggaaacgggactaaactggcgggctccgtggaagcgtggccggcagcgtcccggacgaggagggatccacaaatgctaaagagctgt

SEQ ID NO: 679240 - DNA, 100 bp, Homo sapiens
aagttccacgctctgttaaaggaagagttcagccctgaagacatccagatcattgcctgtccatctatggaacagggaagaaacccttttttcttggagc

SEQ ID NO: 679241 - DNA, 82 bp, Homo sapiens
gatacagagacgatggtcggaatcagatttgaaaatgaaagtaaatcttcccaaacatctggcacaaatgaacagtcttcag

SEQ ID NO: 679242 - DNA, 74 bp, Homo sapiens
gggctcaggatggggcggccgtggtgaggaaccctggactctcagctatcagttgagggatttgcagttgataa

SEQ ID NO: 679243 - DNA, 82 bp, Homo sapiens
caagatgatccaccagcggttccatcctacacttggatacaaggcagatccaaccatccccaccgtggtcctacgatcagtc

SEQ ID NO: 679244 - DNA, 97 bp, Homo sapiens
ctcgtcctaatccacctcggctgacggcgcgggatccctggctccgcgagactcaccccacacagaccgcgtttctctccagtgtcgacctacacac

SEQ ID NO: 679245 - DNA, 83 bp, Homo sapiens
gcactgctttccactcggctcctgtcgtccgttctctcaggctcccgttcaggtttggtgcacctcgatttggaggaagtagg

SEQ ID NO: 679246 - DNA, 100 bp, Homo sapiens
ccagtgagggtgtacaaatacccctttgaattaattatggctcaatgtacaggaaagggaagcacagtttggaacaacagcagagatatatgcctatcga

SEQ ID NO: 679247 - DNA, 82 bp, Homo sapiens
caacatccactattctttctccatcaccaggaatccggtcaataatgaggtgttgacttcaaaatcaaaactgtagagctaa

SEQ ID NO: 679248 - DNA, 100 bp, Homo sapiens
gattttgacagtcgtagatacaaatttttggatgatgatggatccatttctcctattgaggagtcaacgagctctgcaggagtctgcaggtcacccggag

SEQ ID NO: 679249 - DNA, 83 bp, Homo sapiens
ccagaagtctcgccctcgtgcggctgaggagcctgggatcccagacctgaacaaggacccttgaacatctgtgaagaaatgac

SEQ ID NO: 679250 - DNA, 87 bp, Homo sapiens
tgtgctcgcgctactctctctttctggcctggaggctatccagcaatatatacagccctgctctgggacacacctccattggattta

SEQ ID NO: 679251 - DNA, 75 bp, Homo sapiens
attcaacttcaatttttctgcagtggctctgggtccagccccttacttaaaggggtttgccaacttgttaataag

SEQ ID NO: 679252 - DNA, 100 bp, Homo sapiens
tcgacttagccctgctccaggaatgggacctcgagtcactgtgcagtaccatcccactgatatcacgggcccgctcaacctctcagatccctcggtcagc

SEQ ID NO: 679253 - DNA, 50 bp, Homo sapiens
gccgccctgagggaccccgctcaggagttcaaagaaggacgcagagccag

SEQ ID NO: 679254 - DNA, 95 bp, Homo sapiens
cgggaagccggcggaccgcgtcctgcgccggagcagggagagtcccgtattctcagagtaaaagttgtttctggaattgatctcgccaaaaagga

SEQ ID NO: 679255 - DNA, 100 bp, Homo sapiens
aaattaaagcaagaaacccctgcagtacttgaagatttgcataaagccaacattcgcaccgtcatggtcacaggacccagccttgatgcccacttgggag

SEQ ID NO: 679256 - DNA, 100 bp, Homo sapiens
ggatgatttcgcagcttttgtagagaagtgctgcaaggctgacgataaggagacctgctttgccgaggagggcagaaaatacgcaagaggaactccgaga

SEQ ID NO: 679257 - DNA, 74 bp, Homo sapiens
ccaatgatgatgcacagtttgatgcttcccattgtgacagtgacaagggtgcggacaaggcaaaatctcagcaa

SEQ ID NO: 679258 - DNA, 82 bp, Homo sapiens
ccctcctcctccagccgcccgcttcctccttgccaggagattgtagaaggcatgaaacaaaaaatgtggagtattgaaaata

SEQ ID NO: 679259 - DNA, 100 bp, Homo sapiens
gtgtaccctgcaaatgagcgattttggtatttcagcagaaagactttcacagagactttcttcatgagattgaaacagaattcagtagctttgttgtccg

SEQ ID NO: 679260 - DNA, 100 bp, Homo sapiens
ggcgcctccttcatcgggatcctggacattgccggcttcgagatctttgatgtgattgcatactcggaacatcgttaccgtatctttggggaaaccatcg

SEQ ID NO: 679261 - DNA, 96 bp, Homo sapiens
caaaccagacccctgtgtcatcctcaagatgcagtctcatgggcagtggtttgagcttgacagagccaattcgctattaaaccagactcaacagcc

SEQ ID NO: 679262 - DNA, 83 bp, Homo sapiens
aaaccttctcatctttgtggtcgtgtttttaaagtaggagagcctacatattcttgcagttacatggacacagaacagtatga

SEQ ID NO: 679263 - DNA, 75 bp, Homo sapiens
ccggggctttcgacatgccccccaggctattgagggcacctacattgacaagaaatgccccttcactggtaatgt

SEQ ID NO: 679264 - DNA, 124 bp, Homo sapiens
gcagactgtgaacaataaaagagtttctgcagcatctgtagctttattgaacaccagcaagaatggcatatcaggtgctgtaaaatacctggagtgctcggcgctcacacagcgaggcctcaag

SEQ ID NO: 679265 - DNA, 89 bp, Homo sapiens
tggaaaattggaattgctttcttcagggccttcaatgccattcatcaaagagggcactggatgtgtgtgagaagtggggagaaatgcca

SEQ ID NO: 679266 - DNA, 100 bp, Homo sapiens
atggggacgctgtggcaccactggtcgccggtactcatcagcctggccgccctgttttccaaaggaattttggagagtaaaaggctgaaccttgttaaag

SEQ ID NO: 679267 - DNA, 75 bp, Homo sapiens
agaatcgccgcgggggaccgcccttcgccttcgttgagttcgaggacccgcggtcactatcatatgacaaaggct

SEQ ID NO: 679268 - DNA, 50 bp, Homo sapiens
aaggttattctgggccggtaccaggcttatttataaagctgaatcctgct

SEQ ID NO: 679269 - DNA, 101 bp, Homo sapiens
cgaaggggcgtctgcggctctccgccgtccccagccctgcctctccctgggctctggattaatgcagtatcgaatggacaagtccgaggtgatagttacag

SEQ ID NO: 679270 - DNA, 121 bp, Homo sapiens
ggatgaggggagcatgggtgccaaggagtcacggatcggattcctcagctacgaggaggcgctgaggagagaaattataaagagctctgatgggctatttgggtgatacccagtgcagtga

SEQ ID NO: 679271 - DNA, 100 bp, Homo sapiens
cttaacgtcccagtggatgactccttggttaaggagctcttttatcttcctgccaagaagaatgtggattccattcttgaggattatgcaaattacaaga

SEQ ID NO: 679272 - DNA, 83 bp, Homo sapiens
gctgggagctgcctgcgggaaggtgcggggagcggagccatggcctccgcgccagcagccctgtggtggcgacgacgatggac

SEQ ID NO: 679273 - DNA, 100 bp, Homo sapiens
ggaagcgctgctggactacaaggacgagttctcgggcagaggcgacctccccgcgttccatgcgcacagggacagggctgctagcagaagaaagtcttcc

SEQ ID NO: 679274 - DNA, 100 bp, Homo sapiens
gggatcctgtggctggaagcgaggaggctccacacggccgttgcagctaccgcagccagagcaaaatatgctgtgaattccatcaagaagaaagtcaacg

SEQ ID NO: 679275 - DNA, 78 bp, Homo sapiens
agctcaactgcccagcgtgaccagtggccacctctgcagtgtcttccacaacctggaataaacgactggaggaagtga

SEQ ID NO: 679276 - DNA, 75 bp, Homo sapiens
gactgcacaaggtgaagactgtctgcagcaagcgtccgtctccaagagagtatgaagagagtgcgtctgtagggc

SEQ ID NO: 679277 - DNA, 96 bp, Homo sapiens
gaacaactttccgaatctgcaaaagaagccgaatttgccacatacctgaatttctgccgttccttgcgttttgacgacaagcctgactactcgtac

SEQ ID NO: 679278 - DNA, 100 bp, Homo sapiens
cagcccaagaaacatctcaccaatttcaaatccggttaaaaagatcaagtggcatgagcagccttttggggaaaattggtgccaagaagcagaaaatgag

SEQ ID NO: 679279 - DNA, 75 bp, Homo sapiens
gagtacacagaggaggcctatgaaggtgtccctgtgaacagcagagtgtcctccaaaatccagcagcttctgaac

SEQ ID NO: 679280 - DNA, 100 bp, Homo sapiens
gccgtgtctccggcatcatgtgtggtgtcatggagaaactccagctgggcccagagattctgcagcgggaaaatccaaggcttatttatgccaggctgag

SEQ ID NO: 679281 - DNA, 96 bp, Homo sapiens
atcgtgactattcagatcatccaagtggaggttcctacagagattcatatgagagttatggaggagacatcacagctttcccagatcgggaggaaa

SEQ ID NO: 679282 - DNA, 82 bp, Homo sapiens
cggggtggtcctcttccctttgtcgatggacttcagcagaaatctttatgatattggggaacaactggacagtgaagatctg

SEQ ID NO: 679283 - DNA, 75 bp, Homo sapiens
gccaagttcatctcctccgtcaccagccacatctaccaggtaaggctggcctctctgcagtcagaggtctgagct

SEQ ID NO: 679284 - DNA, 74 bp, Homo sapiens
acatgagccccctgaggccccagaactatcttttcgccctggcttgaaaaacagtccaattgatgaaagtgagg

SEQ ID NO: 679285 - DNA, 80 bp, Homo sapiens
tgttatgtggatcatctggatgggaatagtgcctaccgatcagctgcatctaaaacaatgaatatttatttccctaaaaa

SEQ ID NO: 679286 - DNA, 100 bp, Homo sapiens
ctcgacgtcttgcctgtgtcccacttgttcgcggcctatagctccaattaaggaacagctatatcctgcttccttctgtaagcagcatcgacttgtgcaa

SEQ ID NO: 679287 - DNA, 98 bp, Homo sapiens
ttttattcaggttcctaggaatctcgttgccctggtacctgacagtgtaaagaaggagctcctacaaagaataagaacattccttgctcagcatgcca

SEQ ID NO: 679288 - DNA, 82 bp, Homo sapiens
acccccaagcaacttagaatgcagcttcagcagaggctgcagggccagcagctccctgccgtggcctttaatgtgaacaacc

SEQ ID NO: 679289 - DNA, 97 bp, Homo sapiens
gctgcagctgcgatctctgtggtaggcccaggttgtttttcaccattcagaacattgcctgaagcaggtccaccatgccgttagtaacgaggaacat

SEQ ID NO: 679290 - DNA, 75 bp, Homo sapiens
gaggaacgctcactgtcagcgcctggaaacttgctcaccaccagtggaacagtgattaacaagctgaaggttgtt

SEQ ID NO: 679291 - DNA, 87 bp, Homo sapiens
cagcattgcagccgccaagacggtccaagtgtgcctgccatcaactaactatccaggctacagcctgtaccccaggaggccaaatca

SEQ ID NO: 679292 - DNA, 97 bp, Homo sapiens
ggaagagaaaattgtgaactaaggccccctgcccccttttcctggtgcatgtgaagttatcaaaaacagatgtgcagagcagctagttcacaataac

SEQ ID NO: 679293 - DNA, 101 bp, Homo sapiens
tcaccacgcggctgcacaactgcaggaacaccgtcacgctgctggaggagactgctgagaagtcaggccagattgaaagatcaaagaatgtaaggcaaaga

SEQ ID NO: 679294 - DNA, 98 bp, Homo sapiens
ctgggcgctgacgccgcggacctccctgcgaccgtcgcggaccatgggcgacaaagggacccggcaccaggatcatctacgaccgaaagttcctgctg

SEQ ID NO: 679295 - DNA, 51 bp, Homo sapiens
tgttaaggattccaagtaactcttatttgcctggctccatcgattctaaca

SEQ ID NO: 679296 - DNA, 100 bp, Homo sapiens
ctgtgtaacagttgtgaaatggaaaatgaggtacttaaagtgctttccgaagctgctatttcaggaaaagagcactggttgccattggtacccatgattt

SEQ ID NO: 679297 - DNA, 75 bp, Homo sapiens
gccttttcaacatggatggctcctcccgctgccgctgccgctccaggagacagcttccccttctcagaatcctgc

SEQ ID NO: 679298 - DNA, 98 bp, Homo sapiens
ggcgggttcgttcgcttcgcgttttggccagggcgggggtctgggctttaggcaaaggagcatttctaccagaggcagcaccggctgcccgagccctc

SEQ ID NO: 679299 - DNA, 90 bp, Homo sapiens
gcgatgctgcccggtttggcactgctcctgctggccgcctggacggctcgggcgctggagattcaaccctatgaaaagataaaggccagg

SEQ ID NO: 679300 - DNA, 100 bp, Homo sapiens
gtcgtgatcgtgactattcagatcatccaagtggaggttcctacagagattcatatgagagttatgcaaaagatacagatattgtggatgaagccatcta

SEQ ID NO: 679301 - DNA, 75 bp, Homo sapiens
aaataaccgtccccgccagtcagaagttgagtttggaaattttagcattcaggtgccaggaatgcagatgggaca

SEQ ID NO: 679302 - DNA, 82 bp, Homo sapiens
aagccatccagccgactacaaacccacgtttgtcagttcaccgggacctggaggcccagattgcgatcgtgacggagaacca

SEQ ID NO: 679303 - DNA, 95 bp, Homo sapiens
ctccttgaaggaactgtggcttgtgatccatgggcgagtctacgatgtcacccgcttcctcaacgaggaacttgatactaaatttgggactcttt

SEQ ID NO: 679304 - DNA, 100 bp, Homo sapiens
cccgtgccctgtacgactaccaggcagacttcacagagaatgcagttgtcttgacttcaggtctgtctgttctgttggcaagtaaatgcagtactgttct

SEQ ID NO: 679305 - DNA, 97 bp, Homo sapiens
cagtctacaaaggactcttctaaaaggatatgtgttgctaatacccatctttactggcatcctaaaggtgtcatggagaaactccagctgggcccag

SEQ ID NO: 679306 - DNA, 80 bp, Homo sapiens
cccgcccgccgagcagccatgagatgcctgctctgtgcctgtatctgagatcatcgccgttgaggaaacagacgttcacg

SEQ ID NO: 679307 - DNA, 75 bp, Homo sapiens
tctgacacagagatggaagacatgattgctgaagaccatttaatttggcagagcggaaagctagcgcccattcaa

SEQ ID NO: 679308 - DNA, 100 bp, Homo sapiens
cttccgggccgcggcctccgagcgcgcgggatttgcagtccacctggaaggccgctgtggtggaaggatgtttgactgcagagatgtggcattcactgtg

SEQ ID NO: 679309 - DNA, 80 bp, Homo sapiens
gtacagggtcccagacggcatggtgggcctgaagtgtgactccagctgtgtgggctgcacaggggaaggcccaggaaact

SEQ ID NO: 679310 - DNA, 100 bp, Homo sapiens
gcgccgagaggccgtgcgggacgcgggcgccaggaccggccgaacgcagaggtacagttatttgtcacccctgcaaatacagcaaatacctatccctaaa

SEQ ID NO: 679311 - DNA, 76 bp, Homo sapiens
gtggaagctgagcgcgtggtggagttttcctgtgctggtgcccctgggtgaactgaccaagcacagcacatcagcg

SEQ ID NO: 679312 - DNA, 75 bp, Homo sapiens
agaaatgcagaggcactatgtgatgtttaaggaagaaatctctaaacgttttaaatcacatactgaccaacttgt

SEQ ID NO: 679313 - DNA, 88 bp, Homo sapiens
caaattcactccccagtacaaagcaaatccaagctctgctggctccccccaagacggacgaggcagaaaagcgcagtcggaagcctga

SEQ ID NO: 679314 - DNA, 75 bp, Homo sapiens
tcccttctgccccagctccgtctcggcggcggcggccccccgtccagctccgacgccggcctgcggttcccggac

SEQ ID NO: 679315 - DNA, 78 bp, Homo sapiens
tccgttgggtccggccgctctgcgggactctgaggaaaagctcgcaccaggtggagctggctctgtgggacacagcag

SEQ ID NO: 679316 - DNA, 99 bp, Homo sapiens
ggacagtaaagctttggacaactaaggttgctcgtgggggccccgcgggcagaagcgcttccactgcagagagccaacagaacgggagggctgtacagc

SEQ ID NO: 679317 - DNA, 83 bp, Homo sapiens
caggggtctaccggctctcttatggcgaatgcaacccgaagagagagtgagagttgatctctctaatgtattagatcttcatg

SEQ ID NO: 679318 - DNA, 99 bp, Homo sapiens
gacagtgtaccagaccctgtcagccaagctgctgtggaagaagtacccgctgcctctcgctctgtcacccaggctggagtccagtggcacaatttcagc

SEQ ID NO: 679319 - DNA, 75 bp, Homo sapiens
ttctttgggccttcaccatcttccacaaagcccaaggagacccagggggccgaaggccagagaccaggatttggc

SEQ ID NO: 679320 - DNA, 80 bp, Homo sapiens
atttcctgcttctccttttcatgagtgttcctgtggtctctgcacctcctttctgctattttggcattctgctggatata

SEQ ID NO: 679321 - DNA, 83 bp, Homo sapiens
taaagacatcttaattgggcacgaaagaggacacattcagctaacgtattttagcaggtggagtgaggttgaagattcctgtg

SEQ ID NO: 679322 - DNA, 100 bp, Homo sapiens
ctttggtgccctcaacatctctcagagacgaaaggtatttaaaccatgtcagagctgcctcaccacaggaccttgctggaggctatacttcttctcttgc

SEQ ID NO: 679323 - DNA, 49 bp, Homo sapiens
ggtcatgtggctggaattaccacgcgatgaagaacgatacagatacagg

SEQ ID NO: 679324 - DNA, 49 bp, Homo sapiens
ccgagaaccgtcagtttgagccagatgacatttgaagacagtgatttgt

SEQ ID NO: 679325 - DNA, 136 bp, Homo sapiens
cagtgggggttgctgacccagaggagagttctccaaacatgatcgtttactgcaaagaaacttggatttaactggccagaagcaggtattcaaagcagagaacaatccctgggtgacccccattgcagaccagttc

SEQ ID NO: 679326 - DNA, 75 bp, Homo sapiens
ttggtcactgaggaagagatcaatcttaccagagggccctcagaaacaagtggaagccggtgtctgtgttaccat

SEQ ID NO: 679327 - DNA, 49 bp, Homo sapiens
agtgttgagaagtttattcagaaagggcaccaccacgaggcgatttgtg

SEQ ID NO: 679328 - DNA, 75 bp, Homo sapiens
aacctttccaacacagatgtccaagctgccaagttaaatgagggacatactgtgtacttggaacgccacatttgc

SEQ ID NO: 679329 - DNA, 75 bp, Homo sapiens
ccactcgcccctggcctcgcgggccgtgtctccggcatcatgtgtggaccctgatgctcccataagacagaaaat

SEQ ID NO: 679330 - DNA, 73 bp, Homo sapiens
agatgagaagaggttgttgttggagaagcaggctggcggaaacccttgaaacctcctgcaaaagtggaagcga

SEQ ID NO: 679331 - DNA, 51 bp, Homo sapiens
gccctacagcgtctcttcaaaaagagcaatggtggaacaaagcggcaaaag

SEQ ID NO: 679332 - DNA, 88 bp, Homo sapiens
caaacgaggacagcaccaaaatgagaagacgttggctttggtttgaggaggctgaggagagtggaatgttggctgtccgtgaaaaccg

SEQ ID NO: 679333 - DNA, 101 bp, Homo sapiens
cagccatggccgagcgccgcgccttcgcccagaagatcagcagggaggctgagaagacaaaactccttatagctgcacagaaacaaaaggttgtggaaaaa

SEQ ID NO: 679334 - DNA, 100 bp, Homo sapiens
ggatacggagtacaaaaacggcccttggatgatggaggagagaagatgactgaggaggaggtggagaccgttctggcaggacacgaggacagcaacggct

SEQ ID NO: 679335 - DNA, 98 bp, Homo sapiens
gcgcggcgcgcagagccgtggcggccacgggggtgcgcggggggcagacttaattcagtgcacaaatgagatgaatgtgaacatcccacagttggcag

SEQ ID NO: 679336 - DNA, 100 bp, Homo sapiens
tcctgtggaagaacagcaggaagtaccaccagatcttgagccagatgattgtgcatccatttacatctttaatgtagatccacctccatctactttaacc

SEQ ID NO: 679337 - DNA, 75 bp, Homo sapiens
ctcgcgccggctatggccgtgccctggggctgagccctcagagtgatcagcagctggactgtgccttggacctaa

SEQ ID NO: 679338 - DNA, 82 bp, Homo sapiens
ccctgcgtcgccgggaccctcgcgcgcgaccgccgaatcgctcctgcagcagagaaaatgcttggacagaagagatgagtac

SEQ ID NO: 679339 - DNA, 83 bp, Homo sapiens
cttagctgtgctcgcgctactctctctttctggcctggaggctatccagcgatgataatgaagataattcaaatgatgggacc

SEQ ID NO: 679340 - DNA, 100 bp, Homo sapiens
gtgatgcgcaataccagttcactggtattaaaaaatatttcaactcttatactctcacagctgccccagagcacatcagctatgtgccccagctctcaaa

SEQ ID NO: 679341 - DNA, 90 bp, Homo sapiens
ggaagcagcagtccaggaatgcagtcagtctgttgatgaaactatatggctttggaagattcagaacagaagcacaatcttttacattca

SEQ ID NO: 679342 - DNA, 100 bp, Homo sapiens
tttagtatcagccaaacttgcagctgttcagaccgcgctccgccgagcaatggtacaacagctccatgaacgtgatctgcacctggttgacggaccggat

SEQ ID NO: 679343 - DNA, 74 bp, Homo sapiens
tacctggcattgacctctcagatcccaaacaactggcagaatttgctagaagtcacctgcaccggtgcccgtga

SEQ ID NO: 679344 - DNA, 82 bp, Homo sapiens
ggacaagcaaacctcagcctggaggcacttttccaggtttcatcagtttcacccttttctgtgtgcggctgattttagaaag

SEQ ID NO: 679345 - DNA, 82 bp, Homo sapiens
cgatccgggcgctcgagacttaccagagccacaaggctgcctgctgtttcccggggagatcatgaaacgaggtcgccttccc

SEQ ID NO: 679346 - DNA, 75 bp, Homo sapiens
gccaggacgagaggatgcggagcccgcagaacctccacagtcaagaggacggtctccaccagctgagcagcccgc

SEQ ID NO: 679347 - DNA, 74 bp, Homo sapiens
tacagaaacaaaatgtcaacaaattgatggggacccagaccccaggaggcctcaccccacagcaagagaaagac

SEQ ID NO: 679348 - DNA, 100 bp, Homo sapiens
agctccgctcaggtagtcccccaaagtctccacgaaccacagtccatgacaagtctgcccaccaaacacacagaaaggggagtgtgtttgcctacagtgt

SEQ ID NO: 679349 - DNA, 83 bp, Homo sapiens
agcgccgcgcacttcgtcatgttcttcgcgccctgtgtactaatggtcacttgatgtgcgctggctgttttatccacctacta

SEQ ID NO: 679350 - DNA, 100 bp, Homo sapiens
gaagaatcgtttggtctcctgccgtgcccgatggaatcagtgtgagtggctttcccctgtccagtccttttcggcaggtcgttcggccccgagtggaggg

SEQ ID NO: 679351 - DNA, 100 bp, Homo sapiens
gatgtcagttaactctgagaagtcgtcctcttcagaaagtgccggtggtggtgtgcacattgagccccggtatagacagttcccccagctgaccagatcc

SEQ ID NO: 679352 - DNA, 98 bp, Homo sapiens
cggaagttgctgggttcgttttattcagcggcagtggtgctttcccgaatctcagaatgccaaaaatggctacaaacttcctagcacatgagaagatc

SEQ ID NO: 679353 - DNA, 101 bp, Homo sapiens
cactcagccaactccattgccacagcctcccccaccaacacagctgttgccaatacacaatcaggcttcaagtctggatagtcagaagtttgtgacagtgc

SEQ ID NO: 679354 - DNA, 82 bp, Homo sapiens
cttttgcctcagatactattttgaagtttcagctcctggcatcagctctattcaaatctggttcagattttacagctctggg

SEQ ID NO: 679355 - DNA, 98 bp, Homo sapiens
cgggcagccatggccgaagcggcgcctgcccgggatcccctaacaacagtgagagagcaatgcgagcagttggagaaatgtgtaaaggcccgggagcg

SEQ ID NO: 679356 - DNA, 74 bp, Homo sapiens
attgatgaaatttatggcattcagaacaatcatttcaaaggtggtcagtctggattaaatctgtctaagaattt

SEQ ID NO: 679357 - DNA, 100 bp, Homo sapiens
atggaggccaaataggattagcaacttgctcaggactccacagcgtgctcttgctaaaactggagctgaatctatcagtttgcttgagttatgtcgaaat

SEQ ID NO: 679358 - DNA, 100 bp, Homo sapiens
agctcctcaagaataacggaagggagaaaacccgctatgaaatgtatgtcagcattctcaaggaaggaggcaaagagctactgagtaacgatgaaagcga

SEQ ID NO: 679359 - DNA, 143 bp, Homo sapiens
gtcacggattctcctgactatgaccgccgagcagacaagccctgggccaggttaacacctgcagacaaggaatagagctgtgcccccctggaaaacggttcatgattacgatggtggcgagcttcgtggccatggcgggccag

SEQ ID NO: 679360 - DNA, 90 bp, Homo sapiens
gtgcagatgcagtgtggctctggatagcaccttatggacagaaacgggctgtaaaggcagaaaaccacgtcgtgaaactaaaacaggaaa

SEQ ID NO: 679361 - DNA, 83 bp, Homo sapiens
tgccggcccggcggctgctgctgctgctgacgctgctgctgcccggcctcgggaaggggaaactgaggcccaaggaaattgag

SEQ ID NO: 679362 - DNA, 75 bp, Homo sapiens
ggaggagagaagatggcggaagcggaacagagattgcgaagagactgaacacaattttagcacagatcatgcctt

SEQ ID NO: 679363 - DNA, 97 bp, Homo sapiens
gcactcgtttcctgcaggagagtgttggaaaaccttggacagacaattgtccccgatttgggatcactggaaagtcagcatgattttcgaaccccgg

SEQ ID NO: 679364 - DNA, 100 bp, Homo sapiens
cgggaagggcctcggcactggtaccctttacatcgctgagagcaaatgaagaaacacccctgccgccagtgtgacaagtctttcagctcgtcccacagcc

SEQ ID NO: 679365 - DNA, 75 bp, Homo sapiens
ctcagaagttgcctatgtgtgacaaatgtggcactgggattgtgcttgcacagaaatctggaggcagtatcacct

SEQ ID NO: 679366 - DNA, 109 bp, Homo sapiens
atcgtgactgacctgcgcgcccgcctcggcccgcacgccaagcacgtggtgggctatggccaccttgggaggaggtacaggagaactgtgtgcggtggcgaaagaggtt

SEQ ID NO: 679367 - DNA, 100 bp, Homo sapiens
ggcggcgggagcatgaacgcccctccagccttcgagtcgttcttgctcttcgagggcgagaaatgcaggcctggggtagtctcctttctggactgagaag

SEQ ID NO: 679368 - DNA, 75 bp, Homo sapiens
gctcccaagatgtcgcagacggccatgtccgaaacctacgggaagaggaagaacgtctgagaaataaaattcgag

SEQ ID NO: 679369 - DNA, 75 bp, Homo sapiens
ccgctcggagccagccagccgtcccgagctaccagcaggacgagattgaggagctgcgggccgagatgctggaga

SEQ ID NO: 679370 - DNA, 100 bp, Homo sapiens
tcttatcgaaggatgtgcatgaaggacagcctcttctcaatggtccttttggaataaatcatgggattgagcttcattcagatgtggtggaatatgccaa

SEQ ID NO: 679371 - DNA, 99 bp, Homo sapiens
atcaagtagaaaaacaacaccaacagattctggtgatggctgtggacacctagtgacttatcaggatagtggcacaatgacatctaagaattatcccgg

SEQ ID NO: 679372 - DNA, 101 bp, Homo sapiens
gctgttgtattgcaatcatggtgcagaaataccagtccccagtgagggtgtacaaatacccctttgaattaattatggctaccctgactgcacctgcccca

SEQ ID NO: 679373 - DNA, 82 bp, Homo sapiens
cagccgaggccgcgaactgcatcatggagatgtgaagttcatttccaatccgccctccatggtggcagcggggagcgtggtg

SEQ ID NO: 679374 - DNA, 100 bp, Homo sapiens
aaaacaaatgtgaaagagttacaatactacgtcggacagagttttgccaatggtctggtgagctgtaccttctttctggcagtgaatggtctgtattcct

SEQ ID NO: 679375 - DNA, 101 bp, Homo sapiens
ggccccggccgctctgggcgactgtgctggcgctgggggcgctggcgggcgttggcgtaggaggaactttatattgctgttggaatatctggagccatcca

SEQ ID NO: 679376 - DNA, 75 bp, Homo sapiens
gacagatttgtcatgaagaaactcaatgatcgtgtcatgagagagatgcgctctgtgctgcggaaggcgggctcc

SEQ ID NO: 679377 - DNA, 76 bp, Homo sapiens
cgaagacatggaccagggctacggagccctgggcgctgcctatggcacagccaagagcggtaccggcattgcggcc

SEQ ID NO: 679378 - DNA, 75 bp, Homo sapiens
gagtcagtgcgccgctctccagcccgcttgaacgtgttatccaagataaattctgtgggattataaacatttcag

SEQ ID NO: 679379 - DNA, 75 bp, Homo sapiens
cactggtgcaggacaacattcagtggcccacaggcggccaggaattctggtgctgattaacgatgccgactggga

SEQ ID NO: 679380 - DNA, 75 bp, Homo sapiens
gtgcccaaaccagtagattattcttgccaaccctgtcataaacaggaagctgatgacattgttcgagtggcaaag

SEQ ID NO: 679381 - DNA, 75 bp, Homo sapiens
ttgctttgcctgggcggtgcggacaagcgcctgcgatggacgtgcacatcctccggcagcagccctcagtacaac

SEQ ID NO: 679382 - DNA, 100 bp, Homo sapiens
ctcaatgcatcatgtcaggcagcttatgatgccaatttgtcccatggtactatgaaaccgtgtcagatgtattaaactctgtgaagaagatggaagagag

SEQ ID NO: 679383 - DNA, 100 bp, Homo sapiens
tcaagcagttcaccaccgtggtggccgacacgggcgacttccacgtggcagcatggaacctgcatttcatagaggagatcttctctttctaacaaatcga

SEQ ID NO: 679384 - DNA, 75 bp, Homo sapiens
gaataactatttatgttgcacaagattgtacagccattttgcagactctgatcacagtgaaacgttccatgggaa

SEQ ID NO: 679385 - DNA, 100 bp, Homo sapiens
attgctctcggtgttcctaatcctcggacttccaatgaagttcagtatgaccaaaggctcttcaaccaatccaaggatgaaaactttcggaagagaaagt

SEQ ID NO: 679386 - DNA, 75 bp, Homo sapiens
gacagcataaggaagccaagttggaccgttctgatgtgactgagagagaaggcatttatgtttgaatcatcttta

SEQ ID NO: 679387 - DNA, 51 bp, Homo sapiens
gtacaaaaattcttcaagaaatctaaggggacggcaaaacagaacagaaag

SEQ ID NO: 679388 - DNA, 75 bp, Homo sapiens
ggaccaatttgaaatgttatatcccagccatgaaggtgtggaaatgctcctttggaccaccttcctctaaacaga

SEQ ID NO: 679389 - DNA, 90 bp, Homo sapiens
ggcggggctgaagaagcagttctacaaggcgagccaggtgtgcttcccgcacagctgcagccatggggtctgaggaccacggcgcccaga

SEQ ID NO: 679390 - DNA, 75 bp, Homo sapiens
acccacagtgccaaatatggccctggaacagtctattgcgtctgcagacatggatttcaaccagctggaggcatt

SEQ ID NO: 679391 - DNA, 51 bp, Homo sapiens
ctttcttcaaaatagcagccaccttaaagccttcgtgtccgaggccagcac

SEQ ID NO: 679392 - DNA, 76 bp, Homo sapiens
tctcctgtttgttgtgacatggaggctcaagctgggtctactcaagcccgtgatgctgatgagcgagagaagtgga

SEQ ID NO: 679393 - DNA, 98 bp, Homo sapiens
gccgtgctgcagtgggtcctgaaatacctgctgctcgaatttcacggtccctcatggtgtctcactccagcagacagaggattgtgtcgtgccaatga

SEQ ID NO: 679394 - DNA, 75 bp, Homo sapiens
cccagtgcagggcatcatcaatttcgagcagaagcattgggaatggtaccacctcccgaaaatgtcagaatgaat

SEQ ID NO: 679395 - DNA, 75 bp, Homo sapiens
tcagaagaccgaagcgttcgtatctggaagtgcaaaatggcaactcttaaggaaaaactcattgcaccagttgcg

SEQ ID NO: 679396 - DNA, 101 bp, Homo sapiens
gctgagggagcaagaggtgtcggaggtctcatctttgaactactgccggagcttctgccaggacttaaagagagatctacttcagagccagcagtcccgcc

SEQ ID NO: 679397 - DNA, 82 bp, Homo sapiens
tagaagcccaccaactgctaacaaccagctggaggattggagaaatgaaggcagaggtcaccaaactacataaaaaattgtt

SEQ ID NO: 679398 - DNA, 101 bp, Homo sapiens
gtgacgtaccactttaaaaaaactgcaaattttgaaattgatcctgaaaagggcaagattactggagggggtatggtggttttcacttccagttactgcaa

SEQ ID NO: 679399 - DNA, 90 bp, Homo sapiens
agaggagaataatttggaagactgttgtgggcaacaatgcaggatttggaacagaggcgtccccagttggaagaactcattaccgctgcc

SEQ ID NO: 679400 - DNA, 75 bp, Homo sapiens
gagattccggcctggagctcccagggccgagtataaccccgttttcacacgaatggccccttcacatatttgaag

SEQ ID NO: 679401 - DNA, 100 bp, Homo sapiens
aaattctcttaaatgacaatgaccttgctgttacctacttctttcatcaggtgggcttggattttacaggatatcttggggattgctttctgtctgaatt

SEQ ID NO: 679402 - DNA, 100 bp, Homo sapiens
tgcttcttgctttcatcatcgccttccacatcacctctgcagccttgctgttcattgccaccgtcgacaatgcatgggagctcacccagaagaccttcgc

SEQ ID NO: 679403 - DNA, 100 bp, Homo sapiens
gatggacagagcacaaatggacctctctggaagagggaatcccatcaaagtcagccgtgtggggtctgcaatggtctataacttgacccaggagttcttc

SEQ ID NO: 679404 - DNA, 83 bp, Homo sapiens
cttctctgtcagctctttccccgtcagcatcccagccgtgctcacgcagcccctgtcaaagggaacaggaagcagtccacgga

SEQ ID NO: 679405 - DNA, 100 bp, Homo sapiens
cacggtgctcaaagacccctacacggggatgcacaaaggaaccatcactgttgctggaggcacctgacaaatcctagcgaatttttggagcatctccacc

SEQ ID NO: 679406 - DNA, 51 bp, Homo sapiens
cgagctgaccctgggagacatcgacggtcgtgtacaacgtgggactctgca

SEQ ID NO: 679407 - DNA, 99 bp, Homo sapiens
tggcaaacgtgaatttgataggcatagtggaagtgatagatcgtttcatgaagtcttcaaaaccctagctgaaagtgatgaaggaaagttacatgtgct

SEQ ID NO: 679408 - DNA, 75 bp, Homo sapiens
tcctttagaaaattactttcactgtgtcttcagaaagatccttccaaaagattcatgcccaagcacaaaacaacc

SEQ ID NO: 679409 - DNA, 51 bp, Homo sapiens
gtagccaatgcaattgtgggtgtatggcagatggagtcttgctctattgcc

SEQ ID NO: 679410 - DNA, 100 bp, Homo sapiens
gtgcaaccattggcgtggatccgctggcctgttacgaagtgacagtgctggtgcgggactcctccaggctgccatcagaggggccccggccggcccacgt

SEQ ID NO: 679411 - DNA, 88 bp, Homo sapiens
ggacaggcagagtgctgatgtgaaaaataccacgacaaaaccaccctagtcaaaatgcagatcttcgtgaaaacccttaccggcaaga

SEQ ID NO: 679412 - DNA, 100 bp, Homo sapiens
atttctccacctcatttgaagaacgagcttcgtagcccacggagctgagatgtgactccctgcatgtctcctctgccacatgacagtcctttaatagaga

SEQ ID NO: 679413 - DNA, 82 bp, Homo sapiens
ccaaatggttgaaaacagatatacagaagtgtatgctgacttgtaaagtgaagaagccagtggtgctgcgggtgttcttttg

SEQ ID NO: 679414 - DNA, 75 bp, Homo sapiens
cctgcctcagcctcctaagtagctgggactacaggttatcaggacaccccatgggagagacttcgatgactcttt

SEQ ID NO: 679415 - DNA, 100 bp, Homo sapiens
gggagaggctcaagcgggacctgttccagtttaacaagagttttgcggcctccaggtggtggatccaatttttcattaggttttgatgaaccaacagaac

SEQ ID NO: 679416 - DNA, 82 bp, Homo sapiens
caaggagctaaagcagcgtgcgttcagccctgggattcttcgctgctgctgccttaccgccgagaaccaccacccgccaggc

SEQ ID NO: 679417 - DNA, 60 bp, Homo sapiens
acaaccttcgatctcctgacgacagcctcccgcgacgatgcccctcaacgttagcttcac

SEQ ID NO: 679418 - DNA, 49 bp, Homo sapiens
gcaggagcagccaaagatgtccaagggaagagatggtgttgagtggaaa

SEQ ID NO: 679419 - DNA, 98 bp, Homo sapiens
ggttgaatcataggcaagtggtgtgtggcacaaaatgcaacacgcttaccctcttctccacctgctccccggctgcccgcaccttccgggcctccgcg

SEQ ID NO: 679420 - DNA, 96 bp, Homo sapiens
ctggcagccgcggatctcaccgccgctcagggccagcattgaaacaggggaccgtgtctggaggatgcctctcttcgaacattatacaagacaggt

SEQ ID NO: 679421 - DNA, 74 bp, Homo sapiens
ctacttggctgacctcctgatgcctcacttgtcttcaggcagtgacagtggtgggagcagcagcagcagcagca

SEQ ID NO: 679422 - DNA, 99 bp, Homo sapiens
gctggtgctgccagatggacaaggagaccaaagagaacaacctctctgaagaaggtcttgctatcacagatgaaattttgctgagtaaggcagagtggt

SEQ ID NO: 679423 - DNA, 73 bp, Homo sapiens
gaagacctattatcagatcaaccaccaaagtgggaaacattgaaatcaagcacccagtcagcttgaagagttt

SEQ ID NO: 679424 - DNA, 90 bp, Homo sapiens
ctctagtaacccgcgaaatgatgggatagcgttgcaaatccttaaaagagtcttaacggaggactcagagagagtaatgataattaccgg

SEQ ID NO: 679425 - DNA, 89 bp, Homo sapiens
gttcaccagcaccggctccagtgggctcttcctattttgtaacggattatgatccaaccattgaagattcttacacaaagcagtgtgtg

SEQ ID NO: 679426 - DNA, 100 bp, Homo sapiens
ttcatataccacgattaacagagtgcttcctccaaaggtttagataatccttaccagcagaagggaagacaccaacatccaaatgacatagaacactggg

SEQ ID NO: 679427 - DNA, 98 bp, Homo sapiens
aggattccaagtaactcttatttggtgactttcaccaagcggaagtttggcctgatgaagaaggcgtatgagctgagcgtgctatgtgactgcgagat

SEQ ID NO: 679428 - DNA, 100 bp, Homo sapiens
gcgtctctctgctgcggcgcggggaccgctgtgctctcggtgagaagccctaccactgcaactgggacggctgcggctggaagtttgcgcgctcagacga

SEQ ID NO: 679429 - DNA, 100 bp, Homo sapiens
gagccgcttcccccagcactataagagtctctaccgtctggccttcctctacacctacagcaagacccaccggatggctcgttcggaacaccacctggat

SEQ ID NO: 679430 - DNA, 75 bp, Homo sapiens
accgaacgagaagcagagctcaagaaactgcaagaagccagagtatgaagtgaaggctcctgttccttctgcctg

SEQ ID NO: 679431 - DNA, 75 bp, Homo sapiens
gcaaatggtgctgaccccactgagagtcctaaaaacatcctgagtttctttggcctgccagaaagtcaccttcct

SEQ ID NO: 679432 - DNA, 112 bp, Homo sapiens
ctctccccgagttcttcaacggcaagaacaagtccaagactccagagatgggtgggaaccgccaaacctctcccttctttttgacttcacccttggataccatcaaggccag

SEQ ID NO: 679433 - DNA, 100 bp, Homo sapiens
tgcatcccgcgtccagcacctacgtcccgctgccgtcgccgccgccaccatgcccaagagaaagcatctggttttgtagcctggatgtgtctgctagtag

SEQ ID NO: 679434 - DNA, 137 bp, Homo sapiens
ccgagatgtctcgctccgtggccttagctgtgctcgcgctactctctctttctggcctggaggctatccagcaacatccagtcatggataaaaatgagctggttcagaaggccaaactggccgagcaggctgagcga

SEQ ID NO: 679435 - DNA, 129 bp, Homo sapiens
agccaaggttacggtggttatggaggatatgactacactggttacaacaactactatggatatggtgattatagcagtgatgagatttccatccatgctgactttgagaatacatgttcccgaattgtg

SEQ ID NO: 679436 - DNA, 100 bp, Homo sapiens
caaagcttgcgaggtggcgttagggctacaccaagtccattgatatttggtctgtaggctgcattctggcagaaatgctttctaacaggcccatctttcc

SEQ ID NO: 679437 - DNA, 50 bp, Homo sapiens
ggtggctccgcggattataacagttgtcatggatgatgatgatgactcgt

SEQ ID NO: 679438 - DNA, 99 bp, Homo sapiens
cctccgggctccttcggccccgccatgggctgctgcagctccgcctcctccgccgcgcagaatcatttgctgtttcaaatagagaactgtgcgatgatg

SEQ ID NO: 679439 - DNA, 98 bp, Homo sapiens
gcgggagtcgtagggaggacgccgggacacctggaagccgagaaatggtgctggagaatctggtaaaagcaccattgtgaagcagatgaggatcctgc

SEQ ID NO: 679440 - DNA, 100 bp, Homo sapiens
accttgggatgtggacacaatttgtaagatgaataatacggcagctagtccaatgtctactgcaacttcaagtagtggaaggagtacagggaagtctata

SEQ ID NO: 679441 - DNA, 100 bp, Homo sapiens
gtggacagtcacctttgctgctgaccctgaggacatctgctgggagacccaaaggagtaaaggagcaagatgtgtacatctgtgattatcggcttgacaa

SEQ ID NO: 679442 - DNA, 96 bp, Homo sapiens
ctgggccgccgctgctacctgcagcgccgtgtggcacgacacaaaaatcagcatgaatacaactttgtctgagagccccttcaagtgtgatcctga

SEQ ID NO: 679443 - DNA, 50 bp, Homo sapiens
attccaagtaactcttatttggaatctatggatttcctgaaatatgttgt

SEQ ID NO: 679444 - DNA, 101 bp, Homo sapiens
gcgtggagtgacggtgccaccgcggcgcggagagctggtgacggcctccaaggccatcattgaaaaggagtaccagccccacgtcattgtgagcaccacgg

SEQ ID NO: 679445 - DNA, 100 bp, Homo sapiens
agatcatgggcaaaggacagatccaggatgtagctgagctgattcgggccagagcctgccagagggtggtggtcatggtgggggccggcatcagcacacc

SEQ ID NO: 679446 - DNA, 100 bp, Homo sapiens
ctccacaatggtgcaaggatcacagtgcagatgccacctacaatcgagggccactgggtctccacaggacactttttcaaaaatggcaatggtatcagaa

SEQ ID NO: 679447 - DNA, 96 bp, Homo sapiens
gaagctctggatataagtttggtgttcttgctaagattgtgaattacatgaaggtttaccttatgggtgggaggaagcttacacagcagatggaat

SEQ ID NO: 679448 - DNA, 83 bp, Homo sapiens
ccatgtttggattgaagccgcctctgtattacttaccaggttccctcggagacatggaggccagagaggaggtgcagttggtg

SEQ ID NO: 679449 - DNA, 50 bp, Homo sapiens
cttgactacggaggggttgccagtggttagcaggaagaagatgagcctta

SEQ ID NO: 679450 - DNA, 83 bp, Homo sapiens
atccaacccagttagttacttcctgtctagagttgtagcttccacctggagctcttgtccctggcaaagcgaaagcgcagtga

SEQ ID NO: 679451 - DNA, 91 bp, Homo sapiens
ctctggtcttccctgaccccgcggccggacgacccaagcccgctgagcaggatgaggacatggatttaggtgctattacaaaatactcagc

SEQ ID NO: 679452 - DNA, 90 bp, Homo sapiens
cagctatttacagtggacagaaactgaaggggtgaaagaaaacccaaggacaagaggaccctgccttggtgtgagagtgagggaagagga

SEQ ID NO: 679453 - DNA, 100 bp, Homo sapiens
ccctgcccgaagcctgacccgactgcctctctcagtgaggaacatcatttacagcgagcaatttcagcacagcaagtgtttagagaaaaaaaagagagta

SEQ ID NO: 679454 - DNA, 97 bp, Homo sapiens
gacaagaccatgctggcaagtctgaaggtcaaaggagcaggagcggcttcgcttggagcaggagcgagagcaggaacagaagaaggccaatagcctg

SEQ ID NO: 679455 - DNA, 100 bp, Homo sapiens
gagaggtgttaccggaacggcggcgacaagggtgttcccgaactagagtggttccgagagaaatatggggacgtcttcacggtacacctgggaccgaggc

SEQ ID NO: 679456 - DNA, 75 bp, Homo sapiens
gatcatttgaagtggtgtctacacttataaaagttcggctttccagtttggcagcagcactacaaatttcaactt

SEQ ID NO: 679457 - DNA, 74 bp, Homo sapiens
ttaaggattgtctttgtacataacaaggtaagaagagttcctgggtcaagtggtcaccttcataaaaccgaaga

SEQ ID NO: 679458 - DNA, 75 bp, Homo sapiens
gccggggcaggtgattggagccaccactcccagtacagttttttgctccactcaagcctgttagaatcaccatgg

SEQ ID NO: 679459 - DNA, 100 bp, Homo sapiens
cattccctgaagatgattctaattcaacaaatcataacttggtctctaattaacagaagatggcaaagcccagccacagcagctatgtccttcagcagct

SEQ ID NO: 679460 - DNA, 75 bp, Homo sapiens
caacgaatcatccacgcacctgcagctctgctgagagagtgcaagccgtggggcagcaatgaatgtggatcacga

SEQ ID NO: 679461 - DNA, 100 bp, Homo sapiens
agatcgaagcggatttccgattgaatggtactaggttttgacaagcttgcatcatgcgtgagtataagctagtcgttcttggctcaggaggcgttggaaa

SEQ ID NO: 679462 - DNA, 78 bp, Homo sapiens
gcgtgacgctcctgcctgcgcgcggccaagccatgctcggccccaggaagctcttcgtgggcggtcttgactggagca

SEQ ID NO: 679463 - DNA, 90 bp, Homo sapiens
gagacagcgcctgggctttttcccgcccgcggttccaccgctctgaaaccgatttctaacagagaggaagagagagaaaatccttcaaaa

SEQ ID NO: 679464 - DNA, 100 bp, Homo sapiens
ccctgccaagaagtcgcccatcgcagcagctcgccttgggacaataatgcagtctgtgcagacccctgctccctgatccccacacctgacaaagaagatg

SEQ ID NO: 679465 - DNA, 100 bp, Homo sapiens
cttggaagaagatgtctgcagagtgagcaagaagaacccatcaggtgattgtcaggcctctgagcccaagctaagccatcatatgccctgtgacctgcac

SEQ ID NO: 679466 - DNA, 88 bp, Homo sapiens
ataaccatcttattcagtgtataatggactctcagaataaaggaaagacctcagagtgttctcacctaccttatgttcagtattttgg

SEQ ID NO: 679467 - DNA, 83 bp, Homo sapiens
ttgaagttctattccagggctcccaggcagcagaatctgcccacagagttcggacaatgcagatcttcgtgaagactctgact

SEQ ID NO: 679468 - DNA, 90 bp, Homo sapiens
atgacatctctatccagcagctgcatttagttgcgctttcctgcctgcttctagcaatttctgcagaaaaatgtgggccccctccaccta

SEQ ID NO: 679469 - DNA, 96 bp, Homo sapiens
cggaacctgaaaaattcaagaagttgaaaaacgcttttcacgtcacctggagagatgcacagttccagctttacatgtggtttggctggggctctg

SEQ ID NO: 679470 - DNA, 73 bp, Homo sapiens
ttcacagagacattttcaatggaggtaaccatgcctgctattttaaagggcagcaaggagcgcttccactggc

SEQ ID NO: 679471 - DNA, 51 bp, Homo sapiens
atgctggcaagtctgaaggtcaatgaatgaagaatggctggaaggggagtg

SEQ ID NO: 679472 - DNA, 74 bp, Homo sapiens
tttgatctgaatagtattaaaataaaatacctggatgaggaagatgaagagtctggagttgatcaaggaacctg

SEQ ID NO: 679473 - DNA, 100 bp, Homo sapiens
ccaggaggttgtcatagccttagctcaagcaatagctgttatactttctgctgagtgccctgggcctgacggtctgtgtgctggccgtggcctttgccgc

SEQ ID NO: 679474 - DNA, 75 bp, Homo sapiens
ctggcccctggggggctttcaggtgaaaggtgtagcagtcactcggcctacacccacagcatcgaccttgtgaac

SEQ ID NO: 679475 - DNA, 96 bp, Homo sapiens
accaacccccaaattggctgggacaggctccctggggaagggaatgcagggttgctggggctgggcccagaagcagcagcaccagggaagaggatt

SEQ ID NO: 679476 - DNA, 50 bp, Homo sapiens
atttatgaccttttctatggaaaggcgtggattctcagatagtggaggag

SEQ ID NO: 679477 - DNA, 75 bp, Homo sapiens
cctagaaattccccccgaagaagactcccccacatctggagtgcctggtgaagaatgtgatgggatcactagcat

SEQ ID NO: 679478 - DNA, 106 bp, Homo sapiens
ctgaaacagaacctgtccaggagctggcatgacgtgcaggtctctagcgcgttctcccatgggcaggtggtctctctggatgagctgcgccccttccaggacccag

SEQ ID NO: 679479 - DNA, 48 bp, Homo sapiens
cggcgggacatctcctcctggctgggtggatctttggcgagcgtctgc

SEQ ID NO: 679480 - DNA, 100 bp, Homo sapiens
gccggatcaggagccgccgccgccatatcagaccccatatcatgtgaacctcctcctggctggctatgatgagcatgaagggccagcgctgtattacatg

SEQ ID NO: 679481 - DNA, 82 bp, Homo sapiens
ccctaataagacctcagcttccctcgggaggggttgattcttcaccacactgaaaccattaggaaaaatccttgtggttaac

SEQ ID NO: 679482 - DNA, 82 bp, Homo sapiens
ccggcgcccggcgagggcgcgcggctggtgtccgccccgcccgaaaggtaattttttctgcaggatgaattaagagaagaga

SEQ ID NO: 679483 - DNA, 98 bp, Homo sapiens
atttaggcctacacctgcaactaccccaggcctgcgtaagtgaggaaacagctgatcctgctcctgtggcctccagcctcagcgaccgaccagtgaca

SEQ ID NO: 679484 - DNA, 74 bp, Homo sapiens
gacgcgggcgagctgcggctcggacgccagcggacacgcgggcgagcaattctgtggtgttcttggtcacacat

SEQ ID NO: 679485 - DNA, 100 bp, Homo sapiens
gaagagctgcttcaccaaggattatgaagagcatgacaagattatgtttgagaccttcaacaccccggccatgtacgtggccatccaggccgtgctgtcc

SEQ ID NO: 679486 - DNA, 74 bp, Homo sapiens
ggatttgttaaggattccaagtaactcttatttggtgaattttgaagtcttcatcagtatatccatattaaaac

SEQ ID NO: 679487 - DNA, 97 bp, Homo sapiens
tcattttaaactatggacgactccgaggaacattgagcttattccactaagctcaacaaatttcctgtatttaatattaatgatgacttgaatgatc

SEQ ID NO: 679488 - DNA, 88 bp, Homo sapiens
gaactgcctgtgcgccctcaacctgctttacaccacaatgcagatcttcgtgaagactctgactggtaagaccatcaccctcgaggtt

SEQ ID NO: 679489 - DNA, 129 bp, Homo sapiens
caggacagaaaagacagtgttctgctttcatggagttcacagaagagtcgaggagaacactcgtgaaactgctcaggccatcaagggtatgcatatacgaaaagccacgaagtatctgaaagatgtcac

SEQ ID NO: 679490 - DNA, 50 bp, Homo sapiens
ctccttttccctctccctttccctaagatcatgagcgtcttgttgttcat

SEQ ID NO: 679491 - DNA, 50 bp, Homo sapiens
attcacctgacttctgcagaacagtgccctagtggggaagtccaagtcag

SEQ ID NO: 679492 - DNA, 88 bp, Homo sapiens
aatgatccttttgctcctggtggaacagttgttgcagcaagcgattcagactataatgtaactgcaaactccaagctggtcattatca

SEQ ID NO: 679493 - DNA, 98 bp, Homo sapiens
ccgggcctcccgctcctccgtacagattgctcgctgtaagcagctcatctgtgaccccagctacgtaaaagatcgggtagaaaaagtgggccaggtga

SEQ ID NO: 679494 - DNA, 98 bp, Homo sapiens
caaagaagagttgagcacaatcaggctggacgtaaagaaagaagtgatgcactcaattctgcaatagataaaatgaccaagaagaccagggacttgcg

SEQ ID NO: 679495 - DNA, 82 bp, Homo sapiens
gaagatcacatcctggagcacctgcccgcccggctcaatgaggattagagagaactcccctgcagtctctcctaccacaaac

SEQ ID NO: 679496 - DNA, 100 bp, Homo sapiens
atcatgaaggacgtgcccgactggaaggcattgaatgccccagaggagcccgaaacctcccaggcttggtgcaggaaggagagcccttcagcgaggaagc

SEQ ID NO: 679497 - DNA, 98 bp, Homo sapiens
acggagagaacacgagcccatcaggaccgtataatagacgctggccccaaaggaaactactctcgatttatgaatcacagctgccagcccaactgtga

SEQ ID NO: 679498 - DNA, 100 bp, Homo sapiens
agcgagcgctgcgaggtggcggcctgaggacatggatttgattgacatactttggaggcaagatatagatcttggagtaagtcgagaagtatttgacttc

SEQ ID NO: 679499 - DNA, 50 bp, Homo sapiens
atccacttctacttattaaataagatgacctgatcagagccatcaagaaa

SEQ ID NO: 679500 - DNA, 85 bp, Homo sapiens
aggatgatccagttggaccttttggacaggaaagtgtaacatcagttacagaatttccacaagacggcaccctatgtcgtcactg

SEQ ID NO: 679501 - DNA, 100 bp, Homo sapiens
cattcaccggcggctaccggcggcggcgcgcagcgtgtcaggcggagagacccgccgccagtcttcccatgcacaagatgattaatacagatcttagcag

SEQ ID NO: 679502 - DNA, 90 bp, Homo sapiens
gctgaattggatgaaagataaagcccttaaggacaagattgccagtagaaagccaacagacggtgcttcctcatcaaattgtgtgactga

SEQ ID NO: 679503 - DNA, 76 bp, Homo sapiens
ccaagggaaaaaaagaaaggcccagagcattccagccaggggatgccaggggtcggagagaaaggtgaacccggaa

SEQ ID NO: 679504 - DNA, 75 bp, Homo sapiens
ggacatattcctctcctgatctggcctcatctgttccagggaggtgggattgagctttcttcgagagtcacccag

SEQ ID NO: 679505 - DNA, 50 bp, Homo sapiens
agatctctggagcagacctcaagctcctgggcaacgtgctggtctgtgtg

SEQ ID NO: 679506 - DNA, 75 bp, Homo sapiens
ggcatggaattgaatttcatctgtctgtgggaattgtaagcaagtgacttcggtttcaagatgagtgaagatttg

SEQ ID NO: 679507 - DNA, 98 bp, Homo sapiens
ccctcctcaggaagtccttttattaccaggaggtcatcaccgagtggtcttctcacatcatccttcaggcagcaccaagagtcactggcagcagagag

SEQ ID NO: 679508 - DNA, 50 bp, Homo sapiens
cggggacagagagctgatgaaggaatatggggacaccgtgtacaccattg

SEQ ID NO: 679509 - DNA, 100 bp, Homo sapiens
cgttcgagaatatgctgtaggctgcctgcgacagatgagcatggcacattacacttctgtggatttaaagtccttgcccctcagatcagctttgctcctg

SEQ ID NO: 679510 - DNA, 75 bp, Homo sapiens
atctctgctgctctctcatttgctggccatcggattggggttgcaatgaatgtgtatgagttatcatcagctgcc

SEQ ID NO: 679511 - DNA, 83 bp, Homo sapiens
cagccgtgtgcagcctatcaagctggccagggaacaagatcactcaaggtgaaggataatctactaataccagcactttgaat

SEQ ID NO: 679512 - DNA, 100 bp, Homo sapiens
ttttttgataataagagaagttgacaatgcagatcttcgtgaagactctgactggtaagaccatcaccctcgaggttgagcccagtgacaccatcgagaa

SEQ ID NO: 679513 - DNA, 82 bp, Homo sapiens
tagaacactaaagtgttacatgacagatgtatgagttgaaacattgtagtcggtatatacatgacttatttccttcactcat

SEQ ID NO: 679514 - DNA, 101 bp, Homo sapiens
atcgacttcggttcgggtgcgctgctcaaggacacggtctacaccgacttcgacgggacctcaggatggaaaccagcagcctgcaccgcccgagaaggtcg

SEQ ID NO: 679515 - DNA, 88 bp, Homo sapiens
atatgttgatggcattccagaatatctcagatgagcagatggagtgtgcccatcagtatcaaatcctttagaagtttacctcattccc

SEQ ID NO: 679516 - DNA, 75 bp, Homo sapiens
gcgactcaaagctgcacggcagtctgtttatgaggctcatgctgaagattcggttatggaccatcatttccggaa

SEQ ID NO: 679517 - DNA, 73 bp, Homo sapiens
caccgctgcagggtgcagttcggggtgatgacccgtaagtgctgtccccggcataggtccatctctgcagaag

SEQ ID NO: 679518 - DNA, 50 bp, Homo sapiens
cagccttctacttgtcccatgagctgtccgtacctggcggtgaaaatcac

SEQ ID NO: 679519 - DNA, 74 bp, Homo sapiens
aggtccagatgaaagagaagtttctggtcactccccaggattatgcgcgggtgttgaaagcagcaggggcctag

SEQ ID NO: 679520 - DNA, 90 bp, Homo sapiens
ggaaaacaaaagctgctacttatggaagatacaaagggtccagtggtttacgtcttggatcttgcagatagactgatctcaaaagcctgt

SEQ ID NO: 679521 - DNA, 100 bp, Homo sapiens
atatttgcgaggagcaggtcaacagctccaagagtcaggatcgcaagtcagaaagcaaagaaaagagagacatcttgtcgtttgataaaatcaaagaaca

SEQ ID NO: 679522 - DNA, 75 bp, Homo sapiens
cgacgaggaaccgcccaacatggcctcggagctgatgaccaaacacccaggcaaacgtctgggttgtggacctga

SEQ ID NO: 679523 - DNA, 75 bp, Homo sapiens
ctttccgaatctgcaaaagaagataatgtggatgcaaatgatcttaagcagttttttgagaccaactattctcag

SEQ ID NO: 679524 - DNA, 51 bp, Homo sapiens
catagtacctacagcagcactccaggtctgaaggggcgtctcgattacctg

SEQ ID NO: 679525 - DNA, 83 bp, Homo sapiens
gtctcagccgccaaagaccccgtccggtagagctgttgcgcagccattggtacctgtattggggaaacatagcatacaagcaa

SEQ ID NO: 679526 - DNA, 75 bp, Homo sapiens
gggaacttctggaaagaagacaagcccacacttccagaaatttcagagtctcgctctgtcacccaggctggagtg

SEQ ID NO: 679527 - DNA, 75 bp, Homo sapiens
ctcagcgggacgcgccgctggagaatgaagctttccgggccctcctgcagatccgggcggtgcggaagaagccag

SEQ ID NO: 679528 - DNA, 75 bp, Homo sapiens
atatagagatgtgatgttggagaactacagaaacctcgtctccctgggtggatttgtttaaaaagagtcttctgt

SEQ ID NO: 679529 - DNA, 101 bp, Homo sapiens
aaattgggaagcaaacacttcctgcaccttggatttagagattcagaggagcttattggaaggaggtggacaagatggtcgactatatgcagccaggcgga

SEQ ID NO: 679530 - DNA, 100 bp, Homo sapiens
cccagaagaggtgaccatctacaaccaccctggcatccaggcagagacccgtgctgagtttgctgagagatcggtagccaagctggaaaagacaattgat

SEQ ID NO: 679531 - DNA, 82 bp, Homo sapiens
aggccgggagtcgccccctacccgcttctcgtagtcctgggagcacagcagaagtatcaccgaagtggccttggagtacaac

SEQ ID NO: 679532 - DNA, 100 bp, Homo sapiens
accgagatgcccctgaggggggctttgatgcagtactccaggcagccgtctgcaagttggctggggaacagaccagggaattggtggatttggagaagag

SEQ ID NO: 679533 - DNA, 112 bp, Homo sapiens
cctggagcctcagttggaagcagccgatccagcctgcggagcctgtggggcaggctttatcctgtggataaacgcagagtgaacgagtttggggagtcctacgaggagaagg

SEQ ID NO: 679534 - DNA, 100 bp, Homo sapiens
tgatgatcaggtttttctggatggaaatgaggctgccaggatatcgcagatgaattcagagcacaggagattgatggacaggcccttctcttgctgaaag

SEQ ID NO: 679535 - DNA, 75 bp, Homo sapiens
tcgagagaggctccctcatgggctgctccattgatggttccgagtctgaggaagacataaccttgtgcctgcctg

SEQ ID NO: 679536 - DNA, 51 bp, Homo sapiens
atctaatgaaccgaaactttggcccatggaccaagcttctctcaaaaacag

SEQ ID NO: 679537 - DNA, 83 bp, Homo sapiens
gaggctcacagccgaacaggcacgcttcttcctggtgctgggcgtcctcttctttgccatagcctgcttcttatacaagcccc

SEQ ID NO: 679538 - DNA, 51 bp, Homo sapiens
tgagccaggggacatgcttttgcaggtgaatgacgtgaactttgagaacat

SEQ ID NO: 679539 - DNA, 76 bp, Homo sapiens
gcgtccctttgggtttagcacgatgagctcaatcggcactggggtgaatcagctcccggccgactttaggattctt

SEQ ID NO: 679540 - DNA, 82 bp, Homo sapiens
agaatgaaggctgagtacgatgcagtgaaggccaaggcccagaccctgtgtcaaggagagtggaaagcctcatttgaagagc

SEQ ID NO: 679541 - DNA, 89 bp, Homo sapiens
aaaaatcaatgctgtccaaacttaaacatggagaactgcgacacatcaccaagctgaagccctggagcctctttgatgtacttgtggaa

SEQ ID NO: 679542 - DNA, 74 bp, Homo sapiens
tggggcaacagattcctgtggtgatttaatgttcctaatgaaatgccctgcgagcaacatagttacagaacata

SEQ ID NO: 679543 - DNA, 75 bp, Homo sapiens
tcacagagcctatttacccagaagtagtccatatggtattaccagagaaacggagtctgaaactcttgaagagcc

SEQ ID NO: 679544 - DNA, 74 bp, Homo sapiens
gaagatggacgtactttgtctgactacaatattcaaaaggagtccattgagaccatgcggacccggctggagcg

SEQ ID NO: 679545 - DNA, 50 bp, Homo sapiens
gacaaatcaaattagtggttttggttggagttgctgtgggtgagctgctg

SEQ ID NO: 679546 - DNA, 102 bp, Homo sapiens
tttagtggtgcccatggaccagaaaaaggctgggcttggagcccacaggaccctagaagtcctttaagaacatttaacgctggactcagctgggggcaggac

SEQ ID NO: 679547 - DNA, 100 bp, Homo sapiens
cttaaccttcaaccatctggggaaaaggcaaaaatcccatctaccgcaactctcagttcgagagtaaaggtagcacaggcggagtgcagcggaggcccct

SEQ ID NO: 679548 - DNA, 51 bp, Homo sapiens
tgacctcttcctttatcagccacagtatagaaaaacattttggaaatttct

SEQ ID NO: 679549 - DNA, 76 bp, Homo sapiens
cgcagagggccctgctggcacgaggcactaaggctacatcggtgtggtgaaagatgccacagagtccacggcccgt

SEQ ID NO: 679550 - DNA, 98 bp, Homo sapiens
tctacctcagtgtccatgatgaggaccgagatggtcgcatcctgagtctcagctggcatccctctggtacccacattgcagctggttccatagactac

SEQ ID NO: 679551 - DNA, 97 bp, Homo sapiens
acctgtgaaagaccgattttctgcagaagatgaagctttgagtaacattgccagagagggatcatagacggtatttctatgtaaacgaacagtcggg

SEQ ID NO: 679552 - DNA, 75 bp, Homo sapiens
gaaggcgcctgaagaggacgaagattccaactccacagagtgaccagagagaggacgtggctgaagacaccaaag

SEQ ID NO: 679553 - DNA, 74 bp, Homo sapiens
cttgaacaagttcctttagctctggacgcgtgaccaaaaccaaagacggccatgaagtgagatcgtgcaaagta

SEQ ID NO: 679554 - DNA, 90 bp, Homo sapiens
gacaagggtgttcccgaactagagtggggcatcttctctgcattcagtttcatccaagtcattccgggatttcttactagaagaaaaaaa

SEQ ID NO: 679555 - DNA, 82 bp, Homo sapiens
cgacgtacccgccgccgccgttggctggaggagcatcagatccatgctgctgctgactcggagccccacagcttggcacagg

SEQ ID NO: 679556 - DNA, 75 bp, Homo sapiens
gctgagccggccgcgggcgcgaccggaggcaggagtcggagaggatggcaggggccggaggccagcaccaccctc

SEQ ID NO: 679557 - DNA, 100 bp, Homo sapiens
tacgtggtccacgctgcagtgctgctgctgtttggaggtctgtgcatgcatgttcaggttgtagaaggaacgcctcttattgatggaagaagactcaagt

SEQ ID NO: 679558 - DNA, 83 bp, Homo sapiens
ggagagacgctctgaactgactgccccgcatcaccggagcgtcccagctgcgaggaggtgacagagctgaatgaacctctctc

SEQ ID NO: 679559 - DNA, 97 bp, Homo sapiens
ccttaaaggagctccaccaaaggtctcgtacctctcagaggttggcaaaagcagcttttgatgatgcaattgcagaactggatacgctgagtgaaga

SEQ ID NO: 679560 - DNA, 90 bp, Homo sapiens
ccctccgccgccgccgccttgctgctgctcaaagctgctgccgccccttgggctaaaagggagccagcgccggcagccaccatggcgtca

SEQ ID NO: 679561 - DNA, 85 bp, Homo sapiens
gggagttcttggtgttggaatattttacagcaaagcagtcagctatcagcttcccagtttgcacaattcatcaagaaattatgcg

SEQ ID NO: 679562 - DNA, 95 bp, Homo sapiens
cggggtcgcctagtgtcatgaccagggcgggagatcacaaccgccagagaggatgctgtggattctgtaaagcctggtgcccatctaacagtgaa

SEQ ID NO: 679563 - DNA, 90 bp, Homo sapiens
ccggagcccgctctgcgttttgttttcccctcggcactaggcagcggaggagcccgaccgacccggccgtgacttggcgagcacgaccct

SEQ ID NO: 679564 - DNA, 75 bp, Homo sapiens
agccccagacggaaagagctacttgctgaaggaagaaattgttgagcttccagatttggattacctgcgaaccat

SEQ ID NO: 679565 - DNA, 82 bp, Homo sapiens
tttcagctgttgaaacagaagaagttgagcctgatgaagaagaagtctacttccccagcaggacagcatcattctcctatat

SEQ ID NO: 679566 - DNA, 50 bp, Homo sapiens
caccagctccgaaatcaccaccaagacggaatcagtccccaatgcctgga

SEQ ID NO: 679567 - DNA, 75 bp, Homo sapiens
agcttttcacctctggttcctacatctggattgtagccataagtggacttgctttaatttgtgcctggtgctgac

SEQ ID NO: 679568 - DNA, 90 bp, Homo sapiens
gctaaaagacgaaataccaccggaactggtcgaatgaggcacctaaaaattgtataccgcagattcagtatgggtggcatccctgcccgg

SEQ ID NO: 679569 - DNA, 83 bp, Homo sapiens
ccgggcgcggggagctgcgcgaagccggggcggagcacgcgagctatggtttggtgcacctcgatttggaggaagtagggcag

SEQ ID NO: 679570 - DNA, 90 bp, Homo sapiens
ggaagatgttcgacaagggcccagagcaggagtgagctgagtcgacagaaacttcatacccaagagctgctttctcagctggaaatggca

SEQ ID NO: 679571 - DNA, 137 bp, Homo sapiens
gggaagattggctactacctggtgctgggctggtgctgcgtagccatctttgtgttcatgggcgacatggagtccaatgggaaatacatcaccaaatctggaacccgtgtggaccaccagacaggccccattgtgtg

SEQ ID NO: 679572 - DNA, 99 bp, Homo sapiens
cggagccgtctaccagatcaacgtcctccgggaccggagtcagaaccctccgcagagtaaagggtgtccggtggagagctgtttgaccggatagtggag

SEQ ID NO: 679573 - DNA, 75 bp, Homo sapiens
agggacagcacctcatcccctggatgggggaccacaagatcctcatcgacaggacgtggcccagtggaacatcgg

SEQ ID NO: 679574 - DNA, 82 bp, Homo sapiens
gttttttgccttgcttttggagccacattgctactgtttttggatgaagacttgaaggtagctgggaaatacaaaggaaatg

SEQ ID NO: 679575 - DNA, 100 bp, Homo sapiens
ggaagccctttctcctcggcactgtattctttacctgcttcccaatcccactgatgaggatcagcccatggtatctgaacttaggactggagctgcagaa

SEQ ID NO: 679576 - DNA, 75 bp, Homo sapiens
gggaggaactgtttgtagccctcgtccagacgccccaaacaaacaggtaaggtggcttttcgttgcctggacccg

SEQ ID NO: 679577 - DNA, 100 bp, Homo sapiens
atcagaagattgctggatgttatgaaaagaatcttttatggggggctataatgttaattcaagactctcgaagagaagcttcagtgcagatggatttgag

SEQ ID NO: 679578 - DNA, 73 bp, Homo sapiens
tgaaggtgaagaacatcatccagtggcagacactgaaaataaggtgtacaactatgagcctttgacacagctc

SEQ ID NO: 679579 - DNA, 100 bp, Homo sapiens
agcggtggtgaagtggtctgctccggatggctccgcaagtcccccccggagaaaaagttgaagcgttatcgcttctctgaagtagctttggaaagtagag

SEQ ID NO: 679580 - DNA, 96 bp, Homo sapiens
aaagaacaagctttcttactcaggggggaaaacgttttgagcttcaacatggcctcgctgtgatatgttttaaaagccttggcctcagaggaccct

SEQ ID NO: 679581 - DNA, 76 bp, Homo sapiens
tggatttcgtattagagttgatctcgcatctgagacctcatctgagtatgacagtagttttccaaactgggaattt

SEQ ID NO: 679582 - DNA, 90 bp, Homo sapiens
tagaaaactgtcttctgcagtacgttctgggatagttgagtatttgagccttgtaaaggttcgagaaagtgatcccagtgacccaaacaa

SEQ ID NO: 679583 - DNA, 100 bp, Homo sapiens
ggaaatcgtgcacatccaggctggtcagtgtggcaaccagatcggtgccaaggtatttggcaccaatgtgatggtgacagtggccaagtccttcgaggca

SEQ ID NO: 679584 - DNA, 75 bp, Homo sapiens
aaagcttgttcgaatgtctgcaagccagttagaagccctctgtcctcaggtcaaaatgcagatcttcgtgaaaac

SEQ ID NO: 679585 - DNA, 100 bp, Homo sapiens
cgtgcccgagaatagctccgtccagcaggtgctgaccttaaggaaagagccaaaatgagttccagtgaagttggtccttttgtctccaaaataagagcag

SEQ ID NO: 679586 - DNA, 100 bp, Homo sapiens
cctgacactatgaatgctacttggatgcctcttaagataagatgctcccaagtcccttgcagctctcttcagaagaaaaatcactagtgctctgctcttg

SEQ ID NO: 679587 - DNA, 83 bp, Homo sapiens
aatacttcctgtttggcttcaacattgtcttctggagggtcaccatgaagttcaatcccttcgttacctcggaccgcagtaaa

SEQ ID NO: 679588 - DNA, 83 bp, Homo sapiens
tggtgcgcattgtctttccatcgagagccaagcgacaaggagacatctggaacaaactggccctggccaacgtcaacattggg

SEQ ID NO: 679589 - DNA, 101 bp, Homo sapiens
ccgctggcgctagtctgaccctccgccaggcaaaaggaagaatgtctacacaaggaagtacaggatttggcttttctagatgtcgtatccaaacttcgcag

SEQ ID NO: 679590 - DNA, 82 bp, Homo sapiens
aaggaagtgaagaaggcgcatcactcccagctgcgcaaagcttgcgaggtggcgttagtcctcctgcatatgcccaagagga

SEQ ID NO: 679591 - DNA, 96 bp, Homo sapiens
tcagtgggctgatcccaatggattgcatccacattccagagagcatcatcaatactacgacatttctgccaaaagtaactacaactttgaaaagcc

SEQ ID NO: 679592 - DNA, 75 bp, Homo sapiens
gtgaggatgaagaagatgactaccagccagatctcggtgctcagcggcggcaaggccaagtgctcgcagttctgc

SEQ ID NO: 679593 - DNA, 89 bp, Homo sapiens
tcgtgcatgggaatcggagaccatggcagtgcagctggtgcccgactcagctctcggcctgctgatggggtcttgctcctcagaacaaa

SEQ ID NO: 679594 - DNA, 82 bp, Homo sapiens
ggggccgggcccaggagcctcagccccgccggcagccctaagggcaagcaatggatggtgtgccttttatgatttcagagaa

SEQ ID NO: 679595 - DNA, 50 bp, Homo sapiens
gttcagaggactgcacggtcatggatgagaacaagttgagcagtgccaac

SEQ ID NO: 679596 - DNA, 89 bp, Homo sapiens
gcagcaggggactcctgacacttccccttccccaccgaaccgcggaactgatttcatctgaaattgaagagacaatcagagaaaaacta

SEQ ID NO: 679597 - DNA, 100 bp, Homo sapiens
gtttcctctctttgctcctggtggctgctgtggtttggaagatcaaacaaagttgttgggcctccagacgtagagagtatgtccgtggttcagaccctgt

SEQ ID NO: 679598 - DNA, 100 bp, Homo sapiens
cagactgtggtgcctacccccatcactgcttccctcagccataacaggctaatggaggttggcaggatgctactaccccttcatcagtgacctcccctac

SEQ ID NO: 679599 - DNA, 90 bp, Homo sapiens
cgacccttctgattatgagagaaaccagcgacaagactctgggacgatgaagaagccgcacaccactgaagagattggtgtgcccatatc

SEQ ID NO: 679600 - DNA, 75 bp, Homo sapiens
gccctctactggaggggtgaagaaacctcatcgttacaggcctggagctgctgaagactgctattgggaaagctg

SEQ ID NO: 679601 - DNA, 75 bp, Homo sapiens
ctccgttgcctgctcccggagggagacgcgctgccgaggagaacccagcggtggtcatatgcattagaaaaaccc

SEQ ID NO: 679602 - DNA, 73 bp, Homo sapiens
ctgcatggagtcttgtgaaatcgcgtggactgcaacacccagcagcgcgaatgatatggaacctagcaaagct

SEQ ID NO: 679603 - DNA, 90 bp, Homo sapiens
tcacgcaaacaacttatcagtagtgacttacagtaagctccatgatgcgttatctgggtctggaaacccaaaccctcaaggatggcctgg

SEQ ID NO: 679604 - DNA, 111 bp, Homo sapiens
cctcagagcaggagaagctgagcctttctggacagaccaacctgtcagtgctgcaaggtgtccgcaatgttgccagtgtctgtctgcagattggctacccaactgttgcat

SEQ ID NO: 679605 - DNA, 100 bp, Homo sapiens
gccccgcagccgacccctgccggccggtgtccccaccgccatccctgacccatggcgctgaagaggattcagaaatcacttatataagaagaaccttgat

SEQ ID NO: 679606 - DNA, 75 bp, Homo sapiens
ctgtgggatgagacggatgtccattgagacccagagcagcagttctgaagagatagtgcccagccctccctcgcc

SEQ ID NO: 679607 - DNA, 98 bp, Homo sapiens
cgggtagtgccagctacggtccgcggctggggttccctcctccgtttctgtatccccacgagatcagctggatactcttgttaccagaattccaaagg

SEQ ID NO: 679608 - DNA, 75 bp, Homo sapiens
tttggaccaaaaggacaagcagtttgttgccaagaggctaagaatattgtacacaaagattcttgatgttcttga

SEQ ID NO: 679609 - DNA, 75 bp, Homo sapiens
atccacagggccacagcgacaccactgctctgtatgaaaaagctgatatcaaggggcctgaagacaagaagaaac

SEQ ID NO: 679610 - DNA, 90 bp, Homo sapiens
ttcctgcaccattgctgacgcctggtgatccatgtcagaagtacttccagttcaggcccatgaagttcatcagaaaattctggcaactga

SEQ ID NO: 679611 - DNA, 101 bp, Homo sapiens
caacattgagacagccaacagttttgctgtaacaaacgcctgaagaagaagtctctccacagttgtttactttccacgaagctgtttcacaaatggtagaa

SEQ ID NO: 679612 - DNA, 100 bp, Homo sapiens
gaggatgtggcgcgcggaggggaaatggctgccgaaaacaagccggaagtgagaaggcaaccaaagtgcaggacatcaaaaacaacctgaaagaggcgat

SEQ ID NO: 679613 - DNA, 100 bp, Homo sapiens
aagtggtgtgtggcacaaaatgcaacacggaactctattttaagaacctctcaaaacgaaacaagcaaatcatggagaagaatggaaataaccgaaagct

SEQ ID NO: 679614 - DNA, 100 bp, Homo sapiens
ggcgctgcttgctaaagagccgagcacgcgggtctgtcatcatgtcgcgttacgggcggtacggaggaggtgaaagaaaatggcccgaaccaagcagact

SEQ ID NO: 679615 - DNA, 83 bp, Homo sapiens
cggatgccctgcagtacctgcagaaggtctctggagacatcttcagcaggcaggagaccgggtgatggtgttgaaccggtcag

SEQ ID NO: 679616 - DNA, 75 bp, Homo sapiens
ggcgcactggacagaagtgtgccctgaagggccatgctatgatagtggaagcttatccaaaataatagatccaga

SEQ ID NO: 679617 - DNA, 100 bp, Homo sapiens
gcagagtggataaagaactgggagaaatcagggagaggcgaattgctctcaaaattagagagatgtgtaattgtccaccactgtctaatccagaccctcg

SEQ ID NO: 679618 - DNA, 86 bp, Homo sapiens
gaacagagagagaggtggacagatctgagagatactgagtaaagatgacggcgccttgaggtaagctacaggcaacaccacttccg

SEQ ID NO: 679619 - DNA, 96 bp, Homo sapiens
ggagatctccaggaagcgcgagaccaggacggcgcgggaactctacgccaacgtggtgctggggctctactacccgaaggatagtgcccgaagttg

SEQ ID NO: 679620 - DNA, 100 bp, Homo sapiens
tcaaggctcggaagaatgtggagagttttctagaagcctgtcgaaaaatgggggtgcctgagaacatccagtcatggataaaaatgagctggttcagaag

SEQ ID NO: 679621 - DNA, 100 bp, Homo sapiens
cccaggtgtaagcgcagaaagcaggcgaacccgcggcgcaataacgggtgataaaagaaaatgtggctgaagttacccgaagttcagcttgcagtgtaat

SEQ ID NO: 679622 - DNA, 74 bp, Homo sapiens
aaagtttcattgtgtatgtagaagaccagaagtggatggagaggtctacatcaactattacgacatgaacgcgg

SEQ ID NO: 679623 - DNA, 100 bp, Homo sapiens
aacactttacagatgtttagagctgcagaagcagaaccacagactatgacttggtcggaggcgatcagctcaactgtcacttcggctccatcctgcacac

SEQ ID NO: 679624 - DNA, 83 bp, Homo sapiens
aggacatcttcttctctataggattcggaaggacgttggttagcgtccccaaaatgaaacataagccaaccaggcaacagaag

SEQ ID NO: 679625 - DNA, 82 bp, Homo sapiens
ggacagattgaccttcagagcgaggaacttgctactaccagcaccatgccctaccaatatccagcactgaccccggagcaga

SEQ ID NO: 679626 - DNA, 99 bp, Homo sapiens
cagggactgcgcctgcaggaacccctggtgccccacccctggctggcatggccattgtcaaggagaagaaggaagttgtggaagaggcagaaaatggaa

SEQ ID NO: 679627 - DNA, 75 bp, Homo sapiens
tcagaaactcagccactggttgccttggtaggcaataaaaactgggactcttcaattaatctgacatttcacaaa

SEQ ID NO: 679628 - DNA, 100 bp, Homo sapiens
tggctgctgtgtggttgtctctgctgctgttgcacactgggttgcagcctatggcctgttatttgtctcaacaaaagaagccatgggaccacaccaccac

SEQ ID NO: 679629 - DNA, 74 bp, Homo sapiens
ttttggcatcaaggacaaacccaccttcatcaaaggggatgaaattgattctgcagtaaagatgttggtgtcat

SEQ ID NO: 679630 - DNA, 90 bp, Homo sapiens
gatgaagatgatgatgtcctcagtattgattcagattaccagagactgatgactgtggcggagacgattacagctctcatgtttcctttc

SEQ ID NO: 679631 - DNA, 100 bp, Homo sapiens
ctgaaatatatggagaatgtgggtccagtgtgaaaaaagccagtattaaaatactgaaaaattttgatgaagcgataattgtggatgcggcaagtctgga

SEQ ID NO: 679632 - DNA, 75 bp, Homo sapiens
cgccgcgcactcggagccggcacggctcggcggtgttatgaagcggagattgaggagatagatgaagaaaatggc

SEQ ID NO: 679633 - DNA, 90 bp, Homo sapiens
tacagagaaattctactacatctataacgagaagggcctggaggtcaccatcaccgccaggcttagaagggcagctctgtgaggtggaga

SEQ ID NO: 679634 - DNA, 83 bp, Homo sapiens
attaagaagtacaatagcattcgcgaaagcacacctgagctgctcttaatatcatctcttgaagatacaaatgaaacacgaaa

SEQ ID NO: 679635 - DNA, 100 bp, Homo sapiens
aggcaggagcagcttctggatgaaatacatcgtgagaagagagatggaatggggcgagtccttgctcaagatgtatatgcaaaagacaatttacccccct

SEQ ID NO: 679636 - DNA, 104 bp, Homo sapiens
gcggacatcgtctcctgtgtggcgatggtcttcctgctggggctcatgtttgagcacttgcacctcctgcgccgccgccccccatccaaggatatgccttcaag

SEQ ID NO: 679637 - DNA, 99 bp, Homo sapiens
cacacgcgccggctgctgctactactaccactttgggctgatggcaactggtgctggagaatctggtaaaagcaccattgtgaagcagatgaggatcct

SEQ ID NO: 679638 - DNA, 83 bp, Homo sapiens
gagccgcacctttgccgtgtacctcaatagcactggctaccggacagacaatgcagatcttcgtgaagactctgactggtaag

SEQ ID NO: 679639 - DNA, 110 bp, Homo sapiens
cgtccgcttgaccgagatgctgcgggcctgtcagttatcgggtgtgaccgccgccgcccaggtcaaatggatgatgtactggattatatttgcacttttcaccacagcag

SEQ ID NO: 679640 - DNA, 74 bp, Homo sapiens
tgctgatgactgggtaacagatccccgttttctaatagtttcactgttacatgccttgaagtgatgaggaggtt

SEQ ID NO: 679641 - DNA, 75 bp, Homo sapiens
caagacctctggccttccagcaaatccctccccaggaccagccccacaggctaaagtaaataatgccagcctgat

SEQ ID NO: 679642 - DNA, 100 bp, Homo sapiens
tccctgacaactttgtaagaccccatggctgggggttatggagtgatgggtgacgatggttctattgattatactgttcacgaagcctggaatgaagcca

SEQ ID NO: 679643 - DNA, 75 bp, Homo sapiens
agcaggacccgaggccaggagccaggggcccagaagattgctagtgcaactactgctccatcgatcccttcacat

SEQ ID NO: 679644 - DNA, 50 bp, Homo sapiens
gaccaatggaagttgttaatacagagccacattgctgtgaggaagcctgg

SEQ ID NO: 679645 - DNA, 82 bp, Homo sapiens
ccaccatcttcgacttgagcgaagttttatgcaagagttgatctctctaatgtattagatcttcatgcctttgatagtctct

SEQ ID NO: 679646 - DNA, 98 bp, Homo sapiens
cagagttctagggttctaagtgatgtccaggaaggaggaggaataatatttatggagcatatattatggaacacatatgagaataatgttatcactat

SEQ ID NO: 679647 - DNA, 100 bp, Homo sapiens
gggtgttcttgacgattaatcaacagaaaaatatgtcgtaactgcaagtgtggccaagaagagcatgatgtcctcttgagcaatgaagaggatcgaaaag

SEQ ID NO: 679648 - DNA, 60 bp, Homo sapiens
tggacagccaccttcgggatgagcataagccctgccaaggtaaccctgctggggtcagtt

SEQ ID NO: 679649 - DNA, 82 bp, Homo sapiens
ctcaggaacagggacagcacctcatcccctggatgggggaccacaagatcctcatcgacagaccctgaaggaagattgggaa

SEQ ID NO: 679650 - DNA, 100 bp, Homo sapiens
ggcatctctaggtaccatccctgacctggtcctcatgctgccgaggctgttgctgttgatctgtgggctcacacagtcgacaaaagaaaacgtttttctt

SEQ ID NO: 679651 - DNA, 83 bp, Homo sapiens
cgagtcagcaggagcccacccaggacccgcctgctaccgcaaagctggtctcttgtggctcagcgccgtgcggaggttgaagc

SEQ ID NO: 679652 - DNA, 101 bp, Homo sapiens
agaaacttatgcagagggagatgtccatggatatgatggacttccaaaaccagaactaatatcctggattgaacacgggggagagcccttcaggaaatgga

SEQ ID NO: 679653 - DNA, 90 bp, Homo sapiens
ccccaccggaagtcctgatgtatagcaagttcagcagcaaatctgacatttgggcttttgagccctatgagtttgtctctctggaatggc

SEQ ID NO: 679654 - DNA, 100 bp, Homo sapiens
gctgaggctacctgtgaacagtacgcagtgaatgttataccatgtttgtgtggaagtgccccgtgtttgctatgccgatgctgtcctagtggaaacaact

SEQ ID NO: 679655 - DNA, 74 bp, Homo sapiens
ccggagcttctcagaagacagagggttttcttttgagcgatggcaagccggcaggtggatattgcaactcaggg

SEQ ID NO: 679656 - DNA, 98 bp, Homo sapiens
ccggcaaggggacccagtgcgcccgcatcgtcgagatgaggacggggacttggttgccttttccagtgacgaggaattgacaatggccatgtcctacg

SEQ ID NO: 679657 - DNA, 75 bp, Homo sapiens
tgaataatatagctggtattgaagagaattctcccagtccttggctacatcagcccacccctgtgacctcagcag

SEQ ID NO: 679658 - DNA, 98 bp, Homo sapiens
ggatctatcctgacgctaagaagcgatcgctgatcaatgaggtaaaggttgttgctgttgatgcagagttgaatgtcttctatgaggaaagtgtgcat

SEQ ID NO: 679659 - DNA, 49 bp, Homo sapiens
aatatagcagatatggaaggtgcactggataagaagcatgtagactggg

SEQ ID NO: 679660 - DNA, 82 bp, Homo sapiens
gctggagcctgctggaggaggtgctagagcagcagagaaggcgtccagctcagcgcatgaaggtcgcctcagtgacccacag

SEQ ID NO: 679661 - DNA, 74 bp, Homo sapiens
cttatgagctcggttttcttatgcttataagagtggaacagcgaatgacaacagagctgctcaaggcgggaact

SEQ ID NO: 679662 - DNA, 75 bp, Homo sapiens
aactggcagcggttttatcaactgacaaaactcttggattctatgcatgaagtctctttaatgtggggaacaagc

SEQ ID NO: 679663 - DNA, 82 bp, Homo sapiens
aagcagcagtcagaaggggaacggatctgtgtgcccacagctcctggagccccacagtgtactaatggtcacttgatgtgcg

SEQ ID NO: 679664 - DNA, 50 bp, Homo sapiens
gctagtaatttgccttctggattgaagaaggtagataatgactataatgc

SEQ ID NO: 679665 - DNA, 90 bp, Homo sapiens
caaggcgttcaagcgaaaacatgaccgctgagcccatgagaaggagcgatatatagttatcagcaaagtagatgaagaagaacgcaaaag

SEQ ID NO: 679666 - DNA, 88 bp, Homo sapiens
cctgacctaatgttatcgcggaatgatgatcccagatgcagtgactggttactacctgaaccgtgctggctttgaggcctcagaccca

SEQ ID NO: 679667 - DNA, 71 bp, Homo sapiens
gaggggaacggaggccagagctgcgtgggctcgggatgagtttgaaggcctcttcaagcagccagcagaaa

SEQ ID NO: 679668 - DNA, 145 bp, Homo sapiens
ggaagctgcggtctctggccagcacgctggactgcgagacggcccggctgcagcgagcgctggacggagaggaaagcggctgaatattctgaactggtcgaaacattactatcaagtcagcaagacccagttatttaccagagat

SEQ ID NO: 679669 - DNA, 83 bp, Homo sapiens
attcgagtgaccgagaccgcggccgggaccgaggttatgcaaagggtgacctggacatatcttacatcacatccagaattgca

SEQ ID NO: 679670 - DNA, 100 bp, Homo sapiens
ttaaggccattggtacagaaccagattcagacgtcctctcagaaataatgcattcttttgcaaaggtctatgttaacaatgaatgggcaaccagtgttgg

SEQ ID NO: 679671 - DNA, 75 bp, Homo sapiens
ggattacagatgtgagccacttcgcccagcccaccgttttattttttacttggaccatgagactgtttcagccac

SEQ ID NO: 679672 - DNA, 100 bp, Homo sapiens
aggatcttcactaaaaagcttccccatcctgatctggccttttcagatattaatggcaaagttcagaccattgttttgacatctggtacattatcaccaa

SEQ ID NO: 679673 - DNA, 83 bp, Homo sapiens
aaaactcctaagaaaaccaaaagttctccagctaaaaaagagaagtgtgatggcaccttgtccaccctgtcgtgattattcca

SEQ ID NO: 679674 - DNA, 83 bp, Homo sapiens
cgacgcggacatggtcatgagctttgtgaacctgggccgagacgcatccagagctttcgtgaccggggactgttctgaagcag

SEQ ID NO: 679675 - DNA, 100 bp, Homo sapiens
tacaatggaatctggtccaaacaatcatgggaatttccaaggggattcaaacttcaacagaatgtggcaaccagaatagctgaaacctttggacttcaag

SEQ ID NO: 679676 - DNA, 100 bp, Homo sapiens
agatgtgatgttggagaactacagaaacctggtctccctaggtgaacaaatagaagctgagggtgaaggacctacagctgtcaccttcatctcttctcaa

SEQ ID NO: 679677 - DNA, 100 bp, Homo sapiens
agccccacgtcgccggcctggaggggcgaagaggacgagggggccaaggcttcctccgggaaatgcactcggtgatggaaagagagccactattctgaag

SEQ ID NO: 679678 - DNA, 100 bp, Homo sapiens
tcgtttcctcttacattatctgggtttctgtgaaagaggtgccgccggatggtggtggttgtctctgatgattacctgcagagcaaggaatgtgacttcc

SEQ ID NO: 679679 - DNA, 100 bp, Homo sapiens
ccgccaccggcagcagcagcaccaccggacgattctggatgaaattgaagaacataacatcaaaatctatcacttacctgatgcagaatcagatgaagat

SEQ ID NO: 679680 - DNA, 82 bp, Homo sapiens
atccagcctgcggagcctgtggggcaggtacctgcaccagtcaggggccctgaccatggaggccctggaggacccttccccc

SEQ ID NO: 679681 - DNA, 100 bp, Homo sapiens
ccgagagggggcgacggcggcggcggtggcctgaggaggcccgagcggcggcggtggcggcgaaggccgaggcggtgaccgcgagtggttctgggacttg

SEQ ID NO: 679682 - DNA, 112 bp, Homo sapiens
gagcaaacaaacaccaaagactggacagtgacacctgagcacgtcttgcctgagtcccagaggcccccagaatgagaagtgacaacaaggaaaatccacaacaggaaggggc

SEQ ID NO: 679683 - DNA, 100 bp, Homo sapiens
agatgaacccaacctagtgggtgtaatacatcatgaactgcagggtcgcccggctcatggagatgggattttccagaggtgatgctttggaagccctgag

SEQ ID NO: 679684 - DNA, 75 bp, Homo sapiens
atgggaaaaacatcaaattcttgaccaatctagggccagcatccttcagaaaaagcatccccgaggaggaagacg

SEQ ID NO: 679685 - DNA, 49 bp, Homo sapiens
ctcccatcattgatgtggtgcgatcgactattgcagatatcatccgaac

SEQ ID NO: 679686 - DNA, 100 bp, Homo sapiens
taattattgtgtaaaaaaacaacttcttcactcttgggtacagccaaagaccggagctttggagagatgaagtttaaacagtgtcctacagagaacatgg

SEQ ID NO: 679687 - DNA, 83 bp, Homo sapiens
ctgcaattcactcagcaaactgggactgttggtcaccctacctggcagccagtgataagctggttgtcttcttgcctgccctg

SEQ ID NO: 679688 - DNA, 75 bp, Homo sapiens
tagacattggtggaggattcacgggaactgaatttcaattggaagagaccatgctcgacagctgaccaaggccat

SEQ ID NO: 679689 - DNA, 74 bp, Homo sapiens
cggaatgcctgaaccaactgttttgaggttcccattaaggatgtcgaggcggggaatggtgaggaagagtcggg

SEQ ID NO: 679690 - DNA, 83 bp, Homo sapiens
ctggcttacaaattggattgagatttctcacattggcaaactgagagattttcttctggaacacaggaaagattatattaatg

SEQ ID NO: 679691 - DNA, 100 bp, Homo sapiens
cccagcatttcatccctcgtcgaaaggattggattggcatctttagaacattgctacaagtggttggtgtggtctctgtggctgtggccgtgattccttg

SEQ ID NO: 679692 - DNA, 100 bp, Homo sapiens
cggttctacatgaaggaggccatccagctcatcgctcgcatcgctgccgccaacggggccgccatggcatcagatgaaggcaaactttttgttggagggc

SEQ ID NO: 679693 - DNA, 98 bp, Homo sapiens
tagaaagtcctcattatgctgtgaaaatattagattctgtgattcacctccaagaaattgtccaccaggctgcagatcccgagaccctccctagatca

SEQ ID NO: 679694 - DNA, 90 bp, Homo sapiens
gattgatgttggctgatattggagtgctcattcacatgaagtacaggtttgcagattccgccagcagcacagcaagctctacagatgagt

SEQ ID NO: 679695 - DNA, 74 bp, Homo sapiens
tggaggaggtggaggaggcgccggaccggggggatcagacctattgtgaccgcctggtgcaggacacgcctttc

SEQ ID NO: 679696 - DNA, 83 bp, Homo sapiens
cttcggcagtccacccaccgccgccgcctcccaggtggacccccaaaagtacaagggcatatttaacggattctcagttacac

SEQ ID NO: 679697 - DNA, 100 bp, Homo sapiens
gagcagagccgcccagccctgccagctgcgccgggacgtaagactttgaccccgacgcaggcttcagtgattgccgcggatcagaagcctgagcactttg

SEQ ID NO: 679698 - DNA, 82 bp, Homo sapiens
ggaacaagagaaaagaaattcgaggttaagagattatagaagtcttatcgaacaatgagatggtggagctacagagaatacg

SEQ ID NO: 679699 - DNA, 100 bp, Homo sapiens
ctgacggtggaggttcgcggctctaacggggctttctacaagccaaaatgaagtttaatccctttgtgacttccgaccgaagcaagaatcgcaaaaggca

SEQ ID NO: 679700 - DNA, 100 bp, Homo sapiens
ggtggcgggcgcagctgctgtgacaggtatgaacgctgccgtccgtgccgtggtgcgcatgggtatctacgtgggggccaaggtgtacttcatctacgag

SEQ ID NO: 679701 - DNA, 75 bp, Homo sapiens
ctggtgtcgccatgggccgccgccccgcccgttgcatttcttgagacttaaagtggcattctaaaggcaatttaa

SEQ ID NO: 679702 - DNA, 90 bp, Homo sapiens
ccccaccttgatccagcggacttacggggcatgaccattcggcccctggtagacctgttggctgtgaagaaaaagcaagagacgaagcgc

SEQ ID NO: 679703 - DNA, 83 bp, Homo sapiens
ctgaagacagagggctctgatctgtgcgacagaggacgactggagtgagcactggcctgggagtctgaagattgtgccttcag

SEQ ID NO: 679704 - DNA, 82 bp, Homo sapiens
gctaagcaaaaccctgcagaacggctgcctaatttacagcaaccatgaggtttctgacaaagcgggagcaaaaattaatgca

SEQ ID NO: 679705 - DNA, 87 bp, Homo sapiens
tctttgcagaatttgctgttcaagctgaaaagaaaattgaagttgtaatggccgaacccttgatggtattgcagaaatatgaataga

SEQ ID NO: 679706 - DNA, 83 bp, Homo sapiens
gttggacgctgccagtttgcacagcagcaggttggatttggtctagggagtcccagaaagaagtagaaaaagagagagaagcc

SEQ ID NO: 679707 - DNA, 83 bp, Homo sapiens
ttacccccctattcaagttcatgtcacgctgggtaatgaggatttgactgtgaaggtatataatctgtctcagaatattcaag

SEQ ID NO: 679708 - DNA, 90 bp, Homo sapiens
agctgtccgagtcccaggtcaagagcctctgcgagaagccacataaagaagatccctaatagtcatttctcaacaattatatagtcaact

SEQ ID NO: 679709 - DNA, 107 bp, Homo sapiens
gagtacagaaaaaatccaggaacatatcaccaaccaggttcatggaaatcttaccgctggtcatggtctcctggttgagttgataatcacatttcaattggtgttta

SEQ ID NO: 679710 - DNA, 102 bp, Homo sapiens
tcgacctgagctgggaggccactagcagccagttccggcccgaggacaccgactaccagcaggtgaaagaacttgtcctggacaacagtcggtcgaatgaag

SEQ ID NO: 679711 - DNA, 100 bp, Homo sapiens
tgccgccagtgtttccgtcagtacgcgaaggatatcggtttcattaagggcactgcgtggacctgccagacacaggactctgcaaggagagcatcccgcg

SEQ ID NO: 679712 - DNA, 101 bp, Homo sapiens
caagtttcgaggtcaccggcgaccccccctagcagcgcgcctggctctggcccccgcgaaggaggacggagtttggtgcttttctgctttgggccaagtag

SEQ ID NO: 679713 - DNA, 100 bp, Homo sapiens
cctggaagggagagacctggagctggccctctcctcctccatctccttgactgggtccggctccatgtgtgcgaggtggacagtttgtcggcagatgttc

SEQ ID NO: 679714 - DNA, 89 bp, Homo sapiens
tggagggcctcgccatgtcctgctgcccggtggtggcggtggcggcccgcgatctgagccgtgcgaaggagtttgcacagaaacacgac

SEQ ID NO: 679715 - DNA, 96 bp, Homo sapiens
cagaagggtgatcagcaccgcgaaagccccaggggccattggaccctacaggaaatctgaaatagagtactatgctatgttggctaaaactggtgt

SEQ ID NO: 679716 - DNA, 100 bp, Homo sapiens
cactcctcaaccttgtgctggacggcaccattgagtacatgcgaggtgacaaaatatctgaacagaagaggacttaggagagatctgaactccagctgcc

SEQ ID NO: 679717 - DNA, 83 bp, Homo sapiens
cgcagaagtcgcgtgtctaggtgagtcgcggtgggtcctcgcttgcagttcagcgaccacggggtcgggccccggctcagtgg

SEQ ID NO: 679718 - DNA, 106 bp, Homo sapiens
gaagaagcagaggaagaacaagaagagaaccttgaagcaagtggtggagatgaagaagagaatgatgagccacccaaagtagtagttaccgaagtaaaagaagaag

SEQ ID NO: 679719 - DNA, 75 bp, Homo sapiens
gaggaaggaaggagcagttggttcaatctctgggagccagagtgacccctcgacctgtcagccatgggggagatg

SEQ ID NO: 679720 - DNA, 100 bp, Homo sapiens
tctgggccgcgcgggagccgcagggcgccctagccttcgcagaaacgatggcggaggaagaagatcagccatgcagaagctggggacagaagtatttgaa

SEQ ID NO: 679721 - DNA, 75 bp, Homo sapiens
ccgaaaaagagcttctcacacgtggcagagctgtcggaaaaggtaacagaagatggaactcgaaatcccaatgaa

SEQ ID NO: 679722 - DNA, 83 bp, Homo sapiens
agacgctggatttttttcgggtagtggaaaaccagatttcttgataaccggctgtttgctacctgctctgatgacactacaat

SEQ ID NO: 679723 - DNA, 100 bp, Homo sapiens
cgcacttgtcttagcagttctcgctgaccgcgctagctgagcacttaaagaacctaaggaactgaattttgtttttggtgtcaacattgaacaccgggat

SEQ ID NO: 679724 - DNA, 101 bp, Homo sapiens
gtcaagaccatcatcactttcattgtctcggacgtgcggggcctgggcctcccggtccgcaagcagcacattggagatatatttccacagcatctggcttt

SEQ ID NO: 679725 - DNA, 74 bp, Homo sapiens
cagcacaggatatgccttgtcagatctgctacttgaactaccctaactcgctataccaaatggttttggtacca

SEQ ID NO: 679726 - DNA, 75 bp, Homo sapiens
acttccaacaatatttacgaggcagtcaaggctgcggagtggcagctggaccagccatcatggagtggccggctg

SEQ ID NO: 679727 - DNA, 83 bp, Homo sapiens
atcaggtgatggataggagcaaccctgtaaaaccagccttagactatttttcaaacagtactgatagtggtgccattccggga

SEQ ID NO: 679728 - DNA, 83 bp, Homo sapiens
taggactcattttaatcttctgcctaccttttattcctcctcagaggaaagtgactattttaccccacagggagaattccgtg

SEQ ID NO: 679729 - DNA, 82 bp, Homo sapiens
tgaagtagcaaaggcaagaaggcaacgacgttccatctgtggaaggacctaccaaccaggagaggagaggcagcagcatggc

SEQ ID NO: 679730 - DNA, 88 bp, Homo sapiens
agcagccaagatggtgaagcagatcgagagcaagaactgataaatttcaaacggaagagagtggcagcatttagaaagaatctaattg

SEQ ID NO: 679731 - DNA, 127 bp, Homo sapiens
caggccatgatctggactgcaggctggctgctgctgctgctgcttcgcggaggcttcattgaggaccctgagaggaagtatcactttgagtgcagcagcgaggagcagtgtcaggagtggatggagg

SEQ ID NO: 679732 - DNA, 98 bp, Homo sapiens
cagctccaaagatgtagctgtgatgcagttgcggagttttaaagcccatctgggagcagttacctgtgccagcccctctacctgtgttagcagatctg

SEQ ID NO: 679733 - DNA, 100 bp, Homo sapiens
actatatccaacaactcagatatggcagaagtgaagtcaatgttccgggaagttcttccaaagcaagattgttcagattccattctgtggggaaattgac

SEQ ID NO: 679734 - DNA, 75 bp, Homo sapiens
aaactcagatgcgctgaagctagctaaagaagttgatcctcaagggcacctggacgatgacggattaccgcacgg

SEQ ID NO: 679735 - DNA, 100 bp, Homo sapiens
ctcagagtccgactctcccacctgctaagtgacgccaagtccagtgaaaggcaaagggaaagtgggtcgccccacagcttcaaaggcatcaaaggaaaag

SEQ ID NO: 679736 - DNA, 49 bp, Homo sapiens
ctcgaattccagaatgatgaaattgttgtaaacaggaacatcgataagt

SEQ ID NO: 679737 - DNA, 87 bp, Homo sapiens
tcctcgctcccgccaccgccggacttcaatgcccagtccccagctcgccagcatcagaccaaacattgtctggcttgcactgtaaaa

SEQ ID NO: 679738 - DNA, 75 bp, Homo sapiens
gcaacatcaggtgactgtcccagaagtgaatcgcagcgagaattagaactgcagcgtcagcgtgacttgcataag

SEQ ID NO: 679739 - DNA, 75 bp, Homo sapiens
gcttctcagatgctctaatcgaccaggacccccaggcggcgttagaggccgaggagtcttgtaaatgtaatggct

SEQ ID NO: 679740 - DNA, 100 bp, Homo sapiens
agcttcgctgctgggcagttggctggaggggctgctgctgggaacacctggagtctccgcgggcagggttgaaaggaggagcaggaggtactgatggaca

SEQ ID NO: 679741 - DNA, 80 bp, Homo sapiens
acttgtgattttgatttatcacatttctggagcaagtacagtcaatgtgacggtggactacattagaccagccagcccag

SEQ ID NO: 679742 - DNA, 100 bp, Homo sapiens
cagattggccgaagacaaagcagagttggaaagtgatccaccttacatggaaatgaaggtggacattgaagtggacctaattcggttttccttttaaaag

SEQ ID NO: 679743 - DNA, 75 bp, Homo sapiens
aaactttacagtccatctgcattctagcaggagatcattgtcatagatcctatgcctgtgactcagaaggaacag

SEQ ID NO: 679744 - DNA, 74 bp, Homo sapiens
ctcaaaaagaagccttccgctgctctggaggaggatacgaagcgttttcggcttcctgcccggagctgtgcagc

SEQ ID NO: 679745 - DNA, 100 bp, Homo sapiens
acagattctataagcagttaggatctggaggttgaccccctgtttacagtgccagcgccaccaccgccgatttccagcagtctcacgcctcagattctac

SEQ ID NO: 679746 - DNA, 100 bp, Homo sapiens
gatctgcacttcgcattttggcattgacatttaattttagggtcctttatatagaagggagagtaggttgtttttcaccattcagaacattgcctgaagc

SEQ ID NO: 679747 - DNA, 100 bp, Homo sapiens
gaaattgcaggtggaaaggaatttggacaatatcccagtcgacatcagtgacagtgatatgatgctgaacatcatcaacagctctattactaccaaagcc

SEQ ID NO: 679748 - DNA, 120 bp, Homo sapiens
caaagtagccacaaatatcatgagggcgtggctgttccagcatctaacaagaatgaatactactctgagcagtttgaaggaaaaagttaatactgcacaatgccctttacctcttttcac

SEQ ID NO: 679749 - DNA, 100 bp, Homo sapiens
gtggctgccctcgtggtgctcgagttctccctccgggccgtgtccacgctgctgtccctgggcaaggccccagcggagggaccttcagtccagcccggtc

SEQ ID NO: 679750 - DNA, 100 bp, Homo sapiens
gactgaggacttaaatgaagccactgattagcaatttaaagatcctctccaaggtcagtcaccacgaacaggggcactcggcatgctgccccagcactgg

SEQ ID NO: 679751 - DNA, 101 bp, Homo sapiens
aagctccttcaagagcctgcaagcacttaaccgtttcagaggagcgtgctcgacctttctctccagtggagatttgccaacctgcccaacaatgccaagct

SEQ ID NO: 679752 - DNA, 75 bp, Homo sapiens
ttaggccgcgagcgactgcggcgccgagccggtttggtgcacctcgatttggaggaagtagggcagggcccttat

SEQ ID NO: 679753 - DNA, 100 bp, Homo sapiens
ccccatccctgcttcctacgcatacattggtggttgaagatggatatgaattttttgcaaagaggcagttggtcactctgttttctgcgcccaattattg

SEQ ID NO: 679754 - DNA, 96 bp, Homo sapiens
attcttttagaagacatagaagaagcactgcccaattcccagaaagctgtcaaggaattttctacttctggtcatgcttacactgatacagggaaa

SEQ ID NO: 679755 - DNA, 100 bp, Homo sapiens
aggaagatggcggatctggaggagcagttgtctgatgaagagaaggtgtgtagctgggacggtgctggtctgagctggaccttgtctgatggcttcctcc

SEQ ID NO: 679756 - DNA, 74 bp, Homo sapiens
acgggcggctccgcagtgaccggactcgggggaggtggaatgcaagctttaggacttcacctgacagatccaag

SEQ ID NO: 679757 - DNA, 83 bp, Homo sapiens
gccacccccaccctcaccaagtatcgagaaccttccctgcgaacttcagaggaacttccagctgatgcgagagctggaccaga

SEQ ID NO: 679758 - DNA, 87 bp, Homo sapiens
gacagctctcagtccacactcccaaaagggaaaggtattgttgcagcatctggcagtgagactgaggatgaggacagcatggacatt

SEQ ID NO: 679759 - DNA, 80 bp, Homo sapiens
aatcaaattattagctgggcaacattagacggcgaggggaccgacctgtttgccgtggctgtccatgagtttggccacgc

SEQ ID NO: 679760 - DNA, 100 bp, Homo sapiens
ctgtaaatggtaaacccatgctaggagttatacataagccattttccgaatatacaggcatttattaatacagcaaaagaaatttatgaaaaaattcaag

SEQ ID NO: 679761 - DNA, 131 bp, Homo sapiens
gatgctgcccactggtggtcccccgctcccggggtccccggccggccaagcagtgtgtgctgtatttatggagtttaaagattaatcatcccaaaacattgtttctgcttcggggaaatcatgaatgcagg

SEQ ID NO: 679762 - DNA, 99 bp, Homo sapiens
tatggcaattgacctcacctcaagcacacccaatggacagcatgcctcaccaagtcacatgacaagcagccctcgggaccaaggatcacgtcatgactc

SEQ ID NO: 679763 - DNA, 100 bp, Homo sapiens
tccctgaccccgcggccggacgacccaagcccgctgagcaggatgagggtgctggagaatctggtaaaagcaccattgtgaagcagatgaggatcctgca

SEQ ID NO: 679764 - DNA, 100 bp, Homo sapiens
aggcctgcccggacggtgtgcggggcggcgacgacctggaccccaactacgtgctgagctcgcgggtgcgcacgggccgcagcatccgtggcttctgcct

SEQ ID NO: 679765 - DNA, 88 bp, Homo sapiens
cgaaggccgggacccggttccccggcccacagtgggggtgtgcaaacccgagagaactgggtatatttgcttacttaaactaccatgt

SEQ ID NO: 679766 - DNA, 82 bp, Homo sapiens
caccaacccatttggttccacattctgctttggtcttcagcgaatgatctttgagaaaatatttacaccagcagctccagtt

SEQ ID NO: 679767 - DNA, 83 bp, Homo sapiens
tcggctgtgtcaatgccattgaattctccaacaatggaggccagtggctggtctcagggaccctgacagtggagcagatttat

SEQ ID NO: 679768 - DNA, 82 bp, Homo sapiens
agcagccgcggcgcgcagggcacttgggcgatcagtgggtgaccgcggctgcgagggactttgtcatccgtcctccaggatc

SEQ ID NO: 679769 - DNA, 100 bp, Homo sapiens
ggagactgtgatttccagctgttgaaactagatggcaagttttccgtggtatacgcaaaatgtgattccagtccagtattcgtgtgccgtgagtcccact

SEQ ID NO: 679770 - DNA, 75 bp, Homo sapiens
gaaaaccctttaaagaagatgatggaagaatttgtaccccatagcaaggagtacaagcgcaagctagccagagtt

SEQ ID NO: 679771 - DNA, 90 bp, Homo sapiens
cccttattccagttgatccccaggcatgttatgttacccagagaactttccaaacaagtacctaaaactcatctgatgtctgaagaggag

SEQ ID NO: 679772 - DNA, 74 bp, Homo sapiens
ttgaagttacttttgaagcaaaacgtggatgtcgaagcagagacgccaaggacttattgttgtgctaacactga

SEQ ID NO: 679773 - DNA, 110 bp, Homo sapiens
actctctgaggaagcccaactcctatgagctcctctctggcagggaactgactcttttttggagtaaactgcaaagaagaattgacccttctttagatacttttttggag

SEQ ID NO: 679774 - DNA, 76 bp, Homo sapiens
ctcgctgtgagacatgtctgagactcctgctcagtgtagcattaagatgaggctgtggacccaggctagacagatg

SEQ ID NO: 679775 - DNA, 98 bp, Homo sapiens
caaggtacccaatgcctgtttattcaccatcaacaaagaagaccacacactgggaaacatcattaaatcgtattcaaaacctttgaccacatggcccg

SEQ ID NO: 679776 - DNA, 82 bp, Homo sapiens
gaagcggcctggcaggggaaggatcgagggggatatgagactttctactcggaatatcctgagtgttgcgtggatgtaaaac

SEQ ID NO: 679777 - DNA, 71 bp, Homo sapiens
gcgcggcacctgcgaagatgcttccctgtgcaagaggtgctggagaatctggtaaaagcaccattgtgaag

SEQ ID NO: 679778 - DNA, 87 bp, Homo sapiens
aagactttatgtaccgtcacctccaatattatggctactttaaaggtgttggtgaaaatttgactgacccatctgtgataaaagcag

SEQ ID NO: 679779 - DNA, 75 bp, Homo sapiens
gaccacaacaccaggaggaccagctggatcgacccccgggacaggttttaaatgcacagagagcaggatacaagg

SEQ ID NO: 679780 - DNA, 101 bp, Homo sapiens
ccatgcaaaggcaggggaggaagccacctcgaggaaacttggatttaactggccagaagcaggtattcaaagcagagaacaatccctgggtgacccccatt

SEQ ID NO: 679781 - DNA, 74 bp, Homo sapiens
cgccaggccagccgggacggacgccgatgcccggggctgcgacggctgcaggtgtgaccatgaagctcatggat

SEQ ID NO: 679782 - DNA, 113 bp, Homo sapiens
ccaggataacctgtaatgggcaaggagccacaaagaagaaaacatttcttttaatttttaaacttggtttgaaaggggcaccgttctacccctttctgcctggagaaactgcc

SEQ ID NO: 679783 - DNA, 100 bp, Homo sapiens
gatttataccatgaaatgattgaatctggtgttatcaacttaaaagatgccacctctaagagccattgctgctgagattgttctaaagggacaaagagag

SEQ ID NO: 679784 - DNA, 100 bp, Homo sapiens
cgcaatctgacctttgatccagtcagcgccaaccgtcacttctatctgtcgcgccaggaccagcaggtaggaaactatgtgaaagaatctcctgatgtca

SEQ ID NO: 679785 - DNA, 83 bp, Homo sapiens
agcggctgctgctgctgctgctgctgctggtggcccctttgcaggtcaaaatgcagatcttcgtgaaaacccttaccggcaag

SEQ ID NO: 679786 - DNA, 100 bp, Homo sapiens
actagggaaaggtccgcaaactcttaaggtcactttctgaaggcggcctcatcacagtcggaggcctccggtgtggctgtctctgatggtgtcatcaagg

SEQ ID NO: 679787 - DNA, 100 bp, Homo sapiens
gctggccagtatgtgatcccagaggttgttaccccttctacaaaactgacccgttcatcttcccagagtgcccgcatgtctacttttgtggcaacacccc

SEQ ID NO: 679788 - DNA, 82 bp, Homo sapiens
gaggagctgtggataacgggaggtgaatttccatgtcaacatagtcctgccctgggcgctgcctatggcacagccaagagcg

SEQ ID NO: 679789 - DNA, 90 bp, Homo sapiens
ctgccattgaatatattcggcaaggaagcctctctgctaaaccccctgccatgtttttggtatactgtgcactggagaaagaacctgtgc

SEQ ID NO: 679790 - DNA, 82 bp, Homo sapiens
ggaaacacatttcatatactgcaggtcgatggccaggtggtcttcataaactatactgccttgtgatgcctccctagaaatg

SEQ ID NO: 679791 - DNA, 96 bp, Homo sapiens
ggcattatccttcagtggggctattggactgacttttcttatgctgggatgtgccttagaggattatgggtgctgcatgccatggggacctcacag

SEQ ID NO: 679792 - DNA, 83 bp, Homo sapiens
gtaaagtcgagtatctggtgaagtggaaaggatggcccccaaaatcttgatgaacaaagcagtcataattcatctctagaaag

SEQ ID NO: 679793 - DNA, 88 bp, Homo sapiens
gctgtctcggaacccgtggtcctccgcttcatgggtcgctgtgatgaaattcaagaaccccccagtgaacagcctgagcctggagttt

SEQ ID NO: 679794 - DNA, 100 bp, Homo sapiens
gcttgcttctctcccaagagactcctttcttatcaggctcaaatgaatgaaaggaggatgttaaaggtgctcaaaaatgtgataactttgctgaaaaaag

SEQ ID NO: 679795 - DNA, 75 bp, Homo sapiens
agattccttgcagagacagctcaacacggcacttccacagaccatagcccagtggcgtaaagctggctaccagga

SEQ ID NO: 679796 - DNA, 83 bp, Homo sapiens
gcgtccctggagcggccgccttccagccacccagtcagcttgaagagtttcaaatggaccctaccactgagaaatcaagatgg

SEQ ID NO: 679797 - DNA, 107 bp, Homo sapiens
ccacctgcatcacaaagcgaggggcacacctgaaccggggctggcgggaagaggagaaatacgaatgtgctttaaagcgagcaagtattaaaattgtgactcctgac

SEQ ID NO: 679798 - DNA, 73 bp, Homo sapiens
aaaaatggaagaatttgtttgtaagggctgacgcgccactatgtagcgggtttcgggcgggccacgcgtgcgg

SEQ ID NO: 679799 - DNA, 99 bp, Homo sapiens
gaagtagctgaatgtgttactccattgctgaggagtgctatgctaagaaggaatctgatcttaatggcgcccagatcaagcttcgagaatatgaagcag

SEQ ID NO: 679800 - DNA, 76 bp, Homo sapiens
gacagaatgtacgaccttgttgctgttgtggttcactgtggaagctttctgagaccaagatcttcactgcctctaa

SEQ ID NO: 679801 - DNA, 90 bp, Homo sapiens
gaaacttcaaccaggattgtcttttcttaacctgggaagtggaaccggatatttaagtacaatggaagatctgagttagaatgtatgaat

SEQ ID NO: 679802 - DNA, 98 bp, Homo sapiens
tgagttggatgataatgcaggactatcaagaagtgaaactggatcaacgatatcaatgagttctttagagatcgtctggggaatatttttcatcttag

SEQ ID NO: 679803 - DNA, 100 bp, Homo sapiens
gaggcggagggagagcaggagccactgagatgaggaggcgtcgcgcgcgcctgtagctcgcgggcctcgcagaatagcctaacatggcagaccagagaca

SEQ ID NO: 679804 - DNA, 75 bp, Homo sapiens
cctatcaaacctgtttagaaaataaaccaggtatcatgatattagctggtttgacatcaagtcatttgtgagtca

SEQ ID NO: 679805 - DNA, 100 bp, Homo sapiens
gtcactttcagtgagtcatcgctgacagctgaggaagtctgcatccacattgcacataaagttgaggtataaccagggaattgttccagaggtttccttg

SEQ ID NO: 679806 - DNA, 100 bp, Homo sapiens
gagaaaatagcaaacgatccagacggcagggagtgcatcaaaggtgtgaacacagctgaataccactagaaacatacctgtaaccagagacagctgatta

SEQ ID NO: 679807 - DNA, 74 bp, Homo sapiens
tttgattcatgctgaactgaaaatggtgctggagaatctggtaaaagcaccattgtgaagcagatgaggatcct

SEQ ID NO: 679808 - DNA, 51 bp, Homo sapiens
ggaacattccaaaggaaaaatttcaggaaggcgtggaagtgcgagtggcca

SEQ ID NO: 679809 - DNA, 75 bp, Homo sapiens
cccgaacgacgcgggcgagcggggctttggacgccggtggagacgcaggcgagaagaagactgcataaactgggc

SEQ ID NO: 679810 - DNA, 80 bp, Homo sapiens
tctgcagtacaggatatgaagaaattgagggttcttgccatggtatgctatacctccggagcatggaaaacgacttgaaa

SEQ ID NO: 679811 - DNA, 74 bp, Homo sapiens
agactctgtccccggactgggagtttgaccgcgttgacgacggctcgcagagtgtaatcctgagagattcacat

SEQ ID NO: 679812 - DNA, 108 bp, Homo sapiens
ttcccggcccctgaagttggcactgcagcagacagctccctgggcaccaggcagctaacaggttgaaatcacaaagattagacacctttttagataggtgttcttcag

SEQ ID NO: 679813 - DNA, 82 bp, Homo sapiens
gtgcgtcaatcagagcgtcctgtgcggctactgcagcactggggtgtcagttgttggtccgacccagaacgcttcagttctg

SEQ ID NO: 679814 - DNA, 85 bp, Homo sapiens
acctctgccttttttgggaaatattttgtcctaccataagcaattctgtggtgttcttggtcacacatttatggagtttctgaag

SEQ ID NO: 679815 - DNA, 100 bp, Homo sapiens
attccgacgaggatggtggaccccaggaccaacttaaaaagccacccttaagtacaatgttctcctacctaagaaggcatctggattttctctttccttg

SEQ ID NO: 679816 - DNA, 82 bp, Homo sapiens
gtcctgaattagaaaaggtattcattaaagaaaataatgggaaggaagaagtatccaaggtggccattttatgtcagttcct

SEQ ID NO: 679817 - DNA, 100 bp, Homo sapiens
tggatctcatcaaaaaggacaccagcaagctgttcaatgaggagccaatggagatcttcgtggatgatgagacgaagttgacgctgcatgggttgcagca

SEQ ID NO: 679818 - DNA, 85 bp, Homo sapiens
ctttggaagatgcagatgagaaggttcagttggcaaaccagatatatgacttggatctggaaatagtatattcctatttacatgg

SEQ ID NO: 679819 - DNA, 100 bp, Homo sapiens
ccgacagagtcctccgtgtcctcccccgcatgacccccttgacgaaactggaaaatggccttcattggaaaagccccagtcctcggggagcagatccccc

SEQ ID NO: 679820 - DNA, 90 bp, Homo sapiens
gatttttagaactccacatttgagccaaaggtcattccaaatgctatatgtggaatttgtctgaagggtaaggagtccaacaagaaagga

SEQ ID NO: 679821 - DNA, 75 bp, Homo sapiens
tgcacagcctggcgacggctgcggaaatctactttcttcaatgtgttaaccaatagtcaggcttcagcagaaaac

SEQ ID NO: 679822 - DNA, 96 bp, Homo sapiens
accctggtctatgagaactacaacaagttcatctcagccacagaaactggcgatggaatatgagaggagccctctggaaagaaaaggacagaccct

SEQ ID NO: 679823 - DNA, 82 bp, Homo sapiens
gaacgaggcaaggagctaaagcagcgtgcgttcagccctgggtgaaactggaacgccaagctgaagaagaacgaatacggaa

SEQ ID NO: 679824 - DNA, 78 bp, Homo sapiens
gggcggcacgcacgcggtgcagggtaacatggcggatgcggaagaaggacagaataacgggctcccagattcacaagc

SEQ ID NO: 679825 - DNA, 97 bp, Homo sapiens
gaaccaaggagctgcgctgctacagatgttaccacttctgtggctgctaccccactcctgggccgtccctgaagggagaagcagaatttgcccgcat

SEQ ID NO: 679826 - DNA, 76 bp, Homo sapiens
agctgagccacatcatcagacaactacaggcctgctctctggttccaggctcaacgagaacctttgacaagagcac

SEQ ID NO: 679827 - DNA, 99 bp, Homo sapiens
tgccaaaatggcgaccggcaactactttggattcacccacagcggggcggcggcggcggcggctgcggcccaatatagatcacaggttttcagatccag

SEQ ID NO: 679828 - DNA, 100 bp, Homo sapiens
cgggatttatacacacatcactaaaaattatccctactacaggactgcggacaagggctggcaggatgacgtcatgatgccccagcgggtgaggctgcaa

SEQ ID NO: 679829 - DNA, 101 bp, Homo sapiens
gggcacccctttggttggccttccaacggcttcccagggccccagggctctgtgtggctgcacagtgaacgtccccactctggacggcaggacgatacccg

SEQ ID NO: 679830 - DNA, 100 bp, Homo sapiens
tttccaactccaggaccctttccttctctacagaaatgccagatgcaagaagctcttctggctgccattagtgaaaaagacgccaatatagctctcttgg

SEQ ID NO: 679831 - DNA, 100 bp, Homo sapiens
gcagccttcctcctctgcctcctcagtcttggcggagccatcgaaattcctatggatcgtcagccagagcagcctccccatgctgtcctcgccgtcaccg

SEQ ID NO: 679832 - DNA, 83 bp, Homo sapiens
aagagactttccgttacatgagaactgtggctgcaccatctgtcttcatcttcccgccatctgatgagcagttgaaatctgga

SEQ ID NO: 679833 - DNA, 82 bp, Homo sapiens
cgctttccctctcgcgtctctggctgcaggaattgcattttgtgaaaaaagaacaagaattttctgcaaggatcatatctaa

SEQ ID NO: 679834 - DNA, 50 bp, Homo sapiens
gcaattttgccaacttcagtgctatgtctttggtggacttgggaaagagg

SEQ ID NO: 679835 - DNA, 50 bp, Homo sapiens
gcaaacttgacactcaccctgaccggtaacgatgactcggacatagacat

SEQ ID NO: 679836 - DNA, 99 bp, Homo sapiens
cggagaatctgctgtcgcctgcagctgctcgcctgtctccgtcggaagggagcccaagctttgcagaggtaccaggatcatctatgaccggaaattcct

SEQ ID NO: 679837 - DNA, 75 bp, Homo sapiens
acaagttggccagtgagaagtcagagatgcagcgtcactatgtgatgaaatttgcccttggccattgggatttct

SEQ ID NO: 679838 - DNA, 100 bp, Homo sapiens
ggataacatccgatgcaatgggctcatgatgaacgcatttgaagaaaattccaaggtcactgtgccgcagatgatcaattacacaacagccaatgcggag

SEQ ID NO: 679839 - DNA, 101 bp, Homo sapiens
ggtgaacctgaacgaagaccctctgatgtctgagtgtctgctctaccacatcaaagatggcgtcaccagggcgtcatggtgggcatgggccagaaggactc

SEQ ID NO: 679840 - DNA, 100 bp, Homo sapiens
cacacgtgtaactactacctgcagccagaggaagacgtgaccattggagtctgtttcctccagcttatggaggcatatctgaggtgaatcaacctgccga

SEQ ID NO: 679841 - DNA, 101 bp, Homo sapiens
agaagatgaattcctgaaccagaggtacccagattatttatgtaaacccgaagacaacatctacagtattgatttcacccgcttcaaaattcgagatttgg

SEQ ID NO: 679842 - DNA, 75 bp, Homo sapiens
tgcaggcacaagtgcgcattggtgggaaagttgatactgcctctccaagcccaatggaaacatctggatgtgccc

SEQ ID NO: 679843 - DNA, 100 bp, Homo sapiens
cacgtcacacagtggggacaacagcagtgagcaagaaaaccatgataaattctggacaaaatacagaaaacccacaactctctgaaggcactggagagtg

SEQ ID NO: 679844 - DNA, 119 bp, Homo sapiens
ggaacgcgggcgcctgaaggagttgttgtctcggcagcgcccgcggagacgtgaagagaaaccaaggtgtatgttggtaacctgggaactggcgctggcaaaggagagttagaaagggc

SEQ ID NO: 679845 - DNA, 100 bp, Homo sapiens
tggagagagcgagctgagtggttgtgtggtcgcgtctcggaaaccggtagcgcttgcagcatggatctgcaactggaatatggacaaggacaccaaggtg

SEQ ID NO: 679846 - DNA, 75 bp, Homo sapiens
gtagcttccatccgccagctgccatgagcgagcgcctccgtcccagacttaattcagtgcacaaatgagatgaat

SEQ ID NO: 679847 - DNA, 75 bp, Homo sapiens
tcatccctcgtcgaaaggattggattggcatctttagagtgtgcggcgacatccatggacaattctatgacctca

SEQ ID NO: 679848 - DNA, 133 bp, Homo sapiens
ggatgattttgagcgtcgcagagaacttagaaggcaaaagagggaggagatgcgactcgaagcagaaagggagaagatgtcaaccggacactagaaggtggaaggaaacctcttcattatgcagcagattgtg

SEQ ID NO: 679849 - DNA, 90 bp, Homo sapiens
ctggcgattcgtgttcgtgagggccttttctgataaagtggagaattttcatgaagaacatgaaaagaatagtcaccatattcacaaaaa

SEQ ID NO: 679850 - DNA, 90 bp, Homo sapiens
cctccaccgtcgcctcccactgcaaaaaggcctgggtgccctacgagacgctgaacaaacgctttcgcgccgctcagaagaacattgacc

SEQ ID NO: 679851 - DNA, 89 bp, Homo sapiens
aaagatgagatttacctgtgagatgtttcatcccaacagtgtgatgaatgcagactctgctaccattttggctgtttggatcctccttt

SEQ ID NO: 679852 - DNA, 83 bp, Homo sapiens
cggacagccgcgcgctgagggtctcggggcgggcgccgcgggacctctccgggccatgggagctgaaaggcgggaaggcttat

SEQ ID NO: 679853 - DNA, 112 bp, Homo sapiens
gactgcaactgctggattgctgcaaggctgagggacgagaacgagtggtagtcgctcttctaaaacttttaaaccaaagaagaacattccagagggttctcaccagtatgag

SEQ ID NO: 679854 - DNA, 82 bp, Homo sapiens
ggacccaccgctgccctcagctccgagtccagggcgagcttcctcatcgtcctggtctgcctcatcttcagcgtgctgtcca

SEQ ID NO: 679855 - DNA, 89 bp, Homo sapiens
tgccaggccaaggagtggactagggtcgccggggaagcggacttaattcagtgcacaaatgagatgaatgtgaacatcccacagttggc

SEQ ID NO: 679856 - DNA, 96 bp, Homo sapiens
gaaaactctagaagtctggatgtcggtgggcctctgagatatgccgtttacggtggtggacttgctttgtgaagagacagttcatgaacaagagtc

SEQ ID NO: 679857 - DNA, 100 bp, Homo sapiens
agattgaggaatttcttgaagaagtcttatgccctcccaagaactctccggagtcctttctgtattgttgtgattttgcttctggagctgtggagctcgt

SEQ ID NO: 679858 - DNA, 50 bp, Homo sapiens
cagggaaccctggtcaccgtctcctcagggtgtggatgaatggaacatag

SEQ ID NO: 679859 - DNA, 98 bp, Homo sapiens
tgggaggcaaaggctacaagctgtccccagaggactacacgctcaagggtcctgatgaagaagctgttgtggatcttggcaaaactagctcaactgtg

SEQ ID NO: 679860 - DNA, 75 bp, Homo sapiens
ggccgcttcaccacttacgaaatcagggtcaaggaaaaccagtagattcccagacatcgcgaagtgaatctgaaa

SEQ ID NO: 679861 - DNA, 82 bp, Homo sapiens
tgctgtagtcacaggagctgtagagaggaccccggtacatctgaaagccgggaaatggtgcccgtggttgacacgagctgtg

SEQ ID NO: 679862 - DNA, 83 bp, Homo sapiens
gggagaggagccgcacccggccggcccggccccagccccatggacctccgagcaggtttcttggcgatctcacaacagaagga

SEQ ID NO: 679863 - DNA, 83 bp, Homo sapiens
ctcgtcatgctctttgtagcgtggtgcttctgttgctcacagctcagagtcaagatctccactgaagttggcatcacaaatgt

SEQ ID NO: 679864 - DNA, 90 bp, Homo sapiens
aatgaggcccataggaaacaagtgacttgctgagtccagataacactgactgtcagaaacatgaatttgctttcggatgctcgctctgcc

SEQ ID NO: 679865 - DNA, 75 bp, Homo sapiens
ttacttgtagtgtatgcctcgtttgttgggaacctactgatgaaccttggttcatcttccttcctgtacagtatt

SEQ ID NO: 679866 - DNA, 97 bp, Homo sapiens
tagaggagctttaccgcaattatggcatcctggccgatgccacggagcaagtgggccaggcacaataaagacattgccctggtcaacctggcaaacg

SEQ ID NO: 679867 - DNA, 90 bp, Homo sapiens
agatgacatgccagcccagactttcatgggttggtgccatctacatccgtcgccggccccgtgtgcgtgtggaggccctgcagagtggag

SEQ ID NO: 679868 - DNA, 90 bp, Homo sapiens
cagcggccgagcgggcggcttcctggcctgggcgctccggtggcggcggagaaagaagcttccggttctgaggtcctggaggtgccattt

SEQ ID NO: 679869 - DNA, 99 bp, Homo sapiens
tgaaaagcaggaagactctgagagcagtgaggaggaatcagacagtgaggaagcagctgcatctccagcacagacctgattcctcagacctctgcccta

SEQ ID NO: 679870 - DNA, 100 bp, Homo sapiens
gtgggagacgggtgaagtacaggctcagtctgcggccaagactccatcctgcaaggaattgagttcttctcagactttatcacatgatggaggattcttc

SEQ ID NO: 679871 - DNA, 90 bp, Homo sapiens
gccatcgcccggcccggccgcgcccgcggaaccagaccaggtttctgacgtagaagagcttacccctccagagcatctttctgatcttcc

SEQ ID NO: 679872 - DNA, 100 bp, Homo sapiens
tggaattacactgtgatacgactgactgttttgacctgtagcagagaaccaattctggagaacagcctcacttctttgattgaatacttacataatgcat

SEQ ID NO: 679873 - DNA, 98 bp, Homo sapiens
caatggcctatccaaggacatgagcagtttacacatctcacccaattcagctattgacctgaaaagtggttctggaaaagtgtaccaaggccctgcaa

SEQ ID NO: 679874 - DNA, 90 bp, Homo sapiens
aggcgaggacggtctctgccagtataaatgcagtgacggtgcagctaaatcaagtccagcagctaaaccaggatccacaccttctcgacc

SEQ ID NO: 679875 - DNA, 51 bp, Homo sapiens
gagcgccggaacgccgaggcccagctctggatgagggggatattgccttgt

SEQ ID NO: 679876 - DNA, 83 bp, Homo sapiens
gtcagacgcagccgtagacaccagctccgaaatcaccaccaagagtgaagacatttccacctggacacctgaccatgtgcctg

SEQ ID NO: 679877 - DNA, 75 bp, Homo sapiens
ctggacgaagagctctcctccttcttcctcaactatctcgctgacacgcagattcccactggaaattcgttgtat

SEQ ID NO: 679878 - DNA, 100 bp, Homo sapiens
ctgagagccgagcccgcgctgaccggggcccgggccggatgggcgctgcgggccggggcgcggaccgcggagcggccatcttccagagggagcagtgaag

SEQ ID NO: 679879 - DNA, 97 bp, Homo sapiens
ttttacttcctaacaaaatcacagtggaatgcagtagccctctgggcctgggatattgtggttgataactgtgccatctgcaggaaccacattatgg

SEQ ID NO: 679880 - DNA, 90 bp, Homo sapiens
gacatccataaaaattcatcagagagcattttactactgagctgcaaagtgctggacccaaaggagacaacatttatgaatggaggtcaa

SEQ ID NO: 679881 - DNA, 85 bp, Homo sapiens
aatgatacaattacctgcacgacacatggaaattggactaaattaccagaatgcagggttccatgccattgcagtgtcaactagg

SEQ ID NO: 679882 - DNA, 51 bp, Homo sapiens
aacaggggatatcaaagtgacagaccattcctcaagaattttgtatccaag

SEQ ID NO: 679883 - DNA, 99 bp, Homo sapiens
aagaatgcttgctcagtgagggtagctggtgcagaagccattttttaaacttaggtatttaagtactgaaagatctttgtagaatttgatggctgtaac

SEQ ID NO: 679884 - DNA, 98 bp, Homo sapiens
gctgaggagaggagcgtcaacagcagcaccatgggggaaggtgtggctcattgactttaatccatttggtgaagtcacagattcactgctgttcacct

SEQ ID NO: 679885 - DNA, 100 bp, Homo sapiens
tacacttctggccagtttgacctggaaatgagccgtcagactgctacagcattacctaccggtacctcgaagtgtccaccatcccagagggtgcctgccc

SEQ ID NO: 679886 - DNA, 100 bp, Homo sapiens
ccgacacttacatgccatggccttctacgttgtgaaaatggccggctgcctaccctccagactgtccgctatggctccaaggctgttacccgccaccgtc

SEQ ID NO: 679887 - DNA, 75 bp, Homo sapiens
ggattgtggacccttttgccagacctcgaggtcatggcaggaaagtaattacaagtagtggctacagccccagat

SEQ ID NO: 679888 - DNA, 92 bp, Homo sapiens
ggagcctcagttggaagcagccgatccagcctgcggagcctgtggggcagaaatcttcccaaggctgcagacaccgacggatttgctttggg

SEQ ID NO: 679889 - DNA, 100 bp, Homo sapiens
aggtttaataatgatagaatgaagaccacaataaaagagacctctacttagctcagcaattcttaccttggacttcagtactagtgctaataacatccag

SEQ ID NO: 679890 - DNA, 100 bp, Homo sapiens
taattgatgctggggccaatgtgaatgtgaaggacagaaatggaaagacgccccttatgggaaacttcgtggcttgcatgacagctattttacgacaaat

SEQ ID NO: 679891 - DNA, 100 bp, Homo sapiens
aggagcagtggtgctgtcagcgcggccgtcggagacatgggagacccggggtcggagatgtgtcttgctgaatcagggctctcttatccctgccatcgac

SEQ ID NO: 679892 - DNA, 82 bp, Homo sapiens
cttctccactgttcctggaggaatccgagaagagcagagcggagggagccccagacacggagcacgtgaattgcctctgctt

SEQ ID NO: 679893 - DNA, 128 bp, Homo sapiens
tggagccaaggaaacaggatgctgatagtctccagcgggcctggactgtgggctggtgtgtggaactgggtgtccgcaatgttgccagtgtctgtctgcagattggctacccaactgttgcatcagta

SEQ ID NO: 679894 - DNA, 100 bp, Homo sapiens
gccgtcccttcgcctccttcaccgccgcagaccccttcaagttctagtcatgcaactagaagccatttgtgtcaaggtaacgtctggagaaacaaaaggt

SEQ ID NO: 679895 - DNA, 74 bp, Homo sapiens
aaaggacggtagacctgcccaagtctcccaaggtttttgagtcatgatgcaagaatctgggactgagacaaaaa

SEQ ID NO: 679896 - DNA, 75 bp, Homo sapiens
caggcacagccgacgccgcgggcaaatcatgaaggacaggtggatcaatgcagggcatgaagaagatgaactcaa

SEQ ID NO: 679897 - DNA, 75 bp, Homo sapiens
gctagtggaggaaactgtgcaggctatggaggagccaaaaacctgtatatcatctccgtgaaggggatcaaggga

SEQ ID NO: 679898 - DNA, 100 bp, Homo sapiens
aaatggggaaaaactggatgttttactcttggtagaaaaagggagtgcttttttaggaccaaaggatatatttccttactcagaaaataaggaaaagtat

SEQ ID NO: 679899 - DNA, 101 bp, Homo sapiens
gagctggacccggaccggttttgggagctgacatggacccaaatcctcgggccgccctggagcgccagcagctccgccttcgggagcggcaaaaattcttc

SEQ ID NO: 679900 - DNA, 98 bp, Homo sapiens
ggccgtgggcccgggcggcgggcggagacgtgggcgccctccccgccaaggcccgtgcgaggaggagctgacaagcacaagtgtggaacacatcattg

SEQ ID NO: 679901 - DNA, 75 bp, Homo sapiens
cttggcgccaccgcctcatgcactgtcaaacggggattcagcgtccgatcctttggaacagggactcacgtgaag

SEQ ID NO: 679902 - DNA, 95 bp, Homo sapiens
caaaagctgctacttatggaagatacaaaggtgccctataaggactgccaggcaataatgaaggttcttttactgaaggatgcgaaggaagatga

SEQ ID NO: 679903 - DNA, 83 bp, Homo sapiens
cgctacctgctgccgctgtcggcgctgggcacggtagcaggcgccgccgtgctgctcaagcgccatgtcagaaccggctgggg

SEQ ID NO: 679904 - DNA, 75 bp, Homo sapiens
cagccccgggctcccagctgcccacctcatagattcatgatgttgctatcaaaagttgagaaattgtcagaagaa

SEQ ID NO: 679905 - DNA, 83 bp, Homo sapiens
agaagccttttccgttgccggtgccggcctagcgtcctggaattacttcaatcaattcctgaagaattcttgtacaacccttt

SEQ ID NO: 679906 - DNA, 75 bp, Homo sapiens
ttaaaaaggtgatgggtatctttaagagcagcttattccaagctttgctaggagacggtggctcagggagtaaag

SEQ ID NO: 679907 - DNA, 75 bp, Homo sapiens
atgagatgaaccatcttcctgcacacagccacgatttgcaaagcatgttggcagataaattgaacatgactccag

SEQ ID NO: 679908 - DNA, 100 bp, Homo sapiens
gcagatgttgtcaaggtggcctaccaggaggccaggggtgtcgccatggccctggccaacgtcaacattgggagcctcatctgcaatgtaggggccggtg

SEQ ID NO: 679909 - DNA, 100 bp, Homo sapiens
tttaatgtctgaatctggagaaggggaaatctccccacaaagagaagtctcaagatcccaggtatcctttgtgtggctgatcagtgtcacggcttaagag

SEQ ID NO: 679910 - DNA, 75 bp, Homo sapiens
cccggcccagctcccctgagctccaggaagcacgttctctacgtggagcacagctgctacaggagctgagagacc

SEQ ID NO: 679911 - DNA, 97 bp, Homo sapiens
agaatatgtatcggggatatagaccacgattccgcaggaggatgctggtggtggaggtggcgaacggccgctccctggtgtggggagccgaggcggt

SEQ ID NO: 679912 - DNA, 75 bp, Homo sapiens
gctgcgcaggacgtgctgttttccagccctccccaaatgcattcttcaggactactgttcgaagatttttggaag

SEQ ID NO: 679913 - DNA, 75 bp, Homo sapiens
cggaccatgctgtatactccacaggaaatgaaacaggtgacaaacagcatgtttggtgcttcaagaaagaagttt

SEQ ID NO: 679914 - DNA, 107 bp, Homo sapiens
ggtgggcgaacgagtgacattggctgacatcacagttgtctgcaccctgttgtggctctataagcagaattatatccagatcgagagacagaagattctgaaagggt

SEQ ID NO: 679915 - DNA, 116 bp, Homo sapiens
acagctcaaacgttgaaacacccacagactgccaagtgggacaactttctggcttttgaaaggctccttcttcagacacgaagatcgattgagaagttattagaatgggaaaacaa

SEQ ID NO: 679916 - DNA, 100 bp, Homo sapiens
cttgctcgtgcactttacacacatgagatctgggctgcaggagctggggccacccacagcccccctaccgacctggtgtggaaggcacagaacacctggg

SEQ ID NO: 679917 - DNA, 100 bp, Homo sapiens
gacatctttagactcatcagaacttcctacgagctcgcagacctctgaagagagtgccattgagacgggttccagcagttccaccttcatcaagagagag

SEQ ID NO: 679918 - DNA, 96 bp, Homo sapiens
agctgtggaaaatgagcatcctcaaggtcatcatcagatttgaaatatttaaagtggatacaaaactatttcagcaatgcagacaattaagtgtgt

SEQ ID NO: 679919 - DNA, 100 bp, Homo sapiens
tattgccctgtcttcatcaacatttaatcagtgaccgaactagcagttgcccagtgatcttcatattagatgaatttgatctttttgctcatcataaaaa

SEQ ID NO: 679920 - DNA, 89 bp, Homo sapiens
atatccgtttgatccttgttctactgcagcgggctacattgagagacctcagctgattcgagcaaaagtgccaattgtgaagttcaggg

SEQ ID NO: 679921 - DNA, 48 bp, Homo sapiens
gcgacgcctttggcggtaaattcgggtgctggagaatctggtaaaagc

SEQ ID NO: 679922 - DNA, 118 bp, Homo sapiens
ccaagaaaatcaaatggcatccggggatttctgctcacctggagaagggatggaaatacttcaacaagagaggaacttgatacagatgaatatgaagaaaccaaaaaggaaactctgg

SEQ ID NO: 679923 - DNA, 87 bp, Homo sapiens
tttgggaaaaagctccaggattctgacagggatgttgcgaagggttctccaaaaaatgtggaatcctttgcatctatgctgagacat

SEQ ID NO: 679924 - DNA, 50 bp, Homo sapiens
ctcggagtgggagacgtggagtgcagtggaatgcagtagccctctgggcc

SEQ ID NO: 679925 - DNA, 74 bp, Homo sapiens
ttttaccagaagtacgaccctaaggacgtcatcggcagttccagggtcacccccgagaggacaacaggcatctg

SEQ ID NO: 679926 - DNA, 80 bp, Homo sapiens
caagaacctggacaccgtgaaggagctgaagaagaagctgttcaaacgccggcgggtgttgaatcgggagcggcgtctga

SEQ ID NO: 679927 - DNA, 103 bp, Homo sapiens
ttctggctgaaattatcatccttgtggtgatcattgttgtgtatgagaagaggaagaggccagatgaggttcctgacgagttttgctcttgttgcccaggctg

SEQ ID NO: 679928 - DNA, 101 bp, Homo sapiens
aaaacatcttgatctggagaaaaactggatgttggtagaaaaagcaagagtttgttatatagcagaagcccagaacctcatggccctcaccaatgtggaca

SEQ ID NO: 679929 - DNA, 100 bp, Homo sapiens
gtacaggctctttgaatatgactctgcaaaggaccagttacagaagtggatccgcggtaatgtgagtgcatgtgcgaactctgttttcatatttgacgag

SEQ ID NO: 679930 - DNA, 83 bp, Homo sapiens
cggcctcatcgtgccggcttcgcgcgcgaacccggctttcgcatttgggaccctgcaggcttgcgcgatctctggcctcttca

SEQ ID NO: 679931 - DNA, 78 bp, Homo sapiens
ccaggaccacctggaagcctagaaatgacgctgaccggaaaggagattgagattgacattgaacctacagacaaggtg

SEQ ID NO: 679932 - DNA, 87 bp, Homo sapiens
ctgctcagcgtcctcatgtggggggtaaaccactcgagtgtggaggtatcctgactggtccttacggttctattaagtctccggggt

SEQ ID NO: 679933 - DNA, 74 bp, Homo sapiens
agcactgtggccgaggcccacctgctgacatctacctgccagactcggtgaaatacctggagtgctcagctctc

SEQ ID NO: 679934 - DNA, 50 bp, Homo sapiens
gaaggtagctggtgatttgcataaggaggatggactcagacaagttctgg

SEQ ID NO: 679935 - DNA, 75 bp, Homo sapiens
gaagtgggacccaaatctacaatgtgagatggaagattttcgaggtatagcagaagaatcatttccaagctttct

SEQ ID NO: 679936 - DNA, 75 bp, Homo sapiens
ccctgcgcaagcccacctgaaaaaggtgctggagaatctggtaaaagcaccattgtgaagcagatgaggatcctg

SEQ ID NO: 679937 - DNA, 90 bp, Homo sapiens
caaccaacctaaggtggcctcagacgcagtaaaacgcaggactcttcccgcttggattcgcgaaggtcttgaaaaaatggaacgtgaaaa

SEQ ID NO: 679938 - DNA, 51 bp, Homo sapiens
aattgaagaaacacttcttcttgaggaaagaatcatgtgatgtacagcttt

SEQ ID NO: 679939 - DNA, 75 bp, Homo sapiens
tggttattttggaggaagtctgtatgctagacaaggaggtgatgaatggtgctatccttcaacaagtgtttgtgg

SEQ ID NO: 679940 - DNA, 117 bp, Homo sapiens
ggaagttgatgcggggtacagttactcccggaccggcggcgtgaaagtcgtgatatcatcgttgaactatatttggatttgacctgcattttggaatttatctacacttaaaatgcc

SEQ ID NO: 679941 - DNA, 96 bp, Homo sapiens
ggtcaaaatcagaactggtaagatttctgcatatctggccaacagagattttgagaaacacattgaaggatctgttaacacttgatatacccaata

SEQ ID NO: 679942 - DNA, 75 bp, Homo sapiens
gttgctggggctggagaagagtaaggggaccctggactttggtgctgacgcaggatggggcggtcctgcctcagt

SEQ ID NO: 679943 - DNA, 76 bp, Homo sapiens
agagtggataatataatcaactcctctgcctgattgttaccagcgcttagaattcctgggagatgcgattttggac

SEQ ID NO: 679944 - DNA, 51 bp, Homo sapiens
cttcaatccgctctactggaatgtgatgtgttccagctgccaagaagccgg

SEQ ID NO: 679945 - DNA, 83 bp, Homo sapiens
cgcggacctagacctggaatcgcccaagtccctctactcgcgaggagcctcctcaacaagcccaagagtgagatgaccccaga

SEQ ID NO: 679946 - DNA, 74 bp, Homo sapiens
caactattcgcggagctggaatgactggcaacccagaacgaggtcactcggacactatggtgttcttttacctg

SEQ ID NO: 679947 - DNA, 83 bp, Homo sapiens
ctgtggggcttccggtggctgatcttcaggatcatgcttggagcagtgagaagccctaccactgcaactgggacggctgcggc

SEQ ID NO: 679948 - DNA, 50 bp, Homo sapiens
ccggcgccggagacgatgccgttactctttttgatcagaacaatgctgca

SEQ ID NO: 679949 - DNA, 83 bp, Homo sapiens
cggagtagcaagtggccatggggagcctcagcggtctgcgcctggcagcagatgacatgcttattaagctctgggactgggat

SEQ ID NO: 679950 - DNA, 100 bp, Homo sapiens
aacagcctatgggtgaaatttggctttcattcatgaatgagggccagatattcgaagcttacaacatggcagctttgtggaaattaccttgtattttcat

SEQ ID NO: 679951 - DNA, 75 bp, Homo sapiens
cggctgcccttcaagtaccatttcttgcagaacataaattattaggaaacattaaaaatgtggccaagacagcta

SEQ ID NO: 679952 - DNA, 83 bp, Homo sapiens
atggagtagaagggagcgatactacaggttgctccttgagggcaggacagttcttatggctttatccgttgcgtaagcacaga

SEQ ID NO: 679953 - DNA, 50 bp, Homo sapiens
aaatagaacgtgcaaatgcctgcaactcatttcagtacaaaacggttcga

SEQ ID NO: 679954 - DNA, 98 bp, Homo sapiens
cgccggcgaggagagcccgcggctgcagttcgaggtcaggaaaatggattggatggcaccaagagtggagggccttctggaagaggaacagaaagagg

SEQ ID NO: 679955 - DNA, 90 bp, Homo sapiens
ctgaatttgaaagctagacaggatcgtcaggctgaaggaatcttggtaaatgggtacaatgactcttcttgcttttcacctaagttgaat

SEQ ID NO: 679956 - DNA, 85 bp, Homo sapiens
gggcagaagcctggagacctgtacagtcctgacagcagcccccagatctcactgatgaaaaggcctccaggtttttcacctttcc

SEQ ID NO: 679957 - DNA, 50 bp, Homo sapiens
cggagtgattgcctacatcttgtttcctgggagaaggtggcttaaggctg

SEQ ID NO: 679958 - DNA, 97 bp, Homo sapiens
agttcccgttaaccttagccacaaagtcaaagttttcggctttgtgagaaaccttaccatcaaacacgatggccagcaacgttaccaacaagacaga

SEQ ID NO: 679959 - DNA, 100 bp, Homo sapiens
ccacccatcaaatcagagagaaggaatccaccttcttacgctatggcagaaatgagccgtcagactgctacagcattacctaccggtacctcgaagtgtc

SEQ ID NO: 679960 - DNA, 75 bp, Homo sapiens
cggccctgcgccgcgacaagtacgtggccgagttcctcgagtggggtaagaatgattgatgttggctgatattgg

SEQ ID NO: 679961 - DNA, 75 bp, Homo sapiens
gcaagcacgggaagaagcagctggacccgctcaccatctacggcatccggtaaataaggatctggcatgtcaaca

SEQ ID NO: 679962 - DNA, 142 bp, Homo sapiens
cccagaaccacctcctttgcggagagctgcaagccggtgcagcagccttcagcttttggcagcatgaaagttagcaacaccctctccagagcccagcaattgtgagggactgatggagaagtatgtggctgctatggtgctg

SEQ ID NO: 679963 - DNA, 75 bp, Homo sapiens
ttcaagactttgacatgtgtgaaaacatgaaatgatgaggtttatataactttccaagacaaggaagttgtgcaa

SEQ ID NO: 679964 - DNA, 90 bp, Homo sapiens
aaatgcacagccaagcctagcagctcgggcaaggatggtggaggcgagaacactgaggagaatggatacatcaattttgacaagcggagg

SEQ ID NO: 679965 - DNA, 100 bp, Homo sapiens
agtgatcgctaagaactttgccgataccttaggatacaacatagaacctattatgctctatcagtaggtgatttcaaatcggagaagtccaacggggagc

SEQ ID NO: 679966 - DNA, 76 bp, Homo sapiens
cgcggggccccgattaggttggtctcgagacttgggacagtctaacagttcctgtttcccagcgactaaatcttcc

SEQ ID NO: 679967 - DNA, 90 bp, Homo sapiens
cacacaccagcggctgcaggactgggcacagcatgagatccaaaggcagggcaaggaaactggccacaacaaaatgatgcttcaacaccc

SEQ ID NO: 679968 - DNA, 100 bp, Homo sapiens
ttctggagatgcttccgaactgtgggcaaaaatggcgataaactcatcctgaaagtcgctgttgttctcctgctgagcaagaatggaggccccactggtg

SEQ ID NO: 679969 - DNA, 75 bp, Homo sapiens
gttagccagaagcctcccttccagtcagggggtgtccgcaatgttgccagtgtctgtctgcagattggctaccca

SEQ ID NO: 679970 - DNA, 50 bp, Homo sapiens
aatctgcaactcatcataatcctgatggagtgaaggtacctgagcgcagg

SEQ ID NO: 679971 - DNA, 112 bp, Homo sapiens
cacaggcacactccctctgggcgtcctctcaggaggcaagcagactatcgagacaggtcagagccctagagaataagagaagcttgctgctggtgagggggtatggccagga

SEQ ID NO: 679972 - DNA, 106 bp, Homo sapiens
ctccaaagaaattcctcaaacagaatttcacacagggtattccatggagaatgaggtactccaaagattcaggtttactcacgtcatccagcagagaatggaaagt

SEQ ID NO: 679973 - DNA, 100 bp, Homo sapiens
ggcctacgtgaacaacctgaacgtcaccgaggagaagtaccaggaggcgttggccaagggccacgtgctgtacgccgacatcaagatggagaatgggaag

SEQ ID NO: 679974 - DNA, 75 bp, Homo sapiens
cgatgcgtcaagtacactgaaattcatcctgagatgagacatatgtagagtgtgtcggtcagaaggaacacctga

SEQ ID NO: 679975 - DNA, 96 bp, Homo sapiens
gaggaaccagatatcttgaaaagctgccagaaagtctctgttggatgaacccaatcccaatagtccagcaaacagccaggctgctcagctgtacca

SEQ ID NO: 679976 - DNA, 101 bp, Homo sapiens
ttctaacatccagaagatcacacagtgttgcctatggcatgtctgcgttacctttaaatctgataaaaggcactagaagcgctgcttatgaacgtttggaa

SEQ ID NO: 679977 - DNA, 100 bp, Homo sapiens
aacagcttgttcagatttaagcatcttgcaactggaaactatttagctgcagagctcttcacagatggaatcacaaataaacttattggctgttacgtgg

SEQ ID NO: 679978 - DNA, 50 bp, Homo sapiens
ctatgttgccctgagttacataaatagaaatgtagacaaccaatttcctg

SEQ ID NO: 679979 - DNA, 90 bp, Homo sapiens
aagtgatcctcctgcctcagcctcccgagtacctgagattagcccaggattattgcatcgagcttttagtgtcttcttattcaacaccga

SEQ ID NO: 679980 - DNA, 100 bp, Homo sapiens
tcaaaacttaactcctggatacaggtccccagtctatgtgaggatctcctgtcttctgttgaccagccactgaaaattgccagagacaaggtggtgggaa

SEQ ID NO: 679981 - DNA, 98 bp, Homo sapiens
tacgataccgaagcgggctgtgtgccccttctccacccagaggcatcattcttaacaaagaagttaaatattggtgggaaaagagtaaaccttgccat

SEQ ID NO: 679982 - DNA, 75 bp, Homo sapiens
cgcaagacggtgccgagaagcagctgcgagatcctcccaagaaggtgaccacagtgattcaaaaccccatgccga

SEQ ID NO: 679983 - DNA, 83 bp, Homo sapiens
cctgcctggcacagctgaggcctgtgactggggattccgacagatcagtagggtgcagcctgaggcttgttcagcagaacagg

SEQ ID NO: 679984 - DNA, 101 bp, Homo sapiens
tgaggagctgcagtctctgtcaagctgctaacattgtgatccagactgaaccaccagttcctgtttcgattaatagcaacataaccagagtagttcttgaa

SEQ ID NO: 679985 - DNA, 96 bp, Homo sapiens
taatctcttcgttgcactttatgattttgtagcaagtggtgataacacactcagcatcactaaagatcagacctattgtgaccgcctggtgcagga

SEQ ID NO: 679986 - DNA, 82 bp, Homo sapiens
ataattcccaggacagtcagtctggtactaacaatgcagatcatggaccaggccataacggtgggggctccagtgattgggc

SEQ ID NO: 679987 - DNA, 82 bp, Homo sapiens
gcccaccgcgcactcggagatgcagccgctggtatcatgatattagctggtttgacatcaagtcatttgtgagtcatcagat

SEQ ID NO: 679988 - DNA, 83 bp, Homo sapiens
gaattcctgagcgcttctttcctggaaaatttgacatatggagagcacagtccctggaggacccattggagggcaaaccagag

SEQ ID NO: 679989 - DNA, 75 bp, Homo sapiens
ttccgggaagccatagctctgcatgggtcactcagctgccgcaaggagcaaggcaagttctatgaccatctcctg

SEQ ID NO: 679990 - DNA, 75 bp, Homo sapiens
gatatgtatgatcttcccaagaaagaggacgctttactctaccagagcaagggtgactcctgcacctgcgccggc

SEQ ID NO: 679991 - DNA, 100 bp, Homo sapiens
gcccctttggtgccctgacgcagcgcctcctgcaggccctggtggagatagaagaagtcagagatgccatggaaaatgaaatgagaacccagcttcgccg

SEQ ID NO: 679992 - DNA, 74 bp, Homo sapiens
gcaaacgaaaaagaacgacatgatgcaatcttcaggaaagtaagaggcagtcctgcgttaactgcggccgggag

SEQ ID NO: 679993 - DNA, 100 bp, Homo sapiens
ggcaacttctggatgtgcagcaatcagatttatcattcggacaggagacaatttatccagcatgttgctagaaaatctaactgataatgaaagtgaaaat

SEQ ID NO: 679994 - DNA, 78 bp, Homo sapiens
gacacggtctgggccgccgaatctccggccgaagagcggcggcggcagcggcgtgttatagttttgccgctggactct

SEQ ID NO: 679995 - DNA, 74 bp, Homo sapiens
aacaccacatgttgtctcttagaagtgggagctgaacgataaggcatggcagtcagccaacagcaggcatcatc

SEQ ID NO: 679996 - DNA, 49 bp, Homo sapiens
ctggaggccaccctgtggttcaggaagatgagaatgtgcctactgctcc

SEQ ID NO: 679997 - DNA, 97 bp, Homo sapiens
attcagaaggatatcgacgtcgtgatccagaagtccagagctgaggactgcctgtttgcaggtgctcttacagcctgttccaagtgtggcttaatcc

SEQ ID NO: 679998 - DNA, 100 bp, Homo sapiens
ataaagttttgggaggaaaccagacccttactgtaaatgtagagggcactaaaacattgccagatgatcatggctagatgattgtaagaggacatttggt

SEQ ID NO: 679999 - DNA, 51 bp, Homo sapiens
caaaaattggagtccttataggaaaaggatataatgactacatcaagatga

SEQ ID NO: 680000 - DNA, 139 bp, Homo sapiens
ctggaggaggaacttcgaaccatggaccaggccctcaagtccctgatggcctcagaggaggagggctccatccacctcttccaccaagacctgccactgtctatccaggaagcttaccagctgctgctgaccgaccaca

SEQ ID NO: 680001 - DNA, 75 bp, Homo sapiens
ggacgcgcagtccatctctctcagttgctccttcacatgttcccactctctgtgcggccaccatggaagtcggac

SEQ ID NO: 680002 - DNA, 75 bp, Homo sapiens
attgggcttattcagttttgcttatctgctcccaaaacagacgatgaatctggttatagatggacaagagacgat

SEQ ID NO: 680003 - DNA, 82 bp, Homo sapiens
gataaacactcgctggagagggagacgcaggaagcgatgaaagagatgtctgcgcatatcatggagcatctagaaggtgtca

SEQ ID NO: 680004 - DNA, 96 bp, Homo sapiens
cggcacccgcgggagcgcacggcgctatgggtcagccagcagccggcccggggtgtcagccaccccacccaagtccccggtctacctggacctggc

SEQ ID NO: 680005 - DNA, 50 bp, Homo sapiens
gtgcgtcaatcagagcgtcctgtgcggttaatttggagtggcccctggag

SEQ ID NO: 680006 - DNA, 100 bp, Homo sapiens
tggagaacggcgacgcggacgagccctccttcagcgaccccgaggacttcgtggacgacgtgagcgaggaagggtgattctgggggtccacttgtctgta

SEQ ID NO: 680007 - DNA, 80 bp, Homo sapiens
atccactcggtgaatgttttccagggacacacggaatgtggtgaagctgtagagaaaaacaagcgtctcatcacggcaga

SEQ ID NO: 680008 - DNA, 98 bp, Homo sapiens
caacatccacagccggaccgtcacccgctatcctgccaactctatcgtggtcgtaggaggctgtcctgtctgcagatttgttcccgacaaggagtttt

SEQ ID NO: 680009 - DNA, 100 bp, Homo sapiens
ccgaccttgagctccaggagttcgtctcttacgtctgcggaagtgcagctgcctcagttcttagcgcaggccaagtcatcaaggcatgggacattggggt

SEQ ID NO: 680010 - DNA, 51 bp, Homo sapiens
agttaaaactgtgaaatactttaaaggatacatgtgctgcccttttgttct

SEQ ID NO: 680011 - DNA, 114 bp, Homo sapiens
agccgcgcgctgagggtctcggggcgggcgccgcgggacctctccgggccatgggtgagaagccctaccactgcaactgggacggctgcggctggaagtttgcgcgctcagacg

SEQ ID NO: 680012 - DNA, 125 bp, Homo sapiens
ctcgggcaggccttccgagaggaacctctatgccgacatcgacgccgcctggcaggccctgcgcaccagttgctgtcccctttgacgatgatgacaagattgttgggggctacacctgtgaggag

SEQ ID NO: 680013 - DNA, 100 bp, Homo sapiens
tgacccacgatgcagtgcatgcacaaatggatgtgaagctccgctcactgatctgcgtggggctcaagaactggcgctgaagaccctggggacagatggc

SEQ ID NO: 680014 - DNA, 98 bp, Homo sapiens
ggatttctcttcccagaaacttcaacatctggaacatgtgatggaaaattatactcagtggctgcaaaaaaggcgtagaggctccggtgttttttgtg

SEQ ID NO: 680015 - DNA, 76 bp, Homo sapiens
ttgtccaggcctgcagaggtggaatcaaggtcttgatagtctcttcagagcaaatccaaaggtagaagaaagagag

SEQ ID NO: 680016 - DNA, 74 bp, Homo sapiens
gtgagaatcaccagcactggcacacggtagtcaaagaggcacctacaaaggcagcacctaagcaaaagattgtg

SEQ ID NO: 680017 - DNA, 100 bp, Homo sapiens
aacaggacctgcctaattaccttcaaacctggagctgctgctcttcctccagaacctgcccacagcccactgggatgatgaggacatcagcctgttgctg

SEQ ID NO: 680018 - DNA, 100 bp, Homo sapiens
atcgaatcttcactcccgctgtctcagcagtctacagcacggattaatgcagtatcgaatggacaagtccgaggtgatagttacagtgaaggttgtctgg

SEQ ID NO: 680019 - DNA, 101 bp, Homo sapiens
agggagtccatggccagaaaacttttgggcgcttctctgaagtagctttggaaagtagagaagaaaatccagtttgcttcttggagaacactggacagctg

SEQ ID NO: 680020 - DNA, 80 bp, Homo sapiens
cggcctcccggggtgtcccgggctcgcgcaggacgcagaagggcagtggagccagggtgagaactctgtctcagtcgacg

SEQ ID NO: 680021 - DNA, 100 bp, Homo sapiens
ggaggcacagatggaggtggagcaataccgcagagagcgagagcacgaattccagagcaagcagcaggcggcctgagacctgggaggaagctggagaaaa

SEQ ID NO: 680022 - DNA, 80 bp, Homo sapiens
agctgctatgaggtctcgtaaacaggctgctcccggcagatcggcttctcctttgtacgacccaagctctgtgccttctc

SEQ ID NO: 680023 - DNA, 100 bp, Homo sapiens
gttgctcatcttgatcatggtccatccagggaaggcccggcgactgaagcaggcaaaggaggaggcacagatggaggtggagcaataccgcagagagcga

SEQ ID NO: 680024 - DNA, 75 bp, Homo sapiens
ccgggatctcaggtcctcgggggcggcggccacgccaaggacgggttaatgactgaagggctctggaaaggggat

SEQ ID NO: 680025 - DNA, 100 bp, Homo sapiens
gttcgagcagatcgacaagtccgggagctgggcggccatttaccagccaacaaatggaattttcttgagcatgtttctaatcgttttgccattggaatcc

SEQ ID NO: 680026 - DNA, 83 bp, Homo sapiens
gctgcctcccagtgtctctgctgctcaaaatttctcttccagggagtgcatccgccccaacccttttccccctcgtctcctgt

SEQ ID NO: 680027 - DNA, 100 bp, Homo sapiens
cgggggcggggcggcagtgagctcggccggcaaccgagggacccgcgtccaggagggagccatggatttgctgcgggagctgaaggccatgcctatcacg

SEQ ID NO: 680028 - DNA, 80 bp, Homo sapiens
gacggcgagcgcgagcggcgcgagaaagtactaccgtggtgcagtgggcgccctgctggtgtacgacatcgccaagcacc

SEQ ID NO: 680029 - DNA, 80 bp, Homo sapiens
ttgattctgaccatttctcatgaacagaaacacctaggaagggagaactgaggctgggaggcggcagaatgcagccagag

SEQ ID NO: 680030 - DNA, 128 bp, Homo sapiens
aatctccagagagccatggacattggagagagtggtattatggtgtaaacaacgattctttggaggtatggcccatctcctgtacgcttggagcgacctttggctacgtggctggccttgttatttca

SEQ ID NO: 680031 - DNA, 83 bp, Homo sapiens
cgccgtgagcgcccggagcggtccgcgagccaccgaggcccaggaagctcttcgtgggcggtcttgactggagcacgacccaa

SEQ ID NO: 680032 - DNA, 83 bp, Homo sapiens
gaaacaactgaagcaaggaatgccttaattgaacaaggatgagagtccaatgaaagcaaacttccttcaaaacatgatagaag

SEQ ID NO: 680033 - DNA, 80 bp, Homo sapiens
ggcggggagccccgcctgaggtgccctaaacacactatgaccgatgaaggatttgggggcagagcacttggcaggtcatg

SEQ ID NO: 680034 - DNA, 51 bp, Homo sapiens
cgtcacctggagagatgcacaggtggattctcaatatcctcctgttcagag

SEQ ID NO: 680035 - DNA, 80 bp, Homo sapiens
acgctacactggcggagaacgggctcgcataaagccaaggtagaagcaatgaccctggacctcgctctgctccgtagcgt

SEQ ID NO: 680036 - DNA, 88 bp, Homo sapiens
tgggatgacccatactatgacatcgcccggcaccagatcgtggaggtggcagagtgcacaagggaagaagatgccaagcaaaaccagc

SEQ ID NO: 680037 - DNA, 75 bp, Homo sapiens
tggtgtgcacccccaccatccacactgccaccgtcaaggtcgtcatacaggtcaaaatgcagatcttcgtgaaaa

SEQ ID NO: 680038 - DNA, 82 bp, Homo sapiens
gacactgccaagcagccttagccctagtgtagagattgagctaagagaacgagagatagaacgactgtcagttgctttggat

SEQ ID NO: 680039 - DNA, 98 bp, Homo sapiens
caagccaaactttgtgattcaggagaactggtcgccatcaagaaagtattgcaggacaagagatttaagagaccatttgtttgtgactatgaagggtg

SEQ ID NO: 680040 - DNA, 83 bp, Homo sapiens
ctttaagaatgagggtgccgaaccagatctaatcagaagccggcaggagtgactctcggcatggaggacccatctcctagcac

SEQ ID NO: 680041 - DNA, 50 bp, Homo sapiens
ttatcatctaaaatccaatccctcgcatcccatatcaagatggattgccc

SEQ ID NO: 680042 - DNA, 71 bp, Homo sapiens
gatttacatgctgatggagaaggacatgcggtctttagcagggcttttggcccggtggttctttattcatt

SEQ ID NO: 680043 - DNA, 116 bp, Homo sapiens
gcgggatgctgggatccctccaaggaccctctgaggacgtaggagggatgctgagacaggtgtgatgaatgcagactctgctaccattttggctgtttggatcctcctttgaaaaa

SEQ ID NO: 680044 - DNA, 75 bp, Homo sapiens
agccctactgggaggcacggagggtggcgaggcaggaggcactggctacaattaggcttctcgacgtcctgtgcg

SEQ ID NO: 680045 - DNA, 100 bp, Homo sapiens
ctgttagcggctcaggtccgcagtggaggccacatcaactcggcgccttgggaaccgctcgagcctaccaggataccatacttgcagagctccttcagat

SEQ ID NO: 680046 - DNA, 83 bp, Homo sapiens
gaaagacttcctcaaggactacagtatgcacttaatgtccctaatgacattttcctcagacattatgacaaagggccatgcag

SEQ ID NO: 680047 - DNA, 80 bp, Homo sapiens
ggagccagaggagaggcgcccccgccggccgccgcgccgcccggcagcctcggcaggtgattgcccacagtgagtatcaa

SEQ ID NO: 680048 - DNA, 100 bp, Homo sapiens
gaacattttgtgtggactgtgagacttaccatacggccgcctctacccttggcagccaagggaagctctccactgggcccttttcagcatgcaagccacg

SEQ ID NO: 680049 - DNA, 90 bp, Homo sapiens
cgagcggtggtttggacgccggcggagacgcgggcgaggtgctggagaatctggtaaaagcaccattgtgaagcagatgaggatcctgca

SEQ ID NO: 680050 - DNA, 98 bp, Homo sapiens
gagcaggatcacagtaaaggccacagcacgcagatggcacggctccgacagtcactgtctcagcgccatcatgaccgggtcctataacaacttcttca

SEQ ID NO: 680051 - DNA, 100 bp, Homo sapiens
cgtcatcgagtgtgacgtggtgaaagaaatacagtccatactgcccggaatctctgcaaagctgacttggacttcagaggaaggcagctattctcaggat

SEQ ID NO: 680052 - DNA, 80 bp, Homo sapiens
cctcaactatgctctccgctgtgtccacagcgttcaagggaaaaccctgggtgctggagctttcgggaaggttgttgagg

SEQ ID NO: 680053 - DNA, 74 bp, Homo sapiens
aggctacagtccactccagcatggttcttgatagtccacaatgggtgaaccacagcaagtgagtgcacttccac

SEQ ID NO: 680054 - DNA, 100 bp, Homo sapiens
aaggacatcttcttctctataggattcggaaggacgttggcctaccccttgctcaggttcaagaagacagtgaagaggctcattccgcatcttctttctt

SEQ ID NO: 680055 - DNA, 100 bp, Homo sapiens
gggcttttttaaaatcaaaagtaacaagagaacagcaagtgcaccaaacttagaataactgaagtgaagtgatggactccgatttggagagtagtaagac

SEQ ID NO: 680056 - DNA, 75 bp, Homo sapiens
ggacgggccggagggaggatgttaaagccccgcggtgatgatgaacagtctacacagatggctgcaagttgggaa

SEQ ID NO: 680057 - DNA, 90 bp, Homo sapiens
aaacaaactacccattttcttttttggaactcatgagacgtatggcgtgagtcccgagaacattatcctctatggtcagagcattgggac

SEQ ID NO: 680058 - DNA, 100 bp, Homo sapiens
ggcattagatttagaacaacttctaaatcatcgtgagtgtactaatggtcacttgatgtgcgctggctgttttatccacctactagcagatgcccggctg

SEQ ID NO: 680059 - DNA, 116 bp, Homo sapiens
acatttgaggatcttattcagcgctgcctttcttcagcaacagaccctaatgacatcttcgagtggtccagggaccaccgagcccaccacaagtactcagagacggatgctgaccc

SEQ ID NO: 680060 - DNA, 100 bp, Homo sapiens
cctctctggccactatggaattctaatttgaaccatgtttggattgaagccgcctctgtattacttaccaggtgaccccagggtttgaagaaaaggaggg

SEQ ID NO: 680061 - DNA, 101 bp, Homo sapiens
atctgtggagcagatccgatggagaggctgagctgctccaggacttgggggagttctgtccaacatctcttccatcaccgatctcggcggctttgacccag

SEQ ID NO: 680062 - DNA, 50 bp, Homo sapiens
ccctggcattttaggtgtcggttggggcatgaactacttggaggaccgtc

SEQ ID NO: 680063 - DNA, 90 bp, Homo sapiens
aacaccccgagcgaggccaaccttcaggaggaggagagtgatcagcagctggactgtgccttggacctaatgaggcgcctgcctccccag

SEQ ID NO: 680064 - DNA, 90 bp, Homo sapiens
actggggccacgtggagctgctggaggaggctgtggccaggccagctgggctcggggagcgccagcctgagaggagcgcgtgagcgtcgc

SEQ ID NO: 680065 - DNA, 100 bp, Homo sapiens
taagaagaatcacacctcattgcaggtgactccagaccaaggaggatgagctgctgtccctggaagagaacggatggagggaagcagctcctacgaagtt

SEQ ID NO: 680066 - DNA, 102 bp, Homo sapiens
gtcgatctacgttccaattggggccgtaccatggcggagaagactcaaaagagatgagctcacagtgcctgcactttaccccagtagccctgaagtgtgggc

SEQ ID NO: 680067 - DNA, 84 bp, Homo sapiens
gaggccgagggtttgatgaaggtggaggcagcgcggctctcaggtacactgaggaggggacggctccgtcttcacattgtgcac

SEQ ID NO: 680068 - DNA, 100 bp, Homo sapiens
ttgttcaggcactgagtcagcatgtagatcgttaactgaagacaatatgcaaaattctcacatggatgaatacagaaattctagtaatggcagcacaggc

SEQ ID NO: 680069 - DNA, 75 bp, Homo sapiens
ctcgctgcttcaggaggacctgcaggaggacgcagacggatgtgttgacttcaaaatcaaaactgtagagctaag

SEQ ID NO: 680070 - DNA, 80 bp, Homo sapiens
gaagattcttacctctttgatctcgacaataagctctaagcgaaagacatgaggcctcagcctgaaatgaggttgttttg

SEQ ID NO: 680071 - DNA, 97 bp, Homo sapiens
gggactcaccgctctggccagggtgcttttggaaacaaccagctcatgtttggaaaaggaatcttccactgaaacatttggatacccgacgttctcc

SEQ ID NO: 680072 - DNA, 75 bp, Homo sapiens
tccgcagggttcggatgagaccagcctgggttactaggtgtctttcagaagctgattgcatccaaagcaaatgac

SEQ ID NO: 680073 - DNA, 101 bp, Homo sapiens
gaattcttgacagacttctggatggttacgataatcggcttagaccaggactgggaggaagcagaatctgaaactttctgaggagagcatttgagcttcag

SEQ ID NO: 680074 - DNA, 75 bp, Homo sapiens
cagattccagaaaaattacagcacatctcagtgaatttgcaagtgctggcgctacgtacatctttgggaaaagtg

SEQ ID NO: 680075 - DNA, 82 bp, Homo sapiens
cagccgcgaggaggcgcgggaggtgttcgagaacgaccccgagacggtggccaaggtggaatacgtcaggaagaagccaaaa

SEQ ID NO: 680076 - DNA, 74 bp, Homo sapiens
tgatgacagctggccttttttgaaacttgtttctaaaatccaggaccgccgggagagcctgcccacctccccac

SEQ ID NO: 680077 - DNA, 83 bp, Homo sapiens
ccggagtcagtcattttactgtcaagacatttcttcggcattctgcaacaggctggcgcggagatctccaccgtgaacccaga

SEQ ID NO: 680078 - DNA, 101 bp, Homo sapiens
attattcttgatgatgatgagtgtcctttacaaatcttcagggaatggccaagtgacaaaggattcaagatgaccaacgaagaacctcttcccaagaaggt

SEQ ID NO: 680079 - DNA, 75 bp, Homo sapiens
cccggaaggggaagaggaaagcaaaggcgtcaggaatggttcttcctcagctccggctcccaccttgtctttgtc

SEQ ID NO: 680080 - DNA, 100 bp, Homo sapiens
acccgccgaccacgcttgatccccggccgcggggccaggaagtcggagtttgagccccggaggcagagcggctgccatgatctccatcctttgtccagag

SEQ ID NO: 680081 - DNA, 83 bp, Homo sapiens
ccgaagcagcgtgtcctccgtgggagcccgagaggccggtagaggactgtgaaccaaaagttgtcccccaggatggacttcac

SEQ ID NO: 680082 - DNA, 97 bp, Homo sapiens
agagaattggaagctaaagctaccaaagacgtagaaagaaatcttagcaggtgattgcccacagtgagtatcaaaagtccaaaagaatttccatctt

SEQ ID NO: 680083 - DNA, 100 bp, Homo sapiens
gctgccgagaaggagggaggggaaacacaaagccggctacgcgctgcgagcttggacagcttttagcagctacatgcaaagaacttccaggccctaaaga

SEQ ID NO: 680084 - DNA, 90 bp, Homo sapiens
ggatgagaagtgcttagattctggatacattttgaagacctctgtgagtgaaagccttcagagggaagctgctaagaagcaggccatgaa

SEQ ID NO: 680085 - DNA, 87 bp, Homo sapiens
agccctcgcgacgcgcccggcccggagcccccagcgcagcggccgcgtggtttgagtccagccaatgacactggagccaaaaagaag

SEQ ID NO: 680086 - DNA, 82 bp, Homo sapiens
tgatcttcaggatcatgcttggagcagattttttatcaagcagaaatgcatcgaacaacgagaatcaagatcactgagctaa

SEQ ID NO: 680087 - DNA, 124 bp, Homo sapiens
attgcccggcaggggtcctacaccagcatcaacagtgagggggagttcatcccagagaccagcgagcagtgcctggcaaacttccccagactctgcgaggaaacggaaaggattgttgctaacc

SEQ ID NO: 680088 - DNA, 100 bp, Homo sapiens
cacctatcaaagccccctgctctactgtgacctggagtttcttgcagaacataaattattaggaaacattaaaaatgtggccaagacagctaacaaggac

SEQ ID NO: 680089 - DNA, 49 bp, Homo sapiens
gccttatcaccttcttgcttgcaggtatctcagatgaagacatcatcaa

SEQ ID NO: 680090 - DNA, 100 bp, Homo sapiens
ctgtaaattcctgtgcagaaggcatcgtcgtcttccggacagactatggtcagtgaccgaagctggctttggtgctgacatcggaatggagaaattcttc

SEQ ID NO: 680091 - DNA, 100 bp, Homo sapiens
tctttcatctcttctggggcaggggccagggccagggctctgccagcagacagccttggcacacaggcacaagggctggagcccagagatgagagtgccc

SEQ ID NO: 680092 - DNA, 90 bp, Homo sapiens
ggagcatccagagatgctggagaaagcgtcccgggagctgtggatgcgcgtctggtcaagggtgtggacagttctgtgttcgaggctctg

SEQ ID NO: 680093 - DNA, 51 bp, Homo sapiens
caaattcgcctccatctgtaccatggtttctggtcctcataccgtgtggtt

SEQ ID NO: 680094 - DNA, 88 bp, Homo sapiens
actggggccagggaaccctggtcaccgtctcctcagcttcgagagctgtgcccaggagtgaacaaccagccctacctctgtgagagtg

SEQ ID NO: 680095 - DNA, 75 bp, Homo sapiens
cgggacaccgggtgtagagggcggtcgcggcgggcagtggcggcagccggagccggtgattccagtgaaggatgc

SEQ ID NO: 680096 - DNA, 101 bp, Homo sapiens
ttatttccaaagttgaagaagtcttgaatgactggaaactgattggaaactctttgggaaagccactcgaaaagaacctaaaggcagacccagaagagctt

SEQ ID NO: 680097 - DNA, 123 bp, Homo sapiens
gcttcatctgcgatggacagaataactgtcaagacaacagtgatgaggaaagctgtgaaagttctcaagcaaatgccagatgttaatgtaagctgggatggagagggcccaaagcaactgcca

SEQ ID NO: 680098 - DNA, 100 bp, Homo sapiens
cggaggagcacccagtgctgctgaccgaggcccccctgaaccccaaggccaacagagagaagatgactcagatgacttcctgctgtacctggaccctcac

SEQ ID NO: 680099 - DNA, 100 bp, Homo sapiens
ccagtgagcccatcccgttctctgatttgcagcaggtaccattgttggatactggtgacatcatcattgacggaggaaattctgaatatagggacaccac

SEQ ID NO: 680100 - DNA, 74 bp, Homo sapiens
cggggcttctgcagcgccgatggctccgacccgctctggcaggttcaggagaagtggcacctggtggaggacct

SEQ ID NO: 680101 - DNA, 100 bp, Homo sapiens
acctgcatcagtgtgcagaggccgttgcttttgaccagaatgctttggttaaacgaatcaaagagagctctcgatgttctgaagtatgaggaagttgaca

SEQ ID NO: 680102 - DNA, 96 bp, Homo sapiens
cctgttggagaaacacaaagagattggcacttctctgtttgatgaagagggagccaagattgtcaaagacctaatgtccaaagctgagaagaatgg

SEQ ID NO: 680103 - DNA, 100 bp, Homo sapiens
gacgggacttgcggcccgggtcccgcgtgctcctgctcctgcttctgctcctgctggtgtacctgactcagccaggacccaaaaggggggaacatgcctg

SEQ ID NO: 680104 - DNA, 83 bp, Homo sapiens
gtcagacgcagccgtagacaccagctccgaaatcaccaccaagaagcaaggtctcgctgtgttaccctggctggagtgcagtg

SEQ ID NO: 680105 - DNA, 75 bp, Homo sapiens
cccgattctcatctgcccataatcatggacacagccccaggatgtgcaggtagagacggggtttcaccgtgttag

SEQ ID NO: 680106 - DNA, 83 bp, Homo sapiens
ggctaagatcaccaacacagacgtgatcctgaggaggatgaaggggctggccctggaggccgagagtgagctggagagacaag

SEQ ID NO: 680107 - DNA, 105 bp, Homo sapiens
acttggaagcaatgtttgaacaaactcgaagaacagctgtggaaagaagttgcaaaacactggcaatggctgccatccggaagaaactggtgattgttggtgatg

SEQ ID NO: 680108 - DNA, 80 bp, Homo sapiens
ctctcatccgcacgcacaatatcgggcagaaagataatcacgggatttcagtcataatcggttgtctaactggaacatca

SEQ ID NO: 680109 - DNA, 100 bp, Homo sapiens
ctgcctggagtcgaggccccgctccgccgctggctttccgcggagccccagatgacacctttgaggccctgtgcatcgagccgttttccagcccgccaga

SEQ ID NO: 680110 - DNA, 100 bp, Homo sapiens
caaatcttcagggaatggccaagtgacaaagaagttgattcaagtcagttgagacgccagttgtgtggaggaagtcaggccgccatagaaagaatgatcc

SEQ ID NO: 680111 - DNA, 100 bp, Homo sapiens
tcggcagtgaagctcaagttgctactcgggacgctgcacctcccgcgccgcacggtggacgaggagtctaccatggctcaagaatctcccaaaaattcag

SEQ ID NO: 680112 - DNA, 96 bp, Homo sapiens
tctagtcaaggccgcacaggaacaggagggtctgatgtcctccagttccgatgaagttaaattccgtcaagatttaatgaatattgcgggcacaac

SEQ ID NO: 680113 - DNA, 101 bp, Homo sapiens
caagaagttgctcaagtacatgaagcacaccgtggtagtatactgggggccgaaggccagagaccaggatttggctacggaggcagagcgtccgactataa

SEQ ID NO: 680114 - DNA, 100 bp, Homo sapiens
gccgaattttggaccagctttttcgtttcatttcctcactttgcgttgtagtcgtctcaaagggaatagctctccagacccccagctggccatgtggtga

SEQ ID NO: 680115 - DNA, 100 bp, Homo sapiens
gagctggcgggtcccgcgggccaggccgtggaggacctgctgaagttcccatgatgtcacccaatggatccattcctcccattcatgtgcctccaggtta

SEQ ID NO: 680116 - DNA, 100 bp, Homo sapiens
tgaagggaggaaatagtggcaggtgacagtctgcatgtgcagttttcagaacttgaaggtgcacattcttgatactgaaagttttgaaactacatttggc

SEQ ID NO: 680117 - DNA, 83 bp, Homo sapiens
ctgagccgcgtctaccccgagcgtccgccatggaccagctggccaagaccacccaggaaaccatcgacaagactgctaaccag

SEQ ID NO: 680118 - DNA, 99 bp, Homo sapiens
gtgtaactatggccggcctgcggaacgaaagtgaacaggagccgctcttaggcgacacacctggaagcagctaaaagatggcggcaaggcagcccaggc

SEQ ID NO: 680119 - DNA, 51 bp, Homo sapiens
actgttgacaattgaagacagaaaccggaatatttggagttttcctggtct

SEQ ID NO: 680120 - DNA, 75 bp, Homo sapiens
gggtgcagcggaggcggcggcggcggcggcagtgacgtcgccgggtacggacattgctgcaggagaagaggttgc

SEQ ID NO: 680121 - DNA, 100 bp, Homo sapiens
agaaggaagcccccagccccttccaggccctgttctcagggcgtgatggtgggcatgggtcagaaggattcctatgtgggcgacgaggcccagagcaaga

SEQ ID NO: 680122 - DNA, 83 bp, Homo sapiens
ggatcatgtctgcgagccaggattcccgatataattggtgattacaactttcctctataaattaactcttgacactccttggg

SEQ ID NO: 680123 - DNA, 100 bp, Homo sapiens
cttcccatgatacatggtggggagatacagcaaacacccaatactgttgcagcctcccctgctgcatcagccctgaaaaccactcgcttgcagagcgctg

SEQ ID NO: 680124 - DNA, 100 bp, Homo sapiens
ctccaggccaagagggatccttcacccgtgtctgacctgcaggctgggacaatgaaaagaaaatagctattttacatgaaaattttacaaccgtgaagcc

SEQ ID NO: 680125 - DNA, 75 bp, Homo sapiens
aaaaactctgcctatcctgcttaaatccagaaacaagggcagctgcgttccctgcacctgacatgtgacagcgcc

SEQ ID NO: 680126 - DNA, 75 bp, Homo sapiens
tatttgtggtaataacccttaccgggagtttcactgaagtgccaaatctttggagtgttgatggagaagttacag

SEQ ID NO: 680127 - DNA, 100 bp, Homo sapiens
caaaaactcagaaaatacgtggttggagagctcatctggaattttgccgatttcatgactaaccagtgaagaggcagaaatccaggcagaacttgaacgt

SEQ ID NO: 680128 - DNA, 90 bp, Homo sapiens
caaggacaacaatgagatcgtggacaagatcatgggcaaaggacagatccagttacagaatgtctgaaggggacagtgtgggagaatccg

SEQ ID NO: 680129 - DNA, 94 bp, Homo sapiens
gtagcagtgaatctacagggacgccatcgaatccgatcctaacacattttgaggtgcagcctgagccaggtgcggccccagttagacccaagac

SEQ ID NO: 680130 - DNA, 100 bp, Homo sapiens
tttgcacccagtcctgcagcgccagcagctggactatggcatctatgttatcaaccaggtgaccatagccgatgactactcagatccctttgatgccaag

SEQ ID NO: 680131 - DNA, 97 bp, Homo sapiens
tgctgctgaggagaggagcgtcaacagcagcaccatgggactccagaagacctttccagattcgtggttgagctgcagcagagggagcttgccttga

SEQ ID NO: 680132 - DNA, 100 bp, Homo sapiens
atgaaatatggaaacgactcctcggccgagctgagtgaggggtgctacatccattgtgtacagatgcaaacagaaggggacccagaagccttatgctctc

SEQ ID NO: 680133 - DNA, 74 bp, Homo sapiens
catcaccggtatcacaggccagttctgaaacacagacaacatcaagggggaaagaaagtgaagattcatcttat

SEQ ID NO: 680134 - DNA, 99 bp, Homo sapiens
cgagaggcggcgccgctcccaagatgtcgcagacggccatgtccgaaacctacggtatccgttacagcactgatgtgagtgtagatgaagtaaaagctt

SEQ ID NO: 680135 - DNA, 75 bp, Homo sapiens
ctttgccaatagcccctgggtggttcaggtgggtcatgataactgggtacgtggagttctgttccattctggggg

SEQ ID NO: 680136 - DNA, 100 bp, Homo sapiens
tgttcatcgcctcttcctcgggcttcgtggcggcagtcttgattgatatggaagaaggggtagtgaatgaaattctgcagggaccactgagagatgtatt

SEQ ID NO: 680137 - DNA, 100 bp, Homo sapiens
actagttgccctccgccagcagctggaagaagtcaaagcgattaatttacagatgtttcacaaagctcaggttcaggagtttgaacatgttaatgggcgc

SEQ ID NO: 680138 - DNA, 83 bp, Homo sapiens
aagccgaggattctgctcatgggactccggcgcagcggcaagtcctccatccagaaggtcaaaatgcagatcttcgtgaaaac

SEQ ID NO: 680139 - DNA, 82 bp, Homo sapiens
gcagaatgtgatttgcttgaagatatgagaacaagttgaaatcatcgcagaaggataaagttcgtcagtttatgatcttcac

SEQ ID NO: 680140 - DNA, 100 bp, Homo sapiens
actgcctggccgaatcagccttttcacgctcaaggagtagcccatcgaagccagagcagtgaaggagtcagttctctcagcagctcgccctctaatagcc

SEQ ID NO: 680141 - DNA, 83 bp, Homo sapiens
ggtgtcaccgctttcgcttctgcttgaggattcctggtcacctcccttgctcttttcttcctggatgaaacaagaagataatc

SEQ ID NO: 680142 - DNA, 98 bp, Homo sapiens
gtccgtctggtggtctcgaacctgggactcggcgaatgcggattcgatcattcacatcgatctggaaagcatgaagactgggctttttttcctatgtc

SEQ ID NO: 680143 - DNA, 83 bp, Homo sapiens
caaagccgcgcgagcagtgggaggagcaatgagaggcaatcctggggatatgagactttctactcggaatatcctgagtgttg

SEQ ID NO: 680144 - DNA, 90 bp, Homo sapiens
ttaacccctagaccggtttttagtccattgactatgcagcctaatgcttggaagctcgaagtctggctgtggccatgggagatacagtag

SEQ ID NO: 680145 - DNA, 90 bp, Homo sapiens
accatcatgccgcggctaagtgaggaagccagccaggctctcatcgagtcagagcaccataacatggtgtgggaagtgaagacaaatcag

SEQ ID NO: 680146 - DNA, 100 bp, Homo sapiens
cctggacacagcaatatctctgggctttcacagagtctctctgagaaatcaaggaaagtattccgaatatttcggcagtgggaatctctgtgctcatgct

SEQ ID NO: 680147 - DNA, 75 bp, Homo sapiens
cacctgcgctcggacggcgctcggagggtcctcgcccccggcctgcctacctgagagaagaagaaggaggttcct

SEQ ID NO: 680148 - DNA, 51 bp, Homo sapiens
tgtgactaccctggttacctcatatggacgacttgagaaggcatcctgacc

SEQ ID NO: 680149 - DNA, 100 bp, Homo sapiens
gaaaaattaagtgaattgatttggttggaatgctcttttaccgatgctttaacatacagccactagctaaacccaaagtgaacgtgaagccatctgtggt

SEQ ID NO: 680150 - DNA, 101 bp, Homo sapiens
agtcgcagcggtggtttgggatgcggtgatgatgaccaaacggaccaaagacatgggcaagttcagttctgtcaccgtgtctaccattgatgaagaggaag

SEQ ID NO: 680151 - DNA, 50 bp, Homo sapiens
gcaccaaatttcaacctgacgggtgtggtggctggaggtggccgaattga

SEQ ID NO: 680152 - DNA, 75 bp, Homo sapiens
ccaggcctgctcggccctcacagggccgactcgcgggccgctgcacccaccgccaaggacaaaaggagcccagcg

SEQ ID NO: 680153 - DNA, 82 bp, Homo sapiens
tctggagtttatctggagtgaggtggccggttcttggtgggatctgagcagacgttggacctctcgaacaaccagctgagcg

SEQ ID NO: 680154 - DNA, 82 bp, Homo sapiens
tcccaagaatggcaagttaaacatacagtcgcctctgacaagccaggcagcctgcttctgcaaagtggtacgatcgaaggga

SEQ ID NO: 680155 - DNA, 100 bp, Homo sapiens
acttatcagagattgagaatgtccatggatttgtttctcattctcatatttcaccaataaagggcagccattctacaaaagtggaagctgtggtcagaac

SEQ ID NO: 680156 - DNA, 82 bp, Homo sapiens
gattcagccagcacactcctcgcgagcaagagatgccctgtatccaagcccaatatgggacaccagcaccgagtccgggacc

SEQ ID NO: 680157 - DNA, 100 bp, Homo sapiens
agttgactgaaaatggggcggaagaaaatacaaatcacacgcataatggatgaaaggaaccgacaggtgtttgctgactagcactttggagagtgtatgc

SEQ ID NO: 680158 - DNA, 100 bp, Homo sapiens
ctcccggcccggccgcagcagccgccgccgccgcgcagtcactcctggaagcaaggcggctctagctaatttatgtattggagatgtaatcacagccatt

SEQ ID NO: 680159 - DNA, 97 bp, Homo sapiens
tcgacctgatgattctaagatatgctcacatggtcaacggattcactgcgtgagaccaaggaccaggtagctaactcagcctttgtggaacgtcttc

SEQ ID NO: 680160 - DNA, 73 bp, Homo sapiens
aacaggatcagtaaagaaggaaaaagcagtaaagccagaggaagatctgactgcagccatgagcagcaatgag

SEQ ID NO: 680161 - DNA, 101 bp, Homo sapiens
cgtcatggcatacgaggccaagctcccccggcaggcctcctcctctaccgtcaccgaagacttcagcgaggattccgagaatgggagtgaggccctaatga

SEQ ID NO: 680162 - DNA, 100 bp, Homo sapiens
ctggtggacagcaaaggctttgatgaatacatgaaggagctaggaccacagaatactggccatggtgcaacttctggttttggcagtgcttttacaggac

SEQ ID NO: 680163 - DNA, 100 bp, Homo sapiens
aacagctggagcaaggcgacgaaccttggagagaggagaacgaacatcttctggacctttgtccagtacttacagatcatcagtatttggagaggacacc

SEQ ID NO: 680164 - DNA, 114 bp, Homo sapiens
gaggaaggaacgaggcaaggagctaaagcagcgtgcgttcagccctgggataacgaaggaggcccaacttcattcaataaggagcctgacggatttatcccagacggtagaaca

SEQ ID NO: 680165 - DNA, 76 bp, Homo sapiens
tcagtgcgaagaagctgcagccgcacctggccaagggtacaacagaatagctcgggaatggactcagaagtatgcg

SEQ ID NO: 680166 - DNA, 83 bp, Homo sapiens
ccctcgtacgggctgtcggccgaggtcaagaaccgggttcgtgctggccgtgggcagcgccgtctttgatgccatgttcaacg

SEQ ID NO: 680167 - DNA, 82 bp, Homo sapiens
cgccaccctgccctgcccacccgccaggggaggagccccagccccgcgacgaggaggaagcggagctggagctgctgaggca

SEQ ID NO: 680168 - DNA, 76 bp, Homo sapiens
aagtcatcatgggccggcctggaacagcttgaccctcaacaccaaccatgggcatatcctggtggattactccaag

SEQ ID NO: 680169 - DNA, 90 bp, Homo sapiens
agtaacctgctccccacccttggtgtgtagtccagttagcaagatcttcaggaattttactgggataattatccaaataaattgcaagca

SEQ ID NO: 680170 - DNA, 82 bp, Homo sapiens
gaccaggacctggtgaagctctgtcaaccgttcgagaacttgtcttggacaattgcaaatcaaatgatggaaaaattgaggg

SEQ ID NO: 680171 - DNA, 83 bp, Homo sapiens
cgcaggaggacggagccctaaccgcaacccgcgccgcgccgcgccgcgccgttgggccggtgcacaaacagcgtggtcaagta

SEQ ID NO: 680172 - DNA, 101 bp, Homo sapiens
cgaagagctctttcaaggaatcaggaagaatccaactgatgagtatctagatgccatgatgaatgaggctccaggccccatcaatttcaccatgttcctca

SEQ ID NO: 680173 - DNA, 75 bp, Homo sapiens
agcccccggagacagcggcacagaggtgcttctgccaggttcctactatctgaccaccacctacggggccctgga

SEQ ID NO: 680174 - DNA, 100 bp, Homo sapiens
tctggtggttgaaaaggacactcgatttattcctggattacagtttgaccttgtctgtgtcaatgcgtggatgctggacctcacccaagccatcctgaac

SEQ ID NO: 680175 - DNA, 51 bp, Homo sapiens
aaaacgtgtgggtacgaccttggtgcttcttaacctaccagtcctgccaga

SEQ ID NO: 680176 - DNA, 102 bp, Homo sapiens
aaaaagtaccatcatttgaaacagatatttcagcagttgaatcagttgaattcacttcatcaagaaactatcatgaaatgcgtgaaaagtaggaaagatgaa

SEQ ID NO: 680177 - DNA, 83 bp, Homo sapiens
cagcaagagggacgttgtgaaggcacccgagtgtacagccccccggagtggatccgctaccaccgctaccacgggcgctcggc

SEQ ID NO: 680178 - DNA, 115 bp, Homo sapiens
ccgctccggcctcgggctgcccgtggcgcccgcaggcggcaggaatcctcctccggcgataggtgctggagaatctggtaaaagcaccattgtgaagcagatgaggatcctgcat

SEQ ID NO: 680179 - DNA, 113 bp, Homo sapiens
gggccgcgctctgctgcttcctcgtcctagtgatccacgcgcagttcctcaaagaagggggggccctcagcctcttggccttgaacgggctgttcatcttgattcacaaacac

SEQ ID NO: 680180 - DNA, 97 bp, Homo sapiens
acttttattccttccagaagcagaatcaaacagcatcagtaggataactgcaaacatggaaaatggagaaaatgaaggaacaattaaaattattgca

SEQ ID NO: 680181 - DNA, 90 bp, Homo sapiens
actgaagcaaaagatcagcgaggagcagcagcagctccagcaggcgctggctcctgctcaggtttaagaattgtttaagctgcatcaatg

SEQ ID NO: 680182 - DNA, 75 bp, Homo sapiens
ctaagatggcgacgcctttggcggtaaattcgggtctgccatcatggatgttctcgcagaagcaaatggcacctt

SEQ ID NO: 680183 - DNA, 75 bp, Homo sapiens
gggatttcctcattcgtgatagtgaatcttcgctgtcaaagctcgaaaaacagcagcagaggaaagaaaagacca

SEQ ID NO: 680184 - DNA, 74 bp, Homo sapiens
gttgcggcgaaaggaacggctgaaggccctacgggagaaaaccgggcgcaaggagctgaagaagaagctgttca

SEQ ID NO: 680185 - DNA, 75 bp, Homo sapiens
acatccaggagagaatgctgacagtcctgcagatccgagcagttggcagactaaaaagagagcggtctatgagtg

SEQ ID NO: 680186 - DNA, 50 bp, Homo sapiens
ccctgcctctccctgggctctgctctctggcctgacaaccaatgttgtgg

SEQ ID NO: 680187 - DNA, 101 bp, Homo sapiens
gccaaggagaagagtaccaaggctgctagtgaacagcgacgtgagcaccactaggctggacagcgacagagtgtcgtctgcctctagcacagccgagcggg

SEQ ID NO: 680188 - DNA, 75 bp, Homo sapiens
gcgacccggatctcctggaagtgttggcggaggaagtttccaacatggctagatccatcagaaactgaagccgtg

SEQ ID NO: 680189 - DNA, 108 bp, Homo sapiens
aggcgcggagggaagacgccctggtgctcaccaagcaagtgctgttaacaaagatagacacttttcttgcgaagactgtaatggaaatgtcagtggaggttttgatgc

SEQ ID NO: 680190 - DNA, 50 bp, Homo sapiens
cttggtgaagagttactagctcaagctgggacgatgccggagtgtgaagg

SEQ ID NO: 680191 - DNA, 115 bp, Homo sapiens
cggggtcctcttctgcaaggtccggctgctggatggaggggattttgtcagcttgtcgtcaaggcagttccggcgaggggggagcctcagcaggattgctgtgtgaaaaccgagc

SEQ ID NO: 680192 - DNA, 85 bp, Homo sapiens
gggggtgtgcaaacccgagagaactggcatgattatgatatgagggtggatgatttccttcgtcgcacacaagctgttgtcagtg

SEQ ID NO: 680193 - DNA, 73 bp, Homo sapiens
tgagggccagagactgtccactgtctgacctctacctggagcgcctgctgctgtgtgtgcaggctctggtgtc

SEQ ID NO: 680194 - DNA, 83 bp, Homo sapiens
atttctgctccgtcatccatgccactctaatataatgccttcgtcgtctcatctctttggctcaatgccatggggaccatcgg

SEQ ID NO: 680195 - DNA, 75 bp, Homo sapiens
gtcaactggcccggcaccgagttctctctgtactaacattctgagagagcctgtgtgtttaggaggatgtgagca

SEQ ID NO: 680196 - DNA, 83 bp, Homo sapiens
cggagcgcgggtacagcttttcgctgactacattcagcaacgaagtaaacgaggaggttggtccaaaggaagaaagaggaaga

SEQ ID NO: 680197 - DNA, 90 bp, Homo sapiens
cttatcagcaggttgcaggtgaacatggccttgagtttcaccagtgatcattaaagaatgggcagcttacaaaggaaagtctcctcaaac

SEQ ID NO: 680198 - DNA, 100 bp, Homo sapiens
gctggtacccattggcaactgcctatgcaacgctgggcatgaggagcggagcggagaatgccaaggcggttcaggaccatcatcctccatagccatagcg

SEQ ID NO: 680199 - DNA, 75 bp, Homo sapiens
cccctttgaattaattatggctgcctccgaccagggagaccttccatcctcctccacctgttccacccagaggac

SEQ ID NO: 680200 - DNA, 76 bp, Homo sapiens
gctacggcggatttgacctgtacttcattttggacaaggttcaggataagtttgaggtgctgaattacacaagcat

SEQ ID NO: 680201 - DNA, 95 bp, Homo sapiens
ctgcaagatttggggaatctatagttaatcttggcgacattgacaatgatggctttgaagtgcccagcgcacccgtgatcgacctggctgagtcc

SEQ ID NO: 680202 - DNA, 119 bp, Homo sapiens
tgggcgcggccaggctggaggactagggcggtggcagtggccaggctgacaaacgggctcatcataatgcactggaacgaaaacgtagggaccacatcaaagacagctttcacagtttg

SEQ ID NO: 680203 - DNA, 100 bp, Homo sapiens
gaaagtgcgattgtggaagctgctcgggatgatgatgctgaagctatccttgctgcagacttcgaaattggtcactttttacgtgagcgtataatcccaa

SEQ ID NO: 680204 - DNA, 95 bp, Homo sapiens
agcgagtctcggagaagatgtggtggcttccgtttgttggtggaggaggtggcaggcctcggcgacgaggagaagaccttttcatgtgtatggac

SEQ ID NO: 680205 - DNA, 100 bp, Homo sapiens
tacctggaatgggatccgacacttggaacacaaggtgctactcacaggaacaccattgcaaaatactgtagaagaactgtttagcttgcttcatttcttg

SEQ ID NO: 680206 - DNA, 90 bp, Homo sapiens
ccgcgagcaccagagtcggcgtaactatcgcctgacagggtatctgaagtaaaagggggtcatcatcagatttgaaatatttaaagtgga

SEQ ID NO: 680207 - DNA, 83 bp, Homo sapiens
gccgtcaccgccgcggctccggccctggccccgatggctctgtgcaacggagactccaagggtttccaggcctgaggtgcccg

SEQ ID NO: 680208 - DNA, 88 bp, Homo sapiens
gtggacccgtgagcaagcataagctgccaaaccaagatgatgattattccccaccttctaagagacaaagaccaacgagccaccacag

SEQ ID NO: 680209 - DNA, 75 bp, Homo sapiens
cggggccgtggctgacatggagcaggccaccagcttgggctccccacggagggcagcaagtgggacttggggaac

SEQ ID NO: 680210 - DNA, 100 bp, Homo sapiens
tgctggacgacaactttgcctccatcgtcacaggggtggaggaggctgtcagccgccctgatgtttgacgccgtgcacgtggtggtgagcgctgtccgag

SEQ ID NO: 680211 - DNA, 95 bp, Homo sapiens
ctgcctgtggccattattaatctaaaagaatatgatccagatgatcatctgatagaagagatatcatgtttaggtattactacaaatgaaagaat

SEQ ID NO: 680212 - DNA, 89 bp, Homo sapiens
gaaactttagagaagacgttcatatcattgtcttccacagatgtgtcaccaaaccaggacagtcattttgtttactcattcagccctgt

SEQ ID NO: 680213 - DNA, 82 bp, Homo sapiens
agatcccaaacaactggcagaatttgctaggactcggtggcttttgaggatgtagatgtgaacttcacccaggaggagtggg

SEQ ID NO: 680214 - DNA, 93 bp, Homo sapiens
gtcggcagcaagaacagagagagaggtggacagatctgagagatactgaggttcttcagccacttcagcagcgattcttaagagtgataaacc

SEQ ID NO: 680215 - DNA, 82 bp, Homo sapiens
ccggtggaggaatttgtggctggctggatctctgcggaggatgaagaggatactatagcagctgaggaacagttggaagggg

SEQ ID NO: 680216 - DNA, 96 bp, Homo sapiens
acgcgcctggggaggctctggcccgggctccgcgtacttcctgttcagtctgatgatttgaagaagagaagagagcctcacatctccactttaagg

SEQ ID NO: 680217 - DNA, 75 bp, Homo sapiens
gatccattggtaaattgatcaggatttttggcctaccctccaaagaaaagatatctgtatgcccttggacagaag

SEQ ID NO: 680218 - DNA, 98 bp, Homo sapiens
ctttcttctagcaaatgcctgcaatggactagctctgctacagaacaccaaggtacatcaggaacgtctctatcaagaatacaatttcagcaaggctg

SEQ ID NO: 680219 - DNA, 100 bp, Homo sapiens
tgtttagtgcctgtcgaatgccccccagccaccagctcgaccacagcaagctcctgggaggcatttcatccttcatgaagccattcaggattttgaattg

SEQ ID NO: 680220 - DNA, 83 bp, Homo sapiens
cagtgatttgctccccctcgtgcagcaacccccacacccagcaccaggtttggtgcacctcgatttggaggaagtagggcagg

SEQ ID NO: 680221 - DNA, 82 bp, Homo sapiens
ccagccaatgatcttttcaatgctgcgaaagctgccaaaagtgacatgcaggatgctttggagtctgcaatgaagaatggcc

SEQ ID NO: 680222 - DNA, 50 bp, Homo sapiens
caaatatgtggacctgtacaaggttccaccccgatgcaggtggtcacgtg

SEQ ID NO: 680223 - DNA, 75 bp, Homo sapiens
aggaggacatgcaccaactcctccaactccagcgccaagaaccatgccgaccagcatctcagacatgtcgaaaaa

SEQ ID NO: 680224 - DNA, 111 bp, Homo sapiens
caaggatgtgaaagaggctgtcagaaagctggcttatcaggggatgtatggcattgagaatgaagtcttcctgagccttccatgtatcctcaatgcccggggattaaccag

SEQ ID NO: 680225 - DNA, 100 bp, Homo sapiens
aagcccacgaactggccaagagttacgggattccattcattgaaacctcagccaagaccagacagggctctagatcgggtgtgagtggtggctctcgaag

SEQ ID NO: 680226 - DNA, 100 bp, Homo sapiens
ccgactgctgcctggtctgcaaagaagtcctttcaagtctctaggactggactcttcctaagcaagtccggttggtcaaagaaaaagtgatgtatgaaaa

SEQ ID NO: 680227 - DNA, 100 bp, Homo sapiens
gcctttccgaaggttcctgagagctatgtagagacttcagccagtggaggtacaggtggtagatgcaagggctggacccagtctaaagactacattgaaa

SEQ ID NO: 680228 - DNA, 83 bp, Homo sapiens
ccagtggcggattacttcaagcagtggattaatctgaaaaaggtactccaaagattcaggtttactcacgtcatccagcagag

SEQ ID NO: 680229 - DNA, 83 bp, Homo sapiens
aagatggcgcctgttgtgacaggacctaatctgggagcctgcaagtgacaacagcctttgcggtccttagacagcttggcctg

SEQ ID NO: 680230 - DNA, 75 bp, Homo sapiens
tcttaagactcctggtattaccaacataaagaggtccgcaagcacatcaatgatctttatgaagatctgcgggat

SEQ ID NO: 680231 - DNA, 88 bp, Homo sapiens
cagattcgcagtggtcgcttcttctccttggctcatcggaacctgtcccagctccctaattttgccttctctgttccactggcgtatt

SEQ ID NO: 680232 - DNA, 100 bp, Homo sapiens
gcaaaggtcaccagtcccaagtcgtccccctctccgccccccaggaggggcgagagggagccgcagctgatgtcagctccctcagaggcccctgatgtct

SEQ ID NO: 680233 - DNA, 96 bp, Homo sapiens
cctggaatggctggaatgcctggactcaatgaaattcttagtgatccagaggttcttgcagccatgcagtctctcaagtcccgaggctacgtgaag

SEQ ID NO: 680234 - DNA, 96 bp, Homo sapiens
ggaagcagccgatccagcctgcggagcctgtggggcagatatcagttttagagaatgtggcgtggagaaattctcaaggaaagagtaaaatgctgg

SEQ ID NO: 680235 - DNA, 100 bp, Homo sapiens
ggctcctgcagctgcgatgcctgcccggttgaactcccaccacctgatcttggaccaagttctgcactaaatcagacactcatgttgctgcgtgaagttt

SEQ ID NO: 680236 - DNA, 74 bp, Homo sapiens
cccagcgttcccaaatcattcgctccaagttccgatctggtggtttcatggccccctgaacagggcggatgcag

SEQ ID NO: 680237 - DNA, 75 bp, Homo sapiens
aacagaagtgagacagctgaagcgtgttggggaaggagctgtaaagagaaacattaaccaggtggtatttgttgg

SEQ ID NO: 680238 - DNA, 100 bp, Homo sapiens
ctggttcaggggctggcattggaaccgtgtttggcagcttgatcattggctatgccaggaatcctcgtagcccactacctccagagcatcacgccttgcc

SEQ ID NO: 680239 - DNA, 100 bp, Homo sapiens
attgcattgactgggattccagtagcaattttcataactctggtgaatgtattcattggtcctgctgaaactgcccactctgcaagaagaaatcatgata

SEQ ID NO: 680240 - DNA, 88 bp, Homo sapiens
ccgatgaagtgcagaggtttttttctggcatagatcaagatcccgatcccgggagcgtcgttctcggtctagagaccgtggtcgtggc

SEQ ID NO: 680241 - DNA, 75 bp, Homo sapiens
caggcaggacgacagcagcagcagcacgtctccttcaggcccattgctagaagactgggacataatcagccccaa

SEQ ID NO: 680242 - DNA, 82 bp, Homo sapiens
tgtgatccattctcattaaataaatctctgggctaacagagaccctgatgctggaattgatgaagctcaagttgaacaagat

SEQ ID NO: 680243 - DNA, 78 bp, Homo sapiens
gccgtgaagcacctgcacatccacactccgctgctcgacaggaatctggtggacagtaacaaactttggtgaaatttc

SEQ ID NO: 680244 - DNA, 49 bp, Homo sapiens
gcggcgacctcatccacgccatgccaggagttaaactttgggatgtgcc

SEQ ID NO: 680245 - DNA, 100 bp, Homo sapiens
ccgcaaggccgcccgggaactgctgacgcttgatgagaaggacccacggcgtctgttcgaaggaggaataaacatggtgtgtctcgaaagaagattgctc

SEQ ID NO: 680246 - DNA, 82 bp, Homo sapiens
ttgcgtgccctacttcaaggataagggcgacagcaacagctctgccggctggaaggtgtggacactgccagcggctgcagcc

SEQ ID NO: 680247 - DNA, 74 bp, Homo sapiens
ccggggacttggggccgcagggaggtctcctctgagcctccggcctccataagacccaaaacagatgacacctc

SEQ ID NO: 680248 - DNA, 101 bp, Homo sapiens
ccaggaggggaagcgatggctgggcccgcgtggatctctaagactgcttttcaggaagccttggacgctgcaggtgataaacttgtagtagttgacttctc

SEQ ID NO: 680249 - DNA, 82 bp, Homo sapiens
caagatggtgttggaaagcactatggtgtgaaggaagaggcccagcagaagggactcgctgagccaccccccgccccactcc

SEQ ID NO: 680250 - DNA, 75 bp, Homo sapiens
accagccctcaggaggcgcccgggcctactgaacttgacgcactggtatttggccatctatacaccattcttacc

SEQ ID NO: 680251 - DNA, 97 bp, Homo sapiens
ggcggcccggacttcatggatcatccgtttgttgacaaggtgttggtgtgttaaacaatttattgtatgctgtaggaggtcatgatggccctttagt

SEQ ID NO: 680252 - DNA, 100 bp, Homo sapiens
tggagcttgaacccattgtcacccctccggtttccaatacttatctacaggaatcgccatgaccccagctctgagggaggcaacagcaaagggtatcagc

SEQ ID NO: 680253 - DNA, 74 bp, Homo sapiens
ttcacaaagattgcctgcagtttattggcctcgaccctgcaggccctttattcaacgggaaacctcaccaagac

SEQ ID NO: 680254 - DNA, 83 bp, Homo sapiens
ctggaggaggaggccatcatcatgaaggacgtgcccgactggaaggctgtggtccaaggccatttttgctggctataagcggg

SEQ ID NO: 680255 - DNA, 75 bp, Homo sapiens
ggaggattcagggaataggagctggggagcccttctgcgccacaggaggatcagctgatttattcggaggatttg

SEQ ID NO: 680256 - DNA, 74 bp, Homo sapiens
tcagtttctttgtcatgtagccaagactggagaaacaatgggaacgcccttttgcttgtgactggcagggctgc

SEQ ID NO: 680257 - DNA, 99 bp, Homo sapiens
gtgacagctgcctccaggtgtttgaatcgctgagcgatatcacagaacacaagattaatcaatgtcaactgacaggccggatacccagagctgtggctt

SEQ ID NO: 680258 - DNA, 50 bp, Homo sapiens
ctccccgacaggttaagcgagccgtgtgccccgagccagaaggttctcgt

SEQ ID NO: 680259 - DNA, 51 bp, Homo sapiens
gccagagttgattgtgatcagcactgtgtctgcctgtatcccagtgttcag

SEQ ID NO: 680260 - DNA, 90 bp, Homo sapiens
cgccggcgccgaacttgggctcgggaagccggcggaccgcgtcctgcgccggagcagatctgagtgggacatacttttgaaggatgtgca

SEQ ID NO: 680261 - DNA, 98 bp, Homo sapiens
tggggccttatttccactttgtaattccagcgagtcgacttcccatcctgagttgagtaaatgtgtcaaatactggcctgatgagtatgctctaaaag

SEQ ID NO: 680262 - DNA, 83 bp, Homo sapiens
tgaagagcgacaagccgctggcagccgcggatctcaccgccgctcaggtcacggacaagttcactgagagcgtctacgtcctg

SEQ ID NO: 680263 - DNA, 98 bp, Homo sapiens
gtttaatcagtgcaagcgaaattaagggaaaatggatgtagaaaatgagcagatactgaatgtaaaccctgcaggaactctaatgaatcattgattga

SEQ ID NO: 680264 - DNA, 100 bp, Homo sapiens
atcatgtctgcgagccaggattcccggggaacgcccttttgcttgtgactggcagggctgcgacaagaagttcgcccgctccgacgagctggcccgccac

SEQ ID NO: 680265 - DNA, 74 bp, Homo sapiens
gtgtctcgaccgcgtcttctgagtcaggtgaaatctgtgactgttgctgaaggactcatagaagaccattttga

SEQ ID NO: 680266 - DNA, 112 bp, Homo sapiens
agagatagagcgtttggaagatctggatacctgtatggtttttgatgccacaaacaccacccgagaacggagagcgaccatctttaattttggagaacagaatggctacaag

SEQ ID NO: 680267 - DNA, 88 bp, Homo sapiens
ggaatggagacgccattggatgttttgtccagggcagcatctctggtgcatgctgatgacgaaaaacccttgccaaactgaagcccga

SEQ ID NO: 680268 - DNA, 83 bp, Homo sapiens
ctcggccgcgcggactgaaggagactgaagtgcctccggagccagcgtggtggccatagacaacaagatcgaacaggccatgg

SEQ ID NO: 680269 - DNA, 100 bp, Homo sapiens
agaaaggagaacaccttatttcaggagcccagtttcctccaattgcagcacaagaccttccttttgttctaaaggctggctaccttgaaaaacgcagaaa

SEQ ID NO: 680270 - DNA, 100 bp, Homo sapiens
ctgctgtagaggatgtgcgcaaacaagactcaccccacacagaccgcgtttctctccagtgtcgacctacacactcactgctcttaccagatgatgttgc

SEQ ID NO: 680271 - DNA, 100 bp, Homo sapiens
acctgaaagaccccagttatggatgggaggcctcatgcattgtgcgtcagcagcaatgtttatggtgaaaaatggcaacgggaccgcgtgcataatggcc

SEQ ID NO: 680272 - DNA, 75 bp, Homo sapiens
agagaaggaacattccagaaactttgggacctctttgtttttagacatgaattggccataatgagactagcagcc

SEQ ID NO: 680273 - DNA, 82 bp, Homo sapiens
ccagctccgaaatcaccaccaagtgtgccgtgcaggtgaagctggagctggggcaccgcgcccaggtgaggaaaaaacccac

SEQ ID NO: 680274 - DNA, 80 bp, Homo sapiens
ccattggatttaaaagacagtcctcgtcagcactgactttcagctatggaatcgaccaaatacacgctgatcgatgagca

SEQ ID NO: 680275 - DNA, 100 bp, Homo sapiens
cggctcatcacctcctcactcgcctccgcgcagagagatccaaaattaacgggacaggctcttattccaggatcagtaatataccacaaacagtcacaaa

SEQ ID NO: 680276 - DNA, 75 bp, Homo sapiens
ccagcaagctgttcaatgaggagtactcccctgccctcaacaagatgttttgccaactggccaagacctgccctg

SEQ ID NO: 680277 - DNA, 90 bp, Homo sapiens
cgagttctcggtcaccatgtggtcctcaggtggcgacatgtctaagaatgtgagccagtcacagatggcaaaattgaaccaacaaatggc

SEQ ID NO: 680278 - DNA, 75 bp, Homo sapiens
caactacggggttggtgagagcttcacagtgcagcggcgaggcctgtgtcacttgtgaaaatgaagattcagctg

SEQ ID NO: 680279 - DNA, 71 bp, Homo sapiens
aaatctcgtggaacaagatggcgtgcttcatagcagtgggttgcatatgatatggctttcagttgatggcg

SEQ ID NO: 680280 - DNA, 88 bp, Homo sapiens
gcctcgcctgggttctggaggctgcggggccatcgctccagtcagtgaaaggggatggagggatcacccactcagaagaaataaatgg

SEQ ID NO: 680281 - DNA, 82 bp, Homo sapiens
gctaagaaggttcaaacaaatttgcaaatgatatacaacttctaaggttctctccataaatgaagaagggctaaggcgatgc

SEQ ID NO: 680282 - DNA, 100 bp, Homo sapiens
tttctgtggcatcctgaagttaatggttctatgaaacagtgtatcaaagtgtggactgaggatgaatcaactggagaaattacgttttacatgaagggag

SEQ ID NO: 680283 - DNA, 82 bp, Homo sapiens
gtgctgccagagagtctcacccgcatggggtgaagcgttcagcctccccagacgacgatgatattagaaatggctactcccc

SEQ ID NO: 680284 - DNA, 75 bp, Homo sapiens
aaactatcagtttttgcagacggacaaaaaagaacaggagaagtctgaacaccctactttggggataaaggatta

SEQ ID NO: 680285 - DNA, 100 bp, Homo sapiens
acggggaggacgcgccgcggccaggcagggaggagaccggcacccagacaggtggcgaaggcagaggagaaaaccagtgttctctggacatgaaaagcaa

SEQ ID NO: 680286 - DNA, 82 bp, Homo sapiens
cctggaagcccggagcctcagcgctcgcccctgctcctggagaagcgactggaggagtggttggggaggacattgcctggca

SEQ ID NO: 680287 - DNA, 97 bp, Homo sapiens
cctcaacaatgtttttgttcaacaggacatgatccacatcgcggacaccaaggtcgccaggcgttatggggatttcttcatccgtcagatccacaaa

SEQ ID NO: 680288 - DNA, 82 bp, Homo sapiens
gacctccgactactttctccttcaaggggttggccggagacctacgacatgaatacctcggagcccaagacggagcaggaaa

SEQ ID NO: 680289 - DNA, 98 bp, Homo sapiens
cctgacaccgtcgttcccagaacccagcgcgctctggtttccaggcctgaggtgcccgccctggccccaggagaatgaaccagccgcagaggatggcg

SEQ ID NO: 680290 - DNA, 95 bp, Homo sapiens
gacacttctgtggtgtgtagtgagtctctacttttatggaatcctgcaaagtgatgcctcagttgaggtactaaagaaaattgacattccatctg

SEQ ID NO: 680291 - DNA, 50 bp, Homo sapiens
ttctcctcttgtctacgtgctggacccgttccttgagggagcggctgcag

SEQ ID NO: 680292 - DNA, 82 bp, Homo sapiens
gactgagatcagaggccctgtgatgatcgtgtcaggtacaccagaggatcgcttcctggcagaatttgggagctgtttattg

SEQ ID NO: 680293 - DNA, 82 bp, Homo sapiens
gcacagcatttatcctggagaagagctctattatcaagtcctaaattttggaatgattgtctcatcggcactaatgatctgg

SEQ ID NO: 680294 - DNA, 74 bp, Homo sapiens
ctcgaaaattccttgatacctctcactattctactgctggaagctcaagtggtgatctgggctcttgggatctg

SEQ ID NO: 680295 - DNA, 50 bp, Homo sapiens
gttctgatgtcgtgcccatgacagcaggatgcttggatattaattcatct

SEQ ID NO: 680296 - DNA, 82 bp, Homo sapiens
gccctctaagaggcagatgcaggtttgggccccatggtatccctgtgacagtatttcccaaaagggaatataaggataaacc

SEQ ID NO: 680297 - DNA, 101 bp, Homo sapiens
tgtctcagcctctcaagtacctggaattacagacctcagttggatgaacccattccactgtatgaggcaaaagtttccatggaagctgttcagaaaaatca

SEQ ID NO: 680298 - DNA, 83 bp, Homo sapiens
ttcagaattgcaattccaaaatgtgtaagacgggatattctcttctgtgctgtcaagggatagtgaatgagagccgacaggta

SEQ ID NO: 680299 - DNA, 60 bp, Homo sapiens
ccactccttcctccgagggctgtttgggtcatgcaagacaagataatctgccttccgaaa

SEQ ID NO: 680300 - DNA, 90 bp, Homo sapiens
cagagcagccacgatgatgattctagcaggttcctgagtcctcgagcgcgggaagaaagctgctgtgacttactcgaagcctcgattggc

SEQ ID NO: 680301 - DNA, 80 bp, Homo sapiens
caagcgcttcagcctcgttctctgtgagctgatctgtggatcgcggcgtgtcggagacagcctggagctgttgcccaaag

SEQ ID NO: 680302 - DNA, 98 bp, Homo sapiens
tcctgaggaacttggctaggctggccccgagcggaaccagagaatgctgaggtacctgatggagggcagctacaacaaagtgttcctggccaagggta

SEQ ID NO: 680303 - DNA, 99 bp, Homo sapiens
cggctggaggtgggatccacacagctcagaacagctggatcttgctcacactctttcaagagaagcttccttgataggaaccaaggctttagccttctc

SEQ ID NO: 680304 - DNA, 98 bp, Homo sapiens
tgaggaaggaccagcgggacgcctgcatcaaggaggccattctcttgctcatcatactggctagtggtggaccccaagctttagtaaatataatgagg

SEQ ID NO: 680305 - DNA, 100 bp, Homo sapiens
attggtgctcgtttggaggcactggactacttacaaaaatgggaatgaaagctactggttgattttaaagtgcctgggcctcacaggtttggagatgtcc

SEQ ID NO: 680306 - DNA, 90 bp, Homo sapiens
ccgggcagtcccatgcccaggtcacgtggcacaagcgtgggggcagcctccctgtccggcaccagacccccgccagcaactggccaccag

SEQ ID NO: 680307 - DNA, 100 bp, Homo sapiens
cagcctccaaaagtgctggcattacagaccgagacatgggtgcccggcaccgcgcccgagcccactccattcagatcatgaaggtggaggagatcgcggc

SEQ ID NO: 680308 - DNA, 75 bp, Homo sapiens
cctgggagcacatccatttcattggcaagggtgggctgaaaaacagcaaacatgaatgcaccctgtcttcacaag

SEQ ID NO: 680309 - DNA, 75 bp, Homo sapiens
cctggttcttccaaagtgcccggacccaaaacaggaaagaggtgcaacggaagccagaacattcctcctggaaat

SEQ ID NO: 680310 - DNA, 82 bp, Homo sapiens
gcctggctaactcctgccaggcagtgcccttcccggagcgtgccctcgccgctggttgaaatcacaaagattagacaccttt

SEQ ID NO: 680311 - DNA, 90 bp, Homo sapiens
catatactgcttacctcattgaaacaagatcacatgtacatgaagacaatggaaagttatttccttcatccagtctacaaatacccaagg

SEQ ID NO: 680312 - DNA, 74 bp, Homo sapiens
gcgagagcggccccatgggcaacatcatggccaagtccaggggcgtggaggccgcccgggagcggatgttcaat

SEQ ID NO: 680313 - DNA, 90 bp, Homo sapiens
gaggaactcgtgaaaagcaagatggatggcgtcctaaagggctgttagttgcccatcttcatgagcataaatctgctgtgaatcgaatta

SEQ ID NO: 680314 - DNA, 75 bp, Homo sapiens
ccctcgtgtcccagatgaggcaggagctcatcgatctccggggaccggaatcccttggcaccatgtcctgtgtgc

SEQ ID NO: 680315 - DNA, 82 bp, Homo sapiens
cagacttcgtgctgatggacaccgtctccatgcccgagttcatggccaacctcaggctcagaagtccattggaatattaagc

SEQ ID NO: 680316 - DNA, 141 bp, Homo sapiens
ataagagtcaaaacaaataagttatgctatgaggatgacaaactctggagtaattggagccaagaaatgagtataggtctacctgcaagtcggatttcccaggttattgttggagatgagcggcagcaatacctcttggtg

SEQ ID NO: 680317 - DNA, 75 bp, Homo sapiens
caccagcaaccatgagtggttccatgatgggaagtgacatgcttaagagttggacagtggaggaccttcagaaga

SEQ ID NO: 680318 - DNA, 101 bp, Homo sapiens
atgactttgaatgggtgcatgttagtgctcaagagcctcattatctaccacccgagatgccccaaggactcagaaggtgtggacatcaagctgggcgtgtg

SEQ ID NO: 680319 - DNA, 80 bp, Homo sapiens
gggcgaagtggaagcagagagcccgggccctgtgccgaacctaaaggcagacccagaagagctttttacaaaactagaga

SEQ ID NO: 680320 - DNA, 80 bp, Homo sapiens
cggggctctccgaggagccgcacgccggcggcaccatggtccacctcagtgctggagaatctggtaaaagcaccattgtg

SEQ ID NO: 680321 - DNA, 83 bp, Homo sapiens
cttacgtgtactttaccaacgagctgaagcaggtgatcgaggaaacatctcaacatcttctaaaccagcctctacatcaggaa

SEQ ID NO: 680322 - DNA, 83 bp, Homo sapiens
gggatttcaacctgaaagtggaggctgcgaaaataggtacggtggttgaggagagcaatggttctgatgagatggagaattca

SEQ ID NO: 680323 - DNA, 100 bp, Homo sapiens
aacaatgagatcgtggacaagatcatgggcaaaggacagatccaggaatgtctgatcacagatacggggatggtggctctactttccagagcacaacagg

SEQ ID NO: 680324 - DNA, 100 bp, Homo sapiens
tcctcgtggaatttgaagattctacagataaatcagcaccttatgaagctaggcagccccttgtccagcccgagggatcctcatcagggggcccaggaac

SEQ ID NO: 680325 - DNA, 100 bp, Homo sapiens
cttagttttctagcagccagaggggtaaatgttcaaggtctatctgctgaagggttatttatgtccaaatgaatttattgctactcaaggtccactacca

SEQ ID NO: 680326 - DNA, 80 bp, Homo sapiens
cgcgagtgggagcaccaggatctcgggctcggaacgagactgcacggagcttcagtttcagcgactcacccgagaactgg

SEQ ID NO: 680327 - DNA, 100 bp, Homo sapiens
tccctggcagagttttctagtccctcttacttgaagcatgtctttcagagcccggcaccacccatcttgagtatctggcaggccagaaagcagacccagg

SEQ ID NO: 680328 - DNA, 100 bp, Homo sapiens
ggacgaagtgctcggcggcatgtctgaagatgatgagaaactgaaaaagaggaaggagcgatttgggattgtcacaagttcagctggaactggaaccaca

SEQ ID NO: 680329 - DNA, 100 bp, Homo sapiens
gaggggagccggaggaggatgctcctgcctcccagagaggggagccggcgaggatcaaaatcttcgaaggaggaccaccatcatggcagtggagtttgac

SEQ ID NO: 680330 - DNA, 98 bp, Homo sapiens
aacaacagaatgaagacttgaggcgaatggccgaatctctccggaaaacggacgatgtattactaagctggaaaacatggggtttcgagtgggacaag

SEQ ID NO: 680331 - DNA, 100 bp, Homo sapiens
acaagatgtccgccagagctgcggccgccaagcttgcattcacaagagatgggctctgtggtctgtggaatgaaatggttaaagatggagaaattgtata

SEQ ID NO: 680332 - DNA, 83 bp, Homo sapiens
cttcagaacagagccaatggcttggaatgaggtctctaattaacagaagatggcaaagcccagccacagcagctatgtccttc

SEQ ID NO: 680333 - DNA, 99 bp, Homo sapiens
gccaccccttctctgctgtctccttctcttcctcagggctcccgtgtctgctcgccctccgacgctgctcaggtcgcaatggaagaagagatcgccgcg

SEQ ID NO: 680334 - DNA, 95 bp, Homo sapiens
cacctcactcggctcattcagaacagcaagggcaaggtcaccttccccaatggcttcaccctggagggctcgttcggcagtggggcagggagagg

SEQ ID NO: 680335 - DNA, 99 bp, Homo sapiens
tcactttccagcagtccagcacggccaagtcagccacctggacggttcctctacctggcatgaaatgggtagataatcacaaaggtgtttttaatgttg

SEQ ID NO: 680336 - DNA, 96 bp, Homo sapiens
gggcgggggcaccgagggctaccacgttctgcggaaaagcacttggttctgcttcgagatggaaggacacttataggctttttaagaagcattgat

SEQ ID NO: 680337 - DNA, 83 bp, Homo sapiens
agcagcaggatcagatggtactgaactttttgatcaggtttactcctggcttgggggcattaggaagcactggaggctcttcg

SEQ ID NO: 680338 - DNA, 100 bp, Homo sapiens
aaaacaaaaatgaatgaatcaagagtgatttgttaatgtcccaatattgaagcccatggatcttatggtagaagcgagtccacggcgaatttttgcaaat

SEQ ID NO: 680339 - DNA, 83 bp, Homo sapiens
cacgaggctgccgttcagcacccgtcgagcgctactgcagcactggggtgtcagttgttggtccgacccagaacgcttcagtt

SEQ ID NO: 680340 - DNA, 124 bp, Homo sapiens
atgttcaagcaatgagcaactgttgtcaagatatgacaagtcgcctacaggtctacttccccagcaggacagcatcattctcctatatcttctagacatcactcatcttcctcacaatcaggat

SEQ ID NO: 680341 - DNA, 98 bp, Homo sapiens
gaggggatgcagttatgggctctgtcgccgtggtattaattttaaagacccacagtttgctgaagattacatttttaaagctgtaatgcttccaggag

SEQ ID NO: 680342 - DNA, 100 bp, Homo sapiens
gcctcctgagtagccgggactacagattggatgactgattattggacagaatggcatcttgtcaacacctgcggtctcctgcattatcaggaagatcaag

SEQ ID NO: 680343 - DNA, 90 bp, Homo sapiens
caggaggatgaagctgctgctgggcatcgccttgctggcctacgtcgcctttccagatttcggaaggttcacgagtgttgccgacacgcc

SEQ ID NO: 680344 - DNA, 75 bp, Homo sapiens
gcagaagaattcctcaatgcagtcttttatagaaaagaatcgagagctccagatcatgagaaagctagatcactg

SEQ ID NO: 680345 - DNA, 74 bp, Homo sapiens
caggacccgcgtgtcgcccctcagcagttctcttcaagaaaatgaggaggaggagattgggaacctagagcttg

SEQ ID NO: 680346 - DNA, 74 bp, Homo sapiens
gcagatgctggtacttgggccaaggctgcaatcagtgattcagccgactgccctggggctggatggtgagattg

SEQ ID NO: 680347 - DNA, 82 bp, Homo sapiens
ctctgatcgccgggaacccttgccgctgctgtcctgcgaccccaagcagggagtgcatccgccccaacccttttccccctcg

SEQ ID NO: 680348 - DNA, 101 bp, Homo sapiens
cgtctgccgctgccaccggcgcgcccgagagtcagagtcagaagcaaaggtagatggagagactgcatcggacagtgagagccgggcagaatccgcacccc

SEQ ID NO: 680349 - DNA, 74 bp, Homo sapiens
ggaaacttcagatacgaaatatcccgcctcatttacagtgggaggtgaccaaagccacgtaatgtccgtagttc

SEQ ID NO: 680350 - DNA, 90 bp, Homo sapiens
ctctagtaacccgcgaaatgatgggatagcgttgcaaatccttaaaagagtcttaacggtatggtgacatggtgccaaaaaccatagcag

SEQ ID NO: 680351 - DNA, 97 bp, Homo sapiens
aattcctcctcccccgccacccccacctggtcctcctccacctcccacatttcatcaggccgtcgctttcgggttctctcatcgcttcgtcgttcgc

SEQ ID NO: 680352 - DNA, 89 bp, Homo sapiens
gattttaggcggtatcaaatggaaagtttttccaaatattcatctgtacagtcactgtgtgcccagtattctgcagacaaacgagaaga

SEQ ID NO: 680353 - DNA, 82 bp, Homo sapiens
gtgaccatgtggattcaacagcttttaggactcagaatgagtctgcaggtcttaaacgacaaaaatgtcagcaatgaaaaaa

SEQ ID NO: 680354 - DNA, 98 bp, Homo sapiens
taggtctcaaggcaagcctattgagttaacacctctgccgctgctaaaagagaaagcatgggattatggcaaccacagaatctcagtagtacaagttc

SEQ ID NO: 680355 - DNA, 50 bp, Homo sapiens
atgttttagctacaaacatttatctaaggctacagatgcacatgttgaat

SEQ ID NO: 680356 - DNA, 74 bp, Homo sapiens
aaatgccaaaggaattggttatccaggttgaagatgacagcgatgcagagacctatggagaagagaatgatgaa

SEQ ID NO: 680357 - DNA, 90 bp, Homo sapiens
gtctccgtacaccaaaaactcaggcttcgccacctgcgtgcaaagtacaagaaaattccccaggacacagagctggtttggagcctttct

SEQ ID NO: 680358 - DNA, 75 bp, Homo sapiens
tttgtgtccattgatctcttggagcagctggggatcatggcagaagctcctcctggggtagagacagatcttatt

SEQ ID NO: 680359 - DNA, 90 bp, Homo sapiens
gccggcccttgttaactacaacagaccatctgggtgccttcaccagggatggaagaggcaggctgcagcagagagatgcagagttctttc

SEQ ID NO: 680360 - DNA, 75 bp, Homo sapiens
tactttagccctttaccgtttagttaaagggcagattttgatgaatgtcactctaatccctgtcgtaatggagcc

SEQ ID NO: 680361 - DNA, 98 bp, Homo sapiens
aaaggacactgccaaccttgataagatggcttcggagggaatgagtacaaaattggacagctgtacatgatcagcaaacacagccatgaacagagtga

SEQ ID NO: 680362 - DNA, 100 bp, Homo sapiens
cttccgctcagtcctcggcgcccgcctgccgcctccggagcgcctgtgtggtgatggaatggggagaagatattaaagcagtttcaaaagatgaagcagt

SEQ ID NO: 680363 - DNA, 75 bp, Homo sapiens
caccctggaagccaggaaatgaatgattacggacctgaagccaaagaacaagatgcgctagtggacagattgctg

SEQ ID NO: 680364 - DNA, 90 bp, Homo sapiens
gtccgctggacaagcacgagggcgcgctcgagacgctcctgagggctgaaaacacagttaaatcactttcaaagttaaaagactattaag

SEQ ID NO: 680365 - DNA, 100 bp, Homo sapiens
cattttccctctactgctggaaaagaaggctcaagaggaagaatccagggtttctatcttactaaaggatatttcagaaaatctatattcactgaggagg

SEQ ID NO: 680366 - DNA, 75 bp, Homo sapiens
aaaccgctctggtcacaccaatactgttgcagattggaacgaagagctctagaaagaagaatatctgaaatggaa

SEQ ID NO: 680367 - DNA, 74 bp, Homo sapiens
aaaatggcattcctatgaagaaagcacgaaatgatgaatatgaggatcttgaagcagcctatcacattacagat

SEQ ID NO: 680368 - DNA, 88 bp, Homo sapiens
gcaggcttctctctgcgctacgagatcttcaagacaggttgaagaagcctcagcggaggcgatacggcctcctcgccaacactgagga

SEQ ID NO: 680369 - DNA, 89 bp, Homo sapiens
gtttctcaggcagcggcagcgcccccggcaggcgcggtggcggtggcgcgcagccagttttcggctttgtgagaaaccttaccatcaaa

SEQ ID NO: 680370 - DNA, 113 bp, Homo sapiens
tcagatcgagaaaatgaccgcaatctctgccagcaccttgggaagagaaagaaaatgccgaaggcactcagacaggttctgacaacaaaggagattgtgacatattgctgggc

SEQ ID NO: 680371 - DNA, 108 bp, Homo sapiens
ggcggatcaggatcggaagcctgcgtaactttctcccttgatccgggagtctttccactgggtgatgcagaagatggggaagaatatgatgacccttttgctgggcct

SEQ ID NO: 680372 - DNA, 75 bp, Homo sapiens
cccgcaccaagctctgctccacactgccaaccggccagaggacgagtgtgggaaggtgctgagctactggtgctt

SEQ ID NO: 680373 - DNA, 74 bp, Homo sapiens
tcgtcgacatgagtgatgtggaggaaaacaacttcgagggcagagaatgttttaaaggaagttgggctactcac

SEQ ID NO: 680374 - DNA, 76 bp, Homo sapiens
gtctactgtgttaaaggaattttagtgccagtgggcaagtcctgggccgacgctgctttgaggcccggatctgtgc

SEQ ID NO: 680375 - DNA, 88 bp, Homo sapiens
tgtaggcgacaggccgctgacggccggaaggaaaatggttcttgattattacagacctctttctgaaaagcccggaattggtacaagc

SEQ ID NO: 680376 - DNA, 83 bp, Homo sapiens
gatttggtattggaagaatgaatctggcacatggattcagtatggagaagaggtttttcgttggaatatacgttgcacattta

SEQ ID NO: 680377 - DNA, 74 bp, Homo sapiens
aaggtgaagcaggcggccaaggagaagtcactattccaggtcctcaggatatagccgtgacctaaacacagaaa

SEQ ID NO: 680378 - DNA, 98 bp, Homo sapiens
atgggcgcgaacaatggcaaacagtacggcagtgagggagcccgagcggcagtacatgcacattggcaccatggtggagtttgcttttgccctggtag

SEQ ID NO: 680379 - DNA, 90 bp, Homo sapiens
ggaggccggccggtgccagcacctttcggcttctgagacggcggcagcagcggcattcagaccattcctcaagaattttgtatccaaggc

SEQ ID NO: 680380 - DNA, 75 bp, Homo sapiens
caatgacttcttgcatggatccgagaaggttcatgtgtgcccagctccctaatcaggtcctggagagcatcagca

SEQ ID NO: 680381 - DNA, 83 bp, Homo sapiens
atctattcaagcaaaaatatggggaagccttgggcaggtgactgcaaggagcctgacaagtgctgctggagacacaagcagtg

SEQ ID NO: 680382 - DNA, 82 bp, Homo sapiens
gggagcgcaaggtcgccctcaaggccatgatcaaaacgacgcgctccaggagatatataatcagaagggcatgtttccaggg

SEQ ID NO: 680383 - DNA, 75 bp, Homo sapiens
ctccaggaccactatattttctccagaaggtccagatggctgtggaggccaagtttgtccaggacaccctgaaag

SEQ ID NO: 680384 - DNA, 100 bp, Homo sapiens
ggaaggaggcgtcttggcccgggcagcagtggcggcagcgcccgagagagatcaccttctatgaggacagggccttccagggccgcagctacgaaaccac

SEQ ID NO: 680385 - DNA, 50 bp, Homo sapiens
aggacgtcaacctgcgggtcatctcgaggaggaagaaggtgggaaaggtg

SEQ ID NO: 680386 - DNA, 100 bp, Homo sapiens
cctctcgggatgacaccactctgaatgcactgaacacagtattgttgcagcatctggcagtgagactgaggatgaggacagcatggacattcccttggac

SEQ ID NO: 680387 - DNA, 100 bp, Homo sapiens
tgaggcctgagacacaggaccagtggaattcggtgcgatctgtaagtcgttgtcgaagcaggagtttaagtcccatttgcccccgtagccaaattggttt

SEQ ID NO: 680388 - DNA, 100 bp, Homo sapiens
ctgcttcctgactcgctctactccgtggaagcacgctcacaaagatactagagtaaaaggatggtttcttctggacaattatatacccacatttatctgc

SEQ ID NO: 680389 - DNA, 83 bp, Homo sapiens
ctcgggtctcgggggccgctctgggatcccggccaccagcaattgtccgcttcgagagctgtgcccaggagtgaacaaccagc

SEQ ID NO: 680390 - DNA, 76 bp, Homo sapiens
cttagctgtgctcgcgctactctctctttctggcctggaggctatccagcagtcctttgggcagaactatccagag

SEQ ID NO: 680391 - DNA, 82 bp, Homo sapiens
agctggctaagctcatcattgttactgcactggccatgggcctctgtgtcgccatgatcgcctttgtccgcctgccgagcct

SEQ ID NO: 680392 - DNA, 75 bp, Homo sapiens
ggagcctcagttggaagcagccgatccagcctgcggagcctgtggggcagatcatgtatcagttggaggacttgg

SEQ ID NO: 680393 - DNA, 97 bp, Homo sapiens
ggcagagcaaagactccagtaacactcaagcaaagaagagttgagcacaatcagctaaaagatggcggcaaggcagcccaggcaaatgtaagaatag

SEQ ID NO: 680394 - DNA, 95 bp, Homo sapiens
agttcggctccgccatgccggccgccgggagtaacgagccggacggcgtcctcagctatcagacttcctctgctaaattacctcgctgccgacag

SEQ ID NO: 680395 - DNA, 75 bp, Homo sapiens
cactattccaaccaagaagagccagttccaggttcctgtaatacttacctcacaggctaatgctcctctgttggc

SEQ ID NO: 680396 - DNA, 83 bp, Homo sapiens
atttagagactgaaatcactgcaccttaaaaacaaaagattgagctgcactgtattcctcttgcattgaaaggctctagttac

SEQ ID NO: 680397 - DNA, 75 bp, Homo sapiens
ttcgcagtggtcgcttcttctccttgagtcttgctttgtcgcccaggttggagtgcagtggcacgatctcggctc

SEQ ID NO: 680398 - DNA, 75 bp, Homo sapiens
ccgaggtagaggcagtggcgcttgagttggtcgggggcagcggcagggcagctcagttctggcaccaaaccaaat

SEQ ID NO: 680399 - DNA, 74 bp, Homo sapiens
tgagtccctgagggacaaagtactccagctacagaaggggagcacctacaggacttgggctgcttcaggctgaa

SEQ ID NO: 680400 - DNA, 74 bp, Homo sapiens
cgacaagccgctggcagccgcggatctcaccgccgctcaggggctcttccgtgggcggcggcttcgcgggcttg

SEQ ID NO: 680401 - DNA, 100 bp, Homo sapiens
cctcttcctcgttagaagaaatcaggataacaaaggcatattgggcacccctacaaaaggtattttcatctcagcctagtgacgatgaatcaagtagtga

SEQ ID NO: 680402 - DNA, 50 bp, Homo sapiens
ccaaattcgcctccatctgtaccatggttatcctaccttgcggatagaga

SEQ ID NO: 680403 - DNA, 101 bp, Homo sapiens
gccaagagttcaaactcaacaatattatccccatgtctctctgctccctggtgtgtaagtggacatattcagcagagaaaggctgggacgacagtttctgg

SEQ ID NO: 680404 - DNA, 90 bp, Homo sapiens
gtcagccctgagtgccccgagggcagcggcaatgtgagctacgtgaagacgtctccattaacaccttccaccatgaccacctcagcaagt

SEQ ID NO: 680405 - DNA, 80 bp, Homo sapiens
aggcgacccgtactgggcctactctgcgtcgagggcgaggcccccagcagtgagactggcacatccctggacagcccctc

SEQ ID NO: 680406 - DNA, 82 bp, Homo sapiens
ctccgcccggcagccaccccatctgggaatggcttgattaaactggcatcccagaatttttcctatggagttactgaaatgt

SEQ ID NO: 680407 - DNA, 87 bp, Homo sapiens
gctggaagatctcatgatgttcaaccattcacttacactccagacccagtcaagttcatccgagaagtaacaccatatatcaagaag

SEQ ID NO: 680408 - DNA, 101 bp, Homo sapiens
aagccactggagcagaaggtggggaggataaaatttggagcaagattctcaaggaagcaacaagatcctaaggtttcctatcctgggagcaggagagtgtg

SEQ ID NO: 680409 - DNA, 50 bp, Homo sapiens
gaacaaattgcagttgtttgaggtggataatattaatgcagctgtgatgg

SEQ ID NO: 680410 - DNA, 100 bp, Homo sapiens
gctaattacaactttcggggcatgtacaatcagaggcagacagtccagaagacatgcacagctggattaaggagattggcgcagctgtccaggccctcaa

SEQ ID NO: 680411 - DNA, 90 bp, Homo sapiens
tgggcatgatccataatcggtttcaagcccaatccctccaacaagctggccattgttcacatcttggggcttctctccaacctcttcacc

SEQ ID NO: 680412 - DNA, 74 bp, Homo sapiens
cagaagcatctgaagaccatggatcacaaccggaaccgcagggcattgaagttgatatcgatgtggagcacgga

SEQ ID NO: 680413 - DNA, 75 bp, Homo sapiens
tgctcagtcattaggggtttcgagtttgaatagtgaacccagcttagactagaaagtctagaagacacacacata

SEQ ID NO: 680414 - DNA, 96 bp, Homo sapiens
gatgaagattcaccaaataagctatatactttggttacctatgtacctgttaccactttcaaaagaaggatctgagtctctccctgcggagacagc

SEQ ID NO: 680415 - DNA, 82 bp, Homo sapiens
ttcaggcaatttccctgagaaccgtttacttccagaagattggtggagcttgatctgaagtgttttaaccaaacagttgtgg

SEQ ID NO: 680416 - DNA, 48 bp, Homo sapiens
cccttctggaccaagacgactcctacgaacctcaagaaggcatgaagc

SEQ ID NO: 680417 - DNA, 88 bp, Homo sapiens
cagttctttacagaaaacacctgtttggaaaggcaggaatacaagctctgctgtggaaatgtcgcccatgtttgatggaaaagtccca

SEQ ID NO: 680418 - DNA, 99 bp, Homo sapiens
acaagacagagctggcctggagtccgcggctggccgcgtgagtaggcaacagatgccctttatgaggtgtttttgggaaacaggcttcgagcagctacg

SEQ ID NO: 680419 - DNA, 75 bp, Homo sapiens
gccgcaccaggtcttgtagcagcgcctcctcgaaactgcttggaaactccctgctgaaactggaaggtgatgacc

SEQ ID NO: 680420 - DNA, 100 bp, Homo sapiens
gaatcagattcacctcatgctgttactgtatatatgctagagcctcactcctgtcaatatattcttgggtttgcagtgttgatgtgggtatttacctatg

SEQ ID NO: 680421 - DNA, 75 bp, Homo sapiens
ctcggcgtcgcgcggcgtgccctgcttgtcacagggtgataaaagaaaatgtggctgaagttacccgaagttcag

SEQ ID NO: 680422 - DNA, 101 bp, Homo sapiens
ccgcagtatcatgctggccaagaagatcatcattaaggacggaggcacggtgcccttgctcgtgtgaatgaacagaggccagagaattgcagaaacccacc

SEQ ID NO: 680423 - DNA, 83 bp, Homo sapiens
aacagaagatttgctctatgatcgtgataaaggaggatcaactttttgtggcattgcctcactatgtctgatgggtaaactag

SEQ ID NO: 680424 - DNA, 76 bp, Homo sapiens
ctgaataagcactacaatctggagaccacagtcccacagggtacagccaaagaccggagctttggagagatgaagt

SEQ ID NO: 680425 - DNA, 82 bp, Homo sapiens
gatgaagccaccagcgctttggatgccgagagcgagtatctgagttaaacatgaagtttctggagagacagtggtatttcaa

SEQ ID NO: 680426 - DNA, 89 bp, Homo sapiens
atttaaagctgagctgcgaggaaaatggcggcgggagggatccaggtccggcacgatcaagacccaggctacatgcatcacaagtttgc

SEQ ID NO: 680427 - DNA, 90 bp, Homo sapiens
gtccggctgctggatggaggggattttgtcagcttgtcgtcaaggttaccccacagcctatccagcagctgcccctgcctacaatcccag

SEQ ID NO: 680428 - DNA, 100 bp, Homo sapiens
gcggagagagaggtggagtccggcccccgaaagaggatccctgggtatcagtatgtgtcacctgaaggcaattgtatagaacatgttcagcctacttctg

SEQ ID NO: 680429 - DNA, 97 bp, Homo sapiens
tttgttcaagactgggcttccaccgagcagaaaatatttacaccagcagctccagttcataccaataaagaagatcctgctacccaaactaatttgg

SEQ ID NO: 680430 - DNA, 100 bp, Homo sapiens
ctggacagttccatgtataccatgtccatgaaggaggtgggtgatggcttacaggatcagatgaactgcatgatgggtgcactgcaagaactgaagctcc

SEQ ID NO: 680431 - DNA, 75 bp, Homo sapiens
gtggctgtggagaaggcgctccggggcgaagcaggagggctgtcggtggcggtgcctggggagatccgaggctat

SEQ ID NO: 680432 - DNA, 51 bp, Homo sapiens
atatgttttccatcttaatgaaggtatcagaagagcaaggtcaagaaaacc

SEQ ID NO: 680433 - DNA, 143 bp, Homo sapiens
gggaaagcggcgagtaagatggaagatgaggaggtcgctgagagctgggaagaggcggcagacagcgggtgctcctgcgggaagaagtgtcgcggctccaggaggaagttcaccttctccggcagatgaaggagatgttggcg

SEQ ID NO: 680434 - DNA, 83 bp, Homo sapiens
cagaacaagctgaaaagccgagagacttaacacctgacaatgcagatcttcgtgaagactctgactggtaagaccatcaccct

SEQ ID NO: 680435 - DNA, 80 bp, Homo sapiens
cgggccaggaagcgcatccaggagtggccacagatgtctttaattccaaaaacctggccgttcaggcacaaaagaagatc

SEQ ID NO: 680436 - DNA, 90 bp, Homo sapiens
atgggcacaggcagtgtctggaattggaacggaaaacagttcttccttcaaagcatgcagtacctgaagtaatagaagactttctctgca

SEQ ID NO: 680437 - DNA, 75 bp, Homo sapiens
gctgctattgaaagagagtatgcacagcttccagtggtgtctgtagtgagagaaacagagtcccagttactgcca

SEQ ID NO: 680438 - DNA, 75 bp, Homo sapiens
gaagaatggcttcacatgtatgctcatcggggagatctttgagctcattgtgaacgtggcatcactgacacaatc

SEQ ID NO: 680439 - DNA, 73 bp, Homo sapiens
tgcctccattcccgggaggggggagcggcgttggaggccaccgtttccagattaccagagactgatgactgtg

SEQ ID NO: 680440 - DNA, 75 bp, Homo sapiens
aagtgaaaaccaaactgatctctctgggttggcttcaggcgcagcccagcctcgaaatgcagaacgacgccggcg

SEQ ID NO: 680441 - DNA, 101 bp, Homo sapiens
tgatcgggatcagcattggaggaggggcccagtactgtccctgcctctatatcgtccaggggatatcattttcaatgcccaatacccagaactgcctcccg

SEQ ID NO: 680442 - DNA, 98 bp, Homo sapiens
atggactcgagtgtaccgagtacagagagtctccgggaccattatggcagtcaagtggacgggtgggcattcttctcctgtcctctgcctgaatgcaa

SEQ ID NO: 680443 - DNA, 82 bp, Homo sapiens
ccgcctctccttgctgcagccatggacccgcggcgccatggctcacgtcggctcccgcaagcgctcgaggagtcgcagccgg

SEQ ID NO: 680444 - DNA, 118 bp, Homo sapiens
gctagagaccctacagaccaggcactccgtcagtgagatggcctccaacaaggtggtatcacggaaaacttgacagaacgatagcagaagaacgcctcaggcaggcagggaagtctgg

SEQ ID NO: 680445 - DNA, 82 bp, Homo sapiens
ggcgccccagccggccgcgatcgcgggcatcccagccatcactcttccacctgctccttagagaagggaagatgagtgagtc

SEQ ID NO: 680446 - DNA, 101 bp, Homo sapiens
taggaacatggcggatcggctcacgcagcttcaggacgctgtgaattcggagaaggtaaagcttgatgctgaaagggaaaaactagagaggcttcaggagc

SEQ ID NO: 680447 - DNA, 74 bp, Homo sapiens
gagaaggacccacggcgtctgttcgaagcagatgctacatttatgtgtgacaagcggtgtaacaagaaacggtt

SEQ ID NO: 680448 - DNA, 75 bp, Homo sapiens
cctgaagacatttcctctcctcccctctggatttctcagagcctcttagcaaatatccggctgtgatcaatgata

SEQ ID NO: 680449 - DNA, 98 bp, Homo sapiens
gataatgtccttcccgtcagcctggcatttgacaaatgtacagcttgttcttccaaagtgaaagaactcttttcttctttgggagtcgaatgtaatgt

SEQ ID NO: 680450 - DNA, 74 bp, Homo sapiens
cgggctcggaacgagactgcacgaattcaattcgtcataatctgtccctacacagcaagttcattcgtgtgcag

SEQ ID NO: 680451 - DNA, 82 bp, Homo sapiens
gagaacttggagcttcggaagaaggtagaggttctagagaacactaatagctgatgttctaatcatgtcagataaagatgat

SEQ ID NO: 680452 - DNA, 111 bp, Homo sapiens
aattctcgcgtcgtctcgcgagagtccaagttaaagaacatggcgacgtctaatctgttaaaggaaataagatatgtggaacggagttatgtatcaaaacccactttgaag

SEQ ID NO: 680453 - DNA, 75 bp, Homo sapiens
tccagcttctgctgtccttctttgtggagagcaagaccctatcagatttggatatgtccttcatatttgattgga

SEQ ID NO: 680454 - DNA, 101 bp, Homo sapiens
caccctctcgcctcgggtctcgggggccgctctgggatcccggccaccagcaattgtccggattcaagagggattggcatcaaagttcacttctttaacaa

SEQ ID NO: 680455 - DNA, 98 bp, Homo sapiens
tccaaggggtggagctgggaacattcctcataaagcgagtcgtcaaggagttgcaggccgaggaggcgggcgcgcccggcggcccccggcagccccga

SEQ ID NO: 680456 - DNA, 100 bp, Homo sapiens
atacggtggggcagcagctgctgtaagacagtctaaactacgaaatacaccttatcaggtagaaatcagccatcttaaagccagacagattgcactccag

SEQ ID NO: 680457 - DNA, 100 bp, Homo sapiens
ctgcaactgcactgattctagaaacactctctattcgaactctcatgagggacttgccatgaggtgttgaagccttgtttcactgagttggagagactgg

SEQ ID NO: 680458 - DNA, 75 bp, Homo sapiens
ttctggcttacttctgcacctctacttcaatcaatttgagaagccaagtacaagaagctggagaagcgatgagaa

SEQ ID NO: 680459 - DNA, 75 bp, Homo sapiens
cgcctcatttgcgccttgcagcactgctggaccaggtctgagcgggaaagttccgaagaataggagtggctgagt

SEQ ID NO: 680460 - DNA, 74 bp, Homo sapiens
tttctcaagaccagcatggttctagagatggcatagaatttgcttttaaagagcctaatccgcaaggggagagc

SEQ ID NO: 680461 - DNA, 73 bp, Homo sapiens
aagttcaaggccaagttcctgacagcctggaacaacgtcaagtacggtatcgagaaccttccctgcgaacttc

SEQ ID NO: 680462 - DNA, 100 bp, Homo sapiens
acgacgcccggcgccagcacatcgcagacagtcttgcactgtttcctaggctggagtgcagtggcacaatcacagctcactgcagccttgacttccccag

SEQ ID NO: 680463 - DNA, 101 bp, Homo sapiens
caatgacgtcagcatgattcaggaatctgactgcggcgtgggagtggaaggaaagagccctcatcctgcaagtctctcggaaacacctccctgagtggccc

SEQ ID NO: 680464 - DNA, 75 bp, Homo sapiens
attttagggtcctttatatagaagggagagtgcagcggtgcctctgcagaggagcccaccagccatcggggaggg

SEQ ID NO: 680465 - DNA, 150 bp, Homo sapiens
tacatctactcctacttccacttcgtgttcttcctagcttccctgtatgtgatgatgaccgtcaccaactggttcaagtctgatgcctttaccagcaggactgcccaacctccccaacctcaacctcaacctcccagcaccacacatcat

SEQ ID NO: 680466 - DNA, 100 bp, Homo sapiens
caacaactagaggaagttaaagcaattaacatagagatgtatcaaaagttgcagctttaatgaagcaccagttgagattcccagtccttctgaaacccca

SEQ ID NO: 680467 - DNA, 85 bp, Homo sapiens
caaatggtgatagcactagcacctgtgggatgcacagttccggtgtcagcaggggggtcgggtgtgctgacagccggctgttaag

SEQ ID NO: 680468 - DNA, 75 bp, Homo sapiens
gtggggttcctcgcccagagcgtcttggcggagtctgatgacttttcacagtaccaactcaaaggcttgcttaaa

SEQ ID NO: 680469 - DNA, 73 bp, Homo sapiens
ggggaggcagcgcgggatcccagcctcaggcgtgcgcggacggtgtgcgggcaaaaagggcagctagctgtag

SEQ ID NO: 680470 - DNA, 76 bp, Homo sapiens
gaatcaaatattcagtgggatacaaatgatccgagtgaagcctgacaggaccggtgtggtcacggatggtgtgaag

SEQ ID NO: 680471 - DNA, 101 bp, Homo sapiens
ttgctccatgtgactgtcggcgggcttttgtctctggattcgatggctctgcgggtagaagaagtatgtcttcctggaccccctggctggtgctgtaacaa

SEQ ID NO: 680472 - DNA, 87 bp, Homo sapiens
aacatccagaacttccagctgcccccagatggcccactgcgtgaccttggttcagctgtccatttcctgtgaccatctcattgacaa

SEQ ID NO: 680473 - DNA, 75 bp, Homo sapiens
ctggttgtccgagatcgctgtggtatcatgaactgatcactaaatatgggaagttggagcctttggcagaagtgg

SEQ ID NO: 680474 - DNA, 82 bp, Homo sapiens
caggagtcatcggacgccagaatctgcccagggccttgctgccgccatgactgaggaatcagaggagacagtcctgtacatt

SEQ ID NO: 680475 - DNA, 100 bp, Homo sapiens
cttctatatctacaagggggtccgcaagctgagctgactgctgcccactttggaggaggcggtgggctccttcacaagaagactcaacaggaaggcgagg

SEQ ID NO: 680476 - DNA, 98 bp, Homo sapiens
acaaactaacagcagaagctattcagacacccctgaaatctgccaaaaacttcacagagaatgcagttgtcttgacttcaggtctgtctgttctgttg

SEQ ID NO: 680477 - DNA, 83 bp, Homo sapiens
tctgttggaagagaggcggattgaactggttccgaacatcagcagacccacctcccaaacacaggagccaggactcattggtg

SEQ ID NO: 680478 - DNA, 97 bp, Homo sapiens
atctcagtgtatgttctgtctatgtcgttcatgatagtctctttggcaggctgttccacctcccaacttcgagatgccagtctccatcccagtgtcc

SEQ ID NO: 680479 - DNA, 97 bp, Homo sapiens
agcgcaaaagaactggatgtgaagattaaaaatgtcatccggaatgtgcacaacccgccttcgggaccccgctcccagctctgagaggtcgccaaag

SEQ ID NO: 680480 - DNA, 95 bp, Homo sapiens
tgccgatttggtactttcttattcaactgtgaatctgctcgagaaagacagacaaagggtggaggatatgaaagtgaaagtgcttacccaaatgc

SEQ ID NO: 680481 - DNA, 87 bp, Homo sapiens
tgaagagcgacaagccgctggcagccgcggatctcaccgccgctcagggtctcctccgggctggggctgagcaagccctcggagtga

SEQ ID NO: 680482 - DNA, 100 bp, Homo sapiens
ctgtcatcagctctagaaagggtgtggccgttttacattggctgttttcctcacattcctcaagcagggccgttgctccagggagaactgcaaatatctt

SEQ ID NO: 680483 - DNA, 75 bp, Homo sapiens
ccgcaatgagccccaccgaatccaacaaatcctcaactacatcaaaggctcctcgtccatccaccggtccccaca

SEQ ID NO: 680484 - DNA, 100 bp, Homo sapiens
ggccgctgtgtggttgcaacggagataaattcccggaaccgcgattcggcgtgtcagaatatgtctgtgctggagaatcatcactggcgatctacaattg

SEQ ID NO: 680485 - DNA, 75 bp, Homo sapiens
ccgtatcgcgacagtacccaagtcggctgacagtgaagatagtactgtgtccatccagataaaattagaaaatga

SEQ ID NO: 680486 - DNA, 90 bp, Homo sapiens
tagggggcggctaccccgtggggggagtcctcagcactgcctcttctatttccctgtggaaacctcaaaagagaaatcctgccaaaagcg

SEQ ID NO: 680487 - DNA, 82 bp, Homo sapiens
agtacctgtggaccgtgtgctgccactgcgggggcaagacgaagacaatgcagatcttcgtgaagactctgactggtaagac

SEQ ID NO: 680488 - DNA, 75 bp, Homo sapiens
aagccataagcaatggagattttgagtcctacacgttctgagtcttctggtagtgtagggtcatctacaggctct

SEQ ID NO: 680489 - DNA, 80 bp, Homo sapiens
tgcaaatctctaggtcacgcctgcataaggaacgaatgcaggaatttgggaactgagctgtgcaagtgctgaagaaggag

SEQ ID NO: 680490 - DNA, 82 bp, Homo sapiens
gagcagttaatcttccaaggagtaaaactgctgattgaaggactaccagctggtccagaagggaggaggacaagagtgtggt

SEQ ID NO: 680491 - DNA, 82 bp, Homo sapiens
tcccgagcacccctgagcagcctggcctgccatgtccgggagaagacaccctgggcgctgcctatggcacagccaagagcgg

SEQ ID NO: 680492 - DNA, 75 bp, Homo sapiens
ctcctctaacatgtcagcgttattgtaatgcaagtccttatgattttggaggtgtacttactaatagtaaccggg

SEQ ID NO: 680493 - DNA, 75 bp, Homo sapiens
cttctcgggcaagttctatcatactgtcctcctccgcctcctcctctctgcatgcgcgtcagagcccgtgccaag

SEQ ID NO: 680494 - DNA, 103 bp, Homo sapiens
actcctgcccctcttcaacacctggacaccttgttagatggaacctacaagcagacaggagactggggagaaccttccattaccttgcgacctccgaatgaag

SEQ ID NO: 680495 - DNA, 100 bp, Homo sapiens
ccagccaccagcaaccccccaggagcccagtttcctccaattgcagcacaagaccttccttttgttctaaaggctggctaccttgaaaaacgcagaaaag

SEQ ID NO: 680496 - DNA, 98 bp, Homo sapiens
agccaaggagttgaagtttgtgactttgtaagactttgaccccgacgcaggcttcagtgattgccgcggatcagaagcctgagcactttggctcgaga

SEQ ID NO: 680497 - DNA, 99 bp, Homo sapiens
agcgactcctggagatagactccgtagtgctacacacgcagggccctgtcgatggcagcctttacgcgaaggtgaggaagaaaagctcctcggatcctg

SEQ ID NO: 680498 - DNA, 75 bp, Homo sapiens
ctaggatggaaaacatatccattaaatggggaagatgagaatgtgcctactgctcctgatcctccaagtcaacat

SEQ ID NO: 680499 - DNA, 100 bp, Homo sapiens
tatactactgatccagaaaagagatatgactactgcgacattcttgagtgtgaaggcctgcaggagttgttccaggccccagacctgcgtgggatctccg

SEQ ID NO: 680500 - DNA, 100 bp, Homo sapiens
tgtaccctgagctcacactccccctcttctcaggatctaaaatgtccactgaggcacaaagagttgatgacagtccaagcactagtggaggaagttccga

SEQ ID NO: 680501 - DNA, 75 bp, Homo sapiens
ggcttcggcggctcaggttgtggtagaggcggaggctcaggcagcttgaggtatcctggatacagccatcgttga

SEQ ID NO: 680502 - DNA, 90 bp, Homo sapiens
aatccacagtccagcccacccagatttggagtcaaaatatggacctgagaaaatatctccagaaaatgatatttttgaaataaatttacc

SEQ ID NO: 680503 - DNA, 98 bp, Homo sapiens
ccatttctaccttgtatgcctcaatttgctggatttaagcactgctgcactttatgagatgaagaaaacctgcttgatatcacacagtcaggagtcaa

SEQ ID NO: 680504 - DNA, 100 bp, Homo sapiens
gaatttgaagtactgccttgtaattcttaatcagcctttggacaactattttcgtcatctttggaacaaagcttggatttacactgggcaacgtggttgg

SEQ ID NO: 680505 - DNA, 74 bp, Homo sapiens
actatgacctcgagtctgacatggccatcaccatcgaggctgagccaagagctgatggcagccgccggaccacc

SEQ ID NO: 680506 - DNA, 90 bp, Homo sapiens
gccgccgcagcccccagcatgtcgggcccagacgtcgagacgccgtccgccatccagatctgccgtactatactggcaattgctggagaa

SEQ ID NO: 680507 - DNA, 100 bp, Homo sapiens
gcggcttctctgcttcctttgaacagagctctagctggtcctatagtacccctcctcaggaatgtctccccagtgcaaggacaaagactgaagagactgc

SEQ ID NO: 680508 - DNA, 85 bp, Homo sapiens
ggcttcacgaccaaaggtgtcacctcagtctctcagatcttccacagcccaggatggctaccaaggctccgaggaggatgtatcc

SEQ ID NO: 680509 - DNA, 75 bp, Homo sapiens
acagttcctgagtcaatttgaaatgcagtccaggaaaagagaagtgttgagctaaatagcaattctttggagtcc

SEQ ID NO: 680510 - DNA, 90 bp, Homo sapiens
gccaagatgaacttaatgaaatcaatcagttcttgggacccgtggaaaaattcttcactgaagagggatctacagtctttgcagaaattc

SEQ ID NO: 680511 - DNA, 83 bp, Homo sapiens
cgggtggcgacttcctccccgcgccccctccccctcgccatgaagtttggaaattttagcattcaggtgccaggaatgcagat

SEQ ID NO: 680512 - DNA, 100 bp, Homo sapiens
cgaaaggataatggctacttcctgattaaacccactctccacagtgatgatgaacagtctacacagatggctgcaagttgggaagatgataaagttacag

SEQ ID NO: 680513 - DNA, 100 bp, Homo sapiens
cggaggcccaggtctccgtgcagcccaacttccagcaggacaagctgcatccagtggaactaaagccgttccaggattatcaaaaactgagcagcaacct

SEQ ID NO: 680514 - DNA, 54 bp, Homo sapiens
gtcgtggtggtcattaagcggagatccgactgatgctgctctaatgtatgatgc

SEQ ID NO: 680515 - DNA, 75 bp, Homo sapiens
cctcgtcgacatgagtgatgtggaggaaaacaacttcgagggcagactgtcttgtcgacggtctcactgatgcct

SEQ ID NO: 680516 - DNA, 104 bp, Homo sapiens
ctagagcagagtacgagtctgaggcggagggagtaatgctgggatctagcaattgggaggcagcagacttgggtaatgaagagagaaaacaaaagttcttgaga

SEQ ID NO: 680517 - DNA, 75 bp, Homo sapiens
agagacagatcaaagcagctcattaccagttgaccagtgcagagctctcctccttaccagcctttagttcacctg

SEQ ID NO: 680518 - DNA, 130 bp, Homo sapiens
taagccgggcacggcggccgagctgcggcagagcgtgtctgaggtggtgcgcggctccgtgctcctgctcctttagcggcagagttttccgagtgaccttcttgatgctggctgtttctctcaccgttcc

SEQ ID NO: 680519 - DNA, 96 bp, Homo sapiens
tcagtgggaagcatgtcgtctttatcgctcagtcgttccccatcaggaagtcctcgcagaagtgcaagtcctgaaagaatggactgaagctctcaa

SEQ ID NO: 680520 - DNA, 75 bp, Homo sapiens
ctggcgctgagcctgcagccggccctgccgagctcaggccccggggcctccagcggcaccagcggagaccacggt

SEQ ID NO: 680521 - DNA, 99 bp, Homo sapiens
taacaacagcgaggaagaagaggacgacgacgacgaggaagaggaggtttctgaggaccaaaatgtctttgactccaagaagaaagtgaaattaaccaa

SEQ ID NO: 680522 - DNA, 100 bp, Homo sapiens
cctggtgctgctcagtgtggtggatcatttcaaccgggtcaggctctggagcaggccatcatcagtcagaagcctcagctggagaagctgatcgctacca

SEQ ID NO: 680523 - DNA, 48 bp, Homo sapiens
ctgagggcgcctactacctggaactgctgtccccggcataggtccatc

SEQ ID NO: 680524 - DNA, 83 bp, Homo sapiens
aggctgccaagtcatccctgcagcaaagcgatgtgattggcatgcactacttctctcccgtggacaagatgcagctgctggag

SEQ ID NO: 680525 - DNA, 96 bp, Homo sapiens
gaaacctcagacagatcgccggggaggcagcgcgggatcccagcctcaggcgtgcgcggacggtgtgcggacgactaaatacgttgaacaagtgtg

SEQ ID NO: 680526 - DNA, 75 bp, Homo sapiens
atccgccagtcaataggaagtacgagttaagactttgaccccgacgcaggcttcagtgattgccgcggatcagaa

SEQ ID NO: 680527 - DNA, 100 bp, Homo sapiens
ttcctggggcgcaccgccaagagctgggtggccaatccgccatggtatagttgaagattgggacttaatggaaaggtttatggagcaagtgatctttaaa

SEQ ID NO: 680528 - DNA, 75 bp, Homo sapiens
cgcagcccaggcgcgggggcgacgacagagctgaactagagaaacatggttataagatggagacttcatagcatc

SEQ ID NO: 680529 - DNA, 100 bp, Homo sapiens
ggaaaactcctgaggagattcgcaagaccttcaatatcaaaaatgactttactgaagaggaggaagcccagaaaaagcttgtggtgaaggggggcaaaaa

SEQ ID NO: 680530 - DNA, 74 bp, Homo sapiens
cttccttccttactttgtcttggtatactacatggcaaaatgggaaagtttgtgaagaaatatgggaacctttt

SEQ ID NO: 680531 - DNA, 100 bp, Homo sapiens
tagagctgggggaaggaggaatagttgtttcttcaaattgaaatccaaagatctactcaagagagaagggccgtaaggagagagagtccctgcagcagat

SEQ ID NO: 680532 - DNA, 98 bp, Homo sapiens
gcagataatgtagttggaaaaaggaggagtattctgatcttttcagtcctggtacctgggctagcttggttcctttccaagtgtcaaataggacaccc

SEQ ID NO: 680533 - DNA, 75 bp, Homo sapiens
ggacagttagtcacccacctacatgttgagaatcctcactatggatgggctcattgaggacattaagcatcggcg

SEQ ID NO: 680534 - DNA, 90 bp, Homo sapiens
aatgtctttcgggccgctttccaggaagcagcaggatgcgccgctccactgtcggtagcaacaagagacccccaacacagcaggcgcagg

SEQ ID NO: 680535 - DNA, 100 bp, Homo sapiens
gtggggaaactaaaaacgcatctatctaacgtttaccctagcaaaccattggttagtctgctgctaattggaattgctgcgtggggcattggcttcgggc

SEQ ID NO: 680536 - DNA, 100 bp, Homo sapiens
aagcttgctgtcatcatcaatggtaaaatccagtacaaggaatatatcattgaaggatttgaaaacatgccagctgcatttatgggaatgctgaaaggag

SEQ ID NO: 680537 - DNA, 100 bp, Homo sapiens
ccagccacggccagctgaccggcgttcctgcaatcttcacccttgcccggagaccaagcggcattgaacctggccacatcccaggtaccgtgaacatccc

SEQ ID NO: 680538 - DNA, 100 bp, Homo sapiens
gcggcggcagcgtccaccatcttcctcttgctgccagtggtagcgctcgtctggcggagctggagtcatcagaaattgggccttccctcgtgattcacac

SEQ ID NO: 680539 - DNA, 100 bp, Homo sapiens
gcgggatcttcaaccacctcgagcggctgctggacgaagtctcaaaccatgaattatgtgggacagctggctgggcaggtgattgtcactgtgaaggaac

SEQ ID NO: 680540 - DNA, 50 bp, Homo sapiens
ggagaaatccaacgacctttctatccagaggcatttcatccttcatgaag

SEQ ID NO: 680541 - DNA, 100 bp, Homo sapiens
gcttctatgtcctgtacacaatcttcatgaaagggaatgggtactgttcaaaaaggaatgccccacaagtgttaccatggcaaaactggaagagtctaca

SEQ ID NO: 680542 - DNA, 90 bp, Homo sapiens
agaagcagtgaaggagtgcagaggcatcacctgaaagggcccaggagacaccagcgggggctgccgctgcagggtaaatgggattccttg

SEQ ID NO: 680543 - DNA, 96 bp, Homo sapiens
agctctgtcggtatctttccaaggtcctagaactcaggaagagtgatgtggttttggataaggtgtgcctacaggggttgtggaaggagacgctgc

SEQ ID NO: 680544 - DNA, 75 bp, Homo sapiens
gccggttcgctgcccggtccgcccgcggtgagaggttctgtggacaatcacaatgggaatccaaggagggtctgt

SEQ ID NO: 680545 - DNA, 98 bp, Homo sapiens
acgagatggtggaggaggcggtggaaggtacggattttcaaatatgcgctatatttcttcgctaattagtggtgttggtattttcatgatgggtgcag

SEQ ID NO: 680546 - DNA, 100 bp, Homo sapiens
tgacctgtcctttcagcttctttctcacacgcagatgaacactggacttcagaaattttaattggttggggtcagataagaagaggagtgacaatcaagc

SEQ ID NO: 680547 - DNA, 100 bp, Homo sapiens
ccgacccgtggccaacatctcggacgtggtcctcgtccgcttcggcctgtccatcgctcagctcattgacgtggcccataatgaggatcttacaactaga

SEQ ID NO: 680548 - DNA, 98 bp, Homo sapiens
gctgatgtcagtgttatatcctccaggaatactggccaggagcaagatttttacactgtggaactggaaagaggagccaagggatttggctttagcct

SEQ ID NO: 680549 - DNA, 76 bp, Homo sapiens
gaaacaataggacggaaacgccgaggaacccggctgaggcggcaggccgttgatgctcactgccatcagctgcatc

SEQ ID NO: 680550 - DNA, 100 bp, Homo sapiens
tggtcacggagaaggcagcctacatagttactccacaggatccgctgaacataggatgttgccacaaaatctacctcgtgtatttttctctttcactcat

SEQ ID NO: 680551 - DNA, 98 bp, Homo sapiens
gcggatctcagaaggccagttcaaaggaatgtatcctgtcaggtataatgtcagtgaatggcaagaaagttcttcatatggatcgaaacccttactac

SEQ ID NO: 680552 - DNA, 51 bp, Homo sapiens
aagcattggggagcttttctcaaggtcaaaatgcagatcttcgtgaaaacc

SEQ ID NO: 680553 - DNA, 75 bp, Homo sapiens
tgggccagtcatttagccgggcgaaagtatcatatcagagttaaacatgaagtttctggagagacagtggtattt

SEQ ID NO: 680554 - DNA, 95 bp, Homo sapiens
gcacgggagcatggcagccaacgtctcggttgaggaaacgtgtgaagcttgaagggaaagaacttgaagaatacttggaaaaagagaaactaaag

SEQ ID NO: 680555 - DNA, 75 bp, Homo sapiens
cagggatgacctgaagaaattgctagagaccgagtgtcctcagtatatcagggctgaccccgcactacatctacc

SEQ ID NO: 680556 - DNA, 80 bp, Homo sapiens
cgaagggaatcgcaaggctcttccctgaccattttctactgtccctgcgcgaggtcgtcaaagtcctacattttagcttt

SEQ ID NO: 680557 - DNA, 50 bp, Homo sapiens
ctcagaatctgctctacccgacttaacagcaggatgaagttaaaggaagt

SEQ ID NO: 680558 - DNA, 100 bp, Homo sapiens
cccacctcctgagtcctctcggcacccagcaagttgggccatatggtgctcttcccagtctggttcctgtacagtctgctcatgaagctgttccagcgct

SEQ ID NO: 680559 - DNA, 90 bp, Homo sapiens
acgtgccggaaatccagagaaccaacttagcaagcacagtgctgtcactcaaggccatcatggagaaactggagatgtccaagttccagc

SEQ ID NO: 680560 - DNA, 100 bp, Homo sapiens
ctgggagaagcagcagcgcaagaaccctctgcaggtcctggtgaacgccatcatcaacagtggtccccgggaggactccacacgcattgggcgcgccggg

SEQ ID NO: 680561 - DNA, 98 bp, Homo sapiens
aaatgttaggatcactttattctgggacatgagagatggctttagaagaaaaagtttctactcttcccattatgcgagagagcggtctccttataaaa

SEQ ID NO: 680562 - DNA, 90 bp, Homo sapiens
ctgcaccgacctcgacgtcttgcctgtgtcccacttgttcgcggcctatagtgcatactccttccacgttactgcagacggtcagatgca

SEQ ID NO: 680563 - DNA, 75 bp, Homo sapiens
cggggcagtaacaaatcctttctggcggcagctaatggtggaaaacgaagctcattcccaacgtgcaaagccaag

SEQ ID NO: 680564 - DNA, 75 bp, Homo sapiens
tcccgagtagcttgggactacagacgcgtcttggctgcccacaagataatggctagctccccagacatggacctg

SEQ ID NO: 680565 - DNA, 101 bp, Homo sapiens
caaaaagagatttcactggagctattaccctgttggagagaaaatacggtacatgtccccatggaggatatggcttgggcttggaacgattcttaacgtgg

SEQ ID NO: 680566 - DNA, 74 bp, Homo sapiens
cagcttgtttcacatgctggtggactcacccatcgacccgagcgagtttgggatatgagattgaaaatgacgac

SEQ ID NO: 680567 - DNA, 74 bp, Homo sapiens
gagtgggaacatgacgcaggtgcaggtgtctcttctcgccctggcggggaagaaactggcagacctttcacttc

SEQ ID NO: 680568 - DNA, 100 bp, Homo sapiens
gtgagaagcgtgatgtgcagcctcctgcctctcagcatgagggagagcaatgttgatcccagggatgatgtatttggatatcctcaacaatttgaagata

SEQ ID NO: 680569 - DNA, 99 bp, Homo sapiens
ctgggggacggtaggagcctccgtgcggagaccactgttcaaggccacagcactctacacccccaagtgcatatgggtctgtcaaagcctatactaact

SEQ ID NO: 680570 - DNA, 82 bp, Homo sapiens
gaagacagtgtgccagataccattgatgaaggaaatgctaaagcgattccaagctttggagtttaacccttctgccaatcca

SEQ ID NO: 680571 - DNA, 99 bp, Homo sapiens
atgcaaaattttggtctgatgatagcagatcctatctgttcaattcttatagccattcttatagttgtaagagactctacaggggcaggtaattcactg

SEQ ID NO: 680572 - DNA, 90 bp, Homo sapiens
agtccctcaactctctacgctttgcctccaaggtggttgtctggggtgagtgcgactccactgatgactgtattgagcacaacattggcc

SEQ ID NO: 680573 - DNA, 91 bp, Homo sapiens
gagatttggagttttgtcttgaagagcacagagagaaggtgaatgccacagaagaaatgctgcagcaggctttggtatcaggatgatgctg

SEQ ID NO: 680574 - DNA, 82 bp, Homo sapiens
gctaatcttgtacttcaagaggaggaatcacgctcggaaacaatgggtttggtgcacctcgatttggaggaagtagggcagg

SEQ ID NO: 680575 - DNA, 87 bp, Homo sapiens
cccgtctgccccgcccacatctagaacgatctcaggaaattttctgatggaatttcaagtgaaaaatgttccttcagaaagaattgc

SEQ ID NO: 680576 - DNA, 98 bp, Homo sapiens
tcagtctatgacaacgtctctctgccgtgaatcattcctgcagatgaaaaagtgtgacttggcagctgcaacccaaggagatctgtgcgctggttggg

SEQ ID NO: 680577 - DNA, 74 bp, Homo sapiens
ggaggtgaatttccatgtcaacatagtcctgagacggggtctgactgtgttacccaggctggtcttcaactctt

SEQ ID NO: 680578 - DNA, 82 bp, Homo sapiens
tacaagactctcttcgctctttgcatcttaactgcagatgcagctgactttgcctgtagcctcatagaacccatcccatggc

SEQ ID NO: 680579 - DNA, 100 bp, Homo sapiens
ctgtcaagaaatgtcaggagagggatttccaatatggatacaaccaaattctttcatggatgaaatctgtaagtacagacctgagaattctgttgctaat

SEQ ID NO: 680580 - DNA, 101 bp, Homo sapiens
catggatgttcttcttcgagtatttgtagaaggcgttaaaaggatctgaacaaagtctgctcaaatctcctgctgtgaaccagcagaatttttgaacaggt

SEQ ID NO: 680581 - DNA, 113 bp, Homo sapiens
gttttcttctactttttgatctgacaaatgagcaaagtttcctcaatgtcagaaactggataaacagccgctcaggaagcaatcttgcatgcgtctggaaatggcacaaccaa

SEQ ID NO: 680582 - DNA, 97 bp, Homo sapiens
ctcacagctctgcggcccaggcccaaggtagcccctggaattttgccttcacagtcaagttctacccgcctgatcctgcccagctgacagaagacat

SEQ ID NO: 680583 - DNA, 75 bp, Homo sapiens
gccctgcacctctattccaacaccctcaactttcagcccgagtttcacccagtccccactccacggtgcagctgc

SEQ ID NO: 680584 - DNA, 50 bp, Homo sapiens
atggaacttatcaactggacaggccaggttgttgatcattatgaaaatcc

SEQ ID NO: 680585 - DNA, 82 bp, Homo sapiens
gatgtggagcgcttctttaagggctacgggaagatcctggaggtggatctgaagaacggggtgactgttggatctgtatgga

SEQ ID NO: 680586 - DNA, 75 bp, Homo sapiens
gaaaaaacggctatctataatagtatggactttctgtcagattttgagatgatgttgcagcgaaaaaagagcatg

SEQ ID NO: 680587 - DNA, 83 bp, Homo sapiens
aaaacggcgagagtgggcgagaacgtccactgcgggccggcgaaagctggttgtgaccgagattcccgacgagagagactgag

SEQ ID NO: 680588 - DNA, 75 bp, Homo sapiens
ggagcaccaggatctcgggctcggaacgagactgcacggtcccccacggcccttcaggatgaaagctgcggtgct

SEQ ID NO: 680589 - DNA, 100 bp, Homo sapiens
ggaagatctgcatggtgggaaggacctgatgatacagagaatcccctactttgaaactagtgctgccaatgggacaaacataagccaagcaattgagatg

SEQ ID NO: 680590 - DNA, 74 bp, Homo sapiens
agaaatacctcggtggacaaatgctaaaatggaggtaccattgttggatactggtgacatcatcattgacggag

SEQ ID NO: 680591 - DNA, 88 bp, Homo sapiens
ctttctgtcctgcgcctcagtgtcagttacctccgggtgaagagcttcttccaaggggccaacaaatatgatgaggcagccagctaca

SEQ ID NO: 680592 - DNA, 75 bp, Homo sapiens
ccgtcgcggagccgcgcagccctcggagcacgatgatgattattccccaccttctaagagacaaagaccaacgag

SEQ ID NO: 680593 - DNA, 90 bp, Homo sapiens
ggaagtgcagctgcctcagttcttagcgcagtgatgcagccaacacgaacggttgtcatgtgtaacacaactttcgatcaccgcgaaaac

SEQ ID NO: 680594 - DNA, 100 bp, Homo sapiens
taaatccaaagaggagccagttaccatgactcatccagccctcatggagaccataaagcaaatgtgggtttaaatctcaaattcaacaagaaaaatgagg

SEQ ID NO: 680595 - DNA, 100 bp, Homo sapiens
cgccaggcgctctgaccactctccagcaccagcttccagttagtggatatagcacaccatccccagccagccttctggcggccgcccctggtttctcctg

SEQ ID NO: 680596 - DNA, 83 bp, Homo sapiens
ctccactccgtcccccgcgggtctgctctgtgtgccatggacggatgctgtgggccctgagggaaaggatcacagaggcgctg

SEQ ID NO: 680597 - DNA, 90 bp, Homo sapiens
ggcggcgcgaggcggcatgagggagccgctcgggccacaggagaatggtatgctgctcggcatggagtgaagaccaccccgtgtgcaatc

SEQ ID NO: 680598 - DNA, 98 bp, Homo sapiens
ttctgaaggaccgcgatcctaaagagattgaatgatggagtccactttctcatccaggctggagtgcagcagcgcaatctctgtgtgatcattgcaac

SEQ ID NO: 680599 - DNA, 100 bp, Homo sapiens
aagacaccgggacctcctggaagccaaaaatgaggttggaaagaaccatgactgtattcaggaaggcacatgaactgaagcttctgtcagaatgccaata

SEQ ID NO: 680600 - DNA, 83 bp, Homo sapiens
ccgaagacaggaaagctgaggacttcaccagcgctgaaacgggcctgaatttgaagctaggatccgacagaacgagatcaaca

SEQ ID NO: 680601 - DNA, 100 bp, Homo sapiens
tgtgacctgcgggtattggatgattcgtagctaagactctacgacatccctgaagccgggaaatgttactggggcttccggatgcagatgacgatgcgtt

SEQ ID NO: 680602 - DNA, 96 bp, Homo sapiens
tgcaggacaaaactcctctctatagtcaactccttcaagcatataagtggtcaaacaagactctcagcgttctcatctctcttccttcaccatgaa

SEQ ID NO: 680603 - DNA, 51 bp, Homo sapiens
ggagcgcgtccaggagcggacccggatttcggctgaatgcgtcttcttggc

SEQ ID NO: 680604 - DNA, 101 bp, Homo sapiens
cagtcatttagccgggcgaaagtatcatatcaggccattctcaagcacaacctgggtgaggctctgtcattgcttaatggatcagctgtatagtaacagca

SEQ ID NO: 680605 - DNA, 83 bp, Homo sapiens
cgcccgcgcccgggaccgacccctctgctcgcggccgcgcctttgaggtggaggcaatgcccagagctgtggcagccaccttg

SEQ ID NO: 680606 - DNA, 87 bp, Homo sapiens
cgcagggaaaacatccttgtaatgcgactagcaaccaaggaacaagagatgcaagagtgtactctgaagttcctgtctttgccagac

SEQ ID NO: 680607 - DNA, 90 bp, Homo sapiens
gggagaaattctctggagtcatctggaacttctccgaaaatcgtgttacacgttcccaagaagaacttcgagaagataaagcttaccaac

SEQ ID NO: 680608 - DNA, 82 bp, Homo sapiens
cgcgagcacagagcctcgcctttgccgatccgccgcccgtccacacccgccgccaggggtcgggccccggctcagtggtccc

SEQ ID NO: 680609 - DNA, 100 bp, Homo sapiens
gggaaacaatccctcgcctccggaggcggcgaggagcggcggagcttggggcttccttggtcgcacccaccacctgcctgcccactggtcagccttcagg

SEQ ID NO: 680610 - DNA, 96 bp, Homo sapiens
tgccggcggggaccgctgggaaggcgaggacgaggacgaggacgtcaagaatctaggtcaacctattaagatacgtttccaggaatctgaagaacg

SEQ ID NO: 680611 - DNA, 100 bp, Homo sapiens
tgcgtctcagccacaattccatcagccacattgcggagggtgccttcaagggactcaggagcctgcgagtctttatagagcaaatgctggccgccaaccc

SEQ ID NO: 680612 - DNA, 75 bp, Homo sapiens
cttgtaatctgagtaccatgaactcgaacacttgcaggataattacgccttttggccataaccagtctcagcaag

SEQ ID NO: 680613 - DNA, 100 bp, Homo sapiens
ggctctgggtccagccccttacttaaagatggagaacttaatgttctggatgatattttaactgaagtaccagaacaagatgatgaactgtataatccag

SEQ ID NO: 680614 - DNA, 90 bp, Homo sapiens
ggtctgcagggcctgggccgccgctgctacctgcagcgccgtgtggcacgacacaaaaatcagcatcctaatgtcctatgatcacgtgga

SEQ ID NO: 680615 - DNA, 100 bp, Homo sapiens
cgtgacaaattagagcgagcaaccaatatagaagttctgtcaaatacatttcagttcactaatgaagcccgagaaatgaaatatggctacacacaccttt

SEQ ID NO: 680616 - DNA, 100 bp, Homo sapiens
gattcccctgattcctcttggcctgaaggaaacgaaagacgtcgactttgcagtcgtcctcaaggcctcaggccggagcagccccatcatgccgagggag

SEQ ID NO: 680617 - DNA, 98 bp, Homo sapiens
accttccatgtaccactggtaattatgacttttggacagtccaagctatatcgaaggcctctccttccgatgaaaagagaaaggaagaatggactaca

SEQ ID NO: 680618 - DNA, 49 bp, Homo sapiens
cgtggacgggcacaacttcatcatgagacggagtttcgctgtgtctccc

SEQ ID NO: 680619 - DNA, 100 bp, Homo sapiens
gtcctccttttgatgttgtcattgatggtctcaatgttgccaaaatgtttcctaaagttcgtgaatctcaacttatattgatgatgctcaaatacttccc

SEQ ID NO: 680620 - DNA, 95 bp, Homo sapiens
gcgtgtcctggatgggctccacaatgaactacaaaccattggcttccagcacaacattctgaaattttttggttattgtaatgatgttgatcggg

SEQ ID NO: 680621 - DNA, 83 bp, Homo sapiens
acaatccgtctggatcacggatgtaggaagtggacaatctctatgggaagcagaaggcaaggaccccggtcattttaggtaga

SEQ ID NO: 680622 - DNA, 75 bp, Homo sapiens
gtctttgacaagtgatgagaagctgtcggagcttcccaagtgatcccagggcaccgccgtgtgaatataaagatt

SEQ ID NO: 680623 - DNA, 80 bp, Homo sapiens
gctgcagatcgagctgggcaagtgcaaggcggaacacgaccagctgctcctcaatgcctccggagccagcgtggtggcca

SEQ ID NO: 680624 - DNA, 82 bp, Homo sapiens
ccggcgctgatctacaagaaaatccacaagaacgcactttcctcccagacaatgcagatcttcgtgaagactctgactggta

SEQ ID NO: 680625 - DNA, 100 bp, Homo sapiens
acctgacctcctgtgggttcccaaacactaacttgtttccctgggaatttggaggtgggttcgaaaaaaatcagacacaagtttggcagaaggaagtgtc

SEQ ID NO: 680626 - DNA, 98 bp, Homo sapiens
tcccaatcccccactctttccgccctaatggaggtctccagtttcggcccgatgagagaaagggaaagttaaggatgctggagcagaacaatggattt

SEQ ID NO: 680627 - DNA, 60 bp, Homo sapiens
aactcatgcccagcagcagcaagcagataatgagaagcccatgcgagtggtggatgatga

SEQ ID NO: 680628 - DNA, 100 bp, Homo sapiens
taggttccacccttttctgggaacgtggcgacctgcacatgacccagtttttccgaggcaatctggctggcttaactctccgttccgggaaactcgcgga

SEQ ID NO: 680629 - DNA, 102 bp, Homo sapiens
ccttagttggagctttgtctatcttcttccttaggaaaccatgtctgccaatgattttggacaacaaactgagccacccattgttagagcagctccttccag

SEQ ID NO: 680630 - DNA, 75 bp, Homo sapiens
ccgcccctcggacactgcccccgccgccgccggagctctgcagcacggaggtggagctgtataaaagcagccacc

SEQ ID NO: 680631 - DNA, 50 bp, Homo sapiens
gaaggtctctggagacatcttcagcaggtaaactttgaggatgattctcg

SEQ ID NO: 680632 - DNA, 101 bp, Homo sapiens
cccacacacaagtgaatttaaaggagcagcccgggtgtcacctatcagtgaaaggatgccggaccagatctctgtctcggagttcatcgccgagaccaccg

SEQ ID NO: 680633 - DNA, 75 bp, Homo sapiens
gaggacgaggacagagaagccaagaggaagaaggaggaggaaggtgtcttccgtgaggccaccactgagttcagt

SEQ ID NO: 680634 - DNA, 100 bp, Homo sapiens
cggccgcctggctccccatactagtcgccgtgcattgaatgaacagcgggacattggacacctgctgatccatcaccccgggcccgggcaggcccgtgga

SEQ ID NO: 680635 - DNA, 109 bp, Homo sapiens
accagatgttggatatgggatttgctgatcaagtggaagagattttaagtgtggcatacaagaaagatcgatgctatagaagacaaacaagggaaggttttttttcctt

SEQ ID NO: 680636 - DNA, 100 bp, Homo sapiens
aaactttggaatctgtacccattattggtggtttttgggagactatctttggcaacaggttgtttgatgtgtgcacagtgtcacgaacagacagagaaac

SEQ ID NO: 680637 - DNA, 100 bp, Homo sapiens
gccgagacccagcacatcgccgaccaggaacggtaatggtaggagagagagagcagggattggggaatgctgcccccccaaagtttctgtggctgcgctt

SEQ ID NO: 680638 - DNA, 74 bp, Homo sapiens
aggatggtctcctacaccatcaccctggtcttccagcactaccatgccaagtggaacggcacatgtgtgatggg

SEQ ID NO: 680639 - DNA, 81 bp, Homo sapiens
ccccccccgcgcctgcacttagccccgcgcccgagactgaggctgatgtgaatccaaaggcctatccccttgccgatgccc

SEQ ID NO: 680640 - DNA, 80 bp, Homo sapiens
gggtcaaggcattcatcctctagctggtcagcccaaggccaaccccactgtcactctgttcccgccctcctctgaggagc

SEQ ID NO: 680641 - DNA, 94 bp, Homo sapiens
ctccttcggcagtccacccaccgccgccgcctcccagggtgctttcttctgcgacctggtactcatctacctcatcaaaaagagagagttttac

SEQ ID NO: 680642 - DNA, 74 bp, Homo sapiens
atggtggccggcctgacaacacagggcgtggaccagaagcccctggtccctctgtctccctttcccctatgcca

SEQ ID NO: 680643 - DNA, 83 bp, Homo sapiens
aggccattggtctgaatactttatcaaccttaaaatcagtcaaaccctaaagggtttggaacaaactctcccttcacttgttg

SEQ ID NO: 680644 - DNA, 51 bp, Homo sapiens
tgggacaaggattgatagaaaggggagctgcattctcagtgtgttgctaag

SEQ ID NO: 680645 - DNA, 100 bp, Homo sapiens
gaaaagagccctggaatatgaagcaacatgagatggtggatgaacccacagggaggtggggaagacagggctccagctaccacaggacgggctctgggta

SEQ ID NO: 680646 - DNA, 100 bp, Homo sapiens
cctaaagtcaccacctgctgcttttctggagcgcttaccaggtacttgagctggatacactggtggataatttatctattgatccttcctcgggggacat

SEQ ID NO: 680647 - DNA, 100 bp, Homo sapiens
caggaggatggagctagttagctgtctgttgtctgtagcccaggctgaagggtatgtgattggcagctgtattaaacacattccaatcgcaggacgagat

SEQ ID NO: 680648 - DNA, 87 bp, Homo sapiens
ctgttctgcttcctgctgctctgtctcagcgccgcctccctgcttcttaacaggtactgtctgatgagcgtgaaaggttgtttcacc

SEQ ID NO: 680649 - DNA, 101 bp, Homo sapiens
tttcaagtctgccctgcaagcgataggagtggaagcccaccagatcctccaggtcctattgacaatactaagattgcagtcactaaatgtggtaatgtgat

SEQ ID NO: 680650 - DNA, 100 bp, Homo sapiens
cgacgggttggggatggcgtgcagcgcaaccacgagacggccttccaaggtgaaattcgatgctactgtgatgctgcccactgtgtagccactggttata

SEQ ID NO: 680651 - DNA, 82 bp, Homo sapiens
agcaaggtcggcagagcaaggggcttacgcagaaggacctggccacgaacatccagtcatggataaaaatgagctggttcag

SEQ ID NO: 680652 - DNA, 96 bp, Homo sapiens
aacttgcaggagacagaaactggcatgaggattctgccaccatggaagggctcctgtctccgatgaggacgaagattatctcaactttggtctcct

SEQ ID NO: 680653 - DNA, 75 bp, Homo sapiens
cttgttgtctttgatactacattacaaaaaattttaagagcttgcattgaacaagtgaaaaagtattcagaattc

SEQ ID NO: 680654 - DNA, 101 bp, Homo sapiens
aggggaagaaaagaaggggaagaagatcaaaacccaccatgccccaggctgagcggaaggaggagaaaaaggcggctgcccctgctcctgaggaggagatg

SEQ ID NO: 680655 - DNA, 75 bp, Homo sapiens
tgttgcttgtgtgaagaaagcctcctaccttgattgcatcagggccattgcggtgctggccgggatgaatgtcta

SEQ ID NO: 680656 - DNA, 101 bp, Homo sapiens
gcttggggatcctctgtacgcccgttcactgaacccttaggagaaatcttgagagtggacagcaattgtgaagatcgccagagagttctgtgtttcatcac

SEQ ID NO: 680657 - DNA, 76 bp, Homo sapiens
gcgacccggtgtgtggcgcgcccagagccccgcgtttcagccctagggaagaacaacaagctcaccctcttccgcc

SEQ ID NO: 680658 - DNA, 100 bp, Homo sapiens
cagccaggaagggaggcagaagcatgctaagaacaacagtcaggccaagccttctgcctgtgatgggggtgaatctctacattaagaacttggatgacac

SEQ ID NO: 680659 - DNA, 113 bp, Homo sapiens
tgaagacctacaaggggtgcccgagcggctgctggggacggcggggaccggtcatttatagcaaatacactgacctggttccaaaggaggttatgaatgcagatgatccagac

SEQ ID NO: 680660 - DNA, 100 bp, Homo sapiens
cctggtcagtgtaattctaatctcacggatatcctctgttgggggagaagatggacttattttgagtcacttgccaaatggcccaactgctcattttaaa

SEQ ID NO: 680661 - DNA, 50 bp, Homo sapiens
ctgcatgccgctcaccgtagacgagtgttcagactgcatcacagtgcttc

SEQ ID NO: 680662 - DNA, 100 bp, Homo sapiens
cggcacatcctctcggtgttcccgctggcggcgggcatcttcttcgtgaggctgctcttcgagcggagagactctgtggactccaagtcttctgcctcct

SEQ ID NO: 680663 - DNA, 83 bp, Homo sapiens
ggctatggccgtgccctggggctgagccctcaggtccggcctctttggcctacccccgttggctccgctgccccaggtcgatg

SEQ ID NO: 680664 - DNA, 99 bp, Homo sapiens
ggctcccccctggtgcccacgcccaatgtgctctgggacctggttgacaggatagggaacccttaacattcagggatgtggccatagaattctctccag

SEQ ID NO: 680665 - DNA, 78 bp, Homo sapiens
ttgaccgccacattaccattttttcacccgagggtcggctctaccaagtagccttgccaacattccactaacccccga

SEQ ID NO: 680666 - DNA, 75 bp, Homo sapiens
tgaagcacagcacggtactggagaacacggatgcccagggccttgctgccgccatgactgaggaatcagaggaga

SEQ ID NO: 680667 - DNA, 98 bp, Homo sapiens
tggtgcagtcttattttgaaaaggtgtgatccctcacatccacaaatctctgattggaaagaagggacagcagaaaactgcttagagggatgctttaa

SEQ ID NO: 680668 - DNA, 100 bp, Homo sapiens
ttgaagaagtcttgaatgactggaaactgattggaaactctttgggaaagccactcgaaaaggcaggtatgtttattcctaaaacgaggtgccaatcaac

SEQ ID NO: 680669 - DNA, 75 bp, Homo sapiens
caacgacgttccatctgtggaaggacctaccaaccagattcagaatctgataattcagataacaacacaatcttt

SEQ ID NO: 680670 - DNA, 101 bp, Homo sapiens
tggtcctacctggggatattatcaaatctactactgttcatggcagcaacatggccaacgccctggccagcgccacttgcgagcgctgcaagggcggcttt

SEQ ID NO: 680671 - DNA, 89 bp, Homo sapiens
caactgccctttggttcacaaaccaggatgttcctccacgaagttgccagggcctgtccagggttctctccccttgccaccatgagcga

SEQ ID NO: 680672 - DNA, 100 bp, Homo sapiens
agagactttcgaaagaatatgatcaactcctgaaagaacactctgaacttcagggttttggccaaattgggcgagggcacaaaataaccacttacccctt

SEQ ID NO: 680673 - DNA, 82 bp, Homo sapiens
catgcagttctccatcgtgccacagcctcccgcgacgatgcccctcaacgttagcttcaccaacaggaactatgacctcgac

SEQ ID NO: 680674 - DNA, 75 bp, Homo sapiens
agttcgcccgtccccctgccccgttcacaattgccggtggtggtgtgcacattgagccccggtatagacagttcc

SEQ ID NO: 680675 - DNA, 75 bp, Homo sapiens
cttcctgctctgtctctacttggtgggcttcttggatttgcatgcagccactgttaacccggaccccagtttaaa

SEQ ID NO: 680676 - DNA, 74 bp, Homo sapiens
ttcggatcatgtctggtggctccgcggattataacagtactgtaagattgatgttaaaggcatggtgttcaccc

SEQ ID NO: 680677 - DNA, 80 bp, Homo sapiens
gaaaccctgacattcgggtgctaatttgtgaagaaaaagcaccagttctcaaggtggtcgtcggttttctgagggtactt

SEQ ID NO: 680678 - DNA, 50 bp, Homo sapiens
atcatgcagagtattacctttacaagggcaccaccacgaggcgatttgtg

SEQ ID NO: 680679 - DNA, 100 bp, Homo sapiens
gaatcttgtcactttagccactgctactacaggaacgtttggaaattgctagtttgtcaaaccaagatcatacctctaagaaggacccaggaggacacag

SEQ ID NO: 680680 - DNA, 82 bp, Homo sapiens
cgtgtcctgaaggagttccaccaggccgggaagcccatcgggtgcccgtggttgacacgagctgtgtccccagctgttcccg

SEQ ID NO: 680681 - DNA, 100 bp, Homo sapiens
cacctgtgccttcacggaatgtatcctccgaagctatggcctgaagacgggattctttagctttcaccaacaatcaccagtggtttacacaacattgcaa

SEQ ID NO: 680682 - DNA, 82 bp, Homo sapiens
gacagcacctcatcccctggatgggggaccacaagatcctcatcgacaggaattttggagagtaaaaggctgaaccttgtta

SEQ ID NO: 680683 - DNA, 100 bp, Homo sapiens
gattctacttattcatcagtttgttgtgcttgtcaagatcaggcatctaataggattcaggaatcaaagaatcagtgtactcaggtggtacaggaaagag

SEQ ID NO: 680684 - DNA, 83 bp, Homo sapiens
gaaaaaggaagagagcactgcagccagtgaaaccactgagcttcaagaatccagaggctttaggaagaagataaaacgccttg

SEQ ID NO: 680685 - DNA, 98 bp, Homo sapiens
aatatcatgaacaggaagaaattttcaaacttagactaggacatctcaaaaagggaaacagtgcttcttagtcctacgtcagcagcagtttaatgtcc

SEQ ID NO: 680686 - DNA, 100 bp, Homo sapiens
cgacccttggcgcctgcccctgcaacgggaggagggtgaggacaaaatcttcttaatcaacaagcttcactccatctacgagaggaaggagagggaggag

SEQ ID NO: 680687 - DNA, 100 bp, Homo sapiens
acggacctgggacgcggagtcctgaagccggcggacggttttcgtacgggcggccgtgcgcgaggcgaggcatcagcaatgcagaagcacggcagccagg

SEQ ID NO: 680688 - DNA, 80 bp, Homo sapiens
gtcatcaagacctgggattttggtggaaggaggagaatcagaaggtcgccattgaaactattgaattcaagagcttatcg

SEQ ID NO: 680689 - DNA, 75 bp, Homo sapiens
caaaaactatgctgaggcaaaggatgtcttcctgggcatcttccatattggattcttaccaatgtactgcagaga

SEQ ID NO: 680690 - DNA, 100 bp, Homo sapiens
gccgcgagcgagcttccgcgccgcccgcacgcgcgacctacctgggcgctccgcgcccccggatgctgcagccgctgcagagggagcgtcgcgccggggc

SEQ ID NO: 680691 - DNA, 100 bp, Homo sapiens
agcccaagctctgggcccgctacgcctggaatcatttgaataaggacaaaatgttttccattatcaagacatggccatctatctaaatattatatcaact

SEQ ID NO: 680692 - DNA, 100 bp, Homo sapiens
gccaaaatgactgcagtgataattcagatgaagaaaactgtaggtcgacatgttaaaacgggtcagttggcagccatcaaagttatggatgtcactgagg

SEQ ID NO: 680693 - DNA, 100 bp, Homo sapiens
ccaggcgtggaggaagaggcattgaggactttccttacctgtttttccagctcacccactgccagcagagggtgataaaagaaaatgtggctgaagttac

SEQ ID NO: 680694 - DNA, 86 bp, Homo sapiens
tgaggacgttcccttcacggagaaagattttgagaactgtggctgcaccatctgtcttcatcttcccgccatctgatgagcagttg

SEQ ID NO: 680695 - DNA, 51 bp, Homo sapiens
cctccttcccttctgtgagctatgtctcagcctacagcctggctcccgcga

SEQ ID NO: 680696 - DNA, 80 bp, Homo sapiens
ggaagctggatttcctctcctgtaaaatgaggtattagaaaactactcggatgctccaatgacaccaaaacagattctgc

SEQ ID NO: 680697 - DNA, 100 bp, Homo sapiens
ggacaaagcaaggagctccagaggaagagactcttggagttcaactttagttggcttaccaagagtgaagcgtgacaagtactcagtcttcaactttctg

SEQ ID NO: 680698 - DNA, 75 bp, Homo sapiens
tcgctgtacgccgagcacccaggcgactgcctcatcttcaagacccagtcatggcagcctccagcatcagttcac

SEQ ID NO: 680699 - DNA, 100 bp, Homo sapiens
ccctggagatggagttcaaacgcggccgcttccgactcagcctcttcagcgacctgcccgaggcacagttggtggatctgaaatctgaactgacagaaac

SEQ ID NO: 680700 - DNA, 50 bp, Homo sapiens
tggcactacccgtcttgaggaatttttcagaagaaaatgcaagtaaaatg

SEQ ID NO: 680701 - DNA, 89 bp, Homo sapiens
ttcagccccaagttcttggagtcccagttcagcctgagtgcctcagaagctgccaccttgtttggatccctgctgccttggtgatcccg

SEQ ID NO: 680702 - DNA, 98 bp, Homo sapiens
caggcctgtcttgcatctgtttctccaccacctagcctggaatatactggtagcagtgtttgatgagcaggatccacatcacggaggtgatggcacca

SEQ ID NO: 680703 - DNA, 75 bp, Homo sapiens
ctgtgtttgggaggactcgaactggcgccaggtttactcctggcttgggggcattaggaagcactggaggctctt

SEQ ID NO: 680704 - DNA, 110 bp, Homo sapiens
caccaccgcggtcactcaccgccgccgccgccaccactgccaccacggtcgcctgccacagcaaagggttaccttccagttcaacatttaccttggaagaggggaccatc

SEQ ID NO: 680705 - DNA, 95 bp, Homo sapiens
agtaaacggggctgctggtgggccgcgtcgaagacatggaccagggctacggagaataccctctaccatctgctttggtcagggtgccgctcgag

SEQ ID NO: 680706 - DNA, 83 bp, Homo sapiens
cgagcaaaaatgaaccagcagcgtgggaggcgttttagatctgaataatgtggctgctacagcccgggtcctagttattggag

SEQ ID NO: 680707 - DNA, 88 bp, Homo sapiens
gacgagctgcagttgtgggcaccttgtatgcgctatttgtcgtagatgtccagacaagccagatcaccaagatccccattctgaaaga

SEQ ID NO: 680708 - DNA, 97 bp, Homo sapiens
gagaaagaaacactttccagagttccctgcaacccgtgcttatgcagatagttactattatgaagatggagaagcctccccagctttctgaggatga

SEQ ID NO: 680709 - DNA, 75 bp, Homo sapiens
gacaagtttgcagatcgggagcgcaaggtcgccctcaaggccatgatcaaaacacagccctcagcgcctttttcc

SEQ ID NO: 680710 - DNA, 100 bp, Homo sapiens
cctttcccgaggaccggtccgaactggcgcaggggccgctgcggcaagggactttgaacatgtcggggatcgccctcagcagactcgcccaggagaggaa

SEQ ID NO: 680711 - DNA, 98 bp, Homo sapiens
cctggagattgacgcagagtgggcggcggtggtgtagatctctggcttcctgctctgtttgttctggttgccctggaaagcctgctgctcagcccatg

SEQ ID NO: 680712 - DNA, 100 bp, Homo sapiens
gccactcagagtcgcccgagaaattctacaagggggttgctcctctctggatgagacagataccatacaccatgatgaagttcgcctgctttgaacgtac

SEQ ID NO: 680713 - DNA, 94 bp, Homo sapiens
ttcaaggatatgctgtattcagctcaggaccaggcaccttctgtggaagttggaattaacgacctctggaaagatgccttttatgttaccagga

SEQ ID NO: 680714 - DNA, 51 bp, Homo sapiens
gtcagagcggagccaagatgcgaatggggaccttaaaggctttgatccagg

SEQ ID NO: 680715 - DNA, 97 bp, Homo sapiens
ccagacccggacgacccccattgctgagccagcggagctgcttgaaacttgcccctggagtcagccagtttgcttacacgtgtgtacaagaccaccc

SEQ ID NO: 680716 - DNA, 100 bp, Homo sapiens
agacagaggggagcacagagaaagagaatgatgaagagaaaggcccggagactgaagatgtggacaaggcagtgaaggccgcccgggccgccttccagct

SEQ ID NO: 680717 - DNA, 83 bp, Homo sapiens
gatctaccttctggaagctactactacgtggtgcttggaaaggttcatgtgtgcccagctgcccaaccccgtcctggacagca

SEQ ID NO: 680718 - DNA, 100 bp, Homo sapiens
cagagtttgatgttgtcttcaatgctgcccacatgctcagtgatcggcatgttggtaaaatttattccaaatgttcttcttttctggattatgtcagacg

SEQ ID NO: 680719 - DNA, 95 bp, Homo sapiens
aaaccccaatctcagtggacaagttcaatctcatccctcccagcagctccccttccaccccccggggaactgaagattgtcctggccgcgacctg

SEQ ID NO: 680720 - DNA, 102 bp, Homo sapiens
ctgaggatagtttagaaggatgcttggattgtctgcttcaagccctggctcaaaatagaggagatgttaaagtaacccatcttgcaggacgacattgaagat

SEQ ID NO: 680721 - DNA, 100 bp, Homo sapiens
gaaaaccaatttcgatcagactacatcaagagcatagcccctatcactgactttgaatattcccaggatcttggcctcactactgtttgggaagaccagc

SEQ ID NO: 680722 - DNA, 100 bp, Homo sapiens
atgaacatgaagaccagcacagcctagatttggagcgggaagagagagagcgcgccgaacgagcaaaacgcgaggaagagctacgagagtatcaggagcg

SEQ ID NO: 680723 - DNA, 82 bp, Homo sapiens
tgcaagttggaattgatataatgaagactagttttccaggtatcatgaactgatcactaaatatgggaagttggagcctttg

SEQ ID NO: 680724 - DNA, 98 bp, Homo sapiens
catgagccagctgagtttcgatcggatcctcaagaaggatctggtgcaggcgggatgtagctcattttgggatacgagtctccatcgtggagcctggc

SEQ ID NO: 680725 - DNA, 100 bp, Homo sapiens
cagcctttctccaggttctgtctctcccattctgattcttgacaccagatgcagaccaagatcactccatggatgaaatgacagctgtggtgaaaattga

SEQ ID NO: 680726 - DNA, 80 bp, Homo sapiens
cgtgaccgagagcgcgaatatcgtcatcgttagaagttgcagagcttgaagtgaaaaccagagaaaaattagaagctgct

SEQ ID NO: 680727 - DNA, 76 bp, Homo sapiens
gggaatattcctcctgacttatttgctagaatgacagcagaggaagagagaagggcacagttacctaagtatcaac

SEQ ID NO: 680728 - DNA, 100 bp, Homo sapiens
gaaacctcttagaaaaaagagtagctattatttcatcaaacatgtcccgccactgacagaagaacaactaaataggaaacctgctcttccgttgaaaaca

SEQ ID NO: 680729 - DNA, 100 bp, Homo sapiens
tgcccggccccgcgtcgtctggcgccgccgccgccagcgcgcatgggtgtgagggtcatggacacaaactgggtggctcgaagaggctcctcggccggtc

SEQ ID NO: 680730 - DNA, 75 bp, Homo sapiens
tatttgatggaacaatcattagttcagtgcagtgtctgacttgtgacaggaatgagtccctggaacgccagatgc

SEQ ID NO: 680731 - DNA, 50 bp, Homo sapiens
atggagacgccgccgctgcctcccgcggggattcccgaagtcttccgttt

SEQ ID NO: 680732 - DNA, 75 bp, Homo sapiens
cgaccactacatgtacttgaaccatggacagcagacgatcccgaacggactgtttgctaatccagactttacaca

SEQ ID NO: 680733 - DNA, 80 bp, Homo sapiens
gtggtcaaacccacccggcccaactcactgctactgcagcactggggtgtcagttgttggtccgacccagaacgcttcag

SEQ ID NO: 680734 - DNA, 76 bp, Homo sapiens
tccacgtggtggatggtaaagtcccagatacactcaggaagtgtttctcagagttgattcgatgtcatcagtcccg

SEQ ID NO: 680735 - DNA, 83 bp, Homo sapiens
tgccgctcctaagcctgcacagccgcggcggcagcagcagtgagagtgttctaagaacggaagcatctgggctggatggaatt

SEQ ID NO: 680736 - DNA, 105 bp, Homo sapiens
tgaaggacaagaacagcgccgtcaccagcagagaaacagcacccaggactatcttccaaagagttctggatatcctaaagaaatcttctcatgctgttgagcttg

SEQ ID NO: 680737 - DNA, 74 bp, Homo sapiens
tgccagtgcatcttttgcacagcttgcttatcagattgttgtggaagaactgcacccacaccgaaccaagagag

SEQ ID NO: 680738 - DNA, 114 bp, Homo sapiens
gcaccggctcagcgagcggagtggaaagccaaggtccgcaggatctgagctgtccaagggtttccaggcctgaggtgcccgccctggccccaggagaatgaaccagccgcagag

SEQ ID NO: 680739 - DNA, 75 bp, Homo sapiens
ccgcctcgtcctcaaggccaaagacatcaggaaatgggtcctgatgaatatgaagagatggaagaagaggaggag

SEQ ID NO: 680740 - DNA, 100 bp, Homo sapiens
gctgtctctccccgccagttgcggggccagctcttccgaggctccagcctgcttttccgccgggtgtcatcaggatcatgctttgccctggagtaacctg

SEQ ID NO: 680741 - DNA, 75 bp, Homo sapiens
gcgatttcttcgaggtggagtcggagctgggacggatttaagtgccctgtatgctcaaaatttgtatcctcagat

SEQ ID NO: 680742 - DNA, 98 bp, Homo sapiens
aaaaagtaatgggatgaataaaattggactcagagtttccattgacactgatatggtaacagactgggttgacccatcatttgatgattttctagagt

SEQ ID NO: 680743 - DNA, 75 bp, Homo sapiens
cagtgctcggaaagcatctattgtgaaaaacctaaaggataccttaggtactgtgagaatagagatgtttcgaaa

SEQ ID NO: 680744 - DNA, 80 bp, Homo sapiens
ccggccggcacgaaggcgtccccacgctggaaggcttccccgggcgctgcctggacaggcctgcctgcgtgctgggacat

SEQ ID NO: 680745 - DNA, 100 bp, Homo sapiens
acccagaatcactgaagggtcagagcattttctctgtgccaccagagagtttcgtgtgcgatgcaacaaggagacgcgcctttgccctggtctctcaagc

SEQ ID NO: 680746 - DNA, 73 bp, Homo sapiens
gcatgatcctgaagcagacgttctggagtgggaggagcggcgcaggcagaacattgagaagatgaatgaggag

SEQ ID NO: 680747 - DNA, 82 bp, Homo sapiens
gtcgatggtcggcggcgcccggatgggcagctgaggacacctgctccacttcaccttttgccatgagtaaaagctccctgag

SEQ ID NO: 680748 - DNA, 82 bp, Homo sapiens
tgggagaccaccgggatgggcaggaaccatcactgttgctggaggcacctgacaaatcctagcgaatttttggagcatctcc

SEQ ID NO: 680749 - DNA, 97 bp, Homo sapiens
gctcatcgacctcagcagcaatcccttccactgtgactgccagctgcttccgctgcacagggcaattgaaggaacagactaaaaatcgtgtcctgga

SEQ ID NO: 680750 - DNA, 88 bp, Homo sapiens
cactgcaaggcgccgggggacacgttggctgcgttttcggcgggcttcccgggccaagtcctgtatctgccatgtctgtggcgtccac

SEQ ID NO: 680751 - DNA, 83 bp, Homo sapiens
catcagctcggcagtcgcgaagcagcaaccatgtcccgcagcgtggacaagcagcatgccgtcatcaactacgaccaggacag

SEQ ID NO: 680752 - DNA, 109 bp, Homo sapiens
ggataagcaggaccagatgataccatgaagagaagtttacaggccctctattgccaactgttaatgggcctttggagtgacgctgtgggaactcatgactctgggccag

SEQ ID NO: 680753 - DNA, 83 bp, Homo sapiens
cgctactctctctttctggcctggaggctatccagcgctgaggactccctctgcttctcccttacaccaggaatgaacctttc

SEQ ID NO: 680754 - DNA, 116 bp, Homo sapiens
gagcgactccccggctcgaagcctggatgaaatagatctctcggctctgagggaagccagttgagggaagttctccatgaatgtacgtcacaatgatgatgaccgaccaaatccct

SEQ ID NO: 680755 - DNA, 101 bp, Homo sapiens
ctgatggaagtaccatcctggtccaaacatgaaagaattcccaacatcaagattgattgaaacatattcaatggatgttttctggcaaaggccttcctgca

SEQ ID NO: 680756 - DNA, 101 bp, Homo sapiens
tgacggccgccaagaagcacggcaccaaaaacaagcgcgggctgatcccttatccaacatggttctaaccttcagtactaaagaagatgcagtttcctttg

SEQ ID NO: 680757 - DNA, 97 bp, Homo sapiens
accattgacttcacacccggctcggagctgctcatcaccaaggccaagaacgggcacctggctgtgcggggatctgacgagcttttctctacttgtg

SEQ ID NO: 680758 - DNA, 83 bp, Homo sapiens
ggtgcttctacgtggtggtgacgggggaccagaccgccttgcaccgggccacagtggtggggaacacggagatcatcgcggcg

SEQ ID NO: 680759 - DNA, 96 bp, Homo sapiens
ggtcggggcggcggccgcgctgggcgtgaggggggccttagagggcctccccaggccgcctccgcccgtgaagggtcttactgaagtaacacaaag

SEQ ID NO: 680760 - DNA, 75 bp, Homo sapiens
gtgaagttgaatctgcaaaacttattcgggataaagtagcagagatgcctcggcagtggaatccaatttctttcc

SEQ ID NO: 680761 - DNA, 51 bp, Homo sapiens
gagaccatcctggccaacatggacctagatgacatagaagatgaaaatgaa

SEQ ID NO: 680762 - DNA, 98 bp, Homo sapiens
gaccaataaggacaaaatggaatgtgaagagcaaaaagtctcagatgagctcatgagtgaaagttacagaatgtctgaaggggacagtgtgggagaat

SEQ ID NO: 680763 - DNA, 100 bp, Homo sapiens
aagcctgcgtaactttctcccttgatccgggagtctttccactggtattctaccttgtaaatactgttatttgtatatactgtaaatgatgacatcggtg

SEQ ID NO: 680764 - DNA, 75 bp, Homo sapiens
ccccccggagaaaaagttgaagcgttataaatcatgaccaccccaggaaaagagaactttcgcctgaaaagttac

SEQ ID NO: 680765 - DNA, 76 bp, Homo sapiens
cgagcaggttctcggagggaccgggataggttaccatgccagcaatgattccttttgagtttctgacagaagatag

SEQ ID NO: 680766 - DNA, 83 bp, Homo sapiens
caccatgccgctcctaagcctgcacagccgcggcggcagcagcagtgagaggacatccggaacacggtgggcaacgtgccctt

SEQ ID NO: 680767 - DNA, 106 bp, Homo sapiens
ggtttcgggatctcggtgctgcagacggcgagacctcctgcacagggagcaatggaccacagaaattctgcattgaaaaagttgggaaagaaaattggctacccag

SEQ ID NO: 680768 - DNA, 90 bp, Homo sapiens
accatcaacatggagaacaagaccacgtgggtggggtggaagacaacccgtgagtattacaccttcatgtgggttactttgcccattgac

SEQ ID NO: 680769 - DNA, 83 bp, Homo sapiens
gctagcactcatccgcttccgggtcaagtatatttgccttccctccatgatctccaacactatccgataaagtagaagcaact

SEQ ID NO: 680770 - DNA, 97 bp, Homo sapiens
aagacgatctgcacttcgcattttggcattgacatttaattttagggtcctttatatagaagggagagtagagatctggttggagttggagggtgag

SEQ ID NO: 680771 - DNA, 100 bp, Homo sapiens
agaaaaaagtctaccatacaaaccagaccaccttcataattggagaaacaccaaaaggaatccgcagatgtcaagccctccaacatcctagtcaactccc

SEQ ID NO: 680772 - DNA, 80 bp, Homo sapiens
tcttctcttcctcctccaccgagtcgtgctctcgccccaacccgcgcgccagttgccaaaacaaaggggatttggtgatg

SEQ ID NO: 680773 - DNA, 98 bp, Homo sapiens
ctcacctatacgtgcaagaaaggaacaggtactactgagcgagtgtgcttgatccagggaacggttgaagcactgaatgcagttcatggattcattgc

SEQ ID NO: 680774 - DNA, 100 bp, Homo sapiens
gcgcgccctggcgggtccggaccaagtccagagcacaacctccagaagacaacagaaggaagccagttttggggaaacttggcactctattcactgcagg

SEQ ID NO: 680775 - DNA, 75 bp, Homo sapiens
ctgaccgcgggccctgccctgggctggaacgaccctgacttgccttcaaggtgtgcaagtaaggacttatctcca

SEQ ID NO: 680776 - DNA, 96 bp, Homo sapiens
taggcctctcacatggcagacgtctcatccttatatcctggcagacagtatcagaagtgactctgaccttggactccaagacctacatcaacagcc

SEQ ID NO: 680777 - DNA, 100 bp, Homo sapiens
gtcgttgctgccgggattttggaggccggggccgcgctgagggcgcccagctgcgggcctccccttcctcatcatcgagacaagcaccatcaagccttac

SEQ ID NO: 680778 - DNA, 82 bp, Homo sapiens
caaagcttctccctcagtatttagaccaggagcgtgaggatcatccccggagaggacgggaggatcggcagcacagggaacc

SEQ ID NO: 680779 - DNA, 75 bp, Homo sapiens
tgcccggccgagaccccgtctgggagtcgttgcttagcaaatctaaggcctcttttagattctggaacaatgggc

SEQ ID NO: 680780 - DNA, 95 bp, Homo sapiens
taaggagcagcttccaggatcctgagatccggagcagccggggtcggagcgggctgctgagaactagccctagacctctgcgtgagggttcttct

SEQ ID NO: 680781 - DNA, 94 bp, Homo sapiens
ccatgattgtgaggcctccccagccatgtggaactctgggatagatgggcagcagaagatcatgtgcttcgtgataccgatgaaaatcgtagat

SEQ ID NO: 680782 - DNA, 100 bp, Homo sapiens
gatccgcaggccagtcctcccaggggctgaagtgtttcaaagtcaccctcccacctttcatgtgtaataaacaggccacagacttccaggggaatgattt

SEQ ID NO: 680783 - DNA, 118 bp, Homo sapiens
ccgagatgtctcgctccgtggccttagctgtgctcgcgctactctctctttctggcctggaggctatccagccttgttctaaagacgaaggggaactccctagtgctacaggctgttt

SEQ ID NO: 680784 - DNA, 100 bp, Homo sapiens
ccaaaaatggaccaggaccaacaaaaactaaaactgcaggtccagatcaaacagatgatggaggcagcaacacgacaaatcgaggagaggaaaaaacagc

SEQ ID NO: 680785 - DNA, 75 bp, Homo sapiens
tagatgctcaagtatatcttgaagaaatgtcttggaatgaagaaataaattctactgggtgcggtggctcttacc

SEQ ID NO: 680786 - DNA, 100 bp, Homo sapiens
cctggagcggcgcagccggagtggggccgtgaggtacttggtaatcaaataatgcctggatttcttaatatgaagataaagtttgtgtgcgcccagtgtc

SEQ ID NO: 680787 - DNA, 100 bp, Homo sapiens
tgacttttatcatcatattgataatctcaggagaactctatgcagaagggcaagtgtccagagaatggctgggatgaaagtacacttgaactctttttac

SEQ ID NO: 680788 - DNA, 100 bp, Homo sapiens
ttctggaaaaacatgaagtttattaagaaaccaaagtcatgggaagaatattttgaatggttttgtcaaggaactggctccggatggtggagacgctgag

SEQ ID NO: 680789 - DNA, 115 bp, Homo sapiens
acatttaagtggagaaaggggtcataaatcaagatcaatgaactgagccatgttcaaatccctgttatgttgatgccagatgacttcaaagcctattcaaaaataaaggtggaca

SEQ ID NO: 680790 - DNA, 100 bp, Homo sapiens
gaaagtccaagctcgtggtgggtggaaaagtgttcgccgaggtatccgttacagcactgatgtgagtgtagatgaagtaaaagctttggcttctctgatg

SEQ ID NO: 680791 - DNA, 98 bp, Homo sapiens
ccatctctaacctaccagctgccactttccaggagccccgcggcctaagcgcagcgtctccgcccttggctgagactggcgctcctcgccgcttccgg

SEQ ID NO: 680792 - DNA, 75 bp, Homo sapiens
gggttattcgagtgaccgagaccgcggccgggaccgaggggcgaactttctgaccaagtatacaactacccagag

SEQ ID NO: 680793 - DNA, 101 bp, Homo sapiens
ttccgctcccagtgcctgcaggtgccagagagagaggcgcaggacgctcagcaggatcaggcaaaaatgatcatgccgaaaaagtggcggaaaagctagaa

SEQ ID NO: 680794 - DNA, 100 bp, Homo sapiens
cgagaaggttggggtcgcctcttccgagaaatattgtatccacagtgaatcttggttgtaaacttgacctaaagaccattgcacttcgtgcccgaaacgc

SEQ ID NO: 680795 - DNA, 75 bp, Homo sapiens
atagcaatcccagacctaagtttgaagattggctttgtaacaagtctattatcctcccagtccacaacgctgaac

SEQ ID NO: 680796 - DNA, 50 bp, Homo sapiens
tgggcaccttcatctggaataagatccggacgctgcggctgaagatcttg

SEQ ID NO: 680797 - DNA, 51 bp, Homo sapiens
ccaaaagtgaaattttcaagtcaacagctgtgtcagcgtgttatgatgccg

SEQ ID NO: 680798 - DNA, 82 bp, Homo sapiens
ttacactcttgtgaccatcctcttgccgaaaaaacccagatcacaaaatttgtccaggatagacatagagctagaagaaaca

SEQ ID NO: 680799 - DNA, 76 bp, Homo sapiens
tgatgctggcgcagggcacggtgggcgcctacctggaatcctatccatcttcttcaccgatatggtttgtggattc

SEQ ID NO: 680800 - DNA, 100 bp, Homo sapiens
cggacggggagctgaacgtggacagcctcatcacccggctgctggaggactggtgaattttcagctcgtttccttttgaagctgcccgtagatttcagca

SEQ ID NO: 680801 - DNA, 49 bp, Homo sapiens
cgagggcaagtgcgcttacatccgaggttgaagcactggacaatgccac

SEQ ID NO: 680802 - DNA, 133 bp, Homo sapiens
atcaattgaatatggacccaagagtcagcggtatattagttcagttaccactaccagttaagggaagaaagtcggaggctggctttggctgcgaaaagagaaaaaagaaaagagaagagaaggaagaaaaagg

SEQ ID NO: 680803 - DNA, 50 bp, Homo sapiens
agcagggcggaggaaagtgcagggcgaactttctgaccaagtatacaact

SEQ ID NO: 680804 - DNA, 90 bp, Homo sapiens
ccgcaaacagaatcgcgtttggctgtgctgtggaaaagcgagattgtctttgaccatttgctatggacattgtcagggatggtgcagcct

SEQ ID NO: 680805 - DNA, 90 bp, Homo sapiens
cctggataccctttcagaaatttcttcaaataaacagaaccattcttatcctgagagcctatctctggcagaagtagccaacgagctgga

SEQ ID NO: 680806 - DNA, 90 bp, Homo sapiens
gatctccagcgccggcctcctcagtgcgaagaagctgcagccgcacctggccaagggaatgggtaccacagaccatgtcatcgtcctggc

SEQ ID NO: 680807 - DNA, 100 bp, Homo sapiens
gttgctgccgccatacgcgctctccctgtttagattcagaatggacagtttagaagaacctcagaaaaaagtctttaaggctcgaaaaacgatgagagtg

SEQ ID NO: 680808 - DNA, 100 bp, Homo sapiens
agtgatgaagaagaaggctttattggcccaggagcaggtgcaccctgacattggcatctctgccaaggccatgagcatcatgaactcgtttgtaaacgac

SEQ ID NO: 680809 - DNA, 100 bp, Homo sapiens
tgatttacgatccctggaaaattaccactttgtagatcatacctcactcctgttagggatgaagagtctgaatcccaaagaaaagcaagatctagacaag

SEQ ID NO: 680810 - DNA, 75 bp, Homo sapiens
ttatgctggctgttatgtacgcaggagaatgtgacagtgatgataacatgggtgccaaaaatacttcaataggag

SEQ ID NO: 680811 - DNA, 50 bp, Homo sapiens
gccagatacctggagaactatgatcgttctcttcaccccaggaagaagaa

SEQ ID NO: 680812 - DNA, 74 bp, Homo sapiens
gtccatgctaacctactatgagggtcgagcagaggtgaaagaaaagatgttgtcccggttaagagtagtttcca

SEQ ID NO: 680813 - DNA, 112 bp, Homo sapiens
ctggccattgatgatgatatcattatgctgacctctgacgagctgcaatttggttatgagaaggaacccagccagccggcggaatgcaagcagcagtaggaagcggaggcgg

SEQ ID NO: 680814 - DNA, 90 bp, Homo sapiens
cgtgtatggaaactcatcaggacggaagcacaggggccactcagagtcgcccgagaagaaagcagatggtggagctgaatatgccactta

SEQ ID NO: 680815 - DNA, 100 bp, Homo sapiens
gccctggtccggacccgcatgcaggcacaaggtgaccacccgccggcggaagaaggaaggagaatacaacgtccagcaacagtgcccaggctactaccag

SEQ ID NO: 680816 - DNA, 100 bp, Homo sapiens
atctcagggaactggatgtcagcaagaatgcctaccgtatgtgaacgggagctgtgtgtgtttgcttttcaaaccctgggagtaatgaatgaagctgctg

SEQ ID NO: 680817 - DNA, 98 bp, Homo sapiens
cgagatgtgggagctgctggccgcggcgtgggcagttcaggggctgggcggctgaggcaggtgacagcagggacatgtctcgggagatgcaggatgta

SEQ ID NO: 680818 - DNA, 74 bp, Homo sapiens
taagaagtgctcagagaggtggaaggccttggacaagattcgctatgagagcctgacagacccttcgaagttgg

SEQ ID NO: 680819 - DNA, 100 bp, Homo sapiens
ccagcatgtgttggctgttgacccagaaaaggcggcccagatgaaatcccaggttctatctccccgtcacacccgaggcctggcttcaggagggagcgga

SEQ ID NO: 680820 - DNA, 100 bp, Homo sapiens
tcgattccgcgccagttgcctggctcacattcggaggctggtgtccagggtctcagcgcgggggacgactcagggatctgtgaacaagaggaacctcagc

SEQ ID NO: 680821 - DNA, 51 bp, Homo sapiens
tggcagcgcgggaaacgtcaaactcgagatcacccctgagtacctccagag

SEQ ID NO: 680822 - DNA, 49 bp, Homo sapiens
cagactcagatccaagtcaacagttttggaaattttagcattcaggtgc

SEQ ID NO: 680823 - DNA, 73 bp, Homo sapiens
ttgtgagcctggactcgccctcctatgtcctgtacagccccccaggttcgcctaatagtcttggctacttccc

SEQ ID NO: 680824 - DNA, 97 bp, Homo sapiens
aaaacttgctgcggttgctcaagctggtgctcaagaccgaatcggctgggcttttggcctaggattagaaaggctagccatgatcctctacgacatc

SEQ ID NO: 680825 - DNA, 75 bp, Homo sapiens
aaggattccaagtaactcttatttggactcatggtttttccaaaaccagtgaccgcattggaatatacattcagt

SEQ ID NO: 680826 - DNA, 90 bp, Homo sapiens
tgtagataccaacttatacttcctggcgctgaccttctttgtcgcagcgttccatacgggaggcgtgggcagcttcgacatcgccggcct

SEQ ID NO: 680827 - DNA, 75 bp, Homo sapiens
ctaccacatgcaaacatacaagcagtctcacctcagactgacatcaatttgccctatcttacaatggattcttct

SEQ ID NO: 680828 - DNA, 100 bp, Homo sapiens
cgtgtgaaggacctgaaacacatcataagccttgtaatattgctctttgcccaggctccagacccagttcctggacctgccctggaaaagaagtatcccg

SEQ ID NO: 680829 - DNA, 82 bp, Homo sapiens
gtggagatcaacggcatcatgtacacagcacaggaagtcctggagaacctgaaggaccgctggtaccaggcggacagccccc

SEQ ID NO: 680830 - DNA, 101 bp, Homo sapiens
agcgtgcccatcccggggggcagcaacggcgacatccagcaagactgcagctgaatatgtaaaatctcgactcccagaggcccttaaacagcatcttcagg

SEQ ID NO: 680831 - DNA, 83 bp, Homo sapiens
ctgtgcgcgctggcgctgagcctgcagccggccctgccgggaaatcctcattgacgattcaatttgttgaaggccaatttgtg

SEQ ID NO: 680832 - DNA, 83 bp, Homo sapiens
gcctcatcacccggctgctggagggtcaaggaagctgatccgctgagtaatggctcagtcatgatttttaacacctctgcctt

SEQ ID NO: 680833 - DNA, 74 bp, Homo sapiens
gatgagccccgcgaccactggcacattcttgctgacagatcccgtaccagctttggatctcggacagcaactcc

SEQ ID NO: 680834 - DNA, 73 bp, Homo sapiens
tttgcagatcgggagcgcaaggtcgccctcaaggccatgatcaaaactgctgtccccggcataggtccatctc

SEQ ID NO: 680835 - DNA, 83 bp, Homo sapiens
gcgagcagcggcgggggcccgaggggtggaaaggagactatggaaccaggatccagcagtacttcccatccaactacgtcgag

SEQ ID NO: 680836 - DNA, 80 bp, Homo sapiens
ggctgaggaccccggcggcagacgcaggttcgggaccatgagctgacacgaatgcagagtttgagtccagatcccaaagc

SEQ ID NO: 680837 - DNA, 89 bp, Homo sapiens
cccgctgccttgtggaggagttgagaaaaaccaaggggacagatgagcaggcaattgtggatgtggtggccaaccgttccaatgatcag

SEQ ID NO: 680838 - DNA, 80 bp, Homo sapiens
tgcgcagtgcaggcagataccgtttgacaccaccactgacagtgaagatagtactgtgtccatccagataaaattagaaa

SEQ ID NO: 680839 - DNA, 75 bp, Homo sapiens
tgagcacaccagaaggagacacatccagcatgccaatgaagatgtggaaagaatgttactaggaaacaagtgtga

SEQ ID NO: 680840 - DNA, 75 bp, Homo sapiens
tgccctcggaggctgcgtttgggaatagctggcaggtctcacactctgaggatgactgtctagctttcaaagttc

SEQ ID NO: 680841 - DNA, 75 bp, Homo sapiens
tgccatgaaatatggaaacgactcctcggccgagctgagtgagactagacgcttgaagcaaagctgccatcccag

SEQ ID NO: 680842 - DNA, 75 bp, Homo sapiens
gatacgggagctcaaagtgtgccttctcggggtttccactgtatccaaaaggaggggagaagttgcagtttgatt

SEQ ID NO: 680843 - DNA, 83 bp, Homo sapiens
cagaaagagtcaacagcagtggcaacaggtagaatcactgtggactgagacccacctttctagacctgaagcccaggaggagg

SEQ ID NO: 680844 - DNA, 74 bp, Homo sapiens
taacagatctcttaattcaacagaaccatattgggagtgtgattaagggcccagaatgtgttcagtatcttcaa

SEQ ID NO: 680845 - DNA, 83 bp, Homo sapiens
ctgtcatgctcgtcctcatctgggttctcactggccattggcttctcatggatgattcgagtggtgaatgcatttcgtagttc

SEQ ID NO: 680846 - DNA, 90 bp, Homo sapiens
aaaggagatgaagtcacaattacactgccacatatcccttttcctccagcttatggaggcatatctgaggtgaatcaacctgccgaattg

SEQ ID NO: 680847 - DNA, 100 bp, Homo sapiens
tttgcatatggacaaacatcctctgggaagacacacacaatggaggaggagatgttaaagtaacccatcttgcaggacgacattgaagattggtcttctg

SEQ ID NO: 680848 - DNA, 98 bp, Homo sapiens
ggcagttcatcgacgagtatgtggtcaaagctcagattcacagttgcataagccgtcacctggaatgtcttagaagccgtgaggtatggctgtatgaa

SEQ ID NO: 680849 - DNA, 76 bp, Homo sapiens
ggtccgtgcgcccagcgtcccagggcccaggccgagcaggtggagccgccaccaaaatgcagattttcgtgaaaac

SEQ ID NO: 680850 - DNA, 101 bp, Homo sapiens
ttgggaacgaggggtgaagcggcccaggtgagggtggtgtgtcaagaaggatggtccgggcccctgttggctcagcgcctggtaccagcttccttgggtca

SEQ ID NO: 680851 - DNA, 100 bp, Homo sapiens
cctgggccgggccgtgcagctccaagagctgtggcccgggggcctcttctggaccaggaaactctccacgtggagaccacgtagctttgcaaggccagag

SEQ ID NO: 680852 - DNA, 51 bp, Homo sapiens
gccgccccgaaactttcaccgcgagcggacacgaatgcagagtttgagtcc

SEQ ID NO: 680853 - DNA, 100 bp, Homo sapiens
aggatgacgaggaggatgacgtgcagaacaccaactctgcccttaggtacgacattgtcttcctgccaccctccttccccatcgtggccatggagaaccc

SEQ ID NO: 680854 - DNA, 83 bp, Homo sapiens
gtactctttgccgtacccaccggagcctggcgcagcctccctctattaccagttcctccgtgtcacaaagcagtacctgcccc

SEQ ID NO: 680855 - DNA, 76 bp, Homo sapiens
gctgccctgtggggcctctacatgtccctggttaatgtgggccatgtctggcgatcagtgggtgaccgcggctgcg

SEQ ID NO: 680856 - DNA, 82 bp, Homo sapiens
cgctgggagccgttattggctgccgttaaggaccgttacgtttcccggatcatggaggacacccaggctattgactgggatg

SEQ ID NO: 680857 - DNA, 74 bp, Homo sapiens
tgactgaggcagtgcgggccctgctggccctcagccacaagtacggtggacacagcagccatgtgacaaatgtg

SEQ ID NO: 680858 - DNA, 99 bp, Homo sapiens
aattttgatatgccttcaagtatggatgagtatgtccatcagacagcaccagttgcccttgaagcagaaaacagaggtgaaatgaaactagctctccag

SEQ ID NO: 680859 - DNA, 100 bp, Homo sapiens
gggaacctgactttcacagctcagtacctaaggccccctggggccctgccccacagcatcatgatggggaaactccccctgggggtcgtctccccttatg

SEQ ID NO: 680860 - DNA, 75 bp, Homo sapiens
cggcgaggccctcatgtaccacacgaaatgaagctgttgtcatttctggaaggaaactggcccagcagatcaagc

SEQ ID NO: 680861 - DNA, 82 bp, Homo sapiens
ggagccgaggcgcaggtggcgctgggtgtggacactgccagcggctgcagccgacttggaatgacctgggagacaaatacaa

SEQ ID NO: 680862 - DNA, 83 bp, Homo sapiens
tttaatgaagatattctgtgtccacatggtggagtttgtccatatgctcaatgctaccatgtgcgccactacccgtaccatct

SEQ ID NO: 680863 - DNA, 100 bp, Homo sapiens
tttctgagcttcatgacaatcaggacggtcttgtggttgatatccctgaaagtacttaatagcatcgtgctgttggggaaatcgtgccagtatgtgaagg

SEQ ID NO: 680864 - DNA, 96 bp, Homo sapiens
gagcctggatgatcatgttgttgccgtgtgtgctggaaacaaaatattcatgctggatattgaggaacagggtctgttccacaaaaaagacagtgc

SEQ ID NO: 680865 - DNA, 100 bp, Homo sapiens
tctgtgttagaaaaactaggggaaaggaaaccatgcaacagtcaaccttctgagctttcttcagagacctcagaaaaaaccactgtctgcaataataaag

SEQ ID NO: 680866 - DNA, 50 bp, Homo sapiens
gcctccgccaccgtgcacatccgaatggatcatggaagggaagtggttgc

SEQ ID NO: 680867 - DNA, 100 bp, Homo sapiens
ccaaaaagcagatggaggagttacagacagccgctcaggaagcaatcttgcatgcgtctggaaatggcacaaccaaggactactgcatgctttataaccc

SEQ ID NO: 680868 - DNA, 89 bp, Homo sapiens
gctggagttgtcttccttggagtcgggctgtgggcatggagcgaaaaggtctgtgcagacttttgcagacaaatcaaaacaagaagctc

SEQ ID NO: 680869 - DNA, 87 bp, Homo sapiens
tctgaccactctccagcaccagcttccagttagtggatatagcacaccatccccagccaatgaggacggggacttggttgccttttc

SEQ ID NO: 680870 - DNA, 82 bp, Homo sapiens
accggcacctgcacacctggatccaggataacggaggctgggtgcagagcattgtagaccaaggagccatggataggagaag

SEQ ID NO: 680871 - DNA, 71 bp, Homo sapiens
acgagcgagattcctctggttctggtgggaacccagggtcggatcatgctaaaaggagataatattactct

SEQ ID NO: 680872 - DNA, 87 bp, Homo sapiens
tgcatgtgtgtgcgcgcgaaggagcggaagaatggcagtgctcaaactcaccgaccagacggtctggaaaatcccgaagcagaagcc

SEQ ID NO: 680873 - DNA, 74 bp, Homo sapiens
aggacctggcttagctattcattgcatgcagattagctttatttgctcaccgtgaagatggacctggaatccca

SEQ ID NO: 680874 - DNA, 97 bp, Homo sapiens
gtcccgggccgggggacccgcccgccatggccaccaaggttttaaaatcaaagatgggaaaatcggagaaaattgcccttccccatggccagcttgt

SEQ ID NO: 680875 - DNA, 75 bp, Homo sapiens
cggagtcccaatgaaacgggcagccatggccctccacagcccgcaggtaagaatgattgatgttggctgatattg

SEQ ID NO: 680876 - DNA, 100 bp, Homo sapiens
agcaggaccagagtggaccagcacaccccaggagagaggactggggtcccaggagtaggaggagcggacttggctgccctgcttcccgacctctccggcc

SEQ ID NO: 680877 - DNA, 88 bp, Homo sapiens
ccatggctgcggcggcccagctctctctgacacagataagaaggctgactgcacaatcacaatggctgactcagacttcctggcttta

SEQ ID NO: 680878 - DNA, 100 bp, Homo sapiens
gcagatagcatagctgctgtggctgaactacgacaacacattgctgagcttgaaatccagaagtggggcagcgtgagcaatccactcttcctcccgctga

SEQ ID NO: 680879 - DNA, 98 bp, Homo sapiens
aaactcagcctgtgaccccagcgtgggtgaagataggatcaagatggccatgtggcaggcctctacggcagacacatgcaggccaacccagaaccacc

SEQ ID NO: 680880 - DNA, 100 bp, Homo sapiens
ctcacaagtagctgggattacagacgaggagttgtttttggtctctggagtgcctgtgcttcggtgggcaacattttgggagcgtgcctagcttcttctg

SEQ ID NO: 680881 - DNA, 82 bp, Homo sapiens
ctccctggaggtcatccggaggcctgaaaccaaggtgctcatctgcacacacaccaacaggcttctcacggcattcagcagc

SEQ ID NO: 680882 - DNA, 102 bp, Homo sapiens
ccagcagctgtcgccgccgctctcaggcatcagtgtttttctgaccgaagttctcatttcctgacaatggaaatggaacaagaaaaaatgaccatgaataag

SEQ ID NO: 680883 - DNA, 98 bp, Homo sapiens
ctacacgttcacggtgccccggcgccacctggagagaggccgcgtcctgggcagaggccgagtgaccaagacaaaggacgggcatgaggttcggacct

SEQ ID NO: 680884 - DNA, 85 bp, Homo sapiens
gcggtaccttccaccagcgctccacgatgaccgtgccctggcggccaggaaagcgacgctcagtgcacctgtgcaacaactccat

SEQ ID NO: 680885 - DNA, 75 bp, Homo sapiens
gggaaacagtcttcaggagagcctagatgagctcatacaggctgagggtaaaaagctgggattggtaggctgggt

SEQ ID NO: 680886 - DNA, 90 bp, Homo sapiens
gcctcagcctcccaagtaggtgggactacagcaacccgatagcagaagggtcaactcttctgttggattttctgttttgcagcatacaag

SEQ ID NO: 680887 - DNA, 75 bp, Homo sapiens
agagtcattgcaggaagtggatgagttccacctcattttagagtatcaagcaggacctcagcagccatgtcgaag

SEQ ID NO: 680888 - DNA, 95 bp, Homo sapiens
ttcgaggcatgatggtcgactacaagaagagggcggagcggagacgggagtattatgaaaagatcgtctggcctacatctgcgagggcctcaagg

SEQ ID NO: 680889 - DNA, 50 bp, Homo sapiens
gtactcattcctgtaatagctgtggagcttgaggagcagctggaggagga

SEQ ID NO: 680890 - DNA, 100 bp, Homo sapiens
cgccatgtcgggttattcgagtgaccgagaccgcggccgggaccgaggccacagctccggagcaagccccagccccggcccggccataccagggcgtccg

SEQ ID NO: 680891 - DNA, 100 bp, Homo sapiens
cctggagatctgcctgaaggacctggaggaggaccacgcctgcatccccatcaagttccagaaacgccgctggactgcgaggtctccctgtggtcgtcct

SEQ ID NO: 680892 - DNA, 96 bp, Homo sapiens
atcgttgctgccttcttcgtcaaggcctgtttaaagaagaaaacccgtatgctagatttgaaaacaactaaagcgctccagcacatcagtcccgac

SEQ ID NO: 680893 - DNA, 114 bp, Homo sapiens
gagaaagctgtgcagtccagactcacgggagaggaagtcaacagctgtgtggaggcgggcgctaatattgacacctgctcagaagaccagaggaccccgttgatggaagcagcc

SEQ ID NO: 680894 - DNA, 100 bp, Homo sapiens
ctcaaattttcaagtgccaaacggaggaatacctcgtatgcaacctcaggcttcagccagtccttccatagtgacgccccccaaggacatctggaatgtc

SEQ ID NO: 680895 - DNA, 75 bp, Homo sapiens
ctctccaactgagctcggcgccgggagaggattaagaagaaaacaggcagattttggcgcggcaaaagtcaaact

SEQ ID NO: 680896 - DNA, 85 bp, Homo sapiens
ataactgaagccactaagacggaacatgagaacatcaatggtgtaccgcctcatttgggacatcccttccactggggtgggcatg

SEQ ID NO: 680897 - DNA, 100 bp, Homo sapiens
tggcccagcagatggagaatagaccctctgtccaggcagcattaaaacttaagcaggtgggtcatgataactgggtacgtggagttctgttccattctgg

SEQ ID NO: 680898 - DNA, 100 bp, Homo sapiens
ggtcttggggggatggttccatcatggcgtcaatgcagtgtgaagattgctcctggagcagttgtatgtgtagaaagtgaaatcagaggagatgtaacta

SEQ ID NO: 680899 - DNA, 100 bp, Homo sapiens
ttgaaggctgcagtgagccctgtttttgccaccacactccagcctggcgtgagtgcatctccatccacgttggccaggctggtgtccagattggcaatgc

SEQ ID NO: 680900 - DNA, 75 bp, Homo sapiens
ctcaggtctggagcatgcagcagccagaaagctcagcttcaaaagcagtggactgtcttttggattcaaagtggg

SEQ ID NO: 680901 - DNA, 75 bp, Homo sapiens
tgaatactattcaaataaaatacctggatgaggaaaatgaagaggatcagtgaggaggaggacctgcacctgggg

SEQ ID NO: 680902 - DNA, 100 bp, Homo sapiens
ggatgaaagctacaatgaagtatatgcagaggaggtcccacaggctcctgccctggactaccgaggcatagaatgtcaagctaaccaggcgtccgctact

SEQ ID NO: 680903 - DNA, 100 bp, Homo sapiens
ccgggatcgcggaaagtgatggctgtcgtcccggcgtctctctcaggacaggacgtgggaaacggcgacttgaacatagtaaaaatgtaaacaccgaaaa

SEQ ID NO: 680904 - DNA, 50 bp, Homo sapiens
ccggctccgggatgagcgcacggacgggcatcaagcatgatggaaccatg

SEQ ID NO: 680905 - DNA, 100 bp, Homo sapiens
ccggaagacagacgtcccccaaaacccctcgcctggctcggacccacggagccggcagcccagcactccggtccccttcccctgagcccatctacaatag

SEQ ID NO: 680906 - DNA, 74 bp, Homo sapiens
atggcagcagcctggacctcagcactggcagttctggcataaagcatgcttccattgcgagacctgcaagatga

SEQ ID NO: 680907 - DNA, 83 bp, Homo sapiens
gcgccagcggccgagcgggcggcttcctggcctgggcgctccggtggcggcggagagctagagccggtgcaggccacgcagaa

SEQ ID NO: 680908 - DNA, 88 bp, Homo sapiens
gcgccggagagaatatcagcgacaggactacatggatgccatggctgagaagcatatgtccatttggagaggccccatttcaagtgct

SEQ ID NO: 680909 - DNA, 100 bp, Homo sapiens
ggaggatcgcactgctcatcttggccatcactatacacaacgttccagcttatagtgatttaggatactacattatcaataaactgcaccatgtggacga

SEQ ID NO: 680910 - DNA, 98 bp, Homo sapiens
gatgatgtaaccctggacgacctgatcatggctaaagatgacctctctggtgctgacatcaaggtcaataagcatgcgttttctggagggagagacac

SEQ ID NO: 680911 - DNA, 101 bp, Homo sapiens
gaccatgttagataaacttgtggatggacttgctacctcttgggtgaactctagcaattacaaggtgatgggcagaatctgtttacgaaagacgtgacagt

SEQ ID NO: 680912 - DNA, 100 bp, Homo sapiens
cgctgacctgaaggggttccagtacttctctaccctggaagaagcaggctcaggggagagagaaagcccagaaagaaagctactccagggtcctatggat

SEQ ID NO: 680913 - DNA, 82 bp, Homo sapiens
agctgggccagggcctggactacttctacgacctgctctaggcgggagtcatggatgtagatgctgaaagagagaagataac

SEQ ID NO: 680914 - DNA, 100 bp, Homo sapiens
gtggcctccgccaccgtgcacatccgaatgggttagctcccagcgatgccagatgggatcagcacagccctgcctctgctgctaattgttcctctaaagt

SEQ ID NO: 680915 - DNA, 102 bp, Homo sapiens
caaactggaggatgcctatgtattccctggggatggcgcatcacacaccaaaggacatcaaccaggaagtttataatttcctggcaactgcaggtgccaaat

SEQ ID NO: 680916 - DNA, 82 bp, Homo sapiens
tggggccgccggcggcccggcttcagacaatgcagatcttcgtgaagactctgactggtaagaccatcaccctcgaggttga

SEQ ID NO: 680917 - DNA, 50 bp, Homo sapiens
ttgggggcagccagtactcgggcagcctgctggagtgcaatggtgcggtc

SEQ ID NO: 680918 - DNA, 74 bp, Homo sapiens
tttgtctttgcagtggtcatctatttccagtggcttccggaagttcctggtccacaacgtcaaggagctggaag

SEQ ID NO: 680919 - DNA, 89 bp, Homo sapiens
tgaagatataaataaggataaaaacctggttcctgaagatgaggcaaatataggggcatcagaattaaggaagttcactggagtaaaat

SEQ ID NO: 680920 - DNA, 90 bp, Homo sapiens
tgagagccacgtgtgccgcgctctgggcacagccttggaaagtcaggaccgcgacggcagcagagcagaatgcttctagtcacaacagac

SEQ ID NO: 680921 - DNA, 75 bp, Homo sapiens
aagccttcaaatacttcctgcaaggcatgggctacagttgtcttcctggaaaggcgtgtgctggagctggaaaag

SEQ ID NO: 680922 - DNA, 75 bp, Homo sapiens
agaacaagactctctacagcaaggcacgtgtggttctcaaatataggcattctgatgggaacttgtgtgttaaag

SEQ ID NO: 680923 - DNA, 100 bp, Homo sapiens
tacatggattcaaatctctgccctgctccatactacctgatctgggcacttgccaggcaccgtgacagagaagcttttcccaaaggttatgatatagagg

SEQ ID NO: 680924 - DNA, 87 bp, Homo sapiens
tacattctagaaaactttgtgtctactctgtctcagagcttgtggacaaatgtataggatcaagaattcacatcgtgatgaagagtg

SEQ ID NO: 680925 - DNA, 83 bp, Homo sapiens
ctggactctagggaccctgctgaatagctggggctacaggcgtgtgtcactgcgcccaggaagcagagcaagccatccagtgt

SEQ ID NO: 680926 - DNA, 74 bp, Homo sapiens
caacattctacgagtttttgccagctcagacaccatcaaatggtggatgcttccaaaagcatcgaagctgtcca

SEQ ID NO: 680927 - DNA, 95 bp, Homo sapiens
ctggactctgtatctggaactggtggcgtcggcccaggtcggcgggaaccccctgaaccggagacgctgtgcagagctgcaagtccgtatcactg

SEQ ID NO: 680928 - DNA, 75 bp, Homo sapiens
accttgggcattgctgaatatgaaaaggctaagtgctatttatggaggtacctatatgctgaataaacccattga

SEQ ID NO: 680929 - DNA, 80 bp, Homo sapiens
ttacgaaagtatctgaatagtgaagtatttatcactcatcacagtaacttacggcctgagacctgggaggaagctggaga

SEQ ID NO: 680930 - DNA, 60 bp, Homo sapiens
cttttttgagaaaggaaggaatatatcctgactgattgacttcagggccacaggtgctgc

SEQ ID NO: 680931 - DNA, 90 bp, Homo sapiens
gagacaggacctcggcctgaaagtgatagatgtctttgttgttactgagtgtgggccaggtgtaagtggaagaagttgttccgaatgtaa

SEQ ID NO: 680932 - DNA, 75 bp, Homo sapiens
cagaggcagaaaggcagaagtggaagcaacttctatttagtgatcatggagtctcgctctcagtcaaaatctcca

SEQ ID NO: 680933 - DNA, 74 bp, Homo sapiens
tgtccgcatcgcaaccaccgccctggccatctaccatgtgatgaacgggaccgggttcagaagaaaacgttcac

SEQ ID NO: 680934 - DNA, 100 bp, Homo sapiens
aaggaacttgtacaaacaggacctgcctaattaccttcaaacctggacttcaaacaagtgtgaagaggctgtgtggcgagattgtggaactgaagcagca

SEQ ID NO: 680935 - DNA, 100 bp, Homo sapiens
agtctcatggtccgagtgacacgccacagcctcttttggattttgatacagatgatcttgatctcaacagtctcagacatatctgaagagatggattaag

SEQ ID NO: 680936 - DNA, 100 bp, Homo sapiens
acacgtttttatggtcccctatgcctgaacattatgtggaaggatcaacagtcaattgtgtactagcattccaaggaatacaatagatatggctggtggg

SEQ ID NO: 680937 - DNA, 100 bp, Homo sapiens
gttcagcgctcgggtgaggagctggtggcgtcggcaggttcgaggcgattcgaggtgtcatcttcaacgatgtctatgcagcttccaagttcgccctgga

SEQ ID NO: 680938 - DNA, 83 bp, Homo sapiens
gggaacctctaccatgacacatgcttcacctgtgcagcttgcatgagaaagatcagtctaaagaaaaggagaagaaagtgaaa

SEQ ID NO: 680939 - DNA, 90 bp, Homo sapiens
ctgttggtacagaccactttatggagctttcaggcagagatcctacaagaatccaggatgatgatcccagattgccagcgcaggttggaa

SEQ ID NO: 680940 - DNA, 98 bp, Homo sapiens
aagatgtatcacctatagaaagaaatgagcagctttggataatgacgacagcaacccgaagacagggaaatttaggttcgatacaagaggctgttttc

SEQ ID NO: 680941 - DNA, 100 bp, Homo sapiens
aactggatccttgtgaaaacaaaatcaagtggataaactttttagcgcttggatgcagcatgcttggtgggggcacgctatcatcactaactacttgttg

SEQ ID NO: 680942 - DNA, 98 bp, Homo sapiens
agcaagtgagtagtcacatcacctccagccctctgcattcacgtagcattgctgcggtcccttcaccgatgttgtcaccaccaacctaaagcttggca

SEQ ID NO: 680943 - DNA, 124 bp, Homo sapiens
agtgttaaaggaacctctacaacgaaggtgaagccacggaagataaggtgcaatggatgagcttcatagtctggatccaagaaggcaagagttattggaagctagatttactggagttgcaagt

SEQ ID NO: 680944 - DNA, 118 bp, Homo sapiens
cgcgccatgtggctgctggggccgctgtgcctgctgctgagcagcgccgcggtttcaaccacaccacgggcttttgaccacacaaaacagaaccaggactggacccagtggaacccaa

SEQ ID NO: 680945 - DNA, 75 bp, Homo sapiens
cggttttgacttcacaggcgctgtggaggatatttcattttctggatatgccgcagaaggatccgtgccagaagc

SEQ ID NO: 680946 - DNA, 88 bp, Homo sapiens
aaattcatgcatgttttgtacccaaggaaaagtaatactcttttgagagattgaactaagcgtcttgtagaaggaactattaatccag

SEQ ID NO: 680947 - DNA, 100 bp, Homo sapiens
ccgtgacctaagccacatccttgggatacctcagaggttttgcactgattgcaaaaataaagtcctccgagcatacaatatccttattggtgaacttgac

SEQ ID NO: 680948 - DNA, 75 bp, Homo sapiens
ggcggcgccgccaataaccacggagccggcagcggcgcgggaggccgtgcggatgcccccctcggaagcctggag

SEQ ID NO: 680949 - DNA, 74 bp, Homo sapiens
gggcattaatctgactgcagcagatacagttatcatttatgatagtgattgggagctgaagtgggaatcagtac

SEQ ID NO: 680950 - DNA, 95 bp, Homo sapiens
gcaagcttagagcgtctggccaagaatcagaggaagtggaggcaaggtcttgctatgttgctcagactgatcttgaactcctgaccctaaagtga

SEQ ID NO: 680951 - DNA, 102 bp, Homo sapiens
cggagccggagacgaagagaggcgcttcgagagctgtgcccaggagtgaacaaccagccctacctctgtgagagtggtcactgctgcggggagactggctgc

SEQ ID NO: 680952 - DNA, 100 bp, Homo sapiens
cagaagatcgagagcctaactttgcaaccattggtctgcaggacatcactttagatgatgacaatgcagatcttcgtgaagactctgactggtaagacca

SEQ ID NO: 680953 - DNA, 100 bp, Homo sapiens
ctggaatcaaccgatggaggctccgctgcaaactggaatgagcctggaaacctggccggcgtcaggcacatcatcctggtcctctcaggaaaggggggcg

SEQ ID NO: 680954 - DNA, 75 bp, Homo sapiens
aaagtcatactccttagctgctggcttggccctgggcatggtctgcttggggaaagacccaaatgggaccagtag

SEQ ID NO: 680955 - DNA, 75 bp, Homo sapiens
tgagaccgggcggccacagtccgcagggatgaacctcgagttgctgggcttcaacggaccacaccaaaatgccat

SEQ ID NO: 680956 - DNA, 98 bp, Homo sapiens
acagcctcacttctttgattgaatacttacataatgcattggaacatgacatgagattaaggtattgctggccttttcacaattttctcaagttttgt

SEQ ID NO: 680957 - DNA, 100 bp, Homo sapiens
gcaagaccgaattcagaaggatatcgacgtcgtgatccagaagtccagagctgaggactgcctgtttgcaggttctctacttaaaagacaatgactactg

SEQ ID NO: 680958 - DNA, 100 bp, Homo sapiens
gagaagccgctggcggcagtcacttgtacagcgccggtcaacatcgcggtcatcaagtactgaatgtcccagcggaattgtcaatgaggagaacttcaag

SEQ ID NO: 680959 - DNA, 82 bp, Homo sapiens
ctcgggacccaaggccacaaaggagagctccgtggagagaaggtgtcagcggtgcccactgtgctggccatgaagaatgggg

SEQ ID NO: 680960 - DNA, 51 bp, Homo sapiens
ggccgtggtcagccgcttcgacgagcagaaagtggtaaaatagctgtggag

SEQ ID NO: 680961 - DNA, 100 bp, Homo sapiens
gactctacacttatcatgcagttgttacgtgataatctgacactatggacttcagacatgcagggtgacgttaaaggcattaggatttcctgaaggactt

SEQ ID NO: 680962 - DNA, 74 bp, Homo sapiens
agaaggcaaaagagggaggagatgcgactcgaagcagaaagtgccggtggtggtgtgcacattgagccccggta

SEQ ID NO: 680963 - DNA, 100 bp, Homo sapiens
ctcagacctggcccgggacatgctcatgcattgcttctgcaggaagcctttttggtggcatggtcctcaagaagttcctaaaaggtaaagaattacctaa

SEQ ID NO: 680964 - DNA, 75 bp, Homo sapiens
gggagaatgactgaggagccattgatgtgtgatctagtttgaagcactaagaagaataagacatcagtttgaaaa

SEQ ID NO: 680965 - DNA, 116 bp, Homo sapiens
tgagccttctcgtggcggcggggaccgtccagcccagcgattctcagtcaggctaattcacctaaataagattgatcctcatgctccaaatgaaatgctctatgggcgaataggct

SEQ ID NO: 680966 - DNA, 85 bp, Homo sapiens
agccagcaaaggaggtcttatctatgggaactacctgcatggtgtgattaggcccactgggggatacgctgtcatgctacactgg

SEQ ID NO: 680967 - DNA, 51 bp, Homo sapiens
ggggccactgtgtctgccatctgcagtttgacatgcaaaggataactctgg

SEQ ID NO: 680968 - DNA, 75 bp, Homo sapiens
cacggacaacatcaccgtgaggcagggggacacagccatcctcaggttgaaggtttagaacagatgtggaaaaat

SEQ ID NO: 680969 - DNA, 97 bp, Homo sapiens
gtacctggagcggctaatcaagctgggccggagaaatgggcttcacctccccagagagactcaggaatgtctttggtgcaacactaacaaggcttgt

SEQ ID NO: 680970 - DNA, 100 bp, Homo sapiens
gtggtttgaatatcgtaagcgcacgtttaaacatctcaagaattgcggcgagcagtaagaagcagcgtgtggaaaagggagacgattgttcatcaacatg

SEQ ID NO: 680971 - DNA, 142 bp, Homo sapiens
ggggacaggctccgaggcaggcccgacccgcctccccggcgccgccgtggctcgacggagaccagctaggatgccatggacaatattaccaggcagaaccaattctacgatacccaagtcatcaaacaagaaaacgagtcag

SEQ ID NO: 680972 - DNA, 83 bp, Homo sapiens
tggagtaggtcctgacactgtccataaatgtgcagagtgcacataatgcccctagttatcgagcttgtgtccagctgctcagc

SEQ ID NO: 680973 - DNA, 97 bp, Homo sapiens
cgctcgctcctggagaccaacgaaatcccctcgcttatcctgtgggggccgccgggctgcggcaaggtggaagatggtatcttgaagttgaggaatg

SEQ ID NO: 680974 - DNA, 100 bp, Homo sapiens
taggctgggaccataacacaaggaagctgtagagaaatatgaagaagtgctacataatttggaatttgccaaggagcttcaaaaaaccttttctgggttg

SEQ ID NO: 680975 - DNA, 82 bp, Homo sapiens
ggcgcgactcgcttctttcggttctacctgggagaatccaccgccatccgccaccatgaaatcttcccaaggctgcagacac

SEQ ID NO: 680976 - DNA, 82 bp, Homo sapiens
agggtggggtcgacgacgaagacagcggagaggagagcggtgcggaggactgagcttccccgggcgctgcctggacaggcct

SEQ ID NO: 680977 - DNA, 98 bp, Homo sapiens
gacgcaaaccaaggatctggggatcttcgcactatcccaaggcagaagactgatttttggaaatatgtatttgggagacagtcacgtcctattgaata

SEQ ID NO: 680978 - DNA, 74 bp, Homo sapiens
gctgctcccatcattgatgtggtgcgatcgcgggctacattgagagacctcagctgattcgagcaaaagtgcca

SEQ ID NO: 680979 - DNA, 100 bp, Homo sapiens
aagattccactcgtggtatgagagtggataatataatcaactcctctgcctggtttactcctggcttgggggcattaggaagcactggaggctcttcggg

SEQ ID NO: 680980 - DNA, 97 bp, Homo sapiens
gccgccgcgtcttcccggtctcctttcccggccgcacaggaatatgcttttaaggctattaaccagggtggccttacatcagtagctgtcagaggga

SEQ ID NO: 680981 - DNA, 100 bp, Homo sapiens
gctgcgcgggacggctctgtaggaaggaacttggttccccctccctcagcttccgccccaaaaggaggcaagtgaggcctatctggttggcctttttgaa

SEQ ID NO: 680982 - DNA, 75 bp, Homo sapiens
gtggaagttcatcgtctgattagtgcagactggaatacgctaattgtgggaaagctttctccatggattcgtcca

SEQ ID NO: 680983 - DNA, 148 bp, Homo sapiens
ttcatgagagaagaaatacaggatgcctctcagctgccacctgcctttgacctttttgaagcctttgcaaaaataacaacgaacttgatgcaagtgataggtttgccaaggtcagacctctcatcatccggatgaactgcaatttcca

SEQ ID NO: 680984 - DNA, 82 bp, Homo sapiens
ccgggaccggccgaaaggcgaggaaccgggggatatgagactttctactcggaatatcctgagtgttgcgtggatgtaaaac

SEQ ID NO: 680985 - DNA, 100 bp, Homo sapiens
cagaggggcccactcgctgtcccgaacggcagagtcgaaacaaacaatgagggcgaaccagtttcttacatgttctaacgtttgactttgaaaacagttt

SEQ ID NO: 680986 - DNA, 124 bp, Homo sapiens
tgaatctacgcttcccaaaccagttcagaagccacccaaaagtaatgttaacaataacccagctgaagctatgccatcttttatgtctgatgaggcagtttcatctgatttgaagatgatgaag

SEQ ID NO: 680987 - DNA, 82 bp, Homo sapiens
gaaactgcgaggcgaaggtgaccggggaccgaggttgttgatcattatgaaaatcctagaaacgtggggtcccttgacaaga

SEQ ID NO: 680988 - DNA, 75 bp, Homo sapiens
gcgatctctgtggtaggcccaggcaagtatatcgcgtcaacacagcgacctgacgggacctggcgcaagcagcgg

SEQ ID NO: 680989 - DNA, 75 bp, Homo sapiens
tcgcagttcttgtttgtggatcgctgtgatcgtcacttgggccaattcctgtccccccagcagcatggcatcgtg

SEQ ID NO: 680990 - DNA, 100 bp, Homo sapiens
cgcgccgccagtggagcccccgcgcgcccggccggcccggagcaccgagctcgcggcacggtaggagatacttggcatatcgaaattttatgattgacac

SEQ ID NO: 680991 - DNA, 100 bp, Homo sapiens
gggacatctgaaagccaggaaatgaattaaatgtgagggagtctgacgtaagagtttgtgatgagtcatcatgtaaatatggaggagtctgtaaagaaga

SEQ ID NO: 680992 - DNA, 98 bp, Homo sapiens
tgcgggctgagcggcgagtttccgatttaaagctgagctgcgaggaaaatggcggcgggagtgtaaacaggaacatcgataagtagtgtaaaaacttg

SEQ ID NO: 680993 - DNA, 108 bp, Homo sapiens
tggactgcacggcccactccgacgtgtgctccgcccagggggtgcgaggataccccacagactctgacctgtttttgttggacacccgtgtagtatgggcctcagaag

SEQ ID NO: 680994 - DNA, 75 bp, Homo sapiens
cagtagaatttcttatccaagtggcacgtgtggttctcaaatataggcattctgatgggaacttgtgtgttaaag

SEQ ID NO: 680995 - DNA, 75 bp, Homo sapiens
tgctgggccacgcggcccggctggcctcctccggtctcctcctgcagatgtgtcttgctgaatcagggctctctt

SEQ ID NO: 680996 - DNA, 83 bp, Homo sapiens
cttttcaagacaccaagtgagaggccaaccagtgtatcgcattaagttcaaggagagctttgctgagatgaacaggggctcga

SEQ ID NO: 680997 - DNA, 83 bp, Homo sapiens
gaaggtggcactggccaagaagctcctggcaaaactgcgctttctggctgaggaggtgtgggcccatcgctggatggatctgt

SEQ ID NO: 680998 - DNA, 80 bp, Homo sapiens
ctcggccgggccgtcccggcctgcgcagcctgaggtaagaatgattgatgttggctgatattggagtgctcattcacatg

SEQ ID NO: 680999 - DNA, 98 bp, Homo sapiens
ggaatcacggtttttggaacaaggattttggatgaagaagtttttgagaagagatcacaaaatggctcttcttcagatggcaacagtggaagaagcta

SEQ ID NO: 681000 - DNA, 98 bp, Homo sapiens
tcagttcaagacccgacatgagggaaaagggacgtaggaagaagggcaggacctgggcggaggccgccaagacgacggttacctggcacgctggccac

SEQ ID NO: 681001 - DNA, 100 bp, Homo sapiens
tcagattacaaaagatctagtgatgatcggaggggtgatagatatgatgactaccgagactatgacagtccagaggaaacagagcaaatgcagcgttaca

SEQ ID NO: 681002 - DNA, 50 bp, Homo sapiens
gagacgagggagctcttggataaggttacgaagtgacagtgctggtgcgg

SEQ ID NO: 681003 - DNA, 75 bp, Homo sapiens
caatttaaagatcctctccaagctcctggcggaggagaagaccatctctgccaagtatgcagaggagcgcgaccg

SEQ ID NO: 681004 - DNA, 90 bp, Homo sapiens
gaccgtgaccgagagcgtgaccgagagcgcgaatatcgtcatcgttagaagatgccgccacggccctttggggaaatgcgtgcactgcgt

SEQ ID NO: 681005 - DNA, 100 bp, Homo sapiens
tgactggcacagtggagaaaccgcctcgaaaacggagaagcagtgaccatgcagcaggtggccaggacagtggctaaagtggagctctcagaccacgtgt

SEQ ID NO: 681006 - DNA, 90 bp, Homo sapiens
tgcagcggccctctacagagcagcttttgaaacatccttttataagggatcagccaaatgaaagagagaagaagaaggaggttcctgctg

SEQ ID NO: 681007 - DNA, 97 bp, Homo sapiens
aaccaaacatcagaggaataatgtggggaggccagccagtcggtctaatttgaaagaactccatccggcacaacctgtcactgcatagtcgattcat

SEQ ID NO: 681008 - DNA, 96 bp, Homo sapiens
caggatcccctactttgttgaattgccttatgtataaaatgtcatactacagatttggagaaatgcagatggatctgtctgtagaaactctgttca

SEQ ID NO: 681009 - DNA, 100 bp, Homo sapiens
tccgcgacaccatcttcgacaacatcctcaaggtttgtggaatcttgcttcccttttttccaacctttgtttatttgtattgatgccctttgcctttttc

SEQ ID NO: 681010 - DNA, 87 bp, Homo sapiens
agccgatccagcctgcggagcctgtggggcagacggatgtttccagtcctaaagattagtgtcacagggttggaccccaatgccatg

SEQ ID NO: 681011 - DNA, 90 bp, Homo sapiens
aagaacgctctcatccggaggcaggaccagctgcagctgctaaccaacatcccgggtaaccgggtggctgaaggacaggtgacgtgtccc

SEQ ID NO: 681012 - DNA, 100 bp, Homo sapiens
cattccggaaggggacgaggaaggaaacatggaactcaggcagaaattcgagtacaaaattggacagctgtacatgatcagcaaacacagccatgaacag

SEQ ID NO: 681013 - DNA, 74 bp, Homo sapiens
gaaaagatggtagcagagttaacacgaaagataggatttgacccagagccgtagagacggggtttcgccatgtt

SEQ ID NO: 681014 - DNA, 90 bp, Homo sapiens
caccaccatctccatcacccaccaacaacaccacaataatccacagccaaggtgcacccatcattatgtctttcccacacttttaccaag

SEQ ID NO: 681015 - DNA, 75 bp, Homo sapiens
gctaggctggacgaagcagaaaggcgggtgtcactggggacgttctgagggcatgctggaagatggactgccctc

SEQ ID NO: 681016 - DNA, 100 bp, Homo sapiens
agcgcgcgggcacagggtgccgctgaccgatgtccctaagtgccagctctcccctaaaagttccagctcatctcgcctggcctccccctgagtcagtggg

SEQ ID NO: 681017 - DNA, 89 bp, Homo sapiens
gccgggagagggcctgtaggggcatcctctggtatcacgattccaaaacccccaaagccaccagataagccgctgatgccctacatgag

SEQ ID NO: 681018 - DNA, 75 bp, Homo sapiens
ctggattcaagtcccaggagtcctgaccagagagcagttatgagttgcagaaacgaattgctgaaatggaaactc

SEQ ID NO: 681019 - DNA, 101 bp, Homo sapiens
caacgcccttcgcaaggcccctcagcacacagctgtcggcttcaaacagacggccagaagaatgtttgaaggtgagatggcaagtttaactgccatcctga

SEQ ID NO: 681020 - DNA, 87 bp, Homo sapiens
aaggcatcaacatttctggcaatttctacagaaacaagtaaggcgagaccatggacacctcctgagttggatgtcatcccccgaccc

SEQ ID NO: 681021 - DNA, 75 bp, Homo sapiens
cagacctgcaagctctttgacacacagcagttcttgtcagatcaggatcctcatgaccagccaaagagaagaaga

SEQ ID NO: 681022 - DNA, 84 bp, Homo sapiens
cagacctgctgctgcttcaatgtccgcatcgcaaccaccgccctggccatctaccatgtgccgcttacaaacacgcagatggca

SEQ ID NO: 681023 - DNA, 78 bp, Homo sapiens
gtgggcagcgtcggggatgtccccttcacggttatgaagacagtatggagtttccagaccatagtagacatttgctac

SEQ ID NO: 681024 - DNA, 51 bp, Homo sapiens
agtcagagctgcacaaagggaaagggtcggattgtttgtgctgaacgaact

SEQ ID NO: 681025 - DNA, 87 bp, Homo sapiens
catcatccataccaaggagacgctgacacttgtgtttgaatatgtggtgcgtatagcagcaaaattcatcattcatgcccctcctgg

SEQ ID NO: 681026 - DNA, 98 bp, Homo sapiens
agatggtttacatctcgaacgtgttctaagaacggaagcatctgggctggatggaatttagcatcaagcagagtcccctttctgttcagagtgttgta

SEQ ID NO: 681027 - DNA, 90 bp, Homo sapiens
tcatattatagatggagtaaagaaaaatccagttacactcttaaaggaattgtcagtgataaagtctcgatatcaaactttgtatgcccg

SEQ ID NO: 681028 - DNA, 74 bp, Homo sapiens
atcctgaggtgtatcccttagaaataagctggtaaatgaggtgggccccactatggtgggcgatgaacagtcgg

SEQ ID NO: 681029 - DNA, 74 bp, Homo sapiens
ggcatctaagaaatttgctgttaaagacaaccctccatatgataagggagccttcagaatcgaaatcaactttc

SEQ ID NO: 681030 - DNA, 98 bp, Homo sapiens
gactcagaggtcatggcgagcacggtggtgaagtacctgagtaagactttgaccccgacgcaggcttcagtgattgccgcggatcagaagcctgagca

SEQ ID NO: 681031 - DNA, 95 bp, Homo sapiens
caacaagaaattttgagaagagcagcaagagctttacctatctataccacatcagcttcaaaaagacaatgaaggccaaacagctctacattatg

SEQ ID NO: 681032 - DNA, 87 bp, Homo sapiens
cgaagctggccgagcaggctgagcgatacgacgaaaaagcttgagtctccacccccatctaccaatcccttcctggaagatgagcca

SEQ ID NO: 681033 - DNA, 74 bp, Homo sapiens
gcggggtacaccacaagcacggtttggtgcacctcgatttggaggaagtagggcagggcccttatctggaaaga

SEQ ID NO: 681034 - DNA, 97 bp, Homo sapiens
ccaggggaggaagataatgcagccataagcgagatatataagggatatgttgatgatcctcgaaacactgataatgcatggatggagacagaagctg

SEQ ID NO: 681035 - DNA, 74 bp, Homo sapiens
ctagaagtctggatgtcggtgggcctctgagatatgccgtttacggttcacttcttcaactgagatggacatga

SEQ ID NO: 681036 - DNA, 98 bp, Homo sapiens
tgaaggaccggatcctggagaacatctcgctgtcggtgaagaagatatggccgcgtggaaagtgtcaaaattcttcccaagaggggatctgaaggagg

SEQ ID NO: 681037 - DNA, 82 bp, Homo sapiens
cagctgggccgcgggacgacctcccgcctcccggcgcacgtgtgcaggtcacctcatcatctcaaggaggagcattcccctg

SEQ ID NO: 681038 - DNA, 100 bp, Homo sapiens
ttgccgctatggctggcagtcaggacatattcgatgccatcgtgatggcggatgagagctgctgtattaaagtatgaaaataatgtgatgaatattcgac

SEQ ID NO: 681039 - DNA, 76 bp, Homo sapiens
catctgtaaacctgataacactgcatgaaatgttagagttggtagctggcagtgttgtgatggcttttgaagaagt

SEQ ID NO: 681040 - DNA, 100 bp, Homo sapiens
tacaagtaccgcttcgttccctggatcgcactgaacctaagccacaacccgaggaaatcacattctgcctgatgaagatctggcttcctttcactggagt

SEQ ID NO: 681041 - DNA, 100 bp, Homo sapiens
agccggactgcggttggggcgggaagagccggggccgtggctgacatggagcaggaagcacaagcctatgcagacgacaacagtttgctgttcatggaga

SEQ ID NO: 681042 - DNA, 75 bp, Homo sapiens
agcgatgttaccattgtgaaagaaggttgggttcagaagaggggaggaactctctggaatgaaaaataaaataca

SEQ ID NO: 681043 - DNA, 60 bp, Homo sapiens
tgtcatataactcctgagaatagtggttcttaactctgtttaagaattgtttaagctgca

SEQ ID NO: 681044 - DNA, 89 bp, Homo sapiens
tttggacctgaaacagaaattctggaacacctatatggaacgagggggaataatgtcactcacggaggtgtactgcttagtaaaccgag

SEQ ID NO: 681045 - DNA, 101 bp, Homo sapiens
ggaggaggcgctgcgtcagtaccagcaggcatgttatttgaaagcaattgagacgcaaccgaactttgcagtagcttggagtaatcttggctgtgttttca

SEQ ID NO: 681046 - DNA, 113 bp, Homo sapiens
ccagcttaaagagctccacattcaggggaaccgcctcaccgttctgcccccagaactaggtgtcatggagaaactccagctgggcccagagattctgcagcgggaaaatccaa

SEQ ID NO: 681047 - DNA, 100 bp, Homo sapiens
tcatccacaccgtgttgctgcaaaaggactatcaggagggccctcctggacccgggagcggaccctggtggcggtgaagcccgatggcgtgcaacggcgg

SEQ ID NO: 681048 - DNA, 88 bp, Homo sapiens
gcagcgacatggagggagctgctttgctgagagtctctgtcctctgcatctggctgcaagatcaaggccctgcgggccaagacaaaca

SEQ ID NO: 681049 - DNA, 100 bp, Homo sapiens
ctggactccaaggccacggatagtccacgctggcagtgtgggtgaagtggcccatccatcccagcgccccagagcttgcgggccacaagagacagtttgg

SEQ ID NO: 681050 - DNA, 100 bp, Homo sapiens
gcagtttttgccacaggcagcctcctgccagaactacttcctcatgattgtttcaggaatcagagatcattgatttcttcctgggggcctctctcaagga

SEQ ID NO: 681051 - DNA, 75 bp, Homo sapiens
ctcccgctgcctgctggacagtgactccaggcgccatcatgaccgggtcctataacaacttcttcaggatgtttg

SEQ ID NO: 681052 - DNA, 126 bp, Homo sapiens
gcttcttcgggcggaggaggaagtaggggtgcacctcagcactatcccaagactgctggcaacaggtgtccacaaacgctgttcagcggagagtgcaagaaatagtgcggttcacacggcagctgc

SEQ ID NO: 681053 - DNA, 75 bp, Homo sapiens
ccacccaaatcctcttctccaagaaggtcactgtgattgcccggcagcggggtgaccagctagtcccattctcca

SEQ ID NO: 681054 - DNA, 76 bp, Homo sapiens
gtcatgctgtagtgggctacagtgaatcaactagcatctggattggagacacaaaatcagaaattaagattctaag

SEQ ID NO: 681055 - DNA, 51 bp, Homo sapiens
gaaaaaatttatttacagctcttaatgcagccctcccaggcccaatacttc

SEQ ID NO: 681056 - DNA, 100 bp, Homo sapiens
gcgcacccggtgtcgctgggctgcaccccgggcggggacgtccgccgggcacgggagggggccaagatgccgatgagcccatggattccacaatggatga

SEQ ID NO: 681057 - DNA, 100 bp, Homo sapiens
ccgcgagcggagcggcgcgtgggtcggttgcggtcggccccggcaggtacatgtcccagagcaagcacacggaggcccgggagctcatgtactcgggagc

SEQ ID NO: 681058 - DNA, 100 bp, Homo sapiens
aaggagattgtgacatatcactgcattcaatacctagatgatgaaggagctgactgccgatgcacgggagctgaaaggggagctatactgcctcccatgc

SEQ ID NO: 681059 - DNA, 73 bp, Homo sapiens
cttgattttgtgcaggatccgtgctttgcccaaggagatggtctcattaagattggtgtctccgctgtgcctg

SEQ ID NO: 681060 - DNA, 75 bp, Homo sapiens
ccgggattttatccaccggcactgccaagatcaggcacgtgtggttctcaaatataggcattctgatgggaactt

SEQ ID NO: 681061 - DNA, 99 bp, Homo sapiens
gcgctccctgcggccccgggatgacttctcagcgttcccctctggcgcctttgctgctcctctctctgcacggcaaatcctcccccagtactggtcaac

SEQ ID NO: 681062 - DNA, 100 bp, Homo sapiens
gacggagctggatgaactcattcagagacaaggtctcaccgtattgcccaagctgatctcgagctcctgcgctcaagcgatcatcccatcttggcctctc

SEQ ID NO: 681063 - DNA, 74 bp, Homo sapiens
ggagcagaggggacagaggcaccaaggacctccaagacaggagagtcgcggttgctgatcgtggtgcttgagta

SEQ ID NO: 681064 - DNA, 121 bp, Homo sapiens
ggctaagcaagctcagattccattagctgctgtcatcaagccctttgccaccattccttcaaatgagatactcagagtggaagtaagaatgaggaagatagatagatagatagatttgcac

SEQ ID NO: 681065 - DNA, 83 bp, Homo sapiens
ccccggacgcaggcctggtatggagaacgagaggaaagaagtcccttatcacgatgaagatctccttcaacgacaaaagcctg

SEQ ID NO: 681066 - DNA, 83 bp, Homo sapiens
gaggaatatttctgtggagctgagggctgatgggttctgacggataatttccaagccagcaaattgtggctactaatttgccc

SEQ ID NO: 681067 - DNA, 96 bp, Homo sapiens
ccgcgggcaacctcggagcttatactcctcccagtgacgggtctggagtgcgtgggggaccggctgttggcggtgatcgtaaacttgttgataaag

SEQ ID NO: 681068 - DNA, 75 bp, Homo sapiens
tgaggatgagctggaggaggggttccaattgcccgggctgttcttgttgacatggaacccaaagttatcaatcaa

SEQ ID NO: 681069 - DNA, 100 bp, Homo sapiens
aatactgcccgatggtcttccgtaacctgcgggagaggtttggaattgatgatcaagatttccaggaggatacagaccacaattactatatatctcgaat

SEQ ID NO: 681070 - DNA, 83 bp, Homo sapiens
gtctccagccaaattcaaaaaggataaggagatcatagcagagtacgatactcaggtcaaagatgcttcaggactgccccaag

SEQ ID NO: 681071 - DNA, 75 bp, Homo sapiens
cctcccgccagtctccagccatggagcccaggacaaggcagctatgcagttgagtgagttggaagaggaaatgga

SEQ ID NO: 681072 - DNA, 99 bp, Homo sapiens
gttaaaacacgtatgcaaaaacttgcagagcaacggcgccgttgggataatgatgatatgacaggtggagccgccaccaaaatgcagattttcgtgaaa

SEQ ID NO: 681073 - DNA, 75 bp, Homo sapiens
cccttgccgctgctgtcctgcgaccccaagcagaacctaaaggcagacccagaagagctttttacaaaactagag

SEQ ID NO: 681074 - DNA, 82 bp, Homo sapiens
caaaaatcccatctaccgcaactctcagttcgagagtaaaggagaatggggtactaagagaaaagcacgaagctgtggatca

SEQ ID NO: 681075 - DNA, 83 bp, Homo sapiens
tttctcggcgccgcggctcttttctaaaagtggccacccagtgctcctgcagaagatcgttcaggaacacccgacagcattgc

SEQ ID NO: 681076 - DNA, 90 bp, Homo sapiens
gtttgccaatgttggagccgtctgcaaagtgtccccggcaagaaggcggccggcgcggggcgcaggcggcgcggccatgggctcgcaggg

SEQ ID NO: 681077 - DNA, 100 bp, Homo sapiens
gattccaagtaactcttatttggcacctgaatggacagaagaggacctcagccaactgacaagaagtatggttaagttcccaggagggactccaggtcga

SEQ ID NO: 681078 - DNA, 74 bp, Homo sapiens
atatgaaaatcgagcactatttttctccgctgaatagcattggcaattactacaagccgtggttctttaagcat

SEQ ID NO: 681079 - DNA, 100 bp, Homo sapiens
gggaccctgcgcccgggggtcaccaatgaacaggctgatcccaaagaactaatcaagatggtcaccaggcatgtgactcgacatgagcacgaagcctggc

SEQ ID NO: 681080 - DNA, 80 bp, Homo sapiens
ggcggcagctgcagtgacatgtccagcatgaatcccgaataatatggagtctggagaacggttaccatcctcagcagcct

SEQ ID NO: 681081 - DNA, 75 bp, Homo sapiens
ggctttccagagggcagtgtagagacttaattcagtgcacaaatgagatgaatgtgaacatcccacagttggcag

SEQ ID NO: 681082 - DNA, 83 bp, Homo sapiens
gaggcagaagatgggaagttggggcatggcaacagaagtctgagggaaaaggccataccaatgctggagatgcaatatatgag

SEQ ID NO: 681083 - DNA, 100 bp, Homo sapiens
cttaaaatcctgctctggccggattccagactcgtgggggaaaggctggagattaacgagaccagaaggaagcatgaaacgcgcttggtagaggtggatt

SEQ ID NO: 681084 - DNA, 94 bp, Homo sapiens
aaaccaacattcccaacagccaccaccaccaccagatggtgaaagaaaatggcccgaaccaagcagactgctcgtaagtccaccggtgggaaag

SEQ ID NO: 681085 - DNA, 98 bp, Homo sapiens
accgagagggcgcctggaatccatgaaccagagaatcagtcagagtgctccagtgaaacagccaccacccctggctccccagagcccacagggaggcg

SEQ ID NO: 681086 - DNA, 76 bp, Homo sapiens
gcgtgagccaccacgcctggcctcactcaaacagtaaacgaggatgaagcctgctgggagcgtgaatgacatggcc

SEQ ID NO: 681087 - DNA, 100 bp, Homo sapiens
gctcctgactgtcagtcagtacaaagccgtgaagtcagaggcgaacgccactcagcttttgcggcacttggaggctgaccggttccctgatgtgttacct

SEQ ID NO: 681088 - DNA, 83 bp, Homo sapiens
gttcccggagatgcggcgcgcagattttctggcatccttaaatcttgtgtcaaggattggttataatataaccagaaaccatg

SEQ ID NO: 681089 - DNA, 101 bp, Homo sapiens
aagcgactgagtccgcgatggagggcaccgcgtccgtgctgcagcgccggtcccccaatgaggagtacgtggaggtggggcgcctgggaccctctgactac

SEQ ID NO: 681090 - DNA, 100 bp, Homo sapiens
aagtgcttggggatggagtgcctccaaaggttgctgagctcctcagagaaattttgaaattgccttcaagatgtttgatttgaatggagatggagaagta

SEQ ID NO: 681091 - DNA, 100 bp, Homo sapiens
agaactctgaaagattttgagatgatacgagggatgaaaatgaaactgaatcctcaaaattccgcagtagacagcagggactccctggccatggctctgt

SEQ ID NO: 681092 - DNA, 75 bp, Homo sapiens
tcttaaggaaggctttatgaataaggagggcaccagtgtcttgtcacctggactccacataggactaattattat

SEQ ID NO: 681093 - DNA, 96 bp, Homo sapiens
tgctaaccagacttacctggtgtcagaacgcctagaaaggtgcggtcttgctctgttgcctaggctggagtacagtggtatgagtatggctcaatg

SEQ ID NO: 681094 - DNA, 100 bp, Homo sapiens
agaccttgcttgagaaggctgacctggacccctccctggatttcatggactccttggagcatgacattcccaaagccttcagtttggaaacctgcagaat

SEQ ID NO: 681095 - DNA, 75 bp, Homo sapiens
cagaccttcaagatagacattgaccccgaggagacggctaaagaacgtgccaatggaatggagcttgatgggcgt

SEQ ID NO: 681096 - DNA, 98 bp, Homo sapiens
tgttcttggtgaagtcggccagcctgagcaagcggaggacctacgccggcctggtgagacggtttaagcggaagcatcttactgccattgactgccag

SEQ ID NO: 681097 - DNA, 75 bp, Homo sapiens
aggacatggagtatgaaagacggtcaaggtgaagatgttcttaaagggtcccagattacgtatgttacaggtgta

SEQ ID NO: 681098 - DNA, 89 bp, Homo sapiens
gggaggccggccggtgccagcacctttcggcttctgagacggcggcagcagcggcattcaggcggctgagccagaggccaactgcagag

SEQ ID NO: 681099 - DNA, 98 bp, Homo sapiens
acagctcctcaccccctgaaaatgttcgcctgctccaagtttgtctccactccctccttggatttctctctgatcaaacggacagttcaggactcaga

SEQ ID NO: 681100 - DNA, 100 bp, Homo sapiens
gagtgatgtctgtggggccgccggcggcccggcttcagatatctcttccaaacgcatgatgaaggaggtcttgtcaacagggcaaggcaatacagaagtg

SEQ ID NO: 681101 - DNA, 82 bp, Homo sapiens
ggactggactgttatgcgcttggttgctaacaaaattccagaagattgccatggcaacagcaataggatttgctataatggg

SEQ ID NO: 681102 - DNA, 50 bp, Homo sapiens
ttggagatggaactacttcagtggaagccctcctatgacactgaaacaga

SEQ ID NO: 681103 - DNA, 101 bp, Homo sapiens
ttgcacacactaggagatctcctcaaagaagtttgtccttctgctattgatcctgaagattataagcgccatggctatggctagtgttaaattgcttgccg

SEQ ID NO: 681104 - DNA, 97 bp, Homo sapiens
tagtggagcaaatggtggctttcattgggaaagtcgagatggtcgtgtggacagctggcgaaacttccaagccaatacgaaggggaagaaagagaag

SEQ ID NO: 681105 - DNA, 101 bp, Homo sapiens
ccttcagaacgctggggaggttgggctgaactgcagtgggagaggagaagagatgctggcgtgaaggggctatctgaacgtgctctccaacagccgctggc

SEQ ID NO: 681106 - DNA, 50 bp, Homo sapiens
gcagcaaatgcattccacgtgtatcaggctgaccccgcactacatctacc

SEQ ID NO: 681107 - DNA, 99 bp, Homo sapiens
cagaaagttgaacagaacgcggctcccagccacaccaagttcagagtcttgctatggagatacacttcaattcctacttcagtggaagagtcgggaaag

SEQ ID NO: 681108 - DNA, 75 bp, Homo sapiens
tgatggtgatggagattttgatgtggatgatgccaaagttttattagatatgaattgagaattcgttatttgcca

SEQ ID NO: 681109 - DNA, 82 bp, Homo sapiens
ggtgacggtggcgccgcccggggcgaggcagggccagcagcaggcgggaggagccttcacgtaaatgggtccagtcatgcct

SEQ ID NO: 681110 - DNA, 100 bp, Homo sapiens
gtctggccttagcacatgcagatgagaagtccttagcttttaataacccacgaccagggcaactgggcaggttattgccaaaccagaatttaccacttga

SEQ ID NO: 681111 - DNA, 100 bp, Homo sapiens
tgactcgagttgtcttttagaaacactagaaacatatctgcgaaaacacaggtggattttatccaaagccaagaaagacgataccgatgatgaaattgcc

SEQ ID NO: 681112 - DNA, 98 bp, Homo sapiens
agctgaggtggaggcaggctgcggcagacggcgacagtggcggcggcgccatggcagggcttgcaggacgtcctccccaacgtcgccctcaattccac

SEQ ID NO: 681113 - DNA, 73 bp, Homo sapiens
caggaggttgctaacccagaacactatattaaacatcccctacagaacagatcactttggatgtattagttga

SEQ ID NO: 681114 - DNA, 83 bp, Homo sapiens
actggagccagccggtttgcctcggcagccaaggagggcgtgcccgtggttgacacgagctgtgtccccagctgttcccgtct

SEQ ID NO: 681115 - DNA, 82 bp, Homo sapiens
gccggagctcccaacgaccgaacgatccagaatggggatatgtggaagctcttcgtgggcggtcttgactggagcacgaccc

SEQ ID NO: 681116 - DNA, 100 bp, Homo sapiens
cggtcccgacacctagcctgcgtgacagagctgaatgaacctctctccaatgaagatcgaaatctcctctctgtggcctacaagaatgtggttggtgcca

SEQ ID NO: 681117 - DNA, 88 bp, Homo sapiens
gaagagggcccagggttgttcacctgcccaaaaattgtgtcttgaggctcttgtcaggatggtgaagctgttcatcggaaacctgccc

SEQ ID NO: 681118 - DNA, 90 bp, Homo sapiens
cggagaaggatgacaccggagtttgacgaagaggtggtttttgagaaatgactgctgtccatgcaggcaacataaacttcaagtgggatc

SEQ ID NO: 681119 - DNA, 97 bp, Homo sapiens
gaaatcagcaggcacaggaacaagtggacggcctggtccaatggctcctcagccacggaaatgagaggtgaccaagaatatggcccaggtgaccaaa

SEQ ID NO: 681120 - DNA, 83 bp, Homo sapiens
ccgccatgtcccagaaacaagaagaagagaaccctgcggaggagaccggcgaggagaagcagctatcactgaggcaagggaag

SEQ ID NO: 681121 - DNA, 82 bp, Homo sapiens
caaggctctgtcccacatataggtggattaactgtctggcaaaggcagtgcatttgaaacgccactttatgtttcgaaacca

SEQ ID NO: 681122 - DNA, 75 bp, Homo sapiens
gagtctccaccaggactgaccgctgccgcccagcacgtccagaataacaagcctttgtattcatttgaagataat

SEQ ID NO: 681123 - DNA, 96 bp, Homo sapiens
ctatccttatcctggaaccccaatcactcagcgcttctcgcacaaatcaaccttgtcctatgttaggcagctggaggcaagagtaagacagctgga

SEQ ID NO: 681124 - DNA, 75 bp, Homo sapiens
cacagggcttcaacaagctagctgagattcttggtgccaccattgagaactccaggattgtcctgcagatcgaca

SEQ ID NO: 681125 - DNA, 82 bp, Homo sapiens
gagactttagctgtaaggaggagccagaaattgacagcccagggggcctccggtgtggctgtctctgatggtgtcatcaagg

SEQ ID NO: 681126 - DNA, 100 bp, Homo sapiens
caagttttgggagagcccggagacggtgtcccagctggattcggtgcgggtctggctgggcaagcactacaagaaggcagaggtggaggagacactgaag

SEQ ID NO: 681127 - DNA, 50 bp, Homo sapiens
agcctgagcccgacattattcctgaggccggaaggtggtggtcgtacgct

SEQ ID NO: 681128 - DNA, 100 bp, Homo sapiens
agaacctagaccagaagcaaagactatgcccaattcttcaactcctaccagccagatcaacacaattgatagtcaaagattctaaactgcctgcatataa

SEQ ID NO: 681129 - DNA, 83 bp, Homo sapiens
caggaactcgactcagacgtggataaagataatcccgatcattgagaagcagccaggccacattcggagcagggttttcaggg

SEQ ID NO: 681130 - DNA, 87 bp, Homo sapiens
ggtcatctcgctcggagcttcgctcggaagggtctttgttccctgcagccctcccacggcttcagggatgacttcttagggggcagg

SEQ ID NO: 681131 - DNA, 106 bp, Homo sapiens
gactgcccagagtccgcgaatcctccgctccgagcccgtccggactcccccgatcccagcagttccaagagcctctgagttcctgccttttttcatctctgaatcc

SEQ ID NO: 681132 - DNA, 100 bp, Homo sapiens
taaaaggatgatggacagcagcctgagagacacaatctgacggagcagtgaggagaatgaataccttccaagaccagagtggcagctccagtaatagaga

SEQ ID NO: 681133 - DNA, 82 bp, Homo sapiens
acttggcgaggttcagactcttggagccagaagctacatgacccctaaacggccatcgaagacggcaatttggaggaaatgg

SEQ ID NO: 681134 - DNA, 97 bp, Homo sapiens
ggtggacctgtacctcaacacccccgacaagatgcacatggattaattgatgtatgttgagtttatggagctgccttttggtggcttgctttatctg

SEQ ID NO: 681135 - DNA, 50 bp, Homo sapiens
tcatttcaggctccttctaaatggccaagtggtgaactatgacaatgtag

SEQ ID NO: 681136 - DNA, 50 bp, Homo sapiens
ccgtcatattccacccattactaaggtcgtccttggtggaaggaaccatg

SEQ ID NO: 681137 - DNA, 85 bp, Homo sapiens
cgagtcctagatgtcaataaccagtccttcagagaacaagagatggtgagctcctgagggcaaggcccatgcaggtcattttcag

SEQ ID NO: 681138 - DNA, 75 bp, Homo sapiens
gctcaaagaaagatgattatgcatgatcccgaatgatgtccaaggtcctagcttgctcattgaccttcctgttgt

SEQ ID NO: 681139 - DNA, 100 bp, Homo sapiens
ggccatggcgttgtcgatgccgctgaatgggctgaaggaggaggacaaagagcccctcatcgagctcttcgtcaaggtgcctcattgcattcttgggcgt

SEQ ID NO: 681140 - DNA, 82 bp, Homo sapiens
attcgagtgaccgagaccgcggccgggaccgaggtgtcaaaccagaagagaagtaaaattcaacaaaaatttatgtgtggag

SEQ ID NO: 681141 - DNA, 75 bp, Homo sapiens
actgtcagatggattgactatggaaaagttgccaaattggtgagaagaaatttgtttgtccagaatgttcaaaac

SEQ ID NO: 681142 - DNA, 100 bp, Homo sapiens
gactcctacctccaaagtttatactatcagaccttattttcctaaggatgagatgtacctgtgtggtctaagctggaatctggtcaccttccatccatgc

SEQ ID NO: 681143 - DNA, 100 bp, Homo sapiens
agtcctatgtggaaatgcagagatgcttcggcaagatcgtggacccccaaaagtacaagggcatatttaacggattctcagttacacttaaagaggatgg

SEQ ID NO: 681144 - DNA, 75 bp, Homo sapiens
ggagaatccaccgccatccgccaccatggagctgcagaggctggagacagagttgggccaacccgctgagcgctg

SEQ ID NO: 681145 - DNA, 98 bp, Homo sapiens
ctcggcgccgccctgcgtggagccgccgccggccacccggtgctcagagcatgaaaattttctgctgtctttggaactttgtctacaaacagttagaa

SEQ ID NO: 681146 - DNA, 100 bp, Homo sapiens
gtgggggccgggagtttgcggattttgaatataggctcaagagcaagatgacgttctcatagttgattcagatgaagaagattcttcaaataatgccgac

SEQ ID NO: 681147 - DNA, 50 bp, Homo sapiens
ctcccatcattgatgtggtgcgatcgataacaggaggcgcagggttcgtg

SEQ ID NO: 681148 - DNA, 75 bp, Homo sapiens
cagcagcctggctcctggtggctccagcagcagttatgccccgtggtgccctgcttgtcaaaatcttcaaccgga

SEQ ID NO: 681149 - DNA, 98 bp, Homo sapiens
ctcaaaggggcggcggcagcagcaaactctttagctcttcttttaatggtggaagacgagatgagctctaagcgaaagacatgaggcctcagcctgaa

SEQ ID NO: 681150 - DNA, 90 bp, Homo sapiens
gtggtggtggtgtcttcctgtctcaacgatacctattttctagtgctgagatcctgagacaatgtatatgaaaatgatgatcagctcctg

SEQ ID NO: 681151 - DNA, 74 bp, Homo sapiens
cgcgctgctgccgcgattacccgggtgatgtagtcaaggtgatcgtctccgtccaggtattgatcctcctcccc

SEQ ID NO: 681152 - DNA, 100 bp, Homo sapiens
aggatcagattttgaagagagatatgccaccagcatttattaactcctcagagaaattttgaaattgccttcaagatgtttgatttgaatggagatggag

SEQ ID NO: 681153 - DNA, 100 bp, Homo sapiens
gcagctccggggggctgcagaacgcgcagttcgggatccgccgcgacgggaccctggtcaccggtgatcaccagcagcttgcaaaacttatccaggagtc

SEQ ID NO: 681154 - DNA, 98 bp, Homo sapiens
taagacggtctacaaaggtctggacactgaaaccaccgtggaagtcgcctggtgtgaactgcagaaactggcgatggaatatgagaggagccctctgg

SEQ ID NO: 681155 - DNA, 96 bp, Homo sapiens
ggcttgacagctgcaaggagttactgaagtaatgattctcagtgtggagtcatttgattattaagacccattgacatgagattacatcctctgcct

SEQ ID NO: 681156 - DNA, 76 bp, Homo sapiens
atcttttgcattgtacgtgggaaggcagctacatatcgaaatcgaattgtgagccaaaatctcagcacaagggaca

SEQ ID NO: 681157 - DNA, 80 bp, Homo sapiens
tgcgggtgcggcacctggaggaggagaaccgaggtatggcccatctcctgtacgcttggagcgacctttggctacgtggc

SEQ ID NO: 681158 - DNA, 50 bp, Homo sapiens
cctcaccgtgagaccttacaaagccgggtggtggaggtggatacagcagt

SEQ ID NO: 681159 - DNA, 100 bp, Homo sapiens
aaccgaggagtacgagctcaacggcggcctgcctccgggcacacccggctccccggacgcctcgggcgtctctggccgagcctctttttgtggaaaacga

SEQ ID NO: 681160 - DNA, 90 bp, Homo sapiens
tgtgaactaaggccccctgcccccttttcctggtgcatgtgaagttatcaaaaacagtgcaaggatgatgctgaaaggaataacaaggct

SEQ ID NO: 681161 - DNA, 90 bp, Homo sapiens
cggctgcagcgctctcgtcttctgcggctctcggtgccctctccttttcgtttccggaaacatgaacagatctcggcccctttccaaaca

SEQ ID NO: 681162 - DNA, 100 bp, Homo sapiens
gccctttgccactcccttggcaaggagagccgagacctcagttcccggcggctcttgcggggcacagttaaacaggtgttcaaggagctggagtttctgg

SEQ ID NO: 681163 - DNA, 100 bp, Homo sapiens
tgcaggccgagggacgtgccaagaagcgcaagaccattcccggagtaataaatccagttggagcagcagtgatgagaagaggggatcgacacgttccgat

SEQ ID NO: 681164 - DNA, 100 bp, Homo sapiens
cttgggatccggagggaggaagctgggacacccgggagtcaggaaatgaacaagttgaaatcatcgcagaaggataaagttcgtcagtttatgatcttca

SEQ ID NO: 681165 - DNA, 100 bp, Homo sapiens
tgcaaatacacgtgcccactttcaccttcagagtaaccgttggtgacataacctgcacaggtcaaaggttccgttacagttactatgatgaatcccaggg

SEQ ID NO: 681166 - DNA, 80 bp, Homo sapiens
aggccaggtttactggagtaggtgttagtaagcccaagaagatgaaaggattgttcttgttgacaacaaatgtaagtgtg

SEQ ID NO: 681167 - DNA, 75 bp, Homo sapiens
tgaccatccatctgaaaaggacaggctcctcctcatcaggaacatgtttgacaagctgaaccgtgatgcctttca

SEQ ID NO: 681168 - DNA, 83 bp, Homo sapiens
cagctcgcccagctcgcccagcgtccgccgcgcctcggccaaggaatgtatcctgtcaggtataatgtcagtgaatggcaaga

SEQ ID NO: 681169 - DNA, 98 bp, Homo sapiens
gacctctaccgagatgtgatgttggagaactacaggaacatggtcttgctggaaaccagcctggacaccaagtctgtgtcagaaggccacctcaagag

SEQ ID NO: 681170 - DNA, 75 bp, Homo sapiens
tgagcagggtctgcacgaaataaagctcctgggcaaggggacgtctgcagctgattgatattcactgatggactc

SEQ ID NO: 681171 - DNA, 75 bp, Homo sapiens
tggagaacctggcacttatgtcctccctggctggaagctctttgacatcctttggaacagaaacatcaaacagtg

SEQ ID NO: 681172 - DNA, 101 bp, Homo sapiens
ggcagagcgagggtgtgtggagggccggcggggaccgccgggagcgcgcggatgtcggtgttcctggggccagaacctaatccaccaatagatcaagttat

SEQ ID NO: 681173 - DNA, 100 bp, Homo sapiens
tttgttttttatgatttgtatttgactgagagaaacccactgaagacgtctgcgtgagaatagagaccaccgagcttccccgggcgctgcctggacaggc

SEQ ID NO: 681174 - DNA, 75 bp, Homo sapiens
tggagttataaactgcatctgctggaaaaagttgaatactgagtctgtatcagtttagaagaagaatgtgaatcc

SEQ ID NO: 681175 - DNA, 98 bp, Homo sapiens
tatagacgatgaggacgacagcaccttcacaataactgttgatcagaaaaccttccatttccagggtctattgaatgatggaactgtgggtattttta

SEQ ID NO: 681176 - DNA, 82 bp, Homo sapiens
ctctcgcgctgcactgtctctccgacgcaagactgtcccggcccgggttatggaaacaaaggacatgctttacatcgtcact

SEQ ID NO: 681177 - DNA, 100 bp, Homo sapiens
ttcaaacatctgaagatgacaatttattagatggtgacactgcagttggcctggcgtttccttgaccatgcaggcattttccgaagaggaaaggaagcag

SEQ ID NO: 681178 - DNA, 75 bp, Homo sapiens
gtctgttggtgcacaaaaagacacttatactatgaaagagggaaatcagtcagcttggtttacagtcgtggcttc

SEQ ID NO: 681179 - DNA, 76 bp, Homo sapiens
gaaactctttgggaaagccactcgaaaagatagcagaccccacgttagctgaaatgggaaaaaacttgaaggaggc

SEQ ID NO: 681180 - DNA, 101 bp, Homo sapiens
caaggctcttccctgaccattttctactgtccctgcgcgagcgtttgctgccaattgatggggcaaatgatctcttttttcagccacctccactgactcct

SEQ ID NO: 681181 - DNA, 100 bp, Homo sapiens
aaatcagtccacggatgatatcaacagacgggagactgaacttgaggccatggaggaattgcaagaccaagagggctgggaatatgcttctctaattggc

SEQ ID NO: 681182 - DNA, 98 bp, Homo sapiens
tcagttacttcatcgtctccatcctctacctcaagtatgagccagtgtgctgagagctggtggccagtgggactgagtgagctgtgtgccgtgtattg

SEQ ID NO: 681183 - DNA, 99 bp, Homo sapiens
gcctgtaatgcagagtcaccagtggccctggaggaggccaagggctgttgataatcaggtgtatgtggccacagcctctcctgcccgggatgacaaagc

SEQ ID NO: 681184 - DNA, 50 bp, Homo sapiens
ctcatggaggctgagcatttattcagatggagtcccactctgttgcccag

SEQ ID NO: 681185 - DNA, 96 bp, Homo sapiens
gaaacggaccaatggactgcgaagaactcctaaacaggtggatccagggaaaagcttcactctgaccatcactgtcttcacaaacccaccgcaagt

SEQ ID NO: 681186 - DNA, 96 bp, Homo sapiens
cgcagtggtcgcttcttctccttgagtgttcacaatttcactttaccctcctgggccactgaggacaccatgactaagttgagagaattgtcagaa

SEQ ID NO: 681187 - DNA, 83 bp, Homo sapiens
gcacatgcattcacgccgggtgatgcaccgaggccatgtagggcaggaccgggtggactttggccagactgagccgcacacgg

SEQ ID NO: 681188 - DNA, 82 bp, Homo sapiens
tgcaaaaccttccactccatggcctacgggcacatagggcggaaaacgctgtaaatgtaagcctattagagctacacagaag

SEQ ID NO: 681189 - DNA, 75 bp, Homo sapiens
ttaaagcaattatgaaagaagtcattccttttttgaagcttgaccaagaatgttccaatatttgtttgcactatg

SEQ ID NO: 681190 - DNA, 100 bp, Homo sapiens
caaaaacgtttttcctgataactggaaagttcctcaagatggagactttgactttgtgctgtacttctttgcagtatacaaggactagcagttaatattg

SEQ ID NO: 681191 - DNA, 90 bp, Homo sapiens
cagagttcaaggaggccttccagctgtttgaccgaacagtgctggccattcaggcccgaaagcggaggccgaaaagagagaaacatccga

SEQ ID NO: 681192 - DNA, 75 bp, Homo sapiens
caggtgtctgagcacagcatcatcaaggacttcaccaagcaggtgattgcccacagtgagtatcaaaagtccaaa

SEQ ID NO: 681193 - DNA, 83 bp, Homo sapiens
gcggtgcgcaccgtttgcgacttggtcaaaatgcagatcttcgtgaaaacccttaccggcaagaccatcacccttgaggtgga

SEQ ID NO: 681194 - DNA, 100 bp, Homo sapiens
cctggcctgcgcgccgctgcccgcgccacaggagctgctgctcttcctccagaacctgcccacagcccactgggatgatgaggacatcagcctgttgctg

SEQ ID NO: 681195 - DNA, 75 bp, Homo sapiens
gccccacccagctcacccagaggctcccggtgtccaggcagggcatcgactgggcccccgagagtaaccgtattg

SEQ ID NO: 681196 - DNA, 100 bp, Homo sapiens
acttaaacactgtgtgatagttcctacacatctcattatagtttaacagctttgctgagccatcaaggtctaatggaagcatggttcggcattcttcatc

SEQ ID NO: 681197 - DNA, 83 bp, Homo sapiens
gatttgatcaacctgctcacgctaaaccaggtggacaggtgaaatgtcagtatatctctgctgtggataaagttatatttgtg

SEQ ID NO: 681198 - DNA, 51 bp, Homo sapiens
cttctggaagctctgcgacttcaacaagtgtagacccttgtctgagaccga

SEQ ID NO: 681199 - DNA, 50 bp, Homo sapiens
ggcgccaagccgcggagcctccagacgggccaacgtggaacctgttgtgc

SEQ ID NO: 681200 - DNA, 83 bp, Homo sapiens
ctggattgctgctttcaattactggcatccagaaattgtgtattcaggacccatacaatgtactggccccaaagggagcttca

SEQ ID NO: 681201 - DNA, 100 bp, Homo sapiens
aggagttcgagcagatcgacaagtccgggagctgggcggccatttaccaggtacatcaggaacgtctctatcaagaatacaatttcagcaaggctgaggg

SEQ ID NO: 681202 - DNA, 75 bp, Homo sapiens
gaaacaagatggtccttaaaaccgaagaggaggacggctctgacgcccgctctgcggcttcggtgtttgaacagg

SEQ ID NO: 681203 - DNA, 80 bp, Homo sapiens
ggatttgagattgacgcggtgaactctgtccagttttcaaaccacacaggactccctggaggaaaagcggaagcggcagc

SEQ ID NO: 681204 - DNA, 90 bp, Homo sapiens
cagctgcttccattggccagtatgaagtggtgaaggagtgtgtgcagcggtacgaatgtgaagaatcttttacgaccctaaacgtagaca

SEQ ID NO: 681205 - DNA, 100 bp, Homo sapiens
ctgaaggacaacgagaagaaccggaagctctttgaccttctggatgtccttgagttcaaccaggttcggagcgaccttggccgttggcctgaccatcttt

SEQ ID NO: 681206 - DNA, 75 bp, Homo sapiens
agacgaccaccatcctgctggacgggcggcgggtgaagctgcagctctggtgcctcaggaaggtctttccaccga

SEQ ID NO: 681207 - DNA, 75 bp, Homo sapiens
ttacaagttattttctcttcttctgaaaaagagatcttggtttgaacttgttctggaagctgtgcgtcaccgtaa

SEQ ID NO: 681208 - DNA, 100 bp, Homo sapiens
ggaatcagtagctttcagcagagtaactcaagtgggacttacggtccacagatgagccagtatggaccacaaggtactccaaagattcaggtttactcac

SEQ ID NO: 681209 - DNA, 100 bp, Homo sapiens
cagcggtagaggcggcggcgaggactggcgacggcgaggagggccagctctcaatgttgcaagaaaaaatagaccatttggagcgtttgctagctgagaa

SEQ ID NO: 681210 - DNA, 96 bp, Homo sapiens
caaccggcggccttgagcgctgagcaagcaaaggaccttgtgccggagccgactactggagatgacagtgatgctgccacctttaagccaactctc

SEQ ID NO: 681211 - DNA, 98 bp, Homo sapiens
aagaatttgagcctctgctgaattggatgaaagataaagcccttaaggacaaggtggatccttttcataccttatttggaattgctggattgtcactt

SEQ ID NO: 681212 - DNA, 134 bp, Homo sapiens
ctaaccccggagcccggccccggggaactagggagcgtctccggctgcacagcgctcaggtgaatctggattgggaaagtcgacattaatcaactcattattcctcacagatttgtattctccagagtatccag

SEQ ID NO: 681213 - DNA, 50 bp, Homo sapiens
gggagacggatgtggccaagaaaatctcattatttgtggacttggaaaga

SEQ ID NO: 681214 - DNA, 90 bp, Homo sapiens
gcctgagctcatggacgtgcatgtcttctgcacagacagcatccaggggacccccgtggagagcgacgtagagacggggttttaccgtgt

SEQ ID NO: 681215 - DNA, 82 bp, Homo sapiens
attaatcaaacttggacagctctctatgtgagaaagatcagtctaaagaaaaggagaagaaagtgaaaaaaacaattccttc

SEQ ID NO: 681216 - DNA, 73 bp, Homo sapiens
gaacatgctggctacaactaattatgacatgatgggaagaaatcagactgctgtgagagaagagatgattctc

SEQ ID NO: 681217 - DNA, 100 bp, Homo sapiens
tctcagccttgtcaaagatgccagatgtgggagacacgccaaagctcccaagaaactatgttccaacttcctgtcaacaatcttggcagtttaagaaaag

SEQ ID NO: 681218 - DNA, 80 bp, Homo sapiens
gtgaaataccagagtcaggcccggaagatccagacatttaatgtggatgcaccatgccagaccgtggaagatttaacgaa

SEQ ID NO: 681219 - DNA, 83 bp, Homo sapiens
ttggtccccagcgcagtgaagtggtgagcctttttgtcactgaaaaatagtagtctagtcattcaagtgaaaggtccaagaaa

SEQ ID NO: 681220 - DNA, 90 bp, Homo sapiens
gcacagatggaccaaaggttatgcacaggctactccttcctgtagagcagaaattgtattttgcacgaacatgcagttattgaagattag

SEQ ID NO: 681221 - DNA, 75 bp, Homo sapiens
gtgttggaccttccggagcttctcagaagacagagggttttcttttgaggtgcataaagcccaatgagcatcagc

SEQ ID NO: 681222 - DNA, 100 bp, Homo sapiens
aaggaacccctttcttctacagcaaaaaagatgtccggtctgtgctacgacagcaaaatgttccaggtgcatcaggtgctctgcatccccagctggatgg

SEQ ID NO: 681223 - DNA, 100 bp, Homo sapiens
gcagaggcatctgtaaagtcatgtgtccatgaggaacatacaagagactgggacagggagaaattacttgaagcttggatgtccaacccggagaactgct

SEQ ID NO: 681224 - DNA, 75 bp, Homo sapiens
ggcggccgcagtggcgtcctggagccctcctcaggtgaagccaaaaaccttccctcttacccggggccgagcaag

SEQ ID NO: 681225 - DNA, 100 bp, Homo sapiens
ggtaacggcaatgcggctgcaacggcggctacagcaactggacgaggagaacagtgaactccggtcctgcacgccctgtctgaaggccaacattgagcgt

SEQ ID NO: 681226 - DNA, 100 bp, Homo sapiens
cacaggatggagactacgagttttttgatgatcttatggcggagaaggaagctgtatcttcaaaatgtgtcaatttggctaaagagaatcaagtttttca

SEQ ID NO: 681227 - DNA, 103 bp, Homo sapiens
gggcaacctcggagcttatactcctcccagtgacgggtctggagtgcgtgggggaccggctgttggcgggtgaaaggtgtagcagtcactcggcctacaccca

SEQ ID NO: 681228 - DNA, 100 bp, Homo sapiens
ttgaaggaataaaggacagccaagctcagcggatggccgaaaatctaggcttcgttgggcctttgaaaagccaggagtctcgctctcagtcaaaatctcc

SEQ ID NO: 681229 - DNA, 89 bp, Homo sapiens
tccaactcgggtcgcccccaccattatttcggtgagggggcaacgctaagaaggggatactggtacgagtgcttccatatccatttacc

SEQ ID NO: 681230 - DNA, 100 bp, Homo sapiens
tgaccaggggcttgagagctgggttctattttccctcctcaaactgactttgcagccacggagagaaatgcactcggtgatggaaagagagccactattc

SEQ ID NO: 681231 - DNA, 100 bp, Homo sapiens
ttggacagtgacttactttgattcttttgaaccaggaatgtttcctcctactcctctttcacctgccaggttcaagtgctggacgtcattgctcctcctt

SEQ ID NO: 681232 - DNA, 80 bp, Homo sapiens
tgatctggggaaccaaagactctgggactcttggtgccaacagagttactctcggcccagcccaatccagctttactccc

SEQ ID NO: 681233 - DNA, 95 bp, Homo sapiens
ctcagctccagatgcttgcaaaccatggggtaaccttggaaatgttctgaagagtcagagcaaaatttctgaagctgaaagcgcctatagaaatg

SEQ ID NO: 681234 - DNA, 83 bp, Homo sapiens
ctcctcgccatggctcagctccaaacacgcttctacactgataacaagaacgagtaaccagctcataaatcacatcgaacagt

SEQ ID NO: 681235 - DNA, 90 bp, Homo sapiens
cggcgaagccacagaaaccgtccctgctacagagcaggagttgccgcagccccaggctgagacagcaaagtctcactaggcatgctgttg

SEQ ID NO: 681236 - DNA, 98 bp, Homo sapiens
gaaccagtgaataaagatttggaatttcagctccatgaaccatttcttctgtatagaaatgcaagctgaacatccaatacttgggcaacccttttttg

SEQ ID NO: 681237 - DNA, 99 bp, Homo sapiens
cgggcactacgctggagaagatgcaacgagtcttggaaattcacagagagaatatgaaaagcaggttgtcctgtacagtatccgcaatcagttacgata

SEQ ID NO: 681238 - DNA, 100 bp, Homo sapiens
ggaaattgcgctggaccgtcgccttgctcctcgccgcggcggggactgcaggttctctcaagtagtgctgccagtagtaccatcacagcactgtcacctg

SEQ ID NO: 681239 - DNA, 87 bp, Homo sapiens
ggatcagaactgtgttcgcaattcttacgatgtcttctctttgctacgggaggacaagctctttggggctaccaaacagaagcagca

SEQ ID NO: 681240 - DNA, 100 bp, Homo sapiens
cagggcgatggacggccgaaccccgcgcccgcaggacgccccagccagcagtctctggtcccagcccaccccatggcccctcccagtcccagcaccacca

SEQ ID NO: 681241 - DNA, 82 bp, Homo sapiens
gggaaaggatgacatatttttggacctgaaacagaaattctggaacacctatatggtgagccaccagctgggcagcatcatg

SEQ ID NO: 681242 - DNA, 50 bp, Homo sapiens
cttcacggaggcaatagctagccggggctgataacatccggaaatactgg

SEQ ID NO: 681243 - DNA, 96 bp, Homo sapiens
ggccgcccgggagacccagaagcacaagaaggaccttcacccattgtttgatgagacctttgaattagagcagctctaaattgggaagcaatgccg

SEQ ID NO: 681244 - DNA, 100 bp, Homo sapiens
tggagtccatgctacctgattgcccccgggtctcagcaggttgaagctccattcataccaaagtttagaggctctggagataccagcaactttgatgact

SEQ ID NO: 681245 - DNA, 106 bp, Homo sapiens
cgaggccagcgtggccctgctggaggcctcgctgaggaacgacgccgaggaagtttccaacatggctagatccatcagaaactgaagccgtggagaacgctctcgg

SEQ ID NO: 681246 - DNA, 100 bp, Homo sapiens
cccggtgttccacagctattgccacaggttgttgatcattatgaaaatcctagaaacgtggggtcccttgacaagacatctaaaaatgttggaactggac

SEQ ID NO: 681247 - DNA, 75 bp, Homo sapiens
gatccagcctgcggagcctgtggggcagttgtaggacagtcccatctggacagcaacattgagaatcaagagatt

SEQ ID NO: 681248 - DNA, 126 bp, Homo sapiens
cacaagcggtgccatgaatttgtcacattctcctgccctggcgctgacaagggtccagcctccgatgatgctgaaaacgccattcaacagatgggtggccagtggcttggtggaagacaaatcaga

SEQ ID NO: 681249 - DNA, 100 bp, Homo sapiens
caaggatgctgttggcctgggtacaagcattcctcgtcagcaacatgctcctagcagaagcctatggatctggagctttaatgaagcaccagttgagatt

SEQ ID NO: 681250 - DNA, 50 bp, Homo sapiens
gtcaaagtgctgctcaatgcaggaatgtatcctgtcaggtataatgtcag

SEQ ID NO: 681251 - DNA, 75 bp, Homo sapiens
gaaacaaaatgtcaacaaattgatggaaagctgacttcatgagaccgaggatctcgttcgttgatcgatgctaca

SEQ ID NO: 681252 - DNA, 83 bp, Homo sapiens
ggaggtgttcgagaacgaccccgagacgtgtcaacagcatctccaccctggagcctgtgagccggtgccagcgcctgagtgag

SEQ ID NO: 681253 - DNA, 100 bp, Homo sapiens
tcatcagactgcataaaatcagctgccttcctatttcaaggaaagacgccaaggtaattttgacccagaggagcaatgatgtagccacctcctaaccttc

SEQ ID NO: 681254 - DNA, 82 bp, Homo sapiens
cgcggcctccagcgacgagagtcccgggaggcagtaccaagaagcaagagagacctatcttgatctggatagtaaagtgagg

SEQ ID NO: 681255 - DNA, 90 bp, Homo sapiens
acatttaattttagggtcctttatatagaagggagagtagatcccaagacaaaagcgtggttgaaggagcacgtggagcctgtgttcggc

SEQ ID NO: 681256 - DNA, 86 bp, Homo sapiens
agcccggctccggccccgggactaggggcgactgcctggggcgccggcgagacaatgcagatcttcgtgaagactctgactggtaa

SEQ ID NO: 681257 - DNA, 75 bp, Homo sapiens
actggcctgctgctggcccgcagggagggctctgagagatttcatttctgtcctgctgatgaagtctacgttcat

SEQ ID NO: 681258 - DNA, 83 bp, Homo sapiens
gagactcgcaacaagatcccctatgagagtcccatcttcagcagaggttgaaaggattgttgacaaaaggaaaaataaaaaag

SEQ ID NO: 681259 - DNA, 75 bp, Homo sapiens
agtggaccaccccatgaacctcggccatgcgtagtcacgaaggaaatgaagcccaggtttgttatttcataattc

SEQ ID NO: 681260 - DNA, 101 bp, Homo sapiens
agccgactggagcaggcagcagcccagcttcctgtgcttcccagaattccatcatctgactgccatcctagaaggcattctcatgaggaccaagaatttcg

SEQ ID NO: 681261 - DNA, 90 bp, Homo sapiens
cgaggggagcctgatcctatcgttttgacgccaggaatccctttgcccacgtccagctgaagccgacagtgaccaacgacaggtctgccc

SEQ ID NO: 681262 - DNA, 101 bp, Homo sapiens
tgaaaagtcacaaactccttcacactgcagatgaaatttaaaagcctgttgattcaagaactttctaaagtatttccggaagacatggctaagtatcgaag

SEQ ID NO: 681263 - DNA, 100 bp, Homo sapiens
cggagctggtggaggccaaagacggcggctccctggaccaggtgctgaaagaggccaagaggattcccgaggagatcctggggaaagtcagcatcgcggt

SEQ ID NO: 681264 - DNA, 98 bp, Homo sapiens
cctaaatgaggaatgtctttcctaccatctaaaatacgaaggtttctggctgggttgcttttaactttgacagaggaagaattttccaagacgcccta

SEQ ID NO: 681265 - DNA, 100 bp, Homo sapiens
cgactgcatttttgcctttgagactcccgaaatatttaggcctgaaggaattctcagtcaaagagatgtatcggcaagcagtgtaaacggaggacttggg

SEQ ID NO: 681266 - DNA, 100 bp, Homo sapiens
atgccaccagcatttattaaaaactagaaaaactgcttttggaattatctctacagtgaagaaacctcggccatcagaaggagatgaagattgtcttcca

SEQ ID NO: 681267 - DNA, 96 bp, Homo sapiens
tgtccgagcaaacagaggcgctcatccacagagccacatctgttagggacattgctgctcggaatgttctggtgtcctcaaatgattgtgtaaaat

SEQ ID NO: 681268 - DNA, 101 bp, Homo sapiens
caaagctgctgccgccccttgggctaaaaggaatactcccccagttgcaagaggcgcaggaccgtggaagacttcaacaaattctgcacctttgtcttggc

SEQ ID NO: 681269 - DNA, 50 bp, Homo sapiens
taaaggaatcaaagagcctctgggataggctgaccaactgactgaagagc

SEQ ID NO: 681270 - DNA, 80 bp, Homo sapiens
cgaggctcggagaaacaggcgccgcgggctccgcgcccggccggacccgggcccgagagacaagaggagcagcagcggca

SEQ ID NO: 681271 - DNA, 51 bp, Homo sapiens
gagttggcaacgcgacacagagccaggtgtattatttctcgaaaggcaccc

SEQ ID NO: 681272 - DNA, 98 bp, Homo sapiens
gagggctcgcctattcctgaccccagtttctcacctctagttggagagactttgcaaatgctaactacaagaatcctcactatggatgggctcattga

SEQ ID NO: 681273 - DNA, 101 bp, Homo sapiens
attttcttacagagaagaattgcagccagcttcagggctatatccgacagtgccgcaagcacacaggaatgttcaccgttgcgcagctagccactattttt

SEQ ID NO: 681274 - DNA, 100 bp, Homo sapiens
aaagaaaatctctaaatgcagattccagaaaaattacagcacatctcagtgaatttgcaagtgctccccgcagccaccgccacccattggaatggccaac

SEQ ID NO: 681275 - DNA, 96 bp, Homo sapiens
tactgtccaagcacagtctcagccccatggggtatatccaccctcaagtgtggtatggcccatctcctgtacgcttggagcgacctttggctacgt

SEQ ID NO: 681276 - DNA, 84 bp, Homo sapiens
tccgtcgtggaagcaggactgcgccgcgtcttcctcaaggttcgagaacttgtcttggacaattgcaaatcaaatgatggaaaa

SEQ ID NO: 681277 - DNA, 73 bp, Homo sapiens
tcatgacggatggtgtgctgcttaaagaaatccagaaggtccagaggtgtccttctaaagctggtagaggttt

SEQ ID NO: 681278 - DNA, 87 bp, Homo sapiens
cgctgcggcctggcggcttccaggcgcactaccgcggaggcatacacggaatacctgaggagcatccactatatctcccaggtgtta

SEQ ID NO: 681279 - DNA, 125 bp, Homo sapiens
caacgacacaagaaacacaacttcagacttgcagaaaaccagtgaaggggttgacctgacagttcaagaaaaggagaaatatcttaatgtgtctcgctggttttgtcacattcagcattatccag

SEQ ID NO: 681280 - DNA, 46 bp, Homo sapiens
aagaggcatgccagaggtagagcagtttgttcatatcaacaactta

SEQ ID NO: 681281 - DNA, 100 bp, Homo sapiens
tttttagactacaaagatgcttactcagggattatcttgaacacataacctccattggccccaggactacaggaagtccagaaaatgaaattctgaccgt

SEQ ID NO: 681282 - DNA, 75 bp, Homo sapiens
catggacatctaaaattagcagattttggcacgtgtatgaagatggatgaatgtgaaacaataaattctgataat

SEQ ID NO: 681283 - DNA, 125 bp, Homo sapiens
ccattctgttggttttatgcatctttatccaatcaagtgcccttggacaaagcctgaaaccaggaactttatattgctgttggaatatctggagccatccaacatttagctgggatgaaagacag

SEQ ID NO: 681284 - DNA, 90 bp, Homo sapiens
atccagtgttcaccatcctggccccggaagacgactaagctaccggagagccgcgggcaccctgccgagcccccagagcctcaggaagcc

SEQ ID NO: 681285 - DNA, 75 bp, Homo sapiens
ttccacttaaaacctgaaaacattggaccacacaaagtcttactgaacattcagaagattctcggccttgcccct

SEQ ID NO: 681286 - DNA, 96 bp, Homo sapiens
gcaccattcaagtgcccataacaaaggaagaaacacctcttacagtcatctgcaggggattctccaaggacatgggaagatagatgtaagccctgg

SEQ ID NO: 681287 - DNA, 75 bp, Homo sapiens
cgagaacgcctccagcggggatgacacagaaggttttgcacactagggaccaagaagccctcggggacactgctg

SEQ ID NO: 681288 - DNA, 90 bp, Homo sapiens
ggctacacagagacagatcaaagcagctcgtattgatgaagatgaccctactgctgatgataccagtgctgctgtaactgaagaaatgcc

SEQ ID NO: 681289 - DNA, 100 bp, Homo sapiens
gaagaccacaataaaagagacctctacttagctcagcaattcttaccttgctgccaaacgagggattctttcatctggtcggggcagaggaattcattca

SEQ ID NO: 681290 - DNA, 75 bp, Homo sapiens
tgtggccgaggcccacctgctgacatctacctgccaggtttacccaaggtccagcctagcccctaggcaccatgt

SEQ ID NO: 681291 - DNA, 75 bp, Homo sapiens
atgtgaatctcaggagagagcagccagagtgccatgttcactgcccacttcccatgagatttctccagtgcccgc

SEQ ID NO: 681292 - DNA, 82 bp, Homo sapiens
aagaaactcaatgatcgtgtcatgagattggtgttggtattaggagatctgcacatcccacaccggtgcaacagtttgccag

SEQ ID NO: 681293 - DNA, 100 bp, Homo sapiens
cgagaccacaagtaacataacctcaaggccagcagtaccagcgaatcctcaaacagtcaaaatctgtacagtgccggtgctgcatgccatggggacctca

SEQ ID NO: 681294 - DNA, 100 bp, Homo sapiens
ggaaggagcagttggttcaatctctggatcagtagtaatttcacttcgtcttcttccaaaactatttggtacttttcagcagtttgggagcagttacgat

SEQ ID NO: 681295 - DNA, 101 bp, Homo sapiens
gccttccccagctccctgatacaggccaatgtgaccgtggggacttgctcgggcttttgttcccagaaactttggcgctgaccacaatgctgagcaggaag

SEQ ID NO: 681296 - DNA, 90 bp, Homo sapiens
ttgaatatcaagaggaggagttgttggacttggatgttgtgggtgatggtatgcagtgtcctccttcacctttgctttttgatccttcac

SEQ ID NO: 681297 - DNA, 80 bp, Homo sapiens
agcggaagctgcccttcaccgcgggcgccaatggggagcagaaggactcggacacaggctgccctgaggatctgtgtttg

SEQ ID NO: 681298 - DNA, 82 bp, Homo sapiens
gtcttccagagcgtgaagatcaagatcggttggaagtactccatgacacacactcggagaaagtcccttcccatgctgagtt

SEQ ID NO: 681299 - DNA, 75 bp, Homo sapiens
ccccgcgcgggctgacgggccggagcccgcacggagcggccgggcgggacaggtgaaaggtgtagcagtcactcg

SEQ ID NO: 681300 - DNA, 83 bp, Homo sapiens
gacctatctcaagccaaccttctgcgaacactgtgcgggatttagttacttctccagaggaggtgcaaagttcattgggatga

SEQ ID NO: 681301 - DNA, 100 bp, Homo sapiens
agacgaccggttcgtcgcctccttgcccgtgaccgtcgctagaactcagttgtgcgttgcggccagtcgccactgctgcaagaagagactgacaggagag

SEQ ID NO: 681302 - DNA, 75 bp, Homo sapiens
ccttgctgctcagacgctccgagaagcttcaggcagcataacacttacaggtgccgtgagcgatgtggagatgca

SEQ ID NO: 681303 - DNA, 90 bp, Homo sapiens
cagagtggctatggtgggcaaactaagccgattttccggaaaaagagggtacaccacccggactacaacaatgagttgacccagtttctg

SEQ ID NO: 681304 - DNA, 104 bp, Homo sapiens
caacttcgccaccctgcggtggattgactacggcaaagtggccactcaggtgagaagccctaccactgcaactgggacggctgcggctggaagtttgcgcgctc

SEQ ID NO: 681305 - DNA, 82 bp, Homo sapiens
atgtggacaagagggtcatggagacaaactactttggcccagttgctctaacgaaaggctgcttctgatgcttggaagatat

SEQ ID NO: 681306 - DNA, 82 bp, Homo sapiens
cccccatcgagaaaaccatctccaaagccaaagggcagcctgcactcagatggctccagcgggggcagcagtggcaataccc

SEQ ID NO: 681307 - DNA, 97 bp, Homo sapiens
ctgggagagaggtacctctccttttccctctccctttccctaagctggcctgctgctgtgggtctgcaggctgctctctctgctgtgattgctgccc

SEQ ID NO: 681308 - DNA, 97 bp, Homo sapiens
ctaaaacacatcatgaaggcctgttttgaagagaaggggaataagactgcatctgttcatatgaggagtacaagcgcaagctagccagagtttccct

SEQ ID NO: 681309 - DNA, 89 bp, Homo sapiens
tactacacaaccgtctccagccttggtctgagtggactgtcctgcagacagccctgcacctggcagccatcctgggggagacatccacg

SEQ ID NO: 681310 - DNA, 82 bp, Homo sapiens
cgagtgggagcaccaggatctcgggctcggaacgagactgcacgacaatgcagatcttcgtgaagactctgactggtaagac

SEQ ID NO: 681311 - DNA, 100 bp, Homo sapiens
cccaacctgaaaaacttcatggagcatggactaatggtcaggtggcagcagactgtcctgggaagctgttcatcttccattcttccttgccaactgctga

SEQ ID NO: 681312 - DNA, 75 bp, Homo sapiens
aaagaaaatactaaggaagagaaattttggatgaataaggcgcagttgtgtagcagttgagtaatgctggttagc

SEQ ID NO: 681313 - DNA, 100 bp, Homo sapiens
ttccagttcgagatcaccttcgagtgcatcgaggacctgtctgaagctgaaggaattgaagaatctgcagcagcaatacttacagattaatcaagagatc

SEQ ID NO: 681314 - DNA, 100 bp, Homo sapiens
ccccacgggtgtgcagctgcaggacaacggcaggacgtgtaaggcaggcatggatgagttgatggaggtgtctttctcgcccctggcggccacaggcaag

SEQ ID NO: 681315 - DNA, 100 bp, Homo sapiens
gatgaatgtctgtgttggtgatattatcaagctagaaaataaccagtttgtggcggtctctgctggagaaggagctggagtctgtgggcatccgcctcaa

SEQ ID NO: 681316 - DNA, 51 bp, Homo sapiens
atgtctaattatgatgaagaagccacataaagaagatccctaatagtcatt

SEQ ID NO: 681317 - DNA, 100 bp, Homo sapiens
cttatacatggagttgatattacaaccagtgacactgcagttgttcccatgactttgccgactaaagttctaagtgcccaccgtaaatcactgaatcttg

SEQ ID NO: 681318 - DNA, 119 bp, Homo sapiens
tgagaaagcaaaggctgctctgaagcgcacgacctccgactactttctccttcaagctcccctttgccttccgccatgattggaagcttcctgaggcctccccatagtgcagatgccag

SEQ ID NO: 681319 - DNA, 51 bp, Homo sapiens
ggggacccagtgcgcccgcatcgtcgaggcatccaggctggagaagcagaa

SEQ ID NO: 681320 - DNA, 100 bp, Homo sapiens
tgctatcaaagagatgattgagaactggtgcataaggcaaatccaatacgcaagtaccagggtctggagataaagtcaagtgaccagcctctgactgtgc

SEQ ID NO: 681321 - DNA, 100 bp, Homo sapiens
gcattactttctagaaaccactccttagaagaagagtttgaaagggcaaaagcagcagtggaggcatggctttgggaagaagacaagaatttgagatctg

SEQ ID NO: 681322 - DNA, 50 bp, Homo sapiens
agcctatgtgggcttccacggaggatcttcctcaggaaatggaaaagttg

SEQ ID NO: 681323 - DNA, 144 bp, Homo sapiens
gccgctaagccgagaaggagtcagtcagagagccttgggccagagttccaggggctctgggagtggctgccaggagaatggggtactaagagaaaagcacgaagctgtggatcatagttcccagcatgaggaaaatgaagaaag

SEQ ID NO: 681324 - DNA, 101 bp, Homo sapiens
agaggagcgtcaacagcagcaccatggggaactgggaacagccaggtgccccaaagcaaatacgcggagctgctggccatcattgaagagctggggaagga

SEQ ID NO: 681325 - DNA, 76 bp, Homo sapiens
cagaggggaaagtatttgtggtaataacccttaccgggagtttcactgaagcagataatctcagtgataccttgaa

SEQ ID NO: 681326 - DNA, 83 bp, Homo sapiens
gcgtgtgtcagcctgccctaggacttcatgtctatatatttccccattcactggaagctcttcgtgggcggtcttgactggag

SEQ ID NO: 681327 - DNA, 88 bp, Homo sapiens
aaggtagccgtttggcgtcgtgaggggttgtggaaaccagaacttcgcctggagaacagagtgcaaccagtgtaaggccccaaagcct

SEQ ID NO: 681328 - DNA, 100 bp, Homo sapiens
ttggaaacaagctgactttggatatgccagagagaggctggaggagatgcatgtgctctgtcagcctaaggaaacggacagaagttgttatttatgttgt

SEQ ID NO: 681329 - DNA, 90 bp, Homo sapiens
ggatgtgaaaattgccttttgtcaggtgtgtgttccttacaggtaaaacaaggcatgcttctgacggccaatgaaacccccaagatgggc

SEQ ID NO: 681330 - DNA, 96 bp, Homo sapiens
gctccaggagcagttgctggtgctgctgaagtccctagggaaccaccaattcttcccaggggtattccctcagcggatactacacccatccatttc

SEQ ID NO: 681331 - DNA, 89 bp, Homo sapiens
agaagattccataattgaggatgaagatgatgaagccgaggtagaagaagatgaacccacagatttggctacccacctttctgttctga

SEQ ID NO: 681332 - DNA, 75 bp, Homo sapiens
agagtgtggcaaatttcagatcaggatgtaagcctgaacaacagatgatgtatgctggaagtaagaataagctag

SEQ ID NO: 681333 - DNA, 51 bp, Homo sapiens
acagaaacacatcagaactcatacagagtttgctctccaaagctcggggaa

SEQ ID NO: 681334 - DNA, 133 bp, Homo sapiens
gaaagttttcaaacacactctccctcccaaggtatttgagatgctgttgcacaaaattccccttatttgccagagctcaaagcatgcctgtttttaaggaagtaaaggtacatctgttagaagatgcaggcat

SEQ ID NO: 681335 - DNA, 97 bp, Homo sapiens
cgcgaccagagccattggagggcgcggggactgcaaccctaatcagagcccgggcgctgtggaagagattctagaccgggagaacaagcgaatggct

SEQ ID NO: 681336 - DNA, 100 bp, Homo sapiens
ttttggatcacaaatagaattcagctgttcagaaggtcaaggatgctatctaaatgggccttttaattcaaatctactgactatcccgaagcaaaggtca

SEQ ID NO: 681337 - DNA, 74 bp, Homo sapiens
tgagattgacgcggtgaactctgtccagttttcaaaccacacagactctaaaatagagctcaagcttgagaaga

SEQ ID NO: 681338 - DNA, 99 bp, Homo sapiens
aataacaggcggagggtcggcgtaggactgactgcattgcacagatgatggatatttacgtatgtttgaaacgaccatcctggatggtggacaataaaa

SEQ ID NO: 681339 - DNA, 93 bp, Homo sapiens
gaggaatcgccgtggcgtcttggtgttctccacgctggttcgcagcccccagcggcgcccgggccgggccgggctggcggaggaggcttccgg

SEQ ID NO: 681340 - DNA, 73 bp, Homo sapiens
tcgggcaagggctaccacggcatgcagagatggacagagacgtatgtgcgttggtctcctaagggcacctacc

SEQ ID NO: 681341 - DNA, 75 bp, Homo sapiens
aaatccacctcgcagcttgtaaatctacagatcaatgaactgagccatgttcaaatccctgttatgttgatgcca

SEQ ID NO: 681342 - DNA, 90 bp, Homo sapiens
ctgcccacggtgtccgcgctcaggctatttctagtctgctggcatcagtgacgcttgacctcagccagtatgccatggacatcgtgaaag

SEQ ID NO: 681343 - DNA, 50 bp, Homo sapiens
agaagaacatgctgttttctggtacaaacattgctgctgggaaagctatg

SEQ ID NO: 681344 - DNA, 75 bp, Homo sapiens
caccatacaggaacagggcagacgttagcgtgagtgatcactctcaatcccgggatgatgagagcctgaagtacc

SEQ ID NO: 681345 - DNA, 100 bp, Homo sapiens
agacgtctgcgtgagaatagagaccaccgagcccgagcgggaagaagttccgcagcaagccgcagctggcgcgctacctgggcggctccatggacctgag

SEQ ID NO: 681346 - DNA, 83 bp, Homo sapiens
atccggaaactctggtgagggtggtgcagatcctcgttcctagctgcctgccagcgtcctcggcccggccctgaggatggacc

SEQ ID NO: 681347 - DNA, 75 bp, Homo sapiens
atgacaaaagaagagttaaatgccctcaagtcgacaggggatgggaccctagttcaacctggtttgtgatcggaa

SEQ ID NO: 681348 - DNA, 100 bp, Homo sapiens
cctgcttttggtttccctggcaggggttgaactgtggagtgtgtggatcatggaagggaagtggttgctgtgtatgttactggtgcttggaactgctatt

SEQ ID NO: 681349 - DNA, 100 bp, Homo sapiens
aggcactgtggccactgccagcactggggtggcagcctgccacatcgggggcaccaccctccatgcctttgcagaccacagcaccgggaagtccagtcag

SEQ ID NO: 681350 - DNA, 97 bp, Homo sapiens
gaggatgtggtgctgcccgagaaggtggacgtgctggtgtctgagtggatggggacctgcctgctggggatggcctttacccttgaagaaaggctgc

SEQ ID NO: 681351 - DNA, 122 bp, Homo sapiens
cccgctgaccgcggagaagctgtgcatttacaccgacaactccatcaagcctcaggagctgctgattgttctctggggccggactgagaaatgcctgaaggagacgacggaggagatccggc

SEQ ID NO: 681352 - DNA, 103 bp, Homo sapiens
ctgactgtttattttttggttcactgatgtctgctacagatccagttgtaaatcaagatggccagcctctcatagaaggaaaacttaaagagaagcaagtcag

SEQ ID NO: 681353 - DNA, 115 bp, Homo sapiens
ggcatcacatgagcatgaagataaaagtcctgaaacagttttgcagtcgaacatccatgatagcagtcttctgtaaatcgaacttttcaagaattctctgaaggaaccaagtagg

SEQ ID NO: 681354 - DNA, 100 bp, Homo sapiens
gtctccctccggagggcactcttagaacaaaagctgatccagtccatcactggcacctctgtgtctcagaatgttgttattgctatgtctggtatttcca

SEQ ID NO: 681355 - DNA, 51 bp, Homo sapiens
ggagccgaggcgcaggtggcgctggtgccggatggagtgctgtgatgtgcc

SEQ ID NO: 681356 - DNA, 73 bp, Homo sapiens
cccaagttggttggagatgtggattttgaaggtgctggagaatctggtaaaagcaccattgtgaagcagatga

SEQ ID NO: 681357 - DNA, 100 bp, Homo sapiens
ccgggctcccgccccagcagcggagggccaattcctgtccccccagcagcatggcatcgtgtgctgaaccctctgagccctctgccccactgcccgccgg

SEQ ID NO: 681358 - DNA, 100 bp, Homo sapiens
tatgaacctgactctgtggtcatgaatgccttccctgtgtctggtcaactctatacaacacacctactatctcttgatgccctattgacagtgattgaca

SEQ ID NO: 681359 - DNA, 90 bp, Homo sapiens
ctgcaggtactgggagatccatagggaagaaggcggaacatccggaggctgggaaatggtttgacatctacaggaaggtgcccaaggacc

SEQ ID NO: 681360 - DNA, 50 bp, Homo sapiens
gttttccacctaccatgctctcgcaaaagaacccccatctcagagtccca

SEQ ID NO: 681361 - DNA, 51 bp, Homo sapiens
gttttgaaattagagacgcagacagtttgagattacgggaaatgatgagac

SEQ ID NO: 681362 - DNA, 100 bp, Homo sapiens
actcaagatgccagcatcccagttgagaaacttccccgtgtcttgggacaaggtgcgcattcctggtgtgctgcagcgattgggagtgacatactttgtg

SEQ ID NO: 681363 - DNA, 82 bp, Homo sapiens
ggagttccaggtcgagcagttaggccgcgagcgactgcggcgccgagccgcacatgattaagtaccggtacatcccgttcac

SEQ ID NO: 681364 - DNA, 98 bp, Homo sapiens
ctggaacatggacaggaactgtggacagtgaagagaggcctctcccaaagcacctgcgcaggtatggttccgaccggcgtttagccgagctctctgat

SEQ ID NO: 681365 - DNA, 113 bp, Homo sapiens
gactcggagggtttctgtgagagacaaattgcttgttaaaggagctacagggagctggccgactgcacctggcacatggcggagaagctgggctgcttctggcccaatgcaga

SEQ ID NO: 681366 - DNA, 100 bp, Homo sapiens
caccaggagaagctggaggagaagcaggcggcttgcctggaacagatacgggagatggaaaagcaggttatcagtgagctgaatggaaaaaacattgaag

SEQ ID NO: 681367 - DNA, 100 bp, Homo sapiens
gccctctgcgacctggggccctgggtgaagtgctccgtcgcccttgcctccagagggtacaccacccggactacaacaatgagttgacccagtttctgcc

SEQ ID NO: 681368 - DNA, 98 bp, Homo sapiens
atatttttggacctgaaacagaaattctggaacacctatatgaccatgctcgacagctgaccaaggccatgatgcgaaaggccacggccagccgcctg

SEQ ID NO: 681369 - DNA, 100 bp, Homo sapiens
ccacccacggccagacacttccaggagcgtcattgattacaacggggaacgcacgctggatggttttaagaaattcctggagagcggtggccaggatggg

SEQ ID NO: 681370 - DNA, 82 bp, Homo sapiens
gaggagaggatccaggaggaggagttgcagaggcaaaggaagcgtccagaatctgggagcatccggaaaacttttcggagtg

SEQ ID NO: 681371 - DNA, 100 bp, Homo sapiens
tacagaaatgtgtcttgttgcatttggtaatttagcagaacttgggtggttctcttcccaaagtggaagccaaattcatcaattatgtgaagaattgctt

SEQ ID NO: 681372 - DNA, 90 bp, Homo sapiens
cgcgtgctgggaggagactggagcccggttaggaagaatggagttggcgactcgctaccaggtctcggtgattcagaatacacctacttt

SEQ ID NO: 681373 - DNA, 75 bp, Homo sapiens
tctaatgaacttattagcagagatgaggaccctgatgctcccataagacagaaaatgccccttgatgatctggat

SEQ ID NO: 681374 - DNA, 100 bp, Homo sapiens
ttgattactcagtctctaaaaagctaagtgtgaagcctcagtttaggtcatctggtggttcagaacactcaacagagggctctgtatccttgggggatgg

SEQ ID NO: 681375 - DNA, 90 bp, Homo sapiens
ggcttcaggacagtgaacatctgcaggcatccaggatccaagaagatgccactgagaacattgaaggtgatagctccagcccttctagcc

SEQ ID NO: 681376 - DNA, 50 bp, Homo sapiens
atggacccagctatgatgtttcgacagagagacaaggtctcactatgttg

SEQ ID NO: 681377 - DNA, 89 bp, Homo sapiens
ccactgatcgcgctggataaagatgcgcctctgcgatttgcagattcgacggaggcgccttgcacgacttgctggtggacagacctctc

SEQ ID NO: 681378 - DNA, 80 bp, Homo sapiens
cagacgggcggcctgcccgcagccatcgacgtggcagtttgctctggaattagtcacagaaaagggccatacatttgccg

SEQ ID NO: 681379 - DNA, 97 bp, Homo sapiens
agagagctattattccctgtattaaagaatcttcagctagatgaagaaacccaataccaaactgctgttgaagaatcttttcaagtaaacatctgaa

SEQ ID NO: 681380 - DNA, 76 bp, Homo sapiens
ccagtgatttacaatagagcaaggtcatcttttcttgagtcccttctgcaaccagagtctttaaggttggattggc

SEQ ID NO: 681381 - DNA, 98 bp, Homo sapiens
cccaggctttttatggctgtgagacacgttaaaatttcagggcctctctgctgatggtggtgccaagcgccaggagcacctatcccgattttccatgc

SEQ ID NO: 681382 - DNA, 50 bp, Homo sapiens
gtacccccttgccatggcagcaaagctgaccaactgactgaagagcagat

SEQ ID NO: 681383 - DNA, 100 bp, Homo sapiens
ggcaagccacaattatgggacctagtgagtctttgcggcaactgaaaacaaaagaacaagaagatgatctaacaagtcagaccttatttgttctcaaaga

SEQ ID NO: 681384 - DNA, 131 bp, Homo sapiens
ctgaacatgagcctcctcctctccttctacctgctggggttgcttgtcagtagcgggcaaggtctcatggactgattggctctcattcagcaggaacctaacagataagtcttcctgctgtatatcaagac

SEQ ID NO: 681385 - DNA, 74 bp, Homo sapiens
cagtggtacaaggaccagaagaaactgcaccggaaatgtgcctaccagggagagctggtgacggcctccaaggc

SEQ ID NO: 681386 - DNA, 74 bp, Homo sapiens
ttggcctaggcgaagatccggactctgggtgttttgctaccgtgaccgtttagcttcttctcagcctgttgata

SEQ ID NO: 681387 - DNA, 100 bp, Homo sapiens
tgaagcaggccggctctggcgtccacggctcctgctccagcccagcccccagagagcagaccccaggtgctggccccgggggttttggtctgagcctcag

SEQ ID NO: 681388 - DNA, 74 bp, Homo sapiens
aaggtgccgctcgaagtccaggaggcagatgaagccaaggaatcagagatcattgatttcttcctgggggcctc

SEQ ID NO: 681389 - DNA, 111 bp, Homo sapiens
gaggacatctgggggccacaaatgctccttctcctggagacgcaactcaagtactaaggctcgtacgtctgcatcgattatcttacgtggggcaaatgatttcatgtgtga

SEQ ID NO: 681390 - DNA, 89 bp, Homo sapiens
cgggggcgcgggcggcggcgccggcaggaagattgttctctggggccggactgagaaatgcctgaaggagacgacggaggagatccggc

SEQ ID NO: 681391 - DNA, 100 bp, Homo sapiens
ctgacggagccggaggctgggagccgcggcggcctgggcaatggttgttttgaacaacctggaaccaaatacaacttatgaaatcagggttgcagctgta

SEQ ID NO: 681392 - DNA, 97 bp, Homo sapiens
tccaagccttagcctgcctgtcagcactgagcatgatcacaggtggacccccaaaagtacaagggcatatttaacggattctcagttacacttaaag

SEQ ID NO: 681393 - DNA, 75 bp, Homo sapiens
agcccatggcatggctggaatttactatatgttaatgcagtttgccaaggcacgagtaacaagctcacgcagttg

SEQ ID NO: 681394 - DNA, 76 bp, Homo sapiens
tgatcaacattttgttaagattcaggtcaaagacagatcaaacagatgatggaggcagcaacacgacaaatcgagg

SEQ ID NO: 681395 - DNA, 101 bp, Homo sapiens
gaagtccacccagcgtttctgagacagggcctcactctattgcccaggctagagtgccgtggcaggatctcagctcactgcaacctccacctcctggctca

SEQ ID NO: 681396 - DNA, 75 bp, Homo sapiens
tgttcaagcagtgcctgtctccgcacttacgcggcttactgaactaaagcgccagtgtgtagagaaagaggaacg

SEQ ID NO: 681397 - DNA, 80 bp, Homo sapiens
ggcgccgcgacctccggatgacccgggcttcggcccccaccagagactcggcattgaatgccccagaggagcccgaaacc

SEQ ID NO: 681398 - DNA, 83 bp, Homo sapiens
gccgcgagcgcggcctgcaggagaggtggggctggtgtccgagcacttctcgcaggccccgcagaggctgtccttctacagct

SEQ ID NO: 681399 - DNA, 98 bp, Homo sapiens
tctgcattctcgcttcctggagaacctgtctgagaaactctctgaacaagaattacaatttcgtcgtctcagtcaagagcaagttgacaactttactc

SEQ ID NO: 681400 - DNA, 98 bp, Homo sapiens
cagacatggcgcgtcttctggagcaatgggaggatttggagttccatggagtgatgagattttattttcaagataaagctgctggaaactttgcaaca

SEQ ID NO: 681401 - DNA, 101 bp, Homo sapiens
tgttcagcaccaccccaccctaccacagcacgctgcctccgcgggcccaccccgcacccagcatggggagcctgagaagaatcttacatcctttctgcaga

SEQ ID NO: 681402 - DNA, 100 bp, Homo sapiens
aaaggtctggacactgaaaccaccgtggaagtcgcctggtgtgaactgcagaaaaagcttgtggtgaaggggggcaaaaaaaagaagcaagttctgaagt

SEQ ID NO: 681403 - DNA, 128 bp, Homo sapiens
cagcatgatcgccgcgcagctcctggcctattacttcacggagctgaaggatgaccaggtcaaaaaggtttttcgttggaatatacgttgcacatttatggcgattctgagtgtgagggcagacttct

SEQ ID NO: 681404 - DNA, 83 bp, Homo sapiens
cttagatgctcagatggtagtggataggcctgtgacgaaggtgctaccatcgtgagagtaagagacgagttgtactgctgtca

SEQ ID NO: 681405 - DNA, 50 bp, Homo sapiens
cgccgagtgggaggatggcggaacccgccgccgccatgcccttctccaac

SEQ ID NO: 681406 - DNA, 75 bp, Homo sapiens
gccgccgctgctacctgcagcgccgtgtggcacgacacaaaaatcagtgctacaaggtgagctgcctggaaatcc

SEQ ID NO: 681407 - DNA, 90 bp, Homo sapiens
acccagctggcgggaccgcgaggaaggggaaactgaggcccaaggaaattgagtatctctgcaaagtcaccagctgagttcgaaccagac

SEQ ID NO: 681408 - DNA, 50 bp, Homo sapiens
cagaactgcacaaggagctggtgagatattctggactcagcagaagaatt

SEQ ID NO: 681409 - DNA, 110 bp, Homo sapiens
cttcaaattggagcaaggagaagagccatggatatcagagggagaaatccaacgacctttctatccagaaagttcaggagccctggaaaggagaaggaataagacggcag

SEQ ID NO: 681410 - DNA, 90 bp, Homo sapiens
ccaatttgctggaaaaaatgacatccagcgacaaggactttagattcaaggcctcttccagatgtagccctgactgggaagtgcactcgt

SEQ ID NO: 681411 - DNA, 50 bp, Homo sapiens
cagagctatacagctgctattaggcagataccggggagaccacgacgctg

SEQ ID NO: 681412 - DNA, 83 bp, Homo sapiens
gtcgctcttgatactcggctcagattcatgatgttgctatcaaaagttgagaaattgtcagaagaaatcatggagataatgca

SEQ ID NO: 681413 - DNA, 74 bp, Homo sapiens
ttccggagatcccggcctcacttcgtcccactgtggttaggggcagatggctcggtgagctgcaagaggacaga

SEQ ID NO: 681414 - DNA, 75 bp, Homo sapiens
agaaaatagcacacttttactctacgcaactgttgctttttcatggctttccttaaagtttcccatgtctcaatg

SEQ ID NO: 681415 - DNA, 50 bp, Homo sapiens
gaatacaagaagtgtgccactggccccagagttccaaaagttggtttgca

SEQ ID NO: 681416 - DNA, 83 bp, Homo sapiens
cttttagaattctgctggaagtctccaagtcaaggattgacttctaaggactcttggtacatgaggaagaaacccggaagggg

SEQ ID NO: 681417 - DNA, 102 bp, Homo sapiens
ccccagttccaaagtgtcttaaaggtaagcggaagggtacagccaatgcccgaatgccagagaaggtcacatggatgaggagaatgaggattttgcgccggc

SEQ ID NO: 681418 - DNA, 98 bp, Homo sapiens
cgcactggcaagtgcagcgcctgtaatgtttggcgagtctggttattgaaagctatgggttggcaggaatatcctgaaaatgatgagaattgccttcc

SEQ ID NO: 681419 - DNA, 90 bp, Homo sapiens
gttcgggagctaagtcacttaaacactgtgtgatagttcctacacatctcattatagtttgattcttctcatcgcagtgctccaggcagc

SEQ ID NO: 681420 - DNA, 100 bp, Homo sapiens
gcacgaacattgatttgaggaggatgcttcgcagtttacgaactgttgtagcaaacagtgacgaatctcagcttctgacaccaggaaagatgagtcagcg

SEQ ID NO: 681421 - DNA, 98 bp, Homo sapiens
cttcagattccatggcaggtcaaaatcagaactggtaagatttctgcatatctggaattgaatgatctggcacgggaccctccagcacagtgttcagc

SEQ ID NO: 681422 - DNA, 100 bp, Homo sapiens
ggctgagggaaaagcgaggcaaggcaggcggtatggactttctgtcagattttgagatgatgttgcagcgaaaaaagagcatgagtggcaagcgcagacg

SEQ ID NO: 681423 - DNA, 83 bp, Homo sapiens
cgtcatcctgctgctgaagatctggaagacgcgctcctgcgccggtcatgcagaaggcttttgtatgatgtgtacaatgcaag

SEQ ID NO: 681424 - DNA, 90 bp, Homo sapiens
agcaggacatcttcatttacagagcaacttgatgaaggtacacccaatagagagggcccgcccttcatggagagcctgcccgagaacaag

SEQ ID NO: 681425 - DNA, 97 bp, Homo sapiens
tttgaattaacattggatgcacttatctcatttaacaagcggaccctagtcctgtttccaaatattgacgcaggttatgatgtgattgctcaagccc

SEQ ID NO: 681426 - DNA, 80 bp, Homo sapiens
gccctggtcttgctcggccgatgaagtgcagaggtttttttctggccggatcacctcaacagtcacgtcagacaagtgca

SEQ ID NO: 681427 - DNA, 102 bp, Homo sapiens
ccgccgtcgcccaggatgggctgggaatgaagcgatgtagccttttaagtattgttgcagcatctggcagtgagactgaggatgaggacagcatggacattc

SEQ ID NO: 681428 - DNA, 100 bp, Homo sapiens
ctgatctgccacctagagcatgggcaggagccatggaccaggaaggaagacctctcccaagacacctgtccaggatacagttgatatattagttggatgg

SEQ ID NO: 681429 - DNA, 99 bp, Homo sapiens
aagtgcaaggaatttcaacttgccaatgtgcaaagctgcagaaaccacagtggtagaggtaaaatctgtaaaaactgggtcagttttttggacaatgtg

SEQ ID NO: 681430 - DNA, 82 bp, Homo sapiens
ggcttggagaggccgagggtttgatgaaggtggaggcagcgcggctctcaggtgtcccgacccaggctaagcttgagcatgg

SEQ ID NO: 681431 - DNA, 88 bp, Homo sapiens
agcggcagcagccccagcctcaaggccagttgatattcactgatggactccaaagaatcattaactcctggtagagaagaaaacccca

SEQ ID NO: 681432 - DNA, 96 bp, Homo sapiens
ctaacatctgggtgaatatggcagccaaaggattacctgatatggattcttcgatccttatacaccacaatggaggtatcccagccaacaaaaaac

SEQ ID NO: 681433 - DNA, 50 bp, Homo sapiens
actggcttcgggaattttaccaggtgctggagaatctggtaaaagcacca

SEQ ID NO: 681434 - DNA, 100 bp, Homo sapiens
agtgcggtaacaccgttcacagagctagccggacgtcctccgactcaaggcatagagaaggagacgtgccagaagatggaagaagacgggtccactgtgc

SEQ ID NO: 681435 - DNA, 100 bp, Homo sapiens
ggaggattgactgctgctggggctgggctcgccagtcttggggacagtgtcagctgatcctgccatgaagcagtttctgctgtacttggatgagtccaat

SEQ ID NO: 681436 - DNA, 74 bp, Homo sapiens
ggctcacgttgaccaactctttgatgatgcatccagctttcaccaacaatcaccagtggtttacacaacattgc

SEQ ID NO: 681437 - DNA, 101 bp, Homo sapiens
gccacagtgtcccaccatcaaagagatcagagaccagggctcctgtggctcctgctggtggcaacatgaagatctacttatcaatagaccacaagccatgt

SEQ ID NO: 681438 - DNA, 83 bp, Homo sapiens
cctgccttcgctcccgcaccgaataccctctaccatctgctttggtcagggtgccgctcgaggatttaaaagcaacaagaaga

SEQ ID NO: 681439 - DNA, 75 bp, Homo sapiens
agctaaaacattttgagaaatttcaggatacagcagaagcattagcaggtctagatgttgatggaatatatcgag

SEQ ID NO: 681440 - DNA, 50 bp, Homo sapiens
gagctttctataaatagcaatccagtgtcttctcagaaaaaaccagcctt

SEQ ID NO: 681441 - DNA, 75 bp, Homo sapiens
ttttagatggaggagaagaaaaccttgaaaaaaatctccctgagtttgccctctggcaggctgccctgagcacgc

SEQ ID NO: 681442 - DNA, 74 bp, Homo sapiens
tgtggttgcatctgtgtgttaggagcatgcagaccaattccagaacacatattacataatggagccgggagaca

SEQ ID NO: 681443 - DNA, 100 bp, Homo sapiens
atgcatttctagtggctacaaatgcccctcaggaaccataaatccatggctaaccttgacaaatacactgaaacattcaagatgggtagcaacagtacca

SEQ ID NO: 681444 - DNA, 100 bp, Homo sapiens
gaacttggcagcaagatacctgtgcatcccaacgatcatgttaataaaagccaggttcctgggctatataagtccagttctgcagactctctttctacaa

SEQ ID NO: 681445 - DNA, 75 bp, Homo sapiens
cgaacatcttctggacctttgtccagagattgccatctgccccaacaaccatgaggtgcatatctatgaaaagag

SEQ ID NO: 681446 - DNA, 50 bp, Homo sapiens
ggtggcctgcgtgtcggcggagtcgattttctaccctagcaaggatggta

SEQ ID NO: 681447 - DNA, 75 bp, Homo sapiens
cgatctggagcttttcccctccccggactcaaatccagtacctcaagcaagtccagcagccgagcgttgcccaac

SEQ ID NO: 681448 - DNA, 99 bp, Homo sapiens
tctggcactgtggttcctgcatgaagacagtggctggcggtgcctggacgtacaaggacaataattttgactatttggagtttcgcctttggattggcc

SEQ ID NO: 681449 - DNA, 59 bp, Homo sapiens
tagaacaacgcttttcagaaaggtggcaatggctacatcaatgactttcccatgggccg

SEQ ID NO: 681450 - DNA, 83 bp, Homo sapiens
attctggtggggagatgaacccaacctagtgggtgtaatacatcatgaactgcaggttgctgatcatctgggctgtgatccac

SEQ ID NO: 681451 - DNA, 118 bp, Homo sapiens
ctgggtctggcttcttgtactggagaaatggttggcccgggaaaagctggaggtgcagtgtcctcctggtgtcaccattggctttgttgcggaacattggaacctgtgcagggcggtg

SEQ ID NO: 681452 - DNA, 82 bp, Homo sapiens
gaagaaagatgttttgcctactgttgatccggcccggattgcatttctacaaggcgaaagaaaaggtcaagagaacctgaag

SEQ ID NO: 681453 - DNA, 95 bp, Homo sapiens
gtggggaggcttcccatggtttggaggatagcaacatcaggtcacagcaacagcccagcaggcagtgtggcccactctaccacctccgacatcag

SEQ ID NO: 681454 - DNA, 74 bp, Homo sapiens
gggaaggaagatccggcgcggggcacaggatccggagctggagcccccagacaaatttacatgtattggagacc

SEQ ID NO: 681455 - DNA, 100 bp, Homo sapiens
cgtgcccgaactggccagactcctggagatcgacccgtacttgaagccctacgccgtggacttccagcgcaggacagagcgggatgccaccagcttgtcc

SEQ ID NO: 681456 - DNA, 60 bp, Homo sapiens
aagaaactgtgaagcaaattcgtcagatcaaagaacaagttgaaaacgaggcccactgcg

SEQ ID NO: 681457 - DNA, 101 bp, Homo sapiens
agggtgccctggtcacaggggccatggccttcgtcgggggtttggtgggcggcccaccgggactcgccgttgcactgctcagcacgcaggcatgtgaggaa

SEQ ID NO: 681458 - DNA, 100 bp, Homo sapiens
attcgcaccaatgttgttaaaggtgtgatccctcacatccacaaatctctgattggaaagaagggacagcagaaaactgcttagagggatgctttaacca

SEQ ID NO: 681459 - DNA, 75 bp, Homo sapiens
gcagaggacccggcgggcggcctcgcgggtcaggttcttgggtgtctctggggagtccctgggccagaccttcct

SEQ ID NO: 681460 - DNA, 83 bp, Homo sapiens
tcgtcatgttcttcgcgccctgattcccaacttcttctggagcctggggatcggtcacactggtgcgtggtggcatactggga

SEQ ID NO: 681461 - DNA, 75 bp, Homo sapiens
tgcttgggtaaggacatgaagacagttcctgtcataccttttaaaggagccaccttcctcgtcacgtttggaaac

SEQ ID NO: 681462 - DNA, 100 bp, Homo sapiens
tgcacccctcgctgggcttgctttggcaacagagtgcctgacccaggtcagggtccccagggagagcctggccccccaggacagcagggtaatccaggcg

SEQ ID NO: 681463 - DNA, 75 bp, Homo sapiens
ttgctaacccagaacactatattaaacatcccctacagaacagagttgatctctctaatgtattagatcttcatg

SEQ ID NO: 681464 - DNA, 75 bp, Homo sapiens
gcaagtccaagaggaggaggaggcggaggtccaagcggaaagttccatacgttttgaagagctgtgcagaattta

SEQ ID NO: 681465 - DNA, 100 bp, Homo sapiens
ctgagaacaacgtgggccttatcacactggctaaaacaccttccaccatgaccacctcagcaagttcccacttaaataaaggcatcaagcaggtgtacat

SEQ ID NO: 681466 - DNA, 83 bp, Homo sapiens
ccacagtccttctgcagtccctcgtccagccacccccagctctattaccaggttttaaacttcgccatgatcgtgtcttctgc

SEQ ID NO: 681467 - DNA, 75 bp, Homo sapiens
cgcaatgatgagaggatgtggtggtctactctgatgtcaatcttgagggctagaaatacatgctacaggatttaa

SEQ ID NO: 681468 - DNA, 75 bp, Homo sapiens
gaaaaacattgtttgaggattcctttcaacagtgctccatgtgcatccctcttgaagcttcgcactctgttgaag

SEQ ID NO: 681469 - DNA, 75 bp, Homo sapiens
agtacttggcagatcactctcttagcagttgctctaggtcgtaaccagcctttgaaaaaggagaaaccaaaatgg

SEQ ID NO: 681470 - DNA, 83 bp, Homo sapiens
tttctgcacaggaatatcgagagcgtcatgaacccgagctatagagaaaggagatgagctcaccatggatgatgatatcgccg

SEQ ID NO: 681471 - DNA, 100 bp, Homo sapiens
ccttgctcctcgccgcggcggggactgcaggctgggacgcagagaccggcagcgattcggaggacgggctgcggcctgacgtgctggtgtctctcgcggc

SEQ ID NO: 681472 - DNA, 50 bp, Homo sapiens
ccctggtggggattgacagccacgggaagattcctggtcgggtggcttcc

SEQ ID NO: 681473 - DNA, 73 bp, Homo sapiens
accccagtttgctttttgtcaatgcgggcatgaaccaggctaaatagagtcccagcacctcctgatgtctgag

SEQ ID NO: 681474 - DNA, 141 bp, Homo sapiens
ccctaagaaggcgctgaagggcaaggaaagcagcatagagaatgagatagccgtcctgagaaactcatgtgctcctcggtgcagaaggccttgtttgaggaggaggaccacgtcaagaaactgcagcagaaagtggccacc

SEQ ID NO: 681475 - DNA, 83 bp, Homo sapiens
caatgatcttttcaatgctgcgaaagctgccaaaagtgacatgcagacactgccctaaccatcatggaggtggccgaggtgga

SEQ ID NO: 681476 - DNA, 88 bp, Homo sapiens
cgggagagcgcgcctagccggctcgcgagctggacgtaaagaaagaagtgatgcactcaattctgcaatagataaaatgaccaagaag

SEQ ID NO: 681477 - DNA, 50 bp, Homo sapiens
ctggcccggaaacaggaggacttcttcctgctgctgctgctggtgttcct

SEQ ID NO: 681478 - DNA, 100 bp, Homo sapiens
ccaggggaagttacacgaggttggtcatgaaagagattccttgcagagacagctcaacacggcacttccacagaaaaaatgcctgtcttaaaggctgaag

SEQ ID NO: 681479 - DNA, 100 bp, Homo sapiens
gaggaggacagttcgctacacagcaatgcatcgagagcttgtggacaaatgtataggatcaagaattcacatcgtgatgaagagtgataaggaaattgtt

SEQ ID NO: 681480 - DNA, 98 bp, Homo sapiens
ctgagcccgtccgtccgccgccaccacccactccggacacagggccaattcctgtccccccagcagcatggcatcgtgtgctgaaccctctgagccct

SEQ ID NO: 681481 - DNA, 51 bp, Homo sapiens
gtttgactggaggaacctctggagcagcttgcctcacatccaaggggagag

SEQ ID NO: 681482 - DNA, 75 bp, Homo sapiens
gacagccttcatttctctgaacatactgccttatgggacagatcaataacaaatgtggcaattattttggatcta

SEQ ID NO: 681483 - DNA, 100 bp, Homo sapiens
acactttggatctttgcagtcactgcaggcatgttcctctatgtagccttggtggatatggcctccccatggccacccatggaccagtcggcattcactt

SEQ ID NO: 681484 - DNA, 98 bp, Homo sapiens
acccagccccgccgtcgccccgccgcgccgcgctccaaccgcctcctcctcctcagtaacgcgggaccttttttctatcagtgcttatgtttatgctc

SEQ ID NO: 681485 - DNA, 75 bp, Homo sapiens
ggatgagcagcagctagccaggcaaagcacatgcagatgacaatccaggctctccaggatgaattgcggatccag

SEQ ID NO: 681486 - DNA, 90 bp, Homo sapiens
gggagatccacagctaagacaccgggacctcctggaagccaaaaatggattcctagatgaggttatgaagaagtatggcagtttggttcc

SEQ ID NO: 681487 - DNA, 82 bp, Homo sapiens
cccttgcaaatttacatacgagaatggcttgtgaaatcatgcctctgcaaaggtatgaaattgaaggctgtgaagtgatttg

SEQ ID NO: 681488 - DNA, 83 bp, Homo sapiens
ggagcgtgacgcggcggcccgggggcctccgggcgccttccggggcacgcggttggttgaatctggcgatgtggaacccatgg

SEQ ID NO: 681489 - DNA, 100 bp, Homo sapiens
cgcggtgtgaagaagaaagcaacaaaacgaccactgaaaacaatgccgacaccattcgcttttcacccaagatgatttgatgtcttataaaactctgatg

SEQ ID NO: 681490 - DNA, 100 bp, Homo sapiens
tgccgaggcaggcgcccaccgccggcggtgatgcggctgtgaagccctagtcggatcaccccttctgtgtcattctctgaggaaaacaagttcttctcaa

SEQ ID NO: 681491 - DNA, 98 bp, Homo sapiens
tctgtctgaactggatcataaatgacagatgatgttgaatttgaagtatcatcggaccgacggactgggaaacccattgctgttaaactggtgaagat

SEQ ID NO: 681492 - DNA, 74 bp, Homo sapiens
aacgatgcgtctcctggatgggggttactggggaggaccagcgtttctgcgcaagttgtttcatctaggtatga

SEQ ID NO: 681493 - DNA, 98 bp, Homo sapiens
caacaatgagctggagaacccaccctacgtgcctgccccagaagaggacacaccagccccagagttagccccagaggcccctgagcctcctgaagagc

SEQ ID NO: 681494 - DNA, 85 bp, Homo sapiens
ttcacagcactctgggcgaaaattggatgtgaaaatgaagccagaccgagagttgatcaagaacttaatggaaaacaagatgaac

SEQ ID NO: 681495 - DNA, 74 bp, Homo sapiens
tcaaagccaagacataaactcaaccccttctcttccaaaaggcgaaagggcgtgtggttgcgcctgaggaagat

SEQ ID NO: 681496 - DNA, 82 bp, Homo sapiens
cctcgataaacagggccgtgccgcagatgcccaccggaatggagaaggaagaggagtcggccaccagcttgggctccccacg

SEQ ID NO: 681497 - DNA, 96 bp, Homo sapiens
gccttgttgccatgggatacctgttcatgtgttttggaggcaccgtctctccctgggaccagaatggagatttacagacagtcatctgggtggagg

SEQ ID NO: 681498 - DNA, 73 bp, Homo sapiens
agcgatggaagaggatcaggagctggagaggtatctagcagagtggaaaaggattataatgatctttttgatg

SEQ ID NO: 681499 - DNA, 100 bp, Homo sapiens
gccagacaactgtcctgacatgctcatcaattcctgaagattgccaagcccctctccagcctcactccactgattgctgcagctaaggaggcaacaaaga

SEQ ID NO: 681500 - DNA, 90 bp, Homo sapiens
gtggggggattctcgacctgctaacagaactggaccttttcgtctcagagaaagatgtcacatctgctaaagcactgtatgaacatttga

SEQ ID NO: 681501 - DNA, 100 bp, Homo sapiens
aggtcttcagcaccccaatattgttggctatcacaccgcgtggatagaacatgttcatgtgattcagccacgaggtgaggcatctatactagctaccttc

SEQ ID NO: 681502 - DNA, 100 bp, Homo sapiens
agctgccggtctatgacatcaccaagaagcatcttattctctcaggcctgatgggagacactgtgtatacccacttcctttttctggatatgccgcagaa

SEQ ID NO: 681503 - DNA, 98 bp, Homo sapiens
ttggcgatccatagctaagacgccaggtcccccggaaacctagaaatgtctgaagttgcagccggagtgaagaagagcggaccgctgcccagtgctga

SEQ ID NO: 681504 - DNA, 100 bp, Homo sapiens
ctcaacgccaggcgccgctcctttacagcctcctgacagtgggcctccaccattgccaacatcctccctcccagaaggttattatgaggaagctgtgccg

SEQ ID NO: 681505 - DNA, 100 bp, Homo sapiens
ctccgcggtccggcccggggccccgggatctcggctgtccttcctcccgggttctccaaaaaatgtggaatcctttgcatctatgctgagacattctcct

SEQ ID NO: 681506 - DNA, 73 bp, Homo sapiens
gcacggcgtgcaagcacgggaggttcggctgatgcggaacaaatcttcaggccgtcgctttcgggttctctca

SEQ ID NO: 681507 - DNA, 75 bp, Homo sapiens
ctgtgggtcttgtgctgcccatgcttataaacaagtggatccgtctattacccagtgccaatatctgcaatgtgg

SEQ ID NO: 681508 - DNA, 73 bp, Homo sapiens
tacccggagctgtctcgagctgagccccctaccgggccggatcccgagctgcggttggatttctcacgatgtc

SEQ ID NO: 681509 - DNA, 90 bp, Homo sapiens
gagtaaggagaaaaagagtttccccagtgcctctggccctgaaggaccctgttcatacagtgtcactgcagcagttcatctacgagaagc

SEQ ID NO: 681510 - DNA, 87 bp, Homo sapiens
aggccgccctgcaccttcagcggatttggggattaggctcttttagcctcctgacaaggtgatccgggcgggccccgcaggaatttt

SEQ ID NO: 681511 - DNA, 82 bp, Homo sapiens
acaatcttcaatgagtaaacatattcctgctcccctggctccagccctaaggtgctctcccagccgtccgacctggatctcc

SEQ ID NO: 681512 - DNA, 82 bp, Homo sapiens
cgccccgggccccccagcatgaagaccccggcggacacaggattatatctgtccaagatgcgagtctggttttatcgaggag

SEQ ID NO: 681513 - DNA, 100 bp, Homo sapiens
gaaaccaagaaaatatctttttctgagctggagtcagatggcagcactatggaggactattcacaggaggactggggaaaccacagtcaggatctccatg

SEQ ID NO: 681514 - DNA, 83 bp, Homo sapiens
ctctgctatgacccagattttgcaatgtcccctgatggggaggccatcgtcactggtgctggagacgagaccctgaggttctg

SEQ ID NO: 681515 - DNA, 50 bp, Homo sapiens
cccagctcagccatgcaggccccaacagaacaagttgaaatcatcgcaga

SEQ ID NO: 681516 - DNA, 100 bp, Homo sapiens
gcttgcggacttggtggaaagctcgttctgccgatgatcaaggaacacattatgcaaatgcttcaaaatcgacactgcccatctctaagataagaacctg

SEQ ID NO: 681517 - DNA, 90 bp, Homo sapiens
ggattgggaaagaccatggcagagacatcatttcagctttccatccatttttatttatggacatactgctagtggaaagacctatgtaac

SEQ ID NO: 681518 - DNA, 75 bp, Homo sapiens
actgtgtatactctacaatctaagaaggatttcagcaaatttggagcaggtttgttggaccagattccagacatg

SEQ ID NO: 681519 - DNA, 74 bp, Homo sapiens
tcctggttctggaatcctcagttcaaggactatcggacaaaacctttctgctgcagcgcttgtccattttcctc

SEQ ID NO: 681520 - DNA, 75 bp, Homo sapiens
actgtcaccagaagtttattgtccatagagacttaaaggttggatggcaagcatgtggtgtttggcaaagtgaaa

SEQ ID NO: 681521 - DNA, 74 bp, Homo sapiens
tagggagcgtctccggctgcacagcgctcagggatggtatgaagaagcattagaacagtttgaagaaatcaagg

SEQ ID NO: 681522 - DNA, 100 bp, Homo sapiens
cgtcaacagcaatggcggaaggagaagatgtgccgccgctgccaacgtcgagcggcgacggctgtataaggatgcatttatgaaagcaaatcctggctac

SEQ ID NO: 681523 - DNA, 100 bp, Homo sapiens
agcgcccggattggggatgagtatgcggaggacagctctgatgaggaggagctggtgagcaggctgctgcacctgcacttcaaggatgacaagaccaaag

SEQ ID NO: 681524 - DNA, 100 bp, Homo sapiens
aaagagcccctcatcgagctcttcgtcaagaatgttccagtggaaaacttctttgtgaaatgcaatggagcactcattaacaccagtgacacagtgcagc

SEQ ID NO: 681525 - DNA, 82 bp, Homo sapiens
ggaagagaagatcatcgagcatttcaaacgaacatccagtcatggataaaaatgagctggttcagaaggccaaactggccga

SEQ ID NO: 681526 - DNA, 75 bp, Homo sapiens
atttacctgtgagatgtttcatcccaacaggatgcttgaagatggaaagaaatttgattcctcccgggacagaaa

SEQ ID NO: 681527 - DNA, 82 bp, Homo sapiens
gggggcgccatggcgaccggagcgaacgccacgccgttgggaagcaatgaggctccccaagaacacacctgaggaaaaggac

SEQ ID NO: 681528 - DNA, 98 bp, Homo sapiens
gtgaaggacggaagaggccctgcggaggcggcggtgcagcgctccgttccaaagcccaagaggagaaatggggtgaacttctccctagctgtggtggt

SEQ ID NO: 681529 - DNA, 98 bp, Homo sapiens
ctgtcggaagcaactgccgccgccgcctctttcatctcttctggggcaggggccagggccaggactccatccccgtgtctacctccctccttggagac

SEQ ID NO: 681530 - DNA, 143 bp, Homo sapiens
ctcaccctctgccgagtctcaatatctgtcttcggtggactccttcggcagtccacccaccgccgccgcctcccaggcctggtactgtggcgctccgtgaaattagacgttatcagaagtccactgaacttctgattcgcaaa

SEQ ID NO: 681531 - DNA, 84 bp, Homo sapiens
cgtggactacagtgacgccctcacggagaagcagtggctaaggattttgaagccagcttcataaggctattggacaaaataacg

SEQ ID NO: 681532 - DNA, 100 bp, Homo sapiens
cctgtgtcgatacaataatcgacttgcagaacatgacagtcattttgtttactcattcagccctgttgcaggtcccaataaactcttcataaggttgaca

SEQ ID NO: 681533 - DNA, 101 bp, Homo sapiens
cctttttaatattggccaatcatcaagacaagccagcagctcgctcagtacaagagacgttgagaaagaagggccttaatggctgtgacagcccagacccc

SEQ ID NO: 681534 - DNA, 83 bp, Homo sapiens
tggggactcgctctcggcttgaccgcattcttcctcccaggtttttagaacttcagccataaaaatgggcagaattttccttg

SEQ ID NO: 681535 - DNA, 75 bp, Homo sapiens
agcgcccacggagctggacccccagagccgcgcggcgccgcagcagatgttctcaaatagtgatgaagctgtaat

SEQ ID NO: 681536 - DNA, 83 bp, Homo sapiens
gccagggtccctgaagagggaagacacgcggaaacagaattatatccagatcgagagacagaagattctgaaagggttcaatg

SEQ ID NO: 681537 - DNA, 76 bp, Homo sapiens
aaatacgactctctggctgcttagattatgaggtgtccagagagtggacgaaggtgggtggaacactgtacaaggg

SEQ ID NO: 681538 - DNA, 100 bp, Homo sapiens
gttggccgaaggcttcccccttcctctgctgaagcgtgttcagctctacgaccttgggctgcagatccataaggatcagcagcaggctcgtcagtctcag

SEQ ID NO: 681539 - DNA, 83 bp, Homo sapiens
gttacatcctgataaaaacccggttctgccggagacttccatttggcctcaatgtgaaattaaagtagaaaatcacatctaca

SEQ ID NO: 681540 - DNA, 50 bp, Homo sapiens
atcctgccttcaagtacctggcccggtcttgctctctcacccaggctgga

SEQ ID NO: 681541 - DNA, 100 bp, Homo sapiens
atggcggatctggaggagcagttgtctgatgaagagaagagacagggcagggcattgttcatgcactgaccgacctcagcagccccggcatgacctcagg

SEQ ID NO: 681542 - DNA, 100 bp, Homo sapiens
ggtgaagggccccgtaaattggaaggatgcacaagttccaaggttacgtttcagtatccagctcacatagaagacattgactacgaggaaggaaaagtac

SEQ ID NO: 681543 - DNA, 83 bp, Homo sapiens
ccactgcttccactcccccaccgactggactgtgtcccaccggcgccacttcccagactcctacagtgaagtgctgcccatag

SEQ ID NO: 681544 - DNA, 90 bp, Homo sapiens
ttgtcggggatgaagcatttcgagaactttctaagatggatccagagggaagcaaattgttggatgatgagatctattgggaaactgatt

SEQ ID NO: 681545 - DNA, 51 bp, Homo sapiens
gctgtgaaccagcagaatttttgaacaggatcagtgaggaggaggacctgc

SEQ ID NO: 681546 - DNA, 95 bp, Homo sapiens
gactgtgtggagaaggaatatcccaaccgggagtctcaggagcaggggctgcggcagaggctgctggacgagcagttcgcagtgttgcggggcgc

SEQ ID NO: 681547 - DNA, 100 bp, Homo sapiens
ggcatgacatcttgaagcaggaagggggcttccaggtcatagtagctgctgctggtggtgacaatgtcaaataacggcctagacattcaagacaaacccc

SEQ ID NO: 681548 - DNA, 100 bp, Homo sapiens
ttcctccttcccaagtacttcaaggaggccctgcagctacgccctacccaccccttgtctgtgtcccctgcccgctgggctgaggaatatttggagcaat

SEQ ID NO: 681549 - DNA, 75 bp, Homo sapiens
ccacatcctcacgaagcaggtccagaagcccttcctcagaccgttctgaagtttataggttaaacttagaacaag

SEQ ID NO: 681550 - DNA, 90 bp, Homo sapiens
cccagagctcccgggtcgtctttcgtgtggccgcgagaatgcgataagttgcggcatgatggctaccgcagttctcagtactactctcag

SEQ ID NO: 681551 - DNA, 100 bp, Homo sapiens
ggaaatagcttgtgctgctgctgctgctgctgctgcatgtctaccaggagaggagggaactgcggagcggatgccttcaattaagttgcagagttctgat

SEQ ID NO: 681552 - DNA, 98 bp, Homo sapiens
ctccagcaacctgggtgcgttcagcggcattcaacaaatggcaggctgctggtggtctacccttggacccagaggttctttgagtcctttggggatct

SEQ ID NO: 681553 - DNA, 100 bp, Homo sapiens
ttcaagccagtctccaaaaaagccgttcaatagtattattgagcacctgtcagtggtattcccatgttacaacaggtgcttccatacaaaggggacagaa

SEQ ID NO: 681554 - DNA, 100 bp, Homo sapiens
aaccaccagcctcacatcaacttccagtgagagtgacacaggtcaggaagcagaatattccttatatgggtgtcaaattgagaaccaggtagatccccac

SEQ ID NO: 681555 - DNA, 100 bp, Homo sapiens
gacttcttacgttggaagtgttcgtccgcttgtcactgaattgtcaagctacaacttcaagcagaagagagaggagttgtgtctatcaaaggagtgtgtg

SEQ ID NO: 681556 - DNA, 73 bp, Homo sapiens
cggcaaccgagggacccgcgtccagaatagcctaacatggcagaccagagacagcgctcactgtctacctctg

SEQ ID NO: 681557 - DNA, 97 bp, Homo sapiens
acaacttggaccagttcagcctattccttgttgggcaaaaaggccccgagtcacttcaggtggtgtgtcagagtctcccagtggattttctaagcac

SEQ ID NO: 681558 - DNA, 90 bp, Homo sapiens
ggaggaaaacaacttcgagggcagaaattaaatatgggtgatgttgagaaaggcaagaagatttttattatgaagtgttcccagtgccac

SEQ ID NO: 681559 - DNA, 100 bp, Homo sapiens
caccatccatgacagcgagttcaaggagttcaccacacgcacgcaggcccccgtcgtatgtctcgtggggtgaatccctccttggtgagctggctgacca

SEQ ID NO: 681560 - DNA, 100 bp, Homo sapiens
gggggccgtcatgggcaccttctcatctctgcaaaccaaacaaaggcgaccctcgaaaggcaggaggaaaggcaggagccagtccgtgcaggcacactca

SEQ ID NO: 681561 - DNA, 75 bp, Homo sapiens
gagcgaggcgccctagacatcttctccctcccttgcctcaggaccgcagctgaatgcacagctagaaggttggct

SEQ ID NO: 681562 - DNA, 100 bp, Homo sapiens
gctgcctctacggctgaggaagcagccaagaaaaaaagacgaaagaagaagaagagcaaagggccttctgcaggttatgaagacagtatggagtttccag

SEQ ID NO: 681563 - DNA, 100 bp, Homo sapiens
cacctttattttaaaagctgatgttccaaggctgaccggttccctgatgtgttacctgcttctgctactgatccaaactgcagaacttctcattcatccc

SEQ ID NO: 681564 - DNA, 75 bp, Homo sapiens
acgtcacgcacacgctcggcgctgcgatccgcgcatataacgctccgccgcatgcaagagatgattgcaaggatg

SEQ ID NO: 681565 - DNA, 82 bp, Homo sapiens
aatgtgttcagaaattaaaggtccacagaaggaggcagaagtcaattcatctggaaagactatctctgagtcagacttaaac

SEQ ID NO: 681566 - DNA, 100 bp, Homo sapiens
caagctagacttttcttccactgttcacagtataatggcaacctgcaagacttaaaagtaggagaggctggctatgtggctacccccatagctatggttc

SEQ ID NO: 681567 - DNA, 99 bp, Homo sapiens
gtttttcctgttctttggaatgattctcttttttgacaaagcactactggctattggaaatacactcacccacggcactgcagtttgcactcgcactta

SEQ ID NO: 681568 - DNA, 75 bp, Homo sapiens
aactacgcacggccgcccacggttatcctggaggattatatctgtccaagatgcgagtctggttttatcgaggag

SEQ ID NO: 681569 - DNA, 83 bp, Homo sapiens
ggaccagttgatgggcacctcccgggacggatcttgttcaagatggggtggcttcaccagctacccctgggaccgggaaatct

SEQ ID NO: 681570 - DNA, 100 bp, Homo sapiens
cgcggggatgggggcctcgggcgccccgcagccccccaacatcctgctcctgctcatggacgacgtcagactatgatgactggagaccgtctctggccag

SEQ ID NO: 681571 - DNA, 100 bp, Homo sapiens
tgggaagaagatttgtaaagaaaactcttaggcaaagcgaaggctggagctaggagaaagcggtcatcagtacctctcagatggtttaaaaacccccaag

SEQ ID NO: 681572 - DNA, 50 bp, Homo sapiens
tagcctatcagctggggctggatgagtgaaagtacacaggaagatgctat

SEQ ID NO: 681573 - DNA, 90 bp, Homo sapiens
cgttggagggcttcgcgtctgcttcggagaccgtaaggagtaacagattccctggataccctttcagaaatttcttcaaataaacagaac

SEQ ID NO: 681574 - DNA, 74 bp, Homo sapiens
gtggccacacgttggtacagggctccagaaattatgttgaattccaaggactgcttcaccagtttttctactgg

SEQ ID NO: 681575 - DNA, 74 bp, Homo sapiens
tccaggcttgcaagcgattaccagtgcctacaccaactaatgttacaattgaatcctataacatgaaccctatc

SEQ ID NO: 681576 - DNA, 75 bp, Homo sapiens
cgagggttcccgggattggaccgacgcagccatgacacagctagcacagaagacgactttaatcagtgattcgaa

SEQ ID NO: 681577 - DNA, 75 bp, Homo sapiens
accgaaatgagactccctcagatccagtgataattgacagtaaacctatgatggacttgttgatattcctttgtg

SEQ ID NO: 681578 - DNA, 51 bp, Homo sapiens
cgtaaccagaccaagctgtgggtcaagtcctaattcgaagcagagtcctca

SEQ ID NO: 681579 - DNA, 98 bp, Homo sapiens
acctgcctgacagaagctttggtggatcacctcaatgtggggacatggaggagtgaatcagcttgggggggtttttgtgaatggacggccactcccgg

SEQ ID NO: 681580 - DNA, 51 bp, Homo sapiens
gcacgacatgctggcctcgctgggttctgccctgatgtttcctggaataat

SEQ ID NO: 681581 - DNA, 50 bp, Homo sapiens
cacgaacttcgacctactgaaaagactcaacgatgactctgaataatgtc

SEQ ID NO: 681582 - DNA, 100 bp, Homo sapiens
acaacactgacagccagtgcaggaaaatgttctgctgctgccctggatgttcttgcaaatgtgtatcgtgatgaactgctgccacatattttgccccttt

SEQ ID NO: 681583 - DNA, 98 bp, Homo sapiens
ggcccgaagcaagatggcggtgaatcagagccacaccgagaaccgccgcggagccctcatccctaacggtgaaagggctggagcggctctgggctccg

SEQ ID NO: 681584 - DNA, 83 bp, Homo sapiens
cccgcgggtctgctctgtgtgccatggacgggcctctccatattgctgtggtgcagggtaacctgccagctgtgcaccggctg

SEQ ID NO: 681585 - DNA, 90 bp, Homo sapiens
ctgcgatcctgaatgggggcggcgtgcccgccggggggctagtggccacgctgcagagcctcgaccggagaagagcagaaccaacttaca

SEQ ID NO: 681586 - DNA, 82 bp, Homo sapiens
gcccgcctcagcatctggtacagccgagtatcacacctgtgtatcataatatgtttgctttaatgagtgaaacagaaaggat

SEQ ID NO: 681587 - DNA, 100 bp, Homo sapiens
gcactttattatgcaggtggtctgtgaagccacacagtgtccagatacgaggtgcgagtctggatccgagggcgatgggacagtgcaccgcaggaagaag

SEQ ID NO: 681588 - DNA, 100 bp, Homo sapiens
ccacaaatgctccttctcctggagacgcaactcaaggaagatctgctaccaggaagtgtcccagtgtttcggggtcctctccagccgcattgaagtccaa

SEQ ID NO: 681589 - DNA, 97 bp, Homo sapiens
gtctcggtgtggatgcacgcatgctgggcaatggtgaagaccaccgcagggcggccgaggagatgaccaggatagtgaaaagtcaaaaccagcaggc

SEQ ID NO: 681590 - DNA, 90 bp, Homo sapiens
cgattccagagagcggcggaaaggataagcctcgacttagaagctaccgagttaccctaagaaagctgccaatttgtggtgtctgaagac

SEQ ID NO: 681591 - DNA, 75 bp, Homo sapiens
gtcggcgacagcggccggggcgcaggcgcccgtgcggaatggcaggcttgtgagaaggttggcatgcagatccct

SEQ ID NO: 681592 - DNA, 100 bp, Homo sapiens
ctcggctgccgccaaggtgttcggtccttccgaggaagctaaggccgcgttggggtgagaccctcacttcatccggtcagattgaagttatcatggatcg

SEQ ID NO: 681593 - DNA, 100 bp, Homo sapiens
agaggagcaggatttgcacccctcgctgggcttgctttggcaacagagtgcctgacccaggtcagagtcacaatggcttcagcctttcgcctttctttga

SEQ ID NO: 681594 - DNA, 100 bp, Homo sapiens
gcagcaacatggagaggcaaacaaagaaaacatccggcaagacttctgaaaagacaatttagcaggtttactgggaaactggtgctcagatcacatctcc

SEQ ID NO: 681595 - DNA, 100 bp, Homo sapiens
caaaaacgtcaacaacagttttacggcccagctgtgagatacagtaagttcaagatgtcagaggccaggccgcccccgctgctcgggcagcacacaacgc

SEQ ID NO: 681596 - DNA, 100 bp, Homo sapiens
gcaaaggagactgcaccatccgtctggagctctcaaacactgctgtcctgcaccagatgcggcgggaccaggtgacagacacgtgccgagccaacagcgc

SEQ ID NO: 681597 - DNA, 75 bp, Homo sapiens
ccaacatcttccgcagcgagtggggcagcctgctggaggagctggtggcggaagtttagcattaatggattcagg

SEQ ID NO: 681598 - DNA, 80 bp, Homo sapiens
accggacccaggccctggatgggactgtctatgatgtcatgtttgtcagcacagggagtgcatccgccccaacccttttc

SEQ ID NO: 681599 - DNA, 90 bp, Homo sapiens
gcacaggaatatccatgtcggcttgtagagagattgcagtaaagtcagtgataaatcttttgtttgctgcatatactggagatgtgtctg

SEQ ID NO: 681600 - DNA, 95 bp, Homo sapiens
atttgtatagagatgtgatgttggagaactacagaaacctggtctccctaggttcccaaagtaacgtacactgaattctgtcaaggtcggacaat

SEQ ID NO: 681601 - DNA, 75 bp, Homo sapiens
tggttaagaagtactgccccaaacgttcatccaaagatgaagagccacggtggtgaagcagtattttccaatttg

SEQ ID NO: 681602 - DNA, 101 bp, Homo sapiens
aacttcggcaagatccagatcgggatttacgtggagatcaagcgcagcgatgctcaccatggatgatgatatcgccgcgctcgtcgtcgacaacggctccg

SEQ ID NO: 681603 - DNA, 76 bp, Homo sapiens
gccatcggatctaagatccaaaagactctaaaatagagctcaagcttgagaagagagaaccactaaagggcagagc

SEQ ID NO: 681604 - DNA, 51 bp, Homo sapiens
tggggacagtttggtattaaaaaatccaaaggactgcatgacacaccatag

SEQ ID NO: 681605 - DNA, 110 bp, Homo sapiens
gttggaatgctcttttaccgatgctttaacatacagccactagttcccatttggccggcgcttgccttgtgacatctactggcatggagtttcatttcacgacaatgaca

SEQ ID NO: 681606 - DNA, 90 bp, Homo sapiens
ggcacctgcgcgaagctggccaaagcctgcccagacggctcacctgtgcgggatggaacaaaagcatataggttgctgtagatgaatgtt

SEQ ID NO: 681607 - DNA, 50 bp, Homo sapiens
gatagatcgaaacatgaaggacgaagaactattatggagctgctaagatg

SEQ ID NO: 681608 - DNA, 100 bp, Homo sapiens
gccagaaaagactgctgctccctcgccgtcactgttgtataaatgaaaaaatcatgtcctacatatgttctcaacaagacactctgtcaaacaaaataac

SEQ ID NO: 681609 - DNA, 98 bp, Homo sapiens
ctggcagcagaggatgatgagggcttcagtgcagacgcagtggtggccctggagcagtatgccagcaagattttacatcctgaagtccaaactctaga

SEQ ID NO: 681610 - DNA, 90 bp, Homo sapiens
gcttcgtgtccaacctgttcagtcaatgaagcctgtgagtggacacccttttctcaaaaagggatggaagggtctaagacgtccaacaac

SEQ ID NO: 681611 - DNA, 83 bp, Homo sapiens
ccggtgtggctgtgccgttggtcctgtgcggtcacttagccaagacaatgcagatcttcgtgaagactctgactggtaagacc

SEQ ID NO: 681612 - DNA, 96 bp, Homo sapiens
tcttggattcgtgaacagaccacagtggaccacttctggggacagagcgggatgccaccagcttgtccaaagggaagttccaggagctcctggtgg

SEQ ID NO: 681613 - DNA, 100 bp, Homo sapiens
attcctgtgcagaaggcatcgtcgtcttccggacagactatggtcaggaatagccaggccagaagaaggaaggcctgtggtgagtgggacaggaaatgac

SEQ ID NO: 681614 - DNA, 75 bp, Homo sapiens
cactttcattgtctcggacgtgcggggcctgggcctcccggtccgcaagcagtgccggatggagtgctgtgatgt

SEQ ID NO: 681615 - DNA, 75 bp, Homo sapiens
cgaagtgggacgcgccgagccggaggctgcaggatggcgggcgacttcaccaaccacaatggcacaggcgggaag

SEQ ID NO: 681616 - DNA, 98 bp, Homo sapiens
ctcggctggtcgcttcccgcgcgggtatctgtgcgtttcagcggcgacacgtgacaaatggcctacagctgtgagagcaaatggacatctcctcctga

SEQ ID NO: 681617 - DNA, 100 bp, Homo sapiens
ccgatttccgcgatggcgagagggggcaccggaggtgacaacaataacaagactgtccttcggacaagttttagcctcaagtactacagccttccagcag

SEQ ID NO: 681618 - DNA, 75 bp, Homo sapiens
ctggattccgccaaagaaataaaaaagcaggttcgtgctgtgctgatcctgtatttcctgtatttcctgcactgg

SEQ ID NO: 681619 - DNA, 100 bp, Homo sapiens
aagattgctaaaatgatagtcagtgacattatgcagcaggctcagtatgatcaaccgttagagaaatctacaaagaaagaaatttcagagcttccaagac

SEQ ID NO: 681620 - DNA, 100 bp, Homo sapiens
caggagcctgttctcatcaccatggcaacaggtgctggcatcggccccaccattcagattggggaggagacggtgatcactgtggacactaaggcggcag

SEQ ID NO: 681621 - DNA, 82 bp, Homo sapiens
gcggacgggccatacccaataaccaggtgcttggcaaaatcgagcgggccattggaagccgagatcccccgcgaggtgatcg

SEQ ID NO: 681622 - DNA, 82 bp, Homo sapiens
cagcggccgagcgggcggcttcctggcctgggcgctccggtggcggcggaggctgatcagctgaccgaagaacagattgctg

SEQ ID NO: 681623 - DNA, 99 bp, Homo sapiens
aagctaccaccgctacctctgtttgcccttctcctttcaaaatgaagcccataggacttcaagagaggtttatggctacaaatgatttgatgacggaac

SEQ ID NO: 681624 - DNA, 75 bp, Homo sapiens
aaatttgaaagtcatattttcatgtcctcctgcatatgcccaagaggattgggagtggaatggacaccagcagaa

SEQ ID NO: 681625 - DNA, 102 bp, Homo sapiens
ttttgaccaatttaaagaagcattaatactcatcttgtccagaactctgtcaaatgaagaacactttcaagaaccagatcttatgccttcattcatccggca

SEQ ID NO: 681626 - DNA, 100 bp, Homo sapiens
ctgcttcagtctgcaagtatggagctcaagttcttaattattcagaatgctgcggttttccaaggcgtcacaatgtagcagggaccccaggcgtcgtgct

SEQ ID NO: 681627 - DNA, 100 bp, Homo sapiens
gaaataaatctgatattgcaccttcacagcaacaagatcttacagactctttcagcacctacgaaaaatttagaacagcaggtgaatcacagccagcagg

SEQ ID NO: 681628 - DNA, 141 bp, Homo sapiens
ctggaggggcgccctgggggttcagattgcaaggtggcaaggagcagaagcagcccttacaagttgcaaagagaaatggtcaatgcatggtttgctgagagagttcacaccatccctgtgtgcaaggaaggtatcagaggc

SEQ ID NO: 681629 - DNA, 82 bp, Homo sapiens
ccgagctcgttggagcttgaacccattgtcacccctccggttgatgccggcccaggatggatcagacctgtgaactacccag

SEQ ID NO: 681630 - DNA, 100 bp, Homo sapiens
gacccggagcacccgacccctgagaacaagactgccaatggagactgccgcagagacccccgggagcggagccgcagccccatcgagcgcgctgtggccc

SEQ ID NO: 681631 - DNA, 100 bp, Homo sapiens
actgcatgaatgaggctgagatagttgatgttgctctgggaatcctgattgaggtaaagtcactgatctttgaccagagtggtacctacctggctcttgg

SEQ ID NO: 681632 - DNA, 100 bp, Homo sapiens
tgcccctcctccaccagaggactgggaggagcatgtcaacagggaaaagaagatctcccggagcagtgccctgaaagtgctggaccatgccatgattggc

SEQ ID NO: 681633 - DNA, 101 bp, Homo sapiens
ttggcttcagctgtgcaacttggagcattttagcttggtaacactgatcccctttcaggtattttttgcatccgtgcgatctggaggaagtagccaagtgt

SEQ ID NO: 681634 - DNA, 87 bp, Homo sapiens
gagtacctgcccagaggggcccactcgctgtccctatggtttgaagtggtgaacatggatttttctcggcttcacatgtacagtcct

SEQ ID NO: 681635 - DNA, 83 bp, Homo sapiens
cgagctcaacggcggcctgcctccgggcacacccggctccccggacgcctcgtgctcctcgtcttcctttgcctgggggtctt

SEQ ID NO: 681636 - DNA, 96 bp, Homo sapiens
ctccccctataagcctcggcctccacagggaactctaatgatccaggacaaagaagttaccctggagtatgtatcaagcctggatttttggtactg

SEQ ID NO: 681637 - DNA, 90 bp, Homo sapiens
gttcccggctccgtggggccgtcttcccggcgagtccgcgacggtcgccgcccacggcgaggtgctggagaatctggtaaaagcaccatt

SEQ ID NO: 681638 - DNA, 75 bp, Homo sapiens
gaaagttttccttccatctctgctgctctctcatttgctggccatcggattgggcctcctgctcttcatggatga

SEQ ID NO: 681639 - DNA, 83 bp, Homo sapiens
ggcggcgaacgcggagagcacgccatgaaggcctcgggcacggtgcgcgcggagccatggttatcatgtcggagttcagcgcg

SEQ ID NO: 681640 - DNA, 101 bp, Homo sapiens
tgtggtacttctcgcagtccccgcgcgtggtcatccagctgcatcttcctcccgtgaggctggccgagctccacgctgatctgaagatacaggagagggac

SEQ ID NO: 681641 - DNA, 75 bp, Homo sapiens
cgaagtctactcaacgtttccaaggtgtacgccccaagttgggacgccggcatagtatggaaaatatggaactta

SEQ ID NO: 681642 - DNA, 98 bp, Homo sapiens
gggaagagagttggctactggctgagcgagaagaaaatcaagaagctgaatttccaggccttcgccgagctgtgcagaactcacctgtgagtgaatct

SEQ ID NO: 681643 - DNA, 74 bp, Homo sapiens
acgaatcatccacgcacctgcagctctgctgagagagtgcaagccgtgggggcaagaatatcacggcatgggca

SEQ ID NO: 681644 - DNA, 101 bp, Homo sapiens
gaggaagggtggctggaaggagaactaaatgggagaagaggaatgttccctgacaatttcgttaagcctctacggcagacacatgcaggccaacccagaac

SEQ ID NO: 681645 - DNA, 100 bp, Homo sapiens
acaacgtccctgtcgtcatatcaaaaatattcgaagaccaagcagctggccagctcagcgtccctggaagggaagggacaactgaagttcacctcaggac

SEQ ID NO: 681646 - DNA, 76 bp, Homo sapiens
caccctggctgactgcaacctgttgccaaagttacacatagtacagatgcccattgctgatgccccgtgtcagccc

SEQ ID NO: 681647 - DNA, 98 bp, Homo sapiens
gctacctcaggggccgtccccaggacactgtccggatcttccctccctgagggctgtgctgaagtttgctgctgccactggagccactccaattgctg

SEQ ID NO: 681648 - DNA, 90 bp, Homo sapiens
tgatgacctttcagattctttctctggaactgaaccagaggttcacaaaacaagtgtagtagcggtttttgaaatttccagatgacccca

SEQ ID NO: 681649 - DNA, 82 bp, Homo sapiens
tggagagcgtggacaagagcgcggggcaagtggctcggaacacagctgcatcttcctcccgtgaggctggccgagctccacg

SEQ ID NO: 681650 - DNA, 90 bp, Homo sapiens
gaagaattcagaagaaacaaaagtgccaccgaagaggacttggaccctctgtggaacacccgagtacctagcccccgaagtcattcagag

SEQ ID NO: 681651 - DNA, 82 bp, Homo sapiens
atcagctggcctggtttgatactgacctgtaaatcatcctttagctcaccatggatgatgatatcgccgcgctcgtcgtcga

SEQ ID NO: 681652 - DNA, 98 bp, Homo sapiens
tcagggtcccttctgagatgatctggatccccgacattgttctctacaacaagtacaatgccagggagtactacgaccacctgcccgagctgaagcag

SEQ ID NO: 681653 - DNA, 100 bp, Homo sapiens
ccgtccgcgggtctatgggaagttcggggacttgacagccgctgccgccgcaggcgagaaccactgtctctgatcaacgtgcggaagaggaacgtggaat

SEQ ID NO: 681654 - DNA, 74 bp, Homo sapiens
atgaaaatgacttctcataggaagtcatttggtgttggagattctctcgggcctagccgtccttggaacccgat

SEQ ID NO: 681655 - DNA, 83 bp, Homo sapiens
ggaggaggcactgcctgagcagtcagaaggcaaagaacagaagatcctccttgtgttgatgggaaccattttcagcatcctgc

SEQ ID NO: 681656 - DNA, 98 bp, Homo sapiens
tgtcaaaaacaaggttctggaaacaactgggcatatgggtgcagtgtggtgactttcctcatctgttagtgtacggaccatcaggtgctggaaaaaag

SEQ ID NO: 681657 - DNA, 105 bp, Homo sapiens
gctcggcgatggtaggcgtccctggagcggccgccttccagcgtccaagacaagctgctgctatctgcgtgccacttactggtctcactggccaccaccgtgcgg

SEQ ID NO: 681658 - DNA, 75 bp, Homo sapiens
ccgaatacttcagaagtggggaaatggtgatatccgacatccaaagcacgtccaacagacggatgtggctgcgac

SEQ ID NO: 681659 - DNA, 96 bp, Homo sapiens
aatgctatcacttttggaggactgcttggggatgccactgacaacatgcagcaaaaatcaccatcagagtcgtttattggtcgagagaagaggtca

SEQ ID NO: 681660 - DNA, 96 bp, Homo sapiens
cactgtatctgggaattgccaaggagaagagtaccaaggctgctagtgaacagcgacgtgtttggaaattttagcattcaggtgccaggaatgcag

SEQ ID NO: 681661 - DNA, 100 bp, Homo sapiens
caaaagtacgtggcatgcctagaagaacttcgtgaagctctggagatctcccccttcttcaagacccacgaggagcacagaaaatggttctgccccctcc

SEQ ID NO: 681662 - DNA, 51 bp, Homo sapiens
cagcgagaacctcaagagagtgctcctctagagacacgaggcatccctttt

SEQ ID NO: 681663 - DNA, 100 bp, Homo sapiens
ggaaattggggtgccaccagacggagacagcttggactaccagttgtacacagaagaaagcccatatgaggacacagcaagaaggtggctgtcttcaagc

SEQ ID NO: 681664 - DNA, 100 bp, Homo sapiens
aagtgaaaacttgagcaaaagtcggaagattctccgttcaatgtccagaaaaacagcatgatcctctctgctgccatcttcatcaccctcttaggtctgc

SEQ ID NO: 681665 - DNA, 82 bp, Homo sapiens
agaaaacttacaaacaaccccatctccagacaaatctctagtgatccctgaaaagttccagcatattttgcgagtactcaac

SEQ ID NO: 681666 - DNA, 51 bp, Homo sapiens
cagaaactttctccctttatccacagtagagacggggtttcactatgttgg

SEQ ID NO: 681667 - DNA, 100 bp, Homo sapiens
gggggtggccattcaggagaagctcagggagcaggtggtgaagcgtgaggagctcttcatcgtcagcaagcatacactggacctgaggaggaagcatccc

SEQ ID NO: 681668 - DNA, 96 bp, Homo sapiens
cggtggctacctcacgctggaagtcagaactacagggccgccgccacgcagaaaactgtggatttagttactccactctgccatgtctttccacca

SEQ ID NO: 681669 - DNA, 93 bp, Homo sapiens
ctccgcgcacatcactcccgagtggaggaagcaatacatccagtatgaggaataatgtatttgtggccttggacatgaggcagtcagtcctct

SEQ ID NO: 681670 - DNA, 100 bp, Homo sapiens
aggaaaactaggaatctatgatgctgatggtgatggagattttgatgtggatgatgccaaagttttattagttgtggaagaaggactctgggaaaatggc

SEQ ID NO: 681671 - DNA, 75 bp, Homo sapiens
ttattcatctgtccagcatgactcatccccgggagtgttgagtttcctccagcctggtggtgccctgtccttgca

SEQ ID NO: 681672 - DNA, 75 bp, Homo sapiens
aaaaaaggctgttctggatgagacatatctgaagagatggattaagaatgctttggattaaggattgtggagcac

SEQ ID NO: 681673 - DNA, 80 bp, Homo sapiens
aaatatgagaaagctaggccatctgaataactttactaaggacctgcgcgaagtctggctcaattatcctctccacccac

SEQ ID NO: 681674 - DNA, 125 bp, Homo sapiens
caaggaggttggcttcttcatcatccgggccagccagagctccccaggggacttctccatctctgtcaggcagaagtcaattcatctggaaagactatctctgagtcagacttaaaccactcttt

SEQ ID NO: 681675 - DNA, 82 bp, Homo sapiens
ggccggccccggcctggtcctggccccggagctgttgctggacccctggcaggagatcctgagtcatgtgttccagtggctt

SEQ ID NO: 681676 - DNA, 50 bp, Homo sapiens
cgccatcattggacccaatggctctgatcatggaagggaagtggttgctg

SEQ ID NO: 681677 - DNA, 96 bp, Homo sapiens
cgtccgccgattcctcctccttggtcgccgcgtccttggctggcgtggctaccagggcatggtggacggaggctcaaacatcgcagaggccgactg

SEQ ID NO: 681678 - DNA, 75 bp, Homo sapiens
gtagctatagcagccgcggcggttaagtatgcggcgccaggagctgtaaagtgaacagagttatctgtgacattc

SEQ ID NO: 681679 - DNA, 50 bp, Homo sapiens
ctttctctcctgcctgggcaagcctcgtgcagggacttcacagcccacac

SEQ ID NO: 681680 - DNA, 100 bp, Homo sapiens
tcctccgccaagcgcggccgccgcccccgcctcaggaccatggccaacctggagcgcaccttcatcgccatcaagccggacggcgtgcagcgcggcctgg

SEQ ID NO: 681681 - DNA, 100 bp, Homo sapiens
atcttcacagcacagttcctgggaaggtggagccaccagcctctccctggcacagatagatcattatctaggacttgcaaataagaatgttaaagatgct

SEQ ID NO: 681682 - DNA, 75 bp, Homo sapiens
ggaaggatgcagagagaaaggagaggttgttaccccttctacaaaactgacccgttcatcttcccagagtgcccg

SEQ ID NO: 681683 - DNA, 101 bp, Homo sapiens
gggagccagagcccttaaccgagaaggccttgagagaagccagctctgccatcgatgtgttgggagaaaccttgctggatgaaaaagaaagtcggcgtctg

SEQ ID NO: 681684 - DNA, 50 bp, Homo sapiens
ccaaggtcagaaggaagcaccacacagagtactatactggcaattgctgg

SEQ ID NO: 681685 - DNA, 82 bp, Homo sapiens
ccgcgggtgccacctcccgggacgctgcccacggcgtccccggtcgcggttgaaaacgttagcggaagaacttatgcaaaca

SEQ ID NO: 681686 - DNA, 100 bp, Homo sapiens
cgatgatctggcagacctcagctgcctggtgaacagattatggcctttgcaagcaaatgagtactcctctcctaaagaaagattacgttgatgaaaaaga

SEQ ID NO: 681687 - DNA, 100 bp, Homo sapiens
cgcgctacaccaacctctcgtacatcggcgagggcgcctacggcatggtgtggttttgacaagcttgcatcatgcgtgagtataagctagtcgttcttgg

SEQ ID NO: 681688 - DNA, 100 bp, Homo sapiens
caagatgaatttcctccgcggggtaatggggggtcagagtgccggaccccagcacacagaagccgagacggctgcaaagttggctttcacagtgcaagcc

SEQ ID NO: 681689 - DNA, 75 bp, Homo sapiens
gctttttttgcccacctagcttgtaacgaagcgaccgtggcagccatgtattacagctactacatgctaccggac

SEQ ID NO: 681690 - DNA, 96 bp, Homo sapiens
gcccagaggactttcttccagcttctgctgtccttctttgtggagagcaagcttaaagcttttcaagccaggccaagaagctgtgaagtaccaggg

SEQ ID NO: 681691 - DNA, 96 bp, Homo sapiens
gcaagctccatgttttcacatcttccctttgactgtgtcctgctgctgctgctgctactacttacaaacgttgagaaagaagggccttaatggctg

SEQ ID NO: 681692 - DNA, 75 bp, Homo sapiens
agaaaaggagttgttgagagtagcatggcaccctgtgctgcgcacactaaagaaccgcattgaagagaacactgg

SEQ ID NO: 681693 - DNA, 98 bp, Homo sapiens
ccgcctaggcaagacagtcgacgcgctcaccggctgggtgggttcgagcaactaccggctcttgcaagcttaggatatgaaaagagctgtgtgttgtt

SEQ ID NO: 681694 - DNA, 48 bp, Homo sapiens
caaataattgagtgctttcgatcagcagatcgccaaactgaggcagca

SEQ ID NO: 681695 - DNA, 100 bp, Homo sapiens
cgcggagtctgagggagatggaagttgagcaagagcagcggcgcagaaaggtggaggccgggaggacgaaggaagcaatgaggctccccaagaacacacc

SEQ ID NO: 681696 - DNA, 88 bp, Homo sapiens
gttcaagataaagtgattttttgcctttgttgattaactggacaaattcagtgagtgatagttgcttcaggaatcttgcagaagaccg

SEQ ID NO: 681697 - DNA, 52 bp, Homo sapiens
ggagccaccagcctctccctggttgcatcataaatacaaaggactgaagtta

SEQ ID NO: 681698 - DNA, 88 bp, Homo sapiens
gagactccactgaggtcacacagccgctctacctacaaggactccaacactctgcacctccctacggagcgtttctcccctgtgcgcc

SEQ ID NO: 681699 - DNA, 50 bp, Homo sapiens
caacaccaaaaagctttctgctaggggaacgaagagctctagaaagaaga

SEQ ID NO: 681700 - DNA, 76 bp, Homo sapiens
cgagctggaggaagcccccaggtgccaggatctgcccggatccgggcctgcgaggtcaaccgccagaaccgagccg

SEQ ID NO: 681701 - DNA, 51 bp, Homo sapiens
ggtgggcaacttcctcaatggctcccagggtctcagtctgttgcccaggct

SEQ ID NO: 681702 - DNA, 100 bp, Homo sapiens
ttatagacgacgtgatatttccaacacacttataatgctcgcagataagcatgctattcgaacaactgccacagcagcaagcaacttgattgaagtattt

SEQ ID NO: 681703 - DNA, 74 bp, Homo sapiens
cccttcgccaaactcttcattttctctaaactctgtgaaggcatatttaaagtccttataaaggacatcccaac

SEQ ID NO: 681704 - DNA, 100 bp, Homo sapiens
gccagagcccacagaagcatggaaggtaacaccagttgttgctctttccaatgagtcctggtctatgtcatttgcaaaataccttgaacttaggttttat

SEQ ID NO: 681705 - DNA, 75 bp, Homo sapiens
gaagaagaagattaacctggagttaaggaacagatccccggaggaggcctccggtgtggctgtctctgatggtgt

SEQ ID NO: 681706 - DNA, 100 bp, Homo sapiens
gaaggcgtcagcagaggggccactgctgggccctgaggctgcaccaagtggcgaaggagccggctccaaggtttggtgcacctcgatttggaggaagtag

SEQ ID NO: 681707 - DNA, 100 bp, Homo sapiens
tagatggaatcctgagtgaggacaagctgactgtggccggcattcacaagaaggtggcccggaccatcggcatttctgtggatccgaggaggcggaacaa

SEQ ID NO: 681708 - DNA, 98 bp, Homo sapiens
ttccaagtctggggatggccagatggcgttcaggaagtggcttatattcactcaaaccagaatgtaattggatcgagcaaagctgaaaatcacatgag

SEQ ID NO: 681709 - DNA, 75 bp, Homo sapiens
gattttcctgcatggattgggagatactgggtcattaagaaggcaaatgataccttaaatggaatcagtagtagt

SEQ ID NO: 681710 - DNA, 83 bp, Homo sapiens
gttcataataatggtggggcagtgtcatttcaggtttttcgttggaatatacgttgcacatttatggcgattctgagtgtgag

SEQ ID NO: 681711 - DNA, 97 bp, Homo sapiens
ccccgcgcctctcttcgcctcgcctcgggacccgcggtccccgctcttgctgatgagaactggactgatgaccaactgcttggttttaaaccatgca

SEQ ID NO: 681712 - DNA, 83 bp, Homo sapiens
gatttatgtaatgtcaactttactgagaattttccacctcctgacacaacaccactcagtccctgtgcgttttattgcgacct

SEQ ID NO: 681713 - DNA, 100 bp, Homo sapiens
tccgcaggcctggcggaggccggccacctggaggggcattgcttggttcgcgtggtagcagaggagcttgagggggacttgatctcatcttcatgccagg

SEQ ID NO: 681714 - DNA, 51 bp, Homo sapiens
gcaaagccagcgttacagtaatgttccagatttggtgttgtactgcgaggc

SEQ ID NO: 681715 - DNA, 87 bp, Homo sapiens
agacgcggcgcgcccgccctgcagctgcccaagcaagctgcggtgcaaccctgggcagtttgcgtgtcgcagcggcaccatccagtg

SEQ ID NO: 681716 - DNA, 91 bp, Homo sapiens
tacggaccttaaaatacccgcaacagccccttcgtcccaaggatcatagacggtatttctatgtaaacgaacagtcgggcgagtctcagtg

SEQ ID NO: 681717 - DNA, 98 bp, Homo sapiens
agcctgaccgggcctcttgcactgactgagacgactcctcaggactgcgaatgctacggtcactccaaccgctgcagctacattgacttcctgaatgt

SEQ ID NO: 681718 - DNA, 90 bp, Homo sapiens
gttgaagagggctgcaaggtgggaagtgaagtcagtgcctcagttgctggtccaggtcaagacctcgtctccgttctcatagtcgtagca

SEQ ID NO: 681719 - DNA, 82 bp, Homo sapiens
gaagacctcaaactttctgatcttttaaaatattacttaagagaatctcaagctgctaagccctggtttcctgaggtttgtg

SEQ ID NO: 681720 - DNA, 100 bp, Homo sapiens
ccaagatgctgagcctgaagctccccaggctgtttagcatagaccagataccccaggatgctgaaaacgccattcaacagatgggtggccagtggcttgg

SEQ ID NO: 681721 - DNA, 111 bp, Homo sapiens
ttttgctcttctggatttagcatcaaccatctggatattgctccttcatccatggaacccagtgacatgcctgctggctaccactgccccttagactctgccccctgggat

SEQ ID NO: 681722 - DNA, 100 bp, Homo sapiens
tcctgtcctcccggcaggacaatacggaggagctgtggctcctccattcaaacatcgacgccatcgacaagcggtggacgacccaccggagcccgtgtac

SEQ ID NO: 681723 - DNA, 87 bp, Homo sapiens
gagatcccaggcggtgacagagtggagccatggctagaggaaaaccaattctgtgtcctcggaggaccacagcccagttgggcccca

SEQ ID NO: 681724 - DNA, 100 bp, Homo sapiens
tctcagccttgtcaaagatgccagatgtgggagacacgccaaagctcccaaggttttggcatcatgtttgggaagaaaaagaaaaagattgaaatatctg

SEQ ID NO: 681725 - DNA, 100 bp, Homo sapiens
acactaaagagaagattcaaccaaacccaccatcttctggtttcattggagccatgtgttcacatgtcatgtggaccagtatttaactgtggaaaccgcg

SEQ ID NO: 681726 - DNA, 100 bp, Homo sapiens
caaggataagggcgacagcaacagctctgccggctggaagatttttcgaaagaaagcagtggaacttggggtaaaattgctacctgcatttcatactccc

SEQ ID NO: 681727 - DNA, 82 bp, Homo sapiens
tgacgggtctggagtgcgtgggggaccggctgttggcgggtgaccatggaggaagaagatgagtctcgagggaagacagagg

SEQ ID NO: 681728 - DNA, 75 bp, Homo sapiens
taccgggaagatttacacagatggaaccagaaaagatacgaggctctaggagagtggagatggggtttcaccatg

SEQ ID NO: 681729 - DNA, 100 bp, Homo sapiens
agagtatttggggtctacctcctgtggtttttgattcaagtcctgttctacctactgccaattggaaagaacctggatgacagtgtgttttcgaagcggc

SEQ ID NO: 681730 - DNA, 101 bp, Homo sapiens
gcaactcagaaacatcaggtccaaggtggataattactgtaccttcctcatggaaaaagttttatttaaagtgttatttctcattgaatactatcaaaaag

SEQ ID NO: 681731 - DNA, 100 bp, Homo sapiens
ccgggggtcgtcgccccgcaggtttgaccttgtctgtgtcaatgcgtggatgctggacctcacccaagccatcctgaacctcggcttcctgactggagca

SEQ ID NO: 681732 - DNA, 83 bp, Homo sapiens
cttcgacttggagtctttgtccaggacgatacttgccagaactaatacagctgatgaaatacctgaccttttctgctccaggt

SEQ ID NO: 681733 - DNA, 83 bp, Homo sapiens
tgccctctgcgctcctgcatctgcctccccatgtgcgcgcggagccatggttatcatgtcggagttcagcgcggaccccgcgg

SEQ ID NO: 681734 - DNA, 101 bp, Homo sapiens
aaattcttcagctgctcggacagatgaagctccccaaggagctgcaggatctagtgaaaagccatttgatgtatgcggtcagagaagaagtggaggtcctc

SEQ ID NO: 681735 - DNA, 95 bp, Homo sapiens
cctcacttatcgctatgatgaccagagtgcttgtgatttcacgtatttttgctgaactcgtaaaagagacacttggatggtggattaaccagaac

SEQ ID NO: 681736 - DNA, 100 bp, Homo sapiens
ctacagcagctcctcgtgcctggcggcgtgggcccgggcgagcagccctgcctccggacggaaattcgaaatgagtcccatgactatcctcatagagtgg

SEQ ID NO: 681737 - DNA, 100 bp, Homo sapiens
gcagtccaacaaagacacccaagaagcacagaagtcactgaacctaccagatgtatttgggttggtcgtcctcccattggaactgaaactacggatcttc

SEQ ID NO: 681738 - DNA, 96 bp, Homo sapiens
ggaacttgcttctaaaattaaagaggtgtatgcaacagcgttattgcaacaggctaacgaaaacagacaaaattcaactggaaaagcatgttttgg

SEQ ID NO: 681739 - DNA, 82 bp, Homo sapiens
ccgacttccagaagggcctgaaggatggaactatcttatgcacaaatgttttagcaagtgcatcagctgacaacactgtaat

SEQ ID NO: 681740 - DNA, 102 bp, Homo sapiens
gttgccgtcccttcgcctccttcaccgccgcagaccccttcaagttctagtcatggcaacagagatgcttatttttggaaagaagttaacagcgggagaggc

SEQ ID NO: 681741 - DNA, 74 bp, Homo sapiens
ttgagcaggctgatctactgcaggaggcagcagaagatgtcgttttcattggacctgacacacatgctattcaa

SEQ ID NO: 681742 - DNA, 82 bp, Homo sapiens
ctccggcgtctgcgcttccccatggggctggcctgcggcgcctgggcgctctgagcttccatgaggcaggctgaacctgcag

SEQ ID NO: 681743 - DNA, 75 bp, Homo sapiens
gggaagccaagtgccatcttcaaaatttcaggtcttaaatctgaattcagcggggtgccaagtcgttttctgtgt

SEQ ID NO: 681744 - DNA, 116 bp, Homo sapiens
cagatcagcctgagaagccactcaacttggctcacatcgtttgttgacctcctgtactggagagacattaagaagactggagtggtgtttggtgccagcctattcctgctgctttc

SEQ ID NO: 681745 - DNA, 90 bp, Homo sapiens
agaagaacaagaagtaggcattgaccccttgtccagttactctaacaagtctggaggaataagacgagttggaagaagacctgatcaaca

SEQ ID NO: 681746 - DNA, 75 bp, Homo sapiens
gacagggatcacttcatccgaaccctcagcctcaagccgctgctcttcgatgaagtgcgcacagggacctacagg

SEQ ID NO: 681747 - DNA, 90 bp, Homo sapiens
cttctgaggaggagaagaggaaccccgcgctgtatgccagcaacgtgcggcgagtcatggccgaccgaggtcaagcgcgtgggagacacg

SEQ ID NO: 681748 - DNA, 74 bp, Homo sapiens
gtttagaagaagcagaagaaacagttaatcgtgatatcccaccccttacaggagctgaagaagaagctgttcaa

SEQ ID NO: 681749 - DNA, 99 bp, Homo sapiens
cgctggcaacgcattcaagaaagccgacccccaagccattgacctcatcaacaacctgctgcaggtgaagatgcgcaaacgctacagcgtggacaaatc

SEQ ID NO: 681750 - DNA, 100 bp, Homo sapiens
ctcatcggcactctgaacgcggccaaggtgccggccgacaccgtgccaccgatgacttcaatcacggcgtggtgctgagcagcagagccctgcgggatgg

SEQ ID NO: 681751 - DNA, 83 bp, Homo sapiens
gcagaccctgtggtccacgcgggagcggaagcagacaatgcagatcttcgtgaagactctgactggtaagaccatcaccctcg

SEQ ID NO: 681752 - DNA, 100 bp, Homo sapiens
gtagttccatgctgtctgttcagacttcagcttggtgtattggccatgtcaagccgctcatggttgagctattcttaccaatctcgcttccatctcaccc

SEQ ID NO: 681753 - DNA, 100 bp, Homo sapiens
tctcgtcaggggctagatgaaatgtacaatgaagccagaaggcagcttcgagatgaatctcagttacgacaggatgttgcttcagagtgtgaagtcaaat

SEQ ID NO: 681754 - DNA, 75 bp, Homo sapiens
tctttacagagaaatttggattttcttcccaggcagcaagtgcaattaacagctggagatttggccaatgaactc

SEQ ID NO: 681755 - DNA, 88 bp, Homo sapiens
atgggtacaggtataatgttaatcaacttggtgatgcccatgactggaaccagaacagagatcttcgcaaatactgtggacaatgccc

SEQ ID NO: 681756 - DNA, 100 bp, Homo sapiens
cagcgctggggtttcggcctggaggagttgtacggcctggcactgcgcttcttcaaagtggccctgttccagtattggttatgagtcttctgttcatcgc

SEQ ID NO: 681757 - DNA, 98 bp, Homo sapiens
ctgggtgcccccaggccttaagccggagcagatcaagcttcaggagtctccggaagacatgcctgcagggcagacaccacacacagttatcctgtttg

SEQ ID NO: 681758 - DNA, 100 bp, Homo sapiens
cccagatcacctcgctcgacgtgttgcagcacatcctcatccgagcctttgatttgagtgggtcttgggcgtctttggtactggcttttttaggggtctg

SEQ ID NO: 681759 - DNA, 100 bp, Homo sapiens
ctgcagatcgatgcggaaggcgagtgccaggagggagagatcctggccacaggcagtacggcatggtgctcgagttactggaggtgaactgtttgaagac

SEQ ID NO: 681760 - DNA, 75 bp, Homo sapiens
tggacccagctattgctgcagcatttgccaaggagacatccctcttagggatcatagacggtatttctatgtaaa

SEQ ID NO: 681761 - DNA, 98 bp, Homo sapiens
ccaacctcatcctgtgccgacgcgactacctgaggaaaattgggccgatttccacctatgatgcatcatcaccaggcaccctcagatggccagactcc

SEQ ID NO: 681762 - DNA, 75 bp, Homo sapiens
cctgtttggagagaacagcgatctgaactttctggggaacagaccagttgtgcttgccagcaaagcacggacaga

SEQ ID NO: 681763 - DNA, 89 bp, Homo sapiens
cacctcagccgcttcgtgtggttcttttctggcatcgtaggaggtggcctgctggccttgtatgaagcaggagaaaggagaaaggggac

SEQ ID NO: 681764 - DNA, 100 bp, Homo sapiens
cttcttgcaacaggttaacgtgtatggcgtgtgcgtgccagggctccttcacctaccaaacgcaaagaccgctcagatgagaagtccaaggatcgctcaa

SEQ ID NO: 681765 - DNA, 83 bp, Homo sapiens
ccgcaacaggcgttttgcaatgcagatgtagcagaaatgatggaagaattgcatagcctggacccacgacggcaggaattatt

SEQ ID NO: 681766 - DNA, 100 bp, Homo sapiens
cggacgcgcagcatggcggtggaggacgaggggctccgggtcttccagagcgtgaagatcaagatcgtgtccttgaatccgacccctactttgggtttga

SEQ ID NO: 681767 - DNA, 75 bp, Homo sapiens
cgattagctcgtgtcaatgagcagagaatgaagtgtgttaacagggcacaaccattatgtgatgtgtgctcagtt

SEQ ID NO: 681768 - DNA, 100 bp, Homo sapiens
cagaatctgaggacatggcacagcgcaggaaagaagcagctgatatgctaaagagcctggcccaactagagaatctgtgcaaacagctgtatgaaaccac

SEQ ID NO: 681769 - DNA, 100 bp, Homo sapiens
gtgatcagcagacagttccaggaagtgaacaagtccaagaggaccttctgattagtccacagtcttcctctataggaggctctgtcggtggtgagcgacg

SEQ ID NO: 681770 - DNA, 73 bp, Homo sapiens
ttgccgggtcctcaaaattataaccgccactggatctgcgctgtgcggtcagcagatccggaagctcatcaaa

SEQ ID NO: 681771 - DNA, 95 bp, Homo sapiens
cctgcaggtgctgggagcggcctacatccagcacaagtgctacagcgatgcagccgccaagaagcagattgtgttcagtgtggacccctccgagg

SEQ ID NO: 681772 - DNA, 74 bp, Homo sapiens
aaacttgacactcaccctgaccgggctatgcaccaccgcctaaaaatgggattgaacagaagcgccctggacgc

SEQ ID NO: 681773 - DNA, 111 bp, Homo sapiens
ctccggtacaatagaattaaagcgcttccttctgggattggagctcaccaagtccctgtgaagcaggaagagtgagggcaggttcactgcagctcagcagcatgtctgcag

SEQ ID NO: 681774 - DNA, 105 bp, Homo sapiens
ccggcctcgcctcctcgcagcagcgccatggtcgcctgcgaggccgctggccaggcctgagcctctgccaccatggccattgtgcagactctgccagtgccactg

SEQ ID NO: 681775 - DNA, 100 bp, Homo sapiens
acctgacgggcctgcgagggttgaagattgtgaagcaatagcctaaggtgagtataggtgcttggagaggataaggaaatcaccctgatccaatagctgg

SEQ ID NO: 681776 - DNA, 100 bp, Homo sapiens
tgaaagaccgattttctgcagaagatgaagctttgagtaacattgccagagagctcaacgggacccaggtggagtctgtacagctcaaagtcaacatagc

SEQ ID NO: 681777 - DNA, 100 bp, Homo sapiens
aggagccactgagatgaggaggcgtcgcgcgcgcctgtagctcgcgggcctcgcaggatctatctggttcaatagatgacctccccatggggacagaagg

SEQ ID NO: 681778 - DNA, 83 bp, Homo sapiens
gtgaaccctgaagtcggtgtctgctgcgttcacggcaggattcggttaggtgatcctgaaggacctggaggtgctggcagaaa

SEQ ID NO: 681779 - DNA, 75 bp, Homo sapiens
cgcaaattgccatgtgatactccaggacaaggaaactggcgatggaatatgagaggagccctctggaaagaaaag

SEQ ID NO: 681780 - DNA, 78 bp, Homo sapiens
tctattaggtccacttggtgcagagcaagcgagcctgacgctgtccacgtcgtgctggaccgccacctggtcacaggc

SEQ ID NO: 681781 - DNA, 82 bp, Homo sapiens
tctctagataacagtctgcactttcacccgtttcaggtggctctcgggggctggtccatgggcggctgtggcgtcaggatgg

SEQ ID NO: 681782 - DNA, 83 bp, Homo sapiens
cgtcagcactcagcgcgggccgtgatgaacggcagcagccactcaccaacagccatcaatggtgcaccgtgcacacccaacgg

SEQ ID NO: 681783 - DNA, 101 bp, Homo sapiens
aatcctgcggcagaagccgagttcaacatcctcctggccaccgactcctacaagtgaacacctacctcttcatgatgcaagcccaaggcattctgatccgg

SEQ ID NO: 681784 - DNA, 90 bp, Homo sapiens
gcaagatatggcaccgcaagccgtccccggccacgcgggacggtctgttcggcacttgaagtactccttgtttaagaaatcactactggg

SEQ ID NO: 681785 - DNA, 80 bp, Homo sapiens
ttcggcagtccacccaccgccgccgcctcccaggttctgtggcctgatccccaggaggagctactctgggttaccatgag

SEQ ID NO: 681786 - DNA, 75 bp, Homo sapiens
cagagatccaagtgcgcgccctggcgggtccggaccaagccgcttgatggcattgaaacgaatgggaattgtaag

SEQ ID NO: 681787 - DNA, 90 bp, Homo sapiens
gctgcctctggggtcctatctcttgaaaccagttcagcggattctcaagtatcatctccttctgcatatggagtttcgctctgttgccag

SEQ ID NO: 681788 - DNA, 90 bp, Homo sapiens
cgcccatccagctgaacccggcccccgacggctctgcagttaacgggaccagctctgcggagtttgacaactattcagccaatgtgatgg

SEQ ID NO: 681789 - DNA, 107 bp, Homo sapiens
ttggattccagatttgtattcgatagaccactgcctgtgtctcgtcttgtatctctaattggaagcaacactgcaggcattggttgcttgcccgccgatgtaccacc

SEQ ID NO: 681790 - DNA, 83 bp, Homo sapiens
acagcttcgggtagaagaagatgtgtggatgaaaatactaggaaaagtttatttaagttacgttctacatgggatgaaatatt

SEQ ID NO: 681791 - DNA, 101 bp, Homo sapiens
cccagcgcaggccgcagagccggggccgctgtgagccgagaccgcgggccgcggagctcgggcggccggcgcggagtattaaaggtggaagaaggtccata

SEQ ID NO: 681792 - DNA, 100 bp, Homo sapiens
ccacagtggaccacttctgggagtccctggagaagtgggagcgtctgaccgtggcggatgcgctggagcccgtccagtttgaagatggagagaaaattgt

SEQ ID NO: 681793 - DNA, 90 bp, Homo sapiens
ctcgattcgctgtcggaggagaatgagaccctggtggagtttgctattgccttatgatctcctcattgcgtccccctctgcccactggac

SEQ ID NO: 681794 - DNA, 75 bp, Homo sapiens
cccaaggtctctcgcgggcgggagaacggaaaactcccaacttcctggcacgcttaaaaaggcctcttaagagcc

SEQ ID NO: 681795 - DNA, 100 bp, Homo sapiens
gcggagccggatgtttgccgagccttgacaggcgtggcagagggagcagtgcccgagcgcggatcccatgacagattctgttgtcacgtctccttacaga

SEQ ID NO: 681796 - DNA, 119 bp, Homo sapiens
tgaggtgatggcaacggccaacttcggcaagatccagatcgggatttacgtggagatcaagcgcagcgatggttatggaattagaatcaaagctaaatgaagcaaaagaagaatttacg

SEQ ID NO: 681797 - DNA, 100 bp, Homo sapiens
ggtatcgatgactgctacacctcagcccggggctgcactgccaccctgggcaacttcgcccgaaaatggcacagaaatggtatcaagaaaccccgatcac

SEQ ID NO: 681798 - DNA, 88 bp, Homo sapiens
aggacaaaagccaagaggaggacagttcgctacacagcaatgcatcgaggtgatctgtgaaaatggttcgctattcacttgacccgga

SEQ ID NO: 681799 - DNA, 74 bp, Homo sapiens
cgtccaagctgctgcttccggatgactttaaggaaatctgaaatagagtactatgctatgttggctaaaactgg

SEQ ID NO: 681800 - DNA, 100 bp, Homo sapiens
gaagcaagaaggccctggacacagcaatatctctgggctttcacagattcagtgatctcttctccctggcggaggaatatgaggactcttccaccaagcc

SEQ ID NO: 681801 - DNA, 50 bp, Homo sapiens
ggtatacacaggctttttagatatacttacaaggagattacgatttcggt

SEQ ID NO: 681802 - DNA, 99 bp, Homo sapiens
gtgggcttagccactcgccatggactcccagaaaataatttctgctgctgaaacattgacattgcatccatctagtaaaattgctaaagaaaacctaga

SEQ ID NO: 681803 - DNA, 80 bp, Homo sapiens
cgggagaatgctcttcaggatagtatcttggccagggaactcaaacagcagatgcaggtgaaggtgctaaaggagaagat

SEQ ID NO: 681804 - DNA, 100 bp, Homo sapiens
gcggcgcacaagtcaggtccggcacatgtttccgcggagcggacccagcaatgacgacccaacatgagtgaagtttcctgcaagaaacgggacgactatt

SEQ ID NO: 681805 - DNA, 100 bp, Homo sapiens
gtgtaggccagccccggtcacagagtgcaccgtatcctgtcacttctggatgtgagcaaccccaaggtccaggtggaggccatcgaagggggagccctgc

SEQ ID NO: 681806 - DNA, 97 bp, Homo sapiens
agcagtcagagctggcgagagccctctccacctcggaagagctcacggatgataccatcggggaccttaagaagctgattgcagcccaaactggtac

SEQ ID NO: 681807 - DNA, 99 bp, Homo sapiens
ccaggaaggcgatcttattgaagtggtcttgtcagaacgatagggccttgggagatggaaaaggaattaatcttctcaccctggcgagttttcctgaaa

SEQ ID NO: 681808 - DNA, 101 bp, Homo sapiens
tggggagctgtccagagcgctgtgccgctgtctgtggctggaggcagagccatctggatgatggaccccaaggatgtccgtgagtggcaacatgaggagtt

SEQ ID NO: 681809 - DNA, 83 bp, Homo sapiens
cttgagagaccagcactaagaaaagaagggctaaaagatgaggaagatttctttgtgcttgaggaatccaaagccctcgtgcg

SEQ ID NO: 681810 - DNA, 75 bp, Homo sapiens
atggggatttaaagcactgaaacaaatgattaagattaacttcaagttgtcttcccaagggattgttgaagaaac

SEQ ID NO: 681811 - DNA, 100 bp, Homo sapiens
tttggtgaatatggccagcttcccagagtgagacggtttaagcggaagcatcttactgccattgactgccagcatttggctcggagtcacttggctgtga

SEQ ID NO: 681812 - DNA, 98 bp, Homo sapiens
tcccaacttcgcttctctgctgaccctctctcgtcgccgctgccgccgccgcagctgccaaaataaacatgggctgaggcttcatcttcgaaacccct

SEQ ID NO: 681813 - DNA, 50 bp, Homo sapiens
tggagcagatttcttctctgtgtagcaagacggagtctcgctctgttgcc

SEQ ID NO: 681814 - DNA, 100 bp, Homo sapiens
aaggggaagaattcgggaaaagcaacgtggggcattccaggttgattttgaactggagtcattttctgaaaggaaagaagaggagaaggaagaattgatg

SEQ ID NO: 681815 - DNA, 123 bp, Homo sapiens
caagtcttcaacctgttcagaacgatgggcctgcgccacctgcccgtggtgaacgctgtgggagagaatgccagaggacttggatctgagctaaaggacagtattccagttactgaactttca

SEQ ID NO: 681816 - DNA, 50 bp, Homo sapiens
acatttcttcggcattctgcaacaggtgaagatggagctggaaaaacaag

SEQ ID NO: 681817 - DNA, 74 bp, Homo sapiens
aaaagactcaggacggacaagcacagtcttcggaaggaactgttgacattcagggatgtgaccatagaattctc

SEQ ID NO: 681818 - DNA, 82 bp, Homo sapiens
aagaggctgaccgcaaatacgaggagaacaccttccaccatgaccacctcagcaagttcccacttaaataaaggcatcaagc

SEQ ID NO: 681819 - DNA, 90 bp, Homo sapiens
gagctagaagacactttaagttatactggaaaattcagggctgctaaggaagcaaaaaaggctaagcaagcatctaaaaagactgcaatg

SEQ ID NO: 681820 - DNA, 75 bp, Homo sapiens
gcccgggcctctccggagaagagaggctgcagcagctttacctgctgttcctgagccttacgctggccactgtca

SEQ ID NO: 681821 - DNA, 143 bp, Homo sapiens
tcctgggggcgggacagacctcgtcccgggctgaattctctctccactcttcgagattggcacacccaggtgtcatggagaaactccagctgggcccagagattctgcagcgggaaaatccaaggcttatttatgccaggctg

SEQ ID NO: 681822 - DNA, 90 bp, Homo sapiens
ctcttgttcttccccagtgatgacttttcagtcaaaatgcagatcttcgtgaaaacccttaccggcaagaccatcacccttgaggtggag

SEQ ID NO: 681823 - DNA, 76 bp, Homo sapiens
gaccggttccaggtgcccaccgcgcactcggagatgcagccgctggctgaactcacgggaatcaaatggcgtaggt

SEQ ID NO: 681824 - DNA, 74 bp, Homo sapiens
acaaaactcccatcgcgtcgtggaggagtactttgtggcccccccagaactggagaaccaggagtctcgggtct

SEQ ID NO: 681825 - DNA, 100 bp, Homo sapiens
gtgaattggttagtggagaagaagattttaaggggtcacggacaaagctttcttgttggtaatcagctgagccttgcagatgtgattttactccaaacca

SEQ ID NO: 681826 - DNA, 80 bp, Homo sapiens
acctcctaaaaagggactgctgcagagactcttcagtcgccaagtggaaatgagttctcaacagtttcctcggttaggag

SEQ ID NO: 681827 - DNA, 75 bp, Homo sapiens
agcgtttcctcgcttgcattcagctcctctgtgtttgccgcctggatccggagttaggtgttggcacgctaccag

SEQ ID NO: 681828 - DNA, 112 bp, Homo sapiens
ctgcacaccaagggcgcccttcccctggatacggtcactttctacaagacaatgcagatcttcgtgaagactctgactggtaagaccatcaccctcgaggttgagcccagtg

SEQ ID NO: 681829 - DNA, 75 bp, Homo sapiens
ttgctattgatggttggcccagaaattccagatatccaaattttcggagcaacatcccctgtcacctggttgata

SEQ ID NO: 681830 - DNA, 100 bp, Homo sapiens
tccctcatcaactccctccggaggcagcacctcaggaaagcaatgatgggacagaatttggaggatcaatttatcagaaagtttgtgaagatcttgacac

SEQ ID NO: 681831 - DNA, 90 bp, Homo sapiens
atgtgagtgaccatgcagcaaaagaaggagggtcctctcagtgattaagggacaagaatccttcaagaaacaggaaaaaactcctaaaac

SEQ ID NO: 681832 - DNA, 71 bp, Homo sapiens
gactggcacagtggagaaaccgcctcgaaaacggagaagcaggtaggtgagctcgtgaaacaatatgaaga

SEQ ID NO: 681833 - DNA, 74 bp, Homo sapiens
ctttcaggtcacctacctcccagtgcagaagagtgggatcattgacctaaaggctgaccagtgcaccggtcttc

SEQ ID NO: 681834 - DNA, 100 bp, Homo sapiens
gaaaaacattcaagttgagcagatgacaaaacttcaagccaaacatcaagcagaatgtgatttgcttgaagatatgaggcggttcaggaccatcatcctc

SEQ ID NO: 681835 - DNA, 100 bp, Homo sapiens
cgtttagtctcctcctcggcgggagccctcgcgacgcgcccggcccggagcccccagcgcagcggccgcggttgtgaatatagtgacatctaaccaagac

SEQ ID NO: 681836 - DNA, 75 bp, Homo sapiens
aattcctcaagtggacttggccatgattggttttgtaaggctcctctctatgatctggctgctcatgaagacaaa

SEQ ID NO: 681837 - DNA, 90 bp, Homo sapiens
tctgcaccctgttgtggctctataagcagctggaagagcctgtattgtcctcacaatagtatagaagaattcaagagaggagagagagac

SEQ ID NO: 681838 - DNA, 99 bp, Homo sapiens
atccattgagatgtcccatcaagctctatgatttctacctcttcaaatggtctctctcctcctgggcgagccgttcttcactaccagcctgctgccgtg

SEQ ID NO: 681839 - DNA, 75 bp, Homo sapiens
catcaccatcaccttcaatccgctctactggaatgtgtgtactaatggtcacttgatgtgcgctggctgttttat

SEQ ID NO: 681840 - DNA, 82 bp, Homo sapiens
gagacgccgtccgccatccagatctgccgcaattctgtggtgttcttggtcacacatttatggagtttctgaagggcagtgg

SEQ ID NO: 681841 - DNA, 75 bp, Homo sapiens
gcagacacagaaggccgacaccctgcacctggcgtggagattgatcctgcgagagaagggggttcatcatggcgg

SEQ ID NO: 681842 - DNA, 100 bp, Homo sapiens
acatctgccagcaccttgatcttgaacttctcagcctccagaacggtggagatgttacagccaaaaatatctggttggcagaaagtgttctggatatcct

SEQ ID NO: 681843 - DNA, 100 bp, Homo sapiens
catggaacagggactcactgggggtgatttgatgaaggctgctgcaggagagttcgcagatgatccctgctcttctgtgaagcgaggcaacatggttcgg

SEQ ID NO: 681844 - DNA, 75 bp, Homo sapiens
atgaaaagaatgaacactgtccttcaaaacgagtagagttggctttgtgggacacagctgggcaggaagattatg

SEQ ID NO: 681845 - DNA, 77 bp, Homo sapiens
ccgagagagcctgcggaacctgcgcggctactacaaccagagcgaggccgacccccccaagacacacgtgacccacc

SEQ ID NO: 681846 - DNA, 96 bp, Homo sapiens
caactccctccggaggcagcacctcaggaaagttttaacttctagtcatggcgaatgatcgcaggagagcacagactggaccctgctacgatctct

SEQ ID NO: 681847 - DNA, 75 bp, Homo sapiens
atccaagagaatccctcaacatgctgcattttgaaagcgaagcagaagccgtagaatcagcggcgagcctgttga

SEQ ID NO: 681848 - DNA, 75 bp, Homo sapiens
gtgatgtcttccagactcggtgctgtacccgccgaagcatgagtgggaaaagcatgggacctgcgccgcccaggt

SEQ ID NO: 681849 - DNA, 82 bp, Homo sapiens
caaccaagggcctccgtctggatttccaaggaagaatttcctctgaagcaccgtccctgaagaggaaggagaaggaatatga

SEQ ID NO: 681850 - DNA, 82 bp, Homo sapiens
ctcggcggcggcggagcgggcggcagagcagggcggcggcgactcggttttaaaatcaaagatgggaaaatcggagaaaatt

SEQ ID NO: 681851 - DNA, 83 bp, Homo sapiens
gctgctgctcgggctgctcttggaggcctggcgcaagcgctggtttgtcctccggcgaggccgcatgagcggcaaccccgatg

SEQ ID NO: 681852 - DNA, 100 bp, Homo sapiens
agcccttagcgtggactgggctggccccggaagcccccacgggctctacctgaccctgcagtgaaacaatcatgtttcttcatgaaatatttcatcaagg

SEQ ID NO: 681853 - DNA, 90 bp, Homo sapiens
gtcaacggcttcatcagcaccttgggtttccgttactatggcaatgacggcagggactacaacaacctttcctatgagcaaccatacccg

SEQ ID NO: 681854 - DNA, 73 bp, Homo sapiens
ttgactccaattcagaggttcaggcctcattgctacgatttcagagtaccctggtaatagctgagcatgcaaa

SEQ ID NO: 681855 - DNA, 50 bp, Homo sapiens
ccggccaccagcaattgtccggatctcatagatcagaacatactggagcc

SEQ ID NO: 681856 - DNA, 99 bp, Homo sapiens
agtcgcaggaaattgcccgcaccgagctggagggcgctgtcgggcttgctgccccccgacaccgctatcctgacagaactgtaccgctctctttttggc

SEQ ID NO: 681857 - DNA, 98 bp, Homo sapiens
gaacatccccgccgggctgcagtccatgaaccaggcgttgcagaggcgcttcgccaagggggtgcagtacaacaggcgaccattgacgaggtggagac

SEQ ID NO: 681858 - DNA, 126 bp, Homo sapiens
ggattatactggaaagtatgcaccagctgtcatcgtttgtcagaagaaagcagctggctcagaaaacagacgccctgctggcggacttggagtctaccacctcccacatctccaaacggcctgtgt

SEQ ID NO: 681859 - DNA, 75 bp, Homo sapiens
gcatacttggaatgaatccttctagagacgtccacggggacggcaaaacagaacagaaaggcggagataaaaaga

SEQ ID NO: 681860 - DNA, 83 bp, Homo sapiens
gggagatcccaggcggtgacagagtggagccatggctagaggacagagcgggatgccaccagcttgtccaaagggaagttcca

SEQ ID NO: 681861 - DNA, 100 bp, Homo sapiens
tggggccgcaacccgcgccgggcgagctcagaggatgaaacaggaaactgagtcataaaacactactacaaacaagcccaaggattttatcccagatttt

SEQ ID NO: 681862 - DNA, 100 bp, Homo sapiens
tcgtctctgccaagaaccaccagtctagcaaaaactggagttcaataaggacaggcccaacttgtcactaactcaccttacagtgcctggcgcaaagtag

SEQ ID NO: 681863 - DNA, 82 bp, Homo sapiens
ctcatcagcgagggggcagacgtcaacgtcaaggacttcgcaggcctcgggccagcggccaggagctgcctcccccagcccc

SEQ ID NO: 681864 - DNA, 90 bp, Homo sapiens
gtcctcagggctgttgactccaaagctgacaagcagacaaagccctggacttccctgggttcctggacatgatggcacctcgactcaggc

SEQ ID NO: 681865 - DNA, 83 bp, Homo sapiens
agaattgcaattccaaaatgtgtaagacgggatattctcttctgtgctgtcaagggtgttggagagcacaatggctgaacaag

SEQ ID NO: 681866 - DNA, 75 bp, Homo sapiens
cgcagcaacgtgcggtgggaccacgagagcgaggccccgtgtgggccgcggcccggccctcaccatggagtccat

SEQ ID NO: 681867 - DNA, 98 bp, Homo sapiens
acaccaccaccaagcgctacaacctgcaaatctatcattttcagctgaactctcatctctcaacactggcaaatattcataagatctaccacaccctt

SEQ ID NO: 681868 - DNA, 95 bp, Homo sapiens
gcatttgccatcttcaagtttgttcagattccctagccattttgtccatcctacctgctcttcttattccccatcatgtgcatttcttcacttgc

SEQ ID NO: 681869 - DNA, 100 bp, Homo sapiens
gatccgggctctagacagcgacatgcagaccctggtctatgagaactacaacaagttcatctcagccacagttctcctgtgcctcctgttggctctcttt

SEQ ID NO: 681870 - DNA, 101 bp, Homo sapiens
tgccgcttcagttctcccggtgtggccacgagtcggtgccatcagacaagatcagttgatcagaacagaaagctagctcggaaaatcctacaagagaaagt

SEQ ID NO: 681871 - DNA, 75 bp, Homo sapiens
cacgccagcagtggggcagcacctgcacctacggcggtgggctgcaaggcccttgtgttccccaagcaattcaag

SEQ ID NO: 681872 - DNA, 75 bp, Homo sapiens
ctgggatgtgccttagaggattatggcctttctgagaaaagtctacagcattctttctctgcaggttctcttaac

SEQ ID NO: 681873 - DNA, 100 bp, Homo sapiens
cagagaaagcgactcttttcctcggcacactggataccattttcctcttctcctatgctgtgtataacattcaggcttatccaacaacagtggtattcaa

SEQ ID NO: 681874 - DNA, 82 bp, Homo sapiens
tttgcgacatcccagagagcttccagattttcggctttgtgagaaaccttaccatcaaacacgatggccagcaacgttacca

SEQ ID NO: 681875 - DNA, 50 bp, Homo sapiens
cggaggagtctcagagctgtcagaaagcattatctaaaaatgaagtgtta

SEQ ID NO: 681876 - DNA, 100 bp, Homo sapiens
ggaagacattgctgcccgcctcaacatcccagtcagccaggtgaaccccaggtatattgagatcttcagaagtagcaggagtgaaatcaaaggattttat

SEQ ID NO: 681877 - DNA, 98 bp, Homo sapiens
tccggatcagacactggaagtgtagaacgtcattcagaggaggaagagttcatcgattggtggagcaaattctttgcctccataggggagagggaaaa

SEQ ID NO: 681878 - DNA, 86 bp, Homo sapiens
cgcagagacttctactggctgcgctcctttctggccggagttcaaggagcagggacaagttacaggaatgttctccaagcagcaat

SEQ ID NO: 681879 - DNA, 100 bp, Homo sapiens
aaactgcggaagctggaggagaaacaagcgcgaaaggcccagcgtgaggcattggaatggatacttgtgtcattcctttgaggcacggtgggctttcctt

SEQ ID NO: 681880 - DNA, 75 bp, Homo sapiens
ggccctcgatgtgctctgcgtgttgctggcaatggctgccatccggaagaaactggtgattgttggtgatggagc

SEQ ID NO: 681881 - DNA, 51 bp, Homo sapiens
atttgatggtaatccactcttaagaactattagtgaagaggaagaggagga

SEQ ID NO: 681882 - DNA, 75 bp, Homo sapiens
acttcgaggcactcaagtcctggctcagcaagactctcgagcccataatttctctgcaaagaatgtccaaaaatt

SEQ ID NO: 681883 - DNA, 100 bp, Homo sapiens
ttcacctggacgtgccagcggcatgacaaccctctctgcagaactttccagtcgactctcaacccagggccttgctgccgccatgactgaggaatcagag

SEQ ID NO: 681884 - DNA, 100 bp, Homo sapiens
gcctttgttgctgctgcacattaggttgcagtatgtggccagttatttgcctcagtaaaagagcaaatcgaagggagagtggttgagatttccagactcc

SEQ ID NO: 681885 - DNA, 100 bp, Homo sapiens
tcggcgcccttctcccggccgagcctagctgcggctggacacggagcgcccgagatgatggtgctggacaaggaggacgagcacagactgtgacttctga

SEQ ID NO: 681886 - DNA, 100 bp, Homo sapiens
agacggagtcctgttccaccttcagagcgtcacggcgtacgccctcatggggaaaatctccccggtgactttcagatataaacgaatgcttggtaaataa

SEQ ID NO: 681887 - DNA, 100 bp, Homo sapiens
ccagaagcctgcatttctgcattctgcttaattccctttccttagtttcaccagtgatcattaaagaatgggcagcttacaaaggaaagtctcctcaaac

SEQ ID NO: 681888 - DNA, 88 bp, Homo sapiens
gattttgatgtggatgatgccaaagttttattaggtggagccgccaccaaaatgcagattttcgtgaaaacccttacggggaagacca

SEQ ID NO: 681889 - DNA, 100 bp, Homo sapiens
aaaaaagaaaaagaaactaaaaaatggcagctctcagaatgggaagaatgagagaagtcatatgcccggcacattctggacatggcaagacatgtgccac

SEQ ID NO: 681890 - DNA, 96 bp, Homo sapiens
ctgggctgttgttgcggttgttttccttctctccgtgcaacgctggtggatccataaagaacccagccaacccgcagagggaggggaggggctgag

SEQ ID NO: 681891 - DNA, 73 bp, Homo sapiens
tgacagccctgtgtgacaccaagataagtaacaaaccatactcaggaggtctttgtctccaagaaacagcccg

SEQ ID NO: 681892 - DNA, 85 bp, Homo sapiens
gcggcgccagccactcggagctaatccacaatctccgcaactactgttttccaaagtgaagttgcagtcactctgccgaggcccg

SEQ ID NO: 681893 - DNA, 75 bp, Homo sapiens
aacccggattcagtggcatcggccaaccagatctcactcgtgggatcatggcccaagttgcaatgtccaccctcc

SEQ ID NO: 681894 - DNA, 98 bp, Homo sapiens
gtaggctgcgttgaggatctttgctcttccatccgcctttgatcgtcttcctcttcagccatccaggtggtttgtgatgaaaatggttccaagggcta

SEQ ID NO: 681895 - DNA, 100 bp, Homo sapiens
gggctgatcttcgccaaactgtggagcctcttctgtaaccaagtaacagatcaactcctagcaatcatgatcggatacagcgtctgaggcaagaatttca

SEQ ID NO: 681896 - DNA, 75 bp, Homo sapiens
gcaaaggcaggggaggaagccacctcgagatctgttacctaaagcaataaaaaatggccagaggatcagtgtccg

SEQ ID NO: 681897 - DNA, 50 bp, Homo sapiens
agagaaagtctccaagaaggaggaaacaagcctccaggtctgcttccccg

SEQ ID NO: 681898 - DNA, 100 bp, Homo sapiens
taatgagaaatgaagaagctagtaagcagctggaggttttttgcatgtctgacacccatgactccacctggaccttatggctccacccagaagcaattca

SEQ ID NO: 681899 - DNA, 100 bp, Homo sapiens
gtggttaaaacaagcaagagctccagcaagcatagaggagcagtgcatgctttgggtgtcatggagaaactccagctgggcccagagattctgcagcggg

SEQ ID NO: 681900 - DNA, 74 bp, Homo sapiens
gaaacagcttgatcgtctgggcctgtgtttcagctgggatagggttaccttccgaacaagaatctatcactgta

SEQ ID NO: 681901 - DNA, 82 bp, Homo sapiens
agattaacaattattgtctcggatccatctcactgcaatgttttgctgctggaagtgaacaagcagtgggaccagcatttcc

SEQ ID NO: 681902 - DNA, 100 bp, Homo sapiens
cggccatcgggagtgtccggttcccgtggcggccggacagcaaggacatttccaatctcctgaatatttacgcgttgctgaatctcctgtggacaaacca

SEQ ID NO: 681903 - DNA, 96 bp, Homo sapiens
ccaggaccctctagatcgagcagatttcaatgctgttgagtatatcaataccctgttcccaaccgagcaaatgacacaattggtactgcctggcat

SEQ ID NO: 681904 - DNA, 98 bp, Homo sapiens
cggccgcgaggccacggagagctcgccttggagagcccaggagcaggggagacatgaggaagtcatgctggccgaggaggacaggaatgcagaggaga

SEQ ID NO: 681905 - DNA, 82 bp, Homo sapiens
gtgtgtggccgcagcaagaagcagaacatccagtcatggataaaaatgagctggttcagaaggccaaactggccgagcaggc

SEQ ID NO: 681906 - DNA, 75 bp, Homo sapiens
tacgtcgccatcttggatccgcgggacaagaaaattcatgcggttaaacccatccagagtaatggctgcggcctt

SEQ ID NO: 681907 - DNA, 96 bp, Homo sapiens
cacctgtcttctgaagatgggggtgaccggctctccacacacgagctgacctctctgctcgagaaggaggcgctccaggcccctgcctgtcacgag

SEQ ID NO: 681908 - DNA, 75 bp, Homo sapiens
ctttgtggtcttcatttgtgaatacatagctatatgttctcctttcagccaagacctttcaccagtgcaggggat

SEQ ID NO: 681909 - DNA, 100 bp, Homo sapiens
ggctcctcggagctgcctccggtctccggtactggagccggcggctgcggccggcagccggcagctttgcagcgggttctgatctacaatggccaactgg

SEQ ID NO: 681910 - DNA, 100 bp, Homo sapiens
ggccgtcttcccggcgagtccgcgacggtcgccgcccacggcgagatcttacagactctttcagcacctacgaaaaatttagaacagcaggtgaatcaca

SEQ ID NO: 681911 - DNA, 97 bp, Homo sapiens
tgagctagagggtgaagctggcggagcaggaggatgggcgccaagaagtatgatgcgtttttggcctcagagtctctgatcaagcagattccacgaa

SEQ ID NO: 681912 - DNA, 74 bp, Homo sapiens
agggtcctttatatagaagggagagtaggatttgttgagaaagagataagaaaagctaacattccgattatgga

SEQ ID NO: 681913 - DNA, 98 bp, Homo sapiens
tcctggctgtgctggccttagtgccccaggatcagggaggactgtggttcccagaagtgcggcaccactgccccagcacacccatcatcctggtgggc

SEQ ID NO: 681914 - DNA, 100 bp, Homo sapiens
ccgcctgcgcacccggcagcaccatgacaggatgcacttgcagccttggaaactccaggacgtcccagccaacagaaaaggaaaccgagtacgccactct

SEQ ID NO: 681915 - DNA, 97 bp, Homo sapiens
caactggattatactgtactgcccatgaaaaaggatgttgaccggacagacactgtcacatgaacccaaagtccttcaagagggtctccttcagttg

SEQ ID NO: 681916 - DNA, 75 bp, Homo sapiens
cctggggccggcgatgtgccaccgaggctgaggatgatggtagattgccagggctgggttacgacccctacaacc

SEQ ID NO: 681917 - DNA, 82 bp, Homo sapiens
tggaaggatcaacagtcaattgtgtactagcattccaagctggaggagagcaggagtgttcagaagcaaatgaagatcctgc

SEQ ID NO: 681918 - DNA, 98 bp, Homo sapiens
ctcgccaccctctgtgatgggccctgtccctgtctcccagagcctgagccaccaaagcacaaggcagaaaggagtgggaaccagcggggaaactgagg

SEQ ID NO: 681919 - DNA, 100 bp, Homo sapiens
cacaagctgactgacgtcatccttgaagccgaccagaatgatagccagtccctggagctggtgcacaggttccaggtacctactgtcaacaacgggaagt

SEQ ID NO: 681920 - DNA, 100 bp, Homo sapiens
ctgtggagtttgaggagatggacattttggaccagggagccctacagcgtctcttcaaaaaggacagtcattttgtttactcattcagccctgttgcagg

SEQ ID NO: 681921 - DNA, 98 bp, Homo sapiens
tctgccggtgccagacacaaagcctccaaccacgtcaacagaaggaggtgcagcctcccccacgtcaccaagactttccttatcccagttgattgtgc

SEQ ID NO: 681922 - DNA, 88 bp, Homo sapiens
ttccccgagttcttcacagaaggaatcatattctaagaactcagccactcaggtatccaccatggtgctgggtcctgaacagaagatg

SEQ ID NO: 681923 - DNA, 76 bp, Homo sapiens
ggctcatccaagatctcggagaggcgagacatggttgctgattttcagaacagacatatggcatccaggagaaaga

SEQ ID NO: 681924 - DNA, 82 bp, Homo sapiens
tatgcccataaaatgagtcctaatccagaaagacgagaatccaggacttgaatcgtatcttcccactttctgaggactactc

SEQ ID NO: 681925 - DNA, 75 bp, Homo sapiens
aagaatccagtgaaaagttcaggcaggtggaaaagagtactgaggctgcaataggatctgtggctttggacacag

SEQ ID NO: 681926 - DNA, 50 bp, Homo sapiens
aagctggacacccgcccgccgactagacgcttgaagcaaagctgccatcc

SEQ ID NO: 681927 - DNA, 90 bp, Homo sapiens
cttccctatgtccaaaaacgtttttcctgataactggaaagttcctcaagatggagactttgactttgaaagaccacagcaagattcttt

SEQ ID NO: 681928 - DNA, 123 bp, Homo sapiens
gagcactgcaatgctgcctttagaacgaactatcacttacagagacatgtcttcattcatacagctacagatgcaaaagagcgacagcactgggttagcagacttcagatatgtacacagcat

SEQ ID NO: 681929 - DNA, 83 bp, Homo sapiens
ctgtcgtctttgcttcagccgcagtcgccactggctgcctgaggttttaaaatcaaagatgggaaaatcggagaaaattgccc

SEQ ID NO: 681930 - DNA, 74 bp, Homo sapiens
agaagtggagcgtgtcctgaaggagttccaccaggccgggaagcccatcgggctttatcctgtggataaacgca

SEQ ID NO: 681931 - DNA, 90 bp, Homo sapiens
ccgttttgaagattgttgagaaattggatcttacacttgaaatacagactgttggggaacaagagttattagaggaagtaacacaagggg

SEQ ID NO: 681932 - DNA, 51 bp, Homo sapiens
gggggccttgttgagtccgccaggattcctacaggaagcaagtagtaattg

SEQ ID NO: 681933 - DNA, 51 bp, Homo sapiens
cagcccttagggtcctgctcggccaaggaaactcaggttgaataattcatc

SEQ ID NO: 681934 - DNA, 98 bp, Homo sapiens
cgaatgcaacccgaagagagagtgagggagcttcaggccatggaggccttgcagaatggccagaccacggtagaggggagcatagagggccagtcggc

SEQ ID NO: 681935 - DNA, 75 bp, Homo sapiens
tcgatctaagatggcgactgtcgaaccggaaaatgtttataggaggccttagctgggacactacaaagaaagatc

SEQ ID NO: 681936 - DNA, 75 bp, Homo sapiens
tgcaatttgctgttggctggagtggttccttaaatgtcgaagaagggcagaagatcctgaaggagaaggctgtgc

SEQ ID NO: 681937 - DNA, 89 bp, Homo sapiens
gttccattaactttgcgctcagacgagtaacttcggcaaagggatggggagagtactacgacatttctgccaaaagtaactacaacttt

SEQ ID NO: 681938 - DNA, 100 bp, Homo sapiens
ggcggctgcgccccgctcgtcgaggagctgcgctcacctcaggggcgggcccccgcctgcgttcgcggcgccatttgatgaagaatttctggaaacaaaa

SEQ ID NO: 681939 - DNA, 98 bp, Homo sapiens
agatgttggacacaatatctatattctggcccatcagggaccattgcaatttagagatgtggccatagaattctctctggaggagtggcattgcctgg

SEQ ID NO: 681940 - DNA, 80 bp, Homo sapiens
cttggaatttgtggaggattttattcaggttcctaggaatctcgttggtggttatccaaatgccaacccagtccaggttt

SEQ ID NO: 681941 - DNA, 74 bp, Homo sapiens
acttcttctatgtcttccccctctatgcagccaaagaagatgcagatggacgatctattaatgagatgaagcgg

SEQ ID NO: 681942 - DNA, 100 bp, Homo sapiens
cctcggcctcggcggcagcggctgcggagaaggcgagcgaagcgctgtgcttcgccgtgagccgctcgctgctgctgacgtgcctggtgccggccgcgct

SEQ ID NO: 681943 - DNA, 82 bp, Homo sapiens
gggggaccgcggcccccagcagagcccgcctgcccggctagcatcactcgtaagagacgttatgtggcctcagtgtcccttc

SEQ ID NO: 681944 - DNA, 75 bp, Homo sapiens
ggaggagacagctgcctgcagagtgttttctggatatgccgcagaaggatccgtgccagaagcaagcctgtgaga

SEQ ID NO: 681945 - DNA, 99 bp, Homo sapiens
aataattattcagctcagttctcccttgaacatatgtcaccagaccaagctgacaagctgccacaactacaggacaaaatcaaagggacccttaggagg

SEQ ID NO: 681946 - DNA, 74 bp, Homo sapiens
ccagccgaacttcagggtttccaccgttcgttcaagctgagatctgtatctgtggacctgaatgttgatccctc

SEQ ID NO: 681947 - DNA, 75 bp, Homo sapiens
taggaaccaagaaaacttcttttgtcaactttacagatatctgtaaactgtgttcgaaatccgcaccactgatga

SEQ ID NO: 681948 - DNA, 80 bp, Homo sapiens
ccgacgtgtgctccgcccagggggtgcgaggataccccacacacagaatgttcagcttaacaaagaaatgacacttgcca

SEQ ID NO: 681949 - DNA, 74 bp, Homo sapiens
cgcggcacagcgaggcgccggcccagactccactccccagctgtgaaaggtggaaggaggcaaaaccggaagac

SEQ ID NO: 681950 - DNA, 89 bp, Homo sapiens
aaggttgaagttcaagagctcagaccctaaagtattgataaatggaagcgcttaccagcccagctttgccagccctaataagaagcatg

SEQ ID NO: 681951 - DNA, 100 bp, Homo sapiens
ggactttgttgtcccggtcccagaccaccctcctccaccgtcgcctcccactgcaaaaaggcctgggcactatgtcgtccgaggcccagagatgacccct

SEQ ID NO: 681952 - DNA, 83 bp, Homo sapiens
ccgcccggtgcggagctcgccatggcggccaccgacctggagcgcttctcggaaataatgcaaaaggtgtcccaaggctcctg

SEQ ID NO: 681953 - DNA, 51 bp, Homo sapiens
gtggggactaagagtggcaagctgaaaaagttctaggcctgattcttcact

SEQ ID NO: 681954 - DNA, 100 bp, Homo sapiens
atttatgcaacaggagtccttacgtgttatattcaggaatgtatcctgtcaggtataatgtcagtgaatggcaagaaagttcttcatatggatcgaaacc

SEQ ID NO: 681955 - DNA, 100 bp, Homo sapiens
aagaggccagatgcagatctgaagacctattttactgataagaaaacacatctttacacactaagaaatcatgaccagatctgaaatggctgaaaaaatg

SEQ ID NO: 681956 - DNA, 87 bp, Homo sapiens
gcgctccgcgctctggcgctacggtctggccgtcggctgcggcgccatcggtgatgagacaaaccatgcttctgccacatcaacaca

SEQ ID NO: 681957 - DNA, 73 bp, Homo sapiens
aggactgcgcccccgggagcgggcgcccagaggccaggtcagagcagcccaccatgggatggggagggggtgg

SEQ ID NO: 681958 - DNA, 82 bp, Homo sapiens
ggccttagttggccaagtactagtgaaaccatacatagacgagattgttcagattccattctgtggggaaattgactgtgag

SEQ ID NO: 681959 - DNA, 84 bp, Homo sapiens
aagaccacaataaaagagacctctacttagctcagcaattcttaccttgtgtctttcaggttgcagaaaagatggaaaaaagga

SEQ ID NO: 681960 - DNA, 83 bp, Homo sapiens
cgtctctaccgagcacaaactccacgaagccaacgcccaggtgttggagagcacaatggctgaacaagtccttcctcaggctt

SEQ ID NO: 681961 - DNA, 100 bp, Homo sapiens
gcgccgccaccgtctgaactaggatgtcccgacatgaagatttcctcctctgatgctcctcttcagcctttggtatcctctccttctctgcaagctgctg

SEQ ID NO: 681962 - DNA, 100 bp, Homo sapiens
tcggatggtttccggcggagtgcgtggaggaggtccagtgtaagcccagggacagccaggcagcattagtgccagcagtagttcccaagggctgtctcag

SEQ ID NO: 681963 - DNA, 75 bp, Homo sapiens
ctcctcctcagggctccagtcaggccgatccgctccgctcacgcgttggtcaaatcggaagcgattaagtgccag

SEQ ID NO: 681964 - DNA, 85 bp, Homo sapiens
tatttccaagatggtgacttctacgaaaaagccctggtggagctgaaggttgcaggtggcgacatgtctaagaatgtgagccagt

SEQ ID NO: 681965 - DNA, 100 bp, Homo sapiens
ttcgaaaaatgatcaactattgaccatataggacccactgatctcagcatgaagagacaattggcgactagctcaggatcctccagcagctcaaactcca

SEQ ID NO: 681966 - DNA, 90 bp, Homo sapiens
cgacggctccaacagggatgcgctgagcgatttcttcgaggtggagtcggagctgggacggtgaagaacgaggtggagaagctcccccga

SEQ ID NO: 681967 - DNA, 98 bp, Homo sapiens
aagaagggaactcgagatgttggtatgcagatggtattggctatgtggaagatggccgagagatttttgatgatgaccttgaagatgatgcccttgat

SEQ ID NO: 681968 - DNA, 98 bp, Homo sapiens
agagaccatatatgtcattgggcagggatcagagaaacagcacccaggactatcttccaaagagttctggatatcctaaagaaatcttctcatgctgt

SEQ ID NO: 681969 - DNA, 51 bp, Homo sapiens
gggcccaagaaaaagcacctggactgtacatgtcccagagcaagcacacgg

SEQ ID NO: 681970 - DNA, 101 bp, Homo sapiens
cgccctctctcggagttggcaggaagccaggttgcagggtgtccgcttcctcagaaccgggctgtgggtcggcccaaggggaagctgggcccggcctccgc

SEQ ID NO: 681971 - DNA, 74 bp, Homo sapiens
gacaacattgttcctggaacgccctctttttaaaaaaggaaagtggagaatgaggacatgaataaagaccagat

SEQ ID NO: 681972 - DNA, 100 bp, Homo sapiens
atggatttgcatcttgtaatgtgtttaacaaagccacgaataacctataatggaattaaggataacctagacgacataaagaggataattaaagccagag

SEQ ID NO: 681973 - DNA, 100 bp, Homo sapiens
ggtgtctggaggcctgtgtccagggctgatgtggagaatctcaacagtcagaatgaagctgagctccgacgccagtttgaggagcgacagcaggagacgg

SEQ ID NO: 681974 - DNA, 75 bp, Homo sapiens
gcgcagggcctgcagcgggagctggacggcgagcgcgagcggcgcgagaaaccaccccacgtcatgctgcagcgc

SEQ ID NO: 681975 - DNA, 101 bp, Homo sapiens
ctacacacttcgagctgaagcacctctccagcggggacctgctccgggacaacatgctgcggggcacaggatgattcaaagccgccttactcctacgcgca

SEQ ID NO: 681976 - DNA, 101 bp, Homo sapiens
atattcgcatgcctggggttacacctaaacagtcctgccattgactctaccagaggagattcttcaagcttagttgctgaacttcaagaaaagcttcagga

SEQ ID NO: 681977 - DNA, 98 bp, Homo sapiens
gcaagggctattcctgaccaagaagatctaaagagaacgtctctgaaatcaagtccggatgaagcagagcatcctggccagaacaagccaaggagcca

SEQ ID NO: 681978 - DNA, 90 bp, Homo sapiens
gcggcttcctggaggcggcggccgcgattgcgagtgactggtacaatccaagtggcccaaaggatagaccgagatgcaggtgaattgaga

SEQ ID NO: 681979 - DNA, 50 bp, Homo sapiens
tgaggctcagagatgggtggagtgtccacaggatgaaatgtccgagtcag

SEQ ID NO: 681980 - DNA, 100 bp, Homo sapiens
ggggaagtgattgttgatggtgatgttgttcatggattctataacccagctgttagcagaattgttgagggtggttctcttcccaaagtggaagccaaat

SEQ ID NO: 681981 - DNA, 75 bp, Homo sapiens
aaagagtggatccgacctttggcttcaggggagctctttgctcaggccccggtggatcagtttcctggcacagct

SEQ ID NO: 681982 - DNA, 100 bp, Homo sapiens
agcagatttgatgcctactgctttaaacgatctagtgaaaagccatttgatgtatgcggtcagagaagaagtggaggtcctcaaagagcaaatcaaagaa

SEQ ID NO: 681983 - DNA, 95 bp, Homo sapiens
caacttcaaagccacagctgttatgccagatggtcagtttaaagatatcagcctgtctgactacaaaggttgggtatctacagccattggttgct

SEQ ID NO: 681984 - DNA, 90 bp, Homo sapiens
cgggcggtgaggaagctccggaaatacatcgtcgccaggactcagcgggccgcagggaggcgttatggaccccgcagacgccaggagccc

SEQ ID NO: 681985 - DNA, 83 bp, Homo sapiens
ggctaacttcagcggtggcaccgggatcggttgccttgagcctgccttatgccagcctggaccatcttggaggcagtgtagga

SEQ ID NO: 681986 - DNA, 75 bp, Homo sapiens
ggtctttctcaacctcatcttctgggtatctgcccaaactggaacttatgctgtagacatttctttgtggtttat

SEQ ID NO: 681987 - DNA, 100 bp, Homo sapiens
tgtcaccccagatgtcctcatcatcccgtcagagctgaggtacttcgtgaagttatttacagagtatggaagacttgcgatggaagaaatctaccagaaa

SEQ ID NO: 681988 - DNA, 74 bp, Homo sapiens
gatttgttaaggattccaagtaactcttatttgggctctggtatcagttcctcttcagtattgcatggcatggt

SEQ ID NO: 681989 - DNA, 75 bp, Homo sapiens
tcttctacagccccagttatgtggacgagctgttaaaccagagaccatcatgcagacatcagagactgggtcgga

SEQ ID NO: 681990 - DNA, 140 bp, Homo sapiens
gtgctgctgttcttctgggtaaccaagaggaagttggaggtgccgacgggacctgaagtgcagacccctaagaggtggcaggccactgcccaatgctgaagtcactgtttaacgaaggtggagcctgcctttacctggta

SEQ ID NO: 681991 - DNA, 97 bp, Homo sapiens
tggagaagctctaagtacactcgtcttgaatagctgctgctgttcttgaagggtttttcagagtcggagaggaacaagctagctatgttgactggtg

SEQ ID NO: 681992 - DNA, 97 bp, Homo sapiens
gccgagatgtctcgctccgtggccttagctgtgctcgcgctactctctctttctggcctggaggctatccagcttttacatgtggcacccataaaag

SEQ ID NO: 681993 - DNA, 51 bp, Homo sapiens
ataatttggggttcaagattccaggtgtggtggccgagcctggagcctgtg

SEQ ID NO: 681994 - DNA, 50 bp, Homo sapiens
agttcacattcatccttcctcagcagctggagtacaatggtgcgatctcg

SEQ ID NO: 681995 - DNA, 100 bp, Homo sapiens
gcaggaagatgtcgagtttcaaaaggaggtggcgcaggttcgcaagcgcataacccagaaacgggctgtaaaggcagaaaaccacgtcgtgaaactaaaa

SEQ ID NO: 681996 - DNA, 80 bp, Homo sapiens
gacagatgtgatcattgagaccatgaagtccaacccagctgaataccactagaaacatacctgtaaccagagacagctga

SEQ ID NO: 681997 - DNA, 138 bp, Homo sapiens
aagccatcgcctggccccggctctctggaccttgtctcgctcgggagcggaaacagcggcagccagagttgccaaaacaaaggggatttggtgatggaggctttgttagaaggaatacaaaatcgagggcatggtggg

SEQ ID NO: 681998 - DNA, 100 bp, Homo sapiens
ggagaccctcgagctgggcctggagcctgacaaagatcattccactcagcctgggacgatggggaggaaaaaaatccagatctcccgcatcctggaccaa

SEQ ID NO: 681999 - DNA, 100 bp, Homo sapiens
gttgtcaaagttcttgttaaggaaggagccaatattaatgcacagtctcaggttcttgatagtccacaatgggtgaaccacagcaagtgagtgcacttcc

SEQ ID NO: 682000 - DNA, 100 bp, Homo sapiens
aggcggcggcggcgagcggttccttgtgggctaggtactccaaagattcaggtttactcacgtcatccagcagagaatggaaagtcaaatttcctgaatt

SEQ ID NO: 682001 - DNA, 80 bp, Homo sapiens
taaattcagcccctcttccagataccatttggctttcggctgtgcagggggattcccgaagtcttccgttttctgagaat

SEQ ID NO: 682002 - DNA, 100 bp, Homo sapiens
ctagagactgccggtgccttcatgggcaggactaggccgaaaactccccagttccgagactactgtgctatctgcttaagatgggagtggcctgggtctc

SEQ ID NO: 682003 - DNA, 98 bp, Homo sapiens
ctggaagttgactaaggggagaaggagtctcgttggaaaacggagatgcctgaaaacttcatgcctcctgttcccatcacatcaccaatcatgaaccc

SEQ ID NO: 682004 - DNA, 80 bp, Homo sapiens
cgatccagcctgcggagcctgtggggcaggcgggaagcctgcaatgaaggagaaggagaccctccactctatgtcaacgt

SEQ ID NO: 682005 - DNA, 100 bp, Homo sapiens
tactcggtgaaatcctgtcctgaagactgtaaggcattattggagaccatgtttggtgtaaaagtgattataactggggatgcatttgttcctggagaaa

SEQ ID NO: 682006 - DNA, 112 bp, Homo sapiens
tttgcctcatttgaggagtgggaacaggcttcggcgaacacaaaggtcgttgaggacttccacatggagattggcacaggaccagactcaagacacacaactcataacagtt

SEQ ID NO: 682007 - DNA, 50 bp, Homo sapiens
gttcgagatcagccagccgaccgaggtcagccatgtcatctgagcctccc

SEQ ID NO: 682008 - DNA, 90 bp, Homo sapiens
gtccaacaatgtgccgggttccgatttcagcatcggggcagacaccgccctgaacactatcaccgactctctgttggatgaacccaatcc

SEQ ID NO: 682009 - DNA, 88 bp, Homo sapiens
cgaagaagcatcgttaaagtctctcttcaccctgccgtcatgtctaagtcagaggatgatgatgctgaagctatccttgctgcagact

SEQ ID NO: 682010 - DNA, 82 bp, Homo sapiens
cacaagttccagcacctccatggccggccaccccagccctgggatcctgccagacttctgggagttcccgggcagacggcgt

SEQ ID NO: 682011 - DNA, 100 bp, Homo sapiens
tgggttaggcctgtgtgttgcttagccgaaagaggcatcgttttctctttagagatgaagcatctggtttttgttatctcaatgatgctgtcctgggaat

SEQ ID NO: 682012 - DNA, 98 bp, Homo sapiens
gagctcaccgcccagcccaaaccaggagattgcgagggagcgatgcggtgcagcgcggtttattttcttgaaaaggctccaggcttcggcttggaaaa

SEQ ID NO: 682013 - DNA, 83 bp, Homo sapiens
atagtgtcatcggttcggtaaagtttctgttctctgatagcctgggctggaagctcttctacgtcacaggctgcctgtttgtg

SEQ ID NO: 682014 - DNA, 97 bp, Homo sapiens
ctctgttggatcagaaggtcaagatgaggagctctatgctggtgtgtacatcgattttatgggcactgatgcagccatcttccgcacacttggaaag

SEQ ID NO: 682015 - DNA, 100 bp, Homo sapiens
gttttcttctgggctccaattatgaaatggatggcaagattattttatcataaaccccagtttgccattttggatgaatgcacaagtgcagttagtgtcg

SEQ ID NO: 682016 - DNA, 82 bp, Homo sapiens
tcggcttgtcctggctcttgccctcatcctggttctggaatcctcagttcaaggctgaccccgcactacatctacccaccag

SEQ ID NO: 682017 - DNA, 75 bp, Homo sapiens
tgccctcggaggctgcgtttgggaatagctggcagctaacaacctgagagaagattacaaatttcaccacacttt

SEQ ID NO: 682018 - DNA, 82 bp, Homo sapiens
ccaccatggacacactttgctccacgctcctgctgctgaccatcccttcatacaatgcagatcttcgtgaagactctgactg

SEQ ID NO: 682019 - DNA, 116 bp, Homo sapiens
ttgttttttcctgtatgaagcggttggcaccactgaagtgaccgaatgaggaaccctctggatattgatgcctcgggtgtggttggactgtcatttagtggacaccgaatccagag

SEQ ID NO: 682020 - DNA, 90 bp, Homo sapiens
cacaacttggttcaatgggtagcctcaccatgaaatcacagcttcagatcactggtttttcgttggaatatacgttgcacatttatggcg

SEQ ID NO: 682021 - DNA, 98 bp, Homo sapiens
gaggatccagaaaccgccccagcgatggaagaggatcaggagctggagaggttgcagagcctgaggcctgtgatcagatgtacgagagcttagcgcga

SEQ ID NO: 682022 - DNA, 100 bp, Homo sapiens
aagctgtcaagggctgccacttgtttggggcaggcaagaccttcaacaagcttgtgggaaagtttagccagtccatctttcacttgaatttaacacaaat

SEQ ID NO: 682023 - DNA, 75 bp, Homo sapiens
cgagagtgaacgattcaacccgggggagctcagtggccacagatgtctttaattccaaaaacctggccgttcagg

SEQ ID NO: 682024 - DNA, 98 bp, Homo sapiens
cctccatgcatccagttttgagtcatctgattccaggcctatctctggcacacgtcttagtccactagagctgaacaagaaactcctttacgagaaga

SEQ ID NO: 682025 - DNA, 96 bp, Homo sapiens
ccactcctccaagaaccaacccccaaattggctgggacaggcctccccatggccacccatggaccagtcggcattcacttcctcccttctgcggcc

SEQ ID NO: 682026 - DNA, 100 bp, Homo sapiens
ctggccctgtgccaacgccgcccgacaacatccaagtgcaggaaaacttcaatatctctcggctttaccgatttgttacaactcaagcaagggccagcag

SEQ ID NO: 682027 - DNA, 100 bp, Homo sapiens
tgcaattcataatggagctactgtactggctattggaaggaggagattctgaagataaggaggcacccaggcatgtggaatatgctcatagtggcgatgt

SEQ ID NO: 682028 - DNA, 88 bp, Homo sapiens
ctgtgtagttgttgaggagaagaagcctcaacttacccaggaggagctagaagcaaagcaagcatttgatgaatacagaaatatcagc

SEQ ID NO: 682029 - DNA, 100 bp, Homo sapiens
tcgacaagttcctgggccgcgccgaggtggacctgcgggatctgcaccgcgaccagggccgcaggaagacgcagtggcacaagaatggctcaactctcca

SEQ ID NO: 682030 - DNA, 83 bp, Homo sapiens
tccacacgacaggcctacactctattcaaacagagttcgaaccaacgtggcctcaaccagatttggaatgtcaaaaagcagag

SEQ ID NO: 682031 - DNA, 100 bp, Homo sapiens
gccgtggggtacagccggagccccagctgcagcagctgaagaccgcggtggaggagatccacaatgccgtaggcatgcttcgccgctgggatgacagcca

SEQ ID NO: 682032 - DNA, 50 bp, Homo sapiens
aacccagatgtgcaacaaagtgcgatgattttaggtgatgggcaagtcag

SEQ ID NO: 682033 - DNA, 75 bp, Homo sapiens
gggacaatatcctctgtggagaacacccccccatggaggcgaggctgtcagccagatgaaacagcaaaaatatcc

SEQ ID NO: 682034 - DNA, 100 bp, Homo sapiens
gacggtgcagcaccaggactccagcgacgagctggggctgcagaagaagctacgcacagaggtcattcagctggaggacacgctggcccaggtacgcaag

SEQ ID NO: 682035 - DNA, 75 bp, Homo sapiens
ccgtggaatcccgcggcccccagccagagccagcatgcagaacacagcctgagggaactggcatgatagatgaag

SEQ ID NO: 682036 - DNA, 101 bp, Homo sapiens
agatgtgaagtatggcctcgtcccggtcatctgggcgtgcgggtcccgggttttgatcgcgcgtttgtgtagtcatcttcttgtgagccctgggcttagga

SEQ ID NO: 682037 - DNA, 100 bp, Homo sapiens
ttttaccggccgggaacagacggggtctgaatgctccaagtgagccatcatttgagccccaagccccagctccataccttggacctccaccacccacaac

SEQ ID NO: 682038 - DNA, 100 bp, Homo sapiens
ctcattctattcatgttgctttttgatggccatggcataaggaactctatcccaggaatacagctttgcattaggtactaggttttgacaagcttgcatc

SEQ ID NO: 682039 - DNA, 100 bp, Homo sapiens
gaaccagccgactggagcaggcagcagcccaggtaactcagatgattcaccgtgagccagataaacgtttagaggcagaagattacttaaaacagcagcg

SEQ ID NO: 682040 - DNA, 100 bp, Homo sapiens
cagagctttcacgaaggcaccgacgtcatcatgctgaccaccaatcagatccgtaaggacatttcatatatatggatttcacagctacactcgatccacg

SEQ ID NO: 682041 - DNA, 120 bp, Homo sapiens
agcacgagcagatcctggtcctcgatccgcccacagacctcaaattcaaaggagatgcagaaactaccagaggccgttcagctaattgagaaggccagcatgatgtatctagaaaacggc

SEQ ID NO: 682042 - DNA, 100 bp, Homo sapiens
ctggcctgcgcgccgctgcccgcgccacagagttcgcagtatgtgcagtgcgtggccgggtgtttgcagctgatgctccgggtcaatgagtaccgctttg

SEQ ID NO: 682043 - DNA, 96 bp, Homo sapiens
gggtcagagtgccggaccccagcacacagaagccgagacggtgatctgcaactctttcaccatctgtaatgcggagatgcaggaagttggtgttgg

SEQ ID NO: 682044 - DNA, 100 bp, Homo sapiens
agagtgaggagccagacgacaagcacacactatggcgctgaaacggattaataagatctgttacctaaagcaataaaaaatggccagaggatcagtgtcc

SEQ ID NO: 682045 - DNA, 75 bp, Homo sapiens
gcgcgagcgagcgaggcctgggccttgcctgagaaaatgtgccagaggaacttcaagaaccattttacacagatc

SEQ ID NO: 682046 - DNA, 126 bp, Homo sapiens
tagcaatcgcatcatcggtgccaaggaccacgcatccatccagatgaacgtggccgagcctcctgcccgaaggccacctgaacctaacggctccctgcaacgctgcctgcagctgccagccagaac

SEQ ID NO: 682047 - DNA, 100 bp, Homo sapiens
tttgttggatgtttggccggctatggagcttaccgtgtctccaatgacaaacgagatgtaaaagtgtcactgtattctggattttggactggctcggcac

SEQ ID NO: 682048 - DNA, 87 bp, Homo sapiens
ctgtcaccccgactcaacgtgagacgcaccgcccggactcaccatgatcatggattcctgatacctctcactcaaggggaccaaaag

SEQ ID NO: 682049 - DNA, 75 bp, Homo sapiens
tccactggttcctgggcaccgaaagctgcagacctattcacagacttggaaaatgcatttcaggggaagattgat

SEQ ID NO: 682050 - DNA, 100 bp, Homo sapiens
ctagtcagtgacgcggcgccggccagaaatccgaccggaccgggctcgggggagcgtgagttgcaggagccaaaaacctgtatatcatctccgtgaaggg

SEQ ID NO: 682051 - DNA, 100 bp, Homo sapiens
gaagactgttgtgtgctccccgcagaaggggctaccatgatcctttcctcctacacgaagatcgattgagaagttattagaatgggaaaacaataggtta

SEQ ID NO: 682052 - DNA, 100 bp, Homo sapiens
ctgtacttctatatctacaagggggtccgcaaggacaatacatggcttgatatacaacgccctgaagctcttcatggagatgaaccaaaagctatttgat

SEQ ID NO: 682053 - DNA, 100 bp, Homo sapiens
agaacccagcagcttgccagcatcgttgcagccgctacatctgttacttttgttggtgttatgggaatgagatcctactactatggaaaattcatgcctg

SEQ ID NO: 682054 - DNA, 100 bp, Homo sapiens
cggccctggaggccggcagctggcgctggggatccctgctcttcgctctcttcctggctgcgtccctaggagttcatgatcaagtgttgcccacaccaaa

SEQ ID NO: 682055 - DNA, 75 bp, Homo sapiens
ctgttcaccagcactgtctccaccctagagatgggctcctttaagccaggaggccgagtgatcctggccacggag

SEQ ID NO: 682056 - DNA, 50 bp, Homo sapiens
gtttctaggaaaggccggacaccaggtcaaaatgcagatcttcgtgaaaa

SEQ ID NO: 682057 - DNA, 76 bp, Homo sapiens
ccccaacctccttctcagagcggctctgcctgcaaaataacatagggcctgattacattccaacagaggaagaaag

SEQ ID NO: 682058 - DNA, 98 bp, Homo sapiens
atcgcttgtcctgagctggttgccggggcaggggcggaggcggaggcagaggtggaggcgctttgaaagatgaggataggaattcactcaggctccgt

SEQ ID NO: 682059 - DNA, 82 bp, Homo sapiens
ctccgaaccccttcatgcccaaatcccggaaactccagcgtgtctccagccgtggtctggccctcggcgatgtccccaaccg

SEQ ID NO: 682060 - DNA, 100 bp, Homo sapiens
ctgtgcttgggacacacaaattaaagaccatcacggggaattctgctgctgattggaaaatgccttttatgaacatgcacagacttattactacactgag

SEQ ID NO: 682061 - DNA, 83 bp, Homo sapiens
cccagccccagcctcggctttcttgtcagcaccagggggcacagaacaccgtctgtgacttaagagattaaaattaatttggt

SEQ ID NO: 682062 - DNA, 100 bp, Homo sapiens
tttttttctttttcttttttcttaccagcctccccccaatgagcctcctgacaaggtgatccgggcgggccccgcaggaattttatcccctcaccggcct

SEQ ID NO: 682063 - DNA, 96 bp, Homo sapiens
acggcctccggaacccagagactgcatcagagccactgtctgaggtcattcctgtcccaatcagctgctctactactgatgacattaaagatgcct

SEQ ID NO: 682064 - DNA, 90 bp, Homo sapiens
gcgtatgtggatggcaaatgctgtaaggaatgcaaattcccacagaacaacgagaagcttcaggagagcccgtgcatcttcgcattgacg

SEQ ID NO: 682065 - DNA, 83 bp, Homo sapiens
cagcagcccccggcccgcgctgcccgcactcctggtcctgctcggggctctgttcccaggacccttcaaagttgtacaagaaa

SEQ ID NO: 682066 - DNA, 75 bp, Homo sapiens
ttcaaagagaaaaggcaacatcctgtcacaggccatgctctggcaaaaacatttgcttgtaaatgcatcacgaag

SEQ ID NO: 682067 - DNA, 75 bp, Homo sapiens
gaagagaacagagagactctgaagttctacctgcggatcatactgggggccaatacaatgcagatcttcgtgaag

SEQ ID NO: 682068 - DNA, 75 bp, Homo sapiens
gatcggcaggcgagattgcctgacccaggcctgctcggccctcacagggcttgcttccggcgtcatggctcaaag

SEQ ID NO: 682069 - DNA, 97 bp, Homo sapiens
gccgcccggggcgaggcagggccagcagcaggcgggagctgagcgggctttggacaccatgaactttgatgtgattaagggaaagccaatccgcatc

SEQ ID NO: 682070 - DNA, 100 bp, Homo sapiens
ctggggggcagcatgtaaataccacggacagtgctgtccggatagttcatcttccaacagcatgcaggagaaagtgaagactaatggaaagttggtgaag

SEQ ID NO: 682071 - DNA, 101 bp, Homo sapiens
tgcggaggaccaggcgcggcgcggctgcggctgaggaaacaagctcacatcttcctgtgggaaaccttctagcaacaggatgagtctgcagtggactgcag

SEQ ID NO: 682072 - DNA, 75 bp, Homo sapiens
ctttactctggggtcccggctgccctgtggcctcgctcctcggaggtgtggcttcctgttgtggtgcatggcccc

SEQ ID NO: 682073 - DNA, 75 bp, Homo sapiens
ggcggcgactctgggcagcggggagcgctggacggaaggaattgaatgatctggcacgggaccctccagcacagt

SEQ ID NO: 682074 - DNA, 75 bp, Homo sapiens
gacctacctgcggcgtcggcagctgctgctccgaggaaattccctgagttgtttaattggtttaaaaactttctg

SEQ ID NO: 682075 - DNA, 87 bp, Homo sapiens
gcgatggagacaccctggacagtgatgagttctgcatccttgatgctcccggcctgggcatcccggaaagaccacagcaagattctt

SEQ ID NO: 682076 - DNA, 80 bp, Homo sapiens
cattggtctgcaggacatcactttagatgatggacctcttcaacgacctgattgcttgtgcgttccttgtgggagccgtg

SEQ ID NO: 682077 - DNA, 100 bp, Homo sapiens
gcggcggcaggtggtccgcggcttctcggagcttgcccatctgcccctaggacagagtaacagctgtggaagtgtgctccctccctcactggcagccatg

SEQ ID NO: 682078 - DNA, 75 bp, Homo sapiens
cacctcctcgccagcagccgtccggagccagccaacgagcgacagggtctcactttgtcacccatgctggagtgt

SEQ ID NO: 682079 - DNA, 75 bp, Homo sapiens
tttgaagaatcagattctggtgctactaagagtccactccacttagctaaacccttcgctgaagcagcagctgtt

SEQ ID NO: 682080 - DNA, 75 bp, Homo sapiens
ggcacagagagggcctgggagcttgctgcagcttcagccgcggcgagtcctttgcacatgttggcaacacacgca

SEQ ID NO: 682081 - DNA, 74 bp, Homo sapiens
ttctctaagagatgcctgcagcctgccatgggacgtggggtccaccggtacagacaccattcgcttttcaccca

SEQ ID NO: 682082 - DNA, 82 bp, Homo sapiens
tttttgaaccaaattatgctgcaaatctttgcccgaagtttttacatacaaattctactagtcacacctggccattcagtgc

SEQ ID NO: 682083 - DNA, 101 bp, Homo sapiens
gttgaagaagtgaagaaattattggtacctgcaattctctaaccatggcacaggtagagaaacgtggaggtttgctccggaaatcttcagcctccaaaaaa

SEQ ID NO: 682084 - DNA, 87 bp, Homo sapiens
aggattctgcctggccctgggaagagaagcctagatatctgagtaccatcctcgaggactgtccacgagggcctgaggaatcaggag

SEQ ID NO: 682085 - DNA, 74 bp, Homo sapiens
atcaatgacgtgtttgaaggaagacgagcttttcacctctggttcctacatctggattgtagccataagtggac

SEQ ID NO: 682086 - DNA, 82 bp, Homo sapiens
cagaagaagagcagaaaatagcagccaggaaccaagaaaacttgatcgagggcacccagaaactgctcaacaaagacctggc

SEQ ID NO: 682087 - DNA, 100 bp, Homo sapiens
aatgcaggaagaccgtgatgggagctgcagcacagtcgggggtgtaggttatggggatggaacatcgacatcggaagaaagacaccccggtgcaggccag

SEQ ID NO: 682088 - DNA, 100 bp, Homo sapiens
ccatgatgtcacccaatggatccattcctcccattcatgtgcctccaggttatatctcacagaatacctcctctgaaaaatggcagaagcagttttccat

SEQ ID NO: 682089 - DNA, 95 bp, Homo sapiens
tattgccgctgttactgatatacctttaggtatcagaacaaggtttaatagaaatccttaaaaaagtaagccaacaaacagaaaagacaacaaca

SEQ ID NO: 682090 - DNA, 100 bp, Homo sapiens
ccaggatttcctggaagcagagaaatggtcactcctggaagcaaggcggctctagctaatttatgtattggagatgtaatcacagccattgatggggaaa

SEQ ID NO: 682091 - DNA, 100 bp, Homo sapiens
gccagcttggcgcgcaccgccgcctccgccaccgccgacagcgcgcatcctccgtgtccccgctccgccgcccgagcagagggagcccacagctgtggga

SEQ ID NO: 682092 - DNA, 88 bp, Homo sapiens
cttcccaatcccactgatgaggatcagcccatgcttcttccagaccagctggtcttgcttctggagcatctcttggagcagaagactc

SEQ ID NO: 682093 - DNA, 100 bp, Homo sapiens
cgccgcccgggtgtccccgcggcgcaggaggcggtggagcgcagagcgggcgagcgcgattgaggaagacacatggcagaaatactacttggaaggagtc

SEQ ID NO: 682094 - DNA, 100 bp, Homo sapiens
gctgtgtgctggagggcactaccagatgggtgcttcaccgatatagacacattttgggattgtggcagccagatatcgggccatacggaggactgctgaa

SEQ ID NO: 682095 - DNA, 101 bp, Homo sapiens
gacagccggcggcggagcggccggtccacggaggaggttcgagaacttgtcttggacaattgcaaatcaaatgatggaaaaattgagggcttaacagctga

SEQ ID NO: 682096 - DNA, 101 bp, Homo sapiens
ggctcccaggacctccactaatcaccagaacaaaatgtgcaggtcagcttttgccaactgttttcaaatcacatgcatgggggatcttacacacactcctt

SEQ ID NO: 682097 - DNA, 149 bp, Homo sapiens
tttacaactgtgtaactgtcttcatctttacagaggaatagtctacaaaggaagacttgtaacctggagaagaggtttcacatgcttacccaggaatgctccttgaaaagataatctcctcagacataagcctggccacagaaaagtct

SEQ ID NO: 682098 - DNA, 100 bp, Homo sapiens
catggaattacaatgggtggggatgcaaagccggaatacgagcagtaatcgctacgcctgacaaacctgctgctgtgcacatctgtactcttcaatcaac

SEQ ID NO: 682099 - DNA, 75 bp, Homo sapiens
aaagcagcgtgcgttcagccctggggcggacctacgtgggcgccatgcccgggaagatcatccagtgtttgaaga

SEQ ID NO: 682100 - DNA, 100 bp, Homo sapiens
ctgagatggaggagtcgggagcacagctgctgctgtgctgaggactcatcacatttgcatgatttgaatcgtgagatgaactgggccatcctgttcagga

SEQ ID NO: 682101 - DNA, 100 bp, Homo sapiens
gccaggatctccttcgccaaggagccccacgtagagcagattcgaactcgagccatctctgctaaaggcatgactttagtcacccccctgcagttgcttc

SEQ ID NO: 682102 - DNA, 100 bp, Homo sapiens
tgggtagaagatctgatcggtcaccaggattctgacaaaagtactctccgaagaggaattgacataggaatattggtataatagcatatatgttgttaac

SEQ ID NO: 682103 - DNA, 90 bp, Homo sapiens
cacaagatcaagaactccatctgctccagtcagcccggtcaagcatgacagcaactcaaactcggcaaacttccaagacgtggaggacat

SEQ ID NO: 682104 - DNA, 88 bp, Homo sapiens
ccctgtccacggtgtgttgaaagtacacggagccccgaggacggatgtcgacgtacaagcgggccacgctggacgaggaggacctggt

SEQ ID NO: 682105 - DNA, 100 bp, Homo sapiens
tccagaagtgctttgaagtgggaatgtccaaagaatgtcttccaagatttaccagccaaccagaaccttcctcagtttatgctgggaacaatgcaattct

SEQ ID NO: 682106 - DNA, 83 bp, Homo sapiens
tcgggccggctgtcctggcgcggcaacaatttgggatgaatcccaaagacattatgctgaatgggagaaatcatttttgaaac

SEQ ID NO: 682107 - DNA, 100 bp, Homo sapiens
tgtttggagccaggtagagtgaagtcctacagagttatcaggttccagaccctgccttctcttctgaaagagcagtcattatggcgaaccttggctgctg

SEQ ID NO: 682108 - DNA, 74 bp, Homo sapiens
tcaggacctcagtgtgatacagccaattgtaaaagactgcaaagagcactattcctgatcagagaactccagtt

SEQ ID NO: 682109 - DNA, 75 bp, Homo sapiens
tgcccgcgtccgaggctcgcgggcggcgggcccgggtcagttcaccgggacctggaggcccagattgcgatcgtg

SEQ ID NO: 682110 - DNA, 75 bp, Homo sapiens
agaactcgtcatgctctttgtagcgtggtgcttctgttgctcacagatacctactggagcaggatttcccaggca

SEQ ID NO: 682111 - DNA, 109 bp, Homo sapiens
gccgagggacgccgaggcctcgggcgggggctggcccggggttccaggtaattttaaccaatcagatgacaacaaagattgatagaaatcaggccttgcttgttcctgc

SEQ ID NO: 682112 - DNA, 98 bp, Homo sapiens
tatcttggccagggaactcaaacagcagatgcaggtgttggagagcacaatggctgaacaagtccttcctcaggctttgtatttgagcaatatgcgga

SEQ ID NO: 682113 - DNA, 88 bp, Homo sapiens
aagcctcagtgatcttggtgccatagagagtctccgggtccctggaaagtagaacttcatggaggaacacggagtgacccaaaccgaa

SEQ ID NO: 682114 - DNA, 106 bp, Homo sapiens
cgcgccggcaagagcagcgggagcggcgcggggaagggggcggtgtccgcagagcagcctcctggaggaaagctatgtcatgaaggatcccttcacctccgacaag

SEQ ID NO: 682115 - DNA, 100 bp, Homo sapiens
ccgcagagcggagagcggagcccggagcccgccgccccaggacacattcagctaacgtattttagcaggtggagtgaggttgaagattcctgtgacagcg

SEQ ID NO: 682116 - DNA, 83 bp, Homo sapiens
actgcgaaaatgtgaggtgctgaagaaaaaagtagggcttctcaaggagccttatgccagcctggaccatcttggaggcagtg

SEQ ID NO: 682117 - DNA, 76 bp, Homo sapiens
caagagaaggcactcaagtttatggacctgacatgaaacgcagatctagtggcagagaggaagatgatgaggaact

SEQ ID NO: 682118 - DNA, 90 bp, Homo sapiens
ctccagttctgtcatcatcaccaccacacactgtaccatatttgaagatgttagtggttttggtgcctggcatcgaagatggtgtgttct

SEQ ID NO: 682119 - DNA, 90 bp, Homo sapiens
tgagggtccggcccatgaatcgcagttgcagaatgaagaagagtctggagaacctgaacaggctgcaggtgatgctcctccaccttacag

SEQ ID NO: 682120 - DNA, 101 bp, Homo sapiens
cggaattatttttgtggaaagaagatacacagcagttgtcttaaacagggaaatgttttgggggatcaggtgacctccgcaggcatgtccgcactcacact

SEQ ID NO: 682121 - DNA, 98 bp, Homo sapiens
tggtcagagatacttcttaaaggctggaaacaggattgttgaaatactccctgaacatctgaaagagtttcagtcccttgaaactttggaccttagca

SEQ ID NO: 682122 - DNA, 82 bp, Homo sapiens
gttgctgcaggcagagggagccacagacaatgcagatcttcgtgaagactctgactggtaagaccatcaccctcgaggttga

SEQ ID NO: 682123 - DNA, 108 bp, Homo sapiens
gagctgtgcagccgcgaggaggcgcgggaggtgttcgagaacgaccccgagacgcacggggtcactctggtgcccattgaggagttcagcccggagttcgtggagccc

SEQ ID NO: 682124 - DNA, 100 bp, Homo sapiens
tggtggtgaccaccgagaagagaggcatccgtgtcattctggaccttactcccaactaccggggtgagaactcgtggttctccactcaggttgacactgt

SEQ ID NO: 682125 - DNA, 83 bp, Homo sapiens
cccaacttctgcgggatcttcaaccacctcgagcggctgctggacgaaggttggggcaaacacaatggataatcctttgttga

SEQ ID NO: 682126 - DNA, 75 bp, Homo sapiens
ggaaatctccccacaaagagaagtctcaagatcccagataaacaggggtcacatgacgacagaagccaagagggc

SEQ ID NO: 682127 - DNA, 99 bp, Homo sapiens
ctgggcgcgggcgtgacggcgctcagccatcccctgctctacgtgaagctgctcatccaggaagcggggagaggtggtgagagatgacccctgttgagg

SEQ ID NO: 682128 - DNA, 100 bp, Homo sapiens
gccaggtgaagcccaacgatcagcacttcagtcggaaagttggaacctctgacaagaccaagtactaccttcaagatgattctttgggattgggacttaa

SEQ ID NO: 682129 - DNA, 75 bp, Homo sapiens
tgactccattgcatgtgggaccttcagccgtgaactgacctgcctagagctggaacgttacctccagagcgagcc

SEQ ID NO: 682130 - DNA, 100 bp, Homo sapiens
ggagcatctcctttcactgttgatggagaaaaaaattcccaagctgagatatctaggtgtatgtggaatttgatgatcttgaatgggataaacgagagtg

SEQ ID NO: 682131 - DNA, 105 bp, Homo sapiens
aaatcctgtgcaagctcagcttggagggtgatgtacttgtcttgggccttagacacaaatcaggaagaacgagacaagggtaaaacagtagaagtgggtcgtgcc

SEQ ID NO: 682132 - DNA, 83 bp, Homo sapiens
gccggtgacatgtctgtgagctgcggaggctgcggcccccagtgttctaagaacggaagcatctgggctggatggaatttagc

SEQ ID NO: 682133 - DNA, 101 bp, Homo sapiens
agaaagaaggatctagcgaaatatggctacagagagccctgctacgcgtcgggtccaggtggcagaacatcctagttaccttatcccatatcacacaactg

SEQ ID NO: 682134 - DNA, 76 bp, Homo sapiens
aggcttccatgcagcctgccttaccgagatctggttggagttggagggtgagagaaaatgaattctaatttacctg

SEQ ID NO: 682135 - DNA, 99 bp, Homo sapiens
agaactcagttgtgcgttgcggccagtcgccactgctgtgaatttggagaagtctgtagtgggcgtttgaagacaccagggaaaagagagatcccagtt

SEQ ID NO: 682136 - DNA, 100 bp, Homo sapiens
cagaaccccaggactgcgcccccgggagcgggcgcccagagtgccaccatggcaactgcaccatacaactactcttacatctttaaatatattattattg

SEQ ID NO: 682137 - DNA, 98 bp, Homo sapiens
ccacatcaagaagttcaccttcgtctgcatggctctgtcactcacgagctgcctggagttcagcctcagaatccaggagttcattgaactcatccggc

SEQ ID NO: 682138 - DNA, 98 bp, Homo sapiens
actgagcttcttcctatttgccatggagcagaaggagaaacgtgtgtggagtttaaagccatgttgattgcagtgggcatccacttgctcttgttgat

SEQ ID NO: 682139 - DNA, 100 bp, Homo sapiens
ttcactgttgcccttttcaggaacaagacttatctctcacctagcctaaggaattcctcctgatcagcagagactgatctttgctggcaagcagctggaa

SEQ ID NO: 682140 - DNA, 90 bp, Homo sapiens
ggcacacctggctatcggggtgaacgcatcaatcagctcatccgtcagctgaactagacccaggtagttctcactggaattggtgcagat

SEQ ID NO: 682141 - DNA, 82 bp, Homo sapiens
ggcggtcgagcagaacgtgtagccgcgtcccctccagtccgctccgggcaggtgagaagccctaccactgcaactgggacgg

SEQ ID NO: 682142 - DNA, 100 bp, Homo sapiens
gctcctcccgctgccgctgccgctccaggagacagtgtaatgtgtacaattctggccaacggcggaagctattgctgttcaagaccttctctcggaaagt

SEQ ID NO: 682143 - DNA, 100 bp, Homo sapiens
tccgggaccggccgaaaggcgaggaaccgattatttatgtaaacccgaagacaacatctacagtattgatttcacccgcttcaaaattcgagatttggag

SEQ ID NO: 682144 - DNA, 75 bp, Homo sapiens
attgtatctgtttttctcagaagagaattccacaagggtggcatggagaaatcgttgtcaaaacagagatgtccg

SEQ ID NO: 682145 - DNA, 75 bp, Homo sapiens
tggaagctgatcacctggagtgaagacctcacactgtccccagttgtcctcatccagggtgctattcgagtccag

SEQ ID NO: 682146 - DNA, 90 bp, Homo sapiens
gaaacatgtattggttattctaacagacatgagttcttatgctgaagcacttcgagagcacccagtcagcttgaagagtttcaaatggac

SEQ ID NO: 682147 - DNA, 75 bp, Homo sapiens
atcgcctcccgagaagaagttgaggcgctatggttcccttctggagaagagtcaccgggtttggttctgtttccc

SEQ ID NO: 682148 - DNA, 75 bp, Homo sapiens
ggcaacaagtgggaggcttacctggggctgctgcaggccgagtacaccgagggccccaggatgggtgagttcaac

SEQ ID NO: 682149 - DNA, 100 bp, Homo sapiens
ccattccggacctgcggggcaaagaaggccacttctactacaacatctctgagctcataaatctactgtgtggcaggtccgacacctgccgcagaacagg

SEQ ID NO: 682150 - DNA, 100 bp, Homo sapiens
ttgatgtggatgatgccaaagttttattaggaatctgtcttggaggacatcagaaggtgaattttccaagttcttggacaacctagctgttgaaaagctt

SEQ ID NO: 682151 - DNA, 100 bp, Homo sapiens
agaaaaggattgagaactttaagagtggtgtgattatggattggatatgtctacttctggatgcaaattttactgttgttgtaatgatgccagaagcaaa

SEQ ID NO: 682152 - DNA, 99 bp, Homo sapiens
ctccaagagctgtggcccgggggcctcttctggaccaggaaactctccacgttgcaatgaatgtgtatgagttatcatcagctgccggattaccttgtg

SEQ ID NO: 682153 - DNA, 75 bp, Homo sapiens
tagcaaaatgttctttactactaagcaccgttggtatcctcatggacggatggtactggggaagtatgactgtta

SEQ ID NO: 682154 - DNA, 75 bp, Homo sapiens
ccaggaggccaggggtgtcgccatggctatggagttactagtagagaaagcaatcagcagtgcttctagccctca

SEQ ID NO: 682155 - DNA, 97 bp, Homo sapiens
ttaagccttggaaatggaggaaaaagaagaccagcgacaaatttagagaaacctcggcagacaggggcaagtgtccgagtggtgaatcagctactta

SEQ ID NO: 682156 - DNA, 74 bp, Homo sapiens
aagctcagagaaagcagcagatggcagagggagatgcatttcctgagctgaagaaggacccagacatggtgaag

SEQ ID NO: 682157 - DNA, 52 bp, Homo sapiens
attcactgcattgaggacttccacaagagcattgttttaaacccagcctatt

SEQ ID NO: 682158 - DNA, 100 bp, Homo sapiens
acgcctgggccgggggctgcagcatgggtggatgtgaacactgaccggaagatcagtgccaaggagatgcagcgctggatcatggagaagacggccgagc

SEQ ID NO: 682159 - DNA, 82 bp, Homo sapiens
gtcggcgcctcattcgggtggagctgagccggagacagttatttctcaaactctgaggctgcggagttcacacattgaaatc

SEQ ID NO: 682160 - DNA, 80 bp, Homo sapiens
ctattgtgaggcggttgtagaaggctcttcttcgtggggtcccgggaaggccacctgccctccatcctctccatgatcca

SEQ ID NO: 682161 - DNA, 74 bp, Homo sapiens
ccggctttgcggctgggtcctaaactgcgggagtgcatccgccccaacccttttccccctcgtctcctgtgaga

SEQ ID NO: 682162 - DNA, 90 bp, Homo sapiens
cacctttggaggaggggtgtttctggccacgtgcttcaacgctctgctgcccgctgtgagggaaaaggaagacaatggtgtaaaattggt

SEQ ID NO: 682163 - DNA, 97 bp, Homo sapiens
gaagtaggaagtctttgggacaaaactgtatttaccttgaaactggcaagatgtttacctggggccgagcagactatggtcagctagggaggaagtt

SEQ ID NO: 682164 - DNA, 100 bp, Homo sapiens
cggagaaggtctacagagcggcctgcgccagcgagttacaactgatggaaaaccaaaaatcgttgatatcattgatacaacaggaagtggcgatgtgaat

SEQ ID NO: 682165 - DNA, 50 bp, Homo sapiens
aaacacagtcttcagccctacattaggtgtagagaggagagagagtgaac

SEQ ID NO: 682166 - DNA, 119 bp, Homo sapiens
gtttaccatgacgataagcaaccagcatttagagctgtttatgaagcactgagaaatgcgggatccacagcaccattgtttactgaccagccagaggaacctgagtcaaacacaacaca

SEQ ID NO: 682167 - DNA, 74 bp, Homo sapiens
gtgtaaggacttagcagcagcggatgtaaaaaaacagcgttcagacccgctgaacatatgcagaagaaaaggag

SEQ ID NO: 682168 - DNA, 74 bp, Homo sapiens
accgacatggaacagggactcactggggttgaaaacgaggcccactgcgactttgtgaagctgcgggagatgct

SEQ ID NO: 682169 - DNA, 50 bp, Homo sapiens
ggaactgtcaggtacctcaaagcgtaacttttaacctggagacttgccgg

SEQ ID NO: 682170 - DNA, 90 bp, Homo sapiens
gaactgtacatgctcttcatcaactgcctggaggtggagcccagtgacaccatcgaaaatgtgaaggccaagatccaagataaagaaggc

SEQ ID NO: 682171 - DNA, 100 bp, Homo sapiens
caggtggccattaaggtgatttctcgaggttgaacaaattgaagcagggacaccaggccgactcagagtagtagctcagtccaccaatagtgaggaaatc

SEQ ID NO: 682172 - DNA, 101 bp, Homo sapiens
acgagccaggaactgcgcagcctcttcgagcgccgcggacgcgtcatcgagtgtgacgtggtgaaaggaagtattagggtacaaagtggactaccatgtat

SEQ ID NO: 682173 - DNA, 75 bp, Homo sapiens
attgccttattttttctcatggatgttcttcttcgagtatttgtagaaggacacatcatctcagagttggagcac

SEQ ID NO: 682174 - DNA, 100 bp, Homo sapiens
ccctcaaaagaagatgacagcccgcagagagttaacttctgtttacatggaactcagacatctgcaaatcatgctgattgctgtgtttgaagaacaagaa

SEQ ID NO: 682175 - DNA, 90 bp, Homo sapiens
acgtggtgggaagagcaagaggggttgagaatgcttgcaccaagcttgtccaggcagctcagatgcttcagtcagacccttactcagtgc

SEQ ID NO: 682176 - DNA, 96 bp, Homo sapiens
aactgtgggtcaccagagtcatagcccatgaactggcgcaccaggttttgatgatgatggttcagaatttcatgaacatatatttctggagaaaca

SEQ ID NO: 682177 - DNA, 100 bp, Homo sapiens
ctacggagcacgagaaatacggcgtggtgtcagctgctgctggaagtggcctggcctctatttatcttcctgatcctgatctctgttcggctgagctacc

SEQ ID NO: 682178 - DNA, 100 bp, Homo sapiens
ctttggcagttgttgatggctccaaaagatcaaatttgccctgaaattcagaaggaagtctgccttgccatcaggagctgccgttatactgttctggggg

SEQ ID NO: 682179 - DNA, 83 bp, Homo sapiens
attgtagcgaactgcggtcgctggaatgtgtgtctcacgagtgttcgatgagtatctgaagaccacagggaagccgattgaag

SEQ ID NO: 682180 - DNA, 100 bp, Homo sapiens
tgctgaccctggccttcaaccccgagccgctggtgctacagatccaggaggctgcaagccagggcctgaaattcgttggtgttatacctcagtaccattc

SEQ ID NO: 682181 - DNA, 75 bp, Homo sapiens
ggaattctccctagttttagacttgcttcttggacacttaatgattgttggcaagaaatgtgctgctgatctggg

SEQ ID NO: 682182 - DNA, 76 bp, Homo sapiens
ccgccatgcacaagctgcacttcctgcacaggatgtacagttacccagcacgtgtacctcctcctcctcctattgc

SEQ ID NO: 682183 - DNA, 95 bp, Homo sapiens
tgttgtctcggtagaaggccagagtcacacacggtcctaagagctgggcaccaggaagcgaaggctgttctggacttcagtgaccccttcagcac

SEQ ID NO: 682184 - DNA, 80 bp, Homo sapiens
ccaggacacccctgaagccgagaaatgaataccgtagcagtaggcaggacagttccaattcaacaaaaacctctttaccc

SEQ ID NO: 682185 - DNA, 75 bp, Homo sapiens
tgagaagcaggcagaagattgcatcacacgctttttgcctgaattcatcaatggagactttgattctattaggcc

SEQ ID NO: 682186 - DNA, 100 bp, Homo sapiens
gctgatcgcctaacttctactgacgaagcttggaagttgcagaagcaatcccacagagtattgatgaggaaactgaagtttggagcgatcacatcatttt

SEQ ID NO: 682187 - DNA, 83 bp, Homo sapiens
ctgctcacctatgccactcgagatgacctcatctacacccgcatcagggaaagcaggcaggatgggagagtcgccgatagaac

SEQ ID NO: 682188 - DNA, 100 bp, Homo sapiens
aaaaccacctgctatttagtcattgacaagtttggatcagacatcataaaactgaggtgcttgaactcgctttctccatcttgtatgactcaaactgcca

SEQ ID NO: 682189 - DNA, 98 bp, Homo sapiens
gacaacaacaatccacaagtaaccctgagaaaagtcatctctgtttccccactggtaaataatggttacgagaagtttctgagaagctgaacaaatat

SEQ ID NO: 682190 - DNA, 75 bp, Homo sapiens
tcgggagaagcagcgcctgttcccggggcagatccaggttcaggcattggaatggatacttgtgtcattcctttg

SEQ ID NO: 682191 - DNA, 83 bp, Homo sapiens
cacgtctggtgcaggcaccagtgcagagtccgtgcgtcctggtgcctcctacaaacggcagaatgaaggaaatcctgaaagag

SEQ ID NO: 682192 - DNA, 82 bp, Homo sapiens
agaaaggtcaaaatcaagactatagaggtggaaagaatagcacttggagtggaactgtggctgcaccatctgtcttcatctt

SEQ ID NO: 682193 - DNA, 100 bp, Homo sapiens
agtcctgcgcttggggatcctctgtacgcccgttcactgaacaaatcattcacatgtactttgttcatgccctttgaagagtttgaaaaacttctaacca

SEQ ID NO: 682194 - DNA, 82 bp, Homo sapiens
gaggaggcagccacggggcccctggcttcatcgaggacaatgagattggctccatctctaagaatgccctcagaggacttcg

SEQ ID NO: 682195 - DNA, 82 bp, Homo sapiens
ctagcgtcctggaattacttcaatcaagatgaggaagatggagagaatgcccacccatatagaaacagtgaccctgtgattg

SEQ ID NO: 682196 - DNA, 82 bp, Homo sapiens
ccttagctgtgctcgcgctactctctctttctggcctggaggctatccagcgcatagaatgtcaagctaaccaggcgtccgc

SEQ ID NO: 682197 - DNA, 75 bp, Homo sapiens
cagtttctttgtcatgtagccaagactggagaaacaatgcctgtgattggaattgaaacagtacaactgcctcca

SEQ ID NO: 682198 - DNA, 100 bp, Homo sapiens
gatcccattccaatgcaaagaactcacatgctagaaagagtcaccttcttgatctacaaccttttcaagaaccctggcctagtgtgtccaacctggccaa

SEQ ID NO: 682199 - DNA, 100 bp, Homo sapiens
ctgccatatcactctgtcagacttttaagcttcccttaacgccagtctttgaagggcttgccttcaaaaaccagcctggacaccaagtctgtgtcagaag

SEQ ID NO: 682200 - DNA, 100 bp, Homo sapiens
aatcagtcatgggaccagaagtttacactggaactggacaggttcacagaagaaaagcttggccaggctgagaagacagaattggatgctcacttagaga

SEQ ID NO: 682201 - DNA, 49 bp, Homo sapiens
ggctcctgctgacccgggcagagaagccctgtatgatgagattcgtcag

SEQ ID NO: 682202 - DNA, 89 bp, Homo sapiens
attagcgacatccgagtgcagaacctgcaagcgttacatccttactattcaaagtgccatccacagacctgctgatgggcagcatgagc

SEQ ID NO: 682203 - DNA, 141 bp, Homo sapiens
gccgcgccttggagtccggagtaacttggccaggctggccccgagcggaactggagaaagctgagggttctcccatgggcaggtggtctctctggatgagctgcgccccttccaggacccagacctgagctccctgcaggc

SEQ ID NO: 682204 - DNA, 134 bp, Homo sapiens
gagatactggccattttatagacttcaaagcaacttaggccactgaactgtcaggcgggaaaacaggaagatgagaatgtgcctactgctcctgatcctccaagtcaacatttacgtgggcatgggacaggctt

SEQ ID NO: 682205 - DNA, 75 bp, Homo sapiens
cagttgcaaaatattcaggagaccgtcgttgccttgtatttccagagaacagtccctggcaatccagagatcccg

SEQ ID NO: 682206 - DNA, 103 bp, Homo sapiens
tcgaatggcgagattgagcacgtgaccaagcgggccatcagcacccccgagaacttaattcagtgcacaaatgagatgaatgtgaacatcccacagttggcag

SEQ ID NO: 682207 - DNA, 82 bp, Homo sapiens
ccgtctccatgcccgagttcatggccaacctcaggctcaggaacaagatcactcaaggtgaaggataatctactaataccag

SEQ ID NO: 682208 - DNA, 99 bp, Homo sapiens
tggcggggctgaagaagcagttctacaaggcgagccagggctggccctggccttccacgacggcagcgtccacatcgtgcaccggctctcactgcagac

SEQ ID NO: 682209 - DNA, 94 bp, Homo sapiens
gcgacaagccgctggcagccgcggatctcaccgccgctcaggggtgcttcaaggatgaccgcatcgtcttctggacttggatgttctccaccta

SEQ ID NO: 682210 - DNA, 75 bp, Homo sapiens
cggcaagtaacatgactaaaaagaagcgggagaatctgggcgtcgctctagaggatatcctaaacctgaggaagg

SEQ ID NO: 682211 - DNA, 50 bp, Homo sapiens
ctccttctacaggtgtgtatggtcctggcattgatgtgcctgctccagac

SEQ ID NO: 682212 - DNA, 90 bp, Homo sapiens
cagcgccagcagctggactatggcatctatgttatcaaccagataaacattgacgatcttgaggatgaccctgtggtgaacggggagagg

SEQ ID NO: 682213 - DNA, 98 bp, Homo sapiens
ggttaagctggctgtcctgaaatattataaggtgtattacctgactgcttaaccgatggctctgatgtggtcagtgaccttgaacacgaagagatgaa

SEQ ID NO: 682214 - DNA, 90 bp, Homo sapiens
gtgaatcccctgtttgagaaaaggcctaagaattttggcattgatgacatggcagagcttctcctcggggagtcgaagctggagcagtac

SEQ ID NO: 682215 - DNA, 100 bp, Homo sapiens
gtcagtgtgccccaggtgaaggccagtgctctcaagtggaaggagaacatgaatctctcagaggcccaagtacaggcgttagcattaagtagacaagcca

SEQ ID NO: 682216 - DNA, 74 bp, Homo sapiens
gtttgtgcttccttctacagccaatatgaaaaggcctagacaggttgaagggcggcttggcccatccactgtgg

SEQ ID NO: 682217 - DNA, 98 bp, Homo sapiens
cgcagccccccaacatcctgctcctgctcatggacgacgaaagaccacagcaagattctttcattcgtctcctcctagcctgggggaccaggctcgaa

SEQ ID NO: 682218 - DNA, 99 bp, Homo sapiens
cttgacgaggctgcggtgtctgctgctattctccgagcttcgcaatgcattaaagggcagtatttaaagtcagttggcaagcagtggaataagattttt

SEQ ID NO: 682219 - DNA, 49 bp, Homo sapiens
tttcagctaacagtaaccccagggttcaggataagtttgaggtgctgaa

SEQ ID NO: 682220 - DNA, 100 bp, Homo sapiens
gggggccatgaccgtggagcagaacgtgctgcagcagagcgcggcgcagaaggggcagtgatcggtgatggacagtctgctgtggccagtaacattgcca

SEQ ID NO: 682221 - DNA, 82 bp, Homo sapiens
ggacgaggccgccctcagttgctgctccgacgcggaccccagtaccaaggatattggtgctggaaaaggcaaatactatgct

SEQ ID NO: 682222 - DNA, 100 bp, Homo sapiens
tgctgcggttcctgcgcgcccgggatttcgatctggacctggcctggcggtttcgatactccgattggcaggataaattgtttatgtcgctgggtaccat

SEQ ID NO: 682223 - DNA, 100 bp, Homo sapiens
ggtcttggcagctatattagtggttttcacagttattcctgtgattgtccacctgagctcaaagcaccctggaggagaagaggttctgctggaacaagct

SEQ ID NO: 682224 - DNA, 74 bp, Homo sapiens
aaaatagcctttgccatcactgccattaagccgtttccctggggagatggtaaccatactctattccataaccc

SEQ ID NO: 682225 - DNA, 73 bp, Homo sapiens
gtcgctgaagctgtgtctgcggggaggcagcggaaggcggcaggccctcgggaccaaggatcacgtcatgact

SEQ ID NO: 682226 - DNA, 51 bp, Homo sapiens
tctccaggacaagaggttcaaggtgatcaatgttgatgggacgaagaggcg

SEQ ID NO: 682227 - DNA, 90 bp, Homo sapiens
cgagcacataacggggttcgggtgtctcgtgtgtgaacatcacaggatttgcgcaagcaggtagcgccgctgctgaagagtttccaagga

SEQ ID NO: 682228 - DNA, 75 bp, Homo sapiens
ttatatactccccaggcttccaaatggctattcaagatctctggcagtggaggaagtctctttaagaaaatagtt

SEQ ID NO: 682229 - DNA, 82 bp, Homo sapiens
gcgaaaattggatgtgaaaatgaagccagaccgagggaagcaccactgccatttgtgccacaggccttcggaatttggggaa

SEQ ID NO: 682230 - DNA, 101 bp, Homo sapiens
catttccacatcaagtgtttcacctgcaaagaaacgctccagaggacaagtgctgtttgataaagtgtgtgaacacttgaacttgctagagaaagactact

SEQ ID NO: 682231 - DNA, 100 bp, Homo sapiens
aggttgggattcgtgtctggctctggaattgctactgctgcctctgtcactcctggtgaccagcattcaaggaactgtggctgcaccatctgtcttcatc

SEQ ID NO: 682232 - DNA, 99 bp, Homo sapiens
gcgaggagcgcactccgtggccccgatggagcggtacaaaggtattcccggcgtttccacaagactctaaggcgcttggtgccagactccgatgtgcgc

SEQ ID NO: 682233 - DNA, 100 bp, Homo sapiens
aatcgggcacctctgcagctgcagaagtgaaccggcaaatgctgcaggaactggtgaacgcaggatgcgaccaggttctttggcatggacacaagttcag

SEQ ID NO: 682234 - DNA, 101 bp, Homo sapiens
caaaaatgcacaattctatctcttgggcaatcttcacggggctggctgctctgtgtctcttccaagaatccggacaatcagatagttcaaaccagcaagga

SEQ ID NO: 682235 - DNA, 75 bp, Homo sapiens
ccggcccggccctgcccggcggccctatgccgggggtgccgctcagccaaggccacctttgatgccatttctaag

SEQ ID NO: 682236 - DNA, 75 bp, Homo sapiens
ctgaaaatccatcagtgccagcataccaatgaacctctattcaattccagtgtctcgccccatcctcaccctcag

SEQ ID NO: 682237 - DNA, 75 bp, Homo sapiens
gctggagtcagtggaagacggagctggtcggcccgaaggctcacagaacatttcctgcctgttgctcacactctg

SEQ ID NO: 682238 - DNA, 100 bp, Homo sapiens
cgctaaggatacagtatgtgtgtgaacagaataagcgttacagtgtttctgccacctctgtacaaaagacaattttacttgtgtgacagatgggctctgc

SEQ ID NO: 682239 - DNA, 83 bp, Homo sapiens
gcaaccccagatccatttacactttacattctctctggacactctgtacgtgtctacagcaaaacacgttttcgaaaaaaaac

SEQ ID NO: 682240 - DNA, 100 bp, Homo sapiens
ttcaaacccaaagaggtaagcattcaggtttaccgacaagactgtgaaactttcgggatggtggtgaaaatgctgattgaaaaagatccttcattagaaa

SEQ ID NO: 682241 - DNA, 83 bp, Homo sapiens
ctgtcttcggtggactccttcggcagtccacccaccgccgccgcctcccaggctgttactgaggcggagacacgggtgatgat

SEQ ID NO: 682242 - DNA, 75 bp, Homo sapiens
gaaaaagtatcgtcgagaagcctatcatcggtcccaaagttgtttctaaagaaattccagtagagtccatcgaag

SEQ ID NO: 682243 - DNA, 100 bp, Homo sapiens
gcggggcctgggcctcccggtccgcaagcagttcctgggcttcccgatggactcgagtttttactatgtgagcatcccggtgcctgcacagcaaggactc

SEQ ID NO: 682244 - DNA, 100 bp, Homo sapiens
acttttacctacgttggcggccccagaagatgccttcaattaagttgcagagttctgatggagagatatttgaagttgatgtggaaattgccaaacaatc

SEQ ID NO: 682245 - DNA, 88 bp, Homo sapiens
cggcgctctggctctggctgtgcgcgctggcgctgagcctgcagccggccctgccggtcaaaatgcagatcttcgtgaaaacccttac

SEQ ID NO: 682246 - DNA, 99 bp, Homo sapiens
gagcacagtgtggagggtgcccagcgcgccgctgctatcgcgcgccagaaggccgagattgccgcctccagcgaggatctggatgagctgcactaccag

SEQ ID NO: 682247 - DNA, 100 bp, Homo sapiens
tctacccagagagtgcttcctgcctgctcaggctcagaggagaaggcagagcccccccaggctatgaatgccctgatgcggttgaaccagctgaagccag

SEQ ID NO: 682248 - DNA, 100 bp, Homo sapiens
gcctggtcaatgccagctctttgtcggaagcagagcagctgcagcgggagcacgagcagttccaactggccatcgagtggtgctgattactatgattacg

SEQ ID NO: 682249 - DNA, 75 bp, Homo sapiens
gtcaggtctggagctcgaccgggccaggagttttgagagcaaaatgacaacacccagaaattcagtaaatgggac

SEQ ID NO: 682250 - DNA, 100 bp, Homo sapiens
cacagcttcaagggggaggagtgtccagcagttggtacgccttattacatgtctccagagagaatacatgaaaatggatacaacttcaaatctgacatct

SEQ ID NO: 682251 - DNA, 74 bp, Homo sapiens
aagattttgaagacaatcgtcacttatacagattttgggaaccagtaggacattgacatacatccgagaacatt

SEQ ID NO: 682252 - DNA, 88 bp, Homo sapiens
cagggatacggcgcccagcgggggaattgacataggggatagcttaactattccagatgaattcacggaagacgaaaaaaaatccgga

SEQ ID NO: 682253 - DNA, 74 bp, Homo sapiens
gacccagcacgcctgggccgggggctgcagcatgacatatctgaagagatggattaagaatgctttggattaag

SEQ ID NO: 682254 - DNA, 100 bp, Homo sapiens
gttaacgcgacacattaggatacacacagcctctgaagagccaatccattcaggatgggaaaccacgcaggcaaacgagaattaaatgccgagaaggcca

SEQ ID NO: 682255 - DNA, 74 bp, Homo sapiens
cctgatggtacagtgagctacgataacaaggccgctttgtagttcagaatgtttctgcacagaaagatggagaa

SEQ ID NO: 682256 - DNA, 75 bp, Homo sapiens
tttttctaactatttcaagatgatatttattcaccaaacaagctctgtatgaaaaagctgatatcaaggggcctg

SEQ ID NO: 682257 - DNA, 100 bp, Homo sapiens
tctgaagcccgagaggagccacaatggagacgccgccgctgcctcccgcagctcttcagtatccccatcagccagtttccgaggtgctgagaagcacaga

SEQ ID NO: 682258 - DNA, 101 bp, Homo sapiens
acacgtacctgaacgccgccttggacctcctgggaggcgaggacggtctctgccagtataaatgcagtgacggaactttatattgctgttggaatatctgg

SEQ ID NO: 682259 - DNA, 82 bp, Homo sapiens
aggagctgtgcagccgcgaggaggcgcgggaggtgttcgagaacgaccccgagacggtggtcctgacaaccaagtccacttt

SEQ ID NO: 682260 - DNA, 82 bp, Homo sapiens
ctgaggagcgccgctgcctcgcctcgaaaaatggctacaaacttcctagcacatgagaagatctggttcgacaagttcaaat

SEQ ID NO: 682261 - DNA, 75 bp, Homo sapiens
ctcgggggccgctctgggatcccggccaccagcaattgtccggcttgttagcagtggcacaagatcttacagagg

SEQ ID NO: 682262 - DNA, 100 bp, Homo sapiens
gggcgtccggggctcctgcgcactcacttggcggccgcgcccgctggcgtcctcttgttctcttccaggatcatgcggccagatgatgccaacgtggccg

SEQ ID NO: 682263 - DNA, 82 bp, Homo sapiens
atttttgactgcattgactttcgtagtacttgtcattagatgaaggatttgggggcagagcacttggcaggtcatgaagggg

SEQ ID NO: 682264 - DNA, 76 bp, Homo sapiens
ttcctcacccgcgcctgcgacctcgggactttgaacatgtcggggatcgccctcagcagactcgcccaggagagga

SEQ ID NO: 682265 - DNA, 87 bp, Homo sapiens
gggatgtctggcgctggcagagctgggcaggagaggcctgttgctgccgtctcgactcgtggatggaaggagtcaagactgagaaca

SEQ ID NO: 682266 - DNA, 112 bp, Homo sapiens
tgctcttccggatgagaagtgcttagattctggatacattttgaaggaaactttgagggaaattttgagtcactggaccttgcggaatttgctaagaagcagccatggtggc

SEQ ID NO: 682267 - DNA, 83 bp, Homo sapiens
cagacttctttcccagatgtttataatgagggcacacaggctttcagttctgaaatggcaaagaggtccaagatgctgagttt

SEQ ID NO: 682268 - DNA, 124 bp, Homo sapiens
tcggtcgtgcagcggcggcgagcgctcgcgagcggctgcgggacgcgaggtttccgggtaccccctgtaccggctgggtggcccacaacttcgggtgttccgaaccaacttcttcattcagctg

SEQ ID NO: 682269 - DNA, 80 bp, Homo sapiens
cctggaccaggaggaggttttcaggaccaaaattgtggaaaagtcactctggcttgggcactgtttaaaggaaagttccg

SEQ ID NO: 682270 - DNA, 83 bp, Homo sapiens
agccgcagtgaggccaacgccgtgttcgacatcctggccgtgctgcagacctgcctagagctggaacgttacctccagagcga

SEQ ID NO: 682271 - DNA, 100 bp, Homo sapiens
aagcctattgaacaagaagtcggatggcggtgtcaagatgaactgactggaatccttaagaaattatcacttgagaaatatcagcccatttttgaggaac

SEQ ID NO: 682272 - DNA, 83 bp, Homo sapiens
cgcgtccagcacctacgtcccgctgccgtcgccgccgccaccatgcccaagagaaaggagctggtgactgccctcatgtgtga

SEQ ID NO: 682273 - DNA, 100 bp, Homo sapiens
tggtgaagtataggctgaggctacctgtgaacagtacgcagtgaatgttgaagccctcaatctagaagagtagaggtccaaaggtgccatatgttcacac

SEQ ID NO: 682274 - DNA, 83 bp, Homo sapiens
caaggacggatgatgaagtagtacagaggcttgaagtagaaaatgccatgatgagaaaaactattaaaaaacaggatgaccaa

SEQ ID NO: 682275 - DNA, 101 bp, Homo sapiens
gatcagagagggctaccttgtgaagaaggttcaccatcgcaggtccaggggagtgtgtcttcgtggagcccaccaggctggtgtcgacggagtgtctgatg

SEQ ID NO: 682276 - DNA, 82 bp, Homo sapiens
gacaatttcagcacttctggcattgagacaacatgtgcatcaaatatgctgaaaggagtggcaagaattacaacaaagcata

SEQ ID NO: 682277 - DNA, 96 bp, Homo sapiens
tttctcctgtcctcaatctctggaagaaactaaaccagaacagctttgctgagccatcaaggtctaatggaagcatggttcggcattcttcatctc

SEQ ID NO: 682278 - DNA, 83 bp, Homo sapiens
gccaatcacattttgcacaagggcagtcaccatgaaagtacttccagcggcaatgtaagcaacagaaaggatgagacaaatgc

SEQ ID NO: 682279 - DNA, 75 bp, Homo sapiens
cttgatttctggaaatgtccaaataatggtgtacattccaagcagagtggccctcatccttcagaatgtggatct

SEQ ID NO: 682280 - DNA, 83 bp, Homo sapiens
gctgtggctttccaagctatgggtgccatgaaggtgctttgcaagatatcaccttgtcacagcagaccccctccacttggaag

SEQ ID NO: 682281 - DNA, 75 bp, Homo sapiens
ccccagctcgactctcggtggtctccaggctgcagcagaaggaataccttgagtcatcttagtgggatttgggga

SEQ ID NO: 682282 - DNA, 82 bp, Homo sapiens
gcgggggcggcgtgcggcctagcgtctcaggtcagaagccaatgacctggccctgaggctggctcgccactacacgggacac

SEQ ID NO: 682283 - DNA, 75 bp, Homo sapiens
ctggtggcggtcgcctgggtccgcgccgaggtgacagagctgaatgaacctctctccaatgaagatcgaaatctc

SEQ ID NO: 682284 - DNA, 89 bp, Homo sapiens
gcgcggggcccggttctccatcgcgcgcacggcagcctagcgcaatgaggcgggcagcactgcggttgcacactgggccacagaggatc

SEQ ID NO: 682285 - DNA, 82 bp, Homo sapiens
ccctgtaccacactgaggagcgcggccagccctgctcgcagaattaccgcctcttctttaatggagaacttaatgttctgga

SEQ ID NO: 682286 - DNA, 83 bp, Homo sapiens
ctacatagacgacaccctgacgggaaccctactctggaaactgtcagtcccagggcactggggagggctgaggccgaccatgc

SEQ ID NO: 682287 - DNA, 106 bp, Homo sapiens
attttgacagtcgtagatacaaatttttggatgatgatggatccatttctcctattgaggagtcaacgatcaaaatggtttcaatcccagaatactatgaaggcaa

SEQ ID NO: 682288 - DNA, 96 bp, Homo sapiens
caggagcggagagtttgctccaccaggccaggcaggagtgcagatgtgatctcggcacaccgcaacctctgcctcttggattcaagcaattctcct

SEQ ID NO: 682289 - DNA, 51 bp, Homo sapiens
ttccatcgtcgggcgccccagacaccaggccgtggatccaggacatcgagg

SEQ ID NO: 682290 - DNA, 75 bp, Homo sapiens
gataagctgagcagagccctgcgatactattatgacaagtgtctttctcgagaagcaggtggaaacatgagcatt

SEQ ID NO: 682291 - DNA, 75 bp, Homo sapiens
gttaaaacaacttctgcattggtgcggtgatgacttcgatggagtgccctgaaaagcaaaggcctcatctccatg

SEQ ID NO: 682292 - DNA, 100 bp, Homo sapiens
acaccaaccaaattgtcgccattaagaaacaagagtgagccatggagctacgtgtggggaacaagtaccgcctgggacggaagatcgggagcgggtcctt

SEQ ID NO: 682293 - DNA, 87 bp, Homo sapiens
acaccaacctctcgtacatcggcgagggcgcctacggcatggtgtggggacggcaaaacagaacagaaaggcggagataaaaagagg

SEQ ID NO: 682294 - DNA, 82 bp, Homo sapiens
cgggaggggaaaaacagatggcaaggcttgggcactgtttaaaggaaagttccgagaaggcatcgacaagccggaccctccc

SEQ ID NO: 682295 - DNA, 83 bp, Homo sapiens
cagcagctgccggagcccgagtggatcggggacggagagaacacgagcccatcaggtactccaaagattcaggtttactcacg

SEQ ID NO: 682296 - DNA, 101 bp, Homo sapiens
ccggagtggggaagacctgcgtcctttttcgtttttcggatgatgccttcaatactacctttatttccaccatagcaggagcagctccatatgtgcaggca

SEQ ID NO: 682297 - DNA, 106 bp, Homo sapiens
ggatactcagttgctgctggggagtttactggggattctcagcaagggctccagtggtccagaatcttttactgtctaccactacaatggattgaagcagtcaaat

SEQ ID NO: 682298 - DNA, 100 bp, Homo sapiens
gcggcccggctggcctcctccggtctcctcctgcagctaccgagtctattgcttgctgggagacggggagctgtcagagggctctgtatgggaggccatg

SEQ ID NO: 682299 - DNA, 100 bp, Homo sapiens
agccccgataacgtcgtgtcgaccacagggcaagtgtccagagaatggctgggatgaaagtacacttgaactctttttacatgaacttgcaatcatggac

SEQ ID NO: 682300 - DNA, 97 bp, Homo sapiens
cgggattatatcatggaaccctccatcttcaacactctgaagaggaggaagaagacctggcggcaggtgtgggccgcagccgagttccagtccgccc

SEQ ID NO: 682301 - DNA, 75 bp, Homo sapiens
cccggcgcgaagaggctggactcggattcgttgcctgaggtccctgagtgccagaggtggtggtgttgcttatct

SEQ ID NO: 682302 - DNA, 82 bp, Homo sapiens
gaggaagcggcgcgagcgccccgccatcgtcccggttaatttggagtggcccctggagtcagtttcctacaccatccgaggc

SEQ ID NO: 682303 - DNA, 100 bp, Homo sapiens
acgagatctccgaccagtctgggggcgctggcggcctgcgcagccacctcaaggcaatctttggcagccagacactacctaactccaatttatggacaat

SEQ ID NO: 682304 - DNA, 96 bp, Homo sapiens
aaccacctgtggaccatttggaaactggtcatctccagaaccaacctgtcaagattttattgtcaagatatccgagcttatgacattttatttgga

SEQ ID NO: 682305 - DNA, 90 bp, Homo sapiens
gaggctggataccaaatagcagtggaaaccgaaagtgaagtcactgcttttgctgtcttggatcaagaccagaaagaaattattgatacc

SEQ ID NO: 682306 - DNA, 100 bp, Homo sapiens
ggctccagctccagccgcagcttaggcagcggaggttctgtgtcccaggcttgcatgcttgtctttcaacccgatctcgatgtcgacctccctgacctag

SEQ ID NO: 682307 - DNA, 100 bp, Homo sapiens
gccaggcttcagtcactggacacaagctttctggggcggcgactggcggcgcgatggacctgaccgggctcctgctggacgaagaaggcaccttctccct

SEQ ID NO: 682308 - DNA, 98 bp, Homo sapiens
agaacaatgccgcagaagaggttgaagaggaaagaccacagcaagattctttcattcgtctcctcctagcctgggggaccaggctcgaactgaccctg

SEQ ID NO: 682309 - DNA, 100 bp, Homo sapiens
tccctgccctgctgctgggcaacaagctggacatggctcagtacaggttgtctaccttcataacaacaatatctctgtagttggatcaagtgacttctgc

SEQ ID NO: 682310 - DNA, 50 bp, Homo sapiens
tggagaaggaagaactgtgctgaggccctgccatttctgtgggctcaggt

SEQ ID NO: 682311 - DNA, 100 bp, Homo sapiens
cgatggtcggcggcgcccggatgggcagctgaggatgcctaaatcaaaggaacttgtttcttcaagctcttctggcagtgattctgacagtgaggttgac

SEQ ID NO: 682312 - DNA, 90 bp, Homo sapiens
cgctgcgaccccgactacctgcgcggcgcgctcggccgcctcaaggtcgcccaagtgttttcagtgtggacagcagatgaaggaattgag

SEQ ID NO: 682313 - DNA, 97 bp, Homo sapiens
cctggactctgcagagtgaagagaaaatagcaaacgatccagacggcagggagtgcatcaaaggtgtgaacacagatatctcttccaaatgcatgat

SEQ ID NO: 682314 - DNA, 82 bp, Homo sapiens
ccataatgtcgacctgccggagtcgaggattccagggtcgaacactcggtccttggcccttgccagacattagcaccatgag

SEQ ID NO: 682315 - DNA, 90 bp, Homo sapiens
ccaatgtggatgcccgaattctttaagggcattaggagaccatggaaagtgaactgcctgaatcaagtaaaaagtagtctcttaaaaact

SEQ ID NO: 682316 - DNA, 98 bp, Homo sapiens
ggaggtggaccggagctcgtccagctgcgtgcctagccaggcgggcaccacggcaggggctgagctaccctcatggaagggagaggaccgtaccggat

SEQ ID NO: 682317 - DNA, 98 bp, Homo sapiens
gttcttgctcttcgagggcgagaactctctgatgtaaaggatggagtaaatcaagcagcacctgcatttggatttggcagcagtcaagcagcaacatt

SEQ ID NO: 682318 - DNA, 90 bp, Homo sapiens
gccaaattcaaaaaggataaggagatcatagcagagtacgatactcaggtcaaagggagtgctggtttgccacaaaactccatcgtaact

SEQ ID NO: 682319 - DNA, 100 bp, Homo sapiens
tgtaccagctctataagcggacgtttcctgtgctgcttcgacttgcgtgtgatgttgatcaggtggatgcccggagcataccagtgttagcaaaatggca

SEQ ID NO: 682320 - DNA, 75 bp, Homo sapiens
gtactggaaacccacaggcacacccaacagatgctgtaatggactgtgttggttggcctccaggcaggaagtggc

SEQ ID NO: 682321 - DNA, 71 bp, Homo sapiens
cctctgtgcgctatgagcggcttgccctgctggctctgctggaccggctggagggcagtggcatgatctcg

SEQ ID NO: 682322 - DNA, 75 bp, Homo sapiens
caagctgtacgaaaagcggaaggtggcagcgctggagatcgagaagtaagaatgattgatgttggctgatattgg

SEQ ID NO: 682323 - DNA, 100 bp, Homo sapiens
aatcttcaatgagtaaacatattcctgtcttcaatgaaatttatccagtatggacttactcttacctggtgctactgtttcctgtgttccttgccacaga

SEQ ID NO: 682324 - DNA, 75 bp, Homo sapiens
gcctgcccttcaccctctacatggaaggatctgagtctctccctgcggagacagccctgaagaactcctgtaacg

SEQ ID NO: 682325 - DNA, 82 bp, Homo sapiens
tggagtgaggtggccggttcttggtgggatctgagcagaagccctggacatgatcttctcagctgcccagcactccaatgca

SEQ ID NO: 682326 - DNA, 50 bp, Homo sapiens
accccctctaaatgtcgagaagccccagtctctggctgatgaacttgctc

SEQ ID NO: 682327 - DNA, 50 bp, Homo sapiens
tccgggtgaggccggccacgccccgcacgtctcctgaatatttacgcgtt

SEQ ID NO: 682328 - DNA, 76 bp, Homo sapiens
ataaggctgagtgcggagccaaggtctctctgcaatgcaatcaatgtttacaacctcacctgcaataactgttcag

SEQ ID NO: 682329 - DNA, 50 bp, Homo sapiens
gcggctctttgtatgatgacgtccgcgggagagctgtggggcttggtgag

SEQ ID NO: 682330 - DNA, 97 bp, Homo sapiens
aaggcactgcaggaggagaaccgcgacctgcgcaaagccagcgtgaccatcaatggttatacgccactgcacatcgctgccaaaaagaaccagatgg

SEQ ID NO: 682331 - DNA, 75 bp, Homo sapiens
cctgaactcaaagatgcccttaaaaggctcaggccacagggtcaccacatacatcgcccacccatggaggcggcc

SEQ ID NO: 682332 - DNA, 83 bp, Homo sapiens
tgtgtccaacctggtcactgtgtttgagaatagcagtacttggaccatgagactgtttcagccactttcatcgacagcagtgg

SEQ ID NO: 682333 - DNA, 100 bp, Homo sapiens
ctgcctgtgtgagagccacgtgtgccgcgctctgggcacagccttggaaagtcaggaccgcgacggcagcagagcacttctcaataggtttggcatggac

SEQ ID NO: 682334 - DNA, 74 bp, Homo sapiens
tttttgcttcaccgacatagtcattatgccgaagagaaaggcactgtttagtacagctgttgaaatgaagataa

SEQ ID NO: 682335 - DNA, 96 bp, Homo sapiens
ggatgaacattctgccgaagagaacaagacgtgtgaagactcagtggtggacttgctttgtgaagagacagttcatgaacaagagtctttcaggac

SEQ ID NO: 682336 - DNA, 97 bp, Homo sapiens
ccagtctgtgaaatgatggtgaggtgggcacttctttgtggtgagtgcagattctgcctgatcaatgcaggagtcctgtacctctacttcagcaatt

SEQ ID NO: 682337 - DNA, 98 bp, Homo sapiens
cgggaccgtgccagaccccggctccgcgacccagctctgaggaacaaggtggaagctccagagcgctggtctccaccctggtgcccctgggcctggtg

SEQ ID NO: 682338 - DNA, 88 bp, Homo sapiens
ctcctggacaggatggattgccagggcttcctggcccgaaaggagagcctgacgcaaagtaccacatgcagcgctgcattgactctgg

SEQ ID NO: 682339 - DNA, 97 bp, Homo sapiens
gaagatggccactgttcaataaaagactgtcatgtggagccctgtccagagatatcagaaaaccaggactctgcagatgttgatcctcaggagcatt

SEQ ID NO: 682340 - DNA, 97 bp, Homo sapiens
ccagatggtgttacctggagcttaaaaagctgcacgcaagtgttaaacttctgctttccccagacatggccaacaagggtccttcctatggcatgag

SEQ ID NO: 682341 - DNA, 100 bp, Homo sapiens
cccgccccggagagcggcgaggcggcagccacagaaatgaaagctcattagcatctacactgaagacgctcctgttcttcacagctttaatgatcactgt

SEQ ID NO: 682342 - DNA, 51 bp, Homo sapiens
cagattcagtggcctgcattggcaaaagagagccagtgaagatacaacttc

SEQ ID NO: 682343 - DNA, 50 bp, Homo sapiens
cggagacatgggagacccggggtcggagggagaccctgcagcgtcatggt

SEQ ID NO: 682344 - DNA, 75 bp, Homo sapiens
ctgaggactgactggggttctgagactccctgtcccggaccgcagaaaggcctaaagaatgtatttgacgaagca

SEQ ID NO: 682345 - DNA, 51 bp, Homo sapiens
ggcagaatacagagatatggaatcaggattggtagcttatgtcgatcttga

SEQ ID NO: 682346 - DNA, 75 bp, Homo sapiens
gaacccatcgggcagctacacatcttgaaagagaagctcttcctgtgaggcataaacttggaggaggcagtggag

SEQ ID NO: 682347 - DNA, 75 bp, Homo sapiens
atcaacttatagaaaaaagattaaatctcagggaaactcttatggagtggctatgattttggctatatggtaaag

SEQ ID NO: 682348 - DNA, 90 bp, Homo sapiens
gccatcctggactatggagtggaggaggacctgagccccgaggaggcagagcacaaggagatggatggattgtattacacagagcatgaa

SEQ ID NO: 682349 - DNA, 100 bp, Homo sapiens
cgagagcgtgaccgagagcgcgaatatcgtcatcgttagaaggttggtttgacttccacaaatgcagaagtaagaggatttatagatcagaatctcagtc

SEQ ID NO: 682350 - DNA, 75 bp, Homo sapiens
gagcacatctttagagccatcctgatcaagaaaaccgacagggtatttgaagtataccatacaactgttttgaaa

SEQ ID NO: 682351 - DNA, 75 bp, Homo sapiens
ggcaacccccagggggcctttctcattcgggaaagcgagaccaccaaaggtgccaaattccccatcaagtggacg

SEQ ID NO: 682352 - DNA, 51 bp, Homo sapiens
ctgccccccaactacagctatgggtctgatgagtctctatggcagacctta

SEQ ID NO: 682353 - DNA, 82 bp, Homo sapiens
ggcgagggtgcagagcctggagagcatgccccggccccctgagcagagtgccagctgatgaagacggagcggccccggccca

SEQ ID NO: 682354 - DNA, 100 bp, Homo sapiens
tttgctcttccatccgcctttgatcgtcttcctcttcagccatccaggctggccctcacggaagaacaacagctgatgtttgagaaactgactctgtatt

SEQ ID NO: 682355 - DNA, 96 bp, Homo sapiens
ctgagcaggcagagagcagaagatattcacagacatgcggaatttgagattggtggaacgagaatgcctacacgcagccacaggaatccagtttcc

SEQ ID NO: 682356 - DNA, 104 bp, Homo sapiens
cggccccggagcccctcggcggcgccaccatgtactcgggagccggccccgcccagcagaccgggttatcccagtccgaggtccagcgaaggattttatcccag

SEQ ID NO: 682357 - DNA, 97 bp, Homo sapiens
cactgcttctccgtgggcagcattggcgaccagcgcttcacggtcaatgtgacggtggactacattagaccagccagcccagccacagagacagtgc

SEQ ID NO: 682358 - DNA, 90 bp, Homo sapiens
tgtttggagggaaatgggaatgtacacgataattaaagagtaaagttgtgctcaacgctgtcacaagatgaaggtagaggcacattatac

SEQ ID NO: 682359 - DNA, 100 bp, Homo sapiens
gggctacccctaataaagcgactcattgagcaggtgccagctgctgcccgtgctggtgccattgccccatgtgaagtcactgtgccagcccagaacactg

SEQ ID NO: 682360 - DNA, 75 bp, Homo sapiens
gtgtgggcgcgtcaggccgcgacgagggcgctgaggtcccgcaggctcccgatggcgagattacggcgccctggc

SEQ ID NO: 682361 - DNA, 96 bp, Homo sapiens
gtctgggctcagggtatggaaccggccttctttcagccaacagacattcactcatgggaacctcagaacctgttctggatccacagcaaatccaag

SEQ ID NO: 682362 - DNA, 75 bp, Homo sapiens
ggggacggcgaggccctcatgtaccacacgaaagggctattgcaagacacgaagtccgagaaattgagcagcgac

SEQ ID NO: 682363 - DNA, 83 bp, Homo sapiens
gtaggccgtctcgctctgggtctccaggcccgcgaccgtccgccagtcgtcccgagggggcttcgccaccttctcctcctgct

SEQ ID NO: 682364 - DNA, 125 bp, Homo sapiens
cggagtgtatgtctttggagaacttctggagctggccaacgtgcaggagcgaatgacaacagagctgctcaaggcgggaactctgagctaagcagtggaggtttctctggatctggagagaagag

SEQ ID NO: 682365 - DNA, 90 bp, Homo sapiens
ttgagagtaaatgggttaccagaggaagagctaagatcagaccccaacaccaacaagattcttgaaaaactgtgaagaagtgggtttgtt

SEQ ID NO: 682366 - DNA, 89 bp, Homo sapiens
ctggcggcggcgcttgggctctgcacttcagacaccacctccaacaacacagcaaccgtgatttccacagcgcctccagcttcctcagc

SEQ ID NO: 682367 - DNA, 100 bp, Homo sapiens
tacattttatgaattcttcaatgagcagaaatatgctgatgcggtgaagaacgtcggcttcttcaagcggaaccggccacccctggaagaagatgatgaa

SEQ ID NO: 682368 - DNA, 96 bp, Homo sapiens
gacatctacctccatcaggaccccagatgtctgacagccctgtgtgacaccaagataagtaacttacacaacagccaatgcggagtctgacaatga

SEQ ID NO: 682369 - DNA, 75 bp, Homo sapiens
tcgttgctgcctctgtgtacgctgaggggggagggctggttgatatgtgaagagccaacctgtcgcaatcgaact

SEQ ID NO: 682370 - DNA, 74 bp, Homo sapiens
agcaacccttaatgtgcatgatggttgtgattggagacacaaaatcagaaattaagattctaagcataggcgga

SEQ ID NO: 682371 - DNA, 75 bp, Homo sapiens
agctatccgggttcatcctacatttttgtgcaagaggttagaagggcccccctctctgaaggcccccactccctg

SEQ ID NO: 682372 - DNA, 90 bp, Homo sapiens
cggccggggaggcggcggcggcggcagacctcctgccccccgaggtctgcagtctcctgaacccagcagccatctacgccaacaacgaga

SEQ ID NO: 682373 - DNA, 100 bp, Homo sapiens
caaagcaagaaaattactaaagaggagtttgccaatgaatttctgatttgtattgaacgatgtcttgagaggggaaagagtagtggtaggagtgatgaca

SEQ ID NO: 682374 - DNA, 88 bp, Homo sapiens
gctgaccacgagcttttcctccaggcctttgagagcaagaggcgcagatgttccagagattcctggagatcttactcttaagacgtgt

SEQ ID NO: 682375 - DNA, 83 bp, Homo sapiens
ttatgacccacatcgctggttagcagaaagcaaggagccttcacgtaaatgggtccagtcatgcctcccagtaagaagccaga

SEQ ID NO: 682376 - DNA, 90 bp, Homo sapiens
acagccaacttgcgcttgtggcagtggcaaggttgctgctgaaatgggttgcggattgaacaagttagagaaacgtgatgaaaaacggcc

SEQ ID NO: 682377 - DNA, 75 bp, Homo sapiens
cccccaaaacaccaataaagggtcctccagtttagcagatactttcagaaatggatacataagaaatggctggaa

SEQ ID NO: 682378 - DNA, 83 bp, Homo sapiens
gccggcttcgcgcgcgaacccggctttcgcatttgggaccctgcaggttctgggaagtcatcagtgatgagcatggcatcgac

SEQ ID NO: 682379 - DNA, 100 bp, Homo sapiens
cgcggcgatgttcaaccgcgccgtgagccggctgagcaggaagcggccgccgtcaggtcaaaatgcagatcttcgtgaaaacccttaccggcaagaccat

SEQ ID NO: 682380 - DNA, 75 bp, Homo sapiens
gttggaagcagccgatccagcctgcggagcctgtggggcaggacaactacacctttgcccaacctgggattcaaa

SEQ ID NO: 682381 - DNA, 49 bp, Homo sapiens
cagtgctcaaactcaccgaccaggactttgcctcccgggccaaactggc

SEQ ID NO: 682382 - DNA, 98 bp, Homo sapiens
tggagagccagggtcgagcggcctccatgccccgccttgcggccgagactcagatgaaggtcaccgtgtccaaagggggcgaccgggacagtgacgac

SEQ ID NO: 682383 - DNA, 50 bp, Homo sapiens
gccgccttcatcaaatcaaacagacggggtctggctctgtcacccaggct

SEQ ID NO: 682384 - DNA, 127 bp, Homo sapiens
ccacttcgtgttgggaagtgggagcgggagggccgggcaattcccgaccgaaccaaacggcccaatcctgatgttgaccagctagaagagacacagctggaagaggaggcctgtgcctgcttctctc

SEQ ID NO: 682385 - DNA, 100 bp, Homo sapiens
gaagataaccgtccaggaatgagaggaggccatcagatggttattgatgttcaaacagacctccaatggaagtccgggcacatggcggagagcctcacca

SEQ ID NO: 682386 - DNA, 88 bp, Homo sapiens
gccagtccagcagctaaggatattttgtgcaggttgtctaccttcataacaacaatatctctgtagttggatcaagtgacttctgccc

SEQ ID NO: 682387 - DNA, 75 bp, Homo sapiens
aagaaactggtggtggttttcggaggcacaggtcattcccaaaagcaagttcgtcttggtgaagttcgacaccca

SEQ ID NO: 682388 - DNA, 82 bp, Homo sapiens
tctcagcctccaaaagtgctggcattacagacaatgcagatcttcgtgaagactctgactggtaagaccatcaccctcgagg

SEQ ID NO: 682389 - DNA, 100 bp, Homo sapiens
agatgatgatgaattgggtagagagaccaaagatcttgatgagttgtgcggtctgaaagtagaagtggatatggagaaaattgcagctgagattgcacag

SEQ ID NO: 682390 - DNA, 100 bp, Homo sapiens
cacaccaccaacattcttggcattacgcaggccagcaactcccagctcaatgcaatggtgaatgaaaactttgccattgatttgatagcagagcagcccg

SEQ ID NO: 682391 - DNA, 100 bp, Homo sapiens
cgcgttcctgctgctctgcctgctccacaagcggcgccgcgccctcggcctgcacgggaaacctcgacctgtctcccagttggttgcacagcaggttact

SEQ ID NO: 682392 - DNA, 99 bp, Homo sapiens
tccaagtcttcagaattcattaaatggatcttctgctggcagggcatttgtttacctgagcaatctgctgtatcccgtgcccctgatccacagggtggc

SEQ ID NO: 682393 - DNA, 101 bp, Homo sapiens
gggaatgtgtatatattataccaagttccaaggaccctcacagtggattttacttatccctcattggaagaatcaattccttctaaacctgctgcccagac

SEQ ID NO: 682394 - DNA, 75 bp, Homo sapiens
aaagtcatggggctcccctggagtgccttcaaatctcttgacaaagatggcactggacaaatccaggtgaacatc

SEQ ID NO: 682395 - DNA, 100 bp, Homo sapiens
ctgctcttccccgcggagcccgcgcagtccgcgcagccctcatcgcaactgggcccgcgcgcagggaagatcagttttcctgccatccaggctgctccct

SEQ ID NO: 682396 - DNA, 98 bp, Homo sapiens
taaggatctggcatgtttctacacaacaaaacattcatggagggggaatgtatgttttaactggaaaaagtcttccatgaaaacgtcacttttaaaaa

SEQ ID NO: 682397 - DNA, 80 bp, Homo sapiens
gcggccgcggagacctacctgcggcgtcggcagctgctgctccgaggttttcacaccagacactgcagcagacacccatg

SEQ ID NO: 682398 - DNA, 50 bp, Homo sapiens
ccatccctggaggagacctggcagcagaaggacagaataacgggctccca

SEQ ID NO: 682399 - DNA, 101 bp, Homo sapiens
aatgatgtcgtcagtaatgcctggaatgatgatgtctcatatgtctcaggcttccatgcagcctgccttaccggagccagatgaccaagatgctccagatg

SEQ ID NO: 682400 - DNA, 100 bp, Homo sapiens
cggctctgcgctggccgggggcgcgggcggcggcgccggcaggaagcagcaagatgaagagcgacgtcggcagctgagagagagagctcgtcagctaata

SEQ ID NO: 682401 - DNA, 100 bp, Homo sapiens
ttgtggatcgctgtgatcgtcacttgacacgatgaggcgagtggtacgacagagcaagtttcggcatgtatttgggcaagcggtgaaaaatgaccagtgc

SEQ ID NO: 682402 - DNA, 95 bp, Homo sapiens
cctccggaagtgctgggattacagaactggcattgcccgccttgtcgaggaatctgcaactgcagtttctgccggcagcgagatggacggtgtgc

SEQ ID NO: 682403 - DNA, 100 bp, Homo sapiens
tcaaaatggagatgttgttgggcagcattcatttcctggcaggtaatagcctgcagctggtgttttgagaagccctactgctgaaaacttaacaattttg

SEQ ID NO: 682404 - DNA, 98 bp, Homo sapiens
tggttaaagccatattggagtagcgaggaatctgattccaagcaaaaaccagtattgcctaagtgtaatcttgaacatgggcggtgctgtgagtgctg

SEQ ID NO: 682405 - DNA, 75 bp, Homo sapiens
tttggaagaggagcgctaagctgccggggaggaatatattattcgagtgcaaagaggaatttctgtggaaaacag

SEQ ID NO: 682406 - DNA, 74 bp, Homo sapiens
ccagtgtccagttcaggacactgcctgtggatcaaggtaatccatcagctgaggctctcagagaatgaaagtgt

SEQ ID NO: 682407 - DNA, 100 bp, Homo sapiens
actcaggcagtacgggaagaacttcttcagaattagaaaggagctgcttcccaataaggaaacaatgttgatcttgtctcagaatattgcccaactggag

SEQ ID NO: 682408 - DNA, 83 bp, Homo sapiens
agaacttgcagttgaaggagtataacacagcttacaaaacactacacagcaaaataatgatctgctagactgctaacccgagc

SEQ ID NO: 682409 - DNA, 100 bp, Homo sapiens
taggtgcttcgagcggaccaaggagcagatggataggtcctcagcccaggtggtggccgaaatgttattttaacgagttttctgaatttccagatcccat

SEQ ID NO: 682410 - DNA, 75 bp, Homo sapiens
gctgggaagaaggggttgcccagaaaactgaatatcctgatgttgcttggccattgagatttcgcatcctgcatg

SEQ ID NO: 682411 - DNA, 100 bp, Homo sapiens
aaatgtaaaactccaatcagataaattacaacacggatgtgggcactatgacgcccgggccagagtcctcgtttgccacatgacctccctgctccaagtg

SEQ ID NO: 682412 - DNA, 50 bp, Homo sapiens
gtagaccaactggaacaaattctcagattcgcattctcaagtctccacaa

SEQ ID NO: 682413 - DNA, 74 bp, Homo sapiens
agcctgtctcccaaagagagaactcttctcaaagaggaccctgcttactgcaatggcaccagcatgatatcatt

SEQ ID NO: 682414 - DNA, 92 bp, Homo sapiens
gccgagtggcggtccgacagagtcctccgtgtcctcccccgcatgacccccttgatgagtgccaaaccaaatatggaaatgctaatgcctgg

SEQ ID NO: 682415 - DNA, 100 bp, Homo sapiens
cgaggacagagatggcgagcgcccggattggggatgagtatgcggaggacagctctgatgaggagctacaggcctcgggcctccccggcagcgcggagct

SEQ ID NO: 682416 - DNA, 75 bp, Homo sapiens
cctgggaactccgccatgtcatccacttcgcccaacctccagatgtgtggtttttaacaacagaggagtggcggg

SEQ ID NO: 682417 - DNA, 80 bp, Homo sapiens
catgtcgggttattcgagtgaccgagaccgcggccgggaccgagggcagcagcccagacgcggcacagagagggcctggg

SEQ ID NO: 682418 - DNA, 101 bp, Homo sapiens
acgagagtacctgcttcagtacaacgatcccaaccgccgagggctcatcattctctaaccatggcacaggtagagaaacgtggaggtttgctccggaaatc

SEQ ID NO: 682419 - DNA, 50 bp, Homo sapiens
ttcctgtacagcctgcagaactgacagagcgggatgccaccagcttgtcc

SEQ ID NO: 682420 - DNA, 100 bp, Homo sapiens
gacccccagttacgcctggaatatgaaggcttccccgtcccgttaagtgggcagaccaacatccacctcagcaaaaacttcttcctgacgaatcgcgcca

SEQ ID NO: 682421 - DNA, 50 bp, Homo sapiens
gacatttcttcggcattctgcaacaggtagccctaatggagaaccttgtg

SEQ ID NO: 682422 - DNA, 82 bp, Homo sapiens
ttcaatattggaagcgctttgatttacagcagctgcagaggctgaggggatctggcggtggagcgctaggatcagacgcccc

SEQ ID NO: 682423 - DNA, 100 bp, Homo sapiens
tttgatgagaacactgctctggatgatgcagaagaggagtcctttaggaagctgcaattagaagtggatcggttggaagaactgaaaatgcaaaacatga

SEQ ID NO: 682424 - DNA, 100 bp, Homo sapiens
ggaaggcatgcggtgggccccagccctgcttctagctttcctgcctcttgaacattaaccaggtggtatttgttggaaatttcttgagaattaatacgat

SEQ ID NO: 682425 - DNA, 100 bp, Homo sapiens
aaggacagggatcacaaacactcagagtggaaaaagtaccatcatttgaaacagccaaaccaaacaggaagcttacttttctctacctagccaatgatgt

SEQ ID NO: 682426 - DNA, 108 bp, Homo sapiens
ggccaatgtgggatcgatgtttcaatattggaagcgctttgatttacagcagctgcagctcaccatggatgatgatatcgccgcgctcgtcgtcgacaacggctccgg

SEQ ID NO: 682427 - DNA, 51 bp, Homo sapiens
gccttagactatttttcaaacaggtaatactgaacaacctgtccaaactag

SEQ ID NO: 682428 - DNA, 74 bp, Homo sapiens
ccgatccccatttttattgaaagatgtattgagtacattgaagccacagggcttaaaagacaaccttcttgctt

SEQ ID NO: 682429 - DNA, 75 bp, Homo sapiens
ggaggattcagggaataggagctggggagcccttctgcgccacaggaagttggtgaaccatctaaagaagagaag

SEQ ID NO: 682430 - DNA, 99 bp, Homo sapiens
tggagacttggtaaagagcaccttgggacccaaaggcatggctgtggatgagatgaacggaaaggagctcaatggaaaacaaatttatgttggtcgagc

SEQ ID NO: 682431 - DNA, 104 bp, Homo sapiens
gcaccatgccgctcctaagcctgcacagccgcggcggcagcagcagtgagaggtgtccctggccagtgtccttccacctgtccacaagcatggggaacatcttc

SEQ ID NO: 682432 - DNA, 80 bp, Homo sapiens
gggtgctgtacaagtggaccaactatctgagcgcagacggttgatgatgaagcgccggccgtgtaaatgaagatcgggtg

SEQ ID NO: 682433 - DNA, 140 bp, Homo sapiens
agaacagctatctcgggagaaacaacaactgctacatctgttggaggagccaactagcatggaagtgcagattctggaaccgaagatgtttcgctatgctcacaaattggaggttcagagaacagatggagtactcagcc

SEQ ID NO: 682434 - DNA, 100 bp, Homo sapiens
tgaagctgccgatgccagagccaggtgaactggaggagcgatttgccatcgtgctgttgaccagatataccatctggcatctccagcctcccctccaaac

SEQ ID NO: 682435 - DNA, 75 bp, Homo sapiens
cctccccagccacgtggaacttgccgttggtggttgcctgacgaaaagctgcacttaatagaaatcactgtggat

SEQ ID NO: 682436 - DNA, 100 bp, Homo sapiens
gctgcatttgttctgcctgacttggaccctggaaaacctggccctcttcaatttctgacaaaagtttttgaaatcatgaatcctgtttatagtcctggat

SEQ ID NO: 682437 - DNA, 87 bp, Homo sapiens
gagagagagctattagagattgtgaagaagaatttcgatctccgccctggggtcattgtcagcgctggagagcgaggtggcttcaat

SEQ ID NO: 682438 - DNA, 75 bp, Homo sapiens
ctgggattacaggtgcctgctaccacacccgtcgaaatcagctgtccgccctgcctgcctgcctgtgtggtctgc

SEQ ID NO: 682439 - DNA, 100 bp, Homo sapiens
caaacctggagccagaaacattaccgtcatattccacccattactaagagcatgcttgagaagggaggataaaaactttcagaatgagcaaaacaccatc

SEQ ID NO: 682440 - DNA, 100 bp, Homo sapiens
cgaggccccccaacacctccctgttcatcaggaacgtcgcggacgccaccagaaatacaaacctggtcgatgtgatgatattttgaaatggaagcctccc

SEQ ID NO: 682441 - DNA, 74 bp, Homo sapiens
gccgagtggtctaaggcgccagactcaaggtttggacatatttgactcttttccccccaggttgaattgaccaa

SEQ ID NO: 682442 - DNA, 75 bp, Homo sapiens
ggagagaggaattcctcaagacaccattccaggtgtgctgggcatcaaggtgaagatcatgctgccctgggaccc

SEQ ID NO: 682443 - DNA, 100 bp, Homo sapiens
agatcatgaatacacaacaaaggaggttttccggaagaacttcttcaatgactggcgaaaggtccctggtgctgaaccgcctgcgtccagttgccagcgg

SEQ ID NO: 682444 - DNA, 76 bp, Homo sapiens
caagaccctcaggctggtagtgcgcaggagatctattgggaaactgattataaccactcgggcaccatcgatgccc

SEQ ID NO: 682445 - DNA, 75 bp, Homo sapiens
gcagctgaagccgctgcccctgctacaggtagatgggaaattgctgtgctggctgtgcacactttcatacaaacg

SEQ ID NO: 682446 - DNA, 83 bp, Homo sapiens
ggagatctccctgacatgcaagaacagggtccagaaatatggctacacacacctttctgcaggagagctgcttcgtgatgaaa

SEQ ID NO: 682447 - DNA, 74 bp, Homo sapiens
gctgactcggacgacgagaacctcaacaccgagtccccagcaggaagtgcacggctgtctataacgtgctgccg

SEQ ID NO: 682448 - DNA, 88 bp, Homo sapiens
ccaggtccgggtgaaagcctactaccgcggtactaaggctcgtacgtctgcatcgattatcttacgtggggcaaatgatttcatgtgt

SEQ ID NO: 682449 - DNA, 51 bp, Homo sapiens
gcgaagcagagggtccttgacattgcctcaatcctggtcctctggatgctc

SEQ ID NO: 682450 - DNA, 50 bp, Homo sapiens
ctacagcagcctggtctcactggccagaatctggtgatttagaagagaag

SEQ ID NO: 682451 - DNA, 100 bp, Homo sapiens
cagcttcttacctgaacgcttgtcttttacactgttacttcagtcagttcgatatctcaatgcctatactggaatagtgctacttcgatgcagaaaagaa

SEQ ID NO: 682452 - DNA, 96 bp, Homo sapiens
ggcccttgccttggcagagctgagttcatagccctgatgaagcaagttactctgctctcctaataaatgcaagaaaatgaccttggagggcctttt

SEQ ID NO: 682453 - DNA, 100 bp, Homo sapiens
gcggaggtggcacgcccgagcggcctcgcctgagctccgggggtcgtcgccccgcagggtgaccattgtgaggtagatattttgttctaattttccagat

SEQ ID NO: 682454 - DNA, 100 bp, Homo sapiens
ggacgaggaggacgccgatgaggatgaagatgcggcggcggcgcgccgggccgcagcggccctggaggagcagctgatgcgtaagaggggttccgttcga

SEQ ID NO: 682455 - DNA, 100 bp, Homo sapiens
ggtcctgctggaagtcgtggtgatggaggcccccctatctcttgtgaaatcccatggaaggttgtgctcagcctgtcgggtctctttcttcctgcccata

SEQ ID NO: 682456 - DNA, 83 bp, Homo sapiens
caggcggcggaggcagcaccgaggaagcatttatgaccttctacagtgaggtttttcgttggaatatacgttgcacatttatg

SEQ ID NO: 682457 - DNA, 115 bp, Homo sapiens
gtaaaggatcctgtagaaattcaaaccctagtgaataaagccaagagagaccttggagtaattcgtcgacaggacgcacaagaccagccactgctaccgcatcacgtaccgccac

SEQ ID NO: 682458 - DNA, 101 bp, Homo sapiens
ggcgccgccaataaccacggagccggcagcggcgcgggaggccgtgcggaagagacggaggatgcaaatgaagaagccccattgagggaccgctcccacat

SEQ ID NO: 682459 - DNA, 82 bp, Homo sapiens
cgactccagggctcctgtctacgaccaggctttatcctgtggataaacgcagagtgaacgagtttggggagtcctacgagga

SEQ ID NO: 682460 - DNA, 100 bp, Homo sapiens
tagcaaggatgaagaagtcaaggttgcccccaggcggtccttcctggattttcagctgaactctcatctctcaacactggcaaatattcataagatctac

SEQ ID NO: 682461 - DNA, 90 bp, Homo sapiens
ggacatcggggcagctgacctcgcccacgcccagcagcagcagcaacagctcctggaatgaggccgcccatgggaggccatatgccaatg

SEQ ID NO: 682462 - DNA, 82 bp, Homo sapiens
cgtgggtccgcgctgcttccacccaacttcctgttagctactgatctacttcttgcctggaatcccatttgtttggggttgg

SEQ ID NO: 682463 - DNA, 80 bp, Homo sapiens
agatgaccgtgggcagccccccgcagacgtctcggaagggtgctgacctggaccgggagaagaaggctgccgagtgcaag

SEQ ID NO: 682464 - DNA, 100 bp, Homo sapiens
atcagatctgccccaaatgcagaggggaagacctccagtctataagcccaggaagccgtcttcgaactcaggagaagcaaggagaacttcaacaatgtcc

SEQ ID NO: 682465 - DNA, 100 bp, Homo sapiens
gccgggaggctgtgaagcagtacagctcctacaacttcttccgccccgacaatgaggaagccatgaaagtccggaactcacagtcctcaggcccatgaca

SEQ ID NO: 682466 - DNA, 100 bp, Homo sapiens
gcaaccgtttccgcctcctgctagagcggcgaaccgtgggcagtgagggacgatgatgacattaatgatgttgcatcgatggctggagtaaacttgtcag

SEQ ID NO: 682467 - DNA, 90 bp, Homo sapiens
ggaaaagtgcggacaaattcataaagctttacaagggagtgaagtgcaaccagtggtctgaggaggcttctatggtgtttcgaaatcatg

SEQ ID NO: 682468 - DNA, 97 bp, Homo sapiens
ccttcacggaatgtatcctccgaagctatggcctgaagacgggattctttaggtgcgggccagtgctattgcccaggacgcggaccagaactacgac

SEQ ID NO: 682469 - DNA, 75 bp, Homo sapiens
tgcatggggctgctccccaggacctgagcaggaacctggagttttcaggaggagacatcacagctttcccagatc

SEQ ID NO: 682470 - DNA, 80 bp, Homo sapiens
agagtgtgaccaactggaaccctcaagaggaccgaggtgaaatgtgaccattactggccattcacggaagaacctatagc

SEQ ID NO: 682471 - DNA, 76 bp, Homo sapiens
aaattacaaaaatgtcatcagctaatgtctacctcgaatcaaaggcatattctcaagatgcctacctgaaaggcaa

SEQ ID NO: 682472 - DNA, 100 bp, Homo sapiens
gccgctgcagcctccgacagatgtgagccaggacccgaggcacatggtgctggttcggggactcgtgctgcctgggtcacggagactcaccagttggcag

SEQ ID NO: 682473 - DNA, 100 bp, Homo sapiens
gtgggccaggtccacatcttcttccaggatgggatggtgacgttgactccaaacaagggtgtgtgggtctcagcggcggtggcagccgaggtgcaggatg

SEQ ID NO: 682474 - DNA, 100 bp, Homo sapiens
gacaggacagaaagagtgtgcagcggattaaagctaaagacatagttcctggtgatattgtagaaattgctgggatggcaccacagatgtgacgcggaca

SEQ ID NO: 682475 - DNA, 97 bp, Homo sapiens
aagaagagaaccttgaagcaagtggtgccactgcagaagcgggcagtgccctccatgaggtgcgaaactgtcttcaagctgactcctgaattcttca

SEQ ID NO: 682476 - DNA, 98 bp, Homo sapiens
cgcagaggaaggaagccggcgggcggggctggacgtaaagaaagaagtgatgcactcaattctgcaatagataaaatgaccaagaagaccagggactt

SEQ ID NO: 682477 - DNA, 90 bp, Homo sapiens
acagctaagacgccaggacccactggaagcctagaaatggtagaagatgacagattattgaggttgtcccaaaagaagttctgtgctggt

SEQ ID NO: 682478 - DNA, 75 bp, Homo sapiens
ctaggttccacccttttctgggaacgtgagtatcaaccaagccagtgatgccttcacttttcctgggcagcgatc

SEQ ID NO: 682479 - DNA, 75 bp, Homo sapiens
gccttcctgctctcctgccagatccctggcttgagattgtgcgagccatgacctatgtcatcaaccagggcctgg

SEQ ID NO: 682480 - DNA, 50 bp, Homo sapiens
agcgtcgtgcacgcgggccagaggcgtatgaagtattcagaacagaagag

SEQ ID NO: 682481 - DNA, 90 bp, Homo sapiens
cgagagactttgtcagctcccgcacagtaacgtatttgtggaaacattagacaaatgttttgaaaatgtctgtgagctggatttgatttt

SEQ ID NO: 682482 - DNA, 100 bp, Homo sapiens
tcgtgtcgattccgcgccagttgcctggctcacattcggaggctggtgtccagggtctcagcgcgggggacgactcagttgagtcgtggggacagcttga

SEQ ID NO: 682483 - DNA, 83 bp, Homo sapiens
cctcaaggactacagtatgcacttaatgtccctccatcactggtgcaagctatatttaacggagatcctgatgaagttcgagc

SEQ ID NO: 682484 - DNA, 108 bp, Homo sapiens
agcgccagcggccgagcgggcggcttcctggcctgggcgctccggtggcggcggaggctccctggggaagggaatgcagggttgctggggctgggcccagaagcagca

SEQ ID NO: 682485 - DNA, 83 bp, Homo sapiens
cgaacccagcattttcggcaaccgctgctggcagttttgccaggtgtttgttaccttgcaattctgtggtgttcttggtcaca

SEQ ID NO: 682486 - DNA, 50 bp, Homo sapiens
actcatctgtacctcacttagaaagctcctcagagaaattttgaaattgc

SEQ ID NO: 682487 - DNA, 100 bp, Homo sapiens
cacaccaaagacgttgttagagaatacaggaggagcatattatttaatatctagaagtctagggccagaatttggtggtgcaattggtctaatcttcgcc

SEQ ID NO: 682488 - DNA, 75 bp, Homo sapiens
cgttgacaaggcactgctttttcatgacgtccttcagtgaatctacagacctattttctcaggagctcagcctgg

SEQ ID NO: 682489 - DNA, 87 bp, Homo sapiens
aagacggaaatccaaaggcagacagtacgggctcccttcgccaaactcttcattttctctcacactgatttatgtcagtacatggac

SEQ ID NO: 682490 - DNA, 100 bp, Homo sapiens
atctgaaggaggggcttctggttagcccaggtgtcatggagaaactccagctgggcccagagattctgcagcgggaaaatccaaggcttatttatgccag

SEQ ID NO: 682491 - DNA, 100 bp, Homo sapiens
ctccaggagcccagacaccagccccccaccatgaatacgagctctgagaccaccatggaggaggagctggggctggttggggcaacagcagatgacacag

SEQ ID NO: 682492 - DNA, 90 bp, Homo sapiens
cacttcactgggcttgctacaatgtttccacgggctcccttgctcagcagtatgcgcaccctaacgctaccctgcacccacatactccac

SEQ ID NO: 682493 - DNA, 100 bp, Homo sapiens
gttcgtccgcggagatctctctcatctcgctcggctgcgggaaatcgggctgaagcgactgagtccgcgatggagggtctcactctgtcacccaggctgg

SEQ ID NO: 682494 - DNA, 73 bp, Homo sapiens
tacaagctgatctccctgctaaatgaaaaagggcaagatactggggctgcctgctgtttcccggggagatcat

SEQ ID NO: 682495 - DNA, 140 bp, Homo sapiens
catcagcgacgccgcgcagctacctcatgactattgcaccacgcccggggggacgctcttctccaccacaccgggagtccacaggtcctggctaccctgggaagagacaagaagtaaatgaagaaagaggaagattccag

SEQ ID NO: 682496 - DNA, 75 bp, Homo sapiens
cgagttccttttagacagttccagatgaatgaccaagacggcccgacggccatggaggctgaagagacgatggaa

SEQ ID NO: 682497 - DNA, 50 bp, Homo sapiens
cttaagagaaggctataatgaaccagaggactactgagcccagccaggct

SEQ ID NO: 682498 - DNA, 97 bp, Homo sapiens
cccgctcaatggcgactccctcaccgagtacgaagcgggcgtttgcgaaggcagaagaaatccttagacaagagctggagaaaaaagaaacgcctag

SEQ ID NO: 682499 - DNA, 100 bp, Homo sapiens
gagcttccgggagggcggctcgcaggttgaaatcacaaagattagacacctttttagataggtgttcttcagcaccactgacaacacggttctgacagta

SEQ ID NO: 682500 - DNA, 102 bp, Homo sapiens
agcaagattgcgagggtcccacgactcccgcctggaattcctcctgatcagcagagactgatctttgctggcaagcagctggaagatggacgtactttgtct

SEQ ID NO: 682501 - DNA, 75 bp, Homo sapiens
cgagctcaacgccaggcgccgctcctttacagttggctggggaacagaccagggaattggtggatttggagaaga

SEQ ID NO: 682502 - DNA, 83 bp, Homo sapiens
gattcctgcatttctgaagatctcaagatctggactactgttgaaaaaatttccagtgagatggaccacacatccccgaccta

SEQ ID NO: 682503 - DNA, 100 bp, Homo sapiens
tggacccgaaaccatgcctcactgtcctaggcaaggtgtcatggagaaactccagctgggcccagagattctgcagcgggaaaatccaaggcttatttat

SEQ ID NO: 682504 - DNA, 98 bp, Homo sapiens
ttgctgttggggactcggaaggccgtatttgggtctatgacgttggagagacgcaagatggctgtcctctctaaggaatatggttttgtgcttctaac

SEQ ID NO: 682505 - DNA, 98 bp, Homo sapiens
ggctcctccagctaccggcccaaggccatctacctggacatcgatggacgcattcagaaggcacagcgtcaccttcgtcccctccggagctgcacgtg

SEQ ID NO: 682506 - DNA, 82 bp, Homo sapiens
ggcctgcgtccgagtctccgccgctgcgggcccgctccgacgcggaaggttctccacagacgaaggtcaatgctggcaaacc

SEQ ID NO: 682507 - DNA, 90 bp, Homo sapiens
cgtgacggcatcgtccccttcctgcaggccaggcagtacatgcagatgctacccaaggaaaagcagccagtagcaggctcagagggggca

SEQ ID NO: 682508 - DNA, 83 bp, Homo sapiens
gaagaagtgaagaaattattggtacctgcaaggctaagaatattgtacacaaagattcttgatgttcttgaggaaatccctaa

SEQ ID NO: 682509 - DNA, 82 bp, Homo sapiens
tggataccaaggaagagaagaaggaacggaaacaaagttattttgctcgtactatactggcaattgctggagaagattttgc

SEQ ID NO: 682510 - DNA, 101 bp, Homo sapiens
aagatgatgaagccgaggtagaagaagatgaacccacagatttggtgttggatcccagaacaagaatgattttattcaagatgttgactagaggaatcata

SEQ ID NO: 682511 - DNA, 100 bp, Homo sapiens
cttttcagctacaacatcatcttctgggcaaccatcggcttgatcaggaatctggccctgtgcccagccaaccatgccccgctgcaggaggcagcggtca

SEQ ID NO: 682512 - DNA, 101 bp, Homo sapiens
gagggttctgacacgttctcacctcgcgggatggcagctgctgatttgtcccatgacaagaggctacagtggatggaaactctgtgactgtaagaattgtg

SEQ ID NO: 682513 - DNA, 89 bp, Homo sapiens
caaaaatctggtgaaattgccggcaagagggagttaaggacattccaggcagaggcaaggtggtatcacggaaaacttgacagaacgat

SEQ ID NO: 682514 - DNA, 100 bp, Homo sapiens
gaaaacggaagcgcagggagaaggaagaggtgtttgaaaaggatgttgcttcagagtgtgaagtcaaatgcatgccaacattccagttttttaagaaggg

SEQ ID NO: 682515 - DNA, 100 bp, Homo sapiens
cggtgcaggtgaggggcgcgcgcctgcccagctttgcagcccccgaacgcggcctcgcacagggtgataaaagaaaatgtggctgaagttacccgaagtt

SEQ ID NO: 682516 - DNA, 75 bp, Homo sapiens
tctgcgctcccttcctcagcgtttcaaggttacaagcctgatgaagggaaacgaggggatgcctgtgaaggtgac

SEQ ID NO: 682517 - DNA, 98 bp, Homo sapiens
tttgctgagctggttggccctgtgatccctcaagactggtccacggagtgtatgaccacaaacagccatcaagctgtatgcaggagctattcttgaag

SEQ ID NO: 682518 - DNA, 75 bp, Homo sapiens
cagcaaggtttactctgaatcccaatcctacaggagttcaaaacccacacatgtcacctcatcatctcaaggagg

SEQ ID NO: 682519 - DNA, 83 bp, Homo sapiens
gtgtttcaagattgatggacttactagcggattccagggaagttatacgtaatgatatacatcgagatatttccaagcagaag

SEQ ID NO: 682520 - DNA, 109 bp, Homo sapiens
gccagcaccagcaggtccctggccctcatgtacgagtccgagaaggttggggtcgcctcttccgagcttgcattgaaaggctctagttacagtggacttcttgaacgac

SEQ ID NO: 682521 - DNA, 96 bp, Homo sapiens
tcatctcctgctccatgtcgactgtaacaggtgactattatatggttaaaaagattttggaggaaaacagttcaggtgacttgaacataaattgcg

SEQ ID NO: 682522 - DNA, 51 bp, Homo sapiens
ggtcaccggtcgctctcaggaacagcagccattcaaactcctccccacgac

SEQ ID NO: 682523 - DNA, 98 bp, Homo sapiens
gcaaaagcaagaaatggcggcagatgctccagttccctcacatcagccagtgcgaagagctgcggctcagcctcggcgacgttgtggacgtttaccag

SEQ ID NO: 682524 - DNA, 80 bp, Homo sapiens
cctggatcttcgaacttttgacacggctttggaaacgacgtcatgtgttaggttcattttccagacactgaaagagcaga

SEQ ID NO: 682525 - DNA, 51 bp, Homo sapiens
agcaagtgcagatagatggccttattattcaggacagaatattcaagcaca

SEQ ID NO: 682526 - DNA, 50 bp, Homo sapiens
cgagaaccgcagggactggccgagcatttcacaggacatgcaacgccagt

SEQ ID NO: 682527 - DNA, 100 bp, Homo sapiens
gggcgccctgacgcccagcatcaggaacctggctatggagaaggtggcctcggcagtcctgtttccctgtaagacttcacagagaatgcagttgtcttga

SEQ ID NO: 682528 - DNA, 118 bp, Homo sapiens
attttctacagaagtcaaggcagtcaagctgcggcgagatagatgtctttggtggacttgggaaagaggttgctagaagcagcaagaaaaggccaagatgatgaagtgagaacgttga

SEQ ID NO: 682529 - DNA, 101 bp, Homo sapiens
caacagaagaagccctttgaggagcactggaggaagcacaccctgtcctatgtggacgttggcactgggaaggacagagcgggatgccaccagcttgtcca

SEQ ID NO: 682530 - DNA, 100 bp, Homo sapiens
ggcatgcccatcactgaggtcttcaaggaagagatgggcattggcggggtcctcggcctcctctggttccagaaaaggacaatctctatgggaagcagaa

SEQ ID NO: 682531 - DNA, 100 bp, Homo sapiens
gctgctgtcgccgctgctgggagatgggcctactcgcccgccaccctgcgctgccgccgctctgaggagttaaagctgcatgaaagcggttacgatgctg

SEQ ID NO: 682532 - DNA, 50 bp, Homo sapiens
cggcaactcagaaacatcaggtccaagcagctccacagctgggtcctgct

SEQ ID NO: 682533 - DNA, 98 bp, Homo sapiens
tgtttctggccacgtgcttcaacgctctgctgcccgctgtgagggaaaagatttgtattgaacgatgtcttgagaggggaaagagtagtggtaggagt

SEQ ID NO: 682534 - DNA, 50 bp, Homo sapiens
aggacgaaggccctactgggcaaggtccctcgtctgagctggctcactcg

SEQ ID NO: 682535 - DNA, 75 bp, Homo sapiens
aagaacgctgcagagaatatcacattccatgtccatatcagctcattcagaccaataagctgaagcactacccca

SEQ ID NO: 682536 - DNA, 90 bp, Homo sapiens
tagcaccccgagaaccgtcagtttgagccagatgaacggtgtgctgctgaggactgtcttggaccctgtcactggggatttgtctgatac

SEQ ID NO: 682537 - DNA, 75 bp, Homo sapiens
ctatgaatgctacttggatgcctcttaagcatcgagagtaaacatgaggttacgatcctgggaggacttaatgaa

SEQ ID NO: 682538 - DNA, 49 bp, Homo sapiens
gagacatggaccgcggcgagcaaggaaaagaaagctgcattggaaaagg

SEQ ID NO: 682539 - DNA, 74 bp, Homo sapiens
gcagagcatgcagaagtcctcgctggagtttcataagttcagcatcatcatcaagccgctgtttgagtcgttca

SEQ ID NO: 682540 - DNA, 75 bp, Homo sapiens
cttggcaggagtgaaaggactgaccatgctggatcacgaacaggtgcccctgggcgctgggattgctctagcctg

SEQ ID NO: 682541 - DNA, 75 bp, Homo sapiens
cctggacctatgaatatccagtttgagccatcggatctaagatccaaaagggtttttaatgaccacaacaagcaa

SEQ ID NO: 682542 - DNA, 50 bp, Homo sapiens
tgtcatgaactgccacatgaattagatatggaatgtgcagatgtcccact

SEQ ID NO: 682543 - DNA, 83 bp, Homo sapiens
aggacaagcaggtctaccgggccacgcaccgcctgctgctgctgggcgatcagtgggtgaccgcggctgcgagggactttgtc

SEQ ID NO: 682544 - DNA, 87 bp, Homo sapiens
gaagaggaggtgtatcccctgttaaaaccatatgaaagcgtgatgaagggagtgcatccgccccaacccttttccccctcgtctcct

SEQ ID NO: 682545 - DNA, 100 bp, Homo sapiens
atgaaggaatctgtcttgaaaccaatagtggaactgaaaagatctcaaaatctggacttgaaaagactctttttgatcagaacaatgctgcaaaaaaaga

SEQ ID NO: 682546 - DNA, 82 bp, Homo sapiens
accgctgccctcagctccgagtccagggcgagatgattcacagcgtaagcagtatgaagagtggctccaggagacccaacag

SEQ ID NO: 682547 - DNA, 98 bp, Homo sapiens
gagagagggaagtcgcctctgtgctctcaccaggagactaaagtccatcaaaaacatccagaaaattaccaagtctatgaaaatggtagcggcagcaa

SEQ ID NO: 682548 - DNA, 83 bp, Homo sapiens
agccccgctaccggactacatgtcggaggagaagctgcaggagaaagtgtgattctggagagtgacccccagcaagtgatcca

SEQ ID NO: 682549 - DNA, 100 bp, Homo sapiens
cgagccgcccgagtgggaaccgcgctggaggaaggcgctgcgcggcaaggagaacaagtagccatgtattctgacttgccattcaagtcacccattcgag

SEQ ID NO: 682550 - DNA, 100 bp, Homo sapiens
ggagagcccttcagcgaggaagctacacttttcaccaaggaactggtgctgcagcgagaggtgggatgcagatcttcgtgaagaccctgactggtaagac

SEQ ID NO: 682551 - DNA, 82 bp, Homo sapiens
cggcgccatcttcgaacttagacttccggaaggactttggcgaggggggggccctcagcctcttggccttgaacgggctgtt

SEQ ID NO: 682552 - DNA, 75 bp, Homo sapiens
ttcctgtgcagcctgcagaactgaggaactaccctgccctgacagaggctggggatgaaggaggaagagacagcc

SEQ ID NO: 682553 - DNA, 100 bp, Homo sapiens
gaaaatttcaaagtaaaggatattattagaattctgccatgcaaggactccttccacagatctagtttcaggaaatgtgaaacccagttgtcacagggca

SEQ ID NO: 682554 - DNA, 75 bp, Homo sapiens
aactcctctctgttaatggagtgggaggtggggaagacagggctccagctaccacaggacgggctctgggtatag

SEQ ID NO: 682555 - DNA, 90 bp, Homo sapiens
gacagatcctgtgtcacccggcaactcagaaacatcaggtccaaggacgtgttcctcatgatccggcgccacaagaccaccatcttcacg

SEQ ID NO: 682556 - DNA, 51 bp, Homo sapiens
caaactgtttgaagaaatcagagagatgcggttcatgctattattcagccg

SEQ ID NO: 682557 - DNA, 100 bp, Homo sapiens
gtcggcctggaccttgcagccgcaatggagtatgctgctgctgttccgctttgcgtcctcgctacaaacgcctggtggacaacatattccctgaagatcc

SEQ ID NO: 682558 - DNA, 96 bp, Homo sapiens
agcttaaaaagctgcacgcaagtgttaaacttctggtgaacatgattaaagatgatgggacagttattcatttcaacaatcccaaagtccaagctt

SEQ ID NO: 682559 - DNA, 112 bp, Homo sapiens
gctggtggtgttgtcgtggccggagcggcccgcgcctgggctgccggcacttcgcggcaggtgagaagccctaccactgcaactgggacggctgcggctggaagtttgcgcg

SEQ ID NO: 682560 - DNA, 50 bp, Homo sapiens
ggagtaaccctcactggagaatccagaggagttgcccaagtatctccgag

SEQ ID NO: 682561 - DNA, 71 bp, Homo sapiens
cctccaaggaaaatccacctcgcagcttgtaaatctacaggcacgtgtggttctcaaatataggcattctg

SEQ ID NO: 682562 - DNA, 95 bp, Homo sapiens
ggcctcccaaagagctgggattacaggctgctgggcctttgcaacaacttctcttatgtggtgatgctgagtgccgcccacgacatccttagcca

SEQ ID NO: 682563 - DNA, 100 bp, Homo sapiens
caggtgtccatccccgtgctgagtggtgcttcatgccccacctccaaccaagatcaaacgggagctgcacagcccctcctctgagctgtcgtcttgtagc

SEQ ID NO: 682564 - DNA, 74 bp, Homo sapiens
atgaaagagaagtttctggtcactccccaggattatgcgcggcctggcagctgcgattcagccacctcgtgggg

SEQ ID NO: 682565 - DNA, 98 bp, Homo sapiens
aggctggtgagcgatgggaacatcaactcagatcgcatccaggagaaggtggactctattgatgacagaacctgcaaccatggtcgtgccactagcca

SEQ ID NO: 682566 - DNA, 82 bp, Homo sapiens
cctgggcgtcgctgaagctgtgtctgcggggaggcagcggaaggcggcaggtcatcatcagatttgaaatatttaaagtgga

SEQ ID NO: 682567 - DNA, 74 bp, Homo sapiens
tgatggaatgcttgacagagatgagtttgcagttgagtccttcaataatgttaaacagtggctgcaggaaatag

SEQ ID NO: 682568 - DNA, 74 bp, Homo sapiens
ggaaaagcgagcgatcgagcgagcgcgcgcgcgaaaactccgggcagcacttttccagccattaactccaggct

SEQ ID NO: 682569 - DNA, 111 bp, Homo sapiens
ttggaggtgtcagtgttaaaggaacctctacaacgaaggtgaagccacggaagataagaacactctgctccagccaaggtggtgagggcagctgttcctaaacagcgcaaa

SEQ ID NO: 682570 - DNA, 100 bp, Homo sapiens
gtctacaccatcttgactgtccagctctttgcattcttaaacctactgcctgtagaagcagacattttagcatgatgaatcaccaacaccagcagcagat

SEQ ID NO: 682571 - DNA, 87 bp, Homo sapiens
aacgagaaagagatgcgaaacaagttgcagagctacgtggacgcaggaactccagtgtttcccattaaacactaccaggacaaaatc

SEQ ID NO: 682572 - DNA, 100 bp, Homo sapiens
agaatgtttttgaccagaaaaccgacaaccttcccagaaagtccaagctcgtgtaggctattgtcccagatatatgctgctgttattgaggctgttttgg

SEQ ID NO: 682573 - DNA, 96 bp, Homo sapiens
tgaagatgcttatgacaaactttctccagaaaatgatctttgcagattatcctgtggaaggaaaatgcctaaagtcaaaagaagccggaaagcacc

SEQ ID NO: 682574 - DNA, 100 bp, Homo sapiens
acggaaagaaggaggccagtatggcttagtggctgcgtgtgcagctggagggcaggaagccttggaagatcgtttggaaaggattaatcgagaactgggt

SEQ ID NO: 682575 - DNA, 100 bp, Homo sapiens
gaatgtctcatgttcgagtctggggctgtcgctgtgctctctatttggagatccaattcaggaagcaacacattggagaatggctactttctatcaagaa

SEQ ID NO: 682576 - DNA, 90 bp, Homo sapiens
ggagattgcgagggagcgatgcggtgcagcgcggtctggctcccagccatgaaggctaaggggctggagatctcaggcaccttcacccgc

SEQ ID NO: 682577 - DNA, 74 bp, Homo sapiens
gcggctgggcgggagccccagagttttgctgctgcagcccattgagagtgacgacatggagcacaagaccctga

SEQ ID NO: 682578 - DNA, 75 bp, Homo sapiens
tttcaggaaaacagagaaagaagtgataggagggctctgtagagtccgaaattgaagttcagaggaagaattgcc

SEQ ID NO: 682579 - DNA, 99 bp, Homo sapiens
gatggcaacctcgtgggctcctccaagatcgcagcccgacaccagcagccgctcttctaaaacattcaaaccaaagaagaatatccctgaaggatctca

SEQ ID NO: 682580 - DNA, 98 bp, Homo sapiens
gaaaatccatcagtgccagcataccaatgaacctctattcaagttgacctgacagttcaagaaaaggagaaatatcttaatgtgtctcgctggttttg

SEQ ID NO: 682581 - DNA, 102 bp, Homo sapiens
cagccgagatgccgggggagcggggccttccacaccccctccgtgggtgtgtggttgaatcgctcctagctgacccctcacgtctcttatgatacgtacaga

SEQ ID NO: 682582 - DNA, 100 bp, Homo sapiens
ggaagattcgaggcggcgggggacaagtcggcgccccagagcggacgaggtcatttaggaaatcgtaaatcatgtgaagatgggactcttggtatttgtg

SEQ ID NO: 682583 - DNA, 74 bp, Homo sapiens
aagaaccatcctataaacgggaaagattgactagtttcacaggtcacagatgtgacattgatgtgtccactgaa

SEQ ID NO: 682584 - DNA, 74 bp, Homo sapiens
ctgacggagatggtgcagaagatggaggaggtatctcaggagattacatttcagcttgaaaaagggtcggtgga

SEQ ID NO: 682585 - DNA, 75 bp, Homo sapiens
aaggcgcgagagaatggatgatagtagtgaatcttgggatttagaggaaaaactgcttgatattagaaagaagag

SEQ ID NO: 682586 - DNA, 96 bp, Homo sapiens
cagcagcgctctgtcattctggacaacctcccgcacccctatgccattgctgtctttaaggatcaggggggtttgggtattgctatcagcgaagaa

SEQ ID NO: 682587 - DNA, 100 bp, Homo sapiens
ttcgctgacaggtccagttgcagatacaaacttggattttttccagtctgatccttttgttggcactatcagttgagggatttgcagttgataaaatggc

SEQ ID NO: 682588 - DNA, 50 bp, Homo sapiens
tcctcctccacctcccacatttcatcagaagggagaattccacaagttgg

SEQ ID NO: 682589 - DNA, 90 bp, Homo sapiens
caaagagggtcatctcttctattgtacctgcaggtgcttacactccagagcccctcagcagtttccggtgggctcttctctcaactggcc

SEQ ID NO: 682590 - DNA, 98 bp, Homo sapiens
gatctgaaaacgagcccctatcctaggattacctgaaggtgaaacagattgagccagaaggaagacaatgctggtgtacaaagataatcaatgctgat

SEQ ID NO: 682591 - DNA, 75 bp, Homo sapiens
caagggcgatgggatgcgggggctcgcggtgttcatctccgacatccggaactgatcagttccatgacaagaccc

SEQ ID NO: 682592 - DNA, 100 bp, Homo sapiens
tcgagccccgtggaatcccgcggcccccagccagagccagcatgcagaacagttctccttactatgacaatgtccgccccctctcttaccctgattcgga

SEQ ID NO: 682593 - DNA, 101 bp, Homo sapiens
gccttgacgaagtggcagaggaacttagtttcagaaaagggatccctaacatcagaagagtttgctaagcttgtgggaatgtctgtcctcctagccaaaga

SEQ ID NO: 682594 - DNA, 83 bp, Homo sapiens
cgcaggctccggcttccgtcccggacagagcccgtggtcgcgcagaacaggccgcccgcctgaagaaactacaagagcaagag

SEQ ID NO: 682595 - DNA, 74 bp, Homo sapiens
agagcgtgaccgagagcgcgaatatcgtcatcgttagaaggtacagtatatcagaagtatgagccgatcttttt

SEQ ID NO: 682596 - DNA, 100 bp, Homo sapiens
gcagacattgacctcaccaagagggcgggagaactcactgaggatgaggtcacgcatgaagggagcaccgtggagaagacagtggcccctacagaatgtt

SEQ ID NO: 682597 - DNA, 100 bp, Homo sapiens
ccatagtacctacagcagcactccagatcgcgggagagcccaatcacggggcgagctggacctggctgtgatcatttataatccttgactcctccgctcc

SEQ ID NO: 682598 - DNA, 100 bp, Homo sapiens
gggcgcgcgagctcgcgctcttcctgacccccgagcctggggccgaggcaaatcctgatcctaactgttgtcttggagtatttgggctgagcttgtacac

SEQ ID NO: 682599 - DNA, 75 bp, Homo sapiens
ccaggatggggctaacaaacttcaccctcaactacctcaggggcgatgccagtccctccactccagaggagaacg

SEQ ID NO: 682600 - DNA, 96 bp, Homo sapiens
ggccgcgacctggttctcccggagtctacaatcaggatcctcatgaccagccaaagagaagaagaattaggaagcataaatcaaagaaaaaattta

SEQ ID NO: 682601 - DNA, 87 bp, Homo sapiens
gaaaatgcaggctgcaacaaaattggcaacttcagtactgacatcaagtccaaaagaaactcttccttcaaaacctgtgaagaaaga

SEQ ID NO: 682602 - DNA, 75 bp, Homo sapiens
tcctcttacctacttaacaggaacagggaaagggtgtcccccaacggtgtctgacttccagcaactgctggcctg

SEQ ID NO: 682603 - DNA, 100 bp, Homo sapiens
tctgggcccagaggacttctggcctttggcacgtcctgctccgtggtgctctatgaccccctgtatttgctggccgttggttaatgtcgttttggacggg

SEQ ID NO: 682604 - DNA, 50 bp, Homo sapiens
ttgccggccccaacacggaccttgcaaaagctggcaggctgacagaggcg

SEQ ID NO: 682605 - DNA, 101 bp, Homo sapiens
cgagtgcgggcagcagcagccccggggcccggagagagttcgcagtatgtgcagtgcgtggccgggtgtttgcagctgatgctccgggtcaatgagtaccg

SEQ ID NO: 682606 - DNA, 83 bp, Homo sapiens
ggagctgtgcagccgcgaggaggcgcgggaggtgttcgagaacgaccccgagacggctaactcaggtgagatggagccgctat

SEQ ID NO: 682607 - DNA, 74 bp, Homo sapiens
ctgcggtcgaagaaggggacgccgacaagtggaggacctggagaggaatgacggctcggccgagaggccttact

SEQ ID NO: 682608 - DNA, 98 bp, Homo sapiens
attcgtacctggttccccaaggaaaatcttttcagcttccagacagcaaccacaactatgcaagcgccaggatatcttcacctgtggactggtcgggg

SEQ ID NO: 682609 - DNA, 74 bp, Homo sapiens
gaacatgcaagaaacatatactgcttacctcattgaaacaaggggccttttgagcagctgcttctgcaagagga

SEQ ID NO: 682610 - DNA, 100 bp, Homo sapiens
tgcagtccagttcgggagctaagtcacttaaacactgtgtgatagttcctacacatctcattatagtttacttaattcagtgcacaaatgagatgaatgt

SEQ ID NO: 682611 - DNA, 100 bp, Homo sapiens
ggcggagatcagcatgaccagcactcgttggcggtggtggaagctacaatgattttgggaattacaacaatcagtcttcaaattttggacccatgaaggg

SEQ ID NO: 682612 - DNA, 51 bp, Homo sapiens
ctgaggagtcgccgccgccccgagtcccggctggagtacagtggtgcgatc

SEQ ID NO: 682613 - DNA, 82 bp, Homo sapiens
tgcgatcagatcgatctaagatggcgactgtcgaaccgactaatagggatgccaaaggaaaaatatgatcctccagatcctc

SEQ ID NO: 682614 - DNA, 87 bp, Homo sapiens
tctctctttctggcctggaggctatccagcgataaaagaatcagagtgtctcaacccttgacaagaggaccaagtgcctttattcca

SEQ ID NO: 682615 - DNA, 100 bp, Homo sapiens
gaggaaaagctcgcaccaggcaagaataccctccaataccctcggttccagggtctccctccactgctgtagtaacccgggtccggggcctcggtggtgc

SEQ ID NO: 682616 - DNA, 100 bp, Homo sapiens
gaatcggggagcgtccggagctagctggatcctctaggcaggtatgatctcgtgaaatcttgagagaaactgaatgacgaatgaaactattgttcctgtt

SEQ ID NO: 682617 - DNA, 100 bp, Homo sapiens
cgggccgcgggctgcggacgctcggtcccgcgctgcgcatccccgcggacgccacagcgctaatgttcgtggcatcagagagaaagatgagagctcacca

SEQ ID NO: 682618 - DNA, 50 bp, Homo sapiens
gtgtgcatgacactcctggaaaacaggccttggacaagattcgctatgag

SEQ ID NO: 682619 - DNA, 98 bp, Homo sapiens
aactagaccttgcgtgtggagagagaattcgactggagaagatcagcggtttgagtgctacgtttgcagaaattttcttggaaataatccaaagcagt

SEQ ID NO: 682620 - DNA, 87 bp, Homo sapiens
agcgcggagcccggctcccgcaccatggaggaggacgacagctacgacaagttggatggcttgaggactggtactaaaaggaaacgt

SEQ ID NO: 682621 - DNA, 74 bp, Homo sapiens
tcacacgcataatggatgaaaggaaccgacagaatgcatacacagccacagctatcaacagcaccaacttctgc

SEQ ID NO: 682622 - DNA, 95 bp, Homo sapiens
ctatggatgatcgagaggatctggtgtaccaggcgaagctggccgagcaggctgagcgatacgacggacccgtgcatctcttccgactctcgggc

SEQ ID NO: 682623 - DNA, 92 bp, Homo sapiens
ccgccgtctcttcgagttcttcgtgctgctcaaggagccagggagtaacgaagagatcaaagagttcgccgcgggctacaacgtcaaattcg

SEQ ID NO: 682624 - DNA, 100 bp, Homo sapiens
cgccgtctccaagatgtagctaatgaccgtggttcccactgaggtcccagtagggatggcacaatcagcgaggacaccatccgagcctctctcatctctg

SEQ ID NO: 682625 - DNA, 50 bp, Homo sapiens
cttgatctgtttactcttgataaggttagtcatattgatgtgatcacagc

SEQ ID NO: 682626 - DNA, 75 bp, Homo sapiens
ggaaaagcgagcgatcgagcgagcgcgcgcgcgaaaactccgggcaggtggtagctgagcacccagatgcttcag

SEQ ID NO: 682627 - DNA, 75 bp, Homo sapiens
cagtgaaggctcggggctgaagcggtggttcaactcataatgacaagagacagtgatggttatgaaaactcaaca

SEQ ID NO: 682628 - DNA, 100 bp, Homo sapiens
ttaagtcgattcacaggagcaacaatatttgaggctactccagagcaaataagcatggacctcaagaatgaattgatgtaccagttggaacaggatcatg

SEQ ID NO: 682629 - DNA, 98 bp, Homo sapiens
ggacatcctggaagctgggaaatggacgagattgaggagctgcgggccgagatgctggagatgcgggacgtctatatggaggaggacgtgtatcagct

SEQ ID NO: 682630 - DNA, 80 bp, Homo sapiens
ccgctttggcgccaaatcctgagaaactagatgatggccatttaaacaactctttgagctctccagttcaagcggacgtg

SEQ ID NO: 682631 - DNA, 101 bp, Homo sapiens
gccgggaggacatctacaagcgggtctccaattgagaaacatggcactgtttttcctgcactctacccacctattgctggacttctgttgtacaagttggc

SEQ ID NO: 682632 - DNA, 83 bp, Homo sapiens
tgctcttgcaactgacgcagtcactgcagcactggtggaacttgaggtgtacaagggagaagaagccacattccaaatctcag

SEQ ID NO: 682633 - DNA, 82 bp, Homo sapiens
acaaacaggttttccagaggaccagctttcgctttctgaccagcaggagatctataaggacaggcagaaattctcagaacag

SEQ ID NO: 682634 - DNA, 95 bp, Homo sapiens
tttcttcactcctcttcacttcttcaattcatgatgttgctatcaaaagttgagaaattgtcagaagaaatcatggagataatgcaaaatttaag

SEQ ID NO: 682635 - DNA, 75 bp, Homo sapiens
tgcaaaacgtgactccccacaataagtactccaaagattcaggtttactcacgtcatccagcagagaatggaaag

SEQ ID NO: 682636 - DNA, 75 bp, Homo sapiens
agacgagaagcctgaaaagtcgcagcgagctggagccgccggaggcaggatggggaagcagaatagcaaactggc

SEQ ID NO: 682637 - DNA, 100 bp, Homo sapiens
ccaggctggtcttgaactccttccctcaagtgattcttctgcctaatcctcccaaagttcttagattacaggcttcccagctggcgtgtatgttgtaaag

SEQ ID NO: 682638 - DNA, 121 bp, Homo sapiens
cgaggcctctataaacaaggacaacattggctagagaaaaaagatgttgtggggagagccaggggtactatactggcaattgctggagaagattttgcaattgttgcttctgatactcgat

SEQ ID NO: 682639 - DNA, 100 bp, Homo sapiens
tgcagctttagctgccttggagaaactgttttctggacccaatgcggcaaataataagaaaaagaagattatccctcagaatttcatgtcatccatttgt

SEQ ID NO: 682640 - DNA, 50 bp, Homo sapiens
agccgtctacatagatgagacacggtacagcctgtacacccgcacctggc

SEQ ID NO: 682641 - DNA, 110 bp, Homo sapiens
ctgccgcctcccgggagtgccgtgcgccgcagcccgggcccaggccccggcagcgcctgggacaagactgctctctctgtataagaaaatttctgtcctataaaactcag

SEQ ID NO: 682642 - DNA, 74 bp, Homo sapiens
ctcaagtgtccagaatttccaattacagacgacaaagtagcactgaccaagatcactccatggatgaaatgaca

SEQ ID NO: 682643 - DNA, 100 bp, Homo sapiens
ctgggcgacccagaagccctgagagcaggggaaatgctgtctgtagctgagcacttcctggagcagcagatgcacccaacagtggtgatcagtgcttacc

SEQ ID NO: 682644 - DNA, 100 bp, Homo sapiens
tgaactttctggggaacagaccagttgtgaccatacccttttgtgttattctactctaaatttcatgggctagaaatgtgtgttgatgcaaggacttttg

SEQ ID NO: 682645 - DNA, 75 bp, Homo sapiens
gtgttttctgagcgagccttgaaagagataaaagcggaagtttgccacacgtttgcctgagaatacagatcaacc

SEQ ID NO: 682646 - DNA, 100 bp, Homo sapiens
cgccgaagcaggacccgaagcctaaattccaggaggtagcctctagttcgttagtcaaaacgtgaaaaaaaagacctgctttgccctgggaaatagtaac

SEQ ID NO: 682647 - DNA, 76 bp, Homo sapiens
gcgacagccacatggagacattcttgcgctgcatcgaagcctcaggaaagaccacagcaagattctttcattcgtc

SEQ ID NO: 682648 - DNA, 75 bp, Homo sapiens
ggccgcggcgggtcggtctcctaggcatggaaagctcacctgatgggcccagccggctgcacgatgaacctgcgc

SEQ ID NO: 682649 - DNA, 50 bp, Homo sapiens
accacaactatctgtaagagagattcaaccctatgaaaagataaaggcca

SEQ ID NO: 682650 - DNA, 98 bp, Homo sapiens
ggaaacatccaagaaaaatgtccttaaagcaattgagcaggctgatctactgcaggagctgggttaacaactttggccatgaaggtcttggactctta

SEQ ID NO: 682651 - DNA, 75 bp, Homo sapiens
gttgtgccagcctacaggaggaaaggccagactcacagaagaaaacgcccactcctggatcttcacattgaactc

SEQ ID NO: 682652 - DNA, 74 bp, Homo sapiens
ttcaaggaggccttccagctgtttgaccgaacaggactgatcctttgaaatactccagccatgactaaaagaga

SEQ ID NO: 682653 - DNA, 98 bp, Homo sapiens
caagaccgaattcagaaggatatcgacgtcgtgatccagaagtccagagctgaggactgcctgtttgcagattgtctaaagccccaggaaaaatggtg

SEQ ID NO: 682654 - DNA, 74 bp, Homo sapiens
cagtaaagaaggaaaaagcagtaaagccagaggaagctcattgctatggacagtgctatcaccctgtggcagtt

SEQ ID NO: 682655 - DNA, 85 bp, Homo sapiens
tgaaagtgcttcttttaggcagaatcagcttgctgctacactggcgagcaatcagggagagcaacaagccccggccctcagagct

SEQ ID NO: 682656 - DNA, 98 bp, Homo sapiens
ttctggaggagatgaaagctttgtatgaacaaaaccagtctgatgtacccgtaatcgacaaaactttgaacgaggctgactgtgccaccgtcccccca

SEQ ID NO: 682657 - DNA, 100 bp, Homo sapiens
cggaggcagaggtggaggcgctttgaaaggaactgcaagcacatgttgaccagataactgaaatggcagcagtaatgaggaaagccattgaaattgacga

SEQ ID NO: 682658 - DNA, 51 bp, Homo sapiens
ttaaaaggtgtcaagaagctcagaatgaatcagcatgattcttcagaggct

SEQ ID NO: 682659 - DNA, 75 bp, Homo sapiens
ggctgatatgcaatgtcacttacaacattaatcagatactgcatttaagagcctaatgggaggtgactggatcat

SEQ ID NO: 682660 - DNA, 100 bp, Homo sapiens
tccccggtctatgccaggcgcatctcagaatattgtatggaattcctgttatggatgacaaccaagaatatgtccatattcctccgacaccgcaagggat

SEQ ID NO: 682661 - DNA, 75 bp, Homo sapiens
aaggaagtaccaggacttgcacagctttctgaaacaaagactcattttgaagatgtttaacaaatcatttggaac

SEQ ID NO: 682662 - DNA, 50 bp, Homo sapiens
aactctttgggaaagccactcgaaaagatggcagaaacggtggacacaag

SEQ ID NO: 682663 - DNA, 82 bp, Homo sapiens
ctaaaaagaagcgggagaatctgggcgtcgctctagagggggatatgagactttctactcggaatatcctgagtgttgcgtg

SEQ ID NO: 682664 - DNA, 98 bp, Homo sapiens
ctgctggacgcgggagacgccagcgagctggtgattggagccctgcggagatgccgtagggccaggtgagctgctgtgaaggactcattcttggtagc

SEQ ID NO: 682665 - DNA, 97 bp, Homo sapiens
gcgccttcttgctcgccgcctgctgctgctgtcctcgcgtcgcggatccaggactgagatcccagaaccatgaacctggccatcagcatcgctctcc

SEQ ID NO: 682666 - DNA, 83 bp, Homo sapiens
gctcatcaggactatgggggattgggcagaggtgtgaaatgacaatggatgctctgttggctcgattgaaacttctgaatcca

SEQ ID NO: 682667 - DNA, 75 bp, Homo sapiens
ctgcaagcatttgctggagaatctgagctgttctgagatgttgatggctcatgctgtgacacagcttgccaatag

SEQ ID NO: 682668 - DNA, 75 bp, Homo sapiens
cagggtgggggctacggaggtggttatgacaactatggaggaggctgaggccctgacgtggatgggcaaactgca

SEQ ID NO: 682669 - DNA, 100 bp, Homo sapiens
gccccgctccccgaaacgtgaccatgtggattcaacagcttttaggactcaggtgcccaagcaaggaaagaaataatgaagagacacatgtgttagctgc

SEQ ID NO: 682670 - DNA, 101 bp, Homo sapiens
gaagaaaatgtttgaagcaacaagattgcttgcaacaattgttatgcttggttctccaaaaaatgtggaatcctttgcatctatgctgagacattctcctc

SEQ ID NO: 682671 - DNA, 74 bp, Homo sapiens
ttggggagcccagaagctgccaccgaaccaaggactggacctacagagacatctgggattttctgcgtcagctg

SEQ ID NO: 682672 - DNA, 75 bp, Homo sapiens
gacacactatgctccctccaaagccggaaatcctcattgacgattcaatttgttgaaggccaatttgtggactcc

SEQ ID NO: 682673 - DNA, 75 bp, Homo sapiens
cgcagccccggcctctcggcctctgccggagaaacagggatccaggtccggcacgatcaagacccaggctacatg

SEQ ID NO: 682674 - DNA, 100 bp, Homo sapiens
gtcccatttcgcccctcgcgtccggagtccccgtggccagactgtcttctgaagattgatgtctatttccttgagctctttaattttgttgccaatttgg

SEQ ID NO: 682675 - DNA, 100 bp, Homo sapiens
ccggtggctgtccaagtgcctgggatgcaggactaccgaccagactcccggaaatcatgttggtaggatcccagtctttttcgcctggagggcccaatgg

SEQ ID NO: 682676 - DNA, 101 bp, Homo sapiens
gctgtgcctacaccttcgccacccactattggaccaggtatccaaaccttgaaacctttgctctagatgtcaggcttgtttttgacaactgtgaaacattt

SEQ ID NO: 682677 - DNA, 74 bp, Homo sapiens
aaaccttcaggaaatgccacagatattgagttattctccccacctcagaagtaccagcttttggtgtatcatgc

SEQ ID NO: 682678 - DNA, 100 bp, Homo sapiens
gggccccacagccccacttctggaagagaaaagtggagccccgcccaccccaggccaattctcccccagtgattgtcaacacagataccctagaagcccc

SEQ ID NO: 682679 - DNA, 75 bp, Homo sapiens
gcaccatgagctggggcaccgagctctggctccatgatgcgttatctgggtctggaaacccaaaccctcaaggat

SEQ ID NO: 682680 - DNA, 75 bp, Homo sapiens
actcctcgcttgctgagtttgttcagagcctctctcagaccatggatgaagatcttctcccaagtaaatattttg

SEQ ID NO: 682681 - DNA, 101 bp, Homo sapiens
ggcgtcccgggggcgcagggaaggagggcgtccgagtcaacaaccgcttcgagctggtgcacattcaggttcccgagcacaaacatcaagataacgttcac

SEQ ID NO: 682682 - DNA, 75 bp, Homo sapiens
gcgcgatgcgtcaagtacactgaaattcatcctgagatgagagcttactcacatagcatattggtatatcaaaat

SEQ ID NO: 682683 - DNA, 75 bp, Homo sapiens
gtgggggcacgacagccttgaggcccagcgctagcacccagaactgataaatttcaaacggaagagagtggcagc

SEQ ID NO: 682684 - DNA, 82 bp, Homo sapiens
ataccagccaccctgcccccaagaaggaagtcatcatgggccggcctggaacaggtcctggtgcttgatggtcgaggccatc

SEQ ID NO: 682685 - DNA, 83 bp, Homo sapiens
catcactttcattgtctcggacgtgcggggcctgggcctcccggtccgcaagcaggcggacctggtgaatgacctggggaaca

SEQ ID NO: 682686 - DNA, 75 bp, Homo sapiens
gtgcgggcgagcgtcgacccgggccgctcctggaggaggaggtgggagtcaagagaacaatcggatgatgagact

SEQ ID NO: 682687 - DNA, 75 bp, Homo sapiens
cggccccgcccgcgccggaagagccacgccgagagcgcctgctcgctgtgcccccgggttatgacgacccccaat

SEQ ID NO: 682688 - DNA, 100 bp, Homo sapiens
agggagttaaggacattccaggcagaggcaaggggaagatggtgaaaggaatgggaggtgctatggatttagtgtccagtgcgaaaaccaaagtggtggt

SEQ ID NO: 682689 - DNA, 80 bp, Homo sapiens
ctgaacttagctcgacggggctgaccgctctggcccagggtggccccttcccagctgcctgcctgccctagccagctccc

SEQ ID NO: 682690 - DNA, 100 bp, Homo sapiens
gttttttcctgtatgaagcggttggcaccactgaagtgaccgaatgagatttcagaagaaagtggtagcttcctttccaagaacagttctgagcacagga

SEQ ID NO: 682691 - DNA, 96 bp, Homo sapiens
gacattagcccctgtgcagatgactttccatgctattggaagctccattgaagccagccatgatcagggctcaaaatttgggcggggaactggact

SEQ ID NO: 682692 - DNA, 83 bp, Homo sapiens
cccactggctgctggagcttgtcaccaccagattacctaaaacctcgggcagaagaggagaggaggatagcagcagaagagaa

SEQ ID NO: 682693 - DNA, 75 bp, Homo sapiens
acgagagcaaggagaggctaggggaaatgtttcaacgtgcgcaagcgttgcggcggcgggcagaggactactaca

SEQ ID NO: 682694 - DNA, 100 bp, Homo sapiens
tgaagtggtttgcaacatccttcttctggataacactgtacaagctttcaaagtcaatcaccaaggatgacattgatcttgatgccttggctgcagaaat

SEQ ID NO: 682695 - DNA, 105 bp, Homo sapiens
gaaccactacctgtatgacctgaaccacacgctgtacaatgtgcagagctgcggggcactatggcagacaaagttaggaggcagaggccgaggaggcgagtctgt

SEQ ID NO: 682696 - DNA, 100 bp, Homo sapiens
tggtctggaagcacgccagcaggtttttattatggcagccactaacaggccagcccctcatatggaaaatttgaaatgcagaggggaaacagtagcaaag

SEQ ID NO: 682697 - DNA, 50 bp, Homo sapiens
ccagcatttaccacacaatggcctctgcaattctcattgcaagatcatcg

SEQ ID NO: 682698 - DNA, 97 bp, Homo sapiens
ccccgacctctacgctgctgccggggtgtcagtaatggagtatgtcactgcagttgtctgccttgggtttcctctgcttactgtggatggccccaga

SEQ ID NO: 682699 - DNA, 83 bp, Homo sapiens
cagaggacgccttcaacaccaccttcatctccaccatcggtcagaaacccttcccttgtcaaaaatgcgatgccttcttttct

SEQ ID NO: 682700 - DNA, 82 bp, Homo sapiens
gccgcagccccccaatgcggccgcgagaagcagcgggggggcaggcgatcgaagccttatgccagcctggaccatcttggag

SEQ ID NO: 682701 - DNA, 98 bp, Homo sapiens
tgggctgtgaagtgagcgaggaagagtttcgtgaaggttttgactctgatatcaacaatcggagagctcaaaggatggctactgacatgcagaggaag

SEQ ID NO: 682702 - DNA, 83 bp, Homo sapiens
cccgctggccctctgtctgcctgtgtccctgaccatggctccctgcagtaccctttaacgagcttactcacatagcatattgg

SEQ ID NO: 682703 - DNA, 100 bp, Homo sapiens
gaccttgaaggccctacgcagttccgacaaaggtcgcctttgctactaccgcgactggctgctgcggcgcgaggcagatcgggagcggtgccgagaaaaa

SEQ ID NO: 682704 - DNA, 75 bp, Homo sapiens
cgcgcggcggcaccgggaggccgggccgagcgcaggagcattggtttgaaaaggccctacgagacaagaagggct

SEQ ID NO: 682705 - DNA, 100 bp, Homo sapiens
agtggtgaccctaatagaagatttgacccagatgcttgaagaaaaagagatttctgcatattttggatctggctcatccgtgatatacaattttcaagaa

SEQ ID NO: 682706 - DNA, 98 bp, Homo sapiens
aacccagtatttcagatatcaaggagaagagtaagtttcgcatgtcagaattgtctagctcccgccccaaaagtgagaaagatcagtctaaagaaaag

SEQ ID NO: 682707 - DNA, 75 bp, Homo sapiens
aaaaatgtacccttgaccaagctttcagaggtattctagaagaagaaattggtttggagaacattgattaaggaa

SEQ ID NO: 682708 - DNA, 100 bp, Homo sapiens
tggtttgtcaaaagtggtatacagtggacctcatcctcaaagggagatgctgacagcacagaatcggtatgtttctataaaacctgataaccgaaaattg

SEQ ID NO: 682709 - DNA, 100 bp, Homo sapiens
ttcttttgcaaagctaggaggcttggaggcagttcccatgttatacgcagcagatacttacggagcattgtaatgaagtgtggttctgtaaattctctaa

SEQ ID NO: 682710 - DNA, 100 bp, Homo sapiens
gaacatgtgcttggtgtcgtttttccttgagctgaacgtcttgcaacagtggccgcacgcatagctctcgtggcattatccttcagtggggctattggac

SEQ ID NO: 682711 - DNA, 50 bp, Homo sapiens
ggcagctgagacggccttggccgagagaagaagaaggaggttcctgctgt

SEQ ID NO: 682712 - DNA, 100 bp, Homo sapiens
gtccagcgagttgcagatctacacttggaggagatatttcatcaaatactccagactatgcctggaatagctacattctcatctaggccacaagctgttc

SEQ ID NO: 682713 - DNA, 96 bp, Homo sapiens
acacactgcatttctgtcggcactgcagcattctcttttggaaggtgtcatggagaaactccagctgggcccagagattctgcagcgggaaaatcc

SEQ ID NO: 682714 - DNA, 75 bp, Homo sapiens
gttatttgcagctatcatgtgagtagcataatggcagaacctgtttctccactgaagcactttgtgctggctaag

SEQ ID NO: 682715 - DNA, 83 bp, Homo sapiens
aatgattgtggcattgagagaagctttgagtatctagaagagcagaagacagagaatggaaaagataaggaacagaaacaaac

SEQ ID NO: 682716 - DNA, 83 bp, Homo sapiens
ggacttctcaactgccattctggattccagaagatttaactacgtggtccggatatgatgcttcctggtgtgtttagtggttg

SEQ ID NO: 682717 - DNA, 98 bp, Homo sapiens
ctttctgcggtgactgtgtcgggtcatgtatacaataatcagttccacctggaaggccgctgtggtggaaggatgtttgactgcagagatgtggcatt

SEQ ID NO: 682718 - DNA, 82 bp, Homo sapiens
attgctatttttgcacttcagttcacatactatttatggtttcggtgtctgaactgctcagcttcgcaagtctgctctcagg

SEQ ID NO: 682719 - DNA, 75 bp, Homo sapiens
ctcgatcagggcatacatctttcttcgacaaaggatcaggcctttgtgacactaaccacaaacgatgcctacgcc

SEQ ID NO: 682720 - DNA, 90 bp, Homo sapiens
gcggtgaactctgtccagttttcaaaccacacagggcggcgactggcggcgcgatggacctgaccgggctcctgctggacgaagaaggca

SEQ ID NO: 682721 - DNA, 83 bp, Homo sapiens
ggacaagctggaatgcatccaagagaatccctcaacatgctgagtgcctggtgaagaatgtgatgggatcactagcatgtctg

SEQ ID NO: 682722 - DNA, 99 bp, Homo sapiens
gtgaaggtccggggcttgccctggtcttgctcggccgatgaagtgcagaggtttttttctggagttcaggagaagatgggcataatgaataaaggagtc

SEQ ID NO: 682723 - DNA, 100 bp, Homo sapiens
agaatatttcaagcgactgacatgtgagatctccacaaggggtacatcagacttaattcagtgcacaaatgagatgaatgtgaacatcccacagttggca

SEQ ID NO: 682724 - DNA, 83 bp, Homo sapiens
gcccagagtccgcgaatcctccgctccgagcccgtccggactcccccgatcccaggggctttgttatgcacctaaagccatat

SEQ ID NO: 682725 - DNA, 100 bp, Homo sapiens
cgaaagcgttggagaggtgttaccggaacggcggcgacaagggtgttcccgaactagagtgggttatcaatactctggctgaccatcatcatcgtgggac

SEQ ID NO: 682726 - DNA, 76 bp, Homo sapiens
gtctcttaccttgtgtttgatgaagcagatcgaatgtttgacatgggatttggtggtgatctttgtgaagtctgtg

SEQ ID NO: 682727 - DNA, 82 bp, Homo sapiens
gcgggcgagcggctcctctgccagaggtgatcatggagctcagcttggtctccatggggctggtggtgatggaatacatgat

SEQ ID NO: 682728 - DNA, 75 bp, Homo sapiens
atttatcagaaagatgccaccttctataacagaacaggagatgcgctctgtgctgcggaaggcgggctccccgcg

SEQ ID NO: 682729 - DNA, 98 bp, Homo sapiens
tcctgtttttctcatctgtgcagtgggacactgccttaggaaaaccacgagaggtgtttcgacttcctacagatttgacagcatgtgacaaccgtctt

SEQ ID NO: 682730 - DNA, 98 bp, Homo sapiens
aacagtgtcatccgcctgtacctggagcagcaagtgcaattttacgaaacggaccgtgtgtatgtacaacaaaataatgtggagaacgtctacaattt

SEQ ID NO: 682731 - DNA, 100 bp, Homo sapiens
atccccgacgaccggatcctgaggaggcagctgcggtggcagctgctgagttctcggtgaaggttctccttactatgacaatgtccgccccctctcttac

SEQ ID NO: 682732 - DNA, 100 bp, Homo sapiens
atttcgccgctggcgtcaggactattttcacgttttaatgccgagaggatgtacagttacccagcacgtgtacctcctcctcctcctattgctcgggctg

SEQ ID NO: 682733 - DNA, 100 bp, Homo sapiens
cgcggccctgggggcccgcaatccacgccacggaatccccgaggggggtttgctttcctgccttttctctggttggtcaacatcttctggttcttccgag

SEQ ID NO: 682734 - DNA, 80 bp, Homo sapiens
taaattttccaaacacctgactctgtgtgtttttaccaaccatacagcaacaattgagtcacttcaaaaggagttcattg

SEQ ID NO: 682735 - DNA, 100 bp, Homo sapiens
ctgatgtggcagcccgtggacttgacattgagggggtcaaaacggttagagcagccagcgggtacagaatggattttggaagagggagtcaccactggac

SEQ ID NO: 682736 - DNA, 100 bp, Homo sapiens
cccaggaccttcattatgaaaacttccgttctgagagactcaagagaggcggcaggcacagttggcgggcagctcccaggtctccatgagtacggcgccg

SEQ ID NO: 682737 - DNA, 99 bp, Homo sapiens
cggagacgcagatgtggacttgaaagaagctgcagcggaggaaggcgaggacaagactgatacactggaacacgaactaagaagagaagttgaagatct

SEQ ID NO: 682738 - DNA, 98 bp, Homo sapiens
ccagagcctggagtctgcgaaggccgggacccggttccccggcccacagtgggggtgtgcaaacccgagagaactggcagtcccagctatctgacttc

SEQ ID NO: 682739 - DNA, 75 bp, Homo sapiens
agcagttcaaccgcatgaagcagctggctaaccagaccgtgggcagattcttctgatgtagagcgactggaaaga

SEQ ID NO: 682740 - DNA, 75 bp, Homo sapiens
atctttcctcttctgaccatgcacccccagcagccaccggcagatctctccagcgaacactgaatgagttaaaag

SEQ ID NO: 682741 - DNA, 83 bp, Homo sapiens
attctacaatgaggcctccaatctgcagtattctaccttgtaaatactgttatttgtatatactgtaaatgatgacatcggtg

SEQ ID NO: 682742 - DNA, 96 bp, Homo sapiens
gtgtgagaggttttctcgctctagttgctggatttgtgcgactcggtgaaggatgatgcccggagggtgatctcgacctttaacattccacacacc

SEQ ID NO: 682743 - DNA, 75 bp, Homo sapiens
ccactttcccctgagcctcagcacctgcttgtttggaaggagaaaatgctgagaagcttctgcagttcaagcgtt

SEQ ID NO: 682744 - DNA, 76 bp, Homo sapiens
aaaaagaaaagaaactgacaaaaacatttctgagattagtgacaagagctggggttaggatccggttggactctga

SEQ ID NO: 682745 - DNA, 100 bp, Homo sapiens
gatggatctccttaagaatcctaaaattgctgattatctcaccaggtcgcttatgatgaagctacagatgaatttgcttcttacttcaacaaacagactt

SEQ ID NO: 682746 - DNA, 98 bp, Homo sapiens
tccgtgaaccccgaatccgggccaagtatggaggcattgagagggagaacgtcccagagaactacttctatgtgccagacctgggccaggtgcctgag

SEQ ID NO: 682747 - DNA, 75 bp, Homo sapiens
gtgctgcgttcacaggtgtttctgcggcaggtccagggagtcggtagtaagggatggcgggacgtcaccaccttt

SEQ ID NO: 682748 - DNA, 98 bp, Homo sapiens
tggacatggacatgagccccctgaggccccagaactatcttttcggaactgtggaaggtgcatcagtgaagaaatggaccaatgtgtataatcatgga

SEQ ID NO: 682749 - DNA, 89 bp, Homo sapiens
aatggatcttgctactggcgtgtgcaaggcagtagacctgatggccaaaagaaaggaagaaaatttttcctctcctaaaaatgccaaaa

SEQ ID NO: 682750 - DNA, 75 bp, Homo sapiens
cagaggatcctggaggcctgggaagccaacgaccacacgcaactcggtgaaatacctggagtgctcagctctcac

SEQ ID NO: 682751 - DNA, 75 bp, Homo sapiens
gaagctacacttttcaccaaggaactggtgctgcagcgagaggcaagtgaaccggagcaaacgacttccgatcca

SEQ ID NO: 682752 - DNA, 75 bp, Homo sapiens
ctgcgagaaggtggctgtggagttcgggaaccagctggaggtcgcgtggggcaggcagtggcgctgcgggccaag

SEQ ID NO: 682753 - DNA, 100 bp, Homo sapiens
agagctgcagtctttgtgggacaaggtgatgtgtccaatctagatcccaacttctcatttgaaggcaccaaactggatgtggggaacattgtgctggcat

SEQ ID NO: 682754 - DNA, 74 bp, Homo sapiens
tgacagtctgcatgtgcagttttcaggtacctgacgcgctgggctcctggctccgtcaagcccatctacaaaaa

SEQ ID NO: 682755 - DNA, 83 bp, Homo sapiens
aagaactcgagcgacagagacaagctgagcttgccgcacaaaaagctagagagctgataccccaatgtccttctttgactttg

SEQ ID NO: 682756 - DNA, 101 bp, Homo sapiens
ggaggcacctgttgcaagtgacaggattctccttttacaaatgcaggaatgggatctaatctaaatctgttaggtgaaattgagtgtgatgccagcataat

SEQ ID NO: 682757 - DNA, 50 bp, Homo sapiens
gaaggtctctggagacatcttcagcaggaagtatactgaagatgcaagtt

SEQ ID NO: 682758 - DNA, 82 bp, Homo sapiens
cctgaagaagggctccctcgtgaagaacctgaaggacacactagcactggccatgggcctctgtgtcgccatgatcgccttt

SEQ ID NO: 682759 - DNA, 100 bp, Homo sapiens
ggagagaggcggcggcgacaccatgtcatctcccagtccgggcaagaggcggatggacacggacgtggtcaagctcttcctgtccacttccaacgaagcg

SEQ ID NO: 682760 - DNA, 100 bp, Homo sapiens
tgtcactccaacctcttttcgctgttgcagagcttgaagtgaaaaccagagaaaaattagaagctgctaagaaaaaaacaagctttgagattgcagagct

SEQ ID NO: 682761 - DNA, 76 bp, Homo sapiens
ctcctgcctcagcctcctaagtagctgggactacagacatatggaaagttgatcatgtgctggagcgcttgcagag

SEQ ID NO: 682762 - DNA, 75 bp, Homo sapiens
gaaatggaatttcaagaatacaatcttgtagtcagtcatatgaaattcggatgctggataatcggaaaatgggtg

SEQ ID NO: 682763 - DNA, 80 bp, Homo sapiens
gctcttcggccgcatccccatgcgcttctcggtgctgggtctccgtctctccaccgggggcttcatccttccagggagga

SEQ ID NO: 682764 - DNA, 98 bp, Homo sapiens
ttgtatgtgtagaaagtgaaatcagaggagatgtaactatcgtgacgagtagcacagcccctctatggtttagatggcagtgctgcaaaggaggcaac

SEQ ID NO: 682765 - DNA, 100 bp, Homo sapiens
ctccagccaacgatgaccagtccaggcccagcctctcgaatgggcacacctgtgtagtgccttatatttgtccatgaaagacactgaaaaaggaataaaa

SEQ ID NO: 682766 - DNA, 86 bp, Homo sapiens
acaggtggtaaagacacttgtggggtgagtcatccctactcccaacatctggaggggaaagtccagggagctcccagggaagtggt

SEQ ID NO: 682767 - DNA, 100 bp, Homo sapiens
attcgcagtggtcgcttcttctccttggatcccggctactcaacagaaatgaaggaggaatctgtaaagaaacaccagtatccagatggtgaagtttgga

SEQ ID NO: 682768 - DNA, 51 bp, Homo sapiens
attctgaactcaggacttggcaatccgcagccgccacagccccaggtccct

SEQ ID NO: 682769 - DNA, 100 bp, Homo sapiens
ggaaacaatagttttaatgatattatggaagcaaatttacccagcccctcaccaaaacccaccccttcaagtgatatgtttgttatccaggcataagacc

SEQ ID NO: 682770 - DNA, 100 bp, Homo sapiens
aagttttctcatgaggagattgccatggcgaccgtcacagcgctgcgccgcacagtgccccccgctgtcactggaatcacactgtcagagtacttccgtg

SEQ ID NO: 682771 - DNA, 90 bp, Homo sapiens
caaataagttatgctatgaggatgacaaactctggagtaattggagccaagaaatgagtataggtgaagtgtcagactctgacagcaaca

SEQ ID NO: 682772 - DNA, 96 bp, Homo sapiens
ccggttcccagcttctgcaaaagtgcttggtcacctgtggaaaagggcataagcaccgccaggtctggtgtcagtttggtgaagatcgattaaatg

SEQ ID NO: 682773 - DNA, 94 bp, Homo sapiens
gtcaacagaaggaggtgcagcctcccccacgtcaccaagcatgatcccgaatgatgtccaaggtcctagcttgctcattgaccttcctgttgtg

SEQ ID NO: 682774 - DNA, 95 bp, Homo sapiens
aaagaaacaaggggccagggcagagggcacctgagcggctggagagcctgttggagaaacacaaagagctcattgctatggacagtgctatcacc

SEQ ID NO: 682775 - DNA, 133 bp, Homo sapiens
cgagtctcggagaagatgtggtggcttccgtttgttggtggaggaggtggcaggcctcggcgaacggccggtttgtgggcgatgctgaccttgaaagacagaaattttcagatttgaaactcaacggacccca

SEQ ID NO: 682776 - DNA, 101 bp, Homo sapiens
ttccacaatgcagttgctgtagtcatctacaataataaatccaaagaggagccagttaccatgactcatccagtttggaaattttagcattcaggtgccag

SEQ ID NO: 682777 - DNA, 80 bp, Homo sapiens
cagccgcacgcccaggatttcttgcgtgcagtttgtgaagaaaaaattagagtaagcaggaaattcacaggaggtctgct

SEQ ID NO: 682778 - DNA, 75 bp, Homo sapiens
ggaccactcgttgctgacagtcagaaaatatcttaatgcaattcagacaatgtgtccacacattcttcgctattt

SEQ ID NO: 682779 - DNA, 75 bp, Homo sapiens
gatcgctcagctggccgtgtcctggcaggcggccgcccgccttggcccgtctctggagtgctgggcagccgggtc

SEQ ID NO: 682780 - DNA, 75 bp, Homo sapiens
cattaacggaccttttaccatgaatagttctactccttctacaggtgtgtatggatctatctggttcaatagatg

SEQ ID NO: 682781 - DNA, 100 bp, Homo sapiens
ctattgaacagattccacttgtgaagatattcgggacagtgggggtcccaaaccagtgatggtgtatatccatggtggctcatatatggaaggtactgga

SEQ ID NO: 682782 - DNA, 101 bp, Homo sapiens
ccagccgggaactccccatcgcgttttgccagcgataatacgcctcagaactttacagactagcatggcaaagcttctctccgatcttagtgtggacagtg

SEQ ID NO: 682783 - DNA, 101 bp, Homo sapiens
ccttcactgtcctaaaacgttaccagcagctgaaaccaattggctctggggcccaagggattgtttggacacagaagacttagatcactatgaaatgaaag

SEQ ID NO: 682784 - DNA, 100 bp, Homo sapiens
gacagcagattttggtttaatatctgattgggacaacattcagacccatttccagtcatgaacaagttggatggcttgaggactggtactaaaaggaaac

SEQ ID NO: 682785 - DNA, 83 bp, Homo sapiens
gcagcccagctccgcccgcagccgccgcggaccaggcaggttcgtgctggccgtgggcagcgccgtctttgatgccatgttca

SEQ ID NO: 682786 - DNA, 120 bp, Homo sapiens
gatcattcacaatatctgtgtcgttcttggcagaaattatattttccagcccgtgtctgcaggatggctacttttctcatcggccgaaagagaaagtgcgaacagacagcaacaacgaga

SEQ ID NO: 682787 - DNA, 97 bp, Homo sapiens
agtaggaaaccagatcttcgagttgtcatccccccttcaagcaagggcatgatgcctccactaatgtagctgagcagtattttcaagagagcatggc

SEQ ID NO: 682788 - DNA, 100 bp, Homo sapiens
cttcagagttctctaaaaaaactggctgtgaataatatagctggtattgaagagaaccacaccttcatcaagcggtccgaggtggaagaagtggattttg

SEQ ID NO: 682789 - DNA, 83 bp, Homo sapiens
cttttcaagacaccaagtgagaggccaaccaggaatgggatgtttctggggagctgaaaggaaattctgggtcttgaaaggag

SEQ ID NO: 682790 - DNA, 73 bp, Homo sapiens
cttggcaaggcaagtagcggcggcgcttcaagatatcaacctgaattctcctaacaaaggtctgctgtctgac

SEQ ID NO: 682791 - DNA, 100 bp, Homo sapiens
aggaaatgttaggatcactttattctgacactgccctaaccatcatggaggtggccgaggtggaaagtcctctgaaccccagctgtaagataatgacctt

SEQ ID NO: 682792 - DNA, 74 bp, Homo sapiens
cacggcctctctgcgcaagctccgcgcgtaccgcccctccggccagcggatgataatctcaagacacctcccga

SEQ ID NO: 682793 - DNA, 83 bp, Homo sapiens
ccggcacacgcgcagccccggcctctcggcctctgccggagaaacagccccatggctgggggttatggagtgatgggtgacga

SEQ ID NO: 682794 - DNA, 100 bp, Homo sapiens
gtttatggcttccagtggaggcattttggggcagaatacagagatatggaatcagaacctcaagaaggcatgaagccagcccctgcagtgccgtccaccc

SEQ ID NO: 682795 - DNA, 100 bp, Homo sapiens
acttgcagaaatcacattggaccctcctcccaactgtaggaaagatgaatgggagggctgattttcgagagccgaatgcagaggttccaagaccaattcc

SEQ ID NO: 682796 - DNA, 75 bp, Homo sapiens
cacagcaggctgagcagctgcaaacccccgaaaaagttgatattcactgatggactccaaagaatcattaactcc

SEQ ID NO: 682797 - DNA, 100 bp, Homo sapiens
cggctttcggcaagaactggattcgtggcgccacaagctcattcactgtgtagcagaaagatgaaggtcttagaatcattgattggaatgatccagaaat

SEQ ID NO: 682798 - DNA, 100 bp, Homo sapiens
cctgaaccgcatcttttcctcttctgaacatgcacccccagcagccaccagcagggccactgctctccaggaagataaggcttttaaagcagcctagcac

SEQ ID NO: 682799 - DNA, 100 bp, Homo sapiens
gcttatccaaccgatctttacacaattcgaatgagacttgttaatcgattttacagcttgtgagaagaatgagttgatgacatgctccataccagtggct

SEQ ID NO: 682800 - DNA, 75 bp, Homo sapiens
aaatcccagttgcagagaccccctgaaggtagatttcgggcagacaacttgaacaagctgaagaacctatgcagc

SEQ ID NO: 682801 - DNA, 74 bp, Homo sapiens
gagctatggtgaaacaccactgaagcattgccaaggttccagcaacagatagaaatgctttaagttcactctgg

SEQ ID NO: 682802 - DNA, 98 bp, Homo sapiens
gaacgtgctgtggaatatatgtatggtttgaagtggtgaacatggatttttctcggcttcacatgtacagtcctccccagtgtgtgccggagaacacg

SEQ ID NO: 682803 - DNA, 74 bp, Homo sapiens
tttcttcagtgcactgctcggtttctgaccagacatccaaggaaaggaacttgtaatagctggcatcgttgaga

SEQ ID NO: 682804 - DNA, 82 bp, Homo sapiens
caccgtctgaactaggatgtcccgacatgaaggatgagaccggggcctacctcattgaccgtgaccccacctacttcgggcc

SEQ ID NO: 682805 - DNA, 85 bp, Homo sapiens
cgctggcggcgtggacacctgagtcccggggtaggggtctcccgcgagatgtgccgtttgggggtgctaaagctggtgttaagat

SEQ ID NO: 682806 - DNA, 75 bp, Homo sapiens
tggcacggccacaaggaggaggcctgagtgtgggcggggccttcataccaggcagactgccagattcacttacag

SEQ ID NO: 682807 - DNA, 82 bp, Homo sapiens
ggacattattgcgcgtggaacggctgcttttggaaggtccgcgggagagctgtggggcttggtgagtgtttcgtggcctctc

SEQ ID NO: 682808 - DNA, 98 bp, Homo sapiens
aagagtagctgaggagctggcattggagcaagccaagaaagaatccgaagatcagaaacgtgtatgcagagaatatttccaaaatggtgggaagagaa

SEQ ID NO: 682809 - DNA, 74 bp, Homo sapiens
aagaacatcggtctgggcttcaagacacccaaggagggctgtgtggagaagattgggggctggctgaggaaaaa

SEQ ID NO: 682810 - DNA, 75 bp, Homo sapiens
ttcaaacattcgtctcggaaaccccgcctcttacagtcacgagctctagaagatgaagacaacaaaaaagatgat

SEQ ID NO: 682811 - DNA, 100 bp, Homo sapiens
gaagtgttgtgtaaaggctacccttgagcctgactacggggccctgtatgagggacgcaaccctggcttctatgtagaggcaaaccctatgccaactttc

SEQ ID NO: 682812 - DNA, 50 bp, Homo sapiens
gcggcgatcgagaaagtgcgcaaatgcaaaaaggcattgggatgaacgag

SEQ ID NO: 682813 - DNA, 75 bp, Homo sapiens
taaacatgcaatgaacccaaaaggatgtggaagagctgataccagcattggatttactttgctcggcaattagag

SEQ ID NO: 682814 - DNA, 116 bp, Homo sapiens
ggaagtgagcggcggcagctgcgaggctcggagaaacaggcgccgcgggctccgcgcccggccggacccgggcccgagatgggcaccaacaaatgcgccagccagtcgggcatgac

SEQ ID NO: 682815 - DNA, 74 bp, Homo sapiens
ggcagatctgtccttaggaaagatatttaccagtttgttggcatccaaagctgttggggttgatggtgctgaaa

SEQ ID NO: 682816 - DNA, 100 bp, Homo sapiens
gcaaaacagactttttcattggaggagaagaagggatggcagagaagcttaataccaaaacatccccagcaaccaaccaggcagctggccaagaggaaaa

SEQ ID NO: 682817 - DNA, 50 bp, Homo sapiens
ccgcgcccggagcgccccgccgcgcacaaactggcatcaaatactcacaa

SEQ ID NO: 682818 - DNA, 112 bp, Homo sapiens
cctggacgagctggggcaacctgatctcggctgtcggagtgggtgtcctcaagaaaggatttttagactctgaggagcagttggagctaatccacattatggaaatggaaac

SEQ ID NO: 682819 - DNA, 90 bp, Homo sapiens
ccaaggttccgcgccgggcgtggacggtgtggggcggtcccggccccgcaggttgcacactgggccacagaggatccagcaaggatgaag

SEQ ID NO: 682820 - DNA, 80 bp, Homo sapiens
gttgtggaccaccaaacagaactttctaatttagccaaggaagggtactatttttctgcctggaaataaagtttctgagc

SEQ ID NO: 682821 - DNA, 74 bp, Homo sapiens
caggacacctggaagccgggaaatgatgcttgctctgtcaaggcacagcctattgtctcctttgctcagtgtga

SEQ ID NO: 682822 - DNA, 100 bp, Homo sapiens
caggcgccttcgcggaccgagcctgacggagccggaggctgggagccgcggcggcctgggcgaagcagcagttttgggaatttcgatcgttttcggaata

SEQ ID NO: 682823 - DNA, 96 bp, Homo sapiens
gtctatggtgttgtgaagttctttaagcccccatatctaagcaaaggaactgccgaccccttggtgggaagtattgccactcagtatatgaccaac

SEQ ID NO: 682824 - DNA, 106 bp, Homo sapiens
actgattttatgggaaaattaagcagatgctccagtttgagaaacctggatctgcgatctgtttgtggatgtacagttacccagcacgtgtacctcctcctcctcc

SEQ ID NO: 682825 - DNA, 75 bp, Homo sapiens
cagccttggtgctcaggtgccagatgcaaagacatccacagttatttcaggaaattcttctagtgccagcgtttc

SEQ ID NO: 682826 - DNA, 74 bp, Homo sapiens
ctgcagtacctgcagaaggtctctggagacatcttcagcaggacttgccggagcagccttacttgcagcctcca

SEQ ID NO: 682827 - DNA, 82 bp, Homo sapiens
tgcctttagtgcacccgctgccagaagggctgagggcttctgcagatgctaagaaggtcaaaatgcagatcttcgtgaaaac

SEQ ID NO: 682828 - DNA, 101 bp, Homo sapiens
gctgcaatgtgaatggcaggatatgaagcaagtaagagataaacttctgcactggaggggcctctcctcccctcgttctgcacatggagctctaatcccca

SEQ ID NO: 682829 - DNA, 100 bp, Homo sapiens
gacagacaattgttcagttgcaaaaagaaactggagccaccatcaagctgtctaagtccaaagatttttacccagacctcgggactcaacaataaaccag

SEQ ID NO: 682830 - DNA, 100 bp, Homo sapiens
gcctggtgcgctccctgcgtttcgggtggggccgcgcaggcaaggacaaggccacagagtcggggtcttcacggactttccttatcccagttgattgtgc

SEQ ID NO: 682831 - DNA, 100 bp, Homo sapiens
acacaaagcctgcgaaagtgctcgggaagagggagagcaaacttggctcagcccaatggaggagatgtataagaaagctcatgctgctatacgagagaat

SEQ ID NO: 682832 - DNA, 83 bp, Homo sapiens
tcacaagctcgtgaattagcaggttcttaaatctgccgacaccccaggccatcgagccccaggccatcgtgcagcaggtccca

SEQ ID NO: 682833 - DNA, 82 bp, Homo sapiens
agaccttcaagcagcgccgcaccttcgcttgacaaaagtaagctgaagccaggaacaagagttgctttggatatgactacac

SEQ ID NO: 682834 - DNA, 98 bp, Homo sapiens
ggcggcagctccacgggaggagaaaagatggccccaacctgtattttcgaagctccctctttgcccactagcagggcattagctggtgctgaagacag

SEQ ID NO: 682835 - DNA, 98 bp, Homo sapiens
gctgaacggcggagcgggagcggccggaggagccatggactgcagcctcgtgcggacgctcgtgcacagatacgacatgaccgataatagcaacaatc

SEQ ID NO: 682836 - DNA, 50 bp, Homo sapiens
caaagagtggatccgacctttggcttcagagacgggatctcaccatgttg

SEQ ID NO: 682837 - DNA, 75 bp, Homo sapiens
ccagcctatcgagctcaactccttcaccaaggattgggccgagcctatgccctggcttttgcagaaagaggagcg

SEQ ID NO: 682838 - DNA, 100 bp, Homo sapiens
tagccactttgcattgactggaaacaatggcatttacagaaagagtcaacagcagtggcaacagatgccttcaattaagttgcagagttctgatggagag

SEQ ID NO: 682839 - DNA, 98 bp, Homo sapiens
atgtttctccagtgacacctcccagagaagttaggaatactgcaatttgaaaatgtttcttatggaattgagcctctggaatctgcagttgaatttca

SEQ ID NO: 682840 - DNA, 82 bp, Homo sapiens
aagattgagagacctggagcccatcccctttcatttgcagatggaaagtttttaaaacatacatatgatagttgagaaagac

SEQ ID NO: 682841 - DNA, 100 bp, Homo sapiens
cctgagtgcggatttctgctatgatgacagcgggctacattgagagacctcagctgattcgagcaaaagtgccaattgtgaagttcagggataaagtcag

SEQ ID NO: 682842 - DNA, 105 bp, Homo sapiens
taagaagaaaatacttttcttcaatgataagagctgtcagttttctgtggatgaagacagaatgttgctgcgggatgtaaaagctcttaccctccactatgaccg

SEQ ID NO: 682843 - DNA, 96 bp, Homo sapiens
ggagagcctgcaggacggcgcggcagagtccccgtacgcctacagtaacggagcatcagatccatgctgctgctgactcggagccccacagcttgg

SEQ ID NO: 682844 - DNA, 75 bp, Homo sapiens
gtgcatccctgagtgtccctccgggtacacgatgaattccagcaaaggacagttatgggatggatgggaaggtta

SEQ ID NO: 682845 - DNA, 76 bp, Homo sapiens
gggagatccacagctaagacgccgggactccctggaaacctagaaatgcccccaaatacatcaagatgtttgtact

SEQ ID NO: 682846 - DNA, 83 bp, Homo sapiens
ctgtcaagacatttcttcggcattctgcaacagcaattctgtggtgttcttggtcacacatttatggagtttctgaagggcag

SEQ ID NO: 682847 - DNA, 97 bp, Homo sapiens
aagttggatgccaagaaaagaataaacttatccaaaatcgacaagtacttcaagaactacctgaagaagcaggtcacacccctcttcattcacttca

SEQ ID NO: 682848 - DNA, 100 bp, Homo sapiens
gtaggaggagtcctccacctcgtcgcaggtggtgctctagaaaagttcgagatttatggtggcagggaatccctccaagtgtgagaggcaaagtctggag

SEQ ID NO: 682849 - DNA, 100 bp, Homo sapiens
cgagagacattttaatctggaagagtcttgtgatttgggagacagcttttaataacccacgaccagggcaactgggcaggttattgccaaaccagaattt

SEQ ID NO: 682850 - DNA, 100 bp, Homo sapiens
gtcacagagaagctgcagctgacttacatggaggagacgtgtcgtcactatgtggcccatgtgaagggagaagttgtggaatatgtggatgacctcttgg

SEQ ID NO: 682851 - DNA, 83 bp, Homo sapiens
cgaccctggccgccccgagcggagcctggaggtggaacacctgcagcaggagactgctgctctgaaaaagcaaatgcaaaaaa

SEQ ID NO: 682852 - DNA, 75 bp, Homo sapiens
tcaggagaccgtcgttgccttgtatttccagagaacagccaaatttgtatcctactgtggggcttcaaacaccag

SEQ ID NO: 682853 - DNA, 83 bp, Homo sapiens
cgccggcccgcgggtctacttcctcaaagatcttcgtgaagactctgactggtaagaccatcaccctcgaggttgagcccagt

SEQ ID NO: 682854 - DNA, 101 bp, Homo sapiens
gctccaagccagatatggtacaggactgtcaacgaaacctggcacggctcttgcttccgaaaattcttgctgctgtattgagaacagattgagaaaacaag

SEQ ID NO: 682855 - DNA, 75 bp, Homo sapiens
tgaagtcagcatcgaccagtccaagctgcctggagtcaaggaaggtgtggaccactacaacgaggtgaagagcgt

SEQ ID NO: 682856 - DNA, 74 bp, Homo sapiens
ccctgcagtacctgcagaaggtctctggagacatcttcagcagaccagagtgaactccgagcaggaacacttcc

SEQ ID NO: 682857 - DNA, 101 bp, Homo sapiens
gaagaggattggaggtgtcagtgttaaaggaacctctacaacgaaggtgaagccacggaagataaggccgccatggcatcagatgaaggcaaactttttgt

SEQ ID NO: 682858 - DNA, 50 bp, Homo sapiens
cttgaaacacaaatggtttttggtttctaaggtaaacggagtcactcgaa

SEQ ID NO: 682859 - DNA, 123 bp, Homo sapiens
tgatccccatgaaccacgagacagatgtgaacttccagggcaagaacctggacaccgtgaaggatggagctgatccagtaacctcggagacgggaccctgcccagagctgagttgggggtgtg

SEQ ID NO: 682860 - DNA, 100 bp, Homo sapiens
cgctgcccccagctcagctcttactgcgggccgctccgacggcggtccatcctgagttgaacaatgaccatagttgacaaagcttctgaatcttcagacc

SEQ ID NO: 682861 - DNA, 95 bp, Homo sapiens
tggaggcagaggtggcatggggatctgtggttgtggttccggagaatctggttgtgctgtgtgtggatgttgcaaggcctgtgcaagagagttag

SEQ ID NO: 682862 - DNA, 90 bp, Homo sapiens
gtcgcgggccggccccgcggggagcgcccccggcgcgatgcccttcaggaaaggtttatgctggattgaatattttttttggaatggcaa

SEQ ID NO: 682863 - DNA, 100 bp, Homo sapiens
aaagagaagactgatagagacttcgttaagatttattgctaaacatgggtgcatttttggataaacccaaaactgaaaaacataatgctcatggtgctgg

SEQ ID NO: 682864 - DNA, 100 bp, Homo sapiens
aaaggaagaacaacttaagagcttcttcaaagggcaggcacatcatggacaagtttcatacatttctccgccaattcaccttgactctgagctagaaaga

SEQ ID NO: 682865 - DNA, 96 bp, Homo sapiens
gcggcggcgtgtgcgcccctcagagtctctacaaggaagataacggactgtaaaattctataaagcaaagctacacatcacttgacaccatacacc

SEQ ID NO: 682866 - DNA, 75 bp, Homo sapiens
gaatcacttataaatggcgccgaagcaggacccgaagcctaaattccaggaggatgatgataggagcatcatgac

SEQ ID NO: 682867 - DNA, 82 bp, Homo sapiens
gcgaaacgaggaggagataacgcggccttgggctctgattcctggtcgggtggcttccagtggtcttcagtctgtcgtgcac

SEQ ID NO: 682868 - DNA, 89 bp, Homo sapiens
acctttccaatgggctgttgaacttcagttatcctgcaggcacagtttaattggttggggtcagataagaagaggagtgacaatcaagc

SEQ ID NO: 682869 - DNA, 75 bp, Homo sapiens
tgggcaaacctcctttgcctagaggctatcacacgggctgtactatgggaccacactgtgctgagaagcttcctg

SEQ ID NO: 682870 - DNA, 127 bp, Homo sapiens
cttgttgccatgggatacctgttcatgtgttttggaggcaccgtctctccctgggaccagactatagaatctaactggcggtgtggacgacacaacttgcagaggattcagtgccgctctgaaaata

SEQ ID NO: 682871 - DNA, 90 bp, Homo sapiens
ccttccccacgcaaccccagatccatttacactttacagagagtagcagttccctgaagactgggaggcacagctcaggccaagacaaac

SEQ ID NO: 682872 - DNA, 75 bp, Homo sapiens
ccggaatcccgcgcgctgcccacgattcgcttctgaggtgtggcagagaagacacagcttctgaaattgagtgta

SEQ ID NO: 682873 - DNA, 50 bp, Homo sapiens
aggctgctgtgcacaggaatatgggttagagcctggcaatgccgtttggg

SEQ ID NO: 682874 - DNA, 100 bp, Homo sapiens
cgggcggcagcatgtcggtggcggggctgaagaagcagttctacaaggcgagccagggtgtgtccgcagccggccaggtggtatccctgaaggtgtggct

SEQ ID NO: 682875 - DNA, 75 bp, Homo sapiens
atttttgatcaggagaaagaagacagccatcatttgaaaggtgaagagcgattatatgttagagatagctgatca

SEQ ID NO: 682876 - DNA, 100 bp, Homo sapiens
tatacccataccattagcagtaattacaacatgtattgtgctgtatatgaatgataacaacgaacttgatgcaagtgataggtttgccaaggtcagacct

SEQ ID NO: 682877 - DNA, 75 bp, Homo sapiens
gctggcgcatgcgtgtctccctggccaggatcccttggttccagtaccccattatctatgacattcgggccagac

SEQ ID NO: 682878 - DNA, 75 bp, Homo sapiens
cacctgtggccgagtcctccctgatggtcagaatggcggcagtggagcatcgtcattcttcaggattgccctact

SEQ ID NO: 682879 - DNA, 90 bp, Homo sapiens
gaaagtggtgatccaggcaggaccaggctgcactgaagggacagagggtgaggatccacgacctccgcagtggtaacatcgccctgtcgc

SEQ ID NO: 682880 - DNA, 90 bp, Homo sapiens
ggtgcgggccctctggaccctggagtacaccccgcagcacagccgcgacttcaaggttcgctgtgatcctgagattcaagaactgcgtca

SEQ ID NO: 682881 - DNA, 100 bp, Homo sapiens
ctgcaacatcagtgacagtaacccctaaccagctcatgtttggaaaaggaatcttccactgaaacatttggatacccgacgttctccctggacacttggc

SEQ ID NO: 682882 - DNA, 75 bp, Homo sapiens
attgagcggactggccgctgccaaacatgtgcagggtgactatgaccagagcaggaccaaagtgctgcacatgag

SEQ ID NO: 682883 - DNA, 74 bp, Homo sapiens
caggatggtgatccgtgtatatattgcatcttcctctggctctacagcgaatggacagcaaattatggatgaac

SEQ ID NO: 682884 - DNA, 75 bp, Homo sapiens
ggagcagaggccaggctgctgctctgggaggagttggcctgggccctgccctggagttttgtattgctgtcaacc

SEQ ID NO: 682885 - DNA, 75 bp, Homo sapiens
ccttgggctgaccggtctgtctggcttcagtaagactttgaccccgacgcaggcttcagtgattgccgcggatca

SEQ ID NO: 682886 - DNA, 75 bp, Homo sapiens
gctgcacaggaagccgtgaaactgggtgcaaaaaggccatggaggaaacaacgggttgatatgtatcttccagca

SEQ ID NO: 682887 - DNA, 98 bp, Homo sapiens
cacaaaacctcagtcatcgtcacgagtcctgagtcggttaagttattcaagcggagaaatgttgctacagcagaagaagaaacagaagaagaagttat

SEQ ID NO: 682888 - DNA, 75 bp, Homo sapiens
acctgaacgaggacacgaccttcctgcccttcacgctccaggagctagctacgagttccagggagctctgtcctg

SEQ ID NO: 682889 - DNA, 74 bp, Homo sapiens
ccgcctgaaaaaacgccagccaagaagcatgtgcgactgcaggagagcaggggaaatgctgtctgtagctgagc

SEQ ID NO: 682890 - DNA, 83 bp, Homo sapiens
ccatgctcctggcgtggacacacaagcaccccaataacctcaaggaagggaaaaggccgaggcatcagcgtgtgaagaccgca

SEQ ID NO: 682891 - DNA, 75 bp, Homo sapiens
caatgatgctcactgaaagttgtaagctgcgaggtcttcatcacagatgatcagtagaattgaatatgtgcatac

SEQ ID NO: 682892 - DNA, 100 bp, Homo sapiens
acgaaataaagctcctgggcaaggggacgtctgcagctgacattgcagtgtcgagatggctatgaaccctgtgtaaatgaaggaatgtgtgttacctacc

SEQ ID NO: 682893 - DNA, 76 bp, Homo sapiens
aacgtgaggatcaagaagccggactacaaggtcgcctacgtgcagctggcaggtgacagcagggacatgtctcggg

SEQ ID NO: 682894 - DNA, 75 bp, Homo sapiens
catggagcctcttgcagcttacccgctaaaatgttccgggcccagagcaaagaccgagattttgatgatggcgta

SEQ ID NO: 682895 - DNA, 83 bp, Homo sapiens
ctctcttcttcgccagcacgctgatcaccaccgtgggagagctggagctgctggcaggagaggtgccggcccgaagccctggg

SEQ ID NO: 682896 - DNA, 100 bp, Homo sapiens
ggagaagtaccaggaggcgttggccaagggtccttccatagtgacgccccccaaggacatctggaatgtcactggtgcccaggtgtacttgagctgtgag

SEQ ID NO: 682897 - DNA, 98 bp, Homo sapiens
tggaaggcaagaacacggatgaggagatagtggaatgctggcacaaaggacaagtatggaacccttcagatcaaagcttaccaataaattcagtatgt

SEQ ID NO: 682898 - DNA, 100 bp, Homo sapiens
ggaggccaacgtggggtcatcatcaacactgccagtgtggctgccttcgagggtcaggtgtgtgggcagggggaacttatagaaatgctggcaatttcaa

SEQ ID NO: 682899 - DNA, 100 bp, Homo sapiens
ggagggttggctgcacaaacgagtacacctccagcatgagagccaaatacctcgccacgagccagcctcgccctgactccagcggcagccactagaccgc

SEQ ID NO: 682900 - DNA, 100 bp, Homo sapiens
gagaggcaccgggatcgtgaccgagaccgtgaccgagagcgtgaccgagagcgcgaatatcgtcatcgttagaaggttcgaattgagcaagtaatagttg

SEQ ID NO: 682901 - DNA, 100 bp, Homo sapiens
cgacaggacagaaagagtgtgcagcggattaaagctaaagacatagttcctggtgatattgtagaaattgctggaaaaaagtaatcctcttggaaagctg

SEQ ID NO: 682902 - DNA, 60 bp, Homo sapiens
atccaatagggatattgtagaaactgtctttaacctgactgggctggcttagatgaagat

SEQ ID NO: 682903 - DNA, 90 bp, Homo sapiens
acccttcctgtcgctgacggcgactgcgggaggccagttggattggatgctgctggcaagacaaccattctgtataaactgaagttaggg

SEQ ID NO: 682904 - DNA, 97 bp, Homo sapiens
caagcacctgctgctcgtggaccccgagggcgtgccagacgaggacagccggctgctgcccctgctggtctgcctgcggttcctgttcgtgcccctc

SEQ ID NO: 682905 - DNA, 75 bp, Homo sapiens
gcatcaggtgctgtttcaggcctggcacgtagtagagggctttgttcgcgggggtcacagctctcatggctgcag

SEQ ID NO: 682906 - DNA, 82 bp, Homo sapiens
ggcaaggtggggactgggcacatcatcaatacggatttttacctcctataactccaccagaaaagttttttctttcccagct

SEQ ID NO: 682907 - DNA, 76 bp, Homo sapiens
ggagcaattgaagctgactactaaggagaataagggaattgaagattacaatggtgacatggacttcaaaatagct

SEQ ID NO: 682908 - DNA, 75 bp, Homo sapiens
gtctgtcctgaaggaagtcagccacccgttcctcatcaggctatccctgggtatcagtatgtgtcacctgaaggc

SEQ ID NO: 682909 - DNA, 73 bp, Homo sapiens
tggtggtgaactacgacgccccccagtacctgagaacctacgtgcaccggcccggctggacattttgaagatt

SEQ ID NO: 682910 - DNA, 90 bp, Homo sapiens
agcctcaaaatgaagatggcacatggcccaggcagaccttgcagtcaaagttatggatgatgaatcagatgaaaaagaagcaaactcacc

SEQ ID NO: 682911 - DNA, 75 bp, Homo sapiens
ctatgcagtcaactcctggaccactagtatctcggcccctttccaaacactcctgatgcctcatttgcctctcgc

SEQ ID NO: 682912 - DNA, 100 bp, Homo sapiens
cattaccacctcagccaccctgaccactatcatcaccatggaaaaagtgacttgagcagtacatagtggaatgtcatgggatcacccttcttccccagtt

SEQ ID NO: 682913 - DNA, 75 bp, Homo sapiens
cctcagcacatggtgggggccacaccatttgccgtggccaggctagaggatttaagtgccctgtatgctcaaaat

SEQ ID NO: 682914 - DNA, 75 bp, Homo sapiens
taaggaaagagtgggaaagtgagggaatgttacgttcataacttactaaggattagtgtatattttccaaccttg

SEQ ID NO: 682915 - DNA, 82 bp, Homo sapiens
ggacggtatcccgagcccaccgtgctacgcagggtggcccagttgaaatccttcccttcctctaccttggaagtgcctacca

SEQ ID NO: 682916 - DNA, 101 bp, Homo sapiens
ggccggcgggaccataagggcttaactcatatatttaacccccctccaaaaagaaaacctcttttttgtgatggagtacctcaacggaggggacttaatgt

SEQ ID NO: 682917 - DNA, 97 bp, Homo sapiens
cttcatccgagacagcctggagaagagcgaccagctcactaagaacatgggctcaaaatctccttcgccaagaccaaacatgcctgttcgatacttc

SEQ ID NO: 682918 - DNA, 100 bp, Homo sapiens
agccagactgggtctctctttaagccccggaaagcctatctgccccaggagttgctgggaaagaaagagctgggaacctttgctcaaagctccatcgccc

SEQ ID NO: 682919 - DNA, 107 bp, Homo sapiens
cctgcgttgtaccatccgcctgtgggacacctaccagtccagggaccttgacccagcccctctcagcagacgcttcatgataggaaggactgaaaagtcttgtggac

SEQ ID NO: 682920 - DNA, 75 bp, Homo sapiens
attcgtggctgggatcggtatctgaccaaccaaaagagcgtgaggatcatccccggagaggacgggaggatcggc

SEQ ID NO: 682921 - DNA, 76 bp, Homo sapiens
ccgcccctcaccagacagatcgctgtcaaaaccctagtttaaactcatatcccaggcatatgaagtgctttcagat

SEQ ID NO: 682922 - DNA, 82 bp, Homo sapiens
cagcactctgcatgtgactccccgcagcctggacagacttggagtccaggtgtgagaaatttctacaaaaagacatttttga

SEQ ID NO: 682923 - DNA, 87 bp, Homo sapiens
tgtatctgaattttgcagctgcagaatgtgtagtaccttaaaagctgctgctgttcttgaagggtttttcagagtcggagaggaaca

SEQ ID NO: 682924 - DNA, 98 bp, Homo sapiens
ctggcctccctcaccttggacacctcgcttggtgggttacccagaccaaactttggccatttaacggatccatttgacacaccagcatttaacaaact

SEQ ID NO: 682925 - DNA, 80 bp, Homo sapiens
gattcgctgtcggaggagaatgagaccctggtggagtttgctattgggaaagcaggcaggatgggagagtcgccgataga

SEQ ID NO: 682926 - DNA, 100 bp, Homo sapiens
ctgaagacccaatggcaagccagccgcttccagactgggggagtgaagttgctgccaccgggacccagcataccctcggggaagtctgggtacagaagac

SEQ ID NO: 682927 - DNA, 100 bp, Homo sapiens
gatttctgacatcattgcaatcaagtcacctgacacatttgtgagaactatttatgcagtggatggcattcccaatgacagtagtgatagtgaaatggag

SEQ ID NO: 682928 - DNA, 75 bp, Homo sapiens
gagcctcaaaatgaagatggcacatggcccaggcagaccttgcagtcaaagtggggaagctgaggcaggaagccc

SEQ ID NO: 682929 - DNA, 50 bp, Homo sapiens
tcacagtgtcttgggccgccggaagggaggtggggaagacagggctccag

SEQ ID NO: 682930 - DNA, 50 bp, Homo sapiens
attccaatgttcagtggcggaacttgcaggacattccagctacatcacac

SEQ ID NO: 682931 - DNA, 100 bp, Homo sapiens
tttctcttccttcgctaacgcctcccggctctcgtcagcctcccgccggccgtctccttaacaccgaacacccgtacacagactttactaaaagagtaca

SEQ ID NO: 682932 - DNA, 100 bp, Homo sapiens
cgggggcggtgctgcccctctggagcgcgcttccgcaatataaaaaggtctcctctgagcctccggcctccataagacccaaaacagatgacacctcttc

SEQ ID NO: 682933 - DNA, 75 bp, Homo sapiens
cttctcgactcggtcctgtttcgacagcgaacatgtcgcggcctgtcaggaagcatgagtgggaaaagcatggga

SEQ ID NO: 682934 - DNA, 100 bp, Homo sapiens
ccttgatggtcaaaagattaagctttctaagaagtatggagtacatgtttgtggagaaggtggagagtatgaaactttcactttggattgccctctattt

SEQ ID NO: 682935 - DNA, 101 bp, Homo sapiens
gagcactggatgatgtgagaaacaggcagcaggatgtgcgggtacttaaacttcacccttgtttagcccctattaaggttgctttggatgtaggaagaggc

SEQ ID NO: 682936 - DNA, 100 bp, Homo sapiens
gcagatattgagagaatagccccattggctgagggggccttaccttacaacctggcagaacttcagagacaggaattttcaacgtccggttcatctaata

SEQ ID NO: 682937 - DNA, 75 bp, Homo sapiens
atcaacctcaacccgctcaaggagccactcggcttcatcaaggtcctcgagtggaattgtattcccattggagag

SEQ ID NO: 682938 - DNA, 98 bp, Homo sapiens
ggaaaccagctgagccaacccacattctgacctaaggagcactgagctccctcgtgaaagatgcttctgttcctctgattgatgttacaaacctccct

SEQ ID NO: 682939 - DNA, 74 bp, Homo sapiens
aactcctacccctggccctacggccgacagacggtggttatcactaggctaaaactggacaaagaccgcaaaaa

SEQ ID NO: 682940 - DNA, 90 bp, Homo sapiens
acgggagtcggggtggtggcttctcggaaccgagccccgacaggctatgacgtatcttcgagtgcttcgactgaccatgatcccctgggc

SEQ ID NO: 682941 - DNA, 75 bp, Homo sapiens
tgggagatccacagctaagacgccaggacccactggaagcctagaaatggtacttaaagctttcaccaaaacacc

SEQ ID NO: 682942 - DNA, 100 bp, Homo sapiens
gcacccgagcagcgccagcggccgagcgggcggcttcctggcctgggcgctccggtggcggcggagagaggtggagaagagcgagtacttgagaaagaag

SEQ ID NO: 682943 - DNA, 75 bp, Homo sapiens
ttaccatggcagctgctcaagcagttcaggctacagctcaggtgtcacgtcttgaaattttaaatgtcctcagtg

SEQ ID NO: 682944 - DNA, 75 bp, Homo sapiens
cctagagcatgaagctcttggtatttccatggccaaggtccatctggttggtattgacatctttactgggaagaa

SEQ ID NO: 682945 - DNA, 99 bp, Homo sapiens
agggatcccagcagtgcaaacagacttcggagtacctgcgctatgaagacacgcttcttctggaagaccagccaacagtcaggtaccaggagtctaaga

SEQ ID NO: 682946 - DNA, 90 bp, Homo sapiens
atcagccccaaacaggacgaaggcgtgctgaaggaatttgaagcctacattaatgcttctggagaacatggaattgtggttttctctttg

SEQ ID NO: 682947 - DNA, 100 bp, Homo sapiens
ctgggtccagccccttacttaaaggcttgttgattggtgctggctgtgccctctaccccttgggctgggacagtgaggaagtccggcagacttgtggcta

SEQ ID NO: 682948 - DNA, 108 bp, Homo sapiens
gcctggaccctgcccagcagaatttgtatagagatgtgatgttggagaactacagaaacctggtctccctagttgctgtctctgctggccttcatctgtgaagaagtt

SEQ ID NO: 682949 - DNA, 75 bp, Homo sapiens
gaacagaaaagactgggacttcttgctggatttgcattccttacagcaaactgaaaccgtgtcagttcagtcttc

SEQ ID NO: 682950 - DNA, 101 bp, Homo sapiens
tgattaaacccactctccacacagtctctggtcccagcccaccccatggcccctcccagtcccagcaccaccagcagtaataacaacagtagcagcagtag

SEQ ID NO: 682951 - DNA, 142 bp, Homo sapiens
tactgtcacttttaatcccaaatatgatacgttattaaaagctgtaaaagatgctactaacactggaataaagtcaataggttgttccattcagctagtggaagtacctcaaagcagcaatacgagtctggcctctttttgc

SEQ ID NO: 682952 - DNA, 135 bp, Homo sapiens
gaaattcttcaggatcaattacatgtttgcaaaatggatggtcagcacaaccaatttgcattagtggatattccatctattataaccaagaaactattaaaagcagcaatgaagcatatagaagtgatagttaaa

SEQ ID NO: 682953 - DNA, 100 bp, Homo sapiens
ctgtatgacctgaaccacacgctgtacaatgtgcagagctgcggtatgactcttatgagtcctgcgactcgagggccgtcctgagtgagcgcgacctgta

SEQ ID NO: 682954 - DNA, 100 bp, Homo sapiens
ggcttattctgcctacgtgccccaagatggaacgatgttaactgcgctgcatagttatatggatggtgttaaaatcatcacacaacaggttcaaccaagt

SEQ ID NO: 682955 - DNA, 82 bp, Homo sapiens
accggcgccgggagatcctgggtttaagaattgtttaagctgcatcaatggagcacatacagggagcttggaagacgatcag

SEQ ID NO: 682956 - DNA, 99 bp, Homo sapiens
gctgggcaccaaataccaggctaccatggtctacaagactctcttcgctctttgcatcttaactgcaggaccccaggagcaagcacaagttcaaaatcc

SEQ ID NO: 682957 - DNA, 90 bp, Homo sapiens
gcggaggggaaagcagcacggaaatgccctgtgactggcagcggaaaaggcgaccaccgcttgtgtgtgcccagggtggctccgtggccc

SEQ ID NO: 682958 - DNA, 100 bp, Homo sapiens
tgcgggtagcggggctctccgaggagccgcacgccggcggcaccatggtccacctcagtatctttcagatgaaggcattgaagcttgcacaagctctcca

SEQ ID NO: 682959 - DNA, 146 bp, Homo sapiens
acccaccagaaggaagaaactctgaacacatctgaacatcagaagggacagactccagacgcgccaccgattacacagtgcgtggcctcctgggcaaagctacagatgacttccgtgaggacgggaggctggtagagaagacaacc

SEQ ID NO: 682960 - DNA, 124 bp, Homo sapiens
ctctgggacctgcaggtcccggaaggtccttagggaggaccccagacaccggagactgggaaatggggttgagcattcatgatggtacctggaagtcagcaatttatggttttggagatcagag

SEQ ID NO: 682961 - DNA, 75 bp, Homo sapiens
tcttttttgataataagagaagttggtttggtgcacctcgatttggaggaagtagggcagggcccttatctggaa

SEQ ID NO: 682962 - DNA, 75 bp, Homo sapiens
agaagtaagagggaaaatgaccacgttcaagggatgctgagaacttgctggagtcacagccactgggatcctttc

SEQ ID NO: 682963 - DNA, 100 bp, Homo sapiens
tgggaagaggcccagtccagagaggctgacggggtacgggatccaccactgctttgccaggagcatgatgggccacgaggtgaaggtgccgctcctggag

SEQ ID NO: 682964 - DNA, 75 bp, Homo sapiens
gtcctgagtccggatgaactggaactggagctctgctatcgaagccctggagaagaccagctgttctcggagttc

SEQ ID NO: 682965 - DNA, 82 bp, Homo sapiens
gaacagacctagtgggcgttgcctttagacccagacttaattcagtgcacaaatgagatgaatgtgaacatcccacagttgg

SEQ ID NO: 682966 - DNA, 74 bp, Homo sapiens
acatgaaagacttcctcaaggactacagtatgcacttaatgtccctgatttcagtttcccaaacctgagatgat

SEQ ID NO: 682967 - DNA, 90 bp, Homo sapiens
cgacgaggcgcacagggcggtgctggaggcgctcagggttggggtctgctaggtccccggaatgagttgtttgacgcagccaaataccga

SEQ ID NO: 682968 - DNA, 48 bp, Homo sapiens
ctctgaggggcttagaaattaacaggatgaggaaactgagacgcagag

SEQ ID NO: 682969 - DNA, 82 bp, Homo sapiens
tggaaacgtcaccggaatcaggaccgagtataccaacagatgttttaaagattgtgtattctgtgggtgctcagacaacagc

SEQ ID NO: 682970 - DNA, 101 bp, Homo sapiens
gccctgcgcttcgtgcaccggggcggtccgttgccaaagccagtattgaaatggctgatggcaagtgcaggaagatccttttctacagcagttacagaaca

SEQ ID NO: 682971 - DNA, 75 bp, Homo sapiens
cagcacaggacctggaaaaattacatgagaattgacatctcaccaagtaccctgaggaagcatacccgtttagca

SEQ ID NO: 682972 - DNA, 100 bp, Homo sapiens
gcctcctacgtttacctgtccatgctgtggatttctttaaccagatcaacatgttatatggaactattacagaattctgcactgaagcaagctgtccagt

SEQ ID NO: 682973 - DNA, 74 bp, Homo sapiens
ttctcccagctggcagaagcctatgagtgggctcgggatgagtttgaaggcctcttcaagcagccagcagaaaa

SEQ ID NO: 682974 - DNA, 75 bp, Homo sapiens
cagattctgccaattcgttttcaggagcatctccagttccagaaagctgagtctgatctggattacattcaatac

SEQ ID NO: 682975 - DNA, 82 bp, Homo sapiens
cgctccgtggccttagctgtgctcgcgctactctctctttctggcctggaggctatccagctccctgtgggccttgctcaga

SEQ ID NO: 682976 - DNA, 100 bp, Homo sapiens
tgcctcctgcagcccccatagcaggtgcagtcagcctcagtttccaaagccggaaaaggatcctctagtagccacggtgtggcagctgctctgaaccagg

SEQ ID NO: 682977 - DNA, 51 bp, Homo sapiens
gccaacatccctgcacctctgaagccaacctttctaaaaccaatttttcca

SEQ ID NO: 682978 - DNA, 90 bp, Homo sapiens
cacttgacaaccagcatgccgagatgatgcgacctaaagtcatgtggcacctccttcgaaggtacatggcatcccggctccattccctgc

SEQ ID NO: 682979 - DNA, 102 bp, Homo sapiens
cgcattcagaatttgaccatcttggtgagaaacattaagacctactaccaggtggatccataaagaacccagccaacccgcagagggaggggaggggctgag

SEQ ID NO: 682980 - DNA, 100 bp, Homo sapiens
tgccgagcctcggtcccggcccccatcctccccgccccatcggttgttgtctgggcggatcggcttcagctccccaggaatatgattgaaaacagcatgt

SEQ ID NO: 682981 - DNA, 89 bp, Homo sapiens
gccggagaagcgcgcgggcgcgcaggccgcggggagcacctgggcagagattgtcaagaggctgaatgctatctgtgcacaagtcattc

SEQ ID NO: 682982 - DNA, 82 bp, Homo sapiens
ccatcctgctcggcgtctggtatctggcaccatgactcctgtgaggatgcagcactccctggcaggtcagacctatgccgtg

SEQ ID NO: 682983 - DNA, 98 bp, Homo sapiens
ttttaatggaaaatttattaagacaccaccaggagtttctgggcaaagtatgtttagtccagcaagtatcggtcagccacgaaagacgacattatctc

SEQ ID NO: 682984 - DNA, 75 bp, Homo sapiens
agaaggagctagctgaaataacccttgatcctcctcctaattgcaggtggaataacactcccatggatgaagcac

SEQ ID NO: 682985 - DNA, 78 bp, Homo sapiens
gatggcggtgccctgggaggaatatttccgactggctttgcaagagaaactgtctaccatgaagaaagcagtgtcact

SEQ ID NO: 682986 - DNA, 75 bp, Homo sapiens
tttatacactcttagtgctgtccaggaatggaagttggatacactttgtgacttgtacgagacactgaccattac

SEQ ID NO: 682987 - DNA, 100 bp, Homo sapiens
aaagggaaagaggagaggcacccgatatatgttctctaggccttttagaaaacatgattcgccatgaagtcagcgtaaataatgtaacacataaactgtg

SEQ ID NO: 682988 - DNA, 51 bp, Homo sapiens
gcacggacggtgttggttggggtaagaatgattgatgttggctgatattgg

SEQ ID NO: 682989 - DNA, 90 bp, Homo sapiens
cttgggtcctccgagagcagcagcgttggaaaatggatataccttatttgattatgatgttggactgaatgatataattcagctgctagt

SEQ ID NO: 682990 - DNA, 100 bp, Homo sapiens
ctggtacagaagatgtcgtccgagtatatgcagaagcagactcacaacttcatccaattctgtgacaacatatgaaacctgccagacctacgaacgcccc

SEQ ID NO: 682991 - DNA, 82 bp, Homo sapiens
cgccggccgagggtggccctaggggcagcgagcaagacagcaagcagaaaactttagaaactgttcctttggagaggaaaaa

SEQ ID NO: 682992 - DNA, 75 bp, Homo sapiens
agcaactccaagttacttgttcacgtgcctgccagtgtagagccggtggagcagctgggctcggcgctgaggttt

SEQ ID NO: 682993 - DNA, 75 bp, Homo sapiens
gaagttcacttaccaaacattaaacctggggaaggcctggtaaaagtgctgtttgtacgcaaccttgccaatact

SEQ ID NO: 682994 - DNA, 98 bp, Homo sapiens
atcccgtgccctcgctctgagctgcgcctggacctggttctgccttctggacaatctttccgtgacattctgaaagttcccaaacctgaacctatacc

SEQ ID NO: 682995 - DNA, 100 bp, Homo sapiens
ctccctgccccagcccatcctctctaaccaaggcatctctcgggacaactggcacaagcgccgcaaaaccgggggcaagagaaagccctaccacaagaag

SEQ ID NO: 682996 - DNA, 90 bp, Homo sapiens
gtagagggtttgagtccgcatcgccacagctgaaggctgcgagggactaagagcagactcttcacagatggaatcacaaataaacttatt

SEQ ID NO: 682997 - DNA, 100 bp, Homo sapiens
ggagaggagctgtggataacgggaggtgaatttccatgtcaacatagtcctgagatgtaacctagaagtcaagcggtaaaacaagctttgcaactatgtg

SEQ ID NO: 682998 - DNA, 75 bp, Homo sapiens
cacgatgtttcagacagtccccgacacgtcgtcttacatcaaggcaagccgattttttcagttgatattcaccct

SEQ ID NO: 682999 - DNA, 50 bp, Homo sapiens
cttgctcccatccctgcagcatgaacaagttccagctcaaccaagataaa

SEQ ID NO: 683000 - DNA, 101 bp, Homo sapiens
agcaggccgccccgccagcatgtcaagaaagaggcggtgctgatccaagccggcgagtacatgggtcagctgctggaacaagcgtccctgcacttctttgt

SEQ ID NO: 683001 - DNA, 82 bp, Homo sapiens
cgcgcccgggaccgacccctctgctcgcggccgcgcctttgagggggatatgagactttctactcggaatatcctgagtgtt

SEQ ID NO: 683002 - DNA, 100 bp, Homo sapiens
acgttctaaaaagaggcgaaaggaagcaagcagttcagaagagccaaggaataaacatgcaatgaacccaaaagggccatccgggatggtgtcattgagg

SEQ ID NO: 683003 - DNA, 100 bp, Homo sapiens
cacagagtgcaagacgctgagcaatgcaggagctggaggatcttcagaagaagcctcccccatacctgcggaacctgtccagcgatgatgccaatgtcct

SEQ ID NO: 683004 - DNA, 51 bp, Homo sapiens
gctttcctggtcagcagcgacttggcagaaaatctatttcaggaacttcag

SEQ ID NO: 683005 - DNA, 94 bp, Homo sapiens
ccaaagcctgaacaggcagggccagacccaggctctcctttgataaagatgcgatggtggccagagccaggcggctcatcgagctctacaagga

SEQ ID NO: 683006 - DNA, 50 bp, Homo sapiens
atcacatcacatgctgacagcacaagaagctttcaccaacaatcaccagt

SEQ ID NO: 683007 - DNA, 100 bp, Homo sapiens
gaggtgtagagtttgcatatatcaactgtggccttaatgagcatgttgacagcatcgatgctagacagacactccaaagacaacaggccctccctctgcc

SEQ ID NO: 683008 - DNA, 96 bp, Homo sapiens
ctgccgtggccgcccggctgccgggagccgacagcttcgcgccgggactcacaccacccggcaagaactgctcactacggctccctgccccagaag

SEQ ID NO: 683009 - DNA, 96 bp, Homo sapiens
agtggtctgatgatgagaacacagccacgcttacggattaagcatgaaaatattgttgccctggaagacatttatgaaagcccaaatcacctgtac

SEQ ID NO: 683010 - DNA, 97 bp, Homo sapiens
ggctccagctgcaagcacgtcagcctctaccagcctcagctggccaccaggaaattttatgctttggatccttcattcccaaggatgaatttgttaa

SEQ ID NO: 683011 - DNA, 104 bp, Homo sapiens
gaggcgagtgtggaaggactcctgaaccagctcgtcctggagcacctgcagctggcgcctctgcagtggggtactccaaagattcaggtttactcacgtcatcc

SEQ ID NO: 683012 - DNA, 97 bp, Homo sapiens
atcctttacgagcacggcctcttgcgctacgccctggatgagatgatgaagacagtcagtgttgccttagttttgtgcctgaatgttggtgtggacc

SEQ ID NO: 683013 - DNA, 98 bp, Homo sapiens
cctccagcggggatgacacagaagaggcatggctattgcaccttgggagaagcctttaatcggttagacttctcaagtgcaattcaagatatccgaag

SEQ ID NO: 683014 - DNA, 50 bp, Homo sapiens
tgtcagtgagatggcttctaacaaggcaaacaagcatgcatttaggatcc

SEQ ID NO: 683015 - DNA, 97 bp, Homo sapiens
tggagcgaccccttgttctttggtggcgctgccgattcgaagacagtctcttacacctcctcctcagaacactattacatgggaagaatatatatct

SEQ ID NO: 683016 - DNA, 97 bp, Homo sapiens
tcaggggctgatttgcctcaaatggaacaccagcactgagaaccattttggttctgaactggacatcgctattgcggttccgaggcagtgggaagag

SEQ ID NO: 683017 - DNA, 98 bp, Homo sapiens
acgtgagccactccacccagcctaaaacttcatcttctttgctgatgccattaataatgctgcaggctttggtttcagagggtatgacgaaaatggag

SEQ ID NO: 683018 - DNA, 80 bp, Homo sapiens
ccgcgcagccctcggagcacgggctggagcggctctgggctccggaatcgcccgcagccggtactgcgggacccactgcg

SEQ ID NO: 683019 - DNA, 74 bp, Homo sapiens
cgagatcaatgaacctttagatgaatttacaacttatgcagagatggaccccaccacagcagccttggagaagg

SEQ ID NO: 683020 - DNA, 75 bp, Homo sapiens
tagcgcagttggcgcggcagtacgctgggaaagcaggcaggatgggagagtcgccgatagaaccacctcttccct

SEQ ID NO: 683021 - DNA, 100 bp, Homo sapiens
gctttggctgcccggctgctgcagcccgcgcacagctgctcccttcgccttcgccctttccacctcgcggcagttcgtgcacagccagagaacaacacat

SEQ ID NO: 683022 - DNA, 100 bp, Homo sapiens
gctgtcgccgccacctcctctgatctacgaaagtcatgttacccaacaccggaagtcctcgcagagaatggctgaggctgattgggacgcattaactggg

SEQ ID NO: 683023 - DNA, 100 bp, Homo sapiens
ggccatcgagaagatgaatggcatgctcctcaatgaccgcaaagtgatcatcttctccacgcccctggccgtcattgcctacttcctcatctggttcgtg

SEQ ID NO: 683024 - DNA, 100 bp, Homo sapiens
agctatatactttggttacctatgtacctgttaccactttcaaaagtgtcaactctgcccgctcagttcctccttcctacccaccaccgcaggacccgtt

SEQ ID NO: 683025 - DNA, 75 bp, Homo sapiens
gtcacctcggtaccctggaggtccaaggcccccattgaggatacctaatcagtttttcagaagaagtgaagtcaa

SEQ ID NO: 683026 - DNA, 75 bp, Homo sapiens
cgcgccgcgcccttctccctggagtaccgagtcttcctcatcaccaggagactaaagtccatcaaaaacatccag

SEQ ID NO: 683027 - DNA, 101 bp, Homo sapiens
aaaggagtcagggatggctcttcctcagttgactggattgttgctgacatcttggccatcaggcagaatgcgctaggacatgtgcgctacgtgctgaaaga

SEQ ID NO: 683028 - DNA, 50 bp, Homo sapiens
cccggccgagaccccgtctgggaggataaaagaatcagagtgtctcaacc

SEQ ID NO: 683029 - DNA, 126 bp, Homo sapiens
ggaggcgcctgcctaccgcctgcaggactgcgacgcgctggtcaccatgggccgtgacttggcgagcacgaccctccccgggtaccctccacacgtcccccccgctggacagggcagctactcagc

SEQ ID NO: 683030 - DNA, 100 bp, Homo sapiens
gggggccacaaatgctccttctcctggagacgcaactcaagggtgatattcatgaggatttttgcagcgtttgcagaaaaagtggccagttactgatgtg

SEQ ID NO: 683031 - DNA, 82 bp, Homo sapiens
ggaagggccggcccgcctccctggccggggcgcagttcggaggttcagaggctgaggggatctggcggtggagcgctaggat

SEQ ID NO: 683032 - DNA, 50 bp, Homo sapiens
atcgcctgctttgattcattgaaaggttatatcctgtgttgtgacctcat

SEQ ID NO: 683033 - DNA, 100 bp, Homo sapiens
tgattctccattgggaaaggcatttacagacatatctgaagagatggattaagaatgctttggattaaggattgtggagcacatttcaatcattttagga

SEQ ID NO: 683034 - DNA, 100 bp, Homo sapiens
ggacgaggcggcgccgccgggctgtggagagacaggatctcactgtgttgtgcaggctggtctcaaactcctggcctcgagcagtcctcacacctcagcc

SEQ ID NO: 683035 - DNA, 103 bp, Homo sapiens
tcccgggctcggcggcgcgggtgaacgtgagcggtttcccaggcagctgcagacttgaaacagttctgtctgcagaatgctcaacatgaccctctgctgactg

SEQ ID NO: 683036 - DNA, 50 bp, Homo sapiens
cttgcttttcctcgctggggtgtacggctgctctctcaggaggcaccacc

SEQ ID NO: 683037 - DNA, 74 bp, Homo sapiens
gcagaaactccctctggtgatgatttcagttacatggacacagaacagtatgaagaagcagtacgagactatga

SEQ ID NO: 683038 - DNA, 73 bp, Homo sapiens
tttttgctcattaacagaaaagaagaggagaatgctaagcagaattactccaaaggtttcggcggcaaatacg

SEQ ID NO: 683039 - DNA, 75 bp, Homo sapiens
ccgcgtggtgcttgccgcagccagcaactatttcaggaagatgatccctatgatcttgaagatgtttctgcacag

SEQ ID NO: 683040 - DNA, 101 bp, Homo sapiens
aaggccgtcaccaagtacaccagcgctaagtaaacagttgcaaaagcttctcatttcagagagatgccaggatcctaagtgcctgccaaacttaccaattc

SEQ ID NO: 683041 - DNA, 98 bp, Homo sapiens
agacatttgctacagcatcccacattaagtcaacgggtcgggattactgttcggaagaagaggatatcacatagcaccaattttaccactcaaaccag

SEQ ID NO: 683042 - DNA, 100 bp, Homo sapiens
agcgacagagacaagctgagcttgccgcacaaaaagctagagaggccatcgaagacggcaatttggaggaaatggaagaggaagtacggcttaagaagcg

SEQ ID NO: 683043 - DNA, 51 bp, Homo sapiens
tattttctacccctagttcttctaacagaacgatttcgagatttactactg

SEQ ID NO: 683044 - DNA, 97 bp, Homo sapiens
agatctacttgaaaaattaagtgaattgatttggttggaatgctcttttaccgatgctttaacatacagccactagtccaaacaggagctttacaga

SEQ ID NO: 683045 - DNA, 83 bp, Homo sapiens
gctcttcctcaatgcttgtgtggttagagatgtttatgattacttccgagctgtcctgcagcgtgatgaaagaagtgaacgag

SEQ ID NO: 683046 - DNA, 90 bp, Homo sapiens
gcaccacctccagcccctgcgcctcgaattaaacaaccaccatgtcgagcaaaaaggcaaagaccaagaccaccaagaagcgccctcagc

SEQ ID NO: 683047 - DNA, 100 bp, Homo sapiens
accaaccagcccaaggaacatcttgccaatttcaaatcggggtgctccgaggacacatgggcccagcacctttgacctgcagatgaagtttgtatgtggc

SEQ ID NO: 683048 - DNA, 75 bp, Homo sapiens
atatgatattgctcaatgtgaaaacaaggatgttattgccaaatatgggatgtacgtatttttgcatgcagtgaa

SEQ ID NO: 683049 - DNA, 100 bp, Homo sapiens
ccgtgcacgagcagcaaatggatgacaatgaaatcaaaaccttcatgccgattgcatgggcagcagcttatggtcacagggattatggacccagaacaga

SEQ ID NO: 683050 - DNA, 50 bp, Homo sapiens
aatcccagcacttggggaggccgagttattaccccattcaagttgacaac

SEQ ID NO: 683051 - DNA, 83 bp, Homo sapiens
tgcccagatgctcataaggattgtcctctttctacaaaaggccatgaatattgtcacttcagtgctgctgctttatgccaaag

SEQ ID NO: 683052 - DNA, 73 bp, Homo sapiens
aaatatgaggatggttcatatacttacatcagttgttttttttgctccactcaagcctgttagaatcaccatg

SEQ ID NO: 683053 - DNA, 75 bp, Homo sapiens
cagctgcaaggagttactgaagtactatactggcaattgctggagaagattttgcaattgttgcttctgatactc

SEQ ID NO: 683054 - DNA, 87 bp, Homo sapiens
gatgacattctcatccccccagagtcactgcagcagccagccaagttcctccgcctggtgctctaccagcactggtccctccatgac

SEQ ID NO: 683055 - DNA, 83 bp, Homo sapiens
ggatgacatcatctacactcaggacttcacggtgcccggttacgggcaggacttgagtggcttcggacagggcttctcagacc

SEQ ID NO: 683056 - DNA, 100 bp, Homo sapiens
cctcgctgggcttcgtcttctcggctttcgccagcgatctgctgcatctctacctcggcctgggcctcctcgctgtaagactttgaccccgacgcaggct

SEQ ID NO: 683057 - DNA, 73 bp, Homo sapiens
ggactgggagggcaacgagcacaacaggagctacgaggagttgaaatgcactcggtgatggaaagagagccac

SEQ ID NO: 683058 - DNA, 82 bp, Homo sapiens
cgggacagtggccttcgcgctaacgaagaaaattggcaacttctccatcgtgcggcggcttggcgtgcaggagtgcattctc

SEQ ID NO: 683059 - DNA, 96 bp, Homo sapiens
tggagatatggcgcaactgcggcgccccctggcgaagcggtgctgcctccagcccagagatgccgccaagatgcccgagagcgcttggaagtttct

SEQ ID NO: 683060 - DNA, 100 bp, Homo sapiens
gtctaactgagttgctgaagcaaggacagtatttgatgagccctcctcttcagctaggaaaatgacggtgttcagaaagttaaaacttcttcgctggaag

SEQ ID NO: 683061 - DNA, 100 bp, Homo sapiens
ctctctcaggacaggacgtgggaattaactcctgaggagagagcccaaaagattgccaaagccatgcgcaaacagtcttctgaagtcaaagaaaaatggg

SEQ ID NO: 683062 - DNA, 101 bp, Homo sapiens
ccggggccccgctatgtggccctgagccccgatgactatgctcagctgtgtaacatccccgtgacgggacgccggcagccatatggacgggacgccttggt

SEQ ID NO: 683063 - DNA, 100 bp, Homo sapiens
catcatgcctcccacacaatcgcagtttggagagatgggaggcaagtttatgaaaagccagccccggggcccagcgacctgacagttacaggactgaagt

SEQ ID NO: 683064 - DNA, 100 bp, Homo sapiens
ctcgattaaagaggaaggggcagtgctcacatttctgggcagattcctgctccaaaacgaggagaaatagtaagacagattggcgatgccttgcgggaga

SEQ ID NO: 683065 - DNA, 74 bp, Homo sapiens
gagccgggcctagcccagagacatggagagttgctacaacccattttaagaagaggagaggtcactcaattggg

SEQ ID NO: 683066 - DNA, 100 bp, Homo sapiens
ctccttgcgtcccgcctccctgggagctccgcacggattatgtttgagaccttcaacaccccggccatgtacgtggccatccaggccgtgctgtccctct

SEQ ID NO: 683067 - DNA, 96 bp, Homo sapiens
caggttcgggacatagagaatctgaaggatgcccaggctgaggaagagatcaagcaagagatgaacacactgcagcagaagctgaatgagcagcag

SEQ ID NO: 683068 - DNA, 50 bp, Homo sapiens
aaacaacctgcccgaagacactttaccgatttgttacaactcaagcaagg

SEQ ID NO: 683069 - DNA, 51 bp, Homo sapiens
gtggccacgctgcagagcctcgaatactgcaccgccaacgcagtcactggg

SEQ ID NO: 683070 - DNA, 98 bp, Homo sapiens
cgacctcgaccgggatggctacaatgaccaggatggagcagagcccagcgccaattccgtgtcagcccacaacctgctccggctgcatggcttcacgg

SEQ ID NO: 683071 - DNA, 83 bp, Homo sapiens
tgagactcctgctcagtgtagcattaaggtgtggtggacacaggcctattcatcaacatggctgagagagtctactttgggat

SEQ ID NO: 683072 - DNA, 100 bp, Homo sapiens
aaagactctgggactcttggtgccaacagagttactctaccttagctggatctccaaaatacaagtgaatcacccggcagttctgaggcgtgcggaacaa

SEQ ID NO: 683073 - DNA, 73 bp, Homo sapiens
gacacagagactttatcaaaaacatgattacagggacatctcaggctttccatctgatggtcccctggtgtgt

SEQ ID NO: 683074 - DNA, 75 bp, Homo sapiens
ttgcatttgatttcacaaaagtgaagagaggcatgacgacagagatgatggtgtggattattgggccaaaagagg

SEQ ID NO: 683075 - DNA, 75 bp, Homo sapiens
ggatgagtacgataccgaagcgggctgtgtgccccttctccacccagaggaaatgagtggcttatactctcctgt

SEQ ID NO: 683076 - DNA, 98 bp, Homo sapiens
ctacaactgcgctatcttccctggatttttcttcaccttttccttactcatgagccagttacgccccatggtgtccatcctgccagcagactgattca

SEQ ID NO: 683077 - DNA, 51 bp, Homo sapiens
gcagccgtccggagccagccaacgagcgagtccctgtgaagcaggaagagt

SEQ ID NO: 683078 - DNA, 90 bp, Homo sapiens
cacaactccagtgctaactcaacagaatgattgaagatagtgggaaaagaggaaataccatggcagaaagaagacagctgtttgcagaga

SEQ ID NO: 683079 - DNA, 90 bp, Homo sapiens
attttattgacattgctgaagtggagacagaacacttcagttatggaagatcaaaatgaagatgagtccccaaagaaaaatactctttgg

SEQ ID NO: 683080 - DNA, 100 bp, Homo sapiens
gaccctggagcctcagttggaagcagccgatccagcctgcggagcctgtggggcagtcctcatctagccactgaagcagagtgcccacatcaggagcagc

SEQ ID NO: 683081 - DNA, 90 bp, Homo sapiens
gggagtggagcttggtttcgggatctcggtgctgcagacggcgagacctcctgcacaggtgtctgacttccagcaactgctggcctgtgc

SEQ ID NO: 683082 - DNA, 100 bp, Homo sapiens
agacaaacaaggtgtaaactcacaaaaaccctgtttttttaatagctactacataggcaagtcaccaaagaggtggagatgctttctgaccccgtcgagg

SEQ ID NO: 683083 - DNA, 83 bp, Homo sapiens
ctaagcctgcacagccgcggcggcagcagcagtgagaggttatgccaaggacgccctgaatctggcacagatgcaggagcaga

SEQ ID NO: 683084 - DNA, 82 bp, Homo sapiens
ggagctatcggcgccgcggcaagagccagcagccattgtttgatgtcctgtgactgagaaaccaggctttaaactttatgcc

SEQ ID NO: 683085 - DNA, 90 bp, Homo sapiens
gaaagctgaaagtgttggctaaatccactgaaggaacagaaacaattgaaggagtctataacacacactccagttctcgcctgaattacc

SEQ ID NO: 683086 - DNA, 89 bp, Homo sapiens
gcaatttgtctcatcaacatctctttgagattcgaactcgagccatctctgctaaaggcatgactttagtcacccccctgcagttgctt

SEQ ID NO: 683087 - DNA, 100 bp, Homo sapiens
gagaggaacaagcgtccctgatccagaaggtgggaatagcatttcaaggttcagtggaggagaaccccaagagcaccaaaatggaaagatgatttgtaaa

SEQ ID NO: 683088 - DNA, 50 bp, Homo sapiens
cagccatcttgtcatgtacctgggaaccaaattcagaaggagctggcgga

SEQ ID NO: 683089 - DNA, 82 bp, Homo sapiens
caaggaaaagctggcacagaccgccacggtgtggacgaatgtggaacctcgctctgtggctgtgttcccttggcactcctta

SEQ ID NO: 683090 - DNA, 74 bp, Homo sapiens
ctgacttttttatccgtggagagcgactcagggacaaaatggttgaagaagcctcagcggaggcgatacggcct

SEQ ID NO: 683091 - DNA, 100 bp, Homo sapiens
atttacagaaagagtcaacagcagtggcaacagagcttacaagaccctatgaaaaaattagttgagaaagaagagaagaagaaaatcaaccagcaggaaa

SEQ ID NO: 683092 - DNA, 95 bp, Homo sapiens
cgttgtgattttacgacagaaggagaatgcagaccctcgacctccagtgcagttcccaagtataatgggtctctcccaaatggcgatagaggaag

SEQ ID NO: 683093 - DNA, 89 bp, Homo sapiens
gggcgattggcatcctcagccgcttttctgccttcaggatcctccgctcccgagagccagcccctgggcaacaaagtggaaatggagat

SEQ ID NO: 683094 - DNA, 75 bp, Homo sapiens
caaagaccacgcctttgttacctcgaggctgcagagactgcaagtctggaagaacagctgcaaggatggggagaa

SEQ ID NO: 683095 - DNA, 100 bp, Homo sapiens
ttcttataaagctgtcatcaacctgggaaggaattcaggctggaaaaaaccagcctggacaccaagtctgtgtcagaaggccacctcaagaggaacatcg

SEQ ID NO: 683096 - DNA, 74 bp, Homo sapiens
gttggctgcagatttgtggtgcgttctgagccgtctgtcctgcgccaaggatttccatcaccaaggagtaagaa

SEQ ID NO: 683097 - DNA, 75 bp, Homo sapiens
cgaaggtacagaggcggatgaactgctgagacttgacagagtgcaagacgatgacttgcaaaatgtcgcagctgg

SEQ ID NO: 683098 - DNA, 75 bp, Homo sapiens
aacatttagaacgatgtgaacatcgaatcatggaatcccttgcatggctctcaagtatgtttagttccaatcgtc

SEQ ID NO: 683099 - DNA, 50 bp, Homo sapiens
tgacgaccaacttggcccctcacggccccaactggaccctaggcaaaagt

SEQ ID NO: 683100 - DNA, 100 bp, Homo sapiens
tcaaattcaccacctcggactcctgcgaccgcatcaaagacgaatttcagctactgcaagctcagtaccacaggtggacccaagtggagagattgtggaa

SEQ ID NO: 683101 - DNA, 76 bp, Homo sapiens
tgaccctaatagaagatttgacccagatgcttgaagaaaaaggggggacacagcgattgccacgcgccattggaat

SEQ ID NO: 683102 - DNA, 82 bp, Homo sapiens
ggacgaggggaagtcgtacagcggctggcgcccatgcggctctacacgctctccaagcgccactttgtcctcgtgtttgtcg

SEQ ID NO: 683103 - DNA, 50 bp, Homo sapiens
cccgggggtggtgacagcaggtctgagatccccctccatcagctccccag

SEQ ID NO: 683104 - DNA, 101 bp, Homo sapiens
tttgtctttctcagcaccttggcgaagccttgggtttctttcttaaaggactgatttttagaactccacatttgagatacaaggcagatccaaccatcccc

SEQ ID NO: 683105 - DNA, 75 bp, Homo sapiens
gttgggattttgtgttcatgtcaagcatcctcataaggccaacagagcacttatggcaaggcatctcgagggggt

SEQ ID NO: 683106 - DNA, 75 bp, Homo sapiens
acatggaccaaattatcacctccaaggagcaccttgccagcaagatccgaggaaaatgtttataggaggccttag

SEQ ID NO: 683107 - DNA, 83 bp, Homo sapiens
ctgcaggcgagcgggcgagcgggcgcgccctgcaggggtattgcagttggacacatatattttttcttggaagatgtatttcc

SEQ ID NO: 683108 - DNA, 82 bp, Homo sapiens
aaacgcagaaggactgcctcactgagcaaccaagagtgtgatgaatgcagactctgctaccattttggctgtttggatcctc

SEQ ID NO: 683109 - DNA, 51 bp, Homo sapiens
aaggtgcaagatactatataaagtgtagccctaactactagcagaggcaag

SEQ ID NO: 683110 - DNA, 100 bp, Homo sapiens
agggactggagcaggccgtgcgcttctcacctggggcgggtgggttctgcaccaccctcccaccctccttcctccgtgtggacgatagagccacatccag

SEQ ID NO: 683111 - DNA, 90 bp, Homo sapiens
acgaggttaacctcttagtggaggaaattcatcgtttgggttcaaaaagatttacaaaaggtgcaggtatgagcaggtctgaagactaac

SEQ ID NO: 683112 - DNA, 75 bp, Homo sapiens
caatttatcattgaataagtgttttaagaaagtggacaaagagaggagtcaggaactagaggctgctatccagcc

SEQ ID NO: 683113 - DNA, 111 bp, Homo sapiens
ccagtggtaattaccatcaatactatggaatgcattttgaaacttaaggatgggatacagttaatagaagatgaaattgcaaccattcttaaatctacattgaaaggacta

SEQ ID NO: 683114 - DNA, 74 bp, Homo sapiens
caaggaaaaactggagagcttcatcaaaaatagtgatagctttgataagatttgcctgacacaattcacattgg

SEQ ID NO: 683115 - DNA, 74 bp, Homo sapiens
tttctttgtttatgtcagtaatttcacctggcccatcaaaattcagggtatttgaagtataccatacaactgtt

SEQ ID NO: 683116 - DNA, 75 bp, Homo sapiens
cccttcaaaaatttaaacaagaatccactgttgctactgaaagggaacagatggagtcggataactgttcaggag

SEQ ID NO: 683117 - DNA, 75 bp, Homo sapiens
gcgctccaaccgcctcctcctcctcagtaacgcggaaatgagccgtcagactgctacagcattacctaccggtac

SEQ ID NO: 683118 - DNA, 100 bp, Homo sapiens
ggaacgggtacgtgaggagcagcgctgcagccgcagccgcagccgccgccggccaggagattacctggggcaattgatgttatcggtcagactataacta

SEQ ID NO: 683119 - DNA, 100 bp, Homo sapiens
ctcggagcaacgagcgcagcgccgggtgcggggggcaatggcactgcagctctgggccctgaccctgctgggcctgctgggcgcaggtgccagcctgagg

SEQ ID NO: 683120 - DNA, 99 bp, Homo sapiens
cctgccaatcaaactgctacaagacaacaccctgatctggcatggacatcattatagccttcagaaaggccaacaaagtgggtattttcatcaaagtta

SEQ ID NO: 683121 - DNA, 100 bp, Homo sapiens
cgtatccagcgcaggggcccgtgcatcatctataatgaggataatggtatcatcaaggccttcagaaacatccctggccctcgggaccaaggatcacgtc

SEQ ID NO: 683122 - DNA, 82 bp, Homo sapiens
cactgtccacctttaatttcctcgaaaacgcctgtaactcggctgaagacaatgcagatcttcgtgaagactctgactggta

SEQ ID NO: 683123 - DNA, 100 bp, Homo sapiens
agcatggcttggagcacttcctattccactggattgggaaagaccatggcagggcaagaaagactcctccccgtggacctgccccttccacccaccactc

SEQ ID NO: 683124 - DNA, 50 bp, Homo sapiens
tttagccaacccaaattaccttaattgctcaatattgtgcatgacacccg

SEQ ID NO: 683125 - DNA, 101 bp, Homo sapiens
atttggccagttatccaattgatgaactagtagatagagccaaacaatcttttcaaggttcaaatggttgtcctgatcctgatttagtattgaagttcggt

SEQ ID NO: 683126 - DNA, 98 bp, Homo sapiens
gctaactcctgccaggcagtgcccttcccggagcgtgccctcgccgctggttcaaaccttgtactactcagctgatcacaagctgcttgatgggaacc

SEQ ID NO: 683127 - DNA, 75 bp, Homo sapiens
tcctacacctacctctctctgatatggccgcgtggaaagtgtcaaaattcttcccaagaggggatctgaaggagg

SEQ ID NO: 683128 - DNA, 100 bp, Homo sapiens
gtgccccggggaagccattccccaccccccaggcttgacttcaatggtttctacacggagcgcctggagcgcctgtctgcagagaggagccagaaggcca

SEQ ID NO: 683129 - DNA, 83 bp, Homo sapiens
atctcactctgttaaagctggtctgttctaactgagcatcaaggcatgccatgggttgcctctcataaatggccaaagctgtg

SEQ ID NO: 683130 - DNA, 50 bp, Homo sapiens
gtaaacctggtgactcacagaaccttgattgtcttcgcagttttaccgac

SEQ ID NO: 683131 - DNA, 90 bp, Homo sapiens
cagtaccccattatctatgacattcgggccagacctcgaaaaatctcctcccctacaggctccaaagccaaggccacctttgatgccatt

SEQ ID NO: 683132 - DNA, 98 bp, Homo sapiens
agcagttcaacgagaatgaagccatccaatggatgcaggaaaactgaacactctgctccagccaaggtggtgagggcagctgttcctaaacagcgcaa

SEQ ID NO: 683133 - DNA, 90 bp, Homo sapiens
agacagatgctaatagcaattcctacttgatcctgctccctcggtgtctgcattgactcctcatgctgggactggacccgtcaacccccc

SEQ ID NO: 683134 - DNA, 90 bp, Homo sapiens
ggggaaggtgatgtgaaatgatgctggagaagtaagcaggataacctctgagaatgtggctgagcggtttggcatttcacgggagaagca

SEQ ID NO: 683135 - DNA, 99 bp, Homo sapiens
gcgcttttgggctgcgccaccgacagagacatctggaagccggagctagtggaagaggtgaggtggctttgaccccgggttgcccggccagcacgaccg

SEQ ID NO: 683136 - DNA, 90 bp, Homo sapiens
gtcctaactaagcctcaactccagcagtgcctgggaggaaggaagaacaaatgccctgaggtagaggagttggtcttcagccattttgtg

SEQ ID NO: 683137 - DNA, 50 bp, Homo sapiens
taaacatgcaatgaacccaaaaggtctaccccaaagtctgccaaaggcag

SEQ ID NO: 683138 - DNA, 99 bp, Homo sapiens
ggacccgctgcccgcggctgcagtcggggcggcagctgaggcggaggctgacgaggaggcggatcccccggcgtcagacttcattagaggggtggtaga

SEQ ID NO: 683139 - DNA, 80 bp, Homo sapiens
agaccgaagcgttcgtatctggaaggctgaaggtgatgtggccgccctcaaccgacgcatccagctcgttgaggaggagt

SEQ ID NO: 683140 - DNA, 98 bp, Homo sapiens
gggagagctcctgggccacccctcctttcaggtcaagcctgacatttaccccggtaactgctgggcatttaaaggctcccaggggtacctggtggtga

SEQ ID NO: 683141 - DNA, 95 bp, Homo sapiens
gagcccgctccgccggccttgcgcggcgcgcccagggaaggcatttccagcccgcccacccaggtttacggggtgaaaatagacttttaaaaatt

SEQ ID NO: 683142 - DNA, 101 bp, Homo sapiens
gcttaccccggggtctatggaagtaatggaaggacccctcaacctggtgctggagaatctggtaaaagcaccattgtgaagcagatgaggatcctgcatgt

SEQ ID NO: 683143 - DNA, 83 bp, Homo sapiens
cagagtgcagagccgcctttccagcatgcaggggctgctcaggtgtccctacctgcaccggacgacgggggacacagaacgca

SEQ ID NO: 683144 - DNA, 90 bp, Homo sapiens
atctggggtctcctgcagccctaccagcacctgatctgcgggaagaacgccagcgcaatgcagtcaaccttttaagcaatgttccagtct

SEQ ID NO: 683145 - DNA, 75 bp, Homo sapiens
ttctcttctggatgaagatgaaccacagcttaaggttttacagacatttcaccagaggaattgaggcttgaatac

SEQ ID NO: 683146 - DNA, 75 bp, Homo sapiens
ccacctaactacggaaaacctgatcccaaaattattgaaaacactcgaaggcgccacccaagactgtcaaacccc

SEQ ID NO: 683147 - DNA, 82 bp, Homo sapiens
cttcggcagtccacccaccgccgccgcctcccaggtttctttacctccagaaagaagaatattggccccttgaattctggaa

SEQ ID NO: 683148 - DNA, 90 bp, Homo sapiens
cccgactcagcctaccaaaatgctgggattacaggtcagaagagatcaattctacagaaatttccagtggttctgttgaggctttatgga

SEQ ID NO: 683149 - DNA, 50 bp, Homo sapiens
agggactgggagtcgttagtgagtgtttggccagcgcttggatgagactg

SEQ ID NO: 683150 - DNA, 98 bp, Homo sapiens
ctggacccggcctgggagaagcagcagcgcaaggactttgtgttttatgccccacgtctgagaatcaacaagcggatcctgcagctctgcatgggcaa

SEQ ID NO: 683151 - DNA, 85 bp, Homo sapiens
acacaggagagctggctgcagtaaaaatcattaaattggagcctgatacaaaagttttgcagtactatttcaatctaggattgca

SEQ ID NO: 683152 - DNA, 75 bp, Homo sapiens
caaaggcaagagtaacagcagcgccgtcccgtccgacagccaggcccgggagaattgagtcagcagatactggag

SEQ ID NO: 683153 - DNA, 97 bp, Homo sapiens
ttacatccaagaactacaggctttacttttgtggtagaccgtctaagagaagcaccagtatgcatgagcgggtgaaccgaacagaaagacagtttcg

SEQ ID NO: 683154 - DNA, 118 bp, Homo sapiens
cggcgcccagttggggcgggttcgttcgcttcgcgttttggccagggcgggggtctgggctttaggcaggtccagtgtccatcaaagtccaggtgcccaacatgcaggataagacgga

SEQ ID NO: 683155 - DNA, 75 bp, Homo sapiens
tggtgatattcctggagtccgctttaagctgctctgttaaaagcgaaaatgaaacaattgcctgcggcaacagtt

SEQ ID NO: 683156 - DNA, 90 bp, Homo sapiens
cgcgcccgccgcgccatggcccgaagaccccggcacagcccattattcctatgtttacacaaaatattcgagaaggatttagatcacttg

SEQ ID NO: 683157 - DNA, 100 bp, Homo sapiens
gtgaatctccgcggggaggctcttccaaccaggggctgagcttctgcgctgtggagaagccaggtttattgggcacttcctagcaccaggcactgcaata

SEQ ID NO: 683158 - DNA, 100 bp, Homo sapiens
aaccagacccttactgtaaatgtagagggcactaaaacattgccagatgatcaacaagtgatggagcagcaccagcagcagcgtcaggaatctctagaaa

SEQ ID NO: 683159 - DNA, 87 bp, Homo sapiens
atggatccctcccgactgcgatgactcctcagtggtcttccaatcccgcccattgtcagttcctgttaaagccatgttgaatatatc

SEQ ID NO: 683160 - DNA, 98 bp, Homo sapiens
ccatcctcgctcccacctgtcagccttctaccccatgagaaagaccagaacttgatggagagtttggattcattgctttgtgcagaaggttctgaaag

SEQ ID NO: 683161 - DNA, 75 bp, Homo sapiens
atcgccaaaaagctggagaagatggtggccaggaagaacacggatttacaaaaggtgcaggtatgagcaggtctg

SEQ ID NO: 683162 - DNA, 75 bp, Homo sapiens
atacttcattgctccttcaggacatgggaaccatattacgttcgttgcatcaaacccaatgacaagaaatctcca

SEQ ID NO: 683163 - DNA, 100 bp, Homo sapiens
gatccatgaaaaacagacagctgtgtcagtagaaaacttcattgcagaattgctgcctgacaagaaatgactccaaagtagatggtttagtaaactttga

SEQ ID NO: 683164 - DNA, 50 bp, Homo sapiens
cagaaacacaaagcagcccaaccaaaggagatgagtgaatttcataatta

SEQ ID NO: 683165 - DNA, 101 bp, Homo sapiens
attgatctaagtgtgtgcacacaatgtatctggagtccatctttcaccatcttctcctgagattgtactggaccgtgaccactcttcttccattggctgcc

SEQ ID NO: 683166 - DNA, 75 bp, Homo sapiens
gaccgtccgaggtaattgtctgccacgagtgcacattctgaaaacaggactacaggaatatgtggaagctgtctc

SEQ ID NO: 683167 - DNA, 100 bp, Homo sapiens
caagatttggtggatttctctccagtttatcgatgtctacatatatattctgtcctgtatctctcagaagatagaagtgtgcaagaagtactacagaagc

SEQ ID NO: 683168 - DNA, 80 bp, Homo sapiens
ggatccaggataacggaggctggacaacagtgattgactacgtgaagccctcggatctcaagaaggacatgaacgagacc

SEQ ID NO: 683169 - DNA, 51 bp, Homo sapiens
ctcacaccctggatccttgacctactagttttaaaatcaaagatgggaaaa

SEQ ID NO: 683170 - DNA, 75 bp, Homo sapiens
ttgcttcgagatggctgcggggatgtatttggaacattatctggacagtccatccaagctgaatgatcgcgctga

SEQ ID NO: 683171 - DNA, 50 bp, Homo sapiens
agccttgcggcagtacagcccagaatgtgtctgtgaaaactacaagctgg

SEQ ID NO: 683172 - DNA, 74 bp, Homo sapiens
cagttattgaatatcaagaggaggagttgttggtgtcacgtcttgaaattttaaatgtcctcagtgactctcta

SEQ ID NO: 683173 - DNA, 82 bp, Homo sapiens
ccgtttgccgacccggatctcaacaatcccttcaagtgggaatgtaagacggacttagatattgcatacaaatttggaaaaa

SEQ ID NO: 683174 - DNA, 75 bp, Homo sapiens
aaggggcagtgctcacatttctgggcagaattcccaagatacgccccctctgagtcccactgccgtctcaggtgc

SEQ ID NO: 683175 - DNA, 88 bp, Homo sapiens
cggtcaaaggatgctgagtccggagcgcctagccctaccggactacgagtatctgggtaggaatgaattgatagccagatacatcaaa

SEQ ID NO: 683176 - DNA, 75 bp, Homo sapiens
tgttcttcttcgagtatttgtagaaggatgtgaggtgaggatgagccgcagccctttcctgggacatggatgtac

SEQ ID NO: 683177 - DNA, 100 bp, Homo sapiens
taaaaacaatagctcaaggaaacctttccaacacagatgtccaagctgccaatgccctgtgggacatcgagaccggccagcagacgaccacgtttaccgg

SEQ ID NO: 683178 - DNA, 83 bp, Homo sapiens
cgctccgtggccttagctgtgctcgcgctactctctctttctggcctggaggctatccagcatttctccacccaggtgaactc

SEQ ID NO: 683179 - DNA, 100 bp, Homo sapiens
acctgttcagcacttctttcagcgatatgaagttaaatccagtttgccaaggcacgagtaacaagctcacgcagttgggcacttttgaagatcattttct

SEQ ID NO: 683180 - DNA, 100 bp, Homo sapiens
ttcgagtcgttatcccggaagtctcaattcttcctgaagacctagaggagctctacgacttattcaagcaaagaaatgatgactttattgaattagacta

SEQ ID NO: 683181 - DNA, 109 bp, Homo sapiens
tgctggatttctcggttgtgttcgtcttctttccaatgccatcaaccgcctcaaagacactggttgactttccatgcgtagaaagccaccctacagatcccattcgctc

SEQ ID NO: 683182 - DNA, 74 bp, Homo sapiens
tacagatgtattcaaatggatcttcaaaggaattagaaggtgacgaggagggagaagacgaggatgatgcggaa

SEQ ID NO: 683183 - DNA, 74 bp, Homo sapiens
gcagtggtcgcttcttctccttgggctgaccagtttgagtatgtaatgtatggaaaagtgtacaggattgaggg

SEQ ID NO: 683184 - DNA, 100 bp, Homo sapiens
aagagaggaactccgcaccgtttgatcaggattcccaggtgtgactttgcagaagaagctcattcacacagaagacccatttaatgatgaacatcaggag

SEQ ID NO: 683185 - DNA, 100 bp, Homo sapiens
atgggcttcggaggcctatagcccgcagaaggacagaataacgggctcccagattcacaagccccaccaagaggatcaccccaggaacgcttggaggctg

SEQ ID NO: 683186 - DNA, 100 bp, Homo sapiens
ctcaaagttaaggtgttgggagatgtgattgaggtgcatggaaaacatgaagagcgccaggatgaaaccaacctgaggctggaagccgagaacaacctgg

SEQ ID NO: 683187 - DNA, 96 bp, Homo sapiens
ggccggagcggcccgcgcctgggctgccggcacttcgcggcaggactggagactgatgcatgagggggctacggaggcgcaggagcggtggtgatg

SEQ ID NO: 683188 - DNA, 100 bp, Homo sapiens
ttcttcaaggtggggttggcatcccccacatacggaatgtctacaaggattatcggcagctggagctagcctgtgagacacaggaggaggtggacagctg

SEQ ID NO: 683189 - DNA, 50 bp, Homo sapiens
tgggaagcacatagttggagaggtcgaacaagtaaaattacttgaccgat

SEQ ID NO: 683190 - DNA, 100 bp, Homo sapiens
cctaccccagctgtggattggcattaactttgacagactcacacttttggccctgtttgataggtcatcatcagatttgaaatatttaaagtggatacaa

SEQ ID NO: 683191 - DNA, 101 bp, Homo sapiens
agaagggaagaagatctgtatttgcaactatggatttgtagggaacgggaggactcagtgtgttggttgcaaaagcttctcatttcagagagatgccagga

SEQ ID NO: 683192 - DNA, 98 bp, Homo sapiens
aaggagtcctgcttatcacaatgccccaggaccaaattaccatcacagggtacgaaaagaacacagaagctgccagggatgctatactgagaattgtg

SEQ ID NO: 683193 - DNA, 75 bp, Homo sapiens
gaagtgcgcaaacttgacactcaccctgaccgtactatactggcaattgctggagaagattttgcaattgttgct

SEQ ID NO: 683194 - DNA, 50 bp, Homo sapiens
cagaagcgggcggcgcgggggagatgcctcccagtgcaacgtcagcttaa

SEQ ID NO: 683195 - DNA, 100 bp, Homo sapiens
gcactagcaacttcaaagccgacggcctgtccggcactgctgaaggccccttcacagatgtagtcactacaaatcttaaattgcgaaatccatcggatag

SEQ ID NO: 683196 - DNA, 100 bp, Homo sapiens
actttggaggtggtggaggtaattttggccgtggtggaggcttccattctggtggcaaccggggtcgtggtcggggaggaaaaagaggaaaccagtcggg

SEQ ID NO: 683197 - DNA, 51 bp, Homo sapiens
gttctttacatcccaatgtactgggacattggaggcaatgaaacagtgaca

SEQ ID NO: 683198 - DNA, 91 bp, Homo sapiens
gatgatcgagaggatctggtgtaccaggcgaagctggccgagcaggctgagcgatacgacgtccctgaagaggaaggagaaggaatatgag

SEQ ID NO: 683199 - DNA, 100 bp, Homo sapiens
acaatgttggggaggaggtggacgcagagcagctgatccaggaagcctgtcggagctgcctggagcagacggaccagcaggctgaggccaggtcctacct

SEQ ID NO: 683200 - DNA, 100 bp, Homo sapiens
gcggagttaccccagacccctcagcgtctggcatctggtgaatcatttgatgtaaaagacttgactccataatctgcatctgtcctaatgctgtcatctg

SEQ ID NO: 683201 - DNA, 74 bp, Homo sapiens
tggagccgctggggtcccttttgcctcagatactattttgaaggtgcagcttcaagcttaggaccacccaccat

SEQ ID NO: 683202 - DNA, 112 bp, Homo sapiens
tggagagactatggcgctcaacaagaatcactcggagggcggcggagtgatcgtcaataacaccgagagatcccaaagagaagattgatattgggctgcctccacccaaagt

SEQ ID NO: 683203 - DNA, 100 bp, Homo sapiens
atggagcaagtctgtcagcaccatctttctaacagaatgttacgttcataacttactaaggattagtgtatattttccaaccttgaggcatgaaattctg

SEQ ID NO: 683204 - DNA, 100 bp, Homo sapiens
ccttagctacccacgatgtttcagacagtccccgacacgtcgtcttacatcaaggtgagcgagtgctgtgctttcatgggcctcttctttatgaagcaaa

SEQ ID NO: 683205 - DNA, 100 bp, Homo sapiens
accagcaaggagatgcggacatcaaaccactgcccaacgttgagccccatatgggggttggcaggcagcagagaggcccctttcaaggtgttcgggtaaa

SEQ ID NO: 683206 - DNA, 100 bp, Homo sapiens
gtgtgcccattattgtacctttaattccaccacctttcataaagccaccagcaggccaccaggaacacacctgtagcccagcaaagttgaggccatcgac

SEQ ID NO: 683207 - DNA, 100 bp, Homo sapiens
aagaaggtgaagcaggcggccaaggagaaggcagaatccagagaccacatttgaagtatatgttgaagtggcctatcccaggacaggtggcactctttca

SEQ ID NO: 683208 - DNA, 96 bp, Homo sapiens
agaggaagaccccaccagtgagatccactgctccaggcctccatgaagaagtggactattctgagaaactgaagttcagtgatgatgaagaggagg

SEQ ID NO: 683209 - DNA, 83 bp, Homo sapiens
gttccttgtggagccggagctgggcgcggattcgccgaggcaccgaggcactcagaggaggctgatcagctgaccgaagaaca

SEQ ID NO: 683210 - DNA, 75 bp, Homo sapiens
gagagaccggagaggtggagaggccatgacgctgatggagtacctcatcaagaccggctcggagcgcgtgtcgca

SEQ ID NO: 683211 - DNA, 83 bp, Homo sapiens
ctgcaagccggtgcagcagccttcagcttttggcagcatgaaagttagcatttgtgatggacgcctctgaccccacccagctc

SEQ ID NO: 683212 - DNA, 100 bp, Homo sapiens
gaggagcttctatcctgctctgtggaagaaatgggcatgccagatgcctggaagatcagaggctcacattccagccgattacacctcaacaagaaggcaa

SEQ ID NO: 683213 - DNA, 98 bp, Homo sapiens
acaggtttagaaaatggaatcctcctctgcgagtgacttcatggtcatgacgattttcttcaatgtgagcaggcggtttggctatgttgcctttcaaa

SEQ ID NO: 683214 - DNA, 100 bp, Homo sapiens
tagtgatatttctcttttgtctgcccctattgtaagtgcagatggaacacaacaggctggaggctcccaggtgattttcacaaatcctttagaaatcgtc

SEQ ID NO: 683215 - DNA, 82 bp, Homo sapiens
tcctccatcctgctggccatgctctacgggacagtgcctccggagccagcgtggtggccatagacaacaagatcgaacaggc

SEQ ID NO: 683216 - DNA, 100 bp, Homo sapiens
ctccagatgaggtgatggcaacggccaacttcggcaagatccagatcgggatttacgtggagatcaagcgcagcgatgattttgagaagagggggaaaaa

SEQ ID NO: 683217 - DNA, 75 bp, Homo sapiens
aacaagccctacaagaaggtgctcagtcttgcagcccgtgggagtgataccaggagcaacacagagctcagcagc

SEQ ID NO: 683218 - DNA, 73 bp, Homo sapiens
cggaaggacaccaagatgcggatccgggcctttccggaggcaaaaccttcaactgaggacttgggggataaga

SEQ ID NO: 683219 - DNA, 83 bp, Homo sapiens
gtctggagtgcgtgggggaccggctgttggcggcaaattgtggctactaatttgccccctgaagatcaagatggctctgggga

SEQ ID NO: 683220 - DNA, 98 bp, Homo sapiens
gtgggggcgccgtgggccacctgaggaggaacctgcacttcccgctgttccctcatcgtgcctgccagtgtagagccggtggagcagctgggctcggc

SEQ ID NO: 683221 - DNA, 75 bp, Homo sapiens
cgccgccatgctgcagatcaaccagtacctcaccgtgctggcctccttgggatctggagaagggactcctgaaag

SEQ ID NO: 683222 - DNA, 88 bp, Homo sapiens
tctttggacccaatgctgaaataagataacaacgaacttgatgcaagtgataggtttgccaaggtcagacctctcatcatccggatga

SEQ ID NO: 683223 - DNA, 87 bp, Homo sapiens
ggacagagccagggcactcaccaggctgcaagaacagtgctggggacactttgccaccatcaccttgaccttcatcgacaagaacgg

SEQ ID NO: 683224 - DNA, 51 bp, Homo sapiens
atcctggttctggaatcctcagttcaaggagttcatgatcaagtgttgccc

SEQ ID NO: 683225 - DNA, 82 bp, Homo sapiens
cgagcgggcggcttcctggcctgggcgctccggtggcggcggaggttcctgcacttggccatcatccatgaagaaaaggcac

SEQ ID NO: 683226 - DNA, 82 bp, Homo sapiens
gagcgacaagccgctggcagccgcggatctcaccgccgctcagggaagctgcagtaaaggaagatgaagaagaagtttcaga

SEQ ID NO: 683227 - DNA, 100 bp, Homo sapiens
agaggagcttgcggaggtgcggctgcaggccgttgttggtcgagctggcgggtcccgcgggccaggccgtggagtttgatgccgaccgcgatgaggatga

SEQ ID NO: 683228 - DNA, 75 bp, Homo sapiens
cctgtacccttctgctcctttcctggcagcaggggtttcaatgggagggtttgatgaaatcctggaggccagtga

SEQ ID NO: 683229 - DNA, 50 bp, Homo sapiens
cgcaagatggcagccaccacgggctcggaatctccggcctgtgaaactgt

SEQ ID NO: 683230 - DNA, 51 bp, Homo sapiens
gccgcccagcgtggactccttgtccagcactgaagtcagtggatctgcatg

SEQ ID NO: 683231 - DNA, 105 bp, Homo sapiens
ccaggaagttccttgttttaatgtaaatgctcagctgaaaccaatggagcttcaaggttactgactttttatgatgtttggtggctatgagactatagaagcata

SEQ ID NO: 683232 - DNA, 80 bp, Homo sapiens
gaggaagagacggagctgctccttagaacctcctgccccccgaggtctgcagtctcctgaacccagcagccatctacgcc

SEQ ID NO: 683233 - DNA, 100 bp, Homo sapiens
cccggagctgctgaaccctgagcccaggagactgagcccaggccagcactccttgcccgaggacagagatggcgagcgcccggattggggatgagtatgc

SEQ ID NO: 683234 - DNA, 50 bp, Homo sapiens
gcaatccttggctcactgaggaggtttgaatgtgatggttgttagctgtg

SEQ ID NO: 683235 - DNA, 101 bp, Homo sapiens
gactacactggcagagaaactcttgggatttgttgagaaagagataagaaaagctaacattccgattatggacaccggtgaaaacccagaggttcccttcc

SEQ ID NO: 683236 - DNA, 100 bp, Homo sapiens
ccggccccggccccggcaccatgtcggagaaaagcgtggaggcagcggccgagttgagcgccaaggatactgaggaagatgaggaggaagatgagaagga

SEQ ID NO: 683237 - DNA, 83 bp, Homo sapiens
ctcacgttgaccaactctttgatgatgcatccagtttttcagaagaagtgaagtcaagatgaagaaccatttgcttttctggg

SEQ ID NO: 683238 - DNA, 76 bp, Homo sapiens
ctggcttccatgatccccgccctgcgggagctgggcaggtggctagaggtgcaggtagctaatttaacaagtccac

SEQ ID NO: 683239 - DNA, 100 bp, Homo sapiens
catggaggggacccaggcttggtgtctgcttacggagcaggtctggaaggcggtgtcacaggctctggaatgggcactctccttatcagcaagatccgag

SEQ ID NO: 683240 - DNA, 96 bp, Homo sapiens
cgaggccaggagccaggggcccagaagggccatgaagcccccaggaggagaatcgagcaatctttttggaagtccagaagaagctactccttccag

SEQ ID NO: 683241 - DNA, 100 bp, Homo sapiens
cgggtccccgcgttcacagccccagcgcagggagaagaaatgggtgaccgttggtgacacatccctacgaatctacaaatgggtccctgtgacggagccc

SEQ ID NO: 683242 - DNA, 76 bp, Homo sapiens
gaacatctcgctgtcggtgaagaaggcccgaggtatgaagaagcaaatcattgacgacttcatcacccgaaacaaa

SEQ ID NO: 683243 - DNA, 82 bp, Homo sapiens
ctgacgaagcttggaagttgcagaagagagtcccacgaactggctgggtatacagaaatgtccagaggccggagagcgtttc

SEQ ID NO: 683244 - DNA, 50 bp, Homo sapiens
gagctgtgcgagagcctcctcacttggattcctggtcgggtggcttccag

SEQ ID NO: 683245 - DNA, 103 bp, Homo sapiens
ctgcggctcgcccgcctcgtctcccacgaccgcgtgggccgcctcagcccctgtgtgcctgcgaagccacctctcgcagctgaacagatgggtaaggatggca

SEQ ID NO: 683246 - DNA, 83 bp, Homo sapiens
gcagcagcggcagcggcaagcacctgttatagttttgccgctggactcttccctcccttcccccaccccatcaggatgatatg

SEQ ID NO: 683247 - DNA, 82 bp, Homo sapiens
cagtagatgatgatgtagcagaagaaaacctcggatcaattctcagctggtggcacaacaagtggcacaacagtatgccacc

SEQ ID NO: 683248 - DNA, 98 bp, Homo sapiens
tattggtgaagaaaccaagtatgaaagcatcagacttctgtttgatggcttacagcaaccagtactcaacaagcagataacaacgaacttgatgcaag

SEQ ID NO: 683249 - DNA, 103 bp, Homo sapiens
atgtgtcttccccagctctgcagccacatactatccgtttgttcaggaaccaccagtgacagagaacttgcttgctagaaaacaaagtgcaaggcttgacaaa

SEQ ID NO: 683250 - DNA, 50 bp, Homo sapiens
ggagaacctcaagaacatcttctcagaaactggcagacctttcacttcgt

SEQ ID NO: 683251 - DNA, 85 bp, Homo sapiens
gggcgacagcaggtcacagtggacgaggtgttggcggaaggtaagaaccttgatgctgtccatgatatcactgtggcgtatcctc

SEQ ID NO: 683252 - DNA, 75 bp, Homo sapiens
cagggctggaagatgtggcagccggccacggagcgcctgcagaaaagactgtatcttcaccattgacccatcaac

SEQ ID NO: 683253 - DNA, 75 bp, Homo sapiens
gcggggctgaagaagcagttctacaaggcgagccaggttaaaaggacaactctggtggatagcagaacatctgtt

SEQ ID NO: 683254 - DNA, 82 bp, Homo sapiens
tgtttggatggttgagttctatgctccttggtgtggacactgcaaaaaatggcagaagattttcaagtcccggctggtggag

SEQ ID NO: 683255 - DNA, 101 bp, Homo sapiens
catagagctgacagccccagatagcaatgatgatgtgaaaacagaagctgtggctgaggatttgacagctaaggatattgaagaaattattgatgagctca

SEQ ID NO: 683256 - DNA, 100 bp, Homo sapiens
ccggacctgctgatggcccgcagcttcggtgacaaggttttcaaatggaacattttgatgcatcacttagtacctatttcaaggcattgctaggccctcg

SEQ ID NO: 683257 - DNA, 75 bp, Homo sapiens
ggatggggagctgagcagactttaccccagtgaggcaaagtcccactcatcagggtacaggcatccttcacctgc

SEQ ID NO: 683258 - DNA, 90 bp, Homo sapiens
cggagcccctcggcggcgccaccatgtactcgggagccggccccgcctttccgctgtgcccattgccattactcctgcaacatatctggc

SEQ ID NO: 683259 - DNA, 75 bp, Homo sapiens
ctgctcctcttctacttggcctacatccatgaagacaggtggcagtagagaagagcatcacagaagttgctcagg

SEQ ID NO: 683260 - DNA, 51 bp, Homo sapiens
agcctccgagccgggtggacacagggcaagtgtccagagaatggctgggat

SEQ ID NO: 683261 - DNA, 96 bp, Homo sapiens
cttatcctggaacagatgcagaaggacccccaggcactcagcgacaactttcatcctttgaaacgtgtgctgaaaaagaagaatcagcaaatacta

SEQ ID NO: 683262 - DNA, 97 bp, Homo sapiens
tgcaccgtggtagccgagggcggaggcgacactctcagaaaaggaagaccagtgtctcatgcctgaagcctggaatgtggaccagggagtaattacc

SEQ ID NO: 683263 - DNA, 74 bp, Homo sapiens
ctcagttggaagcagccgatccagcctgcggagcctgtggggcagggttttgactctgggaggagggctgcctt

SEQ ID NO: 683264 - DNA, 75 bp, Homo sapiens
gcagcgctggacacccagcctccagctcgtttgtggtggaaagacagccctgcatgccaacgcaccctcagaggc

SEQ ID NO: 683265 - DNA, 100 bp, Homo sapiens
ggagactgtcttacgctgacaaagattattgaagcaagactaaagatattggcaaaacacttgaatgatggtaaaatcaatcagcttcctcttttccttg

SEQ ID NO: 683266 - DNA, 75 bp, Homo sapiens
ctggcggacaggcgacagcgacctgcggcagatgatatcatcaagttgaatcgaaaggaagggaagaagcagaat

SEQ ID NO: 683267 - DNA, 83 bp, Homo sapiens
aagcgcggggaaccaaggagacgctcctggcactgcaggtgtcgtgaaaactacccctaaaagccaaaatgggaaaggaaaag

SEQ ID NO: 683268 - DNA, 50 bp, Homo sapiens
gcccaggccgcgccgccacgagccgcttacaaacacgcagatggcaagaa

SEQ ID NO: 683269 - DNA, 75 bp, Homo sapiens
ttctttggcatcactgcagctagtaatttgccttctggattgtgttggagcgggccggagagaagtagagtgggc

SEQ ID NO: 683270 - DNA, 75 bp, Homo sapiens
aggacccgcaacagcgcagaggaaggacagaataacgggctcccagattcacaagccccaccaagaggatcaccc

SEQ ID NO: 683271 - DNA, 98 bp, Homo sapiens
caaggacgcgctggatggcctcctccagcagggcaattgaaggaacagactaaaaatcgtgtcctggaaggaaactacaggtactaccagggattttc

SEQ ID NO: 683272 - DNA, 100 bp, Homo sapiens
gttggggagctgatttcagactcagaagccgacgttcgagaggaagattcttacctctttgatctcgacaataaggtatagctgtggaccaactgtatat

SEQ ID NO: 683273 - DNA, 76 bp, Homo sapiens
gttttttgttgtttacttttgcatctttacttgtggagctgtggcaagtcctcatttggaaaatggatatacctta

SEQ ID NO: 683274 - DNA, 98 bp, Homo sapiens
tagcccgtcagtccctgctctgtgcgcgcctccatctgggccatggatgggaaacagatattgatgacagatatggagatttggattccagaacagat

SEQ ID NO: 683275 - DNA, 100 bp, Homo sapiens
agcaagcggagctcccccaagagccggaaaggaagatgagaatgtgcctactgctcctgatcctccaagtcaacatttacgtgggcatgggacaggcttt

SEQ ID NO: 683276 - DNA, 75 bp, Homo sapiens
aaatgcaaactgaaacctgggaaacagtgcaggttcgggatgagtatcggcaggactacgatgctgggagaggag

SEQ ID NO: 683277 - DNA, 83 bp, Homo sapiens
cggaacgcaggagacacaagaagcggatccagccaagaagccctccatgagcagagcagctacatcctctccagtgcagagac

SEQ ID NO: 683278 - DNA, 82 bp, Homo sapiens
cacaagttctcaaaactctctgaaaaatggctccctccgagttaaggtcagcccaaggccaaccccactgtcactctgttcc

SEQ ID NO: 683279 - DNA, 90 bp, Homo sapiens
cagccaagcccaaggagcccaccatggtggccccccgggccaggaaggagcccaaggagcccatctctgggattcccagcccagatgaat

SEQ ID NO: 683280 - DNA, 87 bp, Homo sapiens
tacttccattccagaaagatggcatcatttttgccctcaaaagaaatggcagcttagaccatgctcagcctccaagcagccttgtca

SEQ ID NO: 683281 - DNA, 101 bp, Homo sapiens
gtgcccttcatcccagtcacccaggcctccgcttctccggcctccctgctcttaccgggaggttggctcaaaaacagaagttgctgagtgcaaggagaaat

SEQ ID NO: 683282 - DNA, 90 bp, Homo sapiens
caactttaaagtcatgatctaccaggatggaagtttgcagtgtccaacctgcaagaccatttatggggtgaagacaggcacccaacctcc

SEQ ID NO: 683283 - DNA, 100 bp, Homo sapiens
tctcaatatctgtcttcggtggactccttcggcagtccacccaccgccgccgcctcccaggcagaagctgaggaagattgtcattctgatactgtcagag

SEQ ID NO: 683284 - DNA, 74 bp, Homo sapiens
cacagcctcccgcgcctcgctcagctccaacatgactttcaaacctctggttgaaagaaatatacccagttcag

SEQ ID NO: 683285 - DNA, 100 bp, Homo sapiens
agcgccgcggttaaccacgtctcgtccacgacctccctagagttgctggagaatgtaaccctaatccataaaccagtgtcgttgcaaccccgtgggctga

SEQ ID NO: 683286 - DNA, 100 bp, Homo sapiens
ttgtggatggacttgattctgatgagagcaccatcactcctgtagtgggtaagaagagaaaacgtaatacctcatctgataattcagatgtggaagtcat

SEQ ID NO: 683287 - DNA, 83 bp, Homo sapiens
ggaatggcggcttccacctctgaagcgggcgacgctatgggtcccacagacaatgcagatcttcgtgaagactctgactggta

SEQ ID NO: 683288 - DNA, 50 bp, Homo sapiens
gggtgggcgacctcttccagaagctggtgccgtgagcgatgtggagatgc

SEQ ID NO: 683289 - DNA, 88 bp, Homo sapiens
tctgtgagcgagatcttcgtggagctgcagggctttttggctgccgagcaggacatccgagagggcagctgcaatgactctccgcacg

SEQ ID NO: 683290 - DNA, 110 bp, Homo sapiens
caggggagcagttcctcacttatcgctatgatgaccaggagcttttaagtgaataagaccattttcccaatgagcagtgtcataaacattgaggactctcttaaatcaga

SEQ ID NO: 683291 - DNA, 83 bp, Homo sapiens
tatggactcagtgcatatagtggaaaggcatcacgttgggtggtttccatttagaccgaggccggttcagaacttcccaaatg

SEQ ID NO: 683292 - DNA, 104 bp, Homo sapiens
gcggacggtcgcgcggcggcaggcacaggccccttcacagatgtagtcactacaaatcttaaattgcgaaatccatcggatagaaaagtgtgtttcaaagtgaa

SEQ ID NO: 683293 - DNA, 100 bp, Homo sapiens
gggatggtgccacaggaggctgtgcgggccccgctccgcttcgaatggattgcattctcacaacacaatacaatcatggaccttgtgcagttttttgtca

SEQ ID NO: 683294 - DNA, 74 bp, Homo sapiens
tttgactccttctacagtgaagtggctgagcttggcagctgagatctgtatctgtggacctgaatgttgatccc

SEQ ID NO: 683295 - DNA, 50 bp, Homo sapiens
gttggtcctgctctttgtctacgcagatgagctgcttcagaaagagcaaa

SEQ ID NO: 683296 - DNA, 75 bp, Homo sapiens
cctgcaccaggttcacggacgagtatcagcttttcgaggagcttggaaagagcttactccacgggaacagcctct

SEQ ID NO: 683297 - DNA, 90 bp, Homo sapiens
cgagttcaacatcctcctggccaccgactcctacaaggcagtcttgattgatatggaagaaggggtagtgaatgaaattctgcagggacc

SEQ ID NO: 683298 - DNA, 98 bp, Homo sapiens
acccttaagaaaggagacagaaccacatcatgaacttcttcagcgcctgctcctggtcatcactaaccagatttacttggagtacatgtgaaagaaaa

SEQ ID NO: 683299 - DNA, 100 bp, Homo sapiens
gtcatgcagggtgtgagcagggctgagatgggcaccgcggatctggggccgtcctcaggttagatggagtcagatttgaaaatgaaaaaattaatgttat

SEQ ID NO: 683300 - DNA, 90 bp, Homo sapiens
gtttaggtacatactcaaatttatataaccatccacagcttatcaagtatcaaccaaagaaccctcacacggacgcctggaagagccacg

SEQ ID NO: 683301 - DNA, 100 bp, Homo sapiens
gagacgagtgcggtaacaccgttcacagagctagccggacgtcctccgactcaaggcaccatggctgaggaaacagctccagcagttcttgagcggcacc

SEQ ID NO: 683302 - DNA, 75 bp, Homo sapiens
caaattcatcccagaaatctaagaggtccccaaaggaactgaccagaactgggctcagaagctctatgaccggca

SEQ ID NO: 683303 - DNA, 96 bp, Homo sapiens
gtgtgtggcccagaactcggttggggagatcacagtccatgccaagcttactgtcctccgagcggaacggaagccgccccttttcaacatgaatgc

SEQ ID NO: 683304 - DNA, 100 bp, Homo sapiens
ctgccggcggctgggactgaagagggacgggtcccgcggcgagcgagctcctgaggtaagaatgattgatgttggctgatattggagtgctcattcacat

SEQ ID NO: 683305 - DNA, 100 bp, Homo sapiens
cggaaatgttgtccaaagttcttccagtcctcctaggcatcttattgatcctccagtcgaggaaagtggagaatgaggacatgaataaagaccagatctt

SEQ ID NO: 683306 - DNA, 100 bp, Homo sapiens
ggaggaagatgagttctaccagacgacttatgggggtttcacagaggatcccaggatgctggtatcctgcatagatttcaggtacatcactgatgtcctg

SEQ ID NO: 683307 - DNA, 98 bp, Homo sapiens
cctggaatctaaagcctcctcagccttctgagtcagcctgaaaggaacaggccgaactgctgtatgggctctactttgacccctggtggacaaacgac

SEQ ID NO: 683308 - DNA, 95 bp, Homo sapiens
ccagaccatgcagggggtcatcaccatggatgggacgctgcaggccctggacaagggtgtcccccacctgaagacggcaagctgggtcctgagtg

SEQ ID NO: 683309 - DNA, 100 bp, Homo sapiens
acgcatttttgtttttggaaggagaaggatagacttggctttgaggttgctccttgagggcaggacagttcttatggctttatccgttgcgtaagcacag

SEQ ID NO: 683310 - DNA, 101 bp, Homo sapiens
atggaaaactaaaatattatgacacaatgactgaagaagtgttttccaagcagtgaagcacttgccgtgttgaactgaatgcactactggagaatgttctg

SEQ ID NO: 683311 - DNA, 120 bp, Homo sapiens
ccaaaatcaagtgctgggaaatccatcatggactgtgggctgctcagtggatgtcagatggaatctaatcagaaaagctcattccaagaaatccccaaacttaatgaagaactactcagc

SEQ ID NO: 683312 - DNA, 90 bp, Homo sapiens
aaatccttagctcagagctggaggatgaaggatcggaaccactcacgaattcttgtttggtgcccttgctgaactggttgataatgcaag

SEQ ID NO: 683313 - DNA, 100 bp, Homo sapiens
gttcccttctgctgtgaaactatttggcaagaggctggagccccaccatggctgcaatccgaaagaagctggtgatcgttggggatggtgcctgtgggaa

SEQ ID NO: 683314 - DNA, 100 bp, Homo sapiens
cgcggcggttaagtatgcggcgccaggagctttttcaaagaagaatggaagaaaccatgaagcttgctacgatggaagacacagtggagtactgcctgtt

SEQ ID NO: 683315 - DNA, 74 bp, Homo sapiens
acaccccttcaagaagctttgaatcaactgatgagacaattgcagagagacattttaaatccaaaggatgtgat

SEQ ID NO: 683316 - DNA, 75 bp, Homo sapiens
caccgggaaggggagcgtggggccgctggtgtgggacgcctgctcagaggccctgataatgtttgataaggataa

SEQ ID NO: 683317 - DNA, 100 bp, Homo sapiens
ctccgcctggctggagtgtgtgtgcgtggtcaccttcgacctggagctgggccaggcgctggagtgattcagggattggatgagtctctatggtttgttt

SEQ ID NO: 683318 - DNA, 98 bp, Homo sapiens
gaggagaaaaggattccagtcttagcgatcagcatcagcaaaggctccgaggtgccagaggcataggaaagctttaggcaaatccacagtggtacctg

SEQ ID NO: 683319 - DNA, 100 bp, Homo sapiens
gagccttcagcagaggcggcagcctggagagtcgaagcagcagctctcgctccagaagcttcactttgtaaaggcatgacttcctggcaccacagggaaa

SEQ ID NO: 683320 - DNA, 83 bp, Homo sapiens
ccaatcttgatgctttaatacagaaccagcatcctttgaagtaaattttatggatgatgtaggtcagactctattaaactggg

SEQ ID NO: 683321 - DNA, 109 bp, Homo sapiens
gcttatactcctcccagtgacgggtctggagtgcgtgggggaccggctgttggcgggatgatcggctgaatgtaacagaggaactaacgtccaacgacaagacgaggat

SEQ ID NO: 683322 - DNA, 100 bp, Homo sapiens
gtgagagcaacttccagtactcggagctggtggccgagttctacaacacgtcatctcaatgcgctgcatggtccagtttgtgggacgggaggccaagtac

SEQ ID NO: 683323 - DNA, 100 bp, Homo sapiens
ctggtgggcatagtggctgccctgctgggtggaaccgtcccaaaatgtcccttgctcagaagaaggatcgggtagctcaaaagaaggcaagcttcctcag

SEQ ID NO: 683324 - DNA, 99 bp, Homo sapiens
cttctaccgctgcggctactgcaagaacgagtcgggcagccgctccaatgagttagactggctgagcaacccaagcttttgtgttggatccataacgtc

SEQ ID NO: 683325 - DNA, 75 bp, Homo sapiens
actagggtcgccggggaagcggtatgaaatgcttcatgtcacacctccaatgagcccaccagatgtcctcaagac

SEQ ID NO: 683326 - DNA, 75 bp, Homo sapiens
gggtgtggccgttttacattggctgttttcctcacattcctcaagcagatcgtcagtatttaaacagatcacatc

SEQ ID NO: 683327 - DNA, 118 bp, Homo sapiens
cctgaagtcgcaccacggagagcacgagagacccgagttcatcgcctacccccatctccgcatcaggaccaagtctctgctggatgaaccgaatcctaacagtccagccaatagccag

SEQ ID NO: 683328 - DNA, 96 bp, Homo sapiens
ataagactcgctatatggggaagggtgttcctccaagaaaagctggttatattgaagacctggttttgatgctgcctcagaacatttgggataacc

SEQ ID NO: 683329 - DNA, 99 bp, Homo sapiens
ggattactgtgagggaggggatctgtttaagcgaataaatgctcagaaaggcgttttgtttcaagaggatcaggtgcctttcctgaagactatcttctg

SEQ ID NO: 683330 - DNA, 83 bp, Homo sapiens
ccagttttgaaatcgacacacaaagaatagagttgagcctgtgggacacttcgggtcatgatgatgggcagcgcccgagtggc

SEQ ID NO: 683331 - DNA, 75 bp, Homo sapiens
cgagaggcagcgccatggcggagcagacctactcgtggccggagcctcaacagaaagctcctttagttcctcctc

SEQ ID NO: 683332 - DNA, 82 bp, Homo sapiens
cgcggatctcaccgccgctcaggacggagtctcactgtgttgcccaggctggagtgcagtggcgccatcttggctcactgca

SEQ ID NO: 683333 - DNA, 97 bp, Homo sapiens
ccgctttctcggtcggcaccgccatggtccctcgtctgagctggctcactcgcccaccaacagcgggaagaagctctttgctcccgttccgtttcct

SEQ ID NO: 683334 - DNA, 95 bp, Homo sapiens
gcgggccgggtgcggacggcggaggcggcgggactggtccctggtccggcctctttggcctacccccgttggctccgctgccccaggtcgatgag

SEQ ID NO: 683335 - DNA, 75 bp, Homo sapiens
gattaacgcaaacccggaagcggatcgggtggagtgtaggtcatatcgccgcgaacaagttgaaatcatcgcaga

SEQ ID NO: 683336 - DNA, 82 bp, Homo sapiens
taaaagtctgtgccccaatggttcgatattcaaagtgacataaatgttacagttcttattggaagtaaacaagtcagtgaag

SEQ ID NO: 683337 - DNA, 114 bp, Homo sapiens
tgtaccaggcgaagctggccgagcaggctgagcgatacgacgatgaggacggggacttggttgccttttccagtgacgaggaattgacaatggccatgtcctacgtgaaggatg

SEQ ID NO: 683338 - DNA, 100 bp, Homo sapiens
gggaaagtaccctgcgaagaacaccacaattgccctacaggagcctagtaataaacgggtcaaacccctttcccgagtcacgtcgctagcaaacctcatc

SEQ ID NO: 683339 - DNA, 100 bp, Homo sapiens
agttcttcagtctacaaaggactcttctaaaaggatatgtgttgctaatacccatctttactggcatcctaaagaaagaagtggccctggagagaccccc

SEQ ID NO: 683340 - DNA, 50 bp, Homo sapiens
actgcctggccgacgtggacaccaaggttgttcttgcagaacatgccagc

SEQ ID NO: 683341 - DNA, 87 bp, Homo sapiens
gggctccggaggccatgccggcgttggcgcgcgacggcggccagctgccgctgctcgggcgccaatgcttcggcattagagaaagag

SEQ ID NO: 683342 - DNA, 98 bp, Homo sapiens
ctcaagcacacccaatggacagcatgcctcaccaagtcacatgacaagcagcctctcttcagcttctggagacctcactatcctattatgtctttgtg

SEQ ID NO: 683343 - DNA, 97 bp, Homo sapiens
tggcctcctccgaggtggcgcggcacctggatgaatttttagatgtgatctactggttccgacagatcattgctgtggtcctgggtgtcatttgggg

SEQ ID NO: 683344 - DNA, 100 bp, Homo sapiens
gccagccgtgaccgaggggcccattcccgaggtgctcaagaactacatggacatggtgtctatgagataggcggcctcgttcccgtctgggtcgtggtgg

SEQ ID NO: 683345 - DNA, 98 bp, Homo sapiens
tgctggaacatgcagagtctgcacaataaatctgatatgtctcgcttgcgattagctgctggtagtgccataatgaagcttgctcaggaaccttgtta

SEQ ID NO: 683346 - DNA, 100 bp, Homo sapiens
ccgagacacgcggtgaggcggcgacgggctccggggaaccctactctggaaactgtcagtcccagggcactggggagggctgaggccgaccatgcccagc

SEQ ID NO: 683347 - DNA, 100 bp, Homo sapiens
gccgaccaagatggagactgccgagcagccttgagccgctggctggaggcgtgatcctgggtgtggccctgtggctccgccatgacccgcagaccaccaa

SEQ ID NO: 683348 - DNA, 140 bp, Homo sapiens
aaacttctcaaatcccaggccagcaaacaggtcattgtgagagaattctcacaggcttatcactggtcctctggacacagacatgcagcagttggcccgggagacctccgtggacccagacatgcgaaaagggctgcagg

SEQ ID NO: 683349 - DNA, 75 bp, Homo sapiens
cacaagttgcgctgctcgcgacgagatacttccgggtcatcctcctcctcctcctggccctgactctgctcctgc

SEQ ID NO: 683350 - DNA, 98 bp, Homo sapiens
tggggctgcggcgcctgggactgcaccgcaccgagggcgagctccaggaggacgaatccatgaaccaaccaggaccaatcaaaaccagactggctatt

SEQ ID NO: 683351 - DNA, 100 bp, Homo sapiens
tgtgaagtgtgaggttctttgtctgctggcagctaggggcgacgaggcgggacgtcatggaagtatattgaaatggattccaggcgtgtgcctcgagaca

SEQ ID NO: 683352 - DNA, 100 bp, Homo sapiens
tgagaaagctggaggtggaagccaacaatgcctttgaccagtatcgagacctgtgtcctggaaccagtcccccatgagtatcgatgaatgactacataag

SEQ ID NO: 683353 - DNA, 83 bp, Homo sapiens
ccgaggaggggaccatgacacagttggctcaaaaacagaagttgctgagtgcaaggagaaattcgccgcctccaaggacccca

SEQ ID NO: 683354 - DNA, 49 bp, Homo sapiens
cttgtgtatctggagaaaatagaggtgtccctggccagtgtccttccac

SEQ ID NO: 683355 - DNA, 75 bp, Homo sapiens
tccacttgcacgaaagctttcctaggccaaaaagagtgttatccaagataaattctgtgggattataaacatttc

SEQ ID NO: 683356 - DNA, 100 bp, Homo sapiens
ccaggctgcggaccacggttggtgtcgacggatctctttacaagacgcacccacattaagtgggcagaccaacatccacctcagcaaaaacttcttcctg

SEQ ID NO: 683357 - DNA, 100 bp, Homo sapiens
agtatagttacaaggacccagaggaccaaggaaacctctatattgaatgagctgaaagccagtggtggcgaaatcaaaattcataaaatggagcaaaagg

SEQ ID NO: 683358 - DNA, 75 bp, Homo sapiens
ggttgtttgaaatgtatttgcagtttcctgggactgctaggaggtcttaacccatatttaactttgaacacctct

SEQ ID NO: 683359 - DNA, 89 bp, Homo sapiens
gccaattatcgagggcgaaactgcttccttcttcaaggagataaaggccgccatggcatcagatgaaggcaaactttttgttggagggc

SEQ ID NO: 683360 - DNA, 82 bp, Homo sapiens
ctccccttcctctgacctcctgtattgtacctggagtagaacagaaaaattattatgtctgtgttcccttgggactcattgg

SEQ ID NO: 683361 - DNA, 90 bp, Homo sapiens
tctcagaagtaaaatggacatacctaatactttccagttctatctctaggaaaaagagctatgtggaaagtcaacgtttgtcaaatgctc

SEQ ID NO: 683362 - DNA, 83 bp, Homo sapiens
cgcctgcatgcacagtggctttaagatcctcaactgccaaaaggcaatggatgctgtgggccctgagggaaaggatcacagag

SEQ ID NO: 683363 - DNA, 75 bp, Homo sapiens
tctttgtacagaaattgaaaggcttcaaagctagcaggcacagaccccacaggctcctcggacactgggtccatc

SEQ ID NO: 683364 - DNA, 75 bp, Homo sapiens
ttgagtccatgagattttagagtgaacactcgtgaaactgctcaggccatcaagggtatgcatatacgaaaagcc

SEQ ID NO: 683365 - DNA, 98 bp, Homo sapiens
aactcctgtctggcaggaaaggagggatcctgggcggtggatccggacccctgcccctgtctaatctgctaaggcagtttggtggttatgccaaggaa

SEQ ID NO: 683366 - DNA, 90 bp, Homo sapiens
aacaacttatcagtagtgacttacagtaagatctacgcagaccccaccaagaggctggagctgtacttccggcccaaggacccatactgc

SEQ ID NO: 683367 - DNA, 82 bp, Homo sapiens
ctcgcgctactctctctttctggcctggaggctatccagcgtctggggtcctgaggctgctggcagactatgggtacaacgg

SEQ ID NO: 683368 - DNA, 90 bp, Homo sapiens
ccctcggacgtagcccggcttgtattggaacagctttgctgagccatcaaggtctaatggaagcatggttcggcattcttcatctccata

SEQ ID NO: 683369 - DNA, 99 bp, Homo sapiens
cgcactcttgtcagacttaactaagcagatttcccgagactacggtgtgctgttagaaggttctggtcttgcactaagtacttccagcggcaatgtaag

SEQ ID NO: 683370 - DNA, 75 bp, Homo sapiens
agaatatggagagagccctttgcaggatgcagaagaagccaaaaacattctggatctgactgcagccatgagcag

SEQ ID NO: 683371 - DNA, 98 bp, Homo sapiens
ccgaaacctagccccggacgagaagcgcagcaacgtgcggtgggaccacgagagcagttgatctctctaatgtattagatcttcatgcctttgatagt

SEQ ID NO: 683372 - DNA, 97 bp, Homo sapiens
atggcttggcaatctggtacacaaaggatcggatgcagccaggggctcaatgcgcattgggaaggattttatcctgttcaccaagaaggaagacacc

SEQ ID NO: 683373 - DNA, 101 bp, Homo sapiens
aagaactcttaacggccgatgcagctcttccaaagctaagtgccttgtctttgaagatgctcccaatggggtggaggcggccctggcagctgggatgcagg

SEQ ID NO: 683374 - DNA, 82 bp, Homo sapiens
cgaacgaccaagagggtgttcgactgctagagccgagcgaagcgggagcttttggaagagtcccagatggaagcgaccaggc

SEQ ID NO: 683375 - DNA, 50 bp, Homo sapiens
tgatcgtgtgtcggatgaggagaagatttgacaagatcaaagctgcagga

SEQ ID NO: 683376 - DNA, 100 bp, Homo sapiens
tccgagaggaccagaccctgaaacctggcaaagtcgatgtgaagacagacatgccatggacaatattaccaggcagaaccaattctacgatacccaagtc

SEQ ID NO: 683377 - DNA, 89 bp, Homo sapiens
gttctgcggcacgggatggcggaggcgcctcctgtctcaggtattcaggagtctccggtgccgaacggccactcgcttccgggcagaga

SEQ ID NO: 683378 - DNA, 82 bp, Homo sapiens
tgagctgaagcctgtggacaaggaatcagaggtcgtaatgaaagagcctcccggagatcagactcagcctcctcagagcctg

SEQ ID NO: 683379 - DNA, 101 bp, Homo sapiens
tagaaaaattagcccggtgtgatggtgcatgcttgtaatcgcagctacttcggatcctgagatgccatactgctgttaacatatgtgacactggagacttt

SEQ ID NO: 683380 - DNA, 101 bp, Homo sapiens
ccgctgcgccccgggtttcgccgcaaccaagacccagcgagtgcagcggcggccgccgaggagttatgtgtctcggtaccacgtgaaagactcctcacgcc

SEQ ID NO: 683381 - DNA, 80 bp, Homo sapiens
ttattgagaaagtgaaacctgagatccggctgttgattgagaaatgtaacacgggcgtggactccctggtgctagaaagc

SEQ ID NO: 683382 - DNA, 75 bp, Homo sapiens
ccctgcccccaagaaggaagtcatcatgggccggcctggaacagactgcctctgtcaccgggtccctccaccctt

SEQ ID NO: 683383 - DNA, 80 bp, Homo sapiens
cagacaggtgctgtctctagcatcacctctcagcacgattttcccgagagttcacagacccaacatgagtgaagtttcct

SEQ ID NO: 683384 - DNA, 87 bp, Homo sapiens
gtcgggttattcgagtgaccgagaccgcggccgggaccgagggtgtttgaagtggtggaacgtgtagaagagttaagaaggaagtgg

SEQ ID NO: 683385 - DNA, 116 bp, Homo sapiens
ggcgtcccctctgcaagcgttagacttctttgggaatgggccaccagttaactacaagatggagaagtgtacccaggacctgggcaacagcaccaaagccgtgagctcagccatcg

SEQ ID NO: 683386 - DNA, 82 bp, Homo sapiens
aacctggaggaggtggagttctgtgtggaagggggatatgagactttctactcggaatatcctgagtgttgcgtggatgtaa

SEQ ID NO: 683387 - DNA, 75 bp, Homo sapiens
cgcaggtgggggccggcggggtccgtggccagggcagatgattctggaccagatgaagcctgaggagccttccag

SEQ ID NO: 683388 - DNA, 90 bp, Homo sapiens
attttcaaggaagaaaatcttagggaagagagaagggcacagttacctaagtatcaacgtaatcttcctcggccaggacaggcccccatc

SEQ ID NO: 683389 - DNA, 71 bp, Homo sapiens
tgagggcagctgttcccactggctctgctgaccttgtgccttgacttgtgcaccatggacaattttgctga

SEQ ID NO: 683390 - DNA, 100 bp, Homo sapiens
ctgaaccagagcaacggcactggagatagcgactcagctgcccccactacgaccagtggaactgtcctggagaggtgtcgatcaggttactataatctgg

SEQ ID NO: 683391 - DNA, 98 bp, Homo sapiens
caagttcgtcccctgtcctgccatctgctctgaggctttctcgcttgtctctcatcatcttgcagctgtggcacacaaaacactacaaataaaagata

SEQ ID NO: 683392 - DNA, 95 bp, Homo sapiens
caccgtggttgttggtagaatgttacatgtatcgaagaattcatgaagcaattatccagaggttggatggcaagcatgtggtgtttggcaaagtg

SEQ ID NO: 683393 - DNA, 48 bp, Homo sapiens
tgcaacaatggcttcatgcaccacggttgttcctcaaagtcattcaag

SEQ ID NO: 683394 - DNA, 83 bp, Homo sapiens
ctctccgagtgctgctcctgtcattgtggccatggacgggccgagaactactggtggcgtggccagaacacacggacgctgtg

SEQ ID NO: 683395 - DNA, 100 bp, Homo sapiens
gctcgcgccgccggcgctgctcgcgctcctcacctgctccctgggattctgaaaccttccttgtatccctcctgagacatctttgctgcaagatcgaggc

SEQ ID NO: 683396 - DNA, 75 bp, Homo sapiens
gtcgacatgagtgatgtggaggaaaacaacttcgagggcagaagacttttcttggtctcctggtggtaacataat

SEQ ID NO: 683397 - DNA, 100 bp, Homo sapiens
aatgtcttttccatcatgtacacaggagcaccagggacagagcagaatgggctgatatagatccggtgccgcagaatgatggccccaatcccgtggtcca

SEQ ID NO: 683398 - DNA, 101 bp, Homo sapiens
cgaggcggagcccggctccccacagaagctcatccgcaaggtgtccacgtcgggtcagatccgacagaagagtttgtacagatgatgactgcaaagtgaag

SEQ ID NO: 683399 - DNA, 75 bp, Homo sapiens
gatgttcttcttcgagtatttgtagaagggataaggaagcctgtgtgggtaccaacaatcaaagctacatctgtg

SEQ ID NO: 683400 - DNA, 83 bp, Homo sapiens
ggaggctgcagagagtatcgccttccgcaggctttcgctcctgcgacaaaatgctaactggttagtactgcagaaaaaccacg

SEQ ID NO: 683401 - DNA, 97 bp, Homo sapiens
tgaattggctctagtcaccattgttaaaactctgggagaaagaatatttgccctggaagatattgatgatgttaagaagttcaaaccgggttacctg

SEQ ID NO: 683402 - DNA, 100 bp, Homo sapiens
tagaaggtcttgaaatagcaatgaaacaggccctaaggaaatctgcttgtcgagtttttgctatggaggtgctaaaatgatgtattttctggacaagtca

SEQ ID NO: 683403 - DNA, 100 bp, Homo sapiens
cctgatggagtaagaggggttggctgtgaatacatctccagttacagcccgaacactggaaactctgattcgactggccacagcccatgcgaaggcccgc

SEQ ID NO: 683404 - DNA, 82 bp, Homo sapiens
cggcagccccccgagcagtggcccggcatcggcgccttcccggcggggcctccggtgtggctgtctctgatggtgtcatcaa

SEQ ID NO: 683405 - DNA, 75 bp, Homo sapiens
tcgggcccggcggagcggcccggccggagcgcccccgcgagctcggaccagccaagaagtatgatgcgtttttgg

SEQ ID NO: 683406 - DNA, 75 bp, Homo sapiens
cattcttcgccaggccaggaatctaattgcagagacgacatgacctgtgtgaaggaagagatctttgggcctgtt

SEQ ID NO: 683407 - DNA, 82 bp, Homo sapiens
tacctgcagaaggtctctggagacatcttcagcaggaagatgatccctatgatcttgaagatgtttctgcacagaaatgagg

SEQ ID NO: 683408 - DNA, 74 bp, Homo sapiens
agaaagttatggtgaaaggaggaacgctaaaggctttgatgacagtagggaaagaaccatttcctaccatttac

SEQ ID NO: 683409 - DNA, 83 bp, Homo sapiens
tgactttcaggagactagacctcgtaattacattctctcggccagcgcctccgcgattgagtttgtgacgggcaccaaaaaag

SEQ ID NO: 683410 - DNA, 96 bp, Homo sapiens
cgtggtgggtggaaaagtgttcgccgagatgggctttccttctaaaacagacagccctagctgtgaatattctcggtttgattttgatagcgatga

SEQ ID NO: 683411 - DNA, 95 bp, Homo sapiens
acctctccttttccctctccctttccctaagctggagagatttaccagcatgagaattaagaaggagaaggaaaagcccaattctgctcatagaa

SEQ ID NO: 683412 - DNA, 75 bp, Homo sapiens
gaagataaaatcaagttgctgaaagctgcctttctgcaatactgcagcaaaatgatgcttcaacacccaggccag

SEQ ID NO: 683413 - DNA, 100 bp, Homo sapiens
gtcattgcactcgcgggtaacaaggcagacctggccagcaagagagccgtggaattccagcttaattggcttagtgtcgacttcaataattggaaagact

SEQ ID NO: 683414 - DNA, 74 bp, Homo sapiens
gaactagggagcgtctccggctgcacagcgctcagtggctttgaagcgtatgttgaatttcaatgtgcctcata

SEQ ID NO: 683415 - DNA, 103 bp, Homo sapiens
tctaatttgaaccatgtttggattgaagccgcctctgtattacttaccaggttgtgaccgagattcccgacgagagagactgaggggaagagaggaaggaggg

SEQ ID NO: 683416 - DNA, 100 bp, Homo sapiens
gatgagtatgatgcacctgcagtaggagaggcagatgcgaaccagaacaatgggacctcctctcaggacacagcggtgactgactccaagcgcacagcgg

SEQ ID NO: 683417 - DNA, 100 bp, Homo sapiens
agctttgcttgctgtggggttgacccagaacaaagcattgccagaaaacgttaagatttatacctaaaactggaagatgtgacccataaatttaataagc

SEQ ID NO: 683418 - DNA, 100 bp, Homo sapiens
gaggacacgaggcggcgggctggagacatggaccgcggcgagcaagataattgtatggaagagatacagtgattttaagaaactacacaaagaactatgg

SEQ ID NO: 683419 - DNA, 100 bp, Homo sapiens
gggccgggaggggacggccgccggagccgcgaggccaattccagggtctccctccactgctgtagtaacccgggtccggggcctcggtggtgctcctgat

SEQ ID NO: 683420 - DNA, 100 bp, Homo sapiens
attccagatctgttcagggagaacttgggtggatagcaagccctctggaaggaggggagcctaagttgccaaaggattaccttacacaaaaatctgttct

SEQ ID NO: 683421 - DNA, 100 bp, Homo sapiens
aagaaaggtctggaacacaaagctgatctacaacaacatttatttccagcgcaccctttgcatatctctacctacttgtgcataattcagcatccagcag

SEQ ID NO: 683422 - DNA, 90 bp, Homo sapiens
agcgagggcctgtggagtcggatcctcttcggggtgagccagggcaattgaaggaacagactaaaaatcgtgtcctggaaggaaactaca

SEQ ID NO: 683423 - DNA, 98 bp, Homo sapiens
gacaatagcagtgctatgttactgcaatggcatgaaaaggaagcccttagtgtatacaaggaagcaattcagaaaatgccaaggcagtttgccccaca

SEQ ID NO: 683424 - DNA, 75 bp, Homo sapiens
cgagccggggctatttctggcgctggcgcggctccaagaaggcggggatatgagactttctactcggaatatcct

SEQ ID NO: 683425 - DNA, 75 bp, Homo sapiens
gggcttccagccctgagggtcgccacctcccttccccacagctaggaaccaagcttgccagcaaagcacggacag

SEQ ID NO: 683426 - DNA, 90 bp, Homo sapiens
gcaatctctcagtcttcagtgggttcagacttttcaaccacaccacgggcttttgaccacacaaaacagaaccaggactggacccagtgg

SEQ ID NO: 683427 - DNA, 75 bp, Homo sapiens
tctgtgcctcaacaaccatttctaagtgaagggagagaaggtacccaaagggaaaaagggaaaagctgatgctgg

SEQ ID NO: 683428 - DNA, 100 bp, Homo sapiens
gtgcacatccaggcgggccagtgcggcaaccagatcggcgccaaggaaacttttgacgctgggctgcaggccttccagcaggaaggcattgccaacatca

SEQ ID NO: 683429 - DNA, 100 bp, Homo sapiens
atacaggccagccaattgtgttttcacagcctgaaagtgatgagggttatgtaccgaaggactctaccgtgtcagcgggaataaaactgaccaagacaat

SEQ ID NO: 683430 - DNA, 98 bp, Homo sapiens
gcggctgctgctctccggcctcgtcctcggcgccgccctgcgtggagccgccgccggccacccggtgtcaacagcatctccaccctggagcctgtgag

SEQ ID NO: 683431 - DNA, 83 bp, Homo sapiens
cgcgcgcagggcctgcagcgggagctggacggcgagcgcgagcggcgcgagaaagtgaccatggaggaagaagatgagtctcg

SEQ ID NO: 683432 - DNA, 110 bp, Homo sapiens
ttcttggtctcactgacttcaagaatgaagccacggaccctcgcgatgttgtagaagatgtaaaagaggagtgtcaaaaatatggaccagtggtatctctacttgttcca

SEQ ID NO: 683433 - DNA, 85 bp, Homo sapiens
tttggagtgcctgggggccccgcagaaaatgagaatggagccctaaagtccaggtagatgatgagctggagatcaaggcctacta

SEQ ID NO: 683434 - DNA, 74 bp, Homo sapiens
gaagactatgattaccgatacagggctttgactctatcctctcctgaagttcgattccacatggacagtgaaac

SEQ ID NO: 683435 - DNA, 97 bp, Homo sapiens
ggcgatagcaatgcacagccaatttcatgctccactataggtttggtatccctcatagatctgcttgttctttttacccaacttatctattactcac

SEQ ID NO: 683436 - DNA, 75 bp, Homo sapiens
ttgaagcagaatcctgagggccaatggacaattatggacaacaagacttctaggttgctccatgggaatccctca

SEQ ID NO: 683437 - DNA, 75 bp, Homo sapiens
tccagtcatacactatactgcctcaaagaaggtcatctttctgtccaagggcaaggatgccatgcagtccttcat

SEQ ID NO: 683438 - DNA, 90 bp, Homo sapiens
cccgaaagccgctgggaaaagtacatgtcccagagcaagcacacggaggcccgggagctcatgtactcgggagccctgctcttcttcagc

SEQ ID NO: 683439 - DNA, 100 bp, Homo sapiens
tacccctaggagtacagtaggtgtggcagtactaagtggaaagttgctgaatgctataaagccaggacttgttaaaaagatcaatagattgcctaccccc

SEQ ID NO: 683440 - DNA, 100 bp, Homo sapiens
tcatggatcatgtggggactgagccatccattaaggaggtcgaagaattccatccactgacgccaacctgccatctggcggtaagggcttcaaactccga

SEQ ID NO: 683441 - DNA, 110 bp, Homo sapiens
gagcgccgaggaggctttcctgctggtggcaaccgcctacgagacactcaaggatcttagaaatgaagttgaaaaattacgcaatgaagtgaatgaaagagagaaagcaa

SEQ ID NO: 683442 - DNA, 113 bp, Homo sapiens
ggctggccgtgatgctgcccactggtggtcccccgctcccggggtccccggccggccaagcaggtcgtacctagctcagctgcaaccatcaaacttcatgatcaatcaattgg

SEQ ID NO: 683443 - DNA, 83 bp, Homo sapiens
gggagctgtgccagggcctgggccagcctggctctgtgctgcgggtgctctgattctgagacgcccatccctgcaacgtcgag

SEQ ID NO: 683444 - DNA, 100 bp, Homo sapiens
ctggcttctccctggccgctggacctctgtgcgctatgagcggcttgccctgctggctctgctggaccgatcgccacatcacagaatcgtatctatctca

SEQ ID NO: 683445 - DNA, 98 bp, Homo sapiens
aaacatcaccaatattccacagatacaagtgacactgctgaaaaataaagctccaggattagggaaagtcaatggatacattaattgtttggtcagaa

SEQ ID NO: 683446 - DNA, 50 bp, Homo sapiens
gccacgtcatggaagggtcacccacaggatcaaaaccattcaagtgcaag

SEQ ID NO: 683447 - DNA, 100 bp, Homo sapiens
gccgggggcgccttcgacccctacaccctggtccggcagccgcacaccatcctgcgcgtcgtgtcttggtgtctcagtttgaaactgaattctacatcag

SEQ ID NO: 683448 - DNA, 75 bp, Homo sapiens
gagctgagaccgggcggccacagtccgcagggatgaacctcgagttgctgggttgtacatcctggagacctgaag

SEQ ID NO: 683449 - DNA, 90 bp, Homo sapiens
gcgaccgctgccgaagcatgaagaaggggtaaggcgtgagcccccaagatttcacggtgagccagccatgagagggtatcttgtggccat

SEQ ID NO: 683450 - DNA, 100 bp, Homo sapiens
aagcacagaaagaccacttaagcaaacttaatataccagacactgcaactggtgactcctgcacctgcgccggctcctgcaaatgcaaagagtgcaaatg

SEQ ID NO: 683451 - DNA, 100 bp, Homo sapiens
cgcaggttttggactcgctgaagcggtgatggcttggacaacagtgtagcttcccccagcacaggtgacgatgatgaccctgataaggacaaaaagcgtc

SEQ ID NO: 683452 - DNA, 87 bp, Homo sapiens
ggatggggagcatcgctggctgacaggctggtcagatcaccggcgtaatcaacccagcgttggacaaatactttccgtcagactctg

SEQ ID NO: 683453 - DNA, 100 bp, Homo sapiens
ccggagagaacacggccgaaggaaggatggctccaccgggggacggctacgtgcaggcggacgcccggggccccccggaccacgaggagcacctgtatgt

SEQ ID NO: 683454 - DNA, 75 bp, Homo sapiens
cacagacagatctggcatctccactggacactggtcaggtgaaggtctcccacaggtgtattactttggaccatg

SEQ ID NO: 683455 - DNA, 100 bp, Homo sapiens
tgcaacaggctgaagaaagcataagatattctcgtcagcatcacagtattcagatgggttcttttcctatgactccatcaattccagctaatcctcccat

SEQ ID NO: 683456 - DNA, 100 bp, Homo sapiens
aaaaacatgcgcaggaaaatggaggacaaacatgtctgcattcctgactttaatatgctcttcaacctagagcccgaggcctgacagacgcgggcagtga

SEQ ID NO: 683457 - DNA, 75 bp, Homo sapiens
gtaaagtcagtgacatgcccatgcgagtacctgaggaagaaaatgatgcatcctgttgccagcagtaatccagct

SEQ ID NO: 683458 - DNA, 100 bp, Homo sapiens
gaagttgacatctgacgacgtgaaggagcagatttacaaactggccaagaagggccttactccttcacagatcggggaacgcccttttgcttgtgactgg

SEQ ID NO: 683459 - DNA, 87 bp, Homo sapiens
gggagcaacgggagtgtcctggacccagctgagcgggcggtcattcgcatcgcagggagtgcatccgccccaacccttttccccctc

SEQ ID NO: 683460 - DNA, 100 bp, Homo sapiens
ggtctaatcaggcctgtgtctgcctccttcttgaatagcccagtgaattcatctaaacagccacaagtatatggttatgatgacttgcagatgcttcaga

SEQ ID NO: 683461 - DNA, 75 bp, Homo sapiens
ctcaaaaacaaaattctgaactcaggacttggcaatgctgtgctgtggctttcattgagaagctagacgcccagt

SEQ ID NO: 683462 - DNA, 75 bp, Homo sapiens
agacatcttctccctcccttgcctcaggtgcccaaatgtgagtctgcaaaagctgccagaacagtggctatggag

SEQ ID NO: 683463 - DNA, 75 bp, Homo sapiens
gacggtaggagcctccgtgcggagaccactgttcaaggccacaggtctcctctgagcctccggcctccataagac

SEQ ID NO: 683464 - DNA, 83 bp, Homo sapiens
agaagatctgggtgcccgtggaccacaggccctcgttgcccagatgtgtaaagatttctctctgtgttactggaatccctatt

SEQ ID NO: 683465 - DNA, 100 bp, Homo sapiens
gcctgatgagacagaggtggtggaagaaactgtggcagaggtgactgaggtatatgtggtcgctatgaatattaaaaaggaagcagagtcaaaaccaaaa

SEQ ID NO: 683466 - DNA, 50 bp, Homo sapiens
gggtgccccacgctgaaagagagccccttcatgaataagttttttccagc

SEQ ID NO: 683467 - DNA, 75 bp, Homo sapiens
ttgatcctcctcctaattgcagccaaacatttcagtaatgcagagtcctcttgttggagttacatctactcctgg

SEQ ID NO: 683468 - DNA, 82 bp, Homo sapiens
cggcgaacgcggagagcacgccatgaaggcctcgggcacggtgtggacactgccagcggctgcagccgacttggaatgacct

SEQ ID NO: 683469 - DNA, 82 bp, Homo sapiens
aggcagcagaagccagggcagctgaaagacagagaccttcagctttaaggaagcctcctatttcagtttctcaacatgaaag

SEQ ID NO: 683470 - DNA, 100 bp, Homo sapiens
agatgctttggttcatgatcctctgtccctcaagctgttaacagatgtcataggaaagattgatgtacagctatatattttgtcctttctttcacctcat

SEQ ID NO: 683471 - DNA, 100 bp, Homo sapiens
aagaggagcttcaagcattgcagatagagcaaggaggctttccttaaagtttcccatgtctcaatggactcctgaatataacgagctctacaccttaaaa

SEQ ID NO: 683472 - DNA, 100 bp, Homo sapiens
ttccgacggggcggccgggggctcagagatccaagtgcgcgccctggcgggtccggaccaaggtgtgtggatgtctcctagatcttgacttgctcctgag

SEQ ID NO: 683473 - DNA, 100 bp, Homo sapiens
ccattgtcttaagcattatgcacctcagtgggataaagaggccagatgctccagtgcctgatggcgaaagtgagaaaactgtagaagaaagttcagatag

SEQ ID NO: 683474 - DNA, 100 bp, Homo sapiens
caaaacctggctgttttccttcagagcactggcctccaattacattccagctgcagctcttgtctcctagcagcagcattgtcccagcatttaacacggg

SEQ ID NO: 683475 - DNA, 75 bp, Homo sapiens
ccagtgtttccgtcagtacgcgaaggatatcggtttcattaaggttatggcacacagcttgtgccagcgatgaag

SEQ ID NO: 683476 - DNA, 83 bp, Homo sapiens
ctctcatctcgctcggctgcgggaaatcgggctgaagcgactgagtccgcgatggagatctctgagctgcccagcatagtcca

SEQ ID NO: 683477 - DNA, 126 bp, Homo sapiens
tccaggcccaccaggacctttgggaattcctggcaggagtggtgtacctggtcttaaaggcaggttggtctcctcttcatattgcggcttctgctggccgggatgagattgtaaaagcccttctgg

SEQ ID NO: 683478 - DNA, 75 bp, Homo sapiens
ccggaaaatgccctcaaacgcgccaacggtttgagaagatggtcagtggcatgtacttgggagagctggttcgac

SEQ ID NO: 683479 - DNA, 100 bp, Homo sapiens
ttttatacaagaaaagctgcacttgaggcccagaatgcactgcacaatattaaaactttacctgggaaagaatgctttgtggaacttggcttaaatatag

SEQ ID NO: 683480 - DNA, 82 bp, Homo sapiens
caagagtaacagcagcgccgtcccgtccgacagccaggcccgggagaacagggtttccaggcctgaggtgcccgccctggcc

SEQ ID NO: 683481 - DNA, 100 bp, Homo sapiens
cgcggccgcgcggaggaagcgaaggaggcgggagcggagacctcgctgcgctcatggcgtcgcccggcacttgcacctcctgcgccgccgccccccatcc

SEQ ID NO: 683482 - DNA, 100 bp, Homo sapiens
catcctctttgggaatgatgacaaaatggacactttgccaccatcaccttgaccttcatcgacaagaacggagagactgagctgtgcatggaaggtcgag

SEQ ID NO: 683483 - DNA, 100 bp, Homo sapiens
gctctgtgcccaccaccagcaggacactggcccagggagagctgaatgagatgaggacccgcctctatctcaacctgggcctcacctttgagagcctgca

SEQ ID NO: 683484 - DNA, 75 bp, Homo sapiens
gggggagactgtgccgtggagggcctcgccatgtcctgctgcccgattgtccccttggggcggaaagaagccaag

SEQ ID NO: 683485 - DNA, 90 bp, Homo sapiens
ggtgggattaaaagcagcgaacctcgagaccaacgtggaggagctgtgggtggaagattacacacactccgcctgcaggaatacttatca

SEQ ID NO: 683486 - DNA, 101 bp, Homo sapiens
aatggagtttttgccagctgggaaggcagaatccaaagtttgttggagactgaaccgttgcaaggaacagacgaagatgcagtagccagtgctgacttctc

SEQ ID NO: 683487 - DNA, 100 bp, Homo sapiens
ttatgtccttacaccagatttgccaccaccttcatcatctagtcatgctgggttgttggatatgggaagtatgaactggaagaggatggtaccccttcta

SEQ ID NO: 683488 - DNA, 50 bp, Homo sapiens
gaccaccgtcagcactcagcgcgggccgataagaactccattttctgttg

SEQ ID NO: 683489 - DNA, 96 bp, Homo sapiens
gccaggatactttattctacagcgaagttaattttgtatccgtcgaggctacagtagagcttgctgatgaccgtatggcactggtgtcaggcatca

SEQ ID NO: 683490 - DNA, 75 bp, Homo sapiens
cctgatccgggagagtgagagctccccaggggagttctctgtgtctgtgaaggatctgctggaggaaggaaaggc

SEQ ID NO: 683491 - DNA, 100 bp, Homo sapiens
tcctgctctcaactacaacatcgtttcaggaatatgatgctgtggctgagaaagctggtaaagtagaagctgaggttaaacgcttacacaataccatcgt

SEQ ID NO: 683492 - DNA, 89 bp, Homo sapiens
ctgaatacatgatttaaacaagagatttccacagaagaatcagttgtctggaaacctgctgaggaaattcaaaaacagcaacgggtggc

SEQ ID NO: 683493 - DNA, 74 bp, Homo sapiens
acaggccctcgttgcccagatcttcggaaccaaaaagaagcttcccagagccggggccaggagccccaagcgcc

SEQ ID NO: 683494 - DNA, 75 bp, Homo sapiens
gggcgcccccagaagcccgggaacaaacagactaatagacaagtcacgagttacctgtgtcaaatgggttcccgg

SEQ ID NO: 683495 - DNA, 91 bp, Homo sapiens
atttcagactagataacatagttttccaccctaaagagtgttccttgcctgtatctccccttggttcaatagctaccagatttttggaaga

SEQ ID NO: 683496 - DNA, 75 bp, Homo sapiens
gtcgaccccaacagcaggaatagctcccgtgtcaggggaagctgatggagaatcgagctctggatccagggactc

SEQ ID NO: 683497 - DNA, 50 bp, Homo sapiens
tggacattttactggctcaaggtaaaccagacttgaatacaacattgcca

SEQ ID NO: 683498 - DNA, 100 bp, Homo sapiens
caaagagcttgctccctacgatgagaactggttctacacgcgagctggtattggcaagcttgccagtgtacctgctggtggggctgtagccgtctctgct

SEQ ID NO: 683499 - DNA, 75 bp, Homo sapiens
gtgctcgtcgggagtgatcacctaccctacaggtgtgactgaagaaatatcaaatgtttcctagtaagacagcaa

SEQ ID NO: 683500 - DNA, 50 bp, Homo sapiens
tgcgggccgggagctggacgcggggagttccaccaggtgagaagagtgat

SEQ ID NO: 683501 - DNA, 75 bp, Homo sapiens
gacaaggaaaaggatgaagaggacgaggtcattgacgagaatgtctactagagtccttttagccactctttccat

SEQ ID NO: 683502 - DNA, 100 bp, Homo sapiens
gttgaatgacatctggcaagctccttcctgggcttctcttgatgggagctcggaatgtctgagctctgcagagcagatggagtccgaggacatgctgagc

SEQ ID NO: 683503 - DNA, 96 bp, Homo sapiens
cctgtgaccagaacggcacggccatctgtgtgtctgggcagtgcaagatcgaaattgcccagaagcatcctgatatctatgcagttccaatcaaaa

SEQ ID NO: 683504 - DNA, 75 bp, Homo sapiens
cagaggtcatgattctgagatgattggagaccttcaagtttcctcgctgatctcttcatgccgtgtaatttcaca

SEQ ID NO: 683505 - DNA, 100 bp, Homo sapiens
ccgcagccgccacctacccagtgaccatgatagagccgaacactgtcagctacagccagtccagcttgatccacctggtggggccttcagactgcaccct

SEQ ID NO: 683506 - DNA, 75 bp, Homo sapiens
gggaagtttgtctttgaaatcattccagatgatactacaaatcattctaactcctccaaggaggtcccttcctca

SEQ ID NO: 683507 - DNA, 75 bp, Homo sapiens
tcctcacagcagcacactgtttcaagaggttaatgactccagagagtaagatcagattcgtccacaaagagatgg

SEQ ID NO: 683508 - DNA, 87 bp, Homo sapiens
ttatagaccaccagaatattgaagcacttttcaggattagaagaggctgtgtatagaaacatacaagcttgcaaggagcttgcccaa

SEQ ID NO: 683509 - DNA, 116 bp, Homo sapiens
aaaagggtagaaccacagactgaggacgacctcttcccttgtacttgccataggaaaaagacacagctccgaattgattccttctttagattagcacaacaggagaaagaagatgc

SEQ ID NO: 683510 - DNA, 117 bp, Homo sapiens
ggggaaccctgccctggtgtccgcctatggcacgggactcgaagggggcaccacagaacttacgctggaaaaactccaacagcttcatatggacagatggacttcaaatgctgtttg

SEQ ID NO: 683511 - DNA, 90 bp, Homo sapiens
gtgacatctccagcaacatccaggcatatgggcaacaaagctatggaacctatggacagcccactgatgtcagctatacccaggctcaga

SEQ ID NO: 683512 - DNA, 51 bp, Homo sapiens
ggttgcaaggagcgtgcgtgcgtctggaaaaatgccagctgtgggacaagg

SEQ ID NO: 683513 - DNA, 100 bp, Homo sapiens
aatgaggcctacgcagagctcatcgtccttgtgttttaaccaaacagttgtggctactcatggtgaggaatgaccgctaagagtttgggttctttcagtg

SEQ ID NO: 683514 - DNA, 97 bp, Homo sapiens
cattacacgcaaagatattcaaactctaaaccatctgaattggctcaatgatgaggcactgaaggatagcacagaagtagaaattgtggatgagaaa

SEQ ID NO: 683515 - DNA, 98 bp, Homo sapiens
caagtcttccgttctgaccaacgaaaagatggttttcctttggaatatggataaatacaccatgatacggaaactagaaggacatcaccatgatgtgg

SEQ ID NO: 683516 - DNA, 74 bp, Homo sapiens
ttcgttctggctctagcagagttttgattaccactgacctgctggtgtattccacgtggagaaaaatggtcgct

SEQ ID NO: 683517 - DNA, 74 bp, Homo sapiens
cccaggacggaggctgcatgcccgaggaccaggccggcgcagccatggtcatcatcagatttgaaatatttaaa

SEQ ID NO: 683518 - DNA, 101 bp, Homo sapiens
tccaaaccttggagatgatttcagcagtgtttacaagactgccaaggaacagggaatccattctttggaagtgcagggctcgcggcctggcaagaatgtac

SEQ ID NO: 683519 - DNA, 89 bp, Homo sapiens
ccatagcagggaataatttcaatttgaaaacaagtggaatagtgctgtcttccttggttaatgattttgttcgggacaaatttaccaga

SEQ ID NO: 683520 - DNA, 78 bp, Homo sapiens
atagcacgtttctctctggcctggtactggctacccttctctcgcaaggttctacaacaactgaagcagacattttcc

SEQ ID NO: 683521 - DNA, 83 bp, Homo sapiens
tgatttatagctaagactccaggacacccctgaagccgagaaatggaagtcctgacggccacgctggatctggaggacgtccg

SEQ ID NO: 683522 - DNA, 51 bp, Homo sapiens
caagtccagctaatgaggaaagccaggaatagttgctgaacaccccaggcc

SEQ ID NO: 683523 - DNA, 100 bp, Homo sapiens
gccatgagcactgcagcgattgcgagaatgaggaggacaacagctacaaccggggataaaataccatgaggagtttgagaagagccgcatgggccctagc

SEQ ID NO: 683524 - DNA, 103 bp, Homo sapiens
gcggctgcgctggcgcggcttttggcggcctttctgctcctcgcggcccagcttcggaaccaaaaagaagcttcccagagccggggccaggagccccaagcgc

SEQ ID NO: 683525 - DNA, 73 bp, Homo sapiens
aagaaataggaatgcttctggaaaataataaagtgattatgagcaaccactggaggtgaagaacaacagtaat

SEQ ID NO: 683526 - DNA, 100 bp, Homo sapiens
cggcttacagacatatcgctgaccgaatgggaaccccacacctgcagaaggtccttaatcaggtttccctaggacttctgcatgcccatgccacacatat

SEQ ID NO: 683527 - DNA, 80 bp, Homo sapiens
ccatctccacttaatgactgtctcacattggccggcaacttgttccagctgacagcagccatggcgagcggcagtggaga

SEQ ID NO: 683528 - DNA, 101 bp, Homo sapiens
ctcaggaccttagttcccaacttcaccttcaacttgggcttctcgggcaagttctatcatactggcgtgcccctgtgctgtgccaccctgcagtggctcct

SEQ ID NO: 683529 - DNA, 97 bp, Homo sapiens
agcgctttcagggtcatggcataccaggttacacatcattttggaatgactgtatatcatctggattacgtggctgtatgttaattgaattagcatt

SEQ ID NO: 683530 - DNA, 100 bp, Homo sapiens
gagtaaagcaaagagaaaggaagcaggcccgttggaagtggttgtttaattggccttggtcctcacagctccaaaaagaaacaggatctcgataagctct

SEQ ID NO: 683531 - DNA, 100 bp, Homo sapiens
caagcgatcatccggcctcggcctcctaaagtgctgggactgcaggtcacgacatttagtgagcttttgctctgcatgcctgcaggaatgtctgaagccg

SEQ ID NO: 683532 - DNA, 75 bp, Homo sapiens
tcgagagaacacagaaggagaatacagtggaattgagcatgtgtggtggtatctccatcaaggcttctgcaaata

SEQ ID NO: 683533 - DNA, 100 bp, Homo sapiens
tccttggttggctcgaatgtgtacataactcccgcaggatctcagggcctgccgccccattatgatgatgtcgaggaatttgctgcactgacaaaagaat

SEQ ID NO: 683534 - DNA, 89 bp, Homo sapiens
cccccacaatagggtatcatttttacgggccttctggagatgcttccgaactgtgggcaaaaatggcgctatcagaggactcctgaaac

SEQ ID NO: 683535 - DNA, 82 bp, Homo sapiens
ctggatatcagcccccagcggcccaggcccaatgtggacgagtgctcactagcagaaaaaacctgtgtgaggaaaaacgaaa

SEQ ID NO: 683536 - DNA, 100 bp, Homo sapiens
caccagcaggacccgaggccaggagccaggggcccagaagttggaatcgaagcctcttaaaatggcagatgacttggacttcgagacaggagatgcaggg

SEQ ID NO: 683537 - DNA, 83 bp, Homo sapiens
cccgccagcagcactgtggaggccgtcctcgagttgtctgctggttctcagcttgaagaagattctgcagtccttattgatcc

SEQ ID NO: 683538 - DNA, 75 bp, Homo sapiens
tccatcacccaccaacaacaccacaataatccacagccaagggctgttgataatcaggtgtatgtggccacagcc

SEQ ID NO: 683539 - DNA, 96 bp, Homo sapiens
gttacaaccgcagcagtggtggctatgaacccagaggtcgtggaggtggccgtggaggcagaggtggcatgggaattatatccagatcgagagaca

SEQ ID NO: 683540 - DNA, 73 bp, Homo sapiens
tcagaccaccaccagaaccatcacctcggagacccagacaatcacagcaacatgaaccgtgaagaccggaatg

SEQ ID NO: 683541 - DNA, 90 bp, Homo sapiens
tgaggatggagtggctgcaaacaaaaagacgcaggaggagggagacgcactgatgacatcgggccgctcctgcagctcgggcgcctcgca

SEQ ID NO: 683542 - DNA, 90 bp, Homo sapiens
gaaagcctccggaatctaaaaagccctcagtaccagagacagaagcagatggattcgtccttttaggtttcttttctccatggaaaactc

SEQ ID NO: 683543 - DNA, 97 bp, Homo sapiens
tcttgcccgcgcaggcacccctctggctgctcagtcctgcctcaggatgtagtaactggagttagtcccctgctcttcaggaaactcagtaatcctg

SEQ ID NO: 683544 - DNA, 90 bp, Homo sapiens
cagactcggtcctcctgcaggagatgcaggcattgacacagaccttcaacaacaactggtcctatgaagctgatcgtcgtgtgttgccac

SEQ ID NO: 683545 - DNA, 120 bp, Homo sapiens
gttcagaagagccaaggaataaacatgcaatgaacccaaaaggtctcttgcatggcaccaagaatgttaccaattcaagcagtttaagattgccaagacaaaatagtgatggtggtcaga

SEQ ID NO: 683546 - DNA, 83 bp, Homo sapiens
ggaaggtgcatctgcagtacaggatatgaagaaattgagggttcttgccatgcccaagaagatgaaaggattgttcttgttga

SEQ ID NO: 683547 - DNA, 51 bp, Homo sapiens
cctctcgggcatgaccggaaaggccaagattggctctaccagtgcacctgg

SEQ ID NO: 683548 - DNA, 100 bp, Homo sapiens
ctgtcggccccggcccgactctatcacaagaaggtgaaatgacaatggatgctctgttggctcgattgaaacttctgaatccagatgaccttagagaaga

SEQ ID NO: 683549 - DNA, 80 bp, Homo sapiens
ttcaaccataaagacatcttaattgggcacgaaagaggtttacccaaggtccagcctagcccctaggcaccatgtcggac

SEQ ID NO: 683550 - DNA, 101 bp, Homo sapiens
gctttcacaaagataatagaagccatgggattcacgggacctttgaaatacagtaaatggttgtggacatcggatacccaaggagacgaagctgaagcagg

SEQ ID NO: 683551 - DNA, 50 bp, Homo sapiens
aggcatggagtacttggcttcccaaaaaatgaagactggcccatttgcag

SEQ ID NO: 683552 - DNA, 100 bp, Homo sapiens
gagaactacagcaacttactctcactggattcgaattgctgcagaaggaatcaatgggacagttggtggaagcaaattggctaccagactttatgtggaa

SEQ ID NO: 683553 - DNA, 100 bp, Homo sapiens
gccgtgttccgtgtgggaagcgtgttgcaagaaggatgtggatgaagcttacatgaacaaggtagagctggagtctcgcctggaagggctgaccgacgag

SEQ ID NO: 683554 - DNA, 75 bp, Homo sapiens
tccgaccaccgaggctggagggggagaacacccaggtgaaagaacttgtcctggacaacagtcggtcgaatgaag

SEQ ID NO: 683555 - DNA, 80 bp, Homo sapiens
agcgagggaggagccccccgacccagacaatctccgggaaggggcagagcagaaggtggtattcatcacaggacgagtcc

SEQ ID NO: 683556 - DNA, 90 bp, Homo sapiens
tattttgttaacaacatgaactatcttccatttcccatcatacaggaccagctgtactggcgctacgatgaccacacgaggcacatggac

SEQ ID NO: 683557 - DNA, 100 bp, Homo sapiens
gaaaaaacagcagatggctcgagaatacagagagaaaattgagacggagctaagagatatctgcaatgatgtactgacttcacatgtatcattctccgag

SEQ ID NO: 683558 - DNA, 88 bp, Homo sapiens
ccgatgaggaagtactgagcctgttggaggaactggcccggaaacaggaggacccatggccatgcagaaaatctttgcccgggaaatc

SEQ ID NO: 683559 - DNA, 83 bp, Homo sapiens
gcatcatgtgagagtgaagacagtatttgccagctcattggagaatgcagttgaaactaattttgtggatagagaaactgttg

SEQ ID NO: 683560 - DNA, 74 bp, Homo sapiens
cgggacatgcatcgtcccctggactctctcaaaccacacctgtgacaatgcaggttggagaaggtcagcaggtg

SEQ ID NO: 683561 - DNA, 100 bp, Homo sapiens
cggcggcggggcgaccgcgagctcgggatacgctcttcgaagtccgcaggtttagatatcaagtcatcagggtctggctgtgtaaaagttcaaagtattg

SEQ ID NO: 683562 - DNA, 75 bp, Homo sapiens
ctctgcccagcttcccaacttcaggtggagtttgtccatatgctcaatgctaccatgtgcgccactacccgtacc

SEQ ID NO: 683563 - DNA, 74 bp, Homo sapiens
agccccccaatgcggccgcgagaagcagcgggggggcaggcgatcgaagatgacatggcagagcttctcctcgg

SEQ ID NO: 683564 - DNA, 100 bp, Homo sapiens
cccaggggcccggcccggggcgcgttgaaggtggccataaaagtcattgataagaagagagccaaaaaggacacctatgtcaccaaaaacctgcggcgag

SEQ ID NO: 683565 - DNA, 95 bp, Homo sapiens
cgctgttgctgccgccatacgcgctctccctgtttagaaactgattattgatgagaagaagtattacttatttgggagaaaccctgatttgtgtg

SEQ ID NO: 683566 - DNA, 75 bp, Homo sapiens
gccagatagtaccatgatagctgtatcagtgaccatggaggctggtggcctccccttggagctgtggcgcatgat

SEQ ID NO: 683567 - DNA, 74 bp, Homo sapiens
catgagaaaaagcttggagataaagttgctttttactgaaactggcgatggaatatgagaggagccctctggaa

SEQ ID NO: 683568 - DNA, 74 bp, Homo sapiens
atcaaattcccacacttgttcacaggcctccaccgctatgtctggctggtttacgagcaggacaggccgctaaa

SEQ ID NO: 683569 - DNA, 88 bp, Homo sapiens
gcggagccaagatggggaatggaactgaggaagattataactttgtcttcaaggtgagaatttctaatttgatgcgagtattaggaac

SEQ ID NO: 683570 - DNA, 101 bp, Homo sapiens
gaaaacttcgaggcactcaagtcctggctcagcaagactctcgagcccatattttgtatcagattgtaccatctcataaattgatgttggaattccataca

SEQ ID NO: 683571 - DNA, 89 bp, Homo sapiens
tcggagtgtatgacaacatcgggatcctggtgtctcgactgcattgtgagagtgaatctttcaagatggatctaatcttagatgtaaac

SEQ ID NO: 683572 - DNA, 100 bp, Homo sapiens
tctgcatcctacagagccatggatgttggcaagtctttacaatggcagtgtgtgtgtttggaatcatgaaacacaggaactagaacctctggttggtgaa

SEQ ID NO: 683573 - DNA, 75 bp, Homo sapiens
gcagctgaaagcgtgaactgtttttagagaacaacttgtaatggagccttcatctcttgagctgccggctgacac

SEQ ID NO: 683574 - DNA, 90 bp, Homo sapiens
cagccccggctctgctatctcgtgaaggaaggaggcagctatggcttctctctgaaaactgtccaagaattttgaacagaaaatgctgaa

SEQ ID NO: 683575 - DNA, 88 bp, Homo sapiens
gcgcagagctcgccggcgccccgacgggccccggagcagcggcccccggccgggtggcagtgctccttttggacttttctctaggttt

SEQ ID NO: 683576 - DNA, 97 bp, Homo sapiens
ctctgcagctcagccaatcagtgacatcattggactgatcctttgaaatactccagccatgactaaaagagaagcagaggagctgatagaaattgag

SEQ ID NO: 683577 - DNA, 124 bp, Homo sapiens
cggaagaccgcgcgcagggcctgcagcgggagctggacggcgagcgcgagcggcgcgagaaacccgcggcgccatggctcacgtcggctcccgcaagcgctcgaggagtcgcagccggtcccgg

SEQ ID NO: 683578 - DNA, 75 bp, Homo sapiens
ctcagcggctatgaccaggtgctccacgaagacgaaaccacgatgataccacgagtcaacccaaaagttgctggg

SEQ ID NO: 683579 - DNA, 98 bp, Homo sapiens
ttggcttcttccagcgaggagtggccaacttccagctggcaaggacatcttcaacgctgtgatcaaggagcacccggggctagtgcagcgtctgcctt

SEQ ID NO: 683580 - DNA, 74 bp, Homo sapiens
aagagccctggaatatgaagagacatgagatggtagctaaacatttaggttccacttccaaacatgagttccag

SEQ ID NO: 683581 - DNA, 75 bp, Homo sapiens
taatcccagcactttgagaggccgaggttgacaaggtcacaggcaggtttaatggccagtttaaaacttatgcta

SEQ ID NO: 683582 - DNA, 100 bp, Homo sapiens
tgagagtccgtaaggagcagcttccaggatcctgagatccggagcagccggggtcggagcgggtcccgagcagcccggcccaccatggacccctctgccc

SEQ ID NO: 683583 - DNA, 96 bp, Homo sapiens
aaacaagttcttggcaagagaggcatcctccttgaagtatttggctgaggagttttcaatcccagtgatgtacagttcattgattatgaatattct

SEQ ID NO: 683584 - DNA, 90 bp, Homo sapiens
cgcagtccctacagccctgtgctcaggtcaaaatgcagatcttcgtgaaaacccttaccggcaagaccatcacccttgaggtggagccca

SEQ ID NO: 683585 - DNA, 50 bp, Homo sapiens
cttttgtgctgtacaagtgtttgcaggttcaagcaattctcctgcctcag

SEQ ID NO: 683586 - DNA, 100 bp, Homo sapiens
aatcctgactccacccctccaatcctcagtggagctggtcgcagatcctgagacccggacagtggcagtgaaacaggctcggacatcatcatgcagctgg

SEQ ID NO: 683587 - DNA, 100 bp, Homo sapiens
ccgctgcgctcaatgacagggaccaggggggcggcagcgctggacacccagcctccaggtatcctttgtgtggctgatcagtgtcacggcttaagagaac

SEQ ID NO: 683588 - DNA, 100 bp, Homo sapiens
ccccaagccagttcaggacctcatcaagatgatctttgatgtggaaagtatgaagaaagccatggtggagtatgaggaggcaagtgaggcctatctggtt

SEQ ID NO: 683589 - DNA, 100 bp, Homo sapiens
cgtccactcccgcgcgcccctctcggggaccagggcggcctcccaggaggagcttgaaatggctgagcaggagcgctttctactgcatcaggagacccta

SEQ ID NO: 683590 - DNA, 100 bp, Homo sapiens
gcattgaggcaggtgtgcaggtgcggttgcggcgagccagagtattgggaaagggtcgttgtggtgcatagacccagagtatagacaaaatctaattcag

SEQ ID NO: 683591 - DNA, 90 bp, Homo sapiens
acctacctgcggcgtcggcagctgctgctccgagggagtgcatccgccccaacccttttccccctcgtctcctgtgagaattccccgtcg

SEQ ID NO: 683592 - DNA, 75 bp, Homo sapiens
ttcagtgacatcagaaaatgtgtccagagattacaagcttggcatggtggaatggattgaacctcctaaacgaga

SEQ ID NO: 683593 - DNA, 73 bp, Homo sapiens
agcgactgagtccgcgatggaggtgtggactggatgaacaaggtgatggcacgtttcgtgaggggggatgccc

SEQ ID NO: 683594 - DNA, 82 bp, Homo sapiens
gggcccacgaggcagctgtcccatgctctgctgagcacggtgaattctgcttggtcagaatcgtgatggcattgtgttcagc

SEQ ID NO: 683595 - DNA, 88 bp, Homo sapiens
tgactttcttggatcgggtcgcctgtgtggcaagagtagaaggagcatcgatgcaggttgttttccgaggaggtgaaggggctttgca

SEQ ID NO: 683596 - DNA, 100 bp, Homo sapiens
aatggaaaaatggcaaccctgtctgtaggaggaaaaactgtatcacgttttcgtagcaggaaagtccaatccaaccttttatctccagaagggctttcaa

SEQ ID NO: 683597 - DNA, 49 bp, Homo sapiens
cttcgacgtgtggaaaaccatcagcgacagagtccaggccctctcctat

SEQ ID NO: 683598 - DNA, 60 bp, Homo sapiens
tatgaggaaaacatcacacacctgcaggagcagctgaaggtctggtgatagctgggtgca

SEQ ID NO: 683599 - DNA, 100 bp, Homo sapiens
ctggagtacctgggactggcgatgagaatgcggaatagaggcctgagtgtgtccgcttgaaaccaactgacatacagcccgacatcttcagctatctctt

SEQ ID NO: 683600 - DNA, 100 bp, Homo sapiens
tggtttagaaatggaaaaatgtatccaagacagcctcccccaggtcgtcgattccctgtccaaatgcgtgcagtgggccgagggttttctgctggtctat

SEQ ID NO: 683601 - DNA, 75 bp, Homo sapiens
acgaggacaaaagcaacgacttcgtatggctttcaaggatatgctgtattcagctcaggaccaggcaccttctgt

SEQ ID NO: 683602 - DNA, 80 bp, Homo sapiens
ccgggagaccctgtgcccctaaatcgcggtccactgcgcgcgtcagaaaactttagaaactgttcctttggagaggaaaa

SEQ ID NO: 683603 - DNA, 98 bp, Homo sapiens
tggaaaggctctcagtgaaaaagaaatcaatgtggactgaacataaatcacctgatggaaggacttactactacaacactgaaaccaaacagtctacc

SEQ ID NO: 683604 - DNA, 74 bp, Homo sapiens
gatggagatgaacctctaacacagtggaaaggaaccgttctggatcaggtaaccaattctgaagggacatgggt

SEQ ID NO: 683605 - DNA, 100 bp, Homo sapiens
ctgcaccagccatggactgctacacggcgaactggaacccactcggggactctgccttttaccgacaggggcaagtgtccgagtggtgaatcagctactt

SEQ ID NO: 683606 - DNA, 100 bp, Homo sapiens
gactgaagaccatgttgcaggcccacagctgcctacagaaccgtcccaaaatatggcaaagaaacctattctgagttatcggcaggggaggtgagcagat

SEQ ID NO: 683607 - DNA, 73 bp, Homo sapiens
ctggcagaatttgggagctgtttattgcagcactgttgtgccctctgatgccctagatccttgttctgcttac

SEQ ID NO: 683608 - DNA, 83 bp, Homo sapiens
cgcggctgtgcaagtacctgccagagaacgacctgaagaagaagctcattcacacagaagacccatttaatgatgaacatcag

SEQ ID NO: 683609 - DNA, 111 bp, Homo sapiens
tcagcggctccatgccttgcttatgccaccagaacctatcatcattaatcatgtcatcagccgcctgtcttggttagatggctctggattaggattctcactggaataccc

SEQ ID NO: 683610 - DNA, 83 bp, Homo sapiens
taagacaaaagaaatagcaagaactgaggagcaccaggagacgcaactcatcggattccagaggggtgactaccatattgatg

SEQ ID NO: 683611 - DNA, 96 bp, Homo sapiens
tgggcggccggccgacccttcctgtcgctgacggcgactgcgggaggccaggttcaagtgctggggccggcagtggagagttccacgtgtacagac

SEQ ID NO: 683612 - DNA, 82 bp, Homo sapiens
gaacaaccgttgtttaatggaagatttcgatcagttaggggcagctgcaatgactctccgcacggtattattgtcattgcaa

SEQ ID NO: 683613 - DNA, 82 bp, Homo sapiens
ctgagctccctactggctgagggcagagactctcccgacgcccactattgcttggttctacttcctttatcccgattggccg

SEQ ID NO: 683614 - DNA, 75 bp, Homo sapiens
gtttacagacaagaggtttcagccagtgcatgaccttactattggtgacaaggcaactgtatgagccactagtta

SEQ ID NO: 683615 - DNA, 104 bp, Homo sapiens
ctcgaacccgcctgcgatggggcgagaaaggtcccactgcagccctccaagcaggtgaaatgacaatggatgctctgttggctcgattgaaacttctgaatcca

SEQ ID NO: 683616 - DNA, 75 bp, Homo sapiens
aagggcccttcctatgggctctcggccgaagtcaagaacaaggtaatattaacggctgctatttgaactattact

SEQ ID NO: 683617 - DNA, 82 bp, Homo sapiens
ctcaatatctgtcttcggtggactccttcggcagtccacccaccgccgccgcctcccaggctttgaagacgacccccaggct

SEQ ID NO: 683618 - DNA, 100 bp, Homo sapiens
ccctgaccatcaacattccagacaccatggcccacctcatcagccctctgccctcccccacgggaaccatcaggtttggtgcacctcgatttggaggaag

SEQ ID NO: 683619 - DNA, 129 bp, Homo sapiens
caagattttaacatggctgctgacatcgatcctcagaatgcagatgtttatcaccaccgaggacaggtcagatgtaccaacagtaccagcaacaggccggctatggtgcacagcagccgcaggctccac

SEQ ID NO: 683620 - DNA, 100 bp, Homo sapiens
gtttaccttcaccttcgctaagaacccagggcagaaaggtttaggagaagtttgaagtgcagcactctgaaggctaccggcagatctcagccttggagga

SEQ ID NO: 683621 - DNA, 90 bp, Homo sapiens
ttaggaggctgaagcaggagaatcgcttgaaccccggaggtggaggctacagttgctttcacaaccaaaatttatcaccctaatatcaac

SEQ ID NO: 683622 - DNA, 100 bp, Homo sapiens
ggaggcgttgcaggacagcccccagatttggagcaagaggtggtggtggccttcccccgaagaaatttggtaatcctggggagcgtttgcgtaaaaaaaa

SEQ ID NO: 683623 - DNA, 88 bp, Homo sapiens
agaaccagccgactggagcaggcagcagcccagggccatgatccaaaggaaccagagcagttgagaaaactgtttattggtggtctga

SEQ ID NO: 683624 - DNA, 100 bp, Homo sapiens
ccgtgatccacaaggcattagagcatggacagtcattttgtttactcattcagccctgttgcaggtcccaataaactcttcataaggttgacagaagcac

SEQ ID NO: 683625 - DNA, 108 bp, Homo sapiens
ctccactgttcctggaggaatccgagaagagcagagcggagggagccccagacacgggagtgcatccgccccaacccttttccccctcgtctcctgtgagaattcccc

SEQ ID NO: 683626 - DNA, 83 bp, Homo sapiens
atggccaccatgtctgggagatggaagcgaaaactgaccgggacctgtgcaagccggttatgccaaggacgccctgaatctgg

SEQ ID NO: 683627 - DNA, 100 bp, Homo sapiens
ccaagggctaccatgccaacttctgcctcgggccctgcccctacatttggagcctggacacgcagtacagcaaggtaagcttccagcacgaggtgtaccc

SEQ ID NO: 683628 - DNA, 100 bp, Homo sapiens
cgctttcaggtcggcgtctcgtttcatcctcacaacagccaggagtgggccgaacccaacagcttccacgtctgcatcacgtcctacactcagttcttcc

SEQ ID NO: 683629 - DNA, 100 bp, Homo sapiens
ccagctgctgcggacagtgaaccggacagtcatcaccatgggccgggatcacattctgattgacccagatgatgtggtaccagttggccaaagaagagcc

SEQ ID NO: 683630 - DNA, 83 bp, Homo sapiens
gaagcagccgatccagcctgcggagcctgtggggcagattgtcaaaagagtggggaatggtgaggaaacgccgatgattggag

SEQ ID NO: 683631 - DNA, 98 bp, Homo sapiens
tcgattggaggaaggacctccacacactaaaaactggagcttagcagtgtctgcaaaaacgaatcttttcctacaacctgttaactgactggactgtt

SEQ ID NO: 683632 - DNA, 75 bp, Homo sapiens
gaacatctttcagagttgtatcccacttctccttcctgcccttgtatgaagaaggatgtgtttgcttccccttgt

SEQ ID NO: 683633 - DNA, 98 bp, Homo sapiens
gaatttctcctggggctcagagtaggactattttaacaaagggaaaaatgagcctgaggacagtaagcttcgattcgaaacttatcagttgatatggc

SEQ ID NO: 683634 - DNA, 100 bp, Homo sapiens
ggaagtgctttgattctatgagcaggggaggagctttatctttatatactgcccttaccacacagcagaaactggcaggtgtcactgcactcagttgctg

SEQ ID NO: 683635 - DNA, 74 bp, Homo sapiens
atggaaatgaagtataataccaagaaagccccacttgtattgtccttgtgaacttccttgaagatggcagcatg

SEQ ID NO: 683636 - DNA, 90 bp, Homo sapiens
caaactttgcagtaagcgaacaggtgatgacaatgggaagaaggccaacaaccccaaccactgcaactgcatcatagaccagatcttcac

SEQ ID NO: 683637 - DNA, 83 bp, Homo sapiens
gaggacttccctttggatgtagcaaggaagaaattgttcagttcttctcagggtgagaactctgtctcagtcgacgggaagtg

SEQ ID NO: 683638 - DNA, 100 bp, Homo sapiens
tggaaaacgtagggagcaggttggaagtgaaggaactttccaaagagatgatgctcctgcatctgttcattcgctgtaggcgcatgatgtcacaagttat

SEQ ID NO: 683639 - DNA, 83 bp, Homo sapiens
ggagcctttgggaaagtgtacaagcctccacaaatgggaagtgttcctgtaatgacgcaaccaaccttaatatacagccagcc

SEQ ID NO: 683640 - DNA, 97 bp, Homo sapiens
gagagaaggaatccaccttcttacgctatggcaggttccaagaccaaagattaaattaagagaaggtaaagctggacaaaatctgctggaaatgatg

SEQ ID NO: 683641 - DNA, 113 bp, Homo sapiens
gttctggggagcgcctcgtcgacatgagtgatgtggaggaaaacaacttcgagggcagagcagttgtgaaaaacttcaggacaaaaatgtttcatttaaggacttgtgctgct

SEQ ID NO: 683642 - DNA, 50 bp, Homo sapiens
cggcggtagcagcctgcagccacgacaaagatcattccactcagcctggg

SEQ ID NO: 683643 - DNA, 78 bp, Homo sapiens
acagatgaagacagcaccaggttccaaatcatcaatgaagcaagtaagtgagccagagcgaggaaggctaactccctc

SEQ ID NO: 683644 - DNA, 100 bp, Homo sapiens
gcagatgcccaccggaatggagaaggaagaggagtcgggaggaataagtttttttcatctgtaatttggaagccaagtcagtaacaaaatgaaaccagta

SEQ ID NO: 683645 - DNA, 88 bp, Homo sapiens
cagcctaagctgcccctgtgcgacagcctcatgatctgggatcttcaagatgaagttcaaagggagaatactaatctgcaaaaactac

SEQ ID NO: 683646 - DNA, 75 bp, Homo sapiens
catgactttggtagatgagactaacatgtatgaaggtgtaggaagaatgtgccttggcatctcccaatggggtgg

SEQ ID NO: 683647 - DNA, 100 bp, Homo sapiens
cggccagtgcgggtggctggctttgccattagcgggggcctttcctgaggacggcgtacggagtgtggagtcactttgtggcatgtatgacagccatctt

SEQ ID NO: 683648 - DNA, 100 bp, Homo sapiens
agaagacagttcttccgattctgaatcagagtcagaacctgaaagtgaatctgaatccagaagagtcactaaggagtcttttagtcctgctatacagctg

SEQ ID NO: 683649 - DNA, 98 bp, Homo sapiens
ggctacgaatacgtgagcccggagcagctggctggctttgataagtacaagcgcggagacccacatcaagggcttcacactgaacgatgctgccaaca

SEQ ID NO: 683650 - DNA, 101 bp, Homo sapiens
ggctaataacacaacaagtttagggagtccatggccagaaaacttttgggaaaagaggcacagttagatgaagaaggacagtttcttgtcagaataatata

SEQ ID NO: 683651 - DNA, 98 bp, Homo sapiens
tcatctgatgtggtgcttttgaaccactggaaagtgaggaattttgaagtacaccgtggtgacattgtatcattggtcttcgatgtttttgaagcagg

SEQ ID NO: 683652 - DNA, 75 bp, Homo sapiens
aaatcataccatatcagatgcctcgcagagcaccaggcccaccgtgaaagatttgcttgtaaatgcatcacgaag

SEQ ID NO: 683653 - DNA, 100 bp, Homo sapiens
aaacagatgctaatttgggaaaaagctccaggattctgacagggatgttgcgaagaaggaagaatcctgctcaaaaatgaggtgaattaatacttgggcg

SEQ ID NO: 683654 - DNA, 90 bp, Homo sapiens
gtcggaatcagatttgaaaatgaaagtgacctagatgtgaaggctggtggaggctgtgtaatgaccattggagaaatgctacgatctttt

SEQ ID NO: 683655 - DNA, 145 bp, Homo sapiens
ctggcagggagcctggtggggtggcggagggggagactgtgccgtggagggcctcgccatgtcctgctgcccggtcaaaatgcagatcttcgtgaaaacccttaccggcaagaccatcacccttgaggtggagcccagtgacacc

SEQ ID NO: 683656 - DNA, 101 bp, Homo sapiens
ggcgctggagagggggcgctgagctgttgggaactgataaatttcaaacggaagagagtggcagcatttagaaagaatctaattgaaatgtctgaactgga

SEQ ID NO: 683657 - DNA, 50 bp, Homo sapiens
caaggcatttatatgagtccaggagaaacaaaggcagcgctgccctcggg

SEQ ID NO: 683658 - DNA, 50 bp, Homo sapiens
ggaggaggagccgccgccgccagaagatgactcaagaccggcctctgctt

SEQ ID NO: 683659 - DNA, 97 bp, Homo sapiens
ctgatcaaggcgcagcccgacgaccccgagtcgcagatggcctgccacgttttccgcgccacagaccccagccaggatccaaactactggatacagg

SEQ ID NO: 683660 - DNA, 100 bp, Homo sapiens
gccgctcagggccacgatccccttccagctgcagcagccgcaccagcgccgggacgggggtggccgtgcaggttaaccgagagatagtgtccggcatgaa

SEQ ID NO: 683661 - DNA, 82 bp, Homo sapiens
tcctacgcctcctcggcagtcacctttccaggaatcaagggcgaccattgacgaggtggagacggacgtggtggagattgag

SEQ ID NO: 683662 - DNA, 98 bp, Homo sapiens
aaccggtcgaaaaccgtgtatgagggattcatctcggctcagattgtgattgctagcattatgtgcagttacaataaaaatgactggacggaacttgc

SEQ ID NO: 683663 - DNA, 76 bp, Homo sapiens
gaacccaatcctctggaatgtggggtgtcacacctgctgccctacttctacctcctctacttcaccgcgctgctgg

SEQ ID NO: 683664 - DNA, 96 bp, Homo sapiens
tactttcctggcacaggagacttgagggcggagtacgtccagcttgttactgaacttcgaatgacaagagccattcagcctcagatcaatgctttt

SEQ ID NO: 683665 - DNA, 75 bp, Homo sapiens
ctgagccgccggaggaggagccgcgggcaacgagcaaaaaatcccagaagtgggatgaaatgaacatcttggcga

SEQ ID NO: 683666 - DNA, 100 bp, Homo sapiens
gtcggttctgcgtgcgctgccggacgaggctcccgccgccgattgacccgcgctccgcccgtagtcgggccgaccctacagcttggggcctgggctcctc

SEQ ID NO: 683667 - DNA, 98 bp, Homo sapiens
cgagcgggagttcgaagagttggatactcagcgtcgctggcagccgctgtacttgggttctccaaaaaatgtggaatcctttgcatctatgctgagac

SEQ ID NO: 683668 - DNA, 100 bp, Homo sapiens
gtcaattaaggaattctttcgaggattaaatattcgacgtcaagcaattaaagaactgcctcaatttgccactggagaaaatcttcctcgagtggcagat

SEQ ID NO: 683669 - DNA, 90 bp, Homo sapiens
tgaaagtaaacctggtgactcacagaaccttgatgagtaacgaaagaggctttgaaaatgtagaactgggagtcataggaaaaaagaaga

SEQ ID NO: 683670 - DNA, 83 bp, Homo sapiens
ctggctctttcctcttcgccttaaattcggtgctggagaatctggtaaaagcaccattgtgaagcagatgaggatcctgcatg

SEQ ID NO: 683671 - DNA, 51 bp, Homo sapiens
ctgacgacctgctacaacagaagtatcgggctttccgggatgacgatggac

SEQ ID NO: 683672 - DNA, 100 bp, Homo sapiens
caagcctagcagctcgggcaaggatggtggaggcgagaacactgaggaggttgtaaagaagaaagttctaccctttctgtcaaaatgaagtgtgatttta

SEQ ID NO: 683673 - DNA, 83 bp, Homo sapiens
ccaaagtacagcttctagcgacccccaggagtactgagtgaacaagcaagtttccgttactatggcaatgacggcagggacta

SEQ ID NO: 683674 - DNA, 100 bp, Homo sapiens
tcatctcagaaggcaatgagaccgtggaagacattgctgcccgcctcaacatcccagtcagccaggtgaaccccagaggagaggggccactgaaaacttc

SEQ ID NO: 683675 - DNA, 83 bp, Homo sapiens
ccgctatccagaacctccactctttcggtagattttcgttccgtcacccaggctggagtgcagtggtgtgaccttggcttgct

SEQ ID NO: 683676 - DNA, 96 bp, Homo sapiens
gcgattgcgagaatgaggaggacaacagctacaaccgggggaagtttatctcgacaatgctagttgcagtctgtgtgaccctgaccaagttatttt

SEQ ID NO: 683677 - DNA, 101 bp, Homo sapiens
ctatgccttgagctcctcaatgtgggtgtagagtctaaactcatccttaaaggggtcatactgctggtgtgggcaataatagtgaaggtggaagaggaaag

SEQ ID NO: 683678 - DNA, 50 bp, Homo sapiens
aggatgtgagcaacacgggaccgaggctgataaaataccagtaatgcgtg

SEQ ID NO: 683679 - DNA, 87 bp, Homo sapiens
aatacgtggttggagagctcatctggaattttgccgatttcatgactaaccagtgaaggaaaatcacctcggcagtgtttgaaggaa

SEQ ID NO: 683680 - DNA, 100 bp, Homo sapiens
ggacagtcaattccaggaggcacgcagaaagctcagccagaaactgcgggaactgacagagcaaccacccatggaggcctatgagacacgtgaagatatc

SEQ ID NO: 683681 - DNA, 100 bp, Homo sapiens
gcatggtgggcgtctacaacggcaagaccttcaaccaggtggagatcaagcaacctgcggcagatcttccagtccctgccgcccttcatggacatcctcc

SEQ ID NO: 683682 - DNA, 75 bp, Homo sapiens
agtggtcatcgctgtgaagctgcagaacacaccacagccatcagcactggaatgcaaagaccagaacaaacagaa

SEQ ID NO: 683683 - DNA, 100 bp, Homo sapiens
aatgtgaaggtttcctggagaaaaacagagacaccgtctatgacatgctggttgaaatcctgagagcaagcaaggagccccgcaagtgagccagccactg

SEQ ID NO: 683684 - DNA, 83 bp, Homo sapiens
ctggactactgttgaaaaaatttccagtgagggaaggtctgtttctctaacaactttttatcgaacagcgaggaatatcatga

SEQ ID NO: 683685 - DNA, 75 bp, Homo sapiens
ctgcggccccggctccggcccccgcaggagcagtgagtgacctgcaggaagaaggcaagaatgccatcaactcac

SEQ ID NO: 683686 - DNA, 98 bp, Homo sapiens
agaagacctatttccggaacaattacaactatgatgtaggtgcaaaaaactacagacatctctgtgctgtttattacaacaagaatcctgggtttgag

SEQ ID NO: 683687 - DNA, 83 bp, Homo sapiens
ttctgcgccatcctgcaccgccaccggcccgacctcatttcaggacctcaaggggctcggctatgagaaggggaagcctgtgg

SEQ ID NO: 683688 - DNA, 139 bp, Homo sapiens
ctctgcccttggagaactgctaacctagggctactgttgattttgactatcttcttagtggccgccctggtacctgacagtgtaaagaaggagctcctacaaagaataagaacattccttgctcagcatgccagccttt

SEQ ID NO: 683689 - DNA, 74 bp, Homo sapiens
aagcctttgctatgatcattgacaaactggaagagccaaaagaatgcaatggtgtaaagattccagttgatgcc

SEQ ID NO: 683690 - DNA, 82 bp, Homo sapiens
aactgttctgagcaggaagggcagcaggaggaggaagccaagaatctggtgagcgaagccatcgcagctggcatcttcaacg

SEQ ID NO: 683691 - DNA, 82 bp, Homo sapiens
ctgcgcttgcgctgacagacgcaagatggcggacagtgcggaactaaagagaaaggagttcatgaaggcagaaatgcctggg

SEQ ID NO: 683692 - DNA, 100 bp, Homo sapiens
cctgcacacagccaaagtctgcaaagacagaaagaatttactttcaggttttcttacctaaagggagcaaagagaagagcaaaccaatgttcttttgcca

SEQ ID NO: 683693 - DNA, 75 bp, Homo sapiens
ttgatcccaagttgtcgacgaccgacagggtggtgaaaggatatgtgatggcgtccagtttggagctgggataag

SEQ ID NO: 683694 - DNA, 75 bp, Homo sapiens
cgaagagctctcctccttcttcctcaactatctcgctgacacgcagaccaaccctggaatggtccccagccatgg

SEQ ID NO: 683695 - DNA, 90 bp, Homo sapiens
ctatgaatgctacttggatgcctcttaaggtctcctctgagcctccggcctccataagacccaaaacagatgacacctcttcccagtccc

SEQ ID NO: 683696 - DNA, 83 bp, Homo sapiens
cgcgtgtctaggtgagtcgcggtgggtcctcgcttgcagttcagcgaccacgttcatagccctgatgaagcaagttactctgc

SEQ ID NO: 683697 - DNA, 75 bp, Homo sapiens
cacacagccctggagactggaggtgtggcctgaagtcactgatcctgagaagttcgtgtatgaagatgtggctat

SEQ ID NO: 683698 - DNA, 51 bp, Homo sapiens
cttcgagttcaaagagaccctcggaacgcggcctcgagtatcctccacaga

SEQ ID NO: 683699 - DNA, 100 bp, Homo sapiens
gacgctgctcaaaacctcgctccggaaaggggacacctggagttccatctggaatatgacaaattagaagaacggcctcacctgccatccaccttcaact

SEQ ID NO: 683700 - DNA, 75 bp, Homo sapiens
gggtatataacctggacttcaatccacctcatgtacatgatggacgggcggcatcatcaattctggttggtgcta

SEQ ID NO: 683701 - DNA, 75 bp, Homo sapiens
caaagacatctgtatgtgctgtcaggaagtcgtgcagtttctagacaagaagcatccaaaccactatcaagtcta

SEQ ID NO: 683702 - DNA, 51 bp, Homo sapiens
gatattatcatagttgctgcaggtgagcccattggcaggggtaccaaagtg

SEQ ID NO: 683703 - DNA, 95 bp, Homo sapiens
ctacccaagtacatatgatttcagctgcaatggcagaaatgagccgtcagactgctacagcattacctaccggtacctcgaagtgtccaccatcc

SEQ ID NO: 683704 - DNA, 76 bp, Homo sapiens
ccggcgtccagttcactactaaagtcaggtccaatgatgcatcagcagcctccttctcagcaatacaatatgccac

SEQ ID NO: 683705 - DNA, 83 bp, Homo sapiens
catatcataagtggaattttggagatattcaaagctgtacccaagaattaaaccaagacaaaggagcttggcctgaaacttcc

SEQ ID NO: 683706 - DNA, 82 bp, Homo sapiens
cgacccgacgcaagatggcgagtaaagagagtgtcgtgaaaactacccctaaaagccaaaatgggaaaggaaaagactcata

SEQ ID NO: 683707 - DNA, 100 bp, Homo sapiens
ctcggccctgcgccgcgacaagtacgtggccgagttcctcgagtggggtgtcatggagaaactccagctgggcccagagattctgcagcgggaaaatcca

SEQ ID NO: 683708 - DNA, 98 bp, Homo sapiens
aagcgcggctgctgtcgcccagcgccgccccgtcgtcgtctgccttcgcttcacggcgccgagccgcggtccgaacggggtccaggcccaagtcctgt

SEQ ID NO: 683709 - DNA, 100 bp, Homo sapiens
acttactgttaatgtagtagcagtgattgttgcttttacgggcgcctgcattactcaatggtggtgctagagaatgaattgatgtatggggttccttttg

SEQ ID NO: 683710 - DNA, 98 bp, Homo sapiens
ccagccaatcattaaagaaattttaaaaaattttccaaaagagagatgttctttaaggaaaaacagtagtgctctgcatagtttactgaaacgagtgg

SEQ ID NO: 683711 - DNA, 90 bp, Homo sapiens
gagcaacctctttcaggctttaataggaaaatcctgccttgcttcgttgggcctatgcaagaacaataaatgtctatcctaatttcagac

SEQ ID NO: 683712 - DNA, 75 bp, Homo sapiens
gaataagctggacaccaaatacccgtacggaacttagtgatttggcccgtgaccctccagcacaatgttctgcag

SEQ ID NO: 683713 - DNA, 75 bp, Homo sapiens
tgatgccagaggtcaacaaggttctggacaagatgaagtctttctgccagagggtctccccagacacccgagcac

SEQ ID NO: 683714 - DNA, 75 bp, Homo sapiens
gcctcaccaaggagtacgaccgcttgctggaggagcacgcaaagctgcagggcgaccattgacgaggtggagacg

SEQ ID NO: 683715 - DNA, 73 bp, Homo sapiens
ttagatgatccaagtcaccaagaaattactgtctcaagtgatacggaaaattgcctaagaattatgacccaaa

SEQ ID NO: 683716 - DNA, 110 bp, Homo sapiens
ctcctcggcctcatcggaacatttccaccaccattactcctttggaaactggacttaaccaccaccatgtcgagcaaaagaacaaagaccaagaccaagaagcgccctca

SEQ ID NO: 683717 - DNA, 100 bp, Homo sapiens
ctgccatggacgacgaggaggagacgtaccggctctggaaaatccgcaagaccatcatgcaggaagctcttcgtgggcggtcttgactggagcacgaccc

SEQ ID NO: 683718 - DNA, 90 bp, Homo sapiens
catacccttcgggagctgatgtaccctttggacctccgcttgacatacagatactgcaccagtttggcttcattaactatgaagtaggag

SEQ ID NO: 683719 - DNA, 100 bp, Homo sapiens
aagttttctactgtaaagtcaccaacgagatcttccgccactacgagagcggagagtttaataggcaagaaggaagggagaagacagaaggaagacgctc

SEQ ID NO: 683720 - DNA, 100 bp, Homo sapiens
ccaggagtcatgagcgacagcggcgagcagaactacggcgagcgggacatagctcgccttttgcaagaaaaggagttacaggaagagaaaaagagaaaga

SEQ ID NO: 683721 - DNA, 82 bp, Homo sapiens
cttattcccttcaattcaagtaacagagccttcatgttgtttgcattcacttggttggaaggggagagagaaagagaagcag

SEQ ID NO: 683722 - DNA, 90 bp, Homo sapiens
gtcgccgcgtccttggctggcgtctagtatgttcaacacaccaggaatgcagagcttgttgcaacaaataactgaaaacccacaactgat

SEQ ID NO: 683723 - DNA, 128 bp, Homo sapiens
caaaatatcggagaataatttctttctcgctgatcgcctaacttctactgacgaagcttggaagttgcagaagcattggggctttccagctctcacagaaccttcagcatccccagctgccggtcttg

SEQ ID NO: 683724 - DNA, 97 bp, Homo sapiens
caggggccaacaggaattcatgtgctcatcagtgatgagccttatacaggatgctgtgttctttgctcctttgtgaatgtctgttgctggtagctgg

SEQ ID NO: 683725 - DNA, 51 bp, Homo sapiens
tgacggagaatccgtttcaggaaaggacggcggacccagccgagaagacgc

SEQ ID NO: 683726 - DNA, 83 bp, Homo sapiens
cggccggtgagcgtcccgcgctggagccctcagaggcgggcccgtcaggtgtggacactgccagcggctgcagccgacttgga

SEQ ID NO: 683727 - DNA, 100 bp, Homo sapiens
tctcctgcacacgcaggatggcgtggtgcaccaccacggcctcttccagccaggaggaagaagaggaggatgaggaggctgcctcaaggtactatgttcc

SEQ ID NO: 683728 - DNA, 99 bp, Homo sapiens
atgagttctggagggcatcaacatttggtcagctgtttggagacattgcagaaggctctcaaagacatcaaggagcacgtgaaacagctagagaaagcg

SEQ ID NO: 683729 - DNA, 100 bp, Homo sapiens
acttggaagcaatgtttgaacaaactcgaagaacagctgtggaaagaagttgcaaaacactggattccgaaatttttaacctctgaagctgtgccttcac

SEQ ID NO: 683730 - DNA, 83 bp, Homo sapiens
cgcggattcgccgaggcaccgaggcactcagaggagtgcaaatggtcaagaaaaggcttcatccggacgaggtggtgcattgc

SEQ ID NO: 683731 - DNA, 101 bp, Homo sapiens
ttcaggaaggcatgaatatgcattcagcttcgagcttccacagacttggagagaggcgatttcctctcagaagagtggagggagcgaatcgccaacacgag

SEQ ID NO: 683732 - DNA, 75 bp, Homo sapiens
ggctgtgctgcgcgacccccgcgcatgaactcctctttcctaaaatggagtcgagtaaaaagatggactctcctg

SEQ ID NO: 683733 - DNA, 74 bp, Homo sapiens
agtggtactaggattatacattgtaagaggtgacaacgtgttcaggtggaaggttataattacactggcatggg

SEQ ID NO: 683734 - DNA, 100 bp, Homo sapiens
gatgtgtgcaataatgaatcattagtatcggacacagaaacttacagatttatggtaatggaaagactaggaatagatttacagaagatctcaggccaga

SEQ ID NO: 683735 - DNA, 74 bp, Homo sapiens
gggaacatggcagcctttgatatgaatgaccctgaagcagtagtatccccagattcagagcattcttcactcca

SEQ ID NO: 683736 - DNA, 82 bp, Homo sapiens
cttcggcagtccacccaccgccgccgcctcccagagccactgacaagactttaagcaagagacggagagttaacatctaatc

SEQ ID NO: 683737 - DNA, 83 bp, Homo sapiens
gttgacaaactgggaaaaagtctacagggtgatccagcagcagctctgcttgagctgatgaacttattagtcctaaagacatt

SEQ ID NO: 683738 - DNA, 81 bp, Homo sapiens
ctgcgggtgcctttgaaaatcaacgacaacttgagcacaggagcatattaatgaaaagtgccataaactgaaaaaccaaac

SEQ ID NO: 683739 - DNA, 90 bp, Homo sapiens
cgcgaggccgcagagctaaatgggggcctctccagggagtgctctgttcacggctccatcgctgttagctgccctgaggatctgtgtttg

SEQ ID NO: 683740 - DNA, 100 bp, Homo sapiens
ctgcacccacgaatctgcccacccctcctgtaacccagcctgtttcacttcttggttttttgcatgtctgacacccatgactccacctggaccttatggc

SEQ ID NO: 683741 - DNA, 46 bp, Homo sapiens
agcgaataaagtttatcacgccgggcgtgagtgcatctccatccac

SEQ ID NO: 683742 - DNA, 50 bp, Homo sapiens
cgaacaatgaaatacatgtggccattgcacagaaaactgaatctgtagat

SEQ ID NO: 683743 - DNA, 100 bp, Homo sapiens
agagaatctgcctcctttaacttatgaccagatcgtaaagctgaaaattgaaatcatgaaagtagacaggactaaactgaagaagacacctactgaggct

SEQ ID NO: 683744 - DNA, 100 bp, Homo sapiens
cgacgatctccatatttcattgcaaggaacttaagagatttgagaacttcataaaatctcgtcctccttttgatgttgtcattgatggtctcaatgttgc

SEQ ID NO: 683745 - DNA, 135 bp, Homo sapiens
aaaagagtctccgcggtggaggtctgcgttgctcttgcttttcctcgctggggtgtacgggccgcttgaagatgccattgaagatgaggaagaagaatgtccatcagaggaaacagacatcatctccaaaggaga

SEQ ID NO: 683746 - DNA, 100 bp, Homo sapiens
gtctgccaccatcctgggttgacaattctacacaaggagaggcacagaaatggacaccagaaataaggcccagctccttgtgctcctgactcttctcagt

SEQ ID NO: 683747 - DNA, 100 bp, Homo sapiens
gtcgcccgaggtcccagcggctctaccagattgttgtggaggcctctcacccgcacaggatcttgtgctgtgaagacatttcccaagtgcttcatgttag

SEQ ID NO: 683748 - DNA, 95 bp, Homo sapiens
tggcaacggccaacttcggcaagatccagatcgggatttacgtggagatcaagcgcagcgatggtatacatggactggtacgagaagttccagga

SEQ ID NO: 683749 - DNA, 75 bp, Homo sapiens
cggtagcactcgggccggcggacagtgagggcgcgaccaatgatgcgagctcagagtcaatagcatccttctcta

SEQ ID NO: 683750 - DNA, 82 bp, Homo sapiens
taggaagtgccatagtttgggttataaatgtgttcagagcaacattgttttgttgacacaagcatttagaagaaagtttgtg

SEQ ID NO: 683751 - DNA, 100 bp, Homo sapiens
gaagaaagcatcgtcctaggaatggatttctcctctaatgacagagttgaaactgtgggacagccagacagaagagatagcataggagtgtgtgcagaaa

SEQ ID NO: 683752 - DNA, 85 bp, Homo sapiens
agaccctggagcctcagttggaagcagccgatccagcctgcggagcctgtggggcagggaaattcaactactgaggaggttacgg

SEQ ID NO: 683753 - DNA, 100 bp, Homo sapiens
caagaggctacatggcatgctgcggggcctgacacatttagggaagggcacccttaccctctgcccctaccacagcgaccggcagcttatgagccaggtg

SEQ ID NO: 683754 - DNA, 75 bp, Homo sapiens
attttcgtgccatcagcaaaaagctgaatttggacatccaggcctgctcggccgcctggaaggctgacggcgtgt

SEQ ID NO: 683755 - DNA, 82 bp, Homo sapiens
gctggaccggcaaattaaagcaattatgaaagaagtcattccttttttgaaggttaatacaatctgttggaatgacactgga

SEQ ID NO: 683756 - DNA, 82 bp, Homo sapiens
accgaagcgttcgtatctggaagatgtgccggtgacttcagcgccagtcaccgcgttctaccgcggctgcatgacactggag

SEQ ID NO: 683757 - DNA, 100 bp, Homo sapiens
atgacattgaagagtttgagaacattcgaaaggacctggagaattcaaggaagccttctccctatttgataaagatggcgatggcaccatcacaacaaag

SEQ ID NO: 683758 - DNA, 100 bp, Homo sapiens
catactctgttatagataaacaaggttgacctgacagttcaagaaaaggagaaatatcttaatgtgtctcgctggttttgtcacattcagcattatccag

SEQ ID NO: 683759 - DNA, 75 bp, Homo sapiens
actgcattgagtttttaccatatggctggagcatctcttgataaaggctgtaccagtgcaggtcctcactttaat

SEQ ID NO: 683760 - DNA, 52 bp, Homo sapiens
ctttcttatcctggcccaagatccagtctgcagatctccaggggagcccacc

SEQ ID NO: 683761 - DNA, 75 bp, Homo sapiens
gcactgtccactttctatctccagcagcatattaatttgcacatgtagagacggggtttcgccatgttggccagg

SEQ ID NO: 683762 - DNA, 82 bp, Homo sapiens
ctcgctctaaagacggaaccgccacagcactcaatcccttaagctcctaggatttttagatgttgaaaatactccctgcgcc

SEQ ID NO: 683763 - DNA, 80 bp, Homo sapiens
cggccacttttgccttcccgggtgagaagccctaccactgcaactgggacggctgcggctggaagtttgcgcgctcagac

SEQ ID NO: 683764 - DNA, 95 bp, Homo sapiens
acttgaaaaggagaagagaggagcagtattgacaacaacacaatatggggttgactttgataaagattgtgaagatcctgaatataaaccactcc

SEQ ID NO: 683765 - DNA, 75 bp, Homo sapiens
agaaggccctggagcctacaggccagcttgccttgcgccatggactggcagccagacgagcagggcctgcagcag

SEQ ID NO: 683766 - DNA, 82 bp, Homo sapiens
ggccaactgtgcccaccagctccccatcgcagaggccatgctgacctacaagcagaagaggatttttagactctgaggagca

SEQ ID NO: 683767 - DNA, 50 bp, Homo sapiens
tgcgacggaaatgtgtcatcgaaagccagtatcagaagctttgagatcag

SEQ ID NO: 683768 - DNA, 100 bp, Homo sapiens
ctgcgggatcttcaaccacctcgagcggctgctggacgaagggacagtatgatttggtgaaatgcctggctcctattcgagaccccaagaccgagcagga

SEQ ID NO: 683769 - DNA, 144 bp, Homo sapiens
aggacttcttcttcaccgccaggacctccttcttcaggagagcgccccagggcaagccccgctccggccaacaagtgtcatggagaaactccagctgggcccagagattctgcagcgggaaaatccaaggcttatttatgccag

SEQ ID NO: 683770 - DNA, 75 bp, Homo sapiens
gacgcggacagcgggctggagcctgacgagctggcggatcactgtgtccactactatgatcttcgtaacactaaa

SEQ ID NO: 683771 - DNA, 100 bp, Homo sapiens
atttatctagaggaaaacccagagaaaagtgaaacaattcaggacacttttggtgaggattcatcaacctccagtatgatgtctgtgaactttgatgttc

SEQ ID NO: 683772 - DNA, 100 bp, Homo sapiens
cccagtgctgcctgcattcgcggggcatgttcccgaggctgtcaccaggaagcatgagtgggaaaagcatgggacctgcgccgcccaggtggatgcgctc

SEQ ID NO: 683773 - DNA, 73 bp, Homo sapiens
gaagctctaagtacactcgtcttgaatagggccatgctatgatagtggaagcttatccaaaataatagatcca

SEQ ID NO: 683774 - DNA, 83 bp, Homo sapiens
tctgtcttcggtggactccttcggcagtccacccaccgccgccgcctcccaggaagccagttgagggaagttctccatgaatg

SEQ ID NO: 683775 - DNA, 100 bp, Homo sapiens
gatattccagattgcccctgtggtgccaagagaatattggaattccaggttgctgctaaatgggaaaaacttagcttagtactgatagatgactttattg

SEQ ID NO: 683776 - DNA, 82 bp, Homo sapiens
ggtccctcaaagcgggaaatgcgtcaaaggctgctttgtaccgcctcagtggagactggaatcccttacacattgatcctaa

SEQ ID NO: 683777 - DNA, 50 bp, Homo sapiens
ctgctctgaggacaccatcccttcccaagtcaccaggagactaaagtcca

SEQ ID NO: 683778 - DNA, 50 bp, Homo sapiens
gtcctgacactgtccataaatgtgcagagtttgctgaatggtgcttagag

SEQ ID NO: 683779 - DNA, 83 bp, Homo sapiens
agaacctgcccttcgccaaggagatcgtctctctcatcgaggcccaaaccgccaagacaatgcagatcttcgtgaagactctg

SEQ ID NO: 683780 - DNA, 100 bp, Homo sapiens
atgtgtcttccattctaacatccatacagactgccagttagagaaattgcccatgaggccccgggaccggtcccgtgtgattgatgctgccaaacatgcc

SEQ ID NO: 683781 - DNA, 90 bp, Homo sapiens
ccgatgcagtcttacagatgcaggtatgggaggacatggctatggtggagctggtgatgcaagttcaggttttcatggtggtcatttcgt

SEQ ID NO: 683782 - DNA, 50 bp, Homo sapiens
caatcttctcctctggggatgacctggctccagggcccacaacggcagtg

SEQ ID NO: 683783 - DNA, 96 bp, Homo sapiens
cgcaaagttctttccacagctggcgggaggagactctcaagttctctttgtaaagaatccttttctggtcaagtttcttcttcatcactcatgcca

SEQ ID NO: 683784 - DNA, 74 bp, Homo sapiens
cggcagcggagggacggcagtctcgcgcggtaagaatgattgatgttggctgatattggagtgctcattcacat

SEQ ID NO: 683785 - DNA, 100 bp, Homo sapiens
gctcttctctgttcgacatggcccaattcgagcggctagaatcttgcctgctccacagtttggtaagaaaactgaagttcagaaaagggaggggactgac

SEQ ID NO: 683786 - DNA, 89 bp, Homo sapiens
cacgccgtcattgacatcaatgccttcccagactacgtctactttgagaactcctccagcaacccatacctgatccggagaatcgagga

SEQ ID NO: 683787 - DNA, 90 bp, Homo sapiens
gtgcagagcgccgtctggagccgagatggagccctggtgggcacggcgtgcaagctcgacacttcatgcaccagatcatcacagggatgt

SEQ ID NO: 683788 - DNA, 88 bp, Homo sapiens
gccgcagtgttcgtgggatggggcagcgggctgcagctggcggccggaatccgcgcgcagcccggttttagagaacaacttgtaatgg

SEQ ID NO: 683789 - DNA, 75 bp, Homo sapiens
aacgacacctccaacttttgccctggattacagggtcctatcggtggtgctaatagagatatttctattctccag

SEQ ID NO: 683790 - DNA, 100 bp, Homo sapiens
ccatgtgctatgcctgtaacaagagcatcacagccaaggaagccctcatctgcccaacagacataaacgtgacccaaaaaagcttcaattttgccaagaa

SEQ ID NO: 683791 - DNA, 96 bp, Homo sapiens
atgagctctaagtacatgcccagtggatactccatgtgacatggtttctccctatgttacgtggatgtttgtaacatctttataaacaacgagtgg

SEQ ID NO: 683792 - DNA, 74 bp, Homo sapiens
aagaaccagctaagccagctgtccaggcaccctggtccactgcagatttggagtccaggaatgagactaagcat

SEQ ID NO: 683793 - DNA, 75 bp, Homo sapiens
ggaagacccagtacagctggacgtttgccgtccactctgaggtgctgactctggctgcccaggagctgtctaggc

SEQ ID NO: 683794 - DNA, 90 bp, Homo sapiens
cagagctgcacaaagggaaagggttcacagaatgattgcagagttcaagctgatccctggacttaataatttgtttgacaaactgatttg

SEQ ID NO: 683795 - DNA, 100 bp, Homo sapiens
caacacaacaatcagatggcaccagggactggcagctccactgccgtcaactcctgttctcctcagagcctgaaaaggaaccagtgatttacttgcttgg

SEQ ID NO: 683796 - DNA, 75 bp, Homo sapiens
ttggatccacttccccatctgtaacgaggtgttgagacgaggattcaggagcagttccagaaaaatcccgacagt

SEQ ID NO: 683797 - DNA, 75 bp, Homo sapiens
cagccaagctcgtggcctgcctctgcgtgcaggccacaagaggaagctgaatgaagaggacgccgccagcgagtc

SEQ ID NO: 683798 - DNA, 82 bp, Homo sapiens
ttcacgcacgggatccagagcgccgcgcacttcgtcatgttcttcgcgccctggagggccctcctggacccgggagcggacc

SEQ ID NO: 683799 - DNA, 74 bp, Homo sapiens
atggcatagatcttgggaaaattgcgaggactacactgaaacattcaaatgtgtggcgaaaacataattttcat

SEQ ID NO: 683800 - DNA, 82 bp, Homo sapiens
ctggagcctcagttggaagcagccgatccagcctgcggagcctgtggggcaggccaaacttccagatctgcaaccatttcct

SEQ ID NO: 683801 - DNA, 75 bp, Homo sapiens
tccgctctgtctccgtggtcacaggcagcgagcagaagaggaaggtgctgggcagctggtggaatttttgaagaa

SEQ ID NO: 683802 - DNA, 100 bp, Homo sapiens
aatggggttgtgatggcccaggttcttcaaaagattcagaagaagaagttgtagaaggagagaaggaagtcgaggctttgaagaaaagtgcggactgggt

SEQ ID NO: 683803 - DNA, 97 bp, Homo sapiens
gcagaggctgagggagatggagaaggcgaaccccaaaactgggctagttgcacatagtgatttagatgaaagagctattgaagctttaaaagaattc

SEQ ID NO: 683804 - DNA, 75 bp, Homo sapiens
tttgaggacacagcctcgctggaggcagtttctggttgctgcttttgctcagaggacatccatgaccctaatggt

SEQ ID NO: 683805 - DNA, 100 bp, Homo sapiens
ccggttggtagagggtttgagtccgcatcgccacagctgaaggctgcgagggactaagagcagacggggatctgatgagcttctttcttctggcatcatt

SEQ ID NO: 683806 - DNA, 111 bp, Homo sapiens
cgggtccagcttcaggagtactggcggaggggctggacgttccacgccaaaggtactccaaagattcaggtttactcacgtcatccagcagagaatggaaagtcaaatttc

SEQ ID NO: 683807 - DNA, 100 bp, Homo sapiens
gctttccttttccatcaacaggggcaaatcgaagtagagagcgaaaccatcttcaagttagcagcgtttattttacagggcccaatgtaaaggctgttgc

SEQ ID NO: 683808 - DNA, 75 bp, Homo sapiens
agtgcgcaaacttgacactcaccctgaccgaaacgaggatgcagtcaatcagatggccgttactccctttccagt

SEQ ID NO: 683809 - DNA, 98 bp, Homo sapiens
aggggacatcgtgtccctgtacgcggagggctcggtcaacggcttcatcagcaccttgggttggtgacaaagttcctgctgatataaggttaacttcc

SEQ ID NO: 683810 - DNA, 100 bp, Homo sapiens
gtggtttcaggatatctgaagaaaatgaaacaacatgctacatgggaaaatggagttctccacctcagtgtgaagataacacttacttgtgcctggctgt

SEQ ID NO: 683811 - DNA, 75 bp, Homo sapiens
agtccaagtcaaacgcagaaggactgcctcactgagcaaccaagagtatctcagcgtttgagtcagccaggagta

SEQ ID NO: 683812 - DNA, 100 bp, Homo sapiens
tggtggacatcacaaagcaacctgtggtaatggagagtgaagagttcatgttgcttccagccaatcaactcattgatataatatccagtgatgagctaaa

SEQ ID NO: 683813 - DNA, 83 bp, Homo sapiens
gtctgtgagacctcacagaagagcacccctgggctccacttacctgccccctgctccttcagtgagaactcaacagaggcaaa

SEQ ID NO: 683814 - DNA, 82 bp, Homo sapiens
aagaaacagacattcaacatgattgcatttgaagttaaaaggactactgactcaaactctgcctcttgagttcatggttcac

SEQ ID NO: 683815 - DNA, 100 bp, Homo sapiens
aaaacaagctcagggctcccactgattctacattacggaaactttgaaaagcaccccaaagaactgatcagggggcccatatggcttcgaggttggaaag

SEQ ID NO: 683816 - DNA, 75 bp, Homo sapiens
actgatcatctgtccgctttctgtgttaagcaactggattagatggagtttcactgtgtcagccaggatggtctc

SEQ ID NO: 683817 - DNA, 82 bp, Homo sapiens
tttgacttcatcatcaccattgggcactcgaggctggagaggcgggagatttttgagcagcacctgaagagcctgaagctga

SEQ ID NO: 683818 - DNA, 83 bp, Homo sapiens
ctgcaggccctgcagaccctgtggtccacgcgggagcggaagcaggtcgcctgcgaggccgctggccaggcctgagcctctgc

SEQ ID NO: 683819 - DNA, 82 bp, Homo sapiens
gaggaggctcatgcgggatttcaagcgccctgggcgctgcctatggcacagccaagagcggtaccggcattgcggccatgtc

SEQ ID NO: 683820 - DNA, 74 bp, Homo sapiens
tttgttaaggattccaagtaactcttatttgctccccaggtgtgtcctggtagacaactgctcccaggagctgg

SEQ ID NO: 683821 - DNA, 100 bp, Homo sapiens
ggctgcccacgggggctccgcggcgtcctcggcgctgaaggggttaattcaacagttcaccaccattaccggtggttagctcaaccaatggagagctgaa

SEQ ID NO: 683822 - DNA, 51 bp, Homo sapiens
ttcccgacgctgagggcagccccgtccaggatggagtctcgctctgttgcc

SEQ ID NO: 683823 - DNA, 83 bp, Homo sapiens
tttatatagagatgtgatgttggagaactacagaaacctcgtctccctggctggagaatgctggaggagaccttaaggatggc

SEQ ID NO: 683824 - DNA, 100 bp, Homo sapiens
cagataagccaggataatctccctatcttattatgagtccacaggtcctggctaccctgggaagagacaagaagtaaatgaagaaagaggaagattccag

SEQ ID NO: 683825 - DNA, 90 bp, Homo sapiens
accatgacaggcatgttgtataaatgtacagagctccacctggaggggaacttcctacaccgcctccccagcgaggtcagtgccctgcag

SEQ ID NO: 683826 - DNA, 75 bp, Homo sapiens
aactctttgggtgctgctataggctcagccctcagtggatttggttcatcagaatttggtgttcacttggcagaa

SEQ ID NO: 683827 - DNA, 100 bp, Homo sapiens
aagagcagtgggggttgctgacccagaggagagttctccaaacatgatcgtttactgcaaagtcttagtggtgcaatggctagtataagcgtgcgttcga

SEQ ID NO: 683828 - DNA, 73 bp, Homo sapiens
gaagatgttgatggagaagctctaagtacactcgtcttgaataggtcttgtggatgagcagcagaaagttcgg

SEQ ID NO: 683829 - DNA, 75 bp, Homo sapiens
caacaaacaccagcgctttggtttgctggcctagacctgaactcttcagataatcagagtggaggaagtacagcc

SEQ ID NO: 683830 - DNA, 98 bp, Homo sapiens
cgggggctttgtgctgggcctgctcttccttggggccgggctgttcatctacttcaggaatcagaaagactgcatccaggtggatccccccgagcggc

SEQ ID NO: 683831 - DNA, 100 bp, Homo sapiens
ccgagctccagccgaaggagaagggggggctcctcgcacctaccccagcaactcaaattcaccacctcggactcctgcgaccgcatcaaagacgaatttc

SEQ ID NO: 683832 - DNA, 83 bp, Homo sapiens
gcgctgcccgaggggagcaaggacagattgcaggaggagatgcttcagagagaggaagccgaaaacaccctgcaatctttcag

SEQ ID NO: 683833 - DNA, 50 bp, Homo sapiens
gcagcaacagcaagctcccgggcagctctgcggccgtcacgatgttctgg

SEQ ID NO: 683834 - DNA, 74 bp, Homo sapiens
ctcaacacggatatcagcatcctgtccttgcagggctgatggagttatgagaacaatgaacacagaaaaactcc

SEQ ID NO: 683835 - DNA, 75 bp, Homo sapiens
gtcgctaaagcggaggagggtgcttcgtatcgcaagatcgaccttcagaagatgcccttggggaagctgagcaaa

SEQ ID NO: 683836 - DNA, 83 bp, Homo sapiens
ctggaagctactactacgtggtgcttggaaagccatcactggtgcaagctatatttaacggagatcctgatgaagttcgagca

SEQ ID NO: 683837 - DNA, 101 bp, Homo sapiens
atctatgcttacggttttgagaagccttccgctattcagcagagagctattattccctgtattaaagcctagtggaggccagtataagattcagatctttg

SEQ ID NO: 683838 - DNA, 100 bp, Homo sapiens
tggatacaactcagatcttaagtagtgatatttctcttttgtctgcccctattgtaagtgcagatggaacacaacagattgccttctctcagcacagcaa

SEQ ID NO: 683839 - DNA, 101 bp, Homo sapiens
ccggagctgggcgcggattcgccgaggcaccgaggcactcagaggaggtatgtgaggagcagcgctgtgaggaggaagtcttccccctggccatgaactac

SEQ ID NO: 683840 - DNA, 98 bp, Homo sapiens
tgaaattaaataggaagatcatcagtcaaggaagacccactggagaaatcttgccctgtcgctcaagctggggtgcagcggtgtgatcttggctcact

SEQ ID NO: 683841 - DNA, 100 bp, Homo sapiens
ctatggacttcagacatgcagggtgacggaacagcatatgccatatatgagctggctgtggcttcatttcccaagaagcaggagtgacttcagtcatccc

SEQ ID NO: 683842 - DNA, 80 bp, Homo sapiens
cttgagagctgggttctattttccctcctcaaactgactttgcagccacggagagcacttttccagccattaactccagg

SEQ ID NO: 683843 - DNA, 100 bp, Homo sapiens
gcatttcttttgaagaagctcctgttttcttcggagaagtcttcttggcgggattgttcagtttgctgggggaagcgcgccaggaaccagccctggcaga

SEQ ID NO: 683844 - DNA, 82 bp, Homo sapiens
tgaacccgagctatagagaaaggagatgagattaactgctgaagtactgatcgagttctgcatttcttcaatgaggaactac

SEQ ID NO: 683845 - DNA, 50 bp, Homo sapiens
gctggcttgtatggaagagttccagaaggcggtctatgcttgcttggtgc

SEQ ID NO: 683846 - DNA, 74 bp, Homo sapiens
caccatgctgaagacgtgggccagacaatgcagatcttcgtgaagactctgactggtaagaccatcaccctcga

SEQ ID NO: 683847 - DNA, 97 bp, Homo sapiens
gaacgagcagtgatggctgaaaaggatgctttagaaaaacacgatcagctcttagacaggtatgctatacctccggagcatggaaaacgacttgaaa

SEQ ID NO: 683848 - DNA, 83 bp, Homo sapiens
agaaatttggagtgtgcgtgcgcgccgagcggagaatggggtactaagagaaaagcacgaagctgtggatcatagttcccagc

SEQ ID NO: 683849 - DNA, 82 bp, Homo sapiens
ggaaaagagccctggaatctgaagagacatgagatggtagacaaaaccccagggaaaaagacctcgatgaagttctgcagac

SEQ ID NO: 683850 - DNA, 82 bp, Homo sapiens
atcttctcaacatgcaaaaagctggaggagtctttgacagttgagggtgtccgcaatgttgccagtgtctgtctgcagattg

SEQ ID NO: 683851 - DNA, 76 bp, Homo sapiens
gcggcagaggattcgctcccagagcagctgcggccagttctcctggcagggctgggggacaccgaggcccagcaga

SEQ ID NO: 683852 - DNA, 100 bp, Homo sapiens
ggatgacatcatcacaaatcgaataatccagaatggctactctgatctatgttgataaggaaaatggagaaccaggcacccgtgtggttgctaaggatgg

SEQ ID NO: 683853 - DNA, 83 bp, Homo sapiens
tgtcacaggccatgctctggcaaaaactctgttctctggggaggcagtaaggggccgtggagctggcctcggcctcggcatcg

SEQ ID NO: 683854 - DNA, 75 bp, Homo sapiens
tcagccactggttgccttggtaggcaataaaagaagaggatcacctagcccgggtagaagaggcaatcacccgta

SEQ ID NO: 683855 - DNA, 100 bp, Homo sapiens
cgagaccagacgcggagccatggccgaggtgttgcggacgctggccggggaacgcccttttgcttgtgactggcagggctgcgacaagaagttcgcccgc

SEQ ID NO: 683856 - DNA, 88 bp, Homo sapiens
ggagcctcagttggaagcagccgatccagcctgcggagcctgtggggcaggccgagacgcatccagagctttcgtgaccggggactgt

SEQ ID NO: 683857 - DNA, 75 bp, Homo sapiens
acctgaaagagtattttagtacctttggagaagttcttatggtgcaggctgtttataccttaacttctctttacc

SEQ ID NO: 683858 - DNA, 100 bp, Homo sapiens
atgggctgcagacacagcaggctgagcagctgcaaacccccgaaaaagagcacctgaagaagcctcttgaagactacatggcccttttccccagtgtgag

SEQ ID NO: 683859 - DNA, 75 bp, Homo sapiens
accatcatcctgctcctgggtgccgtggcatgtcgatttgtccttcactacaggaacatcgtcttgagcaatccc

SEQ ID NO: 683860 - DNA, 75 bp, Homo sapiens
gttttacaaagagatctccgtatagaataactgaagtgaagtgatggactccgatttggagagtagtaagacgtg

SEQ ID NO: 683861 - DNA, 97 bp, Homo sapiens
tgatatcagacaccgagcttcagcaagctctctccaacggtccatattcaagcctttcatctttgttgatgacgtaaaacttgtccccaaaacacag

SEQ ID NO: 683862 - DNA, 75 bp, Homo sapiens
gccgctagccaagctgtcctgcctgggcacacaagactgtatctctgcttacacaagtctggccagaaggatctg

SEQ ID NO: 683863 - DNA, 80 bp, Homo sapiens
gctgtgttcaaaaccacccaaaggcggctgtgcgtggcgagcagtggacgcccatcgagcccaagccccgggagcggccg

SEQ ID NO: 683864 - DNA, 90 bp, Homo sapiens
agggagagaggatcggggacccgctgatcttccagctcccctcacccaacgtcgtgccccttcacagatgtagtcactacaaatcttaaa

SEQ ID NO: 683865 - DNA, 83 bp, Homo sapiens
tacctgatccgtctggccgccggccacctggtccagctgcccgcaggggtgatgcctgaggaaacccagacccaagaccaacc

SEQ ID NO: 683866 - DNA, 75 bp, Homo sapiens
tacaggcgtgaaccactgcacccggcgaggtacatcaggaacgtctctatcaagaatacaatttcagcaaggctg

SEQ ID NO: 683867 - DNA, 103 bp, Homo sapiens
tccgagcggccgcgagcagagccgcccagccctgccagctgcgccgggacggttgattcttcaccacactgaaaccattaggaaaaatccttgtggttaacag

SEQ ID NO: 683868 - DNA, 90 bp, Homo sapiens
cggcgggagcgtcccccgggggagaccaggactcgcacaggttgaaatcacaaagattagacacctttttagataggtgttcttcagcac

SEQ ID NO: 683869 - DNA, 98 bp, Homo sapiens
ttgtccagattgaatatgctttggctgctgtagctggaggagccccgtccgtgggaattaaagatgctgacctgacctttgaccagacggcgtggggg

SEQ ID NO: 683870 - DNA, 82 bp, Homo sapiens
ggcctctgctgcgtcctgctgaccttcggtcaaaatgcagatcttcgtgaaaacccttaccggcaagaccatcacccttgag

SEQ ID NO: 683871 - DNA, 83 bp, Homo sapiens
tgtatcaagcctaatgacttcaagttcccattcacgttttaaaatcaaagatgggaaaatcggagaaaattgcccttccccat

SEQ ID NO: 683872 - DNA, 83 bp, Homo sapiens
aaaacgcactcaaagaagttcccctgggacttttccagcttgatatataatgaagatctggaacttgaagatgccattcatac

SEQ ID NO: 683873 - DNA, 50 bp, Homo sapiens
gcaggccaatgaagacaccatggaatgtcataaagtttcttggcgatgaa

SEQ ID NO: 683874 - DNA, 100 bp, Homo sapiens
cagctcaatgacagtcaagtggaaacaactgtctggttttgcacactagggaccaagaagccctcggggacactgctgagaaaagactgccgaagggaag

SEQ ID NO: 683875 - DNA, 98 bp, Homo sapiens
cgcagagcaagctgagccgagccgagccgagctgggggcgcagagcgcgggaggcggcggcggcgcggagcccagtcccctccagggcaggtgactga

SEQ ID NO: 683876 - DNA, 100 bp, Homo sapiens
atttgaaattattaatgcaatttatgaacctacggaagaagaatgtgaatggaaaccagatgaagaagatgagatttcgcatgttaatgcaaccctggac

SEQ ID NO: 683877 - DNA, 74 bp, Homo sapiens
agttgttctaacgctgcctttgctttaaaacagtattacttgcggaaatgtggctttagataatctacagataa

SEQ ID NO: 683878 - DNA, 50 bp, Homo sapiens
ggactctattcagagactgaaggcactgcttacagtgctgctgtccagtc

SEQ ID NO: 683879 - DNA, 98 bp, Homo sapiens
caaatatgcagcaaagattacaccaagatctgtgctgaccacaggaattggatctactagtgcaggtcccccacggcccttcaggatgaaagctgcgg

SEQ ID NO: 683880 - DNA, 89 bp, Homo sapiens
gatttgccttgtctcagatgagactttggactgtggacttttgagctctgttgacattggctcttgaaggcaaacttcataatgagggg

SEQ ID NO: 683881 - DNA, 75 bp, Homo sapiens
ttgactacgcccgcatgagagagttccagggtcacccccgagaggacaacaggcatctggaagtgctctctcgcc

SEQ ID NO: 683882 - DNA, 100 bp, Homo sapiens
attaaaaggagagctgggaggagcgcatggatttaggagaatgtaccaaaatccacgacttggccctccgagcagattatgagattgcaagtaaagaaag

SEQ ID NO: 683883 - DNA, 100 bp, Homo sapiens
gaatcagatggtacagattgctgcagtggaaaatcagaagaatgtcttccaagcaagccacctctccatttgcctgtgcagctgatggagaggatgcaat

SEQ ID NO: 683884 - DNA, 90 bp, Homo sapiens
caccatcaagttcttcaggaatggagacacggcttcccccaaggaatatacaggaaagaccacagcaagattctttcattcgtctcctcc

SEQ ID NO: 683885 - DNA, 98 bp, Homo sapiens
cggcagcaggtggtggggccatgatgtcggtgcagatctcttgtccatgtgccagcgaaacattgccctcaacagccacctggctgccactggaggtg

SEQ ID NO: 683886 - DNA, 93 bp, Homo sapiens
gccagaatcatgcagatccactcccgaaagatgaatgtcagtccctagagcgtccaagatttttggtttcaaaccaatttcctgctgaccaga

SEQ ID NO: 683887 - DNA, 101 bp, Homo sapiens
ccttagttccgggcgcgctgcgaccgttggtgaagatagtgatccggggagacaggaacacgggcaagacagcgctgtggcaccgcctgcagggccggccg

SEQ ID NO: 683888 - DNA, 75 bp, Homo sapiens
gctttctgcacgagaccgggctggccatgatctatgggtccaaggactatcaactggtgacgtggtcccgggatc

SEQ ID NO: 683889 - DNA, 97 bp, Homo sapiens
cttttaagaagaaatgctaatgtcaacctcaaaaaccaggttacaaatgctgctgccaactgtcctggccaaatgactctgcatcacaaacctttcc

SEQ ID NO: 683890 - DNA, 97 bp, Homo sapiens
gtgggaagtgtgctcttgtcaggcacaaatttaacaggcttcctagatttattgctaaacatgggtgcatttttggataaacccaaaactgaaaaac

SEQ ID NO: 683891 - DNA, 100 bp, Homo sapiens
agcgaatcggtggccatgatctctagggggaagacgttttcatcccgctaatcttgggaataagaggaggaagcggctggcaactgaaggctggaacact

SEQ ID NO: 683892 - DNA, 75 bp, Homo sapiens
ccactccagaaactttccctccttcagatgagtgaccgaggaggtggcgttcctttgaggaaaattgacagactt

SEQ ID NO: 683893 - DNA, 107 bp, Homo sapiens
cacgtcctgaacatgagcctcctcctctccttctacctgctggggttgcttgtcagtagcgggcaagtactaaggctcgtacgtctgcatcgattatcttacgtggg

SEQ ID NO: 683894 - DNA, 100 bp, Homo sapiens
tgcggcagaagtacaatgtccgctccatgcccatccgcaaggacgacgaggtccaggtccacatcacgctgagcacccatgagtgtgccggcctttcaga

SEQ ID NO: 683895 - DNA, 75 bp, Homo sapiens
ttagtgattgtcaagtggggaacacgacagacttctgttccgatgaaaacttttcagttcctcataataaaagag

SEQ ID NO: 683896 - DNA, 90 bp, Homo sapiens
ccgggaggggacggccgccggagccgcgaggccaagacaagatcgcagaggaaggtgggcggcgggagtgcccagccgtgtgacagcatc

SEQ ID NO: 683897 - DNA, 100 bp, Homo sapiens
gggagagtgtcttcatcttacccagtggaacctaagaaattaaattctccaggccaggacgactggaatgggaccaggccgtcgctgaaggcccctcctg

SEQ ID NO: 683898 - DNA, 98 bp, Homo sapiens
ctgtctcagtttggggcaagtttatacgggcaacaaaggttcatagtggcgtcatgcacgcagactcctgcaagttcccctaagttcttagaggactg

SEQ ID NO: 683899 - DNA, 76 bp, Homo sapiens
gagaaactgcaggatatacagcagcgaggaggggaagagagctggtgccgacaagaaagccgaggctggggctggg

SEQ ID NO: 683900 - DNA, 100 bp, Homo sapiens
ccgatatatgttctctaggccttttagaaaacatggagttggtaaaatattaaagaagatcaacaaggccatcgtctccaagaagaataaagacattgtg

SEQ ID NO: 683901 - DNA, 100 bp, Homo sapiens
tagtgaaaggcaaccgcaaggaagcggcaaggatagcagctgaattttatggagtaacccaaggacaagcagacctactccaatgaagtccattgtgttg

SEQ ID NO: 683902 - DNA, 75 bp, Homo sapiens
cttggagcaaatgatgaagacatccggaagaaggaggaagaacgtgcaaaacgtgaggagctagagcgaatactg

SEQ ID NO: 683903 - DNA, 74 bp, Homo sapiens
ggcggacggctgcgtcgcccgaggcgaggaggagcgctggcggttgccaagctgttctgcctttctggaatggt

SEQ ID NO: 683904 - DNA, 90 bp, Homo sapiens
gatctccaaagactggatggtatgggctgtctggagtttgatgaggagcgagcccagcttctgcagaaagccgtcattacacctgatttt

SEQ ID NO: 683905 - DNA, 99 bp, Homo sapiens
agtccgagctgagatccatctgcaccacggtgctgccactttggagatttgttaatgataccaaagacaaaagaatgttagtttataaatctgaagata

SEQ ID NO: 683906 - DNA, 90 bp, Homo sapiens
cggaaatccttgggtttgaagatgatgttgtgattgagtttatattcaaccagctggaagtgaagggaatgaaggatggcagcatgccgt

SEQ ID NO: 683907 - DNA, 82 bp, Homo sapiens
caccctcagctccacattgagagcaaaatctacaagatgatgcagggaggagtttgatgaaggccggaacaactttgaaggg

SEQ ID NO: 683908 - DNA, 98 bp, Homo sapiens
aaggacaacaagaaacttccccaaggaggcaagtgaggcctatctggttggcctttttgaagacaccaacctgtgtgctatccatgccaaacgtgtaa

SEQ ID NO: 683909 - DNA, 80 bp, Homo sapiens
ccgccatgaatgaggagtacgacgtgatcgtgctgggcaccggcctgacgaatcagcatgattcttcagaggctcttcag

SEQ ID NO: 683910 - DNA, 99 bp, Homo sapiens
acaaaagaaaaaagagttgtatttactcaagaaatcaagtacttcagtaagagatgggggattaatgaaaatcaagttccatcctcagacaagaggtaa

SEQ ID NO: 683911 - DNA, 98 bp, Homo sapiens
ccatatgagaatatcaggaatgaagggtaattatgtgctggatcgagatgacctggtggaggcccaaacacctgagtatgatgtggtgctctgcctca

SEQ ID NO: 683912 - DNA, 82 bp, Homo sapiens
cgggaggaaggaacgaggcaaggagctaaagcagcgtgcgttcagccctggggctccagggagttccacgctgtccagttct

SEQ ID NO: 683913 - DNA, 100 bp, Homo sapiens
cggggagcgtccggagctagctggatcctctaggcagatgatgtcagaagtgggatccaaagtagagcttataatgacacctaggagtgctgagtgacca

SEQ ID NO: 683914 - DNA, 90 bp, Homo sapiens
cgaaaggaagcaagcagttcagaagagccaaggaataaacatgcaatgaacccaaaaggatgcttttgataaagagtacaagatggcata

SEQ ID NO: 683915 - DNA, 98 bp, Homo sapiens
gtgctggacatagactggtgcccacataacgatcaggtcattgccagcggttcagaggactgcacggtcatgttgtctatcaacgtctatgactacaa

SEQ ID NO: 683916 - DNA, 50 bp, Homo sapiens
tttgctccagatgacggtggaatctatgtcttccatgaagaaatgatgaa

SEQ ID NO: 683917 - DNA, 100 bp, Homo sapiens
tgatgcttctgattaccagacagtccagatgttggtgaccttcaaggatgtggctgtgacctttacccgggaggagtggagacagctggacctggcccag

SEQ ID NO: 683918 - DNA, 90 bp, Homo sapiens
ggaaaaacagaatcagctgttccctgcgaaagatgtgttcagagcaacattgttttgttgacacaagcatttagaagaaagtttgtgatt

SEQ ID NO: 683919 - DNA, 100 bp, Homo sapiens
ccacaataacaggcggagggtcggcgtaggtttgcctgcaatgagatttcattctctacatttaaaggacatcctttctgagctgctgtgaataaatttg

SEQ ID NO: 683920 - DNA, 96 bp, Homo sapiens
atgggggagtgctgatcaactaaaagaggaaggatttttactgggagaggtaagacaagaggaaacgtttagcatcagtgactcacaaatcagcaa

SEQ ID NO: 683921 - DNA, 83 bp, Homo sapiens
tcgcgccggctatggccgtgccctggggctgagccctcagaaggaagaggcccagcagaagggactcgctgagccaccccccg

SEQ ID NO: 683922 - DNA, 75 bp, Homo sapiens
agggattggtctatgaaacatcagttcttgatcctgatgaggaagctgcagtaaaggaagatgaagaagaagttt

SEQ ID NO: 683923 - DNA, 50 bp, Homo sapiens
tccggcggctgccgtgactccagtgcaacttgaaatccatggcccaaaat

SEQ ID NO: 683924 - DNA, 100 bp, Homo sapiens
cagcgcccaccctgcgccagagaccagataaagaaaccatcttcatcggtactccaaggttctggaggcccatttgggagacccaaaacctcggcctcta

SEQ ID NO: 683925 - DNA, 82 bp, Homo sapiens
ggcggaggcgcgcgctcgattccccccacgcggcggcgccgcctgtttacgctctatgttctatgatgaggatggggatctg

SEQ ID NO: 683926 - DNA, 101 bp, Homo sapiens
gccttacaactacaaccagctggaaggcagattcaagcagctgcaaggttgctgaaaagccaggagtcaaaatgactgagcgctttgactgccaccattgc

SEQ ID NO: 683927 - DNA, 100 bp, Homo sapiens
aaacggccaagaggcagacctaggaaatggtgcttagatgagtacgaagatgatgaagcagggcagaaagagcggaaacgagaagatgcaattacacaac

SEQ ID NO: 683928 - DNA, 100 bp, Homo sapiens
gtccctgcagaaaagaggaacacagagatgttagacaatctgccatctgctgggtcccagatacatttcatcaatgaagccttctggacctggagtttcc

SEQ ID NO: 683929 - DNA, 50 bp, Homo sapiens
ttgatctctttatctgtggatgaacaggttggaaaagagactgttcaaac

SEQ ID NO: 683930 - DNA, 133 bp, Homo sapiens
gttcggtctcctggtgtacggccaacgccaagtaggggattgcgttccctccagtcgcaggtcctgtccaaaatgcattgctgtcttcacaagagtcagtgagccaaggatacaatttccagcttccaggatc

SEQ ID NO: 683931 - DNA, 82 bp, Homo sapiens
cttttgcaaaatacagccctggagatctttatggcaaacagagcagccaacagggaagagtgtcgcacccaggagaaagtta

SEQ ID NO: 683932 - DNA, 90 bp, Homo sapiens
ttttggttttgatatggattatacccttgctgggcagagcggcttgggtaaatccaccttaatcaacaccctcttcaaatccaaaatcag

SEQ ID NO: 683933 - DNA, 83 bp, Homo sapiens
gccttcctcaacgacgcggacatggtcatgagctttgtgaacctggctatccagtcagttcgctgctattcccatgggtcaca

SEQ ID NO: 683934 - DNA, 87 bp, Homo sapiens
cagccctatgctgtcagtgaattagcagtattcaagtcaaacaacgttgaaatggattgggtgttgaagcatactggtccaaatagt

SEQ ID NO: 683935 - DNA, 143 bp, Homo sapiens
attgctactgcacggtgaacctggaccaggaggaggttttcaggaccaaaattgtggaaaagtcactctggacccagatgatgtggtaccagttggccaaagaagagcctggtgttggtgcatgtgctttggactagcattta

SEQ ID NO: 683936 - DNA, 99 bp, Homo sapiens
atttttggagtctcctttggtatccgcaaactctacatgaaaagtctgttaaaaatctttgcgcaagaaagtacgactatcagcagccacaaaaccaag

SEQ ID NO: 683937 - DNA, 100 bp, Homo sapiens
gggctcttatgctcagaagaagggcagtgccattgataggatccagaatgaagagagtgtggtgctttttctggtcgcgtggactgtgacagagatcact

SEQ ID NO: 683938 - DNA, 75 bp, Homo sapiens
gggaagaggaggcggaaaaggacgcaaagttctccggcgagaatcctaatgtacctggctagctggtggtgagta

SEQ ID NO: 683939 - DNA, 90 bp, Homo sapiens
agggaggagaccggcacccagacaggtggcgacggcagaggaactatatcatcatgtacatagaaaaatccaaaggattctgcaaaaaag

SEQ ID NO: 683940 - DNA, 100 bp, Homo sapiens
ggcattttggggcagaatacagagatatggaatcagtaatggaaagtcgtgatcctagtacaaatgtgatattattggaggatactgctgcagtcttggg

SEQ ID NO: 683941 - DNA, 80 bp, Homo sapiens
caactccaaccacgacggggccgacgagacctcagcttgtcaaaattcccaaaaatgatcccctcaatgaagttcataac

SEQ ID NO: 683942 - DNA, 83 bp, Homo sapiens
gcgcgcagggcctgcagcgggagctggacggcgagcgcgagcggcgcgagaaataagaagacatgttggataacaagaagagg

SEQ ID NO: 683943 - DNA, 90 bp, Homo sapiens
tgcaggcctcgcgctgacaggatcttttgtgacgctgcaaatgtcctgattttggaagatggcaaagttcatgacacccgtgatccagga

SEQ ID NO: 683944 - DNA, 75 bp, Homo sapiens
aacagctaagccagggaaaacaccgattcagaatgccagctgatgaagaccgagaggccgcgacccaacaccttt

SEQ ID NO: 683945 - DNA, 102 bp, Homo sapiens
agattgtcgcaaattttgcactactggcatcgatggagccatgacaatttgggatttcaagaagaagatagtggtgagctggcaaagccaaagattggtttt

SEQ ID NO: 683946 - DNA, 100 bp, Homo sapiens
gtgaagttgaatctgcaaaacttattcgggataaagtagcagacggttgatgatgaagcgccggccgtgtaaatgaagatcgggtgaggagcaggacgat

SEQ ID NO: 683947 - DNA, 50 bp, Homo sapiens
ctgtgaccacccctgaagaaattgcacagttattcaaattagaagacctg

SEQ ID NO: 683948 - DNA, 95 bp, Homo sapiens
gctgcgtgattcccgtgattgcgttacaagctttgtctccttcgacttggagtctttgtccaggacggtggtgatgatgtccagcaactctgtga

SEQ ID NO: 683949 - DNA, 137 bp, Homo sapiens
gtctactgaaagctgccgctgaagctgccgccgttgcctccgccgccaagagtgagcgagcggacccgcgatggaaatgatgatgcacgtgcaacagctgtctcttgcgtctttatgtgtgaaaaaacaacagccaa

SEQ ID NO: 683950 - DNA, 100 bp, Homo sapiens
cctggaatatgaagatatgtgagatggtggatgaatccccaggttcacagcagatgaggctcgggacctgattcaacgttacctgacagagcaccctgac

SEQ ID NO: 683951 - DNA, 98 bp, Homo sapiens
gaagaaggcgtcagcagaggggccactgctgggccctgaggctgcaccaagtggcgaaggagccggctccaaggtccaagcatctcattttgaaggcc

SEQ ID NO: 683952 - DNA, 100 bp, Homo sapiens
ctgcggaactatgtcccggaggatgaggacctgaagaagaggagggtgccccaggccaaaccggttgcagaccgagacatgggtgcccggcaccgcgccc

SEQ ID NO: 683953 - DNA, 126 bp, Homo sapiens
cagtgggaaggccaaggctaaggcagtatctcgctcacagagagctgggctacagctgacacttcctccatggcccatctatcgccggcatcctctcaagtggttacctgttcaagaatcaagcac

SEQ ID NO: 683954 - DNA, 100 bp, Homo sapiens
gtacgagggcgtgtggaagaaatacagcctgacggtggccgtgaagaccttgaagtctacatcagcatcagcatctgcgtcaccatttcaatctgcatgg

SEQ ID NO: 683955 - DNA, 98 bp, Homo sapiens
tagggaaaacactatcctctgagatcccagatcatgagctaatagatgatgtattggacttcacctcgtgttctgaccagatgggcaaaccaacatca

SEQ ID NO: 683956 - DNA, 100 bp, Homo sapiens
gggcgcaccttccccaagcgcggccagacctgcgtggtgcactacaccgctcaaatagctataactgtaccaaagacatggaagaaaccaaaagatcgga

SEQ ID NO: 683957 - DNA, 97 bp, Homo sapiens
gccaaggaaggcttcgagaagattagcaaaggtgctaatccagtggaaatcaggagagctatccagtcagttcgctgctattcccatgggtcacagg

SEQ ID NO: 683958 - DNA, 99 bp, Homo sapiens
cagcaccagcttccagttagtggatatagcacaccatccccagccatcaaaccggcacgatgtccaggcaccagaaccagaacaccatccaggagctgc

SEQ ID NO: 683959 - DNA, 50 bp, Homo sapiens
cgtggagcagcaccttgcctgcaggcagtggctctgccaatgatcctgtg

SEQ ID NO: 683960 - DNA, 107 bp, Homo sapiens
ctggtggggccgtctactccccagccctaacagacttcacgttcatggtaaagtgctgaagctgctgaaagatggcagaagaagtggtggtagtagccaaatttgat

SEQ ID NO: 683961 - DNA, 75 bp, Homo sapiens
gacgaagaagcagaagcgtctgctcaggttgcagcaggagagagggagtaccctgacttctaccggaagctctac

SEQ ID NO: 683962 - DNA, 127 bp, Homo sapiens
ggaagcgtctccgttgggtccggccgctctgcgggactctgaggaaaagctcgcaccagtaaaatgtttattggaggcttgagctgggatacaagcaaaaaagatctgacagagtacttgtctcgat

SEQ ID NO: 683963 - DNA, 100 bp, Homo sapiens
ccatctttgatctcttcctagaatgcatgccggggtatcctctggacaagccggatgcagacggcagcacgggtgtttcccattaaacactaccaggaca

SEQ ID NO: 683964 - DNA, 78 bp, Homo sapiens
tcgctgagagctgggaagaggcggcagacagcgggctcttgaggctagtgcgcctctaggcaagatgtccctgcccat

SEQ ID NO: 683965 - DNA, 100 bp, Homo sapiens
tgaccgagaccgtgaccgagagcgtgaccgagagcgcgaatatcgtcatcgttagaagctgagtcagtgctgattctctcaaatagagcttgaaggataa

SEQ ID NO: 683966 - DNA, 73 bp, Homo sapiens
gatctttgctcttccatccgcctttgatcgtcttcctcttcagccatccagcatttaaatcaaacggtattga

SEQ ID NO: 683967 - DNA, 100 bp, Homo sapiens
ctgagccgtctgtcctgcgccaagggaacccgagcgtcatgttagggtgaagcagaggacctcagtgctgaacatgctaaggaggttggacaaaatcagg

SEQ ID NO: 683968 - DNA, 100 bp, Homo sapiens
ggctccggcgcgcccggtgacggcggagaggcgccccccgcagcagagatcccgctgtgcgctggctgtgaccagcacatcctggaccgcttcatcctca

SEQ ID NO: 683969 - DNA, 75 bp, Homo sapiens
tgttagttcacagtttttcagccatgggccgtctcagtctcataaaaggggatcaggcaggaggagtttgggaga

SEQ ID NO: 683970 - DNA, 101 bp, Homo sapiens
aagtatgacttcataatggagaccaagctcaaacccctccggaaggttccaattgtggacaagataaggaccattgctcaggctgtctatggagccaaaga

SEQ ID NO: 683971 - DNA, 75 bp, Homo sapiens
ccgagaccagtccacctacatcagggtaagaaggtggatggctctgtaaatgcctatgccataaatgtctctcag

SEQ ID NO: 683972 - DNA, 98 bp, Homo sapiens
agatggaaaaggagttcgagcagatcgacaagtccgggagctgggcggccatttaccaggacacagagcacagccaagacctgcagagtgccctcatc

SEQ ID NO: 683973 - DNA, 100 bp, Homo sapiens
ctgcacttcgcattttggcattgacatttaattttagggtcctttatatagaagggagagtaggttcctccccgggcagaagaaatcaccattccagctg

SEQ ID NO: 683974 - DNA, 115 bp, Homo sapiens
tactggaggttttggctctgcgtgagtgtggtctacgagctgtttctcatctttatactcttccagaggctgggaggcggcagaatgcagccagaggagggcacaggctggctgc

SEQ ID NO: 683975 - DNA, 90 bp, Homo sapiens
actgcgacgccaaatacgtctgggcagccacggccgggggcgtctttcagagcattacgcatgaagaggaaccacctcagaatatgaaac

SEQ ID NO: 683976 - DNA, 100 bp, Homo sapiens
cgacaaccttctcgtctactgcaagcggaaatccaggtcagccatgtcatctgagcctcccccaccaccacagccccccacccatcaagcttcagtcggg

SEQ ID NO: 683977 - DNA, 51 bp, Homo sapiens
caaggtcgtcggctggcggagcggcgtatattgaaatggattccaggcgtg

SEQ ID NO: 683978 - DNA, 82 bp, Homo sapiens
gagaagtttccgcaggactacttccccgagtatgacaatctcctgagccagtttggctgcatgcaggtgtcttcgtcctcct

SEQ ID NO: 683979 - DNA, 98 bp, Homo sapiens
tccaagctggccgtggctctcttggcagccttcctgatttctgcagctctgtgtgaagacttaattcagtgcacaaatgagatgaatgtgaacatccc

SEQ ID NO: 683980 - DNA, 97 bp, Homo sapiens
ttgaagattgtaaaaatttcttttaagtgcaaacagttttttattcaacttagaaaagaattggcagaaggagaagacagcctgaagaagatgcagc

SEQ ID NO: 683981 - DNA, 75 bp, Homo sapiens
gttggtttgtggaacagacagctccttctttattgacaacgactgaaagacctttcattcagaagctgtttcgtc

SEQ ID NO: 683982 - DNA, 50 bp, Homo sapiens
tagtccattgactatgcagcctaatgacaggggcaagtgtccgagtggtg

SEQ ID NO: 683983 - DNA, 101 bp, Homo sapiens
agctaatccagaaccactttgtagatgaatatgatcccaccatagaggatattattgctggattcctatataccattttaatcttagctgtcttctatcca

SEQ ID NO: 683984 - DNA, 83 bp, Homo sapiens
ggtacatggattttctgcagatcttcactgtattagtgaatccgataagggttacacatcattttggaatgactgtatatcat

SEQ ID NO: 683985 - DNA, 100 bp, Homo sapiens
tacaacaaaccagatgtcagtctgcaggtttgtcccgctggctggaagcctggcagtgacacgattaagcccaacgtggatgacagcaaggaatatttct

SEQ ID NO: 683986 - DNA, 101 bp, Homo sapiens
gtcagggacatttctgaagcgagcgtcttcgatgggatatctgcattacctccacctcctccacctccaccaccaccagcagctcccttgcctcctgcgag

SEQ ID NO: 683987 - DNA, 82 bp, Homo sapiens
gggttctgagactccctgtcccggaccgcagtgaaattcgtaaggacaccttgaaggccattctgttggagttagaatgtca

SEQ ID NO: 683988 - DNA, 90 bp, Homo sapiens
cggatttctgaggttctgcaaacagagggggaagacggtggggcctccccacctgccccgcagaagatgcagttctttggccgcctggtc

SEQ ID NO: 683989 - DNA, 90 bp, Homo sapiens
caggtcttctgtgaggaatctggattgtcacctttgctgcaaaaaattacgggtcaacgggatggacatcagcaatgtccctcacaacta

SEQ ID NO: 683990 - DNA, 90 bp, Homo sapiens
ggcgggagatgtcgaaccccgggacacgcaggaacggctccagcatcaagatccgtctgacaggtagcagtagctgatgtgcagtttggc

SEQ ID NO: 683991 - DNA, 96 bp, Homo sapiens
ttgtcttctgtgtggattcttcagaaagtgaacttggcattttagatctaattcaactctttcaccatgcctggatcacttcctttgaatgcagaa

SEQ ID NO: 683992 - DNA, 75 bp, Homo sapiens
ggccgccgcgctgctggtcggctccagcaccctcttcttcgtgttcaccctcctctattggcccaggaagcccac

SEQ ID NO: 683993 - DNA, 78 bp, Homo sapiens
gggcagtatagagacgtcggacttcacgggtggatgtgaacactgaccggaagatcagtgccaaggagatgcagcgct

SEQ ID NO: 683994 - DNA, 96 bp, Homo sapiens
tcctggaatgccaggtggtatggggacccctggagagcctggaccccagacttgaagcttcaagatttcctggtggacaatgaaaccttctctggg

SEQ ID NO: 683995 - DNA, 83 bp, Homo sapiens
tgctacagcatcccacattaagtcaacgttttttggaccatatacaaacaacactctttttgaaactgatgaacgctaccgac

SEQ ID NO: 683996 - DNA, 100 bp, Homo sapiens
ctcatctcatcttacaggagcagactaggttgcaagaccttaccctttacaaccctgagaggaccatcactgtgaagggggccatcgagaattgttgcag

SEQ ID NO: 683997 - DNA, 99 bp, Homo sapiens
tttgcagttcctgtcaccgcctcttccctccgtgagcgctggcctgggggaaccaaggccccctgatgttgagcatggcaccacactcctgatggttgc

SEQ ID NO: 683998 - DNA, 98 bp, Homo sapiens
tggctgagaggattgcggtggaattttgccatgtgacaaggttgaaatcacaaagattagacacctttttagataggtgttcttcagcaccactgaca

SEQ ID NO: 683999 - DNA, 100 bp, Homo sapiens
ggcggatctggaggagcagttgtctgatgaagagaagggccgcgcattgaagacggcaacctcattggctgaggggctctcgcttgtggtgtctcccgac

SEQ ID NO: 684000 - DNA, 100 bp, Homo sapiens
tgcccatcctgctggtcaccctggtcttcaccaagaacttcgcaggaatactcccccagttgcaagaggcgcaggaccgtggaagacttcaacaaattct

SEQ ID NO: 684001 - DNA, 92 bp, Homo sapiens
tccccggcgcgaagaggctggactcggattcgttgcctgagtgcctccggagccagcgtggtggccatagacaacaagatcgaacaggccat

SEQ ID NO: 684002 - DNA, 107 bp, Homo sapiens
ggattgtgggagtctccgcgtcccgctcgctgggagagaggtacctctccttttccctctccctttccctaaggttattaatgctgcactggctttagcagcaaaac

SEQ ID NO: 684003 - DNA, 98 bp, Homo sapiens
gttggccctgtgatccctcaagactggtccacggagtgtatgaccacaaacagccatcaagagtatttgatttctgacactggaggacaacagctctc

SEQ ID NO: 684004 - DNA, 90 bp, Homo sapiens
cttaagcatggaattggccagaaaatgcacggaactcattagcgatgtgacaaccaaagccaagcaactgaaggattcagtgacctgctc

SEQ ID NO: 684005 - DNA, 100 bp, Homo sapiens
acaaggtcctccagaaggcatgaaccagcaatattaccctgatgacttacaaaccatccaagttggaattcctcatgaggagcacctcaaagaaaaccag

SEQ ID NO: 684006 - DNA, 75 bp, Homo sapiens
tggattttcaccattctaataggctttatcctgtggataaacgcagagtgaacgagtttggggagtcctacgagg

SEQ ID NO: 684007 - DNA, 95 bp, Homo sapiens
tgggaaaattaagcagatgctccagtttgagaaacctggatctgcgatctgtttgtggtcaaaatgcagatcttcgtgaaaacccttaccggcaa

SEQ ID NO: 684008 - DNA, 83 bp, Homo sapiens
gagcaaggggcttacgcagaaggacctggccacggggagtacatcaagacctggcggccacgctacttcctcctcaagaatga

SEQ ID NO: 684009 - DNA, 83 bp, Homo sapiens
gaactgctcaagcctggagactcgcaacaagatcccctatgagagtcccatcttcagcagagagtcttgctatgttgcccagg

SEQ ID NO: 684010 - DNA, 80 bp, Homo sapiens
caggacgaggaggacagaatcgaggccctgaaacaactgcatcaacaagtatgggtctccgtacaccaaaaactcaggct

SEQ ID NO: 684011 - DNA, 82 bp, Homo sapiens
cagggcagaaatagcgaccatggcgaggtatggcctcacaagtcttggtctacccaccatatgtttatcaaactcagtcaag

SEQ ID NO: 684012 - DNA, 100 bp, Homo sapiens
catctcggagcaactgaggcgccgggaccggctgcagagacaggcgttcgaggagatcatcctgcagtaaatacaaacctggtcgatgtgatgatatttt

SEQ ID NO: 684013 - DNA, 75 bp, Homo sapiens
ctgcttctctgaaaagcgtgtggctttctggacttggtcaaaatgcagatcttcgtgaaaacccttaccggcaag

SEQ ID NO: 684014 - DNA, 100 bp, Homo sapiens
attttgaagacaatcgtcacttatacagaatggtagctgagtggaggttgtctcgaggtgttgaagaacagacacaagctttctttgaaggctttaatga

SEQ ID NO: 684015 - DNA, 89 bp, Homo sapiens
ccgtggagacaccgagaaaccatgagtgtaaggttaccccagagtatagacaggctgatctactggctgacctttgccgtgggccgctc

SEQ ID NO: 684016 - DNA, 75 bp, Homo sapiens
atcagtagcaccagtgtttatgttgtgattccaaagaatccctatcctgcctccgatgtgaatactgagaagccc

SEQ ID NO: 684017 - DNA, 124 bp, Homo sapiens
accgtgtccgcgcgcctgggagacgctgcctcggcccggacgcgcccgcgcccccgcggctggagggtggggttcaactagatatagcttcacaatctctggatcaagaaattttattaaaagt

SEQ ID NO: 684018 - DNA, 100 bp, Homo sapiens
ttggacgcgggcgcggcactgcgggtcccgattgctgcagccgcttgtcagtgtgatgaagattggcacccaggctcacagaacatttcctgcctgttgc

SEQ ID NO: 684019 - DNA, 75 bp, Homo sapiens
aggctggctcattaacatgcatcctgagtctactcttcatcttgtgttgagacttcgtggtggtgctaagaaaag

SEQ ID NO: 684020 - DNA, 100 bp, Homo sapiens
agccttgcaggaggactctggcacctacgtctgcactactaggagtggaggcagcacagacagtgaggacgaagaagaggaggacgaggaggaggaggaa

SEQ ID NO: 684021 - DNA, 100 bp, Homo sapiens
ggctgccgcaggacctgcagcatcccagaggtactccaaagattcaggtttactcacgtcatccagcagagaatggaaagtcaaatttcctgaattgcta

SEQ ID NO: 684022 - DNA, 100 bp, Homo sapiens
cagctgggcctgaccaacccgaaaacattgctagggagtaccctgacttctaccggaagctctacggcctcttggacccctctgtctttcacgtcaagta

SEQ ID NO: 684023 - DNA, 74 bp, Homo sapiens
gtctgccacacgctgatggtgcagcaccgcatgatggtacccaaagtcagctggccctgaaggaccctgttcat

SEQ ID NO: 684024 - DNA, 74 bp, Homo sapiens
tgattttgaaacacctgggtctgggcttcccgggcgagcggtgggtcaaaatgcagatcttcgtgaaaaccctt

SEQ ID NO: 684025 - DNA, 90 bp, Homo sapiens
gtcatttgcaagtacttcgtggaagggcgctgcacctgggctcccagccccattgccaataccttcctccactatcgaaccagcaaggtg

SEQ ID NO: 684026 - DNA, 100 bp, Homo sapiens
gatgacaattgaggaatttgcagcaggtcatcagactagtgctgagtcttggggtactggcagagctgtggctcgaattcccagagttcgaggtggtggg

SEQ ID NO: 684027 - DNA, 100 bp, Homo sapiens
cctcaatgagcacatgaccagcttagcttctgtcctaaagtctcagaccagtatccttcaggggttctcttactctgatttgcggaaatttggcatcgtc

SEQ ID NO: 684028 - DNA, 80 bp, Homo sapiens
tgagcagggctgagatgggcaccgcggatctggggccgtcctcaggttcatcatgcctagtggcgtataagaagaccccg

SEQ ID NO: 684029 - DNA, 98 bp, Homo sapiens
cagtcttcccgcgtccgccgattcctcctccttggtcgccgcgtccttggctggcgtcgggctgacgcacgaggcacacaggaaggaggtggagcagg

SEQ ID NO: 684030 - DNA, 80 bp, Homo sapiens
gaagcagcatgcagctgttagtggaagaggatcacctagcccgggtagaagaggcaatcacccgtatgcttgtgtgtgcc

SEQ ID NO: 684031 - DNA, 51 bp, Homo sapiens
gattaactcattcaaggttacccagttggaacttagtgatttggcccgtga

SEQ ID NO: 684032 - DNA, 51 bp, Homo sapiens
cccttcgccaaactcttcattttctctctgctgcattttttatcacctatg

SEQ ID NO: 684033 - DNA, 100 bp, Homo sapiens
gaatgagcagcgcacctccattctgcaggaggttctgggggaagagaagctgaaggagatactgaaggagcgggaacttaaaatttactggggaacggca

SEQ ID NO: 684034 - DNA, 100 bp, Homo sapiens
aggtgtttcacaagtagcaaatgagatgaaccatcttcctgcacacagccaaagtctgcaaaggtagcacaggcggagtgcagcggaggcccctgccgct

SEQ ID NO: 684035 - DNA, 74 bp, Homo sapiens
gtcagcatggcccaggctcctgctgacccgggcagagaaggctgcgggctgaactaccacaagcgctgtgcctt

SEQ ID NO: 684036 - DNA, 96 bp, Homo sapiens
gttaggagcgcagtggcggcgcaaccagccttctagggcggcggaggaattgaaagatgttggccatcgtgatcagatggctgcagctagaggaat

SEQ ID NO: 684037 - DNA, 75 bp, Homo sapiens
gcagaaagcaggcgaacccgcggcgcaataacggatcttttgccagaaatgagggcatactggcctgacgtaatt

SEQ ID NO: 684038 - DNA, 75 bp, Homo sapiens
ggagagccccctgcctcgccttgtggagggccttgatcagttcacagcagctgctcagccaggaactgagatctt

SEQ ID NO: 684039 - DNA, 93 bp, Homo sapiens
catccagactgaggaagacccggaaacttaggggccacgtgagccacggccacggccgcatagtgtccccagttgtcctcatccagggtgcta

SEQ ID NO: 684040 - DNA, 51 bp, Homo sapiens
caactcccagctcaatgcaatggattgtgcagactggtgcttaaaatggaa

SEQ ID NO: 684041 - DNA, 100 bp, Homo sapiens
cagacggcttcccatttttatgaccggatgctgggaagcctgctggtccacaggtccatacatgaagtcaccataaggcttcaaggagacaacctggaag

SEQ ID NO: 684042 - DNA, 83 bp, Homo sapiens
acgtctctccctgtcctagctctgtaactgtttacagttggatacactccagattggatatttctgctgagaaatgtaatgcg

SEQ ID NO: 684043 - DNA, 99 bp, Homo sapiens
ctgggacacagcggggcaggagcgcttccgcaccatcacctccacgaaagaccacagcaagattctttcattcgtctcctcctagcctgggggaccagg

SEQ ID NO: 684044 - DNA, 75 bp, Homo sapiens
tggaggcactaacttttggggtggaactaaagaggatgatggcggcgactggcggcgcgatggacctgaccgggc

SEQ ID NO: 684045 - DNA, 101 bp, Homo sapiens
tgcctttgaaaatcaacgacaacttgagcacagatctttaatctcatgaagtacgacagctacagccgcttcttaaagtctgacttgtttttaaaacacaa

SEQ ID NO: 684046 - DNA, 89 bp, Homo sapiens
ttccccggggtgtaataatgttaactgagaaatatggctacacacacctttctgcaggagagctgcttcgtgatgaaaggaagaaccca

SEQ ID NO: 684047 - DNA, 100 bp, Homo sapiens
aaacgtcacacgacggccccgcccccttggccagccaactggacagcggagcacgatgattgatagttggataatcagaaactggtgcctcagcctcgtg

SEQ ID NO: 684048 - DNA, 75 bp, Homo sapiens
ctccaccctgctgggaatcccgttcttcgccatggatggcaggatggtggctggcaaagtgttgatggcaaagca

SEQ ID NO: 684049 - DNA, 89 bp, Homo sapiens
actaacgagattcaagattatttgcaacagctcacgggagcaagaacgtggacatttgggagcaataaaaataagaagaaaggaaaagc

SEQ ID NO: 684050 - DNA, 100 bp, Homo sapiens
cgccgtggaccaggagaaccaagatccaaggatcctaagtgtgaacgtgaagtccccagccctgctgctgagccagttgctgccctacatggagaacagg

SEQ ID NO: 684051 - DNA, 75 bp, Homo sapiens
gctccagggaaggcactcaaaagtggggggcaggaaaggtaagaatgattgatgttggctgatattggagtgctc

SEQ ID NO: 684052 - DNA, 100 bp, Homo sapiens
ctctgaccacctacatggtccccaagccagaagaaatcaacctgctcaccggggagtctgatacacagggcgctgatggacgagaccatgaaggagttga

SEQ ID NO: 684053 - DNA, 82 bp, Homo sapiens
ccgagcgggcggcttcctggcctgggcgctccggtggcggcggagatgagcgggatcgtgtgcagaagaaaaccttcaccaa

SEQ ID NO: 684054 - DNA, 100 bp, Homo sapiens
tgccgcctcctccgccgcccgaaaacccggagtgccccgcacaggaatatgaagacaaggctggaagacctagcaagccaccctctccaaagcagaatgt

SEQ ID NO: 684055 - DNA, 96 bp, Homo sapiens
ccatcctgccgtccttctccactttcgccagcccgtgccgcgagcgcggcctgcaggaggattgtcagtggcttcgccccgaggagagctgactgc

SEQ ID NO: 684056 - DNA, 98 bp, Homo sapiens
ggatcttacacattatcattgtcttcagtaggaaatactaagtttgttctggacaaggtgtcgtgaaaactacccctaaaagccaaaatgggaaagga

SEQ ID NO: 684057 - DNA, 119 bp, Homo sapiens
cagcgggccattgaggcagcccctcaggagcctgagcagaaacggagcaggcaggacccaggtgaaaccagcccagagaagttacgggatttgcccccggggctcctgcccagcaagcc

SEQ ID NO: 684058 - DNA, 100 bp, Homo sapiens
tcctgtctgccaccatcctgggttgacaattctacacaaggagttacgccccatggtgtccatcctgccagcagactgattcagaatgggaggcttttgc

SEQ ID NO: 684059 - DNA, 100 bp, Homo sapiens
gaaaagatccgatggcagcaccacttcgaccagcttcatcctcagacaggtgaaaggtgtagcagtcactcggcctacacccacagcatcgaccttgtga

SEQ ID NO: 684060 - DNA, 83 bp, Homo sapiens
aatggggcggaagaaaatacaaatcacacgcataatggatgaaaggaaccgacagttctctacagaaagaaccaatgaaccca

SEQ ID NO: 684061 - DNA, 76 bp, Homo sapiens
ccgacgcaaaccaaggatctggggatcttcgcactatcccaaggttgaaatcacaaagattagacacctttttaga

SEQ ID NO: 684062 - DNA, 109 bp, Homo sapiens
cagcgccggcctcctcagtgcgaagaagctgcagccgcacctggccaagggttgttcctcaaagtcattcaagctgtactcgccgaaggagcccccgaacggcaacgcc

SEQ ID NO: 684063 - DNA, 96 bp, Homo sapiens
agcagggcagtgaccgagtacaccttgcagggaggtatccgttacagcactgatgtgagtgtagatgaagtaaaagctttggcttctctgatgaca

SEQ ID NO: 684064 - DNA, 106 bp, Homo sapiens
aaacaagacagttctgtctgcagaagcccattatggctgtaactggagatgacacagagatttacaaacgaggaccacctggcagttcataaacacaagcatgaga

SEQ ID NO: 684065 - DNA, 82 bp, Homo sapiens
gcgctcgagacttaccagagccacaagggcaacaggtttgtctatgctggctctaactcgggcgtggtccaggccccgctgg

SEQ ID NO: 684066 - DNA, 98 bp, Homo sapiens
tctcacaactgctcgcgtgacgaccgcattcgtggcagatagggccagatttgagtgtgtgaatttttgagtgaaacctggaacccaaatgagaagaa

SEQ ID NO: 684067 - DNA, 74 bp, Homo sapiens
agtgtttcacatttgctgccatgagcaaagaggaggtcgacagaaaactttagaaactgttcctttggagagga

SEQ ID NO: 684068 - DNA, 100 bp, Homo sapiens
ggcggtccccgggtggccctggcgcccggggagacggtgatcggccgcgggccgctgctgggactattgacctgaaaagtggttctggaaaagtgtacca

SEQ ID NO: 684069 - DNA, 100 bp, Homo sapiens
tctttccctgtttgcactgggctgtgaaaattctgatgtggcaggactaactgtctcctaccaaggtaatgccatcggtcccctggtagccttgtggctg

SEQ ID NO: 684070 - DNA, 100 bp, Homo sapiens
tattattagaattctgccatgcaatcactctgagaggagtgataccaatgaaaaaaggtcagttgattccagtgctaaaagggaaaaacctgtggtccgc

SEQ ID NO: 684071 - DNA, 75 bp, Homo sapiens
ccaggactgctcatggtaattgcacttgttgcaggcagaggcaccaaggctggcagaatatcaagcatatatcga

SEQ ID NO: 684072 - DNA, 97 bp, Homo sapiens
gagagactacatttataattggagatcctgaacaccaaagagtttgacttacaaggaatctggagtagatatcgcagctggaaatatgctggtcaag

SEQ ID NO: 684073 - DNA, 102 bp, Homo sapiens
cagcaccgcagatgttgtcaaggtggcctaccaggaggccaggggtgtcgccatggagaggagttcattacttcggaagtggtacaatttaatgatacaaaa

SEQ ID NO: 684074 - DNA, 100 bp, Homo sapiens
ggctctgacatcaacatccgagacaacataacgaaggaggcccaacttcattcaataaggagcctgacggatttatcccagacggtagaacaaaaggaag

SEQ ID NO: 684075 - DNA, 100 bp, Homo sapiens
gctggggaaccctacaaccgcaagacgctcagcaagctcaagaggagcgtggtcagagcccaggagaggctcgggctgtgctgaagtgggcagatggcaa

SEQ ID NO: 684076 - DNA, 100 bp, Homo sapiens
agaaaaatgcctaaagaacatccacagaatagacctgaagacaaaaatccagaagtacaagcagtctggtattgcacatctattacaaatttcctggtta

SEQ ID NO: 684077 - DNA, 90 bp, Homo sapiens
atccagagaagacggtagaaagagtattggatatagcaaatgtgctttttcatcttgaacagtcaggacagctgaatgagtacacagaac

SEQ ID NO: 684078 - DNA, 100 bp, Homo sapiens
ggggaatgagacccaaactgctcatacagaattacgcatttccacttctaatgcacttcactacgcttagcagatgtcctctggaattcccagattcctc

SEQ ID NO: 684079 - DNA, 97 bp, Homo sapiens
aggactacgcttactgccagaacacaaagccaaggctctgctctttgagtgtttcttaccaagaaaatctgcatcatttgaaagtatccaaaaatgg

SEQ ID NO: 684080 - DNA, 101 bp, Homo sapiens
attacaatcgcttgtacaaaggagagtttaaacagccaaaacagttcattcatattcagcaatcgggaccagtattcacatctgctaagtgatcattttct

SEQ ID NO: 684081 - DNA, 100 bp, Homo sapiens
ggcgctgcccatcgtagccatcgagaacatcctcagctttatgtcctacgacgaaattagccagctccgcctggtgaggaaaatagcagctgaatactat

SEQ ID NO: 684082 - DNA, 97 bp, Homo sapiens
gggcggctccgcagcccgccgggagctctgaccgaggcgcctcgctggggcggggaccttgccttgcccggggttgggcccgaaggcatcctgcaga

SEQ ID NO: 684083 - DNA, 82 bp, Homo sapiens
cgccctcaacctgctttacaccggactttgaacatgtcggggatcgccctcagcagactcgcccaggagaggaaagcatgga

SEQ ID NO: 684084 - DNA, 75 bp, Homo sapiens
aaaagaagagttaaatgccctcaagtcgacaggggatgggaccctaggaatgcaatggaaaaacttcatagtatg

SEQ ID NO: 684085 - DNA, 90 bp, Homo sapiens
cagattcgcagtggtcgcttcttctccttgggaagtgtttgtttatgtcagggctcagtgaggtccagctgaaccatatggatgatcaca

SEQ ID NO: 684086 - DNA, 76 bp, Homo sapiens
ggatttcccaggtccaccacctgctccatttgcaactgctgcagaagaatattttgcctgctggaacctgctgtat

SEQ ID NO: 684087 - DNA, 76 bp, Homo sapiens
gaggtccctacctgccacggataccagtcaggaccctgatgctcccataagacagaaaatgccccttgatgatctg

SEQ ID NO: 684088 - DNA, 100 bp, Homo sapiens
ggaacctgctttctctcgatgaggataacatccctccagaagatggctctgtgtggctgcacagtgaacgtccccactctggacggcaggacgatacccg

SEQ ID NO: 684089 - DNA, 83 bp, Homo sapiens
gatccccgttcctggagattctgattgaggtgtcccgacccaggctaagcttgagcatggctgagcaggagcccacagccgag

SEQ ID NO: 684090 - DNA, 100 bp, Homo sapiens
ttagctcgacggggctgaccgctctggcccagggtggtggctattatcatggaaaactaatttttcccagagaatttcctttcaaacctcccagtatcta

SEQ ID NO: 684091 - DNA, 100 bp, Homo sapiens
gagcgcctgcctgaggagagcaggaaagaactgacttcctctggtgggccaacaaagtttgaaatccatatagtggctcagttcgataatcataattctc

SEQ ID NO: 684092 - DNA, 82 bp, Homo sapiens
catgcagttggatggcggtgactgcgtggtgtcttcagtgccctgggtttgcctgtgacccaatgcccactgggactgaatg

SEQ ID NO: 684093 - DNA, 99 bp, Homo sapiens
ggaggacgcgcggcggcagcggcgcacgcgcacggagaggaggctacttgccaggttttaaaatcaaagatgggaaaatcggagaaaattgcccttccc

SEQ ID NO: 684094 - DNA, 100 bp, Homo sapiens
cacggagaacgacctcaaccagggatggcgattttgctgacagctgccaagaaaatgcttcactcaacagtcctcatgtgcccagagatgtttatagaac

SEQ ID NO: 684095 - DNA, 83 bp, Homo sapiens
ccgcctcccgcgcacacacggccatggcggaggtgagaagccctaccactgcaactgggacggctgcggctggaagtttgcgc

SEQ ID NO: 684096 - DNA, 82 bp, Homo sapiens
tttaataatagtcaggcagcttgtgagacaatgcaggcagttaacaagaagatggatccacaaaagacattacaaacaatgc

SEQ ID NO: 684097 - DNA, 75 bp, Homo sapiens
aggagctggcttgctaatggccttctactttttcaggctcgcaggaaggaggtatttatccaggaacggtatggg

SEQ ID NO: 684098 - DNA, 100 bp, Homo sapiens
gctggcgtggactgcggggacggggttggcgcccggcagcacgtgttcctggtttcagcatcctggccactgcaggaacccacttcaatactcacgtgga

SEQ ID NO: 684099 - DNA, 75 bp, Homo sapiens
ccccgagaaccgtcagtttgagccagatgatttgaaagaagccaacactaaaccacaaatatacaacaaggccat

SEQ ID NO: 684100 - DNA, 74 bp, Homo sapiens
accaagaggtgcaaaaacgaaagcaactggagctcaggtatatagtatttgaaggagaagaagggcaggatgct

SEQ ID NO: 684101 - DNA, 75 bp, Homo sapiens
tcctgggcggcggggatgggaggttaacgaagcccttgtcatttgctgattgtgttggggatgagctgccgtggg

SEQ ID NO: 684102 - DNA, 100 bp, Homo sapiens
ccgctgctgccgccaccactgcgtcgggctggtgcagccccgggccaggccgcggccggggcaggagcgcagactctttttgatcagaacaatgctgcaa

SEQ ID NO: 684103 - DNA, 80 bp, Homo sapiens
gcccacgaaggggacagcgcagccggcccagagctcgggtctccggggaccgagccaggtgctgcccacctacgacagcc

SEQ ID NO: 684104 - DNA, 100 bp, Homo sapiens
tagtgaggctcagagatgcctgtaccgtgatgtgacgctggagaacctggcacttatgtcctccctgggtgcagtagacattgttgcaatcatgatcggc

SEQ ID NO: 684105 - DNA, 100 bp, Homo sapiens
gcccatggagggagtggacatcagccccaaacaggacgaaggcgtgctgaaggcagacctcaacaccaacatcgaggatgaaggcagctccttctatggg

SEQ ID NO: 684106 - DNA, 99 bp, Homo sapiens
agacacagtgtcagaattacaaggatgtggagagcatcttgtgcgcaccatactggctagagaatgttcacatgctttacaagctgaggatgctcacca

SEQ ID NO: 684107 - DNA, 107 bp, Homo sapiens
taagcggcgtggtagcgaaggtcgccgaacccgcctggctagccggcgagttgagtggcgaggaaagcaggcaggatgggagagtcgccgatagaaccacctcttcc

SEQ ID NO: 684108 - DNA, 96 bp, Homo sapiens
agaagattccagtcagtggaaagtggagcaaataacgttgtcttcatcaggacacttgggataggtttctcattaaagcccctgagggtcctccaa

SEQ ID NO: 684109 - DNA, 95 bp, Homo sapiens
tacctacagtggatgtcctacatctcctatgtcagttcgatatctcaatgcctatactggaatagtgctacttcgatgcagaaaagaattctatc

SEQ ID NO: 684110 - DNA, 97 bp, Homo sapiens
tcctttgggaacccattcgagggcagccggcgggaggaacgctcactgtcagcgcctggaaacttgctcacgcgggtgccacgtctatgtgggcttc

SEQ ID NO: 684111 - DNA, 82 bp, Homo sapiens
ttgttggcgtgtccctgcagcgaaggatcctgacccaacatgagtgaagtttcctgcaagaaacgggacgactatttggaat

SEQ ID NO: 684112 - DNA, 82 bp, Homo sapiens
ttggaagcagccgatccagcctgcggagcctgtggggcagatttggtcgtattgggcgcctggtcaccagggctgcttttaa

SEQ ID NO: 684113 - DNA, 75 bp, Homo sapiens
cggaaggggtcccgaagccccctgcaggaactctacaacccaatccaggaagtgcagagctgtactgttgactta

SEQ ID NO: 684114 - DNA, 102 bp, Homo sapiens
tgtggcactggacggggaatcaagagacccggtttctaatccctgctctgtcactaacaagctgcgtgatcttcgttaatgtgttaagagccattgacattt

SEQ ID NO: 684115 - DNA, 98 bp, Homo sapiens
gaatcacaagtagatcacagcaccatacattctcagattagaagaggagccatgtcagaagaaacagtaagtgaatcacagttttccttgaagacagc

SEQ ID NO: 684116 - DNA, 100 bp, Homo sapiens
cgggaggttcggttgtcgcccgttggccgcgcggcgccgcgctcggcggccgccattgcagtaagactttgaccccgacgcaggcttcagtgattgccgc

SEQ ID NO: 684117 - DNA, 83 bp, Homo sapiens
acatgccaagatgtatctactgtatccatgcactcaggtccgtaaaagccctgggctcagccagagcagggcagaggatgacg

SEQ ID NO: 684118 - DNA, 82 bp, Homo sapiens
gccggcagcgcgacaggaacccctccgagacccagtccaaaaggtcacggaggtagtcatgatctatgacgccgagaagcag

SEQ ID NO: 684119 - DNA, 82 bp, Homo sapiens
tgcagcccacccgggcagccctcaccctgatcttcagtgtctattggatttttccaagagaaagtttgtaaaattccttaca

SEQ ID NO: 684120 - DNA, 98 bp, Homo sapiens
gggaacctaccatggtatgacactgaaatctgtaacggcgttggagaccagggccagccctggccacaccccaggctgtgtcaccttcgtcctgaatg

SEQ ID NO: 684121 - DNA, 76 bp, Homo sapiens
ccgagtcagaacccgagtgctgcttggcggcgagcctacaacacagcagtcccctcaggatgagcaggaaaagctc

SEQ ID NO: 684122 - DNA, 90 bp, Homo sapiens
caaaaggcctttctctgctcgaaacacacatcttggcgcgttgcacggtcccaccctctcccgacgaccttccgagccgcgggttactcg

SEQ ID NO: 684123 - DNA, 83 bp, Homo sapiens
cgaagtgacctcagcagggcatccaggttgattcttcaccacactgaaaccattaggaaaaatccttgtggttaacagcagag

SEQ ID NO: 684124 - DNA, 149 bp, Homo sapiens
gggagccacggacacggctgtgtttgatgtccggctgagtgggaagaccaagacagtgcctggataccttcgaataggttttgacgaagtatattatgggcagtacatctctttttacatgaaacaaatcttcttcttggatgacagtg

SEQ ID NO: 684125 - DNA, 121 bp, Homo sapiens
gcaacctcggagcttatactcctcccagtgacgggtctggagtgcgtgggggaccggctgttggcgggctccatctcagtgaatagtcgcagcacgccgttcttggccactggagacagcg

SEQ ID NO: 684126 - DNA, 109 bp, Homo sapiens
cttcccccacccccgactcgggcttggcgcggcggccagaggaaccccgaggtgatgtgtccaatctagatcccaacttctcatttgaaggcaccaaactggatgtggg

SEQ ID NO: 684127 - DNA, 75 bp, Homo sapiens
tttggatcctggttccgtccgctaggagtctgcgtgcgagataagccaatggacacgtcagtgttatctgaagaa

SEQ ID NO: 684128 - DNA, 96 bp, Homo sapiens
ccgtggttctgctgaacaaaggcagtcccgtcaggaagcccaagtatgtggaaagccccagagtgcctggagatgcagttataatgccattcagag

SEQ ID NO: 684129 - DNA, 80 bp, Homo sapiens
caagtcagattcccacccctctgacgctctgaccaggaaaaaaccggccaaggcgatccacgatgactgcctgcaagcgg

SEQ ID NO: 684130 - DNA, 96 bp, Homo sapiens
ggcggatggaagggaggagactcctgaccctcagaatggaacacatgattctgtgcagatttgcagaccagacagctgtccagctcccaccccaac

SEQ ID NO: 684131 - DNA, 100 bp, Homo sapiens
gggatataaccgactgacctggatagtagttgttcttcagataatcttgtgccgtggaaatcagaagggcaaaacgaagcagtcatgatgagaagcacac

SEQ ID NO: 684132 - DNA, 75 bp, Homo sapiens
cgcgcggcggcaccgggaggccgggccgagcggttgtggttcaccttgaaactattctaggagcctcagttcaac

SEQ ID NO: 684133 - DNA, 50 bp, Homo sapiens
ccagctccgaaatcaccaccaagtgtcaacagcatctccaccctggagcc

SEQ ID NO: 684134 - DNA, 74 bp, Homo sapiens
ccttcatgccagtgctgggatttggcacttatgctcctgatcatgaatctatggatttcctgaaatatgttgtt

SEQ ID NO: 684135 - DNA, 75 bp, Homo sapiens
caacaagtgtaacgacgatgccctggcctctaagggagctctgtttctcaagtgtctttggtgcaacactaacaa

SEQ ID NO: 684136 - DNA, 101 bp, Homo sapiens
cagggcagtccctcattctgcgttgggagtctggaagaagactctcccttcccttcctttgcccagctgcaagctttcttcctggtggcagatgacatcat

SEQ ID NO: 684137 - DNA, 50 bp, Homo sapiens
ggagtttgtgacgctgtgatgtgttatccaagataaattctgtgggatta

SEQ ID NO: 684138 - DNA, 100 bp, Homo sapiens
tcacctatgtgccgcctctgctgctggaagtgggggtagaggagaagttcatgaccatggtgctggatgtagaagacagaagtagctcagggtcctgggg

SEQ ID NO: 684139 - DNA, 80 bp, Homo sapiens
tttgtcatttggaagaagcgaagagattactacaatgcagctagaacgtgaaaaggctcttgaacataagaatcgaatgt

SEQ ID NO: 684140 - DNA, 78 bp, Homo sapiens
catcaagtcggccggggatttagaacccttaggagaaatcttgagagtggacagcaattgtgaagatcgccagagagt

SEQ ID NO: 684141 - DNA, 75 bp, Homo sapiens
tgtgtggtgtgtggctgcggcctgggcaagagccgccgcggaccatgaggttatctgtgctacaattgcatttgg

SEQ ID NO: 684142 - DNA, 50 bp, Homo sapiens
tcgagagggtcaaactgctgctgcagtgctcttacagatggaaggtgggg

SEQ ID NO: 684143 - DNA, 100 bp, Homo sapiens
agtgggaaaaataaagtgttgagtaaacagaccaagttgggatagattcccagaagtgggataactggatcagagggtgattaccctgtgtataagagta

SEQ ID NO: 684144 - DNA, 85 bp, Homo sapiens
aggacgctggttcatacactccaagccaagaagtatgatgcgtttttggcctcagagtctctgatcaagcagattccacgaatcc

SEQ ID NO: 684145 - DNA, 100 bp, Homo sapiens
ggaccaaagtcatgggcacagctgaatggaaagccagtaggacacgaaggtgctgccaggcgatcggatggggaggatggaagcttggaccaggataaca

SEQ ID NO: 684146 - DNA, 110 bp, Homo sapiens
ttgcacttgtgcgaacaaagcttttctgatatgatgggaaatacaaatgaaccaagcacacgtgtccgactacctatggcctgccccacccgcatcctgtgcctgtaaag

SEQ ID NO: 684147 - DNA, 98 bp, Homo sapiens
ggccttcacaccggtggtctaccataacaagcccgggttcgagagctcgaagaacagtgccgcagccaaaccgagcagttcagcctcctggcacagga

SEQ ID NO: 684148 - DNA, 82 bp, Homo sapiens
agtaggagactcagaatcgaatctcttctccctccccttcttgagccagccccagtgcctgctgagccgtttgacaacacta

SEQ ID NO: 684149 - DNA, 75 bp, Homo sapiens
ccagtgagatgcagacccgaatctttgacccagctccaccaggcagcagaaaggaaaatgtttcaacgtgcgcaa

SEQ ID NO: 684150 - DNA, 87 bp, Homo sapiens
ccagttcccatttctgaagaatctgaagagctggatcagaagacattcagcattgagaaaagccttacagatgctcatgggaagggt

SEQ ID NO: 684151 - DNA, 75 bp, Homo sapiens
ggaaattggactaaattaccagaatgcagggatcctgtgttgccataagcccttggcccacatttaagtgggaat

SEQ ID NO: 684152 - DNA, 100 bp, Homo sapiens
aagggaaggcgcatggatgctggagggcgaagacctgcgaagtccctctccaggtgctactcgtgagcagtagtcgccatccagacagatggattgtccc

SEQ ID NO: 684153 - DNA, 75 bp, Homo sapiens
gtgcctcatgatcgcttcaacaagtctattatcctcccagtccacaacgctgaaccgtggctggacgaatgtttg

SEQ ID NO: 684154 - DNA, 100 bp, Homo sapiens
acaacatctacaatgttggctcaagggcccttgggagctcaccaaaccctcccaccccccttcagctggcagccaaggaggcgaagcttcgagacctgga

SEQ ID NO: 684155 - DNA, 98 bp, Homo sapiens
tttacacatgtggtttgaacaccaaggggcaactgggccatgagagggaaggaaacaagccagcccaccaagaaaacacattgtggagcgctatacag

SEQ ID NO: 684156 - DNA, 101 bp, Homo sapiens
agtgttcttttgcctccgagtaggaccgagagtgttgggaagaggagcgcgtccccggggaaatgaggttacctagggtatgaattaatacagacttggaa

SEQ ID NO: 684157 - DNA, 92 bp, Homo sapiens
ccgggcctgtcagttgacctaccccttgcacacctaccctaaggttaaacactttaagatgagaaaaattgatctctgtctgagctctgaag

SEQ ID NO: 684158 - DNA, 75 bp, Homo sapiens
atgttgtcaaggtggcctaccaggaggccaggggtgtcgccatggctgtgaagctcaccagctctcgaacccagc

SEQ ID NO: 684159 - DNA, 100 bp, Homo sapiens
tgttatggatgatttcgcagcttttgtagagaagtgctgcaaggctgacgataaggagacctgctttgccgaggaggatatagcagatccattctttgct

SEQ ID NO: 684160 - DNA, 74 bp, Homo sapiens
gcaaaccaaggatctggggatcttcgcactatcccaagtattggtaaaggttttcaaggtgtcatgaaaagatg

SEQ ID NO: 684161 - DNA, 100 bp, Homo sapiens
cagaaggaggagtactggcgaagacgagaagaagaggagcgttggagaatggaaatgagtatcataaagaagttgttcgtttgatgtctggggagtttag

SEQ ID NO: 684162 - DNA, 100 bp, Homo sapiens
ctgagttttcttttcatgtaccaagtcttgaagagcttgctggagcgatctagggcagccctgcagaggtacctgttctactgtaatcgctatatgaacc

SEQ ID NO: 684163 - DNA, 75 bp, Homo sapiens
gatcagtttcagaaagaacaatctcctgctaacaggaagaacagcacttcttaacccagctccaggagctcggaa

SEQ ID NO: 684164 - DNA, 74 bp, Homo sapiens
ttctgcggacttgttctgaggccgagtttgcctgagaatacagatcaacccacagaacaaagcggatttccaag

SEQ ID NO: 684165 - DNA, 117 bp, Homo sapiens
tgtggcccgccatgttcttctccgcggcgctccgggcccgggcggctggcctcaccgcccactgggtgtaatggataggtaacagagaagacctcgtcccttcctagtcagggcatc

SEQ ID NO: 684166 - DNA, 100 bp, Homo sapiens
aagagcgctcccaggagaaacaagatcatgaggatgagaatgaagaaggtggtgaggtcccctgggccccgcctgaaggatcagaggcagcagaggaggc

SEQ ID NO: 684167 - DNA, 75 bp, Homo sapiens
cagaaccccaggactgcgcccccgggagcgggcgcccagaggagaatgaagtttctagattagaagacataatgc

SEQ ID NO: 684168 - DNA, 74 bp, Homo sapiens
tggatctcagagcggtatccctgtctcagcgaagtggtgaaagagcatcagctccctagatctttagcttctac

SEQ ID NO: 684169 - DNA, 96 bp, Homo sapiens
tcaggatgtgtggtcttctcttcgactacccagtggcccttccatactttgaccggctagactatgtgtccatgatgtgtaacgaacaggcctatt

SEQ ID NO: 684170 - DNA, 124 bp, Homo sapiens
ttaatttgatattaacaactggaggaacaggatttgcaccacgagatgtcactccagagaataagaaagccttgagttttgtgaaaaaccggagaagagaaactaaaaggacagtagaaaaggc

SEQ ID NO: 684171 - DNA, 100 bp, Homo sapiens
tgaaactcgatcctccggatattacctgtggagaccctcctgagacgttctgtgcaatggaattgaatgatctggcacgggaccctccagcacagtgttc

SEQ ID NO: 684172 - DNA, 75 bp, Homo sapiens
ggctctccctgcacagcatcgcgcagaacaaagggatcaggctactgcagcactggggtgtcagttgttggtccg

SEQ ID NO: 684173 - DNA, 83 bp, Homo sapiens
cccgagtgtgcgaagctagccaagaaaacctcggatcaattctcagctggtggcacaacaagtggcacaacagtatgccaccc

SEQ ID NO: 684174 - DNA, 100 bp, Homo sapiens
atcatcctaaggacgcagctgtctgtgagggtccatgcctgcatcgctgcttttctaacccaaactgtatgtcttgatgacactacagtaaagtttgaaa

SEQ ID NO: 684175 - DNA, 83 bp, Homo sapiens
tcatcattaaggacggaggcacgatttggtgttgtactgcgaggcattcctgaccacctacaggaccttcatctccccagagg

SEQ ID NO: 684176 - DNA, 100 bp, Homo sapiens
aagtgaaagctctgaacaagggtgatgccaactctgaagtcactgtgtactaccaggtagttagaaacaaacctgtggcaaggcaggctcctggcaaacg

SEQ ID NO: 684177 - DNA, 104 bp, Homo sapiens
ctcgagagacctgcgtacattcggggtgccagaaggaaagcataggcacctgaatggacagaagaggacctcagccaactgacaagaagtatggttaagttccc

SEQ ID NO: 684178 - DNA, 75 bp, Homo sapiens
agcaggggcagatggcaagtggagacagcaatctcaacttcagaaaataaacagagttgtctttgttggaaactt

SEQ ID NO: 684179 - DNA, 114 bp, Homo sapiens
caaatggtgcccgctgtgccacctggtttcaagaccctacccgcttcactggcaccatggatgcttaaatggcagaggccaagcccagactccagacggacatgcggataaggc

SEQ ID NO: 684180 - DNA, 98 bp, Homo sapiens
gaaaatgctactatgactcttcctggaatacacccacctaccttgaaccaggtcaagtctggcaccatctttgacaacttcctcatcaccaacgatga

SEQ ID NO: 684181 - DNA, 75 bp, Homo sapiens
taggcggtatcaaatggaaagtttttccaaatattcatctgtacaggcgtcgaccagaagattatgatattcata

SEQ ID NO: 684182 - DNA, 97 bp, Homo sapiens
tatgacacagcacctcgaggcaaggaaataagaaaactgcctctgatccaagcagagaagtaagtacaaatggatcctaggtgaagaaccggtggag

SEQ ID NO: 684183 - DNA, 100 bp, Homo sapiens
ctgcttgctgcaggctctggggagtcgccatgatatgagaccttggtggggacaattgggaaaaagtttgccagaaagagagaccatgccaattatgaag

SEQ ID NO: 684184 - DNA, 82 bp, Homo sapiens
catcaactcagatcgcatccaggagaaggtggactctattgatgacagttgttgacctcctgtactggagagacattaagaa

SEQ ID NO: 684185 - DNA, 101 bp, Homo sapiens
gggagcagaacgctgcggaccgcggcggaggacgcgcccggcgcccctgagccggccgagcggcgacggaccgcgagaccgagaagatcaatccatcttgt

SEQ ID NO: 684186 - DNA, 90 bp, Homo sapiens
tcacctccacctacctgaagcagatgaagcttcgagtgatgaattcccaggagcagcttcgagagctgtgcccaggagtgaacaaccagc

SEQ ID NO: 684187 - DNA, 74 bp, Homo sapiens
gacattcaggtcccgacacgagccccagatgctgtccatgggcttctctgatgaaggcggctggctcaccaggc

SEQ ID NO: 684188 - DNA, 75 bp, Homo sapiens
ggagagccagttactaacttcccgtgctttgaagaagaggagcacttcaaggtgctggtgaagatgaccgcccag

SEQ ID NO: 684189 - DNA, 100 bp, Homo sapiens
gtgatgtcttccagactcggtgctgtacccgccacaggtgatttggcttctgcacagttaggaggagcaccaaaccgatgggaggttttgtcagccacac

SEQ ID NO: 684190 - DNA, 83 bp, Homo sapiens
gccctggcggcggcggcccatggggcccttggcgctgcccgcctggctgcagcccaggctggagcattggatttgctaaagga

SEQ ID NO: 684191 - DNA, 100 bp, Homo sapiens
caggccaagccttctgcctgtgatgtgcaccaattccagctggacatcactgtgaaaatgggacgggataaagtccgagaaatgtttatgaagaatgccc

SEQ ID NO: 684192 - DNA, 82 bp, Homo sapiens
ccggagttggtgctacaaagggttccacatgggagttgtctctgattctgctccagtgggaaggacaccactggtaccagct

SEQ ID NO: 684193 - DNA, 131 bp, Homo sapiens
cttgctcctctctccttggcctctcctgggatcggcccaaggccagttctccgcagtgcctacaccaactaatgttacaattgaatcctataacatgaaccctatcgtatattgggagtaccagatcatgc

SEQ ID NO: 684194 - DNA, 75 bp, Homo sapiens
ctgggttctggtgccgcgcagctttccccgttttcggctttgtgagaaaccttaccatcaaacacgatggccagc

SEQ ID NO: 684195 - DNA, 95 bp, Homo sapiens
cggagagggtgctggctgccgcgcggccgaggactttgctataaaacacgtgaccctagggaaacttttgaagttagcggtatagagagtaccac

SEQ ID NO: 684196 - DNA, 74 bp, Homo sapiens
gccaaggaataaacatgcaatgaacccaaaagggtgttatgaagcggagattgaggagatagatgaagaaaatg

SEQ ID NO: 684197 - DNA, 83 bp, Homo sapiens
ctcatgagagcgcggccggaggacaggcgcgcctcaagttccccatcgactacccatactctccaccagcctttcggttcctg

SEQ ID NO: 684198 - DNA, 101 bp, Homo sapiens
ccggctacttctcggcgctgccgtctctggaggagtactggcaacagggaaggtgaagaaggagctggaccctgacgacagccatttgaacttggatgaga

SEQ ID NO: 684199 - DNA, 75 bp, Homo sapiens
ctgtatatggctgcgccccaaatcagggctgccacacttgtgtatcccttcttccttgaatttaaccaggagtga

SEQ ID NO: 684200 - DNA, 73 bp, Homo sapiens
cctctgtacgcccgttcactgagttgctacgatggaagttaaagggaaaaagcaattcacaggaaagagtaca

SEQ ID NO: 684201 - DNA, 100 bp, Homo sapiens
ctgcgccaaggcctacggccgagatgaagaagtcgagatgacgcggatggcggtccagtttgagctggaggacctgaacctgcggcctgacccagagcca

SEQ ID NO: 684202 - DNA, 100 bp, Homo sapiens
ttctgtatttcagcttcctgctatgtgccctctttgttcctaaagagctacagagacttctgaagtggagagtctgcgacctcctcggttcttcaatgaa

SEQ ID NO: 684203 - DNA, 100 bp, Homo sapiens
ggacaccatggacaagttttggtggcacgcagcctggggactctgcctcgtgccgctgagcctggcgcagatcggttatatcttaagtgtggtgctgcta

SEQ ID NO: 684204 - DNA, 88 bp, Homo sapiens
cggttgtctgtggccggaggctgatcaggaatgtatcctgtcaggtataatgtcagtgaatggcaagaaagttcttcatatggatcga

SEQ ID NO: 684205 - DNA, 83 bp, Homo sapiens
attattgtagatctagaagtcactttggaagaagtatatgcaggaaattttgtggaagagaaaagccttacagatgctcatgg

SEQ ID NO: 684206 - DNA, 82 bp, Homo sapiens
gctgcctcagttcttagcgcaggtatgatctcgtgaaaccttgagagaaactgaatgacgaatgaaactattgttcctgttt

SEQ ID NO: 684207 - DNA, 100 bp, Homo sapiens
gcaatgagctcggcctcggggctccgcagggggcacccggcaggatctccaaagatgggtaaatggtgctaatgaacatggctttgtcttggtgtctttt

SEQ ID NO: 684208 - DNA, 82 bp, Homo sapiens
gagagccgcggctccgtgtttctggaaagtgacagcaggtacagcacatgggaaccggaggaaaacatcctggatgctcgct

SEQ ID NO: 684209 - DNA, 100 bp, Homo sapiens
tttacttttacctacgttggcggccccagaagacattccacttcttccatctattacatctctgagtctaaatgaaaatgaagagaagaccggacctttt

SEQ ID NO: 684210 - DNA, 100 bp, Homo sapiens
tgattttgaaacacctgggtctgggcttcccgggcgagcggtgggagcaagtaatactgcagacacattgtttcaagaagtattaggtcggaaagacaag

SEQ ID NO: 684211 - DNA, 113 bp, Homo sapiens
cccggcctatgcccccactaacggggacttcacctttgtctcctcagcagacgcggaaggtccttaaaattctagtcagggcagtgattgatgggatgactgatcgaagtgga

SEQ ID NO: 684212 - DNA, 100 bp, Homo sapiens
gaacgggaccggagcttcatgcctgcaaagagtgggaaaacagagtatcagaccacaaaaaccaataaagcaagaagatcaacatcctttgaaagaaggc

SEQ ID NO: 684213 - DNA, 75 bp, Homo sapiens
tcagggatcaaagagcaaacagattcagtggcctgcattgactgtatgaaaacaagggagaggctgacttcgtgg

SEQ ID NO: 684214 - DNA, 83 bp, Homo sapiens
gggacaatggtcaccgtctcttcagaaggagaacttatggattgtgatggaaaatcagaatctagtcctgagcgggaagctgt

SEQ ID NO: 684215 - DNA, 100 bp, Homo sapiens
caacccgtggctgatagctgaaagataatatcgtctactgcattatttttggctgcaaaagtggaagaacaggctcgaaaacttgaacatgttatcaaag

SEQ ID NO: 684216 - DNA, 58 bp, Homo sapiens
aacaccaagtgcatcaccatccccaggaagcactaagtaatatggatgattatgacaa

SEQ ID NO: 684217 - DNA, 98 bp, Homo sapiens
ggcccgatgagcggcggcctcggcctccggcgcagcccggaaatgtccggcaagatcgagaaagcagaaatgcactcggtgatggaaagagagccact

SEQ ID NO: 684218 - DNA, 100 bp, Homo sapiens
cggaggcagaggtggaggcgctttgaaaggtctgtgcagacttttgcagacaaatcaaaacaagaagctctgaagaatgacctggtggaggctttgaaga

SEQ ID NO: 684219 - DNA, 75 bp, Homo sapiens
ccagaggtcgtggaggtggccgtggaggcagaggtggcatggggtgtctgcctgtatcccagtgttcaggctggc

SEQ ID NO: 684220 - DNA, 98 bp, Homo sapiens
tggcgggcaaatacgcagagctgggggactggtgcgcccggaggattctgcagcacgtgcaggtgcccgcccctgcatccctaaaagcttcggctaca

SEQ ID NO: 684221 - DNA, 75 bp, Homo sapiens
ctctgactgctccaaaaaaggataagcagggcttcacagaagaggtgacaggtggatccataaagaacccagcca

SEQ ID NO: 684222 - DNA, 74 bp, Homo sapiens
cgcggggaggcggcggcggcagcgttatcaggttaaacccatccagagtaatggctgcggccttacccaggacc

SEQ ID NO: 684223 - DNA, 100 bp, Homo sapiens
gcagcagatctcttagcggcagatttctcaggtgcccctgagccgaggaacgcaggcggtggtcgtggggaagggaagaggagccccgggagacgacagc

SEQ ID NO: 684224 - DNA, 90 bp, Homo sapiens
ccagacttgccccaggacacctttatccagtttcctggatggaccaagagctgtgttaaaagtgaccactcgtgctcgccatgtgctcca

SEQ ID NO: 684225 - DNA, 74 bp, Homo sapiens
tttgcgaaaggatcgcggggcccggagagacttatgcagagatggaccccaccacagcagccttggagaaggag

SEQ ID NO: 684226 - DNA, 83 bp, Homo sapiens
gcgggaacagtctcctccactcggagcgagtttcgctcttgttgtccaggctggagtggaatggcgtgatctcggctcaccgt

SEQ ID NO: 684227 - DNA, 124 bp, Homo sapiens
caaacagatatactaaagcaggctaccaaggacagagtcagtgatttccataaattgaagcaaagtactccaaagattcaggtttactcacgtcatccagcagagaatggaaagtcaaatttcc

SEQ ID NO: 684228 - DNA, 76 bp, Homo sapiens
atgaggaggtggcttatgaaagtgtgatgttcgcgtatttcttgacaggtgatgctgaacacagagcggctgatca

SEQ ID NO: 684229 - DNA, 51 bp, Homo sapiens
gtcactgtatttgaccttaaaaaggttttgctgtgttggccgggctggtct

SEQ ID NO: 684230 - DNA, 87 bp, Homo sapiens
aggccaagcacaacctggagaagcagatcgccaccctccatgcccaggtggccgactatctgacctcacagttctatgccctcaact

SEQ ID NO: 684231 - DNA, 80 bp, Homo sapiens
cctggatcatggctgccgcgccgccgctacgggaccgcctgagctttctacaccgggtcgcaatggaagaagagatcgcc

SEQ ID NO: 684232 - DNA, 100 bp, Homo sapiens
tgagtgcctggaagtttacgcctgatagagccagccccagtgcctgctgagccgtttgacaacactacctacaagaacctgcagcatcatgactacagca

SEQ ID NO: 684233 - DNA, 75 bp, Homo sapiens
aagagaaaagggaacggaaccgcacctgttcttcccggagcctatcagcaaagccattcccaaggctatggctac

SEQ ID NO: 684234 - DNA, 100 bp, Homo sapiens
gatttacttgttggggccctcttgataaaaagagatgtggggggattctcgacctgctaacagaactggaccttttcgagagagcgctgtacagcatgga

SEQ ID NO: 684235 - DNA, 100 bp, Homo sapiens
cgaagagctgcagctcctcctgtgcgggtttgcatcgccagcttctatatattacggcctttttttttgctggatattatcttgtaaaacgtgaagacta

SEQ ID NO: 684236 - DNA, 82 bp, Homo sapiens
tttaagaaagaagatgttaactttcagcacaaacacagagcagtctaaagcaaccgagcactgagaaaaatgaactctgccc

SEQ ID NO: 684237 - DNA, 75 bp, Homo sapiens
aggaggtggaggaggcgccggaccggggggcattggacacatttccaccatgctaatggcattttaaatatattt

SEQ ID NO: 684238 - DNA, 83 bp, Homo sapiens
gatccgccgcccgtccacacccgccgccagtgacaaccatgagtggaaaaaactaattatggttcagcactggcctgagacag

SEQ ID NO: 684239 - DNA, 96 bp, Homo sapiens
cgcagacacgggacccgcttcgaggccgctttggcgccaaatcctgagatttaatccagagactgacttcactatagaacccacagttgtatcaat

SEQ ID NO: 684240 - DNA, 82 bp, Homo sapiens
aacaacaccacaataatccacagccaagccatgccagtgacggtaacccgcaccaccatcacaaccaccacgacgtcatctt

SEQ ID NO: 684241 - DNA, 128 bp, Homo sapiens
tgcagaagctactcaaatgcagtcggcttgtcctggctcttgccctcatcctggttctggaatcctcagttcaagacttaattcagtgcacaaatgagatgaatgtgaacatcccacagttggcagac

SEQ ID NO: 684242 - DNA, 98 bp, Homo sapiens
gaacctgcggcctgacccagagccacttctcaccgagatgattcatgaaacagcacccaagaaaacctcatttggctcgctgaaggatgaagaccgga

SEQ ID NO: 684243 - DNA, 90 bp, Homo sapiens
aaaaaccacagcatcattctttctgcaccaaacccggaaggaatcaccttcaggccattcagaggaggaaagagaggggaatatgaagtc

SEQ ID NO: 684244 - DNA, 82 bp, Homo sapiens
ttcatctttacagaggaatagtctacaaaggaagacttgtaacctggagaagagagtcccctttacttggtaaatcacggcg

SEQ ID NO: 684245 - DNA, 99 bp, Homo sapiens
cccaaatgtctgactctgactctcggactgagaaacgcaaggtgacttaagagattaaaattaatttggttgctgttggttctgaacaaataatgagtt

SEQ ID NO: 684246 - DNA, 75 bp, Homo sapiens
cacccaccaacaacaccacaataatccacagccaagcttcctacatgccaggcatgccaggtggaatctctccat

SEQ ID NO: 684247 - DNA, 49 bp, Homo sapiens
cgccatcgttgctgccttcttcgtcaagagccatccaaaactctgtttg

SEQ ID NO: 684248 - DNA, 71 bp, Homo sapiens
tcagggccgcctccgagtcagatggtctctaattaacagaagatggcaaagcccagccacagcagctatgt

SEQ ID NO: 684249 - DNA, 82 bp, Homo sapiens
cgcccctcctggaagaaggaagaggagatcatgaatcagacagataaaaatcaacaagaaatcccatcataccttaatgatg

SEQ ID NO: 684250 - DNA, 76 bp, Homo sapiens
gaaaaacactccggacctcatgtgggaagaggaattcaccttagtccagcctctgatgaagcaggagagaaagaag

SEQ ID NO: 684251 - DNA, 100 bp, Homo sapiens
aagccagttatccacggactggaagatcaaaagaggttacctagaaaagtacgagaaagttcatcattttggggaggatgatgatgaggtaccaccaggc

SEQ ID NO: 684252 - DNA, 100 bp, Homo sapiens
aaggattcgttacagccagagattgaattctgcttggtcagaatcgtgatggcattgtgttcagcactgatgactattttcaccatcaagatgggtacag

SEQ ID NO: 684253 - DNA, 100 bp, Homo sapiens
ggaggagcagttgtctgatgaagagaagatacgtcggtaacctttccagagatgtgacagaagctctaattctgcaactctttagccagattggaccttg

SEQ ID NO: 684254 - DNA, 80 bp, Homo sapiens
cacgaatctgcccacccctcctgtaacccagcctgtttcacttcttgtgcaccaattccagctggacatcactgtgaaaa

SEQ ID NO: 684255 - DNA, 74 bp, Homo sapiens
tgaggcgggggtcggcccggggctcggagaatgggcagatgcacattgactctcatgaagcccttggagtgtta

SEQ ID NO: 684256 - DNA, 75 bp, Homo sapiens
cagagctgaatggccgctacatcagcaacgaatttaaggtggaggagaacgaagtgaaactcctggtagaacgga

SEQ ID NO: 684257 - DNA, 98 bp, Homo sapiens
agcggcgagtttccgatttaaagctgagctgcgaggaaaatggcggcgggaggctttattgaaaaggcttgaggccgtgaaaccaacagttggtatga

SEQ ID NO: 684258 - DNA, 75 bp, Homo sapiens
tgcgcagttttgttctgctccagctgttcgaaggtgatccagtacgtaggaagcctggacgtgccaaggcccaac

SEQ ID NO: 684259 - DNA, 83 bp, Homo sapiens
cttaggtctgttagaggaagacgacgagtttgaagagttccctgccgaagttctttctacaacttcaacaggctgcactggag

SEQ ID NO: 684260 - DNA, 117 bp, Homo sapiens
aagccattcagttatctggagcagaacaactagaagctttgaaagcttttgtggaagcaagtcctcagaatggttggaatgaccctccagctttgaacagagtacccaaaaagaaga

SEQ ID NO: 684261 - DNA, 83 bp, Homo sapiens
ggacccggtgtctgctcctgtcgccttcgcctcctaatccctagccactatgatccagagacaatggccccgatgggatggag

SEQ ID NO: 684262 - DNA, 50 bp, Homo sapiens
agaaaaacacgatcagctcttagacagctgtatgcaggagctattcttga

SEQ ID NO: 684263 - DNA, 100 bp, Homo sapiens
gcgggagcagctactgggctggactgcggaagcgttttgctgctgacatcatctccgttttggccatgaccatgagtggggagcgtgagtgcctcaagta

SEQ ID NO: 684264 - DNA, 100 bp, Homo sapiens
ttagaaaggatcaggactggcggaccaaagagaaccctgtacagtaagaaatatggtgtggacctcatcagatacactcatgcagcaaacacagttgttt

SEQ ID NO: 684265 - DNA, 100 bp, Homo sapiens
aattgacagagaggggaaaccccgtaaagtggttggttgcagttgtgtagtagttaaggcattcctcctgaccagcagaggttgatctttgccggaaagc

SEQ ID NO: 684266 - DNA, 100 bp, Homo sapiens
ataatagtcaggcagcttgtgagatctgctgatttgggtcctactttaatgacaagacctggacaaccagcacttaccagagtgcccccacctattcttc

SEQ ID NO: 684267 - DNA, 90 bp, Homo sapiens
tctagattgtttacgaaataatgggcaatcaggggacaatgtagtaaaggcacaactacaagagcggaatgaccctcagcaactgctatt

SEQ ID NO: 684268 - DNA, 75 bp, Homo sapiens
gagtcaaggtcgaagttttttcatcccaagccagttccgctgattgggcagaaagtggcccatgctctggcagag

SEQ ID NO: 684269 - DNA, 100 bp, Homo sapiens
gtggcagccaaaagattgaaggaaggtgatacaatgatggggcagcaagtggccaaagacgagttgtactgctgtcacaggaaatggacgctggattaca

SEQ ID NO: 684270 - DNA, 90 bp, Homo sapiens
tgcggaagtgcagctgcctcagttcttagcgcagggggtccctcccttctctctgagcccatgaagacttgcttcactgggggcaatgtg

SEQ ID NO: 684271 - DNA, 100 bp, Homo sapiens
ctgctcgttggaggctgtgcagcagaaggttgtcggggccaaagtggtaacgaacgcccgcagcccgggggctcgatgctatggattcgtcaccatgtcg

SEQ ID NO: 684272 - DNA, 74 bp, Homo sapiens
tggagggtcaaagaaactcctggttgagctcaaagttattttacattgtctccagaaatgctttgggttcatct

SEQ ID NO: 684273 - DNA, 82 bp, Homo sapiens
ctcgacgtcttgcctgtgtcccacttgttcgcggcctatagggagattcttcaagcaatcactatgtcaacagacacaggtg

SEQ ID NO: 684274 - DNA, 100 bp, Homo sapiens
aatcacttaaaggagtggacattgctagcaatgagctcccaaagccatccagtgaaggtggtgtttttaaggctcatcttactttcccaaaagattatcc

SEQ ID NO: 684275 - DNA, 75 bp, Homo sapiens
ggcgcatatcctgggtagcctctaggaagcgctagacacatgctctggcttcatcatgtgcagcggcaaagagaa

SEQ ID NO: 684276 - DNA, 83 bp, Homo sapiens
aatggacatgattgcctaaatcagccaaacacagggtataatgggtctctcccaaatggcgatagaggaaggaggaaaagtag

SEQ ID NO: 684277 - DNA, 82 bp, Homo sapiens
cggcgacctgacgctactatgggccgagtggcagggacgacgcccagtttactaaagcagtgaagcactttggggaagaggc

SEQ ID NO: 684278 - DNA, 101 bp, Homo sapiens
agcaagctgaagacatcaagaagatcttcgagttcaaagagaccctcggaacattgtcctgggtcacataatgccagctgagcgtaaaaagccagcaagta

SEQ ID NO: 684279 - DNA, 75 bp, Homo sapiens
cgagtatctggtgaagtggaaaggatggcccccaaagagcaggccgggctctcgccatgggtcactgtcgcctct

SEQ ID NO: 684280 - DNA, 75 bp, Homo sapiens
tgaccccttgtccagttactctaacaagtctggagagtgaattactggaactgaaacggcagcagcaagagcaag

SEQ ID NO: 684281 - DNA, 99 bp, Homo sapiens
gcttgcagtgttgatggtggtggtgctggtcatcaatgttactcaggtagagatgcaggacaagtactccaaaagtggcattgcttgtttcttaaaaga

SEQ ID NO: 684282 - DNA, 110 bp, Homo sapiens
acctgctaacagaactggaccttttcgatattgatgatgttaagaagttcaaaccgggttacctggaagctactcttaattggtttagattatataaggtaccagatgga

SEQ ID NO: 684283 - DNA, 75 bp, Homo sapiens
tgaaattcatgttttggaaaaacacactaatatgaatttaactcagttgaagctgtcggaaaaggtaacagaaga

SEQ ID NO: 684284 - DNA, 75 bp, Homo sapiens
atcaacactttatacagtgcctggtataccaaagttttacacctgcagcagaagtcaaggaaaaaggaaagaaag

SEQ ID NO: 684285 - DNA, 87 bp, Homo sapiens
ggagttcttacaacatggcagacattgacaagtagctacagcaagctgggtagcaggcagatccaaaggatatcatgaagtttccag

SEQ ID NO: 684286 - DNA, 100 bp, Homo sapiens
aatcttagataagaaggttgagaaggaacgagttgaagcagttaatatggctgaaggaatcattcacgacacagaaaccaagatggaagaattcaaggac

SEQ ID NO: 684287 - DNA, 90 bp, Homo sapiens
ctcttggccgtgatcctgtggtttcagctggcgctgtgcttcggccctgcacagctcacgggcgcctggagcattggtaagcgtcacact

SEQ ID NO: 684288 - DNA, 75 bp, Homo sapiens
tcatgtacagaacatgatcaagggtgttacactggtagttagaaacaaacctgtggcaaggcaggctcctggcaa

SEQ ID NO: 684289 - DNA, 75 bp, Homo sapiens
aaaagggcaggaccagcaccctcttctacggaggaaggaacgggcacagcaggttccaagttccccatcaagtgg

SEQ ID NO: 684290 - DNA, 87 bp, Homo sapiens
gggacggaggacgcgctagtagaagaagttcgtgccccaattcctcaaaagcaggaaatactggtggaaccagaaccattatttggt

SEQ ID NO: 684291 - DNA, 75 bp, Homo sapiens
agtaatggtgcaaagcctgaatttttcagttatgggacaaaaatattatatcaaaacactgaagctttgcaatct

SEQ ID NO: 684292 - DNA, 74 bp, Homo sapiens
agccacgtgcagacatctacaaccttcgatctcctgacgagcttgctctttgacatatatgaaggtcaaatcac

SEQ ID NO: 684293 - DNA, 90 bp, Homo sapiens
ctgttgcctatcagaagtcaattcaaaggacctgcccccagagagatttcatggatttgaatgtgaacatctgttccctggacgcactgc

SEQ ID NO: 684294 - DNA, 100 bp, Homo sapiens
gacaccagcgcagctctcttgatttcacacattgtgcaatgtgttacacataatattgcattacttcgagaggtgataatcaactcacgctttgtaaaag

SEQ ID NO: 684295 - DNA, 100 bp, Homo sapiens
ctgcccccatgacatcctggctgggacgagatcgagatggtgatcatggagcgtagcaagctctcagagctggccgccagcacctccgtgcaggagcaga

SEQ ID NO: 684296 - DNA, 75 bp, Homo sapiens
agagctgaacattactcttccagaagagaaattgcaggtgctgcagtgtctgaaatttccgggcctttctcaaca

SEQ ID NO: 684297 - DNA, 101 bp, Homo sapiens
ttattgtactacttatcccattacttggaaaaaaactcactggaaaagaaacccaaaagctatatggtgtctctaattaacagaagatggcaaagcccagc

SEQ ID NO: 684298 - DNA, 100 bp, Homo sapiens
aaggcactcaaaagtggggggcaggaaagttggcagatgtgaatggagtcattgaggaggagtttaccatggcccgcctgtacatcagcaagatgaagtc

SEQ ID NO: 684299 - DNA, 97 bp, Homo sapiens
tgaagtgcagaggtttttttctggtggtctggacttggctattgagggcccctcaaaagcagaaatcagctgcattgacaataaagatgggacatgc

SEQ ID NO: 684300 - DNA, 74 bp, Homo sapiens
cggaggcttcgagtgacccgggtgccgaggagcgggaagagttgctggggttttgggatttgagattgacgcgg

SEQ ID NO: 684301 - DNA, 100 bp, Homo sapiens
ggacaggccagccctgcccctgcggtccggatgctgcctacatacgtggggtccaccccacatggcactgagagcacagtccctggaggacccattggag

SEQ ID NO: 684302 - DNA, 75 bp, Homo sapiens
aatgaaattatggttgcaccagttatctccagaagaagaagagaaaaggagaatccgaagggaaaggaataagat

SEQ ID NO: 684303 - DNA, 75 bp, Homo sapiens
aagcgccgcgcacggacttcggcagaggagccaaaaacctgtatatcatctccgtgaaggggatcaagggacggc

SEQ ID NO: 684304 - DNA, 100 bp, Homo sapiens
aaggattccaagtaactcttatttgaggaatgtttgctgggggattgaaggagatggaacaggaagaggtcctgatccacggtgtgtcctacaatgctat

SEQ ID NO: 684305 - DNA, 82 bp, Homo sapiens
tcttcctcctccgctaccaccaccacaccagaaactagcaccagccccaaatttcaacccagcttagactagaaagtctaga

SEQ ID NO: 684306 - DNA, 97 bp, Homo sapiens
ccccccagccgcagacaaaagacctcggggccggcctcgcaaggcgcttcccctttccagagagccagaaagaagacaactacacctttgcccaacc

SEQ ID NO: 684307 - DNA, 97 bp, Homo sapiens
cgccggctatggccgtgccctggggctgagccctcaggcggtcaggccgggtccagcactgccggatccgctccaccatggagggcgggaccctgaa

SEQ ID NO: 684308 - DNA, 82 bp, Homo sapiens
tttaattttagggtcctttatatagaagggagagtgaagacactggtggaattcctcattgataactgctttgaaatatttg

SEQ ID NO: 684309 - DNA, 98 bp, Homo sapiens
gaagcttaacttcttatccatcccatctcttggacagatgatgccagttaattactttgaatgcacttcagacaccacctccaacaacacagcaaccg

SEQ ID NO: 684310 - DNA, 75 bp, Homo sapiens
ggaacgctggcaagtccaccatcacgtatgagtgaccacagggcctcccagcccaacatctccagctggatccca

SEQ ID NO: 684311 - DNA, 98 bp, Homo sapiens
tcatttaatgaaattttcaccagatggagaattttttgccactgctgggaagcctttgacgacccctatgccctggtggtgctggctgaggaggagct

SEQ ID NO: 684312 - DNA, 100 bp, Homo sapiens
tgctgtactatcccaccttccatgatggagttctgaccacatccgtgagaaagatggactgtgggctgtccttgcctggctctccatcctagccacccgc

SEQ ID NO: 684313 - DNA, 97 bp, Homo sapiens
tgaaggaagccgcccgccccccaccgccgccccctccggcgtgttcatgcccccggggtcaaaatgcagatcttcgtgaaaacccttaccggcaaga

SEQ ID NO: 684314 - DNA, 75 bp, Homo sapiens
tgcagcagctgacagcgtttttccagcagtgccctgaaagcattaacacccttgtgaagatcagcaaaagtgcag

SEQ ID NO: 684315 - DNA, 98 bp, Homo sapiens
tcacctcgatgcagccagtagcttggatccttgtgggcatgatccataatcggtttcaagatgagattgtgtggcctgagggtgatgaggcactgccc

SEQ ID NO: 684316 - DNA, 50 bp, Homo sapiens
agactcatacgcaacctcaatggctgatcagctgaccgaagaacagattg

SEQ ID NO: 684317 - DNA, 75 bp, Homo sapiens
caaacatcttccaccacagcttagagtgcaactgcagatagaagacctgactcgtaaactgcgcacaggagacct

SEQ ID NO: 684318 - DNA, 50 bp, Homo sapiens
ctgaagtgctcaaatctgaagatgatgccccagtgaagttgtgtgacttt

SEQ ID NO: 684319 - DNA, 60 bp, Homo sapiens
ccctggttgtgagaagacgtctgtgtcgtgcggtaacattgtataacactgatcaggatg

SEQ ID NO: 684320 - DNA, 100 bp, Homo sapiens
aactccaccgccaccagcgcgggcgcgggccaaggtggtgaaattgcctctacctttgatcacccagaactggtgaagcttggaagttgcaaacttatcg

SEQ ID NO: 684321 - DNA, 75 bp, Homo sapiens
gcgcgccccaccaccgccctcaccatgaaccaagagccactgagagaggaagactctgatttcatcctgaccgaa

SEQ ID NO: 684322 - DNA, 90 bp, Homo sapiens
cagaggtgatccctgggcctccatcagagagccctggcatgctgactaagctccaggcctgtcatctttacttcagagtgttactgggaa

SEQ ID NO: 684323 - DNA, 75 bp, Homo sapiens
ttccgtttgttggtggaggaggtggcaggcctcggcggatggatagaatgacagaagatgctcttcgcttgaatc

SEQ ID NO: 684324 - DNA, 98 bp, Homo sapiens
gaggatgatttcatgtgcgatgatgaggaggactacgacctgagacacccgccatttcacccagtaagcgggcccggcctgcggaggtgggcggcatg

SEQ ID NO: 684325 - DNA, 75 bp, Homo sapiens
ccccgctgaccaggtggctgcaggcatgaaagatggccagaagataacattccatggtgaaggagaccaagaacc

SEQ ID NO: 684326 - DNA, 100 bp, Homo sapiens
agcattacagatcctgagacgcattgctaagtgcaatgggaaatacctctcatcaaattactcagaggtgaccaagaatatggcccaggtgaccaaagcc

SEQ ID NO: 684327 - DNA, 87 bp, Homo sapiens
tgaatgctatctgtgcacaagtcattcctttcctgtcccaagaggtgtgttccagagaacaagccttcagacatttgctatattgac

SEQ ID NO: 684328 - DNA, 100 bp, Homo sapiens
ctgaggcggcgcggcagcggagggacggcagtctcgcgcggtttactcctggcttgggggcattaggaagcactggaggctcttcgggaactaatggatc

SEQ ID NO: 684329 - DNA, 96 bp, Homo sapiens
tcttcctcttcaagctcatctacaacgagtactgtgggcctggagccaagcccctcttcaggagtaaggtatcatgaactgatcactaaatatggg

SEQ ID NO: 684330 - DNA, 80 bp, Homo sapiens
tcttccacctaaaattattcaagactattattgtactcttagtcctctccagggggatatgagactttctactcggaata

SEQ ID NO: 684331 - DNA, 90 bp, Homo sapiens
attagacggcgttactgaagcagccaaacactctattagatgaattacttactgagccaaagcaactcccagaaaaatactctcttcctg

SEQ ID NO: 684332 - DNA, 100 bp, Homo sapiens
agagggtggacgaccccgaactccaggacagcatccaggcctcattggacagcattcgagggagaagaaatgggtgaccgttggtgacacatccctacga

SEQ ID NO: 684333 - DNA, 98 bp, Homo sapiens
gttcgggcctagcggagccgggactggagaggatggcattccctgtggatatgctggaaaattgcagccatgaggaattggaaaattctgctgaagat

SEQ ID NO: 684334 - DNA, 98 bp, Homo sapiens
taactggtctggagggtggcatcatgcaaagaaattatccagaaggctcatcatctcttgctgtggaaacggaaacatagcagttttcacatttcctg

SEQ ID NO: 684335 - DNA, 75 bp, Homo sapiens
tcctgcgctgttccacctcattcaacttcaggtttaaacttacacgaatcgctttctggaggaggaggggacccg

SEQ ID NO: 684336 - DNA, 98 bp, Homo sapiens
ctggatgcacagccccggcgctgctgatgcttttttcaaagccgctataagccttgttccggaagttccaaagatgattaatattgatgggaagatgc

SEQ ID NO: 684337 - DNA, 100 bp, Homo sapiens
gagaaataccgcattcttatcacaaagggtaattttatggagtgtcagcccgagagcagcatctctcaccgtttccacaaagactgtgcctctcgagtca

SEQ ID NO: 684338 - DNA, 96 bp, Homo sapiens
gagtgagaagcaagaaggccctggacacagcaatatctctgggctttcacaggcttcagggatgacttcttagggggcaggggaggtagtcgccca

SEQ ID NO: 684339 - DNA, 75 bp, Homo sapiens
tttttgaaccaaattatgctgcaaatagtccataaaacagacctggaacgagtgttagaagcaaatgatggctca

SEQ ID NO: 684340 - DNA, 83 bp, Homo sapiens
gtgtggcttttatcctggataacaccatcccagcatcacaggacatggccccctcagccacctagctggggcccatctaggag

SEQ ID NO: 684341 - DNA, 50 bp, Homo sapiens
ggagactcctgaccctcagaatgcctggcagtctctgtgaagatgaatgt

SEQ ID NO: 684342 - DNA, 101 bp, Homo sapiens
gggtgatcatttcattgagatcaacctgaatgaccaggtgtaaagtgcaagagtaatatgctatgactgaggttttaaatgcacagagagcaggatacaag

SEQ ID NO: 684343 - DNA, 75 bp, Homo sapiens
ggccggagcaggcgaggtggccggagccgtgtggaccaggaggagcgctccttatacaggatgctgtgttctttg

SEQ ID NO: 684344 - DNA, 82 bp, Homo sapiens
gctggattctgaggaccagcagatggccagtcacgagaacccaggtggaaatgagttctcaacagtttcctcggttaggagc

SEQ ID NO: 684345 - DNA, 76 bp, Homo sapiens
ggggaggaggatgggggctaaccagttagtggtgctcaacgtgtacgacatgtgaacagagtatctgtcaggcaag

SEQ ID NO: 684346 - DNA, 82 bp, Homo sapiens
aacttcgttcactggcagggatgaagtatcatgtcatggcaaatcataatagtttggaaagtgactattttaccccacaggg

SEQ ID NO: 684347 - DNA, 99 bp, Homo sapiens
tgctgatgtcatgccagtccagacaagcgccagtgccacgtctgcctttgtatttcagaagaaagtggtagcttcctttccaagaacagttctgagcac

SEQ ID NO: 684348 - DNA, 74 bp, Homo sapiens
ctctcacagagcagcaactagggaagattatggtgacaagctgaacatggagctgagtgagaaatacaagctgg

SEQ ID NO: 684349 - DNA, 75 bp, Homo sapiens
aggcttccaggggggccagatcacactcagcatgcagaagcctggcaggagatcgcagatgctgcggatgcttct

SEQ ID NO: 684350 - DNA, 75 bp, Homo sapiens
acatgagaaaaaggagcattctacagcaggtaaaccagacttgaatacaacattgccaattagacaaacagcatc

SEQ ID NO: 684351 - DNA, 100 bp, Homo sapiens
aagagtctccgcggtggaggtctgcgttgctcttgcttttcctcgctggggtgtacgtagccatcctaatggatatgggttggttcctgttttctatttg

SEQ ID NO: 684352 - DNA, 99 bp, Homo sapiens
ggaaaaagcaagctgaagacatcaagaagatcttcgagttcaaagagaccctcggaacggactggtgattgcagctggaagtgcccatgaccgagctgg

SEQ ID NO: 684353 - DNA, 100 bp, Homo sapiens
ggcagaagaaggggaactcctgctgcccactcagttgtctgagggaagtcaaaagcatgcaagcctacagaaaagcattgagaaagctaaaattggccga

SEQ ID NO: 684354 - DNA, 100 bp, Homo sapiens
cgggccagaaagagtgcgataatgccctgcgggagctcgaggtaggtgagctcgtgaaacaatatgaagaggagaaaatagccttttaaggaaattggcc

SEQ ID NO: 684355 - DNA, 101 bp, Homo sapiens
ccttcggcgggcccctgctgaaagaccggcatgccctattctgtgggcttccgcgaattaccttatcccatatcacacaactggtcctcagccataacaag

SEQ ID NO: 684356 - DNA, 101 bp, Homo sapiens
cactgactttcagctatggaatcggagcttcggaaatataaggaaaatgagaaggacactgaggtgttaatgtcagccctctcagccatgcaagacaaaac

SEQ ID NO: 684357 - DNA, 98 bp, Homo sapiens
gaccattgacgaggtggagacggacgtggtggagattgaggccaaactggacaagggtgattctgggggtccacttgtctgtaatggtgtgcttcaag

SEQ ID NO: 684358 - DNA, 75 bp, Homo sapiens
cgacccacgagatcatggggcccaagaaaaagcacctggactgatgtacagttacccagcacgtgtacctcctcc

SEQ ID NO: 684359 - DNA, 98 bp, Homo sapiens
ctgaagaagacacctactgaggctttgtgttggtgttgaagaggagaaggctgctgacattgacctctaccactgccccaactgtgaagtcttgcatg

SEQ ID NO: 684360 - DNA, 75 bp, Homo sapiens
ggaacccaggccccgccgaggcggccaggtctctaattaacagaagatggcaaagcccagccacagcagctatgt

SEQ ID NO: 684361 - DNA, 89 bp, Homo sapiens
agagaacaaactatattcacctgccagtgctactatatcggggccacagatgatgcagccaccaaaatcatcaatgaggtatcaaagcc

SEQ ID NO: 684362 - DNA, 75 bp, Homo sapiens
ggggaacaagatcggcaagccccacactgtcccttgcaaggtgccagctgctgcccgtgctggtgccattgcccc

SEQ ID NO: 684363 - DNA, 109 bp, Homo sapiens
gttcgcgtcatcacggacgagaactggagagaactgctggaaggagactggatgatagaattgccaaagaactgccaactctgaaagataatgatttcattaatgaggg

SEQ ID NO: 684364 - DNA, 100 bp, Homo sapiens
ctgaaaagcaggaagactctgagagcagtgaggaggaatcagacagtgaggaagcagctgcatctccagcacaggccgagtgtactacttcaaccacatc

SEQ ID NO: 684365 - DNA, 51 bp, Homo sapiens
cctcagcctccggagtagctgggactacagccaggtctaaactgcagtaat

SEQ ID NO: 684366 - DNA, 71 bp, Homo sapiens
gagatctgccaagagcgaggagtctctgtcatcgcaggccagcggggctgcgctgcgagctctgcctgaag

SEQ ID NO: 684367 - DNA, 75 bp, Homo sapiens
agaaagaagaaaagaaagatgcagaggaagaggaaagcgaactgtacaaggtgaatatcttaaccagacttgccg

SEQ ID NO: 684368 - DNA, 75 bp, Homo sapiens
ggcgccgagactgacaacgcggtcccacagggaaagaatatggcaaagctgatgcaagatgggtttattttgatc

SEQ ID NO: 684369 - DNA, 95 bp, Homo sapiens
tgttggattctaatgcagttcatcacatcattcatgattttcaggtcaattggcatgattttgctttttttgatcctgtaatgtatgagagtttg

SEQ ID NO: 684370 - DNA, 82 bp, Homo sapiens
gaagaactggcttcgggaattttaccagggctgaaatctctttaatgatggagggaagcaggcagacgcgagtgtctcggcc

SEQ ID NO: 684371 - DNA, 88 bp, Homo sapiens
tcgacacctacgacgatcgggcctacagcagcttcggcggcggcagagggttgggggccgtcccgctcctaaggcaggaagatggtgg

SEQ ID NO: 684372 - DNA, 90 bp, Homo sapiens
ctcaggtgtgggaccccatccttcctgtcttcgcagaggagtcctcgcgtggtttgagaaaccctccaagacccctcttggtgcctggtc

SEQ ID NO: 684373 - DNA, 51 bp, Homo sapiens
acggagccggacccgccgcctcccggcttgaaggatgccaatgatgtacca

SEQ ID NO: 684374 - DNA, 73 bp, Homo sapiens
agtacgcgcaggaggccgtcaagaagggctcgaccgcggtgttgctctcttgccattcgtggatgagcgaagg

SEQ ID NO: 684375 - DNA, 100 bp, Homo sapiens
tgcaggatatgatcaatgaagtggatgctgatgagagaaaaggaacagttccgtaagctctttattggtggcttaagctttgaaaccacagaagaaagtt

SEQ ID NO: 684376 - DNA, 97 bp, Homo sapiens
tgaatctgagccacagtgtgatcccagctttaaaggagatgcaggagaaaatacggcattgctaggtgactgctggctgctggcagccattgcctcc

SEQ ID NO: 684377 - DNA, 82 bp, Homo sapiens
atatgagaaagctaggccatctgaataactttactaaggtacttgatgaagaagcagaagtttttatagtcaaaatgtggag

SEQ ID NO: 684378 - DNA, 75 bp, Homo sapiens
tacatggactttcctaaagttgggcagccaacagggaagagtgtcgcacccaggagaaagttaatgcaacaggac

SEQ ID NO: 684379 - DNA, 51 bp, Homo sapiens
ggacacccctgaagccgagaaatgtgatttgccttcaaggaaactggggag

SEQ ID NO: 684380 - DNA, 91 bp, Homo sapiens
agttggaagcagccgatccagcctgcggagcctgtggggcaggactccctggaggaaaagcggaagcggcagcggtctgaacgcctggaac

SEQ ID NO: 684381 - DNA, 100 bp, Homo sapiens
attggatttaaaagacagtcctcgtcagcactgactttcagctatggaatcgaccccctcgaggacggtgccagactcggaggcccccccagggtgggat

SEQ ID NO: 684382 - DNA, 83 bp, Homo sapiens
ggacctggagctgacgcctaactgtgccctgtccacggtgcctcctgcatgtcctgctgccctgagctgtcccgagctaggtg

SEQ ID NO: 684383 - DNA, 74 bp, Homo sapiens
ggaaaatcgcttggttaaaacctgacacttttaacaggatctgtctggctccattgatgacctccccacgggaa

SEQ ID NO: 684384 - DNA, 90 bp, Homo sapiens
ccatcaacatcacaaataatgaaaaagttgttgttaaaattctcaaggttggatggcaagcatgtggtgtttggcaaagtgaaagaaggc

SEQ ID NO: 684385 - DNA, 100 bp, Homo sapiens
cattgttaagcacaagttcacgaaagcctacaaaagtgtggagaggttccttcaggaggatcaggatttgcagatttacagaatggctgcacattaatgg

SEQ ID NO: 684386 - DNA, 90 bp, Homo sapiens
ctactcagtttggatcctacaagcaagctgaatggaggccagatagtaccatgatagctgtatcaggtgcgaagtaccacattactgtca

SEQ ID NO: 684387 - DNA, 74 bp, Homo sapiens
ggagctggcggacatcactttagaccctccacctaattgcaggtgcacacatcttgaccaactcagcagcaagg

SEQ ID NO: 684388 - DNA, 85 bp, Homo sapiens
cgccgcgggctccgcgcccggccggacccgggcccgagctgattggggccctggtcctgtctgtgggcatctatgcagaggttga

SEQ ID NO: 684389 - DNA, 83 bp, Homo sapiens
gcagaaccccaggactgcgcccccgggagcgggcgcccagagagatgtggtactggatcttcctctgggctctcttctcttct

SEQ ID NO: 684390 - DNA, 82 bp, Homo sapiens
ctctgactctcggactgagaaacgcaagggctgaagaagatgcagagcagcctgaagctggtggactgtatcatcgaggtcc

SEQ ID NO: 684391 - DNA, 97 bp, Homo sapiens
gaaaaatggggcagaagaagagcagaaaatagcagccaggaaccaagaaaacttgaacttacccagattgaggatccaagagaacagtggaggcgag

SEQ ID NO: 684392 - DNA, 76 bp, Homo sapiens
gctgtttctcatctttatactcttccaggagtacgaccccagcaaagcgacctttgtgaaggtggtgccaaccccc

SEQ ID NO: 684393 - DNA, 83 bp, Homo sapiens
agagcaggagcctcggggtccggaaccagacgatgagacagagttgcgaccgcgcggcaggagaagaaactgaggcctggaat

SEQ ID NO: 684394 - DNA, 96 bp, Homo sapiens
catgggaatttccaaggggattcaaacttcaacagaatgtggcaaccaggagagttaatcttggtctatctggtgtgaatatattgtggatctttg

SEQ ID NO: 684395 - DNA, 89 bp, Homo sapiens
tcgtgatcccggcgacatactacctctggccccgagatcagaatgccggtcgtagttcccccgctccctgggaaagcgtttttgcgtca

SEQ ID NO: 684396 - DNA, 100 bp, Homo sapiens
taactgaggcgtttctgtacatggattatctggtactaggttttgacaagcttgcatcatgcgtgagtataagctagtcgttcttggctcaggaggcgtt

SEQ ID NO: 684397 - DNA, 82 bp, Homo sapiens
ccggggtcctggtcggggtggtctgtctgctcctggcatgccctgccacagccactgcctccaagcccttgcctccagcccc

SEQ ID NO: 684398 - DNA, 75 bp, Homo sapiens
ctgtggctgggattttacgattatgctcacaggctgagaacgggaagcttgtcatcaatggaaatcccatcacca

SEQ ID NO: 684399 - DNA, 115 bp, Homo sapiens
aagaaggcgagcagggtgcgggagagccccttgcagaagacgccgtacgaggatggcactggatctttaaaacgcagtggttcctttagcaaactccgggcttccattagacgca

SEQ ID NO: 684400 - DNA, 90 bp, Homo sapiens
cattggcagaagttgactgagatcagaggccctgtgatgatcgtgtcagagcaaattggtcaggagatgttggaaaaccttagtcatgac

SEQ ID NO: 684401 - DNA, 100 bp, Homo sapiens
ggaaaggaagtaccaggacttgcacagttggttaccacagagaagcgcttcctcaaagacagtttgtacaatgaaggaatcctaattgtatgggacccat

SEQ ID NO: 684402 - DNA, 101 bp, Homo sapiens
ccgccttttgtgctgcggccgcggagcccccgagaaccgggggcggctggcagacaagaggacagtcgccctgcctgccgcccggaacctgaagaaggagc

SEQ ID NO: 684403 - DNA, 100 bp, Homo sapiens
ttaaagccatgcccgaggatgctaaggggcagacagagtctcactcccatcgcccagacttgagtgtagtgatgtgatcactgctcactgcagtctcagc

SEQ ID NO: 684404 - DNA, 83 bp, Homo sapiens
gcctgcagggctacttcctcctggacgggaagtgcaccaacccttcagatatttcaacactcctctcagcatcctccacttcc

SEQ ID NO: 684405 - DNA, 75 bp, Homo sapiens
ttgctcactgatctattattttcaatagaaacagatatacagatgtggagaagagattccagacattctaaatgc

SEQ ID NO: 684406 - DNA, 82 bp, Homo sapiens
tgaacttccctggtcgaacagttttttctaatggctattcaaggatattagaaatggctactccccagtcaattttcatctt

SEQ ID NO: 684407 - DNA, 50 bp, Homo sapiens
ggaagggcttcaccaacctggacgaggaggccgtggagtcctgcctgacc

SEQ ID NO: 684408 - DNA, 120 bp, Homo sapiens
cgagactgtaggcactgccatggcccctgtgctcagtaaggactcggcggacatcgagccttagattgtaagcaaaagaaatcaaggtcaagatctggaagcaagaagaaaatgctaaca

SEQ ID NO: 684409 - DNA, 100 bp, Homo sapiens
ggacagtattggccaagcgtataccatgcaatgccttagcctatgagattgagaagcggctgagcacagcagacctcttcagattccccaactttgagac

SEQ ID NO: 684410 - DNA, 75 bp, Homo sapiens
ggagctgtgaacatgtgctatcgaaccctctacatcgggacaggtactgtcagtttgtgttgaggaagataacat

SEQ ID NO: 684411 - DNA, 95 bp, Homo sapiens
ccggccagtgcggcaaccagatcggggccaagggactttgaacatgtcggggatcgccctcagcagactcgcccaggagaggaaagcatggagga

SEQ ID NO: 684412 - DNA, 99 bp, Homo sapiens
gacgaccggttcgtcgcctccttgcccgtgaccgtcgctagaactcagttgtgcgttgcggccagtcgccactgctgccatcgaagacggcaatttgga

SEQ ID NO: 684413 - DNA, 83 bp, Homo sapiens
aggcaaggagctaaagcagcgtgcgttcagccctgggatgcgagccacccctctggctgctcctgcgggttccctgtccagga

SEQ ID NO: 684414 - DNA, 75 bp, Homo sapiens
ccgttggccttcgtacccgtcttgattgaggagcgtgaggatcatccccggagaggacgggaggatcggcagcac

SEQ ID NO: 684415 - DNA, 75 bp, Homo sapiens
ctggccgagcaggctgagcgatacgacgagtcattcaggagagcaggaaagaaaaggccatccctgtggatgtcg

SEQ ID NO: 684416 - DNA, 101 bp, Homo sapiens
gaaatgttcagcctggactcattcagaaaaggcaaagtgtttcatggatttcaaagctggaggcgccttatgtcacattcttggggctgcttacaagtata

SEQ ID NO: 684417 - DNA, 101 bp, Homo sapiens
gaaaggataagcctcgacttagaagctaccgagttaccctaagaaagtgatagactggagtgatgttagaaaacacaaatatggtcacctatcagagtctg

SEQ ID NO: 684418 - DNA, 88 bp, Homo sapiens
gcttcccaggacagaattctgcagctacctctgacttttgaggatgttgctatttatttctccgagcaagaatggcaggatctagagg

SEQ ID NO: 684419 - DNA, 98 bp, Homo sapiens
atcagtttctgtatagtgtaaaagccttggcaaatgcaacattatgtattcttgaacctattatggctgtggaagttgtagctccaaatgaatttcag

SEQ ID NO: 684420 - DNA, 100 bp, Homo sapiens
ggcgcgcgcaccatgggggagaaacccgggaccagttccagacagaactccggaagatactggtgtctctcatcgaggtggcgcagaagctgttagcgct

SEQ ID NO: 684421 - DNA, 98 bp, Homo sapiens
ggaaacctcagctggagctggccatggtgccccactatggtggcatcaaccgagttcgggtgctggaggcgctgctgccgctgaagggcctagaggag

SEQ ID NO: 684422 - DNA, 75 bp, Homo sapiens
gccccctcccagctcccagcgggttgaagctttgagagaagcagcaactgctgttgagcaagagaaagaaatcct

SEQ ID NO: 684423 - DNA, 83 bp, Homo sapiens
ccaaatgccagactgattgtcatgctcagggaccctgtggagagaaaatggtgtgaatggaacattaacttcaaatgtagcag

SEQ ID NO: 684424 - DNA, 75 bp, Homo sapiens
cttattcaccgttataactttcccaatctcaatatggatgtgcataaagctatttgtcgtagatgtccagacaag

SEQ ID NO: 684425 - DNA, 100 bp, Homo sapiens
aaaaagactgagtcgcagttaccaccaaacccaggaggagactctccctggaaaacttcccttccctttcgtgattcgcctttgccagtctcatctcgtg

SEQ ID NO: 684426 - DNA, 98 bp, Homo sapiens
tcggagcggccggtactgttgaaagcgacaagtggaggcgccgctctagcggccgggactctgaactatggcggcatgagccatgagcccaagtcccc

SEQ ID NO: 684427 - DNA, 49 bp, Homo sapiens
tggggagcccttctgcgccacaggttgaggaaacgtcccatgcagtcaa

SEQ ID NO: 684428 - DNA, 89 bp, Homo sapiens
cagcacaccagtggggcagtgcctcgttggattggatgctgctggcaagacaaccattctgtataaactgaagttaggggagatagtca

SEQ ID NO: 684429 - DNA, 74 bp, Homo sapiens
cttcttcaatgactggcgaaagatgtggacgagtgctcactagcagaaaaaacctgtgtgaggaaaaacgaaaa

SEQ ID NO: 684430 - DNA, 100 bp, Homo sapiens
gcgaagacaagagagctcattggtaaaatcccagaggaatccaaagccctctctttattggctcctgctccaaccatgacaagtctgatgcctggtgcag

SEQ ID NO: 684431 - DNA, 90 bp, Homo sapiens
gcctgctgctgagcagcgccgcggagcagagtaattctcagagcttctctacatcacatgaaggcttggaagaagataaagaccatccaa

SEQ ID NO: 684432 - DNA, 89 bp, Homo sapiens
atggcggatgccctgcagtacctgcagaaggtctctggagacatcttcagcagcacgtcctgaacagagcgcaggacatcaccctgccc

SEQ ID NO: 684433 - DNA, 98 bp, Homo sapiens
aaatcagatcgcactcctgaaattaggaaaattgccactgctttataagaaaacatagctctgctggcagaaacagctctgagattcctggaattagt

SEQ ID NO: 684434 - DNA, 95 bp, Homo sapiens
atgagcatatcactggcagctctagagctcctctctggccttgcaaagatatttctccctcgagtggctgggaaacttggcaagagaccagagga

SEQ ID NO: 684435 - DNA, 75 bp, Homo sapiens
tgaagagacatgcgatggtagatcaacccccagggaacacagccgcacccgggtctgtgccagctgtggttggca

SEQ ID NO: 684436 - DNA, 89 bp, Homo sapiens
cctcccccaggagaccgttgcagtcggccagcccccttctccacgagagaagtggagatcctgatgtttctcagtgccattgtgatgat

SEQ ID NO: 684437 - DNA, 83 bp, Homo sapiens
gactcagagtgtgagaaaaaaataaactcctatttgtttatggcaaggttaaaaatctgtaagagcctgattttagaattcac

SEQ ID NO: 684438 - DNA, 100 bp, Homo sapiens
cctggctggcatggccattgtcaaggaggaggagaacggggctgaggaggaagaagaagaaactgccgaggatggagaggaggaagatgaaggggaagaa

SEQ ID NO: 684439 - DNA, 90 bp, Homo sapiens
aaaatgtgcatactcacagagttagagagagggatggtggatgtcacatgtacttcagtttgaggataaaagcagaaaagtgaaagatgc

SEQ ID NO: 684440 - DNA, 76 bp, Homo sapiens
acttggatcattaccagaagagataggtcagctcaaacagttaatggagctgattgcagagggaatggcatacatc

SEQ ID NO: 684441 - DNA, 100 bp, Homo sapiens
ccgcgttcctgctgctctgcctgctccacaagcggcgccgcgccctcggcctgcacgggtaagaatgattgatgttggctgatattggagtgctcattca

SEQ ID NO: 684442 - DNA, 75 bp, Homo sapiens
acatccagaacccatccttctcccagatcaaccagctgaggaacttcctgaagtgctccgaagacaacccgctct

SEQ ID NO: 684443 - DNA, 119 bp, Homo sapiens
gtaaattgttccatccagaccttgggcttgatttcaacagccaagccaagtttcatgaatgtgtcggagaccagtgaatggaggctaagctatgtcaataaggaatttgctgtctgtcc

SEQ ID NO: 684444 - DNA, 101 bp, Homo sapiens
ggagctggacgccgcgatcgtggggcccgcgaggcgggcagccggggcgtccagacaaatttacatgtattggagaccagaccagaagcccttctgaatta

SEQ ID NO: 684445 - DNA, 75 bp, Homo sapiens
cgtgaccgagagcgtgaccgagagcgcgaatatcgtcatcgttagaagccacagttgaggctattgaggctgaaa

SEQ ID NO: 684446 - DNA, 90 bp, Homo sapiens
cagagatggacggtcactcagcctatggaggggaaggggaggagttacagcccggccagttggagttgtagtaccacgagggacgccaac

SEQ ID NO: 684447 - DNA, 100 bp, Homo sapiens
aaaattctaacttttcctgagaagagtgttctgccagttctggataatccactgtccaagaaggttcgaggcctcattgatagcttacgggcacagagat

SEQ ID NO: 684448 - DNA, 100 bp, Homo sapiens
tgcaaacctggagccagaaacattaccgtcatattccacccattactaaggaagatgagaatgtgcctactgctcctgatcctccaagtcaacatttacg

SEQ ID NO: 684449 - DNA, 101 bp, Homo sapiens
cttctataacatcttaactaaaagcactcccacgtctacaatggagtcgagtctagaattcacacagagccacctaggagttaagtatgacattgacctgc

SEQ ID NO: 684450 - DNA, 100 bp, Homo sapiens
aagcagaaagtagatgaagatgagattcagaagatgcagctcgattttattctccagccaccatatttattgatgagatagactccatctgtagtcgccg

SEQ ID NO: 684451 - DNA, 100 bp, Homo sapiens
gaggagctgaagaaggttctagatgctaacaagagtcgtgtcccaaatgcgaacatcctcgtgcttacttcatgcagcttcagacccgctctgcagatga

SEQ ID NO: 684452 - DNA, 98 bp, Homo sapiens
agattgttgagaaattggatcttacacttgaaatacagactgttggggaacaagaggaaatggctagtgatgagctgaaagagatgcggaaaaacttg

SEQ ID NO: 684453 - DNA, 51 bp, Homo sapiens
ccctggagaagcagatggaaaaggacagaggtgttccgggaggagctgggg

SEQ ID NO: 684454 - DNA, 100 bp, Homo sapiens
ccagagtaaagcaaagagaaaggaagcaggcccgttggaagtggttgtgtggacccaagtggagagattgtggaactggcgaaaggtgcatgtccctgga

SEQ ID NO: 684455 - DNA, 100 bp, Homo sapiens
gaaacctgtgcccagcagctctggtggagatgcccacgttccccatggctcccaggtcattaggaagctggtcatgacctgcgaccgcatcaagcagtcc

SEQ ID NO: 684456 - DNA, 100 bp, Homo sapiens
gtggtggatgcggccaactccaatgggcctttccagcccgtggtccttctccatattcgaggagtctgatgacttttcacagtaccaactcaaaggcttg

SEQ ID NO: 684457 - DNA, 100 bp, Homo sapiens
ggaaaccggtagcgcttgcagcatgccctcttggaacagagatcatgatgacacggcatctactcgttcaggaggaaccccaggcccttccagcggtggc

SEQ ID NO: 684458 - DNA, 83 bp, Homo sapiens
cccttccccacgcaaccccagatccatttacactttacagtttccacttgagcggcacagtgacagaacctgcaatacaatcg

SEQ ID NO: 684459 - DNA, 90 bp, Homo sapiens
ttgagcctgttaattcctgagaaaatcagtctgtcttcagcctccagcagtccagacccaacatgagtgaagtttcctgcaagaaacggg

SEQ ID NO: 684460 - DNA, 98 bp, Homo sapiens
ggtacctgagaatgtggacatctctgtgaccctctacagggtgtgccttcttccacggtgaggttgacaagccggcccaaggctttttgcaccggggt

SEQ ID NO: 684461 - DNA, 96 bp, Homo sapiens
ttgtacagagatgtgatgttggagaactatagcaatctggttttcttggttacagccaagttctacttctgaatctatggatcaactactaaacaa

SEQ ID NO: 684462 - DNA, 83 bp, Homo sapiens
ctggccgggggcgcgggcggcggcgccggcaggaagttgatattcactgatggactccaaagaatcattaactcctggtagag

SEQ ID NO: 684463 - DNA, 83 bp, Homo sapiens
atggggagaaggaagcgagactcatacgcaacctcaatggctaactatatgtcagaaagcatcagcttttctcgatggaccca

SEQ ID NO: 684464 - DNA, 98 bp, Homo sapiens
gcgactagtaagcctatgtcatttcatccaccacattacttagaattcagcattattctggcagacattcacaaagaactgacaaggaaagaagagag

SEQ ID NO: 684465 - DNA, 75 bp, Homo sapiens
tcgtttttcgccgtcatgggcgcctcggccgccatggtcttcagcggctgctctttggcgtaaattgcaatcgat

SEQ ID NO: 684466 - DNA, 101 bp, Homo sapiens
ccgaggtagaggcagtggcgcttgagttggtcgggggcagcggcagagagaagaagaaggaggttcctgctgtgccagaaacccttaagaaaaagcgaagg

SEQ ID NO: 684467 - DNA, 75 bp, Homo sapiens
caccgctgcggggactggagtcggcggagaaaaccggggtccccagcgctggggcaggttcaggagaagtggcac

SEQ ID NO: 684468 - DNA, 75 bp, Homo sapiens
aacccccttacagatgagaataaagaacacgaagctgatacagaagtgtcattgttgcagcaaaaaagtcagcag

SEQ ID NO: 684469 - DNA, 100 bp, Homo sapiens
cttctcagaccatcacaccatgtggttgcaataaattgacagaccagaccctgatctacctacggcgcattgccaacgtcaccttgatcgaccttcgagg

SEQ ID NO: 684470 - DNA, 110 bp, Homo sapiens
agtgtcctatggcaacaccttctttgtggttctcattgtcatccttgtgctgttggtcatcgccgctccggtggatggactggaacgccccccaggttcagtaccgcgtg

SEQ ID NO: 684471 - DNA, 75 bp, Homo sapiens
gtcgatactgcatgcaccagcacctcaagttgaaatggatgcagtcagaactgaatgttgaagaagtggtaaatg

SEQ ID NO: 684472 - DNA, 100 bp, Homo sapiens
ggagggacgtgaacggagtgaccaagagcaggtttgagaaggggaaactgaggcccaaggaaattgagtatctctgcaaagtcaccagctgagttcgaac

SEQ ID NO: 684473 - DNA, 98 bp, Homo sapiens
aaaagccaagaggaggacagttcgctacacagcaatgcatcgaggctgcctttaatattggttgggaacaaatctgatctggtggaatatagtagtat

SEQ ID NO: 684474 - DNA, 83 bp, Homo sapiens
cagaacttcccaaggaaagagaacgaatcgaaggacttggtgggagagtaagccatatcaaagacttcattgaaaaataccaa

SEQ ID NO: 684475 - DNA, 75 bp, Homo sapiens
gaaggagaaacaaacttcagctctgaaatagaagatcttgcaaggaagctttgcatcgtccctatggttgtgatg

SEQ ID NO: 684476 - DNA, 74 bp, Homo sapiens
tcatggtgcggctcatcttcgagaggttcgagaacttgtcttggacaattgcaaatcaaatgatggaaaaattg

SEQ ID NO: 684477 - DNA, 125 bp, Homo sapiens
ggagaagcagtggtgggttccatgtgatggtggagtaggaggcaggtctccgcgacaacaatatgcacaggttttggcccaacagcagaaagcagcactgtcttcccagcagcagcagcagttgg

SEQ ID NO: 684478 - DNA, 100 bp, Homo sapiens
cgtgttggaccttccggagcttctcagaagacagagggttttcttttgaggttaaatggaagctgatcggcgttcacatggaatcctcctcacgtagctc

SEQ ID NO: 684479 - DNA, 100 bp, Homo sapiens
gctcaaaggacactatgcaatcacccgaaagaaacactttgtgctactctgtggggctttggaaaagcatgttaaatgtgatattagggaagatgcaaga

SEQ ID NO: 684480 - DNA, 102 bp, Homo sapiens
gactccccaggcacttctcgccataccccgcccaccaggaggggtcctcagtctattatcctcccagtccacaacgctgaaccgtggctggacgaatgtttg

SEQ ID NO: 684481 - DNA, 74 bp, Homo sapiens
tgggtcctctccagggagaccctctgtgggaccaagaatcgccttcagccctgtctggtgcatccttggcagaa

SEQ ID NO: 684482 - DNA, 100 bp, Homo sapiens
gtgctgtggtctgagctagagggtgaagctggcggagcaggaggatgggcgctattcaggattatgaaactgctcaggaacacaatgaaaatgatcagca

SEQ ID NO: 684483 - DNA, 90 bp, Homo sapiens
gtgattgtcagagcagggaaaatcacctttgcagaaaaggttcacaatattcttgcagaaatggtgatggggggaatggtattggagaca

SEQ ID NO: 684484 - DNA, 100 bp, Homo sapiens
tctgacaagaccaagtactaccttcaaggagccaatgaagtgcttttggtggttgggggctttggaagccagcagtctcccattgatgtggtagagaaat

SEQ ID NO: 684485 - DNA, 101 bp, Homo sapiens
acttggattcatccacagagacatcaaaccagacaaccttcttttggacagcaagctgtgttcaattacaaaaaaagatggaaaagactgttatgaagcca

SEQ ID NO: 684486 - DNA, 75 bp, Homo sapiens
atcgcgaggcagagcgggagcgcgcagccagatggtgaccctctttcagatgtgggttgttcccctctatttcac

SEQ ID NO: 684487 - DNA, 75 bp, Homo sapiens
ggaaggaaccgctctcgcttcgtcctacacttgcgcaaatgtctccgatgtcatttgtcagagtgaaccgctgtg

SEQ ID NO: 684488 - DNA, 83 bp, Homo sapiens
cccgcagcatgaacccccgccggcgggcagcctcctgtacagcccgccgcccctgcagggagtgcatccgccccaaccctttt

SEQ ID NO: 684489 - DNA, 100 bp, Homo sapiens
tggacatccgcctccgagtggatgcagcaccccgtcgccggcaagtccctccagctacaaggtgggcaccatggcggagaagtttgactgccactactgc

SEQ ID NO: 684490 - DNA, 82 bp, Homo sapiens
ccgcccaggcgcagatgcgggccctgctggaccagctcatgggcacggctcgggacgggcgtgatggtgggcatgggtcaga

SEQ ID NO: 684491 - DNA, 100 bp, Homo sapiens
ctatgctgaacggtgcagcagtgatggatgcagctcttctgttgatagggtcacctctgtccagtcagccagtcttaatcaccgtccagcggcagctacc

SEQ ID NO: 684492 - DNA, 75 bp, Homo sapiens
aagccctggtagatcaactttggaaacttatgaattctggttattggaggattcttgaatttgattatgagatga

SEQ ID NO: 684493 - DNA, 75 bp, Homo sapiens
ctcgggagtccaccatcgctctgcaagccgcaggacgagattgaggagctgcgggccgagatgctggagatgcgg

SEQ ID NO: 684494 - DNA, 75 bp, Homo sapiens
aacccagctggcccgtgctttcactatggactgtattactttggaagacaacactaagcagttgagatttgaaga

SEQ ID NO: 684495 - DNA, 76 bp, Homo sapiens
cccagccatcacctggatttacctgttttctgggagcttcgaagtggaactctctagcctcctggttcggaatgtc

SEQ ID NO: 684496 - DNA, 100 bp, Homo sapiens
aggagctctcggtcctggccgcgattttctgcaggccccacgagtgggaggtgctgagccgctcaggaggcgtctaaactggatccagtgggcttccctc

SEQ ID NO: 684497 - DNA, 75 bp, Homo sapiens
atcagcaggttgcaggtgaacatggccttgaggttttgctgttactgctcagtgtagtcacaccttgaataagaa

SEQ ID NO: 684498 - DNA, 100 bp, Homo sapiens
gctgtgatgcctgcagagctgtggcttaccaggctgcaagccggaacaacagatgatgtatgcagggagtaaaaacaggctggtgcagacagcagagctc

SEQ ID NO: 684499 - DNA, 100 bp, Homo sapiens
cgctgcagtcgagtgtatctggaagcctacacctcagtcctaactgtagggaaggaagccttgctgcaagctttcttcctggtggcagatgacatcatgg

SEQ ID NO: 684500 - DNA, 100 bp, Homo sapiens
agtaaacaacttgatgtttataacttaactgcaagacctattattgattctgtacttgaaggctacaatggttctgggttgaatgatggacagtggcacg

SEQ ID NO: 684501 - DNA, 101 bp, Homo sapiens
gcaggcctccgggcccggcgccgccgcccgcagtgtcctctcgcatggcagagcaagtgggaaggcccagaagatcccttacaatacctgagaggtcttgt

SEQ ID NO: 684502 - DNA, 83 bp, Homo sapiens
cacttgcatgtatttggaacaaaaaaaggagatgcctggcagccccgctctctgcagtcttcaaagcttcacctttctccaaa

SEQ ID NO: 684503 - DNA, 83 bp, Homo sapiens
gcccgggacctgcatggccaggcagagtcagcagctgcagtgtggaaggtcaaaatgcagatcttcgtgaaaacccttaccgg

SEQ ID NO: 684504 - DNA, 100 bp, Homo sapiens
atttgcccattctcaggaagagcttgaaaaataatgatgaacctctcctgagtggatctggtgatgtatccaaagaatgtgcagaaaaaattcttgaaac

SEQ ID NO: 684505 - DNA, 120 bp, Homo sapiens
ggcgtggagcagcatgtacgccaaggggggcaagggttcggccgtgccctccgacagccaggcccgcgagaactggagcagatccgcagggacatccgagacttccggtctagcgcgggg

SEQ ID NO: 684506 - DNA, 98 bp, Homo sapiens
ctcggcatcaccagtggcttcgtgaagcccaagctggaaaccagcctggacaccaagtctgtgtcagaaggccacctcaagaggaacatcgtggtgaa

SEQ ID NO: 684507 - DNA, 83 bp, Homo sapiens
gaaccgcagtatcatgctggccaagaagatcatcattaaggacggaggcacgggtggcccagttgaaatccttcccttcctct

SEQ ID NO: 684508 - DNA, 83 bp, Homo sapiens
ccggcagagccgccgagacgccgaagagcccgccgcccgcgcgagggcgtgatggtgggcatgggtcagaaggattcctatgt

SEQ ID NO: 684509 - DNA, 95 bp, Homo sapiens
ttaaatattgacccgataaccatggcctacagtctgaactcttctgctcaggagcgcctaataccacttgcctgattacatcaaccccagagccg

SEQ ID NO: 684510 - DNA, 50 bp, Homo sapiens
tctggtgcccagaagctgtgcagggtggcacctgtggaaatgaaacggag

SEQ ID NO: 684511 - DNA, 83 bp, Homo sapiens
ggaggaggggcggccaagcgctgttgaaggtgtgactgcacagaaaagttacaaaacaaatttgactttttgcgctcacagtt

SEQ ID NO: 684512 - DNA, 97 bp, Homo sapiens
cacaatggagctgcagggaattgtgccggaggttctgaagaagatcgtaacaacttatgacatgtgatatcagtatcaagataaaagtttggaatgg

SEQ ID NO: 684513 - DNA, 83 bp, Homo sapiens
agaatttccaaaacatgctccattggaaattgcctcaccagttctaacattttgaaagcgaagcagaagccgtagaatcagcg

SEQ ID NO: 684514 - DNA, 100 bp, Homo sapiens
taaggactcatcaaactgtgtgcaaacaagatttggagcaagaggtggtggtggccttcccccgaagaaatttggtaatcctggggagcgtttgcgtaaa

SEQ ID NO: 684515 - DNA, 100 bp, Homo sapiens
gtagcaaggaaggtcaacgagacggtggagagcggctctgacactctgggcataatcaccagcaacacccgggacaataatacgggggccacctaccccc

SEQ ID NO: 684516 - DNA, 96 bp, Homo sapiens
ggccgcgctgtgcggcgcgctgctctgcgcccccagcctcctcgtcgccctgggccaagtcagaacttcgagcagccattgatcggtatgtgcaag

SEQ ID NO: 684517 - DNA, 95 bp, Homo sapiens
ggttggctatggtgatcttaatgggaaagaatactggcttgtgaaaaacaggtggggcaagtccgtgggcatcatgttgaccgagctggagaaag

SEQ ID NO: 684518 - DNA, 82 bp, Homo sapiens
agagatcctggaagccatgaagcacccctcgttcttcatgacagccagattccccgtaatggaaaagggcagcaagttggag

SEQ ID NO: 684519 - DNA, 74 bp, Homo sapiens
gtcagttccatttcggctttaactcagaaactctgccatgtcgtgaagagtcttttatgacatcaagagaaatg

SEQ ID NO: 684520 - DNA, 75 bp, Homo sapiens
ccggtacaagctcctgcgggccggcggggcccctggccccaacatggcccgtcgctctcagagctcctcgcaggg

SEQ ID NO: 684521 - DNA, 75 bp, Homo sapiens
cagtccctaggtatccgcactgctcagggatgatgaataaggtatttggaggtactgtgcacaaaaaaagtgtca

SEQ ID NO: 684522 - DNA, 82 bp, Homo sapiens
tgatgatgacagtgaaacctccaattggattgcagccaacacaaagagtcccctttacttggtaaatcacggcgagagtgga

SEQ ID NO: 684523 - DNA, 102 bp, Homo sapiens
gttcctgggcaccggggagccggccttggacacgggcacggccgagcagatgaggactgtgtggacgaccgggccagacaccgggaggaacggctgctcggg

SEQ ID NO: 684524 - DNA, 83 bp, Homo sapiens
gtttgctcaaagtgatgacctggatagtgaaggatgacttactgtctctgaaggttgtaagtgtgctacaccatctcagtatc

SEQ ID NO: 684525 - DNA, 49 bp, Homo sapiens
ggtggccctgctggaggagctctgggacttgggaccctggaggactgac

SEQ ID NO: 684526 - DNA, 90 bp, Homo sapiens
gccacttccggatccggggcctccttcccctccaaggcatgctgagcacagcaatggaggaaacagctatatgggaacaacatacagtga

SEQ ID NO: 684527 - DNA, 83 bp, Homo sapiens
cgtaaatgcaaaggacatggccggccggaagtcttctcccctgcacttcgctgcagttagagatgtttatgattacttccgag

SEQ ID NO: 684528 - DNA, 51 bp, Homo sapiens
cttgcaacagtggccgcacgcatagaccaagatcactccatggatgaaatg

SEQ ID NO: 684529 - DNA, 101 bp, Homo sapiens
cggccggtccctcgcctcccggccgagctgacgataatgcctctgaggtagcagttactactccaggaactagtaaccatagaaacagctcaacaggccca

SEQ ID NO: 684530 - DNA, 100 bp, Homo sapiens
tcagcttggggggaactctgtcccccagcctggctgcacttgaggttcccgcccaggaaggcagccagataagctggtggtggtatggacccgtcggaac

SEQ ID NO: 684531 - DNA, 100 bp, Homo sapiens
gtctttcttgtcaactgctcacgacagaaggcgtctcatggcgttggaataccggctctcagcggctctatcatggtgaacttacttcagattgtgcggg

SEQ ID NO: 684532 - DNA, 75 bp, Homo sapiens
ctctcgctgtgagacatgtctgagactcctgctcagtgtagcattaagagtggagactgctgcacggactctgga

SEQ ID NO: 684533 - DNA, 100 bp, Homo sapiens
ttatggatgtggctgctgggctgaaaatactggagctcataacccctactccacagctgtgagtacctcagccaaaagaatgcaatggtgtaaagattcc

SEQ ID NO: 684534 - DNA, 50 bp, Homo sapiens
ccggaaacgggatggggagctggaccaggctggtctggaactcctgggct

SEQ ID NO: 684535 - DNA, 75 bp, Homo sapiens
acgacatggaagggcagctggtcagcatccacagcccggaggagcaggtggctatggaccgccccctgcaggaag

SEQ ID NO: 684536 - DNA, 101 bp, Homo sapiens
aagattcaaacaaccaaccctgatttcctgcttctccttttcatgagtgttcctgtggtctctgcacctcctttctggacaatgactcattcttcccagga

SEQ ID NO: 684537 - DNA, 75 bp, Homo sapiens
agttaacttctgtttacatggaactcagacatctgcaaatcatggttcgatacaagaggctgttttcctagcgtg

SEQ ID NO: 684538 - DNA, 100 bp, Homo sapiens
gcctgtctcgatatagattgaagtttagcgctgataaagtagacacaatgattgttcaggcaattttctctgctggatgaaccgaatcctaacagtccag

SEQ ID NO: 684539 - DNA, 100 bp, Homo sapiens
ggaagaattcccaagccaaagctttccagcctctacggcagacacatgcaggccaacccagaaccaccgaagaagaataatgacaaatcgaaaaagatca

SEQ ID NO: 684540 - DNA, 50 bp, Homo sapiens
cgacgaccgacagggtggtgaaagttttccaagagataacttcaccaaga

SEQ ID NO: 684541 - DNA, 98 bp, Homo sapiens
gaacatggacatgaagaggaggatccacctggagctgaggaaccggaccccggcagctagtgggaaaccacccatcaatgatatgttcacagacctca

SEQ ID NO: 684542 - DNA, 96 bp, Homo sapiens
ctgaaagcaaccaggaggcagtaaattcttcagctgctcggacagatgaagctccccaaggagctgcaggaattacatgaacgacagccttcgcac

SEQ ID NO: 684543 - DNA, 98 bp, Homo sapiens
ccgcgtcggctgagagcccacaggcccccacagggagtaccctgacttctaccggaagctctacggcctcttggacccctctgtctttcacgtcaagt

SEQ ID NO: 684544 - DNA, 75 bp, Homo sapiens
ctgtgacgaaggtgctaccatcgtgagagtaagatggactttctggccgagaccagccagtggagctgctgaatc

SEQ ID NO: 684545 - DNA, 101 bp, Homo sapiens
ccactttgcattgactggaaacaatggcatttacagaaagagtcaacagcagtggcaacaggtacaccagaggatcgcttcctggcagaatttgggagctg

SEQ ID NO: 684546 - DNA, 88 bp, Homo sapiens
ctttgctgtggagcatagagacagggaagtgcctagtcaagtacgcaggccacgtgggctcagctccagtcagcccggtcaagcatga

SEQ ID NO: 684547 - DNA, 74 bp, Homo sapiens
gccggcgtcactctggatgaggccaggtgagagggtccaagcctggtaagaatgtccagcttcaggagaatgaa

SEQ ID NO: 684548 - DNA, 50 bp, Homo sapiens
ggtaccctttacagaagaagaacagcatccacccgttttgtcaagtgtga

SEQ ID NO: 684549 - DNA, 90 bp, Homo sapiens
gcagctggcttagaagcagatctggaatgcaaacagatctggcaaaatttgggctgcacatcattgactcctgggcccaactgtgaccga

SEQ ID NO: 684550 - DNA, 75 bp, Homo sapiens
tgtcatccccatggctgatgcagcaggcatcatccgctatgcaattgggaaaggtggtggcgccctcctgcactc

SEQ ID NO: 684551 - DNA, 82 bp, Homo sapiens
tgatcgtccgtgcgtctagcctttgcccacgcagcagcccctgtcaaagggaacaggaagcagtccacggagggtgacgccc

SEQ ID NO: 684552 - DNA, 100 bp, Homo sapiens
gaagatgttgggcaacatttatttaacatgctccacagcccggaccctgggagtctccccaggacagtgctatcacccgggatattaaccgaacattccc

SEQ ID NO: 684553 - DNA, 100 bp, Homo sapiens
gcggctacgacctgaaactctacgaggataaccagacaattgatgggtcaaccttgagaacgatctgcatgcagcatggcccactgctgacattccatct

SEQ ID NO: 684554 - DNA, 74 bp, Homo sapiens
caactgaacccacagaaactgtccaaacatggatagagctactcactggtgctgtccttattcccagcccagtc

SEQ ID NO: 684555 - DNA, 76 bp, Homo sapiens
aaagcccagtggaggaaagagctagagtctccacagcctattggctcacttggacatgatgctgacttgaggcggc

SEQ ID NO: 684556 - DNA, 96 bp, Homo sapiens
gtatgaatagcttgttactggaagagccacttagtggagaggaaggatttacttcatttgggtcactaggtcacgggggcctcacttcattctctt

SEQ ID NO: 684557 - DNA, 87 bp, Homo sapiens
acacagagcagtgggcctgggctgcagaagaataacattcaaggagggaaagcagcccctgctgaagctctgggaatcccggatgag

SEQ ID NO: 684558 - DNA, 114 bp, Homo sapiens
ccggaacaacagatgatgtatgcagggagtaaaaacaggctggtgcagacagcagagctcacaaaggagcgggctgcagatgacagcaaagaggttgagagcttccagcagctg

SEQ ID NO: 684559 - DNA, 90 bp, Homo sapiens
cttgccaaagctacaagagacagttacaagggcccattgttggaagatggagcgctctctcaggcagtctctgctggagccagttccccc

SEQ ID NO: 684560 - DNA, 50 bp, Homo sapiens
aaacaactacctgctgaaattgacttaattcagtgcacaaatgagatgaa

SEQ ID NO: 684561 - DNA, 98 bp, Homo sapiens
tttctcctggggaacccgttcagctctccagtgggacagcgcatcgggatagctgggagtatggccaccctgctccacgatgcggtaatgaatccagc

SEQ ID NO: 684562 - DNA, 126 bp, Homo sapiens
tgtttggctgcccaggctcgcctcgactccaaatggttgaaaacagatatacagactccattaataatatacctctttcatttcctaattgactatgctgaattggtgtttatggtaagtaacctt

SEQ ID NO: 684563 - DNA, 85 bp, Homo sapiens
ttctttaatatgctggatgagctgctgaagcccaccgaattaggtgagaagccctaccactgcaactgggacggctgcggctgga

SEQ ID NO: 684564 - DNA, 100 bp, Homo sapiens
ggaatagtaaagaaacacatcataaaacctcccaggacataaaggaatcagagatcattgatttcttcctgggggcctctctcaaggatgaggttttgaa

SEQ ID NO: 684565 - DNA, 100 bp, Homo sapiens
gggcgatgtcgcaagcagcttcattgacttcctgcccctaaaatgggagttcatgatcaagtgttgcccacaccaaatgcttcatccagagtcatagtac

SEQ ID NO: 684566 - DNA, 51 bp, Homo sapiens
tatggctcaaagaaagatgattatgtgcgttccatggatgaactgaatcat

SEQ ID NO: 684567 - DNA, 100 bp, Homo sapiens
aagcataatatggtgaacggccgcctggcagcgccatcatgaccgggtcctataacaacttcttcaggatgtttgatagagacacgcggagggatgtgac

SEQ ID NO: 684568 - DNA, 83 bp, Homo sapiens
ctgcagatctgggacacagcggggcaggagcgcttccgcaccatcacctccacgagccttcacgtaaatgggtccagtcatgc

SEQ ID NO: 684569 - DNA, 88 bp, Homo sapiens
agaccaaccgcaccctccgagacctcctgagggaacagcactgcaaagagctcagcctcacaggccaaagcatcagcaccagaacgca

SEQ ID NO: 684570 - DNA, 74 bp, Homo sapiens
atgactcttcaatgaaacttgtgagggaatttgagcccatgctacaagtgaagatgctaatactggagaccgtg

SEQ ID NO: 684571 - DNA, 104 bp, Homo sapiens
cgacaccatgtcatctcccagtccgggcaagaggcggatggacacggacgtggtcaagctcttacaggacaaattgcagaaaatcttggagaagaagagcagtt

SEQ ID NO: 684572 - DNA, 90 bp, Homo sapiens
ggatgcagcccgcagggacaaggaggtcaaaatgcagatcttcgtgaaaacccttaccggcaagaccatcacccttgaggtggagcccag

SEQ ID NO: 684573 - DNA, 100 bp, Homo sapiens
agatgatgagaaataaggacaaaagccaagaggaggacagttcgctacacagcaatgcatcgagatatgtgcagcgggggctacagcgagtggggctaga

SEQ ID NO: 684574 - DNA, 100 bp, Homo sapiens
cgtgaaaaaaaagacctgctttgccctgggaaatagtaaccctgccaaatacatcagcttgtaggagacagagggtgaaaatcctatttataagagtgcc

SEQ ID NO: 684575 - DNA, 50 bp, Homo sapiens
ttaagggcatcatctcgattttggtggcaagttatggtgtgaagccaaga

SEQ ID NO: 684576 - DNA, 50 bp, Homo sapiens
ctgtggagttcgggaaccagctggaggtttggtgcacctcgatttggagg

SEQ ID NO: 684577 - DNA, 100 bp, Homo sapiens
ggggagcgtccggagctagctggatcctctaggcagttataggatattccaagataaatgcatgaatactaccttgacggaatgtgatttctcaagtctt

SEQ ID NO: 684578 - DNA, 75 bp, Homo sapiens
ctgcgccggaggcctgactctgggagcacgcaatggtcatcatgggccagtgctactacaacgagaccatcggct

SEQ ID NO: 684579 - DNA, 100 bp, Homo sapiens
gaggaattccagttcctgcaggcgcagtatcacagaaatgtgcctgtggctgccttgcctgtaactcagcaaatgacagaaatgagcatttcaagagagg

SEQ ID NO: 684580 - DNA, 101 bp, Homo sapiens
ggcataccagcgggccctggccgctcacccgtggaaagtacaggtcctgacagctggactccagaagacctttccagattcgtggttgagctgcagcagag

SEQ ID NO: 684581 - DNA, 75 bp, Homo sapiens
ttaaacacagaaggaaatacccagactgttactacaacctcgggcgtctggttcaaaccttgtactactcagctg

SEQ ID NO: 684582 - DNA, 90 bp, Homo sapiens
tccagatgctcctgcgttctgatgtcgtgcccatgacagcagaggatgatgtggacctggaagccctggtgaacgatatgaatgcatccc

SEQ ID NO: 684583 - DNA, 80 bp, Homo sapiens
ggactggaggcttgactaatgtgaaaggggcgtctgaaagtgggatgccatcactgaaatggatgaacataataggccca

SEQ ID NO: 684584 - DNA, 100 bp, Homo sapiens
gcgggactgcggcggcgccggcctccggggagaaacgccagagactgctgctactttgaaacgtacgatagaggccctgatggacagaggagcaatagtg

SEQ ID NO: 684585 - DNA, 83 bp, Homo sapiens
ggcggcgacagagcgagcgcggcgcggggccaccatgggggcccagctcagcacggactggaaggatcaccagcacatatgcg

SEQ ID NO: 684586 - DNA, 97 bp, Homo sapiens
catgaggagggacgtgaacggagtgaccaagagcaggtttgaggtatggacctgtctgccaatcaggacgaggagaccgaccaggagaccttccagc

SEQ ID NO: 684587 - DNA, 82 bp, Homo sapiens
gtggcactggctgatggtggccggcctgacaacacagggcgtggaggaatgcagtagcatggatagttgatggtgaatttgg

SEQ ID NO: 684588 - DNA, 83 bp, Homo sapiens
ccgaaggaaaaggaggaattcgccgtgcccgagaatagctccgtccagcaggtctctaattaacagaagatggcaaagcccag

SEQ ID NO: 684589 - DNA, 101 bp, Homo sapiens
tggatttctttttaataatgtgtgacccttcacctttgatcccctgacctgcattaccttgagtcaatgcatgtgttgatgtggtgctctcaggggtgaag

SEQ ID NO: 684590 - DNA, 100 bp, Homo sapiens
tgataatgtaatggctttatacaagaagattatgtttggtggtaatccatttgcttccttggtgagcaatacatcctctggtgaaggtagtcaaccttcc

SEQ ID NO: 684591 - DNA, 90 bp, Homo sapiens
gtgggcatcgtgggagctgtcatcatgccacacaacatgtacctgcattctgccttagtcaagccaccttgggtgttgaggttcatcccc

SEQ ID NO: 684592 - DNA, 130 bp, Homo sapiens
ttcaaggcaagaccgaattcagaaggatatcgacgtcgtgatccagaagtccagagctgaggactgcctgtttgcagcacctcaatgacctgaagaaggagaacttcagcctcaagctgcgcatctactt

SEQ ID NO: 684593 - DNA, 75 bp, Homo sapiens
ccagccatgcttcctgtacggcctgcagaactgtcgccttttgctcttggtgccaacaaggactcactctcggcc

SEQ ID NO: 684594 - DNA, 75 bp, Homo sapiens
cacgacccacgagatcatggggcccaagaaaaagcacctggactagagagaatctgaccaacacagttgatcact

SEQ ID NO: 684595 - DNA, 100 bp, Homo sapiens
gctccgtccccaggatcttcccggttcagggacctggcgatttctgagtgttccgaaactcctttaaataacggatcaacccctagaattgtgaatgtgg

SEQ ID NO: 684596 - DNA, 74 bp, Homo sapiens
agaaccggaagaaactgtccgagaagcccaaaccgtgcaaggttataaacgcaaaagatgttgacttcatgtac

SEQ ID NO: 684597 - DNA, 89 bp, Homo sapiens
gtttatgagtcgcaccaaccggccgcctctgtccctttcccggatgggtccccagccccaccccagccccaaaggaggctgttcgagag

SEQ ID NO: 684598 - DNA, 100 bp, Homo sapiens
tgctgaggaccaaacctgcttttttcttcaaatactgttgaagtatatggttattcagtccctgccacaggtggaccgacacacagtctacaatatcatc

SEQ ID NO: 684599 - DNA, 97 bp, Homo sapiens
cagaatggggaggaggagcctgaggtcgccaggctctggggcatccagaagaaccggccagccatgaattacgacaagctgagccgctcgctccgat

SEQ ID NO: 684600 - DNA, 74 bp, Homo sapiens
gccctggctgcctcagccctaccagcactggtcatgtctaaaggtcagcaactgtaatctgtatcgccttggaa

SEQ ID NO: 684601 - DNA, 124 bp, Homo sapiens
cgagttctcggtactcttcagggatgagtcatgtggcagtggaaaatgcgctcgggctggaccagcaggtttggtgcacctcgatttggaggaagtagggcagggcccttatctggaaagaagt

SEQ ID NO: 684602 - DNA, 100 bp, Homo sapiens
accagctcacctctcaccgcgcatgtttggagaaggacaagttctgcgtgtacgaggagtattgcagcaaccatgagaaagccctgaggctgctggtgga

SEQ ID NO: 684603 - DNA, 100 bp, Homo sapiens
tgcaacacgaggctgccgttcagcacccgtcgagcatgcagacggtgcagcaggagcagctgctgcaggagacgcaggccctgcagcaaagcttcctctc

SEQ ID NO: 684604 - DNA, 75 bp, Homo sapiens
gaaaccagaaactttaaatcttgagaaaagaagattgtctatcatgaaggagattgagaggatccagaatccaga

SEQ ID NO: 684605 - DNA, 50 bp, Homo sapiens
cttgcagaaaaattggtgtacctcagtactatactggcaattgctggaga

SEQ ID NO: 684606 - DNA, 83 bp, Homo sapiens
gccgaggcaccgaggcactcagaggagctgtggcggggccttcgtgggcccgcgatgccaggaccccaacccgtgcctcagca

SEQ ID NO: 684607 - DNA, 100 bp, Homo sapiens
tatacaggaacaatattgatgatgtagtaagctcctctctgctatatgaaatatgggagacgacagaccgtttgtgtgcaatgccccgggctgtggacag

SEQ ID NO: 684608 - DNA, 75 bp, Homo sapiens
gctggggggatctgggcatgagaccccttctcccaggaggggaggtcatcatcagatttgaaatatttaaagtgg

SEQ ID NO: 684609 - DNA, 90 bp, Homo sapiens
cgcgggcgagctgcggctcggacgccagcggacacgcgggcgagcttgaccctcaacaccaaccatgggcatatcctggtggattactcc

SEQ ID NO: 684610 - DNA, 96 bp, Homo sapiens
gtgcgacctgcagggactggcagacccgtagctaagacgccaggatttcctggaagcagagaaatggttctcaggaatcagatagctcgcagtcgg

SEQ ID NO: 684611 - DNA, 100 bp, Homo sapiens
tgagatttacctgtgagatgtttcatcccaacacatctgatgatcacagctcagagattcacagtgcaaattgaggagaaactgctcctcaagctgctaa

SEQ ID NO: 684612 - DNA, 100 bp, Homo sapiens
cccagggcctggatgactatggagcgcggtccatgagcagtcggagagcgaggagaaggttgtcacctatgaccacattgggcccaacgtctgcatggga

SEQ ID NO: 684613 - DNA, 97 bp, Homo sapiens
gtctccttgtccttcctaaaaaaccttcgcctcatcctaggagaggagcagctagaaggctttcatgaagcagaggaggatgggtctgaacgacttt

SEQ ID NO: 684614 - DNA, 96 bp, Homo sapiens
gaataatgccctgacaatgagcaagagcactagaatgctgcagggttggcctttggcctaaaccatttctagctatggacttgccagatgagagcc

SEQ ID NO: 684615 - DNA, 75 bp, Homo sapiens
aaagctggccggggcctgggcctgagcatcgttgggaaacgggactttgaatccaaagcaaaccatcttggtgat

SEQ ID NO: 684616 - DNA, 82 bp, Homo sapiens
ttgagttggtcgggggcagcggcaggttatcaatactctggctgaccatcatcatcgtgggactgactttggtggaagtcct

SEQ ID NO: 684617 - DNA, 83 bp, Homo sapiens
ggttccaacgcgaggagctcatcgggcagattagcgacatccgagtgcagaacctgcaagaaatacactttcgggaaatggcc

SEQ ID NO: 684618 - DNA, 100 bp, Homo sapiens
agaaagatgatgatgttgtaagccttagcagccttgatctgaagttgctgatcatctgggctgtgatccacaaacccggttctttgtccctcctaatatc

SEQ ID NO: 684619 - DNA, 96 bp, Homo sapiens
gtttggctgcccaggctcgcctcgactccaaatggttgaaaacagatatacagattacgctcgatttgaggccaaaatccatgacctacgagagca

SEQ ID NO: 684620 - DNA, 100 bp, Homo sapiens
agcaccttctccagtcgacactctcgcgcccggaggaatgaagccaagagtgatgaaagaagctgtatctactccatcacgaatggcccacagggatcag

SEQ ID NO: 684621 - DNA, 100 bp, Homo sapiens
tctttttcttcaatgggcagcatatgaaagtggattatgggttggcaaaagcagcttttgatgatgcaattgcagaactggatacgctgagtgaagaaag

SEQ ID NO: 684622 - DNA, 90 bp, Homo sapiens
aagaggctggactcggattcgttgcctgaggagatgaacgccctgcgaggccaggtgggtggtgagatcaatgtggagatggacgctgcc

SEQ ID NO: 684623 - DNA, 89 bp, Homo sapiens
ctgcagcccgcgcacagctgctcccttcgccttcgccctttccacctcgcggcagttcggtccagcaagactatgaatctctgttccaa

SEQ ID NO: 684624 - DNA, 95 bp, Homo sapiens
ttaatgtctgaatctggagaaggggaaatctccccacaaagagaagtctcaagatcccaggttacacttccaggggctccccactcagtccccag

SEQ ID NO: 684625 - DNA, 83 bp, Homo sapiens
actctctctttctggcctggaggctatccagcggcggcaccttcctacttctgcccagccacagccctcccctcacagttgag

SEQ ID NO: 684626 - DNA, 100 bp, Homo sapiens
cgcaggcccccccgcgccgaccgcgttcctatggacagacgcacagacacctgcaggatctcattttgcccaacggtggtactccagcaggtacttcaag

SEQ ID NO: 684627 - DNA, 113 bp, Homo sapiens
agaaaatggactccctggctgctggagagttgaatgccagccaccagccatgggtgtttaagatagaagtgctaatgaatggaagaaaacattttgttgaaaagagatacagc

SEQ ID NO: 684628 - DNA, 90 bp, Homo sapiens
cgcccttgccttctgcttccagggaactcaccagtcaccaaggacttgtcagtcacatctgtaacctgctcactgaaactgccacactgt

SEQ ID NO: 684629 - DNA, 75 bp, Homo sapiens
gggagatcgacttatcgccattggagacccaacatgagtgaagtttcctgcaagaaacgggacgactatttggaa

SEQ ID NO: 684630 - DNA, 75 bp, Homo sapiens
tctacacatacccagatggtaaatctggcatggctttgtgtccctggtgatgttggaacattaatgatggaacat

SEQ ID NO: 684631 - DNA, 100 bp, Homo sapiens
cagcagcagcttcagtagcgcagaggcggcggtggcgagaggtgcggcgaaggaggcagaggcacttatgcttgtcagatataccttagatgaatttgga

SEQ ID NO: 684632 - DNA, 90 bp, Homo sapiens
gcaggctgagctgaaggcacttagtgcccacaaccgcaccaagaagcacgacctgctgagggcaatgagctgggatgaagacaactgaat

SEQ ID NO: 684633 - DNA, 75 bp, Homo sapiens
ccctgctctgcctaagtgtactccagtggtaggagtgaaggtggcaggaattcccgggtcacccctgcagctgcc

SEQ ID NO: 684634 - DNA, 75 bp, Homo sapiens
tggactgcagcctcggcggtcagcaggagatctcagccctgctgagctgatgatgctgactataggagatgttat

SEQ ID NO: 684635 - DNA, 100 bp, Homo sapiens
ttcggcttctgagacggcggcagcagcggcattcagagttttgattcatcatggataatctgtcatcagaagaaattcaacagagagctcaccagattac

SEQ ID NO: 684636 - DNA, 75 bp, Homo sapiens
tcgtggatgaagcccatcggctgaagaacaatcagtctaagtgcaattccaaaagccaaggtgagaaagaaatgt

SEQ ID NO: 684637 - DNA, 82 bp, Homo sapiens
gcaggcccagacgacgcgcgcgcacgcccgggggctggagaaggccaggcagcagctgcaggaggagctccggcaggtcagc

SEQ ID NO: 684638 - DNA, 75 bp, Homo sapiens
gtccttgccccttcccttatctacttcagaacagagagcccgagcccagcacattgtgccctgtactatatctca

SEQ ID NO: 684639 - DNA, 96 bp, Homo sapiens
atcgatgttgtaattgatgtgtcttgtatatatggttccttgagaatatgtatatcgggaaggaatgtaaacgtgcatgtaataagactcctataa

SEQ ID NO: 684640 - DNA, 83 bp, Homo sapiens
cttttgtgggatgcctcacggctgctgaggggctgcagcggggtggcccagttgaaatccttcccttcctctaccttggaagt

SEQ ID NO: 684641 - DNA, 75 bp, Homo sapiens
cgcagcgtcaatgacttacgccaagaagaatggggcattctcttctcccaccctcgggactttaccccagtgtgc

SEQ ID NO: 684642 - DNA, 100 bp, Homo sapiens
ctggaattaggcaaatatggacagctgacaagctctctactgatgatctgaactccctcattgctcatgcacatcgtcgtattgatcagctgaacagaga

SEQ ID NO: 684643 - DNA, 75 bp, Homo sapiens
ggcgctccgtgcgcggagccgtctgcctgcatctgctgctgaccctcgtggtgtaatggataggtaacagagaag

SEQ ID NO: 684644 - DNA, 100 bp, Homo sapiens
acctttccaacacagatgtccaagctgccaagatgaccatgaaagctgtggttctaattctaccaaccgtagtactgctgagagcacaaaatcatcaatc

SEQ ID NO: 684645 - DNA, 88 bp, Homo sapiens
atgagaacacatgccctctcccacaagaaatgaaagctctgtttaagcggggatctgatgagcttctttcttctggcatcattaacgg

SEQ ID NO: 684646 - DNA, 90 bp, Homo sapiens
tccgcaagtcccccccggagaaaaagttgaagcgttatcttctcggacaaactatttagtggaaaaggcttacattttcagccatcagtt

SEQ ID NO: 684647 - DNA, 90 bp, Homo sapiens
ccgccgccggcgcggaaggacgaggctgaggcgagaaacgaggaattgaatgatctggcacgggaccctccagcacagtgttcagcaggt

SEQ ID NO: 684648 - DNA, 80 bp, Homo sapiens
cctccgcggctgccctgcgccaggctgcctgctgtttcccggggagatcatgaaacgaggtcgccttcccagcagcagtg

SEQ ID NO: 684649 - DNA, 83 bp, Homo sapiens
ccggcatgcccagggagaaaaaactgcaggcattaatgtccgaaagggtatgacaaggcagcaaagattgctaagacagcaca

SEQ ID NO: 684650 - DNA, 100 bp, Homo sapiens
atcttcattcatgactccagacagctaacccactcctagaagcctttggaaatgcgaagactgttcgcaacaataatagcagtcgatttgggaaatttgt

SEQ ID NO: 684651 - DNA, 82 bp, Homo sapiens
cacggatcggattcctcagctacgaggaggcgctgaggagagggaaactgaacagccaagactcctataacaattttaccaa

SEQ ID NO: 684652 - DNA, 82 bp, Homo sapiens
ggggaacctgctcaaagccctgggtcgcttggaagaagccaaggttgactatagtcaatggggccaatggagccaagtgtat

SEQ ID NO: 684653 - DNA, 50 bp, Homo sapiens
gcgacgagcaggtggcggcggctgcaggcactcaaggagttgcccctggt

SEQ ID NO: 684654 - DNA, 90 bp, Homo sapiens
cagtgcccggcgacactgcacccatcccggctgcttttgctgcgccctctcagcttcccaagaaaggcagctgctcccaaccccagaacc

SEQ ID NO: 684655 - DNA, 90 bp, Homo sapiens
gccggacgtgtccgcgaagatggcgggccggctcatagaagacccagatgtcaagatcaaactcaagcttcagtctttaatatatcctgc

SEQ ID NO: 684656 - DNA, 90 bp, Homo sapiens
gtcgaatccagtagaaaactggtcaaggaagctgagactccatcctctgccaatggcccttcccgggagggctctaggctgccgcctgct

SEQ ID NO: 684657 - DNA, 100 bp, Homo sapiens
tcctctgacagcgaagactccgaaacaggtcctgcctcccagcttgatggtggccggcgtgtactgcctcgtggtggctgtcatctttgctactatcaag

SEQ ID NO: 684658 - DNA, 100 bp, Homo sapiens
gaaacaggccatggagggacaggatccggaggcgccagctcaaccgtccacattggccaactgtattcaactgacaagctgatcattgagaatcgagaca

SEQ ID NO: 684659 - DNA, 110 bp, Homo sapiens
gctagactgtagcagccgagaacctcggcatcaccagtggcttcgtgaagcccaagctgggtatcttggagatggccgcttccatctggagtctgtcatgattgccaacc

SEQ ID NO: 684660 - DNA, 98 bp, Homo sapiens
aaagtgctggagttacagatgtgagcctctgtgctcagtccatccttggctgttcaagtgtagagaaaactcttctacagaaattactctcaaagaaa

SEQ ID NO: 684661 - DNA, 76 bp, Homo sapiens
ccgagctcttggatgttcttggacttgacgagctaaaaaagtccctgtacgccatcttctcccagtttggccagat

SEQ ID NO: 684662 - DNA, 97 bp, Homo sapiens
ttctgccagcaggtggtgcggaaagtggctggattggacaagcaggcaaagctgaggagaggagtcactcacaatttttgtggacaagcggaagttg

SEQ ID NO: 684663 - DNA, 74 bp, Homo sapiens
tttatattcatctcaaaaacaaaattctgaactcaggacttggcaaggatcctggagcgggttgtgagaaggaa

SEQ ID NO: 684664 - DNA, 75 bp, Homo sapiens
tgctgcatggtggcgcccctccccgtgaccaccgctgcgttttctcgggaatagttctgtcccaagaagaactct

SEQ ID NO: 684665 - DNA, 74 bp, Homo sapiens
ccctcatgtacgagtccgagaaggttggggtcgcctcttccgagcatcaacaacagcaacttgtgattggcggt

SEQ ID NO: 684666 - DNA, 80 bp, Homo sapiens
ccggaatcccgcgcgctgcccacgattcgcttctgaggccagctgcgggccgtccagcggctgtgccacttctacagcgc

SEQ ID NO: 684667 - DNA, 74 bp, Homo sapiens
aaatatgtggatactccatttggcaagggcgtctctggccgagcctctttttgtggaaaacgacagcagcagca

SEQ ID NO: 684668 - DNA, 100 bp, Homo sapiens
ccgcgtgtgagcgagcagccgtgggcagcggtggagcatgagtctggctggatgaagatcttctcccaagtaaatattttgaggttgactttccaatgat

SEQ ID NO: 684669 - DNA, 82 bp, Homo sapiens
cttgccttctccacacttgtttgatcatgtttgagaccttcaacaccccagccatgtacgttgctatccaggctgtgctatc

SEQ ID NO: 684670 - DNA, 108 bp, Homo sapiens
tttctcagaaagcagaggctcagagcttggagacagacggttgtgcaagcatggcacgtgcatctgtttggcttgtggtgaggcctcaggaagcttacagtcatggtg

SEQ ID NO: 684671 - DNA, 97 bp, Homo sapiens
gagaaggatgtggactgcagtgctgcagtgccagattgtctccagctttaagaccacgacatcgagagctgcctgccagctcgtgaaggagtacatc

SEQ ID NO: 684672 - DNA, 75 bp, Homo sapiens
agcctctcttggccaggatcaaacatgacagccagagactgctgctactttgaaacgtacgatagaggccctgat

SEQ ID NO: 684673 - DNA, 98 bp, Homo sapiens
ctacttaataatgacaatctcctcagggaaggggcagcacattggtgacaaagttcctgctgatataaggttaacttccatcaaatctaccacactaa

SEQ ID NO: 684674 - DNA, 98 bp, Homo sapiens
agcctcccaagtagctggggctacagatcagtccaaagtgtttgtgaaggtgtttactgaaattgaccggatgccccagctcctggcctactactaca

SEQ ID NO: 684675 - DNA, 93 bp, Homo sapiens
tgacatttccgtggcaaccaaagacgggcgcctatcagtacacaataaggctaatgatgtaactggcctaagagagtctgaagaaaaactaaa

SEQ ID NO: 684676 - DNA, 100 bp, Homo sapiens
cggggctcggtttggctgactggggagtcggcaggcggcaggtatccgttacagcactgatgtgagtgtagatgaagtaaaagctttggcttctctgatg

SEQ ID NO: 684677 - DNA, 75 bp, Homo sapiens
cgtatgacccacagataacagcggaagaattagctgaaaaggaatacttcattgctccatcagtagatatacaag

SEQ ID NO: 684678 - DNA, 75 bp, Homo sapiens
catccttgtgctgttggtcatcgggactttgaacatgtcggggatcgccctcagcagactcgcccaggagaggaa

SEQ ID NO: 684679 - DNA, 100 bp, Homo sapiens
cgcggccatcctgcaggcacagttgccgattacagaataacaagcctttgtattcatttgaagataatgcagactatgtttatgatgttatgtggtcacc

SEQ ID NO: 684680 - DNA, 50 bp, Homo sapiens
agagcccaggagcaggggagacatggtcctaggcctacttacaagcctcc

SEQ ID NO: 684681 - DNA, 130 bp, Homo sapiens
ttttcatcgagtttggagttttccaccaaatgaaaatacaggaaaggaggtgacgtgtctggcatggagaccagatggcaaacactgcccttgaagtatgcagagcatttttacaggaagataaaggcga

SEQ ID NO: 684682 - DNA, 75 bp, Homo sapiens
gaggatgcggagcccgcagaacctccacagtcaagaggacgggttgtgagtcccggcccagcccctccacccccc

SEQ ID NO: 684683 - DNA, 100 bp, Homo sapiens
gtccctcccgctggtcaccactccggcaccagatccagtctcccactttcatgcctctgatcatgtgcccaagccaggagtgccaaaccaaccgctcagg

SEQ ID NO: 684684 - DNA, 83 bp, Homo sapiens
catacacaatcccgggcatgggcggcaactctttgatgtactactataatgggaaagcggcccaggatgttttggtgcaggag

SEQ ID NO: 684685 - DNA, 75 bp, Homo sapiens
caccagtggagtccaggatgagaattaatgcaccatctggaaacctctgagatcatgccataaaaggaatttgga

SEQ ID NO: 684686 - DNA, 98 bp, Homo sapiens
aattaccttaccgactaatatccagaggagaataatttggaagactgttgtgggagcctaagttgccaaaggattaccttacacaaaaatctgttctt

SEQ ID NO: 684687 - DNA, 75 bp, Homo sapiens
ccaaaacaaccaatatagaacttcaaggagtaccaaatgatggtgctgatgttgctaatgtctgtaatgaagctg

SEQ ID NO: 684688 - DNA, 98 bp, Homo sapiens
aagcgcgaagagccgttagtcatgccggtgtggtggcggcggcggagactgcgggcccgtagctgggctctgcgaggcggctgagtgacagcccatca

SEQ ID NO: 684689 - DNA, 98 bp, Homo sapiens
ctgcctgaggaggcctcggttggatgcgaaggagctgcagcatccagcctggagatgcccaaagatgagctgcccaaccataactgcattaagcacct

SEQ ID NO: 684690 - DNA, 125 bp, Homo sapiens
agaccctggagcctcagttggaagcagccgatccagcctgcggagcctgtggggcagctctaagcgaaagacatgaggcctcagcctgaaatgaggttgttttgaggtcatctgatttctgacta

SEQ ID NO: 684691 - DNA, 76 bp, Homo sapiens
gtgttgccaatccagcatttttgaaagcccacaggcggttttgtgagctgcttccccaggagcagcggagcgtgga

SEQ ID NO: 684692 - DNA, 100 bp, Homo sapiens
gagaattacgggaatgtgttctcactgggctacctgggctacagctccgacagccctcggccccatccctacgaccagcccttccgtcctgcccaccccg

SEQ ID NO: 684693 - DNA, 101 bp, Homo sapiens
attgaagtgcttggagtgcagaactgaaagaggtatctcagatgaagacatcatcaacattactcttcctactggagtccccattcttctggaattggatg

SEQ ID NO: 684694 - DNA, 100 bp, Homo sapiens
ctcttcaaggagaaaattcttaaattggagtcatatgaaatcactatgaatgtgatggaatggggagaagatattaaagcagtttcaaaagatgaagcag

SEQ ID NO: 684695 - DNA, 75 bp, Homo sapiens
gcagatgccaggaacatgggcgcattggaggtggacacaaaggaagaggcagccagacagctacttcagcgtcct

SEQ ID NO: 684696 - DNA, 82 bp, Homo sapiens
ttccttctcacttggcctatggaaaacggggatttccaccatctgtcccagttccagggtcacccccgagaggacaacaggc

SEQ ID NO: 684697 - DNA, 100 bp, Homo sapiens
agccgagaaggtgtccgaggcccgcaaaaggcccggcaggaagatgggctcccgtggacagggactcttgctggcgtactgcctgctccttgcctttgcc

SEQ ID NO: 684698 - DNA, 75 bp, Homo sapiens
taggatcaagatggccatgtggcaggattggcagattgctactctggctttactcctgggcggcgctgccatcat

SEQ ID NO: 684699 - DNA, 100 bp, Homo sapiens
caaagggaagcgccttcctgaagtttactgcattgtgagccgcctgggatgcttcagcctcttttcaaggaaaccgaccagagggcaaagtgttggagac

SEQ ID NO: 684700 - DNA, 100 bp, Homo sapiens
cgcgtcgcctcggacgtccactgcaccctgcgcgagaaggcagtagcagaatcccatggtagccaggtgggtgaaggggagcgaggacgttctacctgcc

SEQ ID NO: 684701 - DNA, 72 bp, Homo sapiens
cagcccaaggctttgttgtaggagcaatgactgttggaggctagcgaagcgtacctggtgggtctgttcgaa

SEQ ID NO: 684702 - DNA, 99 bp, Homo sapiens
tggatgccctggggctgagaggagtcttctggtgcagtcttattttgaaaaggttgctccttgagggcaggacagttcttatggctttatccgttgcgt

SEQ ID NO: 684703 - DNA, 83 bp, Homo sapiens
tacacagtgttaacaatgcatccacagagcacagaagctgtaatgttattaaacaaagcaatgtatccagatcactcagaatc

SEQ ID NO: 684704 - DNA, 75 bp, Homo sapiens
cacagaaaagccaccgagggctacagcctcgggaaaagaacacttaagccctctcaccgtcatcaccaaagagac

SEQ ID NO: 684705 - DNA, 100 bp, Homo sapiens
ctccattggatttaaaagacagtcctcgtcagcactgactttcagctatggaatcgagccctatgagtttgtctctctggaatggctgcaaaagtggttg

SEQ ID NO: 684706 - DNA, 90 bp, Homo sapiens
ggaaaagttgaatgatgtatttgatcctgattctacccaagtacatatgatttcagctgcaatggcagataatcagcaactgctgtgatg

SEQ ID NO: 684707 - DNA, 98 bp, Homo sapiens
gtaaaacatgtctcctgatatcctacacaacaaacaaatttccatcggaatatgtaccgactggaccatatgatgtggtggttctaccaggaggtaat

SEQ ID NO: 684708 - DNA, 75 bp, Homo sapiens
attcgaaggatggaagaagagacgaagagacagctggatgaaatcatggaagggaagtggttgctgtgtatgtta

SEQ ID NO: 684709 - DNA, 74 bp, Homo sapiens
agtatgagcaaatcctcaataccaaactagcagctgctcagataaagaatttgatgagccagctaggaactaag

SEQ ID NO: 684710 - DNA, 74 bp, Homo sapiens
aaaccgcctcgaaaacggagaagcaggaaccattaaagagatcctggggactgcccagtcagtgggctgtaatg

SEQ ID NO: 684711 - DNA, 75 bp, Homo sapiens
aggaatttgataaccatatcaactcctatgatcatgcacacaagcagggtgccttgtactgtctccttggaaatc

SEQ ID NO: 684712 - DNA, 100 bp, Homo sapiens
cccgcctgcgtcccagaagtgcctgcagttcagacccttctctcccctccactttctcccggctcacggatgattgatatccagaccaggatggctgggc

SEQ ID NO: 684713 - DNA, 95 bp, Homo sapiens
aggtggccagcagggagcagctcttgtacctgtatgccaggtacaaacaggaaatgagtggcttatactctcctgtcagtgaggatagcacagtg

SEQ ID NO: 684714 - DNA, 97 bp, Homo sapiens
tctggagactcctgctgtcacgtcacctggcccctcaccatcaccatcctcatctctcttggtctccctctgatgccgagcggaagctggactgtac

SEQ ID NO: 684715 - DNA, 50 bp, Homo sapiens
ctcaccctcccgagttgaaaaaatgttttactgtgcctggctaactatag

SEQ ID NO: 684716 - DNA, 74 bp, Homo sapiens
tgaaccccaaggccaaccgcgagaagatgacccagcacgtatctcccatgcgccaagtggagcccccagccaag

SEQ ID NO: 684717 - DNA, 82 bp, Homo sapiens
gctttacagaaattccatgctgccttcagcttcctttgccgctctgcatcatgttgcctcccgcgacgatgcccctcaacgt

SEQ ID NO: 684718 - DNA, 88 bp, Homo sapiens
ggtgtggggcggtcccggccccgcaggttcgtgctggccgtgggcagcgccgtctttgatgccatgttcaacgggggaatggccacaa

SEQ ID NO: 684719 - DNA, 100 bp, Homo sapiens
gaggatataccagaccctggagtgaactggattccatgtagagacccctggaggcatttatgtttgaatcatctttaagtctggcggtcacaaagtgggg

SEQ ID NO: 684720 - DNA, 75 bp, Homo sapiens
gtccaagctgcctggagtcaaggaaggtgtgggcagaagaaaaagctagtgatcaacagtggcaatggagctgtg

SEQ ID NO: 684721 - DNA, 50 bp, Homo sapiens
ctctcaggtggctgggattacagtctgaagacctgattttgtgtcagttg

SEQ ID NO: 684722 - DNA, 100 bp, Homo sapiens
cgcttgatgtgcgcggagagcaatcgccgggacagctgcaagggccgccttcaacaacaacgtgagcgtggcctacgagtgcctgagcgccggcgggcgc

SEQ ID NO: 684723 - DNA, 98 bp, Homo sapiens
cgccaccctgcgctgccgccgctctgaggagttaaagctcccctttgaattggagatttactacattcagcatgttatgctctacgtggtacccatct

SEQ ID NO: 684724 - DNA, 97 bp, Homo sapiens
actgaagaggctctgggcaactcaccagaaatctaagggacactgtgttcctgaaatgctcgaatgtcccaacctgaagctgaagaagccgccctgg

SEQ ID NO: 684725 - DNA, 87 bp, Homo sapiens
ggctcccgatggcgggagctccaggaaaggagccgtctacatctgcacggaagacgccttcccgcacaagcgcctgcagcagctcat

SEQ ID NO: 684726 - DNA, 75 bp, Homo sapiens
gagctggggcaccgagctctggatggctgagagctagcaaggaaaactcaggaccatgatggctcagtttcccac

SEQ ID NO: 684727 - DNA, 75 bp, Homo sapiens
agtggatatagcacaccatccccagccaggtcgagctgtgcagttttagcgggtacaagatctaccccggacacg

SEQ ID NO: 684728 - DNA, 100 bp, Homo sapiens
tcaagagttccgatttcatcactcgtgacttcactcagccgttattaccccaagaaaaagccagtagaataactactgccttcattttcacccacctctg

SEQ ID NO: 684729 - DNA, 101 bp, Homo sapiens
aactggatgtcagcaagaatggtttccgcagacatgcagctccagttacaagaaggcagttcccacacggtgcacacaggatggattacctgcactttgag

SEQ ID NO: 684730 - DNA, 100 bp, Homo sapiens
gccagctgcagccccggctgcccactcgcctcacctgagcctgggtgtgatgaatgcagactctgctaccattttggctgtttggatcctcctttgaaaa

SEQ ID NO: 684731 - DNA, 101 bp, Homo sapiens
aaagtaagctggaaagcagatggtactcgcactcacctttgccctgggtactcttcttgtatgtgtttccatatatctctatggattacccagacaagaca

SEQ ID NO: 684732 - DNA, 75 bp, Homo sapiens
gccgctgctacctgcagcgccgtgtggcacgacacaaaaatcaggtctgctttggagactttccaacaatgccca

SEQ ID NO: 684733 - DNA, 82 bp, Homo sapiens
attcaaacttcaacagaatgtggcaaccagatctatagcatgatgctgcgattatctgccttatttgaaagtcatatcaaaa

SEQ ID NO: 684734 - DNA, 100 bp, Homo sapiens
gagactgcgctcctggccctggggtattctcacagctctgcggcccaggcccaaggagaagatggtataaactggtccatcagtgacaaagacattgagg

SEQ ID NO: 684735 - DNA, 93 bp, Homo sapiens
ctgtctctgatccgcaagcatgctcagaccttcattgctctgtgtgccaccggtactccaaagattcaggtttactcacgtcatccagcagag

SEQ ID NO: 684736 - DNA, 108 bp, Homo sapiens
cagcgcttccacaaccgcgtgcgtcagattctcatggcctctgggtccaccaccttcaccaagagacgagttgtactgctgtcacaggaaatggacgctggattacaa

SEQ ID NO: 684737 - DNA, 100 bp, Homo sapiens
ctcagtagtcagtttgaagcgggtatgcacaaagatagctggcttctggctcgagatgctgctgtgcagaagattgagactattatcaaagaacagtttg

SEQ ID NO: 684738 - DNA, 87 bp, Homo sapiens
ggctggggaggcgaggccggacgcacctctgtttgggggtcctcagaatatgtgagatccaggctgttgactgtactacaatatcct

SEQ ID NO: 684739 - DNA, 82 bp, Homo sapiens
gccatattgtgtcttccccggccggtccctcgcctcccggccgagctgacggctgaccaactgactgaagagcagattgcag

SEQ ID NO: 684740 - DNA, 82 bp, Homo sapiens
gtgccgcgagcgcggcctgcaggagaattggctgtgaaaggactgaggcagccatctgggggtagcgggcactcttatcaga

SEQ ID NO: 684741 - DNA, 102 bp, Homo sapiens
gtgatggaggagagaagatggcggaagcggacttcaaaagcagtggactgtcttttggattcaaagtgggcaaaggccaagaaaggagaggaagctttattt

SEQ ID NO: 684742 - DNA, 100 bp, Homo sapiens
ggagttgccatgaaatatggaaacgactcctcggccgagctgagtgagtttcttcactagttgaagaaggagaaaaacagaacaaacgttttaggccgtc

SEQ ID NO: 684743 - DNA, 98 bp, Homo sapiens
ggcgcgagaaggaggtgcgctggccaacggctcccctcgcgatggttctagcaccccaaggaaacaacctcggaagagccctttggtgccccgaagtt

SEQ ID NO: 684744 - DNA, 82 bp, Homo sapiens
ggcctgcagcgggagctggacggcgagcgcgagcggcgcgagaaagcccgatgagagaaagggaaagttaaggatgctggag

SEQ ID NO: 684745 - DNA, 82 bp, Homo sapiens
gagtcactttgcctggacaggaggaaccctggagcatcgagtacagctgtccggcctccaacgagtgtgagatcaccaagcg

SEQ ID NO: 684746 - DNA, 100 bp, Homo sapiens
cggatcgcgtggactggaagtcacactgcggcgctctagaggacaaaatcccagtccttggcacaaactcaggaaatggaagccggagtctgttttttgt

SEQ ID NO: 684747 - DNA, 90 bp, Homo sapiens
ttcgtggctcactccctttcctctgctgccgctcggtcacgcttggaaagaccacagcaagattctttcattcgtctcctcctagcctgg

SEQ ID NO: 684748 - DNA, 100 bp, Homo sapiens
tcccagtcagatgaggatgtcattaggctaataggacagcacttgaatggcttagggctcaacggagctggagtttgttcagatcatcatcatcgtggtg

SEQ ID NO: 684749 - DNA, 101 bp, Homo sapiens
ttcttttgtttgtcagcagccaaggtgtttccaggaagttcagagagaacaggttttgacctgtagcagagaaccaattctggagaacagcctcacttctt

SEQ ID NO: 684750 - DNA, 83 bp, Homo sapiens
acaatgtgggtgaacataacctatttcctggcccaatagacaactctgggctattttcagttgctctatatgcaatcagtgct

SEQ ID NO: 684751 - DNA, 76 bp, Homo sapiens
ggaagctgacggcgtccaagacccacatcatgaagtcggcggatgtggagaaatactgggctaacctaaagctgtg

SEQ ID NO: 684752 - DNA, 100 bp, Homo sapiens
tcttctgcaacagttaataatccattccttccatctgaagatcaggtatccaaaacaaggatgtgatgcagcaggccaccaatgcaattcttaggggtgg

SEQ ID NO: 684753 - DNA, 75 bp, Homo sapiens
ttcacgtttgatcatgttgcagatgtggataccactcagtaaaaaagcacgcttagattggaatactgatgctgc

SEQ ID NO: 684754 - DNA, 101 bp, Homo sapiens
tgctgccgacaccctgacggccacgaacttccgagtggggacaggagagagtggcaagagtacgtttatcaagcagatgagaatcatccatgggtcaggat

SEQ ID NO: 684755 - DNA, 74 bp, Homo sapiens
aggcactggatgatgcaatcaaagctcgacttctcaatcccaagtggccaaagctggagcagagtgaagccaag

SEQ ID NO: 684756 - DNA, 90 bp, Homo sapiens
caagcagccagtactggtggaatagtctttggccaggcctgaccttcataagaagacccagagtaaacacagcctcgctgaaatcctacg

SEQ ID NO: 684757 - DNA, 100 bp, Homo sapiens
taatcgcagcaccaacctgctgctggatggaggcctgcctgaaggaggagcttccttccccggtggagctggaggagagccttcggaatggagtgctgct

SEQ ID NO: 684758 - DNA, 98 bp, Homo sapiens
ggatcgatgtttcaatattggaagcgctttgatttacagcagctgcaggtgaattatgtaacctcattacgctggatgtagctcacaatcaacttgaa

SEQ ID NO: 684759 - DNA, 88 bp, Homo sapiens
tgaggactttgtctctgatgagctgagaaacaaagccacccagccaatgaaggttgcccccaagtttcctggcagtgtgtgatactga

SEQ ID NO: 684760 - DNA, 101 bp, Homo sapiens
gggaagacgccctggtgctcaccaagcaaggttgaaatcacaaagattagacacctttttagataggtgttcttcagcaccactgacaacacggttctgac

SEQ ID NO: 684761 - DNA, 96 bp, Homo sapiens
ctcatctcgctcggctgcgggaaatcgggctgaagcgactgagtccgcgatggagattaacgtcttcaaggacccagttgctgatcccaacaaaag

SEQ ID NO: 684762 - DNA, 101 bp, Homo sapiens
gattgtttgtggagtcactgaagtcacaacttgccaggaggttgtcatagccttagctcaagcaataggaggctgatccgatagagtaatacctaattata

SEQ ID NO: 684763 - DNA, 100 bp, Homo sapiens
caagcgattctcctgtctcagcctcccagatacttggtgttagatgaagctgatcggatgttggatatggggtttgagcctcagattcgtagaatagtcg

SEQ ID NO: 684764 - DNA, 51 bp, Homo sapiens
gaaagaccatcaagtttaccaatgcaacagcattttgaatttgaataccag

SEQ ID NO: 684765 - DNA, 146 bp, Homo sapiens
cccggcgcctgtgctgggggctttctgttccagcgtcaaggatggaggagggggagaggagccccttactgtcccagagcccccctccatgcgcctgaaggcccgacccagcagccctggcttttccgtgcttacctgcagcgcct

SEQ ID NO: 684766 - DNA, 100 bp, Homo sapiens
cctcttctacttcaacatgggcaagcttccgtgaatgtgctggtgcagaactgcaagatctacaatgatgccagctgtgacatttctgcagatggccagc

SEQ ID NO: 684767 - DNA, 75 bp, Homo sapiens
ggcagcgcgggatcccagcctcaggcgtgcgcggacggtgtgcggggtaaagcatcaagtcgaatatttgggtct

SEQ ID NO: 684768 - DNA, 101 bp, Homo sapiens
gtctacatggtggccatacattctggatatagaattagagcccattgggaacgatgccaccaccgtcagacattgtcaaagtggccattgagtggccaggt

SEQ ID NO: 684769 - DNA, 100 bp, Homo sapiens
gtcagctctgctcttcgttttgggaagcgcgtcgctctgggtcctggcagaaggagccatgaaagctgatcggaagcgcttaaagggcgagaagacagac

SEQ ID NO: 684770 - DNA, 75 bp, Homo sapiens
tgtacccctgaagtgagtcaggagctgtatgaccttaacgtggagctctccaagttccaagatgagatgggattc

SEQ ID NO: 684771 - DNA, 50 bp, Homo sapiens
ggaggaacgcgctaaggcaaagcacctgcttggacgaaccttgacaggat

SEQ ID NO: 684772 - DNA, 83 bp, Homo sapiens
ttcagagagaggaagccgaaaacaccctgcaatctttcagacaggcatttgttaatgaaatagaaacaattgaatcatctctg

SEQ ID NO: 684773 - DNA, 82 bp, Homo sapiens
gattctcgacctgctaacagaactggaccttttcgatgtctttggtggacttgggaaagaggttgctagaagcagcaagaaa

SEQ ID NO: 684774 - DNA, 95 bp, Homo sapiens
ctctaggcaggctggcaggcaacaccttaggcctctgcgcttagataccttcatgaaaacagaatcatccatcgggatctaaagccagaaaacat

SEQ ID NO: 684775 - DNA, 100 bp, Homo sapiens
cagcatccagaaaacggcgaggaagctgtggctctggttgaggatgtacagagagctcctggacaacaggtgtgtgtctggggaagagacttacagaagt

SEQ ID NO: 684776 - DNA, 100 bp, Homo sapiens
caaattccgtactcttcatttgccagtctcaacaacattatcagatgttcttgacagagtgtcagcccagcgacttctccgtgtcccttaaagcgtcagg

SEQ ID NO: 684777 - DNA, 100 bp, Homo sapiens
ctccagagtggctgggattacaggttatcccatcatcaggtagcaagttgaaacgaccaacaccaacttttcattctagtcggacatcccttgctggtga

SEQ ID NO: 684778 - DNA, 74 bp, Homo sapiens
gtactgagcctgttggaggaactggcccggaaacaggaggacgatggccggctcctgccagagttcaacatggc

SEQ ID NO: 684779 - DNA, 100 bp, Homo sapiens
gaagtcgcctggaaaaaccaatagttaaaataaaacagggtctgttacctagcttggaagatttgctgttctatacaattgctgaaggacaagagaaaat

SEQ ID NO: 684780 - DNA, 75 bp, Homo sapiens
ctcaagactggtccacggagtgtatgaccacaaacagccatcaaggcctggagctgctgaagactgctattggga

SEQ ID NO: 684781 - DNA, 101 bp, Homo sapiens
ttcagacagtccccgacacgtcgtcttacatcaaggccgaatacatcaagcaatggtaacatctttaaatgaagataatgaaagtgtaactgttgaatgga

SEQ ID NO: 684782 - DNA, 100 bp, Homo sapiens
cgcgacctccgtgggccacctcataggtgctggagaatctggtaaaagcaccattgtgaagcagatgaggatcctgcatgttaatgggtttaatggagag

SEQ ID NO: 684783 - DNA, 75 bp, Homo sapiens
cacctctgagaagggagacgacgctgctgggtccgctgagcggggcgacccgagtgtgtatgtacagagaaccat

SEQ ID NO: 684784 - DNA, 100 bp, Homo sapiens
ctgcacgccagaacctgaggagagaatggcatgccagagatctgaaactggacaatgtcctgttggaccacgagggtcactgtaaactggcagacttcgg

SEQ ID NO: 684785 - DNA, 75 bp, Homo sapiens
ctcctggctgccgtgaataggcagcctaaaggtcctggtgcatctcatccacagccaacagggacacctggtcac

SEQ ID NO: 684786 - DNA, 100 bp, Homo sapiens
ccccgatcctattcccagtcgtgaatctggtgaacagtaacaaactttggtgaaatttcaggaaccatagccattgaaatggatgagggaacctatatac

SEQ ID NO: 684787 - DNA, 98 bp, Homo sapiens
caaggcagacattcaacacctttacatttagcaggccctgtctcagcgggaccctcctcacaacaacttcttcttcttcgatggcatgaaggggaatg

SEQ ID NO: 684788 - DNA, 98 bp, Homo sapiens
gtggctcaccgggcagcgtgggtgagcggcgcagcggcggcagcggagagcgagagaggggagcagctgactacacagacttagtcttctccactccg

SEQ ID NO: 684789 - DNA, 90 bp, Homo sapiens
gcggaaattcatctttaaggacgaagagagctgtctgtggaagcccgtaaagagatgactagaaaggctattaagacagtcaaacatttt

SEQ ID NO: 684790 - DNA, 75 bp, Homo sapiens
aagctgaaggtggcagtgagctgcacgcaacagctgccggctctggggatatgggtaagtgtcaccttaccaaag

SEQ ID NO: 684791 - DNA, 100 bp, Homo sapiens
tctgcgtagctccagaggtttaaccataggatagagaaaccagctgatcactggagattccatcgttagtgctgaggcagtatgggatcacgtcaccatg

SEQ ID NO: 684792 - DNA, 75 bp, Homo sapiens
aggaagaggaaattaactatctgtacttataagtctcttcaagaaaatgaggaggaggagattgggaacctagag

SEQ ID NO: 684793 - DNA, 101 bp, Homo sapiens
gctcactaataatgccacggcccaactcagttgcagagtctgatgatgagtattttgatgctgaagatggagaaccacagacttgtaaaagtatgaaagga

SEQ ID NO: 684794 - DNA, 82 bp, Homo sapiens
acgtacccgccgccgccgttggctggaggctaccggctctctgaccagttccacgacatcctcattcgaaagtttgacaggc

SEQ ID NO: 684795 - DNA, 51 bp, Homo sapiens
aggcctcattggacagcattcgaggtactccaaagattcaggtttactcac

SEQ ID NO: 684796 - DNA, 100 bp, Homo sapiens
gaagaattatggagagaacccagaagcctacaatgaagaactgaagaagctggagttgctcagacagggtgtcagcctgaccatggcgcgggagcgtggg

SEQ ID NO: 684797 - DNA, 98 bp, Homo sapiens
tccttgcttggaattctgcccactctgcggagttagcagtcacgacctccagcacaggtacaccaggggttggaaaaaccacactaggcaaagaactt

SEQ ID NO: 684798 - DNA, 108 bp, Homo sapiens
gaatcctgcggcagaagccgagttcaacatcctcctggccaccgactcctacaagggactttgaacatgtcggggatcgccctcagcagactcgcccaggagaggaaa

SEQ ID NO: 684799 - DNA, 88 bp, Homo sapiens
cagtccctgctctgtgcgcgcctccatctgggccatggatggaaatggtggagtcaatgaagaaagtagcagggatggatgtggagct

SEQ ID NO: 684800 - DNA, 74 bp, Homo sapiens
ccggtcaatgagcactattttggattagtcaatgctgctgagcttcgtgcttatctgaaatctaaaggagctga

SEQ ID NO: 684801 - DNA, 76 bp, Homo sapiens
gtttgcccagcgatattgtcagtgcaataatggcgtgttccagtccacgggacaaattgatggccaggagatcact

SEQ ID NO: 684802 - DNA, 100 bp, Homo sapiens
gcttcctggacgagcccctggtgggtgctgatagggatggtcttcatgcactctcccctcccgcagggtattcattcaggagaaggaccctacagatgga

SEQ ID NO: 684803 - DNA, 75 bp, Homo sapiens
cgggccagccccgccgccctcgcaacctggcagccgccgccgtggaaggaaatctggcattttttaaagtttgcg

SEQ ID NO: 684804 - DNA, 74 bp, Homo sapiens
tcctcgccagcagccgtccggagccagccaacgagcggatttatgaccagaggaaaattgatgagaatgagaac

SEQ ID NO: 684805 - DNA, 98 bp, Homo sapiens
aacatcaccgtgaggcagggggacacagccatcctcaggtgcaatggatgagcttcatagtctggatccaagaaggcaagagttattggaagctagat

SEQ ID NO: 684806 - DNA, 100 bp, Homo sapiens
ttacaacagtgccacccaatcttcgaaaactggatccagaactccattggtatcagctctgtgataacagcgtgggggtgctcttcaatgactcaacacg

SEQ ID NO: 684807 - DNA, 100 bp, Homo sapiens
cagtgtgagagtctcatttctatgcacagtgtttctcaggaggatggagctagttagctgtctgttgtctgtagcccagtctgttatgttctgaacccac

SEQ ID NO: 684808 - DNA, 99 bp, Homo sapiens
ctcctttcggccttcgccgtccaccaggtccctctctctgtccccggccgccatggagcagccgccggcgcctaagagtctcagaccagtatccttcag

SEQ ID NO: 684809 - DNA, 76 bp, Homo sapiens
gaggatgatttcatgtgcgatgatgaggaggactacgacctggtggtgatagtggactggatgggttaggaggacc

SEQ ID NO: 684810 - DNA, 83 bp, Homo sapiens
ggcctgcctccgggcacacccggctccccggacgcctcgctacgagttccagggagctctgtcctggtgaccgtgcccgggtt

SEQ ID NO: 684811 - DNA, 98 bp, Homo sapiens
ctgggctcaagtgatcttctcgcctcagcctcctgagtagctggagctacagataagctgtcattggaaggaatagtggtacaaagagctgaatgccg

SEQ ID NO: 684812 - DNA, 100 bp, Homo sapiens
ctcagaactgttccttcagccaaagaaacaagccgtggaataggtgtatcaagtaatggtgcaaagcctgaagttgcaaatgctgaaagcttaaatgcaa

SEQ ID NO: 684813 - DNA, 50 bp, Homo sapiens
attcgtccccgctctgcctcacccagatggcgcggccaatccaggtgaag

SEQ ID NO: 684814 - DNA, 100 bp, Homo sapiens
cttggacttcctgaaaatgacccaggaacccaagacagaccaggatgaggagcattgccggaaagtcaacgagtatctgaacaaccccccgatgcctggg

SEQ ID NO: 684815 - DNA, 97 bp, Homo sapiens
ttccggagccatgtcagaaggagtggacttgattgatatatatgctgacgaggagttcaaccagctgaagaaacacttaaattctggaaatagcgac

SEQ ID NO: 684816 - DNA, 75 bp, Homo sapiens
tttgatcctggggagtctgattcagatgacaactgtacagatgtcactggcattgaagttgatatcgatgtggag

SEQ ID NO: 684817 - DNA, 100 bp, Homo sapiens
cgagcacccaggcgactgcctcatcttcaagaaaaatggctacaaacttcctagcacatgagaagatctggttcgacaagttcaaatatgacgacgcaga

SEQ ID NO: 684818 - DNA, 50 bp, Homo sapiens
agctgaagctgctgcttttgggcctgaccgccgctgcctacagagtcaca

SEQ ID NO: 684819 - DNA, 75 bp, Homo sapiens
ctcaactctggaacaaacactcaaagtcaagtatactggttggagaaatggccgtggtccttcagcatatctctg

SEQ ID NO: 684820 - DNA, 82 bp, Homo sapiens
caataaccaggtgcttggcaaaatcgagcgggccattggagcgagcccagggcgtggtgctgaaagtgctcacaaacttcaa

SEQ ID NO: 684821 - DNA, 101 bp, Homo sapiens
catctcagatctccagcggaggttgaggggatcgtcagtagagatgctgcaggcccgacaacaagctcaaatacgtcaccaaatggcagaggacagcaaag

SEQ ID NO: 684822 - DNA, 98 bp, Homo sapiens
aagaacttgtacagagatgtgatgttggagaactatagcaatctggttttcttggcgaatgtctgcgacaacgagctcctgcactgccagaacggagg

SEQ ID NO: 684823 - DNA, 100 bp, Homo sapiens
ccggcggcagagggaggaaagactcagggagcaggaaatggagcgattgatggagatcttataacaatttttgatagttctgacctttcctttgcaattc

SEQ ID NO: 684824 - DNA, 98 bp, Homo sapiens
ggagagcgagagaggggagcaggtcagtactcctgcatttgtaccaacgaaaactcacgtgctgcttcatcgaatgagtggaaaaggactagctgccc

SEQ ID NO: 684825 - DNA, 98 bp, Homo sapiens
cctggacgctgcatcctgggcccagatccaccagaagctccgggacttctcccgcagcacccaggtttgaactgatgcgcatgtgctggcagtataac

SEQ ID NO: 684826 - DNA, 98 bp, Homo sapiens
acaggctggtgcagacagcagagctcacaaaggccgccatggcatcagatgaaggcaaactttttgttggagggctgagttttgacaccaatgagcag

SEQ ID NO: 684827 - DNA, 101 bp, Homo sapiens
gaaggatgtggactgcagtgctgcagtgccagaaatgagccgtcagactgctacagcattacctaccggtacctcgaagtgtccaccatcccagagggtgc

SEQ ID NO: 684828 - DNA, 97 bp, Homo sapiens
gaagctgagggcacgtgtttgcggttcagccctttgatgaccgcagcaggctcgtgctgtcttggaaagagaatttaacaaccttttggtcatgggg

SEQ ID NO: 684829 - DNA, 75 bp, Homo sapiens
cacaagctggagcccaactgataatccttgaacatgtatttagtgtctctgatccgggacaagctaggatggatg

SEQ ID NO: 684830 - DNA, 100 bp, Homo sapiens
cagcgatgacgttgctttgtgggacatagagatgagtaccatgagctcccgacactctgccagcccagtggttttcaccagtgcccggagttcacctaaa

SEQ ID NO: 684831 - DNA, 100 bp, Homo sapiens
gaacaaaggcatacacttactagaaatctagatccagactgttgatctcctcatgcaagagtcaggatgtcgtttagaacatccttctgctaccaaattc

SEQ ID NO: 684832 - DNA, 97 bp, Homo sapiens
gagatggtggattctcactgagttttgactagcggaagaaaagatctctcaaaggccttggttctgacagaaattggccccaaacgtgaccctgcga

SEQ ID NO: 684833 - DNA, 75 bp, Homo sapiens
gacacgttatctgagttctggatggaggtaaaggaatatcacgacaggggcaagtgtccgagtggtgaatcagct

SEQ ID NO: 684834 - DNA, 83 bp, Homo sapiens
acagcgaaacgccgcgcactcggagccggcacggctcggcggactcgctcagcagcagcctgaaaacttgctacaagtatctc

SEQ ID NO: 684835 - DNA, 100 bp, Homo sapiens
gttaactctgagaagtcgtcctcttcagaaagtgtctttggtgcaacactaacaaggcttgtctggactacccagttacaagcgtcttgccaccggcttc

SEQ ID NO: 684836 - DNA, 75 bp, Homo sapiens
agacacagctcatgtctcattaatcacaccaacaaaaagatcctgtggtacagtcgtcctcttgagttctggcgc

SEQ ID NO: 684837 - DNA, 82 bp, Homo sapiens
tgatgaggagaaaaaggtggcgagcaggttgactctggaagctcccttgtctgccaaatggacaagacctggattcagatag

SEQ ID NO: 684838 - DNA, 98 bp, Homo sapiens
gcgccctagacatcttctccctcccttgcctcagactggtcaaacaaatggattttacagaggcttacgcggacacgtgctctacagttggacttgct

SEQ ID NO: 684839 - DNA, 100 bp, Homo sapiens
tgataagaaaacacatctttacacactaagcagaatccagagaccacatttgaagtatatgttgaagtggcctatcccaggacaggtggcactctttcag

SEQ ID NO: 684840 - DNA, 100 bp, Homo sapiens
ggacgcgacgcgccccgcctcccccgtccggtccctctctccacggtaaggggatgctgatatgctaactggtgatgagcaagtatggaaggaagttcaa

SEQ ID NO: 684841 - DNA, 80 bp, Homo sapiens
ggcccgcccctcaaggacaacctcggcctgagacaccggaggaccgggtgagaagccctaccactgcaactgggacggct

SEQ ID NO: 684842 - DNA, 101 bp, Homo sapiens
ggccgccgccgccgccgccgcgccgagcggaggaggaggaggaggcgaggaggagagactgttaatttggagtggcccctggagtcagtttcctacaccat

SEQ ID NO: 684843 - DNA, 75 bp, Homo sapiens
gttctaacagaacaccagttttttcctttttagatctcacttactggaaaaggtctaacttcaaacttgtggctg

SEQ ID NO: 684844 - DNA, 99 bp, Homo sapiens
aaggtgggacgggattacgtccagaaggcgcagactaaagagcagcctgggttactaggtgtctttcagaagctgattgcatccaaagcaaatgaccac

SEQ ID NO: 684845 - DNA, 98 bp, Homo sapiens
ttccaggaagcagcaggatgcgccgctccactgtcggtagcaacaagggaatcatcgcagaagagaacaagaacctgcagccccagggagacgaggac

SEQ ID NO: 684846 - DNA, 90 bp, Homo sapiens
atatgtgcaagaccagagcgaagactgcctatatttaaatatatatgtcccgactgaggatgctcgagaggagaatgtggccactttccg

SEQ ID NO: 684847 - DNA, 72 bp, Homo sapiens
aaatgtgaaacgaataacatgatggaatatgtacagcagggaagaactggaaactcagagaaagaaactgcc

SEQ ID NO: 684848 - DNA, 101 bp, Homo sapiens
tcaatccagatggcagccagtcagtggtggaggcactggtgaggtggattgatgatgaatcttctggcacacctggagcaactccagaacacagtcgtgag

SEQ ID NO: 684849 - DNA, 100 bp, Homo sapiens
ccatagttcacaatgttgattctgatgacctcattagcatgggatccaacgacagtaagtacagtctacaaataagaaacctcgaaaatctccaggtgag

SEQ ID NO: 684850 - DNA, 106 bp, Homo sapiens
ggcccggcctgacccggtctggcttgttcgggctcagcggccgcgaggccgcagctcccgaattcaattcgtcataatctgtccctacacagcaagttcattcgtg

SEQ ID NO: 684851 - DNA, 50 bp, Homo sapiens
aaattatgtgaaacctccaaatgtggtatcgtcagtgaagcaggagcatc

SEQ ID NO: 684852 - DNA, 82 bp, Homo sapiens
ctcctaagtagctgggattacagcaactagaagccatttgtgtcaaggtaacgtctggagaaacaaaaggtcaggaaaggcc

SEQ ID NO: 684853 - DNA, 75 bp, Homo sapiens
gtgagacatgtctgagactcctgctcagtgtagcattaaggaatgatgagaagacagcagctgattacaagattt

SEQ ID NO: 684854 - DNA, 100 bp, Homo sapiens
cttccttctgggattggagctcaccaggataccaataactagtgcctcgtactacgcgacagtgaccctggatcaggttcggaatatacttcgttctgac

SEQ ID NO: 684855 - DNA, 90 bp, Homo sapiens
caaactaccaaatgggcgagacacacctgcactcttcaacttcaccactcaagatatcagaaaggtagatttgtcaaaaaacctgttgtc

SEQ ID NO: 684856 - DNA, 83 bp, Homo sapiens
gtcggtgtccgcgtcgaggagccggggcagggcacgatggcggactgggctcgggagacactatggacagcgtgaagcagagc

SEQ ID NO: 684857 - DNA, 100 bp, Homo sapiens
tggcaaaagcccatacctttatccactctatggccttggagaactgccccaaggatttgcaaggtctattattagcagaagatttttctgcatagttggc

SEQ ID NO: 684858 - DNA, 75 bp, Homo sapiens
ctggacttcaatccacctcatgtacatgtgcctcatctccagacatggagcccagctatgggggaggtctctttg

SEQ ID NO: 684859 - DNA, 89 bp, Homo sapiens
gggtaaagtcgagtatctggtgaagtggaaaggatggcccccaaaatgccatggacaatattaccaggcagaaccaattctacgatacc

SEQ ID NO: 684860 - DNA, 85 bp, Homo sapiens
gggatgcctgtaccatgatgtgatgctggagaccttgacacttatatcctccctgggtgctgatattcgtggcttcagtgctcct

SEQ ID NO: 684861 - DNA, 74 bp, Homo sapiens
cgggaacgagcgagtcgccgctgcagccctagtgactgcggcctgcatcccggctattgagggcacctacattg

SEQ ID NO: 684862 - DNA, 100 bp, Homo sapiens
tctggatgtcggtgggcctctgagatatgccgtttacggctcccaaaatggcgatgacaccggcacctggcccaacaaccagtttgacacagagatgctg

SEQ ID NO: 684863 - DNA, 82 bp, Homo sapiens
cagacagactgacagactcgctacagcctcccgcgacgatgcccctcaacgttagcttcaccaacaggaactatgacctcga

SEQ ID NO: 684864 - DNA, 98 bp, Homo sapiens
gtatgcataatatggaatgttcttaacccagaagtagctgaatgtgttactccattgctgaggagtggttaatccctatatcctgaagaagaacatga

SEQ ID NO: 684865 - DNA, 99 bp, Homo sapiens
gtgagacagctgaagcgtgttggggaaggagctgtaaagagagaggaagatcttccttccatagagcagttagcccatcaaatagaagatgaggaaatc

SEQ ID NO: 684866 - DNA, 75 bp, Homo sapiens
tttgaggtcactttccagcagtccagcacggccaagtcagccacctggacggcgcagttgtgtagcagttgagta

SEQ ID NO: 684867 - DNA, 100 bp, Homo sapiens
ggaagaaatgtttgggaggcactgtccaggtactttagattgattgccgagcggggcagttttgtgagccttcatctgaagccttcagttcacccctctg

SEQ ID NO: 684868 - DNA, 90 bp, Homo sapiens
cggaaaggtgcctagaagaacaaggtgcaggaccccgtggtgagactgtggagatgagaaggtggtggacactcgtgatggaatggaaat

SEQ ID NO: 684869 - DNA, 74 bp, Homo sapiens
gtggccaagaagctggtgtgcggagatgaaggaactcgaatcatttatgacagaaagtttctgttggatcgtcg

SEQ ID NO: 684870 - DNA, 87 bp, Homo sapiens
ggagcggcactcggcgagtccgggactgcgctggaacaatggataacttcttcaccgaggagttcattttgaatcaggattggaatg

SEQ ID NO: 684871 - DNA, 90 bp, Homo sapiens
aagtccgggagctgggcggccatttaccaggtcaatcatgcgaggctgtgacaacatgtgtagctactgcattgttcctttcacccgggg

SEQ ID NO: 684872 - DNA, 83 bp, Homo sapiens
ccgagtccagcccaggaaaatggagagacaatgcagatcttcgtgaagactctgactggtaagaccatcaccctcgaggttga

SEQ ID NO: 684873 - DNA, 100 bp, Homo sapiens
ctgagcgagccttgaaagagataaaagcggaagtttgccacacggtgaataatgctacagcacgtgtaatgaccaataagaagatggtcacaccatatgc

SEQ ID NO: 684874 - DNA, 75 bp, Homo sapiens
agtccttctgcagtccctcgtccagccacccccagccgagaaggatctggacgaggcctacctgaagcgccggcc

SEQ ID NO: 684875 - DNA, 100 bp, Homo sapiens
gccaggaggcgtttattaggggggcggggggaaagagccccagcaccgcccctcctggaagaaggaagaggtcctgtgggaagagcagcgtggaggtggg

SEQ ID NO: 684876 - DNA, 113 bp, Homo sapiens
aataaggagaaggataagtcgaaggggaaggcgcctgaagaggacgaaggtgaaatgacaatggatgctctgttggctcgattgaaacttctgaatccagatgaccttagaga

SEQ ID NO: 684877 - DNA, 83 bp, Homo sapiens
ggccgagcaggctgagcgatacgacggcccccagaactctccttccagctgaactccctgggaacaagtcagttgggctgatc

SEQ ID NO: 684878 - DNA, 75 bp, Homo sapiens
ccggctcgacaagttcaagcagctgcttgccggccccaacacggaccttggttcttgattattacagacctcttt

SEQ ID NO: 684879 - DNA, 82 bp, Homo sapiens
cgaggctgctcgaagcggggacgccgccgccaacaagctcttccactacatcccgggcacgacgtccttctatggccgcttc

SEQ ID NO: 684880 - DNA, 102 bp, Homo sapiens
agtacaccccgcagcacagccgcgacttcaaggtgggagacctacctgatgcagatattaaacctccagaaaatgtactgtttgtgtgtaaattgaacccag

SEQ ID NO: 684881 - DNA, 98 bp, Homo sapiens
ggcgcctcatcccactctggaagctgagccggcggcgggaggagctagggctggagcctctccagcctcccgcgaagatccaacttagaaataatgtt

SEQ ID NO: 684882 - DNA, 74 bp, Homo sapiens
ctcggagtgccaaaatgctgcacagatctaccgtcgcgtgaccagtaaatgcactcggtgatggaaagagagcc

SEQ ID NO: 684883 - DNA, 85 bp, Homo sapiens
gaggagaacgtcccgctggatctgacccgagcttgcattgaaaggctctagttacagtggacttcttgaacgacatcatattcac

SEQ ID NO: 684884 - DNA, 99 bp, Homo sapiens
acgtggccctcgatgtgctctgcgtgttgctggaaatgactgctgtccatgcaggcaacataaacttcaagtgggatcctaaaagtctagagatcagga

SEQ ID NO: 684885 - DNA, 75 bp, Homo sapiens
tctcgtgactccctcggcccctgggaataggactgtggacctcttcccaggcgacctgggagacccagccagtac

SEQ ID NO: 684886 - DNA, 101 bp, Homo sapiens
caaagctttaaaaacattgacatttaagttgtcagcagataagcagagagccctagaagaaaccaaagcctacaccacccaatccttagcaagtgttgcct

SEQ ID NO: 684887 - DNA, 100 bp, Homo sapiens
gcagcccctgctgttgctacaactcagattaaagagtctattgttggggaaatcagacgggaaattgtaagtggacttttggcagcagtatcttcaagta

SEQ ID NO: 684888 - DNA, 74 bp, Homo sapiens
aggaatcgtatcgtatgtccgctatccagaacctccactctttcgaaataatagtgtaatccttgctgatgaaa

SEQ ID NO: 684889 - DNA, 98 bp, Homo sapiens
ggcgctccgggcccgggcggctggcctcaccgcccactgggttaaaaggacaactctggtggatagcagaacatctgttactgatgtgaagtttgctc

SEQ ID NO: 684890 - DNA, 75 bp, Homo sapiens
cagattcgcagtggtcgcttcttctccttgcgtgaagcacatctcctgtcccctgctcatcctgcacgctgagga

SEQ ID NO: 684891 - DNA, 100 bp, Homo sapiens
ccggacactgcagtggacggcagtggtgtggagggggtgaagaccgtgttggtgacgaccaacttggcccctcacgggtgagccctattcccagaggcag

SEQ ID NO: 684892 - DNA, 90 bp, Homo sapiens
aagcaggcgactacagccacgtgaaggaggaagaaatcgtggactggtggagtaaattttatgcttcctcaggggaacatgaaaaatgcg

SEQ ID NO: 684893 - DNA, 100 bp, Homo sapiens
ggcctccctcgtgagttgggcttggtaccgtgctgcccagaatgcccttcgggaggtgctggagaatctggtaaaagcaccattgtgaagcagatgagga

SEQ ID NO: 684894 - DNA, 100 bp, Homo sapiens
ccaggtcagcaagggcacctgcgagcaaggtttggtgcacctcgatttggaggaagtagggcagggcccttatctggaaagaagtttggaaaccctgggg

SEQ ID NO: 684895 - DNA, 73 bp, Homo sapiens
ggagaagcccccagaaccaggcccccaactcagccatctgcggaggtcaagattgacgagatgcctgaggctg

SEQ ID NO: 684896 - DNA, 90 bp, Homo sapiens
cgcccagcctcctggcacaccggaaacagagcaaatgcagcgttacaatcaaagacttattgaggaattgaaaaacagacagactcaaga

SEQ ID NO: 684897 - DNA, 100 bp, Homo sapiens
catccagtttgatgtttactacaaggagcagtgaggagaatgaataccttccaagaccagagtggcagctccagtaatagagaaccccttttgaggtgta

SEQ ID NO: 684898 - DNA, 75 bp, Homo sapiens
gatgattgatctggctgaagtagcagatctgaaactagaaaaactgcttttggaattatctctacagtgaagaaa

SEQ ID NO: 684899 - DNA, 100 bp, Homo sapiens
acctacagaaacaaaatgtcaacaaattgatggatgtcttcaatgaacgagacaattgtccctacgtctacaacactgaccagagggacacggatggtga

SEQ ID NO: 684900 - DNA, 75 bp, Homo sapiens
ctggctctcatatcctcgctgggacggcaccctgaggctctgggagtacaggagcggccgccagctgcactgctg

SEQ ID NO: 684901 - DNA, 80 bp, Homo sapiens
ctgtgtgcaaagttcctattgatggtccccccataacatatctgaagagatggattaagaatgctttggattaaggattg

SEQ ID NO: 684902 - DNA, 82 bp, Homo sapiens
acgggatccagagcgccgcgcacttcgtcatgttcttcgcgccctggtgaaagaaaatggcccgaaccaagcagactgctcg

SEQ ID NO: 684903 - DNA, 89 bp, Homo sapiens
cagccaggagtcatgagcgacagcggcgagcagaactacggcgagcggatggcccactgcgtgaccttggttcagctgtccatttcctg

SEQ ID NO: 684904 - DNA, 101 bp, Homo sapiens
atcattcaaaggataaccaaatgtgccgtgatgtatgtgaacaggcaactactctaagagtgaggaaattagaagaaaacattgaagcagaaagagcagcg

SEQ ID NO: 684905 - DNA, 75 bp, Homo sapiens
caacatcgtcaactctgtgaagcagcggcctctccaggcctacaagccggttaccaccaccctgtgaatctgcct

SEQ ID NO: 684906 - DNA, 74 bp, Homo sapiens
caccagccgcgcttctgtccgcctgcaggtttcagagcagcgatggagaaattaaatacttgcaattagcagag

SEQ ID NO: 684907 - DNA, 74 bp, Homo sapiens
tgtagtcatgtacagaacatgatcaagggtgttacactggaagctgagattgacagcattcaccagttagttgt

SEQ ID NO: 684908 - DNA, 100 bp, Homo sapiens
gggagcatgcagctctggagcctcgccaccttgggggccgggccatcatcaccaagagctttgccaggatccacggtggcttcccacacttctgactcgg

SEQ ID NO: 684909 - DNA, 100 bp, Homo sapiens
cgtgcccacccggacttgtccttctacctcaccacctttggacaaccctccatatgataagggagccttcagaatcgaaatcaactttccagcagagtac

SEQ ID NO: 684910 - DNA, 96 bp, Homo sapiens
gatgttgaagacgacaccacggggctgttgaaagttgccatagataatgccagagctcaagagaaacaggtccaactggaaaaaactgagctgaag

SEQ ID NO: 684911 - DNA, 100 bp, Homo sapiens
aaactgctcatacagaattacgcatttccacttctaatgtctatccagaagttaaaggagagattgctcgtaaagatgaaaagctgctgtcgtttctaaa

SEQ ID NO: 684912 - DNA, 100 bp, Homo sapiens
ccaccgcgccgggccccggacgccgcgcggaaaaggggagacggtgcctattgatgaacagtttgacaaagagaaagccaacttggaagctttcacagtg

SEQ ID NO: 684913 - DNA, 75 bp, Homo sapiens
caacaggtggcactgttggccacagccaacggaacgcacattgcagtgcaggctaaagtgaacaactccagcctg

SEQ ID NO: 684914 - DNA, 100 bp, Homo sapiens
gaccgcgcctggctcaggtgtgggaccccatccttcctgtcttcgcagaggagtcctcgcgtgatgcaagcctcccctatccagccccattctagaactg

SEQ ID NO: 684915 - DNA, 100 bp, Homo sapiens
gtgacagaatgtagattgggactgaaggaggagaacccttccaaaaaagcctttgaggaatgtactaggttcgtgctggccgtgggcagcgccgtctttg

SEQ ID NO: 684916 - DNA, 76 bp, Homo sapiens
cgggcggcgcgggtctgcggctccagcgtgcagaagatagagaagcagaggcggatagaacggataaagcagaagc

SEQ ID NO: 684917 - DNA, 101 bp, Homo sapiens
cttttcacgtcacctggagagatgcacagaagcccccgagcgcccacagcatgaaggaggaggccttcctccggcgccgcttctccctgtgtccaccttcc

SEQ ID NO: 684918 - DNA, 100 bp, Homo sapiens
gtggacctcgtgaagctgctgctgtccaagggctctgacatcaacatccgagacaaccgggctgacgcacgaggcacacaggaaggaggtggagcaggtg

SEQ ID NO: 684919 - DNA, 100 bp, Homo sapiens
ctcctgtattaatgtctaagctgtctgtgaatgcccctgaattttacccttcaggttattcttccagttacacagaagtaacagctagcagtcgccacta

SEQ ID NO: 684920 - DNA, 75 bp, Homo sapiens
cttccagtggccagccagatggaagcatcctgcctcgtcatccagttggtgtggcatgcagcattttggaaggaa

SEQ ID NO: 684921 - DNA, 95 bp, Homo sapiens
acagtatttggagaactcactgatgaaataacgaaggaggcccaacttcattcaataaggagcctgacggatttatcccagacggtagaacaaaa

SEQ ID NO: 684922 - DNA, 96 bp, Homo sapiens
cacagcacagttcctgggaaggtggagccaccagcctctccttggaactgtggctgcaccatctgtcttcatcttcccgccatctgatgagcagtt

SEQ ID NO: 684923 - DNA, 74 bp, Homo sapiens
cgttgtcgccgcggtcctgctgttggtagcagtagctgatgtgcagtttggccccatgagatttcatcaagatc

SEQ ID NO: 684924 - DNA, 50 bp, Homo sapiens
ggtgatttctgcatttccatctgagatggagtcttgctctgtcaccaggc

SEQ ID NO: 684925 - DNA, 75 bp, Homo sapiens
tcatgttggacatttgcgttctaccatcatagacctcccaggagctacactgcctgatgtgggcctggaactgga

SEQ ID NO: 684926 - DNA, 88 bp, Homo sapiens
cgggagctgtgcgcgcagccgggccaggtggtcgccccaggatggccaccatgtctgggagatggaagcgaaaactgaccgggacctg

SEQ ID NO: 684927 - DNA, 83 bp, Homo sapiens
ttgcgaatcagatcagagtgtggtcgaatgtaagctttggtctgctctaaacttatccatctctgtccattactggaacaact

SEQ ID NO: 684928 - DNA, 87 bp, Homo sapiens
gatttatgccagttgcaaagaagaatattggctcactatttttcctctgggcatagtgcccttatgcctgcacagttgttttttaag

SEQ ID NO: 684929 - DNA, 100 bp, Homo sapiens
tgggaaggaggccgagccgggatctcaggtcctcgggggcggcggccacgccaaggacggatatggagttaccagtaaggagctccaccgtgactctcct

SEQ ID NO: 684930 - DNA, 97 bp, Homo sapiens
gggactcattggaaattgtacagtgacatcttctgggatttagtctggtatggacctgtctgccaatcaggacgaggagaccgaccaggagaccttc

SEQ ID NO: 684931 - DNA, 52 bp, Homo sapiens
caacgccccggtggagaagctgagggtgactctggaggacccctcaactgcc

SEQ ID NO: 684932 - DNA, 90 bp, Homo sapiens
ggggattgtggacccttttgccagacctcgaggtcatggcaggaaagtgccggtggtggtgtgcacattgagccccggtatagacagttc

SEQ ID NO: 684933 - DNA, 98 bp, Homo sapiens
tgggaaaatcatggaagttgattactcagtctctaaaaagctaagacttaattcagtgcacaaatgagatgaatgtgaacatcccacagttggcagac

SEQ ID NO: 684934 - DNA, 126 bp, Homo sapiens
ccgcgagcaccagagtcggcgtaactatcgcctgacagggtatctgaagtaaaaggggctggagcaggctctgcggctggagcctggggagctggagacgcaggagcccagggggctggtacggca

SEQ ID NO: 684935 - DNA, 75 bp, Homo sapiens
gccttcggaaagagagagcaggctgaagaggaacgatatttccggtgccatcgcctgcaggattctttattcagc

SEQ ID NO: 684936 - DNA, 100 bp, Homo sapiens
gagtgggggaggcgaacagtctcgttgctgcctctgtgtacgctgaggggggagtactatactggcaattgctggagaagattttgcaattgttgcttct

SEQ ID NO: 684937 - DNA, 75 bp, Homo sapiens
aggataagtcaaaggaggaatttgcctcttctacagatagagctgttaaggccgagtgatagctactttcacatg

SEQ ID NO: 684938 - DNA, 101 bp, Homo sapiens
tggtgcttcaatagcatgttattatcataaaaatgaacagttttgtggaatagatgaccaaatagcactctataccaaagcgtcaagatacttcaacgcac

SEQ ID NO: 684939 - DNA, 50 bp, Homo sapiens
gtgcgtcaatcagagcgtcctgtgcggtatctttcagatgaaggcattga

SEQ ID NO: 684940 - DNA, 75 bp, Homo sapiens
acccccagtacacttactactatcctcattatctccaaaccaagtgatgtcttggcattgcccattttcaagcag

SEQ ID NO: 684941 - DNA, 75 bp, Homo sapiens
ctggaattactctcaataaaccagcactcacctttgccctgggtactcttcttgtatgtgtttccatatatctct

SEQ ID NO: 684942 - DNA, 83 bp, Homo sapiens
ctcagacctgccaatttaccagagataattgataacaccctgtaacagctgaatgatcacagtcgtgttaaactgcaaaatgc

SEQ ID NO: 684943 - DNA, 50 bp, Homo sapiens
atgaagaaggtgaagaagcggatgagctgtcaccactgactaaagaagag

SEQ ID NO: 684944 - DNA, 132 bp, Homo sapiens
gaaaaagttggatgaagatagtttaaccaaacaaccagaagaagtatttgatgtcttagagaaacttggagaaggatcagtggtcgtgaagtgtttgaatttcgtcctgaactggtcaatgatgatgatgag

SEQ ID NO: 684945 - DNA, 72 bp, Homo sapiens
taatctttggagagacatcctatattcctttcaggtagcctttccagtaaatatatgactcagggaaaagcc

SEQ ID NO: 684946 - DNA, 82 bp, Homo sapiens
cgccagcccgtgccgcgagcgcggcctgcaggagtaatagctcttcaagtctgcaataaaaaatggcctccaacaaaactac

SEQ ID NO: 684947 - DNA, 100 bp, Homo sapiens
catgagaccatagccaaacccccagcatgccagagagtattggtggatcttttggtatctttgatgagttcaagaacatgttcagaagagctaacccttc

SEQ ID NO: 684948 - DNA, 53 bp, Homo sapiens
gttgaagttcaagagctcagaccctaaaggacatggatgaagctggaaaccat

SEQ ID NO: 684949 - DNA, 75 bp, Homo sapiens
gaatattggggggctcggctgcagacttggccaaatggacgggactattaaggattgaaagaaggtggcaagagg

SEQ ID NO: 684950 - DNA, 101 bp, Homo sapiens
gcccggcctacctcttcctctggcccgaagccttcctttatcgctttcaggggcttgcttctgacatgtctgatgagcgcattcctgctgttgctcctggc

SEQ ID NO: 684951 - DNA, 98 bp, Homo sapiens
gacgcttcagttcatgtatgacgaggaggaagagttcatcgattggtggagcaaattctttgcctccataggggagagggaaaagtgcggctcctacc

SEQ ID NO: 684952 - DNA, 83 bp, Homo sapiens
aacccattagttccccttgggatgtagtttttggaacatcagcccagccatctaatcagtctccgatgtctttaacatctgat

SEQ ID NO: 684953 - DNA, 101 bp, Homo sapiens
taaagctgagctgcgaggaaaatggcggcgggagatggagtccgcctgcgtgaccatccatgaggctctgaaaacggtgattgactcccagacgcattacc

SEQ ID NO: 684954 - DNA, 75 bp, Homo sapiens
ttccacgccatcggctgcctcgagacggtgtctccagagatgcagcttcagctgccctcgcagatgccgctgagg

SEQ ID NO: 684955 - DNA, 75 bp, Homo sapiens
ggggtgtccgagttgccgccggagaggagtggcctcgcccgcttgtttcccacagtcaaatcactcgcctctaca

SEQ ID NO: 684956 - DNA, 110 bp, Homo sapiens
cgcagggcctgcagcgggagctggacggcgagcgcgagcggcgcgagaaagatgcctaaatcaaaggaacttgtttcttcaagctcttctggcagtgattctgacagtga

SEQ ID NO: 684957 - DNA, 82 bp, Homo sapiens
tgacgcaggtgcaggtgtctcttctcgccctggcggggaagagtctctggtaagaagagtgaaagcaaagaagccaagaagt

SEQ ID NO: 684958 - DNA, 97 bp, Homo sapiens
gatattgaaatggacagtggagatgaagcctaagaatatgatcaggctccctgaaacaacagtaacctacccctgtgggtcatcatcatgccctccg

SEQ ID NO: 684959 - DNA, 98 bp, Homo sapiens
actggaacttatgctgtagacatttctttgtggtttatctaaaaaccaaaggtgccactgattaatgaacttgaatcagcaatacatcagctgtacaa

SEQ ID NO: 684960 - DNA, 90 bp, Homo sapiens
gaccttcgaatgcataggcctttaatggtgcagacagaggcagaaggctcgtccactgcctcttcaggaagccaactagccgaaggcaag

SEQ ID NO: 684961 - DNA, 100 bp, Homo sapiens
ggatcaagtcaaaaattccaaatgaacacaagaaacctgctgaggttcgccaagcagcttttcagtctctgggacctttcatatctacttttgctaatcc

SEQ ID NO: 684962 - DNA, 90 bp, Homo sapiens
gatgatgatatccttctcaaccttgtgggatgtgaaaactctgttactgaaggtgtgttccagagaacaagccttcagacatttgctata

SEQ ID NO: 684963 - DNA, 98 bp, Homo sapiens
ggctgctgtcacacattacctgtatctttgccagtttagctggatgctcattcaggaaagcatccaacggagtggaagcagcatgaaggaagagccgc

SEQ ID NO: 684964 - DNA, 97 bp, Homo sapiens
ccagattcctttttgcaccatccgtactaccaggtgctggagaatctggtaaaagcaccattgtgaagcagatgaggatcctgcatgttaatgggtt

SEQ ID NO: 684965 - DNA, 97 bp, Homo sapiens
ggacgtggttaagaaccaactggttgaggttcaatgcagacaagacggatgtgatgctggtgaccaagaatatggcccaggtgaccaaagccctgga

SEQ ID NO: 684966 - DNA, 83 bp, Homo sapiens
aacacgctgaacggcttgaggctccagtcaaaaaccattaaggtgccagaaccctgtggagcatcatgaactgggaagagtag

SEQ ID NO: 684967 - DNA, 74 bp, Homo sapiens
aaggagcagatttacaaactggccaagaagggccttactccttcacagatcgattccagacccaggaggagctc

SEQ ID NO: 684968 - DNA, 100 bp, Homo sapiens
cagggagggagaaatggcaaggaggttgctgccagcccatgtacaggtaaaccgtcctattggcagggtacagatcttcactgcagacttatctgaaata

SEQ ID NO: 684969 - DNA, 50 bp, Homo sapiens
cccgcaggccggacccccttctagggattctcccagcaacaagctgctgt

SEQ ID NO: 684970 - DNA, 141 bp, Homo sapiens
agattacatcaatgccagtttcatggatggctacaagcagaagaatgcttacattggcacacaagctggagcagagtgaagccaagtgtgaggaggccttgaagacgcagaaggtgctcacagcggacctggagagcatgc

SEQ ID NO: 684971 - DNA, 98 bp, Homo sapiens
aggcccatcatgcccaatatggtttttgttggtggaatcaactgccttcaccaaaatccactatcccaggccatgttcgagctggtcacttccgaggc

SEQ ID NO: 684972 - DNA, 90 bp, Homo sapiens
aagaggctcctgaagcacaaatgcaggcctcatctagttgaatctgaagatgtggacctgctgatgaagagggctgattgtatctaactt

SEQ ID NO: 684973 - DNA, 100 bp, Homo sapiens
ctgtcaaggatcttgtgtgctccatagtttatcaaaagatccatatcatagattttgacgatgaaaacaacattataaataaaaatgtcctcctccatca

SEQ ID NO: 684974 - DNA, 83 bp, Homo sapiens
agtgcagaagatctgggtgcccgtggaccacaggccctcgttgcccagatggaacccgagcgtcatgttagggtgaagcagag

SEQ ID NO: 684975 - DNA, 104 bp, Homo sapiens
gccgagctggacccggaccggttttggcctcctgacaaggtgatccgggcgggccccgcaggaattttatcccctcaccggcctcacactagtatcgcatgtcc

SEQ ID NO: 684976 - DNA, 89 bp, Homo sapiens
gaaagtccaagctcgtggtgggtggaaaagtgttcgccgaggccgggtgctcgtccactgccgggaaggttatagccgctccccaacgc

SEQ ID NO: 684977 - DNA, 75 bp, Homo sapiens
agtggtttatcaaaatcacgttataatcagattttgaccaagcattttgtaagcctcctgacaaggtgatccggg

SEQ ID NO: 684978 - DNA, 74 bp, Homo sapiens
caagactcaggccaatgactacttcaaagtgggaatgtaagacggacttagatattgcatacaaatttggaaaa

SEQ ID NO: 684979 - DNA, 100 bp, Homo sapiens
tccagtatccatattcgttatgaagatgatccgattatgtttcgaggggaagtacgtttaaatgtggaagagaaaaaaacaagagctgcaagagagcgag

SEQ ID NO: 684980 - DNA, 82 bp, Homo sapiens
caggaagttcaagatggccgccgcggagacccagtcgctacgggagcagccagagaagaggatcacctagcccgggtagaag

SEQ ID NO: 684981 - DNA, 75 bp, Homo sapiens
tggacaaacttgatgctaatgtgaggccaatagcttcaccgtctcctctgtcgccgccccttcctggcttcaccg

SEQ ID NO: 684982 - DNA, 95 bp, Homo sapiens
ggggagtggtgtggcgtggagttagatgagccacttgggaagaatgatggcgctgttgctggaacaagggagaagaaatgggtgaccgttggtga

SEQ ID NO: 684983 - DNA, 100 bp, Homo sapiens
ttattggaagctagatttactggagttgcaagtgggagcactggaagtacgggcagttgcagtgttggagctaaaggcccacccaatgctaatgaagact

SEQ ID NO: 684984 - DNA, 100 bp, Homo sapiens
gtgactttgaccgcaagctcctcctggccaagtccaagattgaaatggaggagctcacctccgcctccaggaagaccagactcccacccttccacacctc

SEQ ID NO: 684985 - DNA, 100 bp, Homo sapiens
gcgaagcccgtggtggagatggatggtgatgagatgacccgtattatctggcagttcatcaaggagaaggaggaagaggaggtagaacgggaaatcatta

SEQ ID NO: 684986 - DNA, 125 bp, Homo sapiens
aaaaaggtgaaaggtattcttgtggatattgggcttgacagctgcaaggagttactgaaggaaccctcacccagaatgaaatgatatttaagcggctgcacctgggcaccgtgtcctatggcgcc

SEQ ID NO: 684987 - DNA, 75 bp, Homo sapiens
tgagccctggctgcgcgcgcggcccctcctccccggcgcctcccagctactcccgagcccggagaggacccacgc

SEQ ID NO: 684988 - DNA, 51 bp, Homo sapiens
tttcctcacaactgttctttccagatggtgccatgacaatggtgtgaacta

SEQ ID NO: 684989 - DNA, 75 bp, Homo sapiens
ggaaattgcaatgaaaatctggaaaccctggaaaagcagggtgactgtgaagatcacgctaaccttctgtgcagc

SEQ ID NO: 684990 - DNA, 83 bp, Homo sapiens
ctgaaccaagagagaggttacagcttagcttccaggatgatgaagtaacagattccctggataccctttcagaaatttcttca

SEQ ID NO: 684991 - DNA, 100 bp, Homo sapiens
tcattcagatccgagagaagcttgatcagttgaggagtataacaaagccatccggaactacacccgcttcgatgactggtacctgtgggttcagatgtac

SEQ ID NO: 684992 - DNA, 50 bp, Homo sapiens
cgccacctacccagtgaccatgataggagccttcacgtaaatgggtccag

SEQ ID NO: 684993 - DNA, 87 bp, Homo sapiens
gttgtcaattttgatatgccttcaagtatggatgagtatgtccatcagagggctctgaactcctacttcgagcctccggtggaggag

SEQ ID NO: 684994 - DNA, 101 bp, Homo sapiens
cagaggtgataagatctcgcccgcccttccgtcccaggatagtgtgattgcgggaccatggaatttacaaggaaacttggatttaactggccagaagcagg

SEQ ID NO: 684995 - DNA, 100 bp, Homo sapiens
cgtggctcgggctcgggcggagctggagacgtgtggagctgttcgaggactcgcgggtgtgcaggcagcacagattgtgctaatctctctgtttgaattg

SEQ ID NO: 684996 - DNA, 50 bp, Homo sapiens
ggccttcgtacccgtcttgattgagggagaagaaatgggtgaccgttggt

SEQ ID NO: 684997 - DNA, 89 bp, Homo sapiens
caggctctgcgggaggtggagcacctgaagagatgccagcagggcgaccattgacgaggtggagacggacgtggtggagattgaggcca

SEQ ID NO: 684998 - DNA, 75 bp, Homo sapiens
cctgcgcaaagccagcgtgaccatcgtccagtggtttacgtcttggatcttgcagatagactgatctcaaaagcc

SEQ ID NO: 684999 - DNA, 75 bp, Homo sapiens
gaggacacgaggcggcgggctggagacatggaccgcggcgagcaaggtagctacagcaagctgggtagcaggcag

SEQ ID NO: 685000 - DNA, 101 bp, Homo sapiens
cgagagcgtgaccgagagcgcgaatatcgtcatcgttagaagatgattcacctccagcagaaagggaaccaggagaagttgtggacagcctggtaggcaaa

SEQ ID NO: 685001 - DNA, 100 bp, Homo sapiens
atatgctccttatttactgcaatgttctttgcatgttactgtgcactccggactaacgtgaaggcacgtctgagaatggtggatgtggtggagaaagaag

SEQ ID NO: 685002 - DNA, 90 bp, Homo sapiens
ttgacctttaggtgcttttatattcatctcaaaaacaaaattctgaactcaggacttggcaatgctgggctttgacaaacttcctctgtg

SEQ ID NO: 685003 - DNA, 100 bp, Homo sapiens
acgaggcggaagaccgcgcgcagggcctgcagcgggagctggacggcgagcgcgagcggcgcgagaaactttgtgatggtcaacagcgtggcgctgaacg

SEQ ID NO: 685004 - DNA, 82 bp, Homo sapiens
agtggggaaaaagaagaagaaaacaaagggaccagatgctgccagcaaactgccactgggccctggccaacgtcaacattgg

SEQ ID NO: 685005 - DNA, 74 bp, Homo sapiens
cccaggacgccttctgcaactccgacatcgaaatgatggaagaattgcatagcctggacccacgacggcaggaa

SEQ ID NO: 685006 - DNA, 82 bp, Homo sapiens
gcgcctgcggacctaactagctccaggttaggccgagctttgcgggaaagcagcggctaccggctctctgaccagttccacg

SEQ ID NO: 685007 - DNA, 76 bp, Homo sapiens
atggtcgcacgcatgattgtcggcatctcacagtggacatcctcatcatggatgatgacgacgtccccagctggcc

SEQ ID NO: 685008 - DNA, 50 bp, Homo sapiens
tttgagcagtttgtggaagcgatcagggtctagagatgatctaagcacca

SEQ ID NO: 685009 - DNA, 99 bp, Homo sapiens
agaacgctggggaggttgggctgaactgcagtgggagaggagaagagatgctggcgtgaagggttgccaccttccagagaagaggtacgagatgacaag

SEQ ID NO: 685010 - DNA, 50 bp, Homo sapiens
tcagagggcccctagggtctcccaattccactgatcctgtgaaggctgcc

SEQ ID NO: 685011 - DNA, 100 bp, Homo sapiens
agaacttgtacagagatgtgatgttggagaactatagcaatctggttttcttggatctgaacataaagtctggtctcctctggtgacggaggaagggaag

SEQ ID NO: 685012 - DNA, 100 bp, Homo sapiens
cgagtgtccctttccttcctggcgctttcctgggttgcttctggcggccatggtgttgctgctgtactccttctccgggaacagctcctgcccaggtctg

SEQ ID NO: 685013 - DNA, 99 bp, Homo sapiens
ggccttcgtgggccagaagaactccttcaccgtggactgcagcaaagcagaggcgtgcaaagactccagaattggaggcatgatgaagactctgctgct

SEQ ID NO: 685014 - DNA, 90 bp, Homo sapiens
gaggcttcgcgggaagacgcggcggcggcggcggaggatgagcctgcagagcgcgcagtacctccggctgtgggtgagcgtggaggatgc

SEQ ID NO: 685015 - DNA, 95 bp, Homo sapiens
tctctggatggaccagaatacgaggaggaagaggtggccataccgttgaccgctcctccaactaaccagcctctagactcaggactcaacaatgc

SEQ ID NO: 685016 - DNA, 97 bp, Homo sapiens
ctactgtgataagtccttccggcagctctcccacctccagcagcacaccagttgctctaggtcgtaaccagcctttgaaaaaggagaaaccaaaatg

SEQ ID NO: 685017 - DNA, 90 bp, Homo sapiens
gcatcgtgttcgaggcggagaccgagggggagccccgcgcgcggcgtcggtatttctgggaaaagccagcttctgtttgcactggtcttc

SEQ ID NO: 685018 - DNA, 97 bp, Homo sapiens
acgtccgtcgctgctgcaaccccaagatgtcggagacacggtggaaacgcttatgttatgcaatgccaaccaaaaccatagaagtgttgcagttgca

SEQ ID NO: 685019 - DNA, 75 bp, Homo sapiens
tgctataggctcagccctcagtggatttggttcatcagtatgtccgtggttcagaccctgtattaaagcttttgg

SEQ ID NO: 685020 - DNA, 98 bp, Homo sapiens
ctgcaacttcaagtagtggaaggagtacagggaagtctataagctttgcaacagaattacagagtatgatgaatatgaagacaaggctggaagaccta

SEQ ID NO: 685021 - DNA, 75 bp, Homo sapiens
ccttggcagcaatggctgtatttgaagataagtttaggccagacatggaggtggaatatgtgatcaagtgtgaca

SEQ ID NO: 685022 - DNA, 74 bp, Homo sapiens
ccagtcccacttcaaacattcgtctcggaaaccccgcctcttacagtcacgagatggagtctcccaggcgggaa

SEQ ID NO: 685023 - DNA, 121 bp, Homo sapiens
gttagaaaagaaactcttcgactacttcaaccaggaggttttccgagacaacaacggcaccgcgcgccatcatgaccgggtcctataacaacttcttcaggatgtttgatagagacacgcg

SEQ ID NO: 685024 - DNA, 96 bp, Homo sapiens
gtgctgctgctgcccgggaccctgcgactggcaggtcactcggggagcatttacccaagattcaaaagcctcctttaccaccgaccacggaaagac

SEQ ID NO: 685025 - DNA, 99 bp, Homo sapiens
gagagaatgaagcaagtttacctaacacgtctttgcaagctggtgaatgagcaacaagaaagcagacccctcctgagtccctccatcgatgactttctc

SEQ ID NO: 685026 - DNA, 78 bp, Homo sapiens
gtcaccttaccttaaaccttttaagcaaggaaattgaactaagaaatggagaggtatgcctggactgttgcccagtgt

SEQ ID NO: 685027 - DNA, 82 bp, Homo sapiens
ctgctgcagctgcctgaacagagacagcgttccagacaaccaccccaccaagttcaagacatggccaacctgtctctccacg

SEQ ID NO: 685028 - DNA, 75 bp, Homo sapiens
cagacaccgagcttcagcaagctctctccaacgactggattatggacagaacttggaaatattgagaataatttc

SEQ ID NO: 685029 - DNA, 74 bp, Homo sapiens
caacaaatagcactttcttattccaagacctctgtgagtgaaagccttcagagggaagctgctaagaagcaggc

SEQ ID NO: 685030 - DNA, 75 bp, Homo sapiens
cctcgaatacattgaagccaactatggatacagttgatatattagttggatggcatatagatcatactcagaaac

SEQ ID NO: 685031 - DNA, 98 bp, Homo sapiens
cgcagaacgtcaacaccaagtgcatcaccatccccagctggaacagtgaaccatggagctgtatttcggtgaatatcaacatgtgcagcaggaatatg

SEQ ID NO: 685032 - DNA, 75 bp, Homo sapiens
ctactgcaaagagaaggtagacctcaagaggatgttcagcaatccctatgttcaatggccagctgctatttgata

SEQ ID NO: 685033 - DNA, 76 bp, Homo sapiens
cacggcggccgcagtggcgtcctggagccctcctcagtgatgctattgctgagattagagccatttgtattgaaga

SEQ ID NO: 685034 - DNA, 100 bp, Homo sapiens
ccaatcttcgtgttcactttaagaagtggtccaaaggcaaagttcgggacaagctcaataacttagtcttgtttgacaaagctacctatgataaactctg

SEQ ID NO: 685035 - DNA, 75 bp, Homo sapiens
agacagaacagttaatcctcaatttaagcctgatctaacccctagaaacaggtgatttgaagatattaaagctag

SEQ ID NO: 685036 - DNA, 97 bp, Homo sapiens
aggagcagggcgaggaggaatcactgcccagctctgtgccacttggatcctagcatgactatacattgtgacatggtcattacatatggattagacc

SEQ ID NO: 685037 - DNA, 98 bp, Homo sapiens
tgaccgatgggagacctgatcaggtgcggtggctactaaagttcgaaggcacgatatgcgtgtccatccttaccaaaggattgtgaccgcagaccgag

SEQ ID NO: 685038 - DNA, 88 bp, Homo sapiens
acaacaaggctttatatgataccttctccacctttgggaacatcctctcttgcaaggtacatccagacactgaaggaccacaggcccc

SEQ ID NO: 685039 - DNA, 100 bp, Homo sapiens
gtatcctccgaagctatggcctgaagacgggattctttaggtgcagcggaactgctgcctgacgctctgcaacttcagcatccccgaggagctggaattc

SEQ ID NO: 685040 - DNA, 101 bp, Homo sapiens
gttgatgtgaactcagaagtccatgttcaggaaatggctgaagttcgtaaagatgatgttgtaacagtgactggtgacttcaggtggaacattcattggca

SEQ ID NO: 685041 - DNA, 90 bp, Homo sapiens
gtcagagtggaggctgcagactgtggagccgggagccggcaggtgatctgtgaaaatggttcgctattcacttgacccggagaaccccac

SEQ ID NO: 685042 - DNA, 82 bp, Homo sapiens
tcgccagagtggttatcttttgatgtcaccggagttgtgcggcagtggttgagccgtggagacttccaccgctgtcagaagg

SEQ ID NO: 685043 - DNA, 100 bp, Homo sapiens
tgcaccttcagatcatggcgttggcattgaacctgtatttccggagaacacaggtgtaatcctgagagattcacatggtgttgcacaagtacgttttgtg

SEQ ID NO: 685044 - DNA, 100 bp, Homo sapiens
ggaggccgtccagcagatggcggatgccctgcagtacctgcagaaggtctctggagacatcttcagcaggtctctaattaacagaagatggcaaagccca

SEQ ID NO: 685045 - DNA, 50 bp, Homo sapiens
ctaccatgccttttcaggagcgcagaagttcatggcccaggggaagacag

SEQ ID NO: 685046 - DNA, 80 bp, Homo sapiens
tccagcaaggtcggcagagcaaggggcttacgcagaaggacctggccacggccctgggcagtgacggggttcgggtgacc

SEQ ID NO: 685047 - DNA, 50 bp, Homo sapiens
cgacatcgcggccttcttccgatccggccaggctaccaacgtctttgtga

SEQ ID NO: 685048 - DNA, 50 bp, Homo sapiens
cacctgtcctcaggcatatcaaagaatggaagagcaatctatttgctcct

SEQ ID NO: 685049 - DNA, 100 bp, Homo sapiens
acagcctttcagctgctgtttgcctggagggataaaacagctcgcagggaagatgaaagttacggaaaagcagagcaaatgtttggagagatggaagttt

SEQ ID NO: 685050 - DNA, 75 bp, Homo sapiens
tcagtgtgtttttatttctcgaaattttcatactgggagattccaattacaggacacattcagctaacgtatttt

SEQ ID NO: 685051 - DNA, 82 bp, Homo sapiens
cgcactcctggtcctgctcggggctctgttcccaggactacagagacatcattgacactccaatggattttgctaccgttag

SEQ ID NO: 685052 - DNA, 96 bp, Homo sapiens
gtttttgaggatcctgctccacagagaatgctctgcacccgttgatgcggaagagacggaatttcaacaagcaagcgacagaaatcctgaatgaat

SEQ ID NO: 685053 - DNA, 99 bp, Homo sapiens
ccctagcagccggccttcgggtcgggcgtctccgccggctactgccgcttcagttctcccggtgtggccacgagtcggaacactggaactattttgggg

SEQ ID NO: 685054 - DNA, 75 bp, Homo sapiens
ccccccctccgccgccgtcgcggcggcggggccaggcggcccgagcaaaagatacagatattgtggatgaagcca

SEQ ID NO: 685055 - DNA, 74 bp, Homo sapiens
ctgaactccctgatgctgaacttaggaggactttatggacctaatctgggagcctgcaagtgacaacagccttt

SEQ ID NO: 685056 - DNA, 100 bp, Homo sapiens
ggaacattatcacaaagctatcatcctgccaaactccaggctcagatgtcacagatttcattcatacctgtgaaaagctctgccatgaaggagactgtgg

SEQ ID NO: 685057 - DNA, 100 bp, Homo sapiens
atctccaggctccaggctaaccaaaagtctgttctgcattagtgccagcagtagttcccaagggctgtctcagccatccacccagacgactcagtatctg

SEQ ID NO: 685058 - DNA, 100 bp, Homo sapiens
ccaaagcattatgatattcacaggctagcaaaagtgatgcagaatcagcagaaactaatctggattcactccctctggttgatacccactcaaaaaggac

SEQ ID NO: 685059 - DNA, 98 bp, Homo sapiens
tgctgctctgtctcagcgccgcctccctgcttcttaacagagaaactggtagtctgggtagattcaaagcatctttaagagaaaatgtcttggggagc

SEQ ID NO: 685060 - DNA, 75 bp, Homo sapiens
ctgccccccacgccgagctggccgcgccgaccaccatcccggtcaccacgagggttaccgtaatttctatgatcg

SEQ ID NO: 685061 - DNA, 90 bp, Homo sapiens
ctcctgccaagcttccaaagccacccgttggacccaagccaggcgtcacctcctcctgtcgcctggccctcgccatgcagaccccgcgag

SEQ ID NO: 685062 - DNA, 96 bp, Homo sapiens
ggtgagagctgaagcagtaaggaggatgcccccaggcgccgaggctggcagcgtggttctggcctacaacacagcagtcccctcaggatgagcagg

SEQ ID NO: 685063 - DNA, 100 bp, Homo sapiens
aggagctagctgaaataacccttgatcctcctcctaattgcagtgctggagtggcagaagacttttgaggagaagctcacgccgttgctgagtgtgcggg

SEQ ID NO: 685064 - DNA, 90 bp, Homo sapiens
atgctggtcacctacgacgaacccccgtactgcatcaaggacctgagagtcagtatactaagactgcccaggagattgtgaacgtctgtt

SEQ ID NO: 685065 - DNA, 90 bp, Homo sapiens
cttggatacaactgggaaagccgtctacactctcacctatggtggagtacatcttcacagacaagaccggcaccctcacggaaaacaaca

SEQ ID NO: 685066 - DNA, 80 bp, Homo sapiens
cgaagaagctccctttcccacctaggtttgctggttggctcccgagcagacagcaggaaagaagaagcccttcgtgtaca

SEQ ID NO: 685067 - DNA, 60 bp, Homo sapiens
tggatgggggaccacaagatcctcatcgacagagccatgtccattggagcccgttcccaa

SEQ ID NO: 685068 - DNA, 98 bp, Homo sapiens
tatgatataatacctgaaactttactgtgtcatggagaaactccagctgggcccagagattctgcagcgggaaaatccaaggcttatttatgccaggc

SEQ ID NO: 685069 - DNA, 82 bp, Homo sapiens
cgctgcccacagcctagcagtcgggaccgtactgagaagtgagcttgtagtggacaaaacaaagaggaaaaaaagaagagaa

SEQ ID NO: 685070 - DNA, 100 bp, Homo sapiens
gacaatatgttcaagagaatggccgaatttgggcctgactccggcgggagagtaaaggctgacttatccttgtataatgaattccgattgtggaaggatg

SEQ ID NO: 685071 - DNA, 74 bp, Homo sapiens
ggtcacggtgtttgccgtggggaactgagtcagtgctgattctctcaaatagagcttgaaggataaatcttcat

SEQ ID NO: 685072 - DNA, 90 bp, Homo sapiens
gcgggatcgacgcggacagcgggctggagcctgacgagctggcgggcagcagtacctgtccaaagatcgctttagttccaccttgctcca

SEQ ID NO: 685073 - DNA, 50 bp, Homo sapiens
tgtgtgccgagggaggaattgttgatggtggcatcacccttgagaaggaa

SEQ ID NO: 685074 - DNA, 75 bp, Homo sapiens
gggatccgagtgcgggcgcgggcgcgggcgctcccggcgagccacggaatgtatcctgtcaggtataatgtcagt

SEQ ID NO: 685075 - DNA, 100 bp, Homo sapiens
tttcctttcacggttacagctgctaaaggaacaactgttaagatggaatgctttgcacttggcaaccccatggctgggggttatggagtgatgggtgacg

SEQ ID NO: 685076 - DNA, 82 bp, Homo sapiens
ccgctcacctgcgctgtgatgcctgcagagctgtggcttaccaggttacccatgcagttgttactgtaccagcctattttaa

SEQ ID NO: 685077 - DNA, 100 bp, Homo sapiens
gacggctctgtaggaaggaacttggttccccctccctcagcttccgccccaaaaggtatcgagaaccttccctgcgaacttcagaggaacttccagctga

SEQ ID NO: 685078 - DNA, 51 bp, Homo sapiens
gtgcaacatggggcttgagaaagggatctgtgccagttcagaagcaggcga

SEQ ID NO: 685079 - DNA, 113 bp, Homo sapiens
ggctgagaagtttggcgactcctttgtctttgaaggcatgttgagtgagcaagtgaagaccaatattcaacaggcagggccacctacagatgctcctgcagtggacacagcag

SEQ ID NO: 685080 - DNA, 100 bp, Homo sapiens
cttttgtgcaagatgagcctcaagtgcttctgcattacagatggacactccacagctgaccttgactgaactccgggtccttcttgagcagatgggcagc

SEQ ID NO: 685081 - DNA, 97 bp, Homo sapiens
cggcggatctggacacccagcggtctgacatcgcgacgctgctcaaaacctcgctccggaaaggggacacctgtgtcagaataaattatcacttatt

SEQ ID NO: 685082 - DNA, 80 bp, Homo sapiens
gaagcgctttgatttacagcagctgcagagagaaaaggaacagttccgtaagctctttattggtggcttaagctttgaaa

SEQ ID NO: 685083 - DNA, 87 bp, Homo sapiens
ggcccttgtggttgggactaacagctggagagaacagttcattgaagctatcactgtcagtgctgatggcagtcttgggcacgtcca

SEQ ID NO: 685084 - DNA, 74 bp, Homo sapiens
gaagactcttgtcacactaattgccaacaacaatgatactgaagtactctttcccagtgggactaagaaccagc

SEQ ID NO: 685085 - DNA, 102 bp, Homo sapiens
cacaaccgcaccaagaagcacgacctgctgaggctgagcagcaagtctctgctgacatcagatgattatgagctgggagcagggataagaaagagacacaag

SEQ ID NO: 685086 - DNA, 90 bp, Homo sapiens
cgtgagcgcccggagcggtccgcgagccaccgaggcccaggagctgctgctcttcctccagaacctgcccacagcccactgggatgatga

SEQ ID NO: 685087 - DNA, 83 bp, Homo sapiens
ctacaagagacagataaatccaagtcaaataccaagcaaaatagtgtgcctccttcacagaatcatcaatgctgtggtactgt

SEQ ID NO: 685088 - DNA, 75 bp, Homo sapiens
taggagggaaatctggactctttgcctgtttggataggagttaaagttcctcgtaattttcgcttgttggaagaa

SEQ ID NO: 685089 - DNA, 97 bp, Homo sapiens
gaagaaatccagtatctgagtaatttgcagtactttgctgtgaccaacaacaatgatacatgatcccttaattcaggctcaggctgaagaactgacc

SEQ ID NO: 685090 - DNA, 83 bp, Homo sapiens
acaatataatcatgggacaagctgatgtctccagaccggtaaatccagatgcagttgacaaatttacatgtattggagaccag

SEQ ID NO: 685091 - DNA, 75 bp, Homo sapiens
aagggaaggacactgatgactggctgtgcgtggattttgaaatgaacacacctgtgagtactggatgcctgtgag

SEQ ID NO: 685092 - DNA, 100 bp, Homo sapiens
ctcccctcctctcacggcacctcccaccatgaagatgctggtttttcagcagcagacagagaagccagtctggagcttattaaactggacatttctagaa

SEQ ID NO: 685093 - DNA, 74 bp, Homo sapiens
gagaagcaagaaggccctggacacagcaatatctctgggctttcacaggttgcccccaagtttcctggcagtgt

SEQ ID NO: 685094 - DNA, 75 bp, Homo sapiens
cggtgtctacagtgttctcgacttcgtcgctggtcaactcccccaacactggagacagttcgttccaaacaggag

SEQ ID NO: 685095 - DNA, 80 bp, Homo sapiens
ttgaaaagtaccaagaagtggaagaagaccaagacccatcatgccccaggatgtgttcgaaatgcgctttgccaagatgc

SEQ ID NO: 685096 - DNA, 99 bp, Homo sapiens
ctccaggggcgggaactggccgggaggaccgcgcgggagagcacggatgggcaccctgggctcgatgtggtccagctgctcacctgtgacctgctactg

SEQ ID NO: 685097 - DNA, 100 bp, Homo sapiens
agaatgctgttttttctcaggaggggaacatggaggaggaagaaatgaatgatggctcacagatggtgagatctcagcttaatcagagggcttgttttgg

SEQ ID NO: 685098 - DNA, 99 bp, Homo sapiens
cagcccacctcttgcatcgtcacctacagtccagcctagggtgaatgtttccccctccaagaaggggcccttgcagcaccacaacctgcttgtctgcca

SEQ ID NO: 685099 - DNA, 75 bp, Homo sapiens
tgcaagagtccacaaagggacctgatgaagcgaagatcaagcctttagaagaagccacactctctgaattaaaaa

SEQ ID NO: 685100 - DNA, 100 bp, Homo sapiens
aaataccaagcccgagaagacggaggaggactcagaggagctcgtcgtcaaggtgcacatgaatgataacagcacaaagtcactgatggtggatgagcgg

SEQ ID NO: 685101 - DNA, 100 bp, Homo sapiens
ggaacatagccctttgggagagttgtgtccaccagatcagcggtttgagtgctacgtttgcagaaattttcttggaaataatccaaagcagtcttcctga

SEQ ID NO: 685102 - DNA, 75 bp, Homo sapiens
gccgctatcatcccagcagtggagttcagcccactactctgaaccagcccgcggcgccatggctcacgtcggctc

SEQ ID NO: 685103 - DNA, 50 bp, Homo sapiens
tgcctggataccttcgaataggctgctacaggagctgagagaccctaccc

SEQ ID NO: 685104 - DNA, 75 bp, Homo sapiens
tagtgccaggcctatgttggagggggggccctcagcctcttggccttgaacgggctgttcatcttgattcacaaa

SEQ ID NO: 685105 - DNA, 100 bp, Homo sapiens
aagggctccacctgtgccttcacggaatgtatcctccgaagctatggcctgaagacgggattctttagatcgccacctgcaacagccggaacgggaaccc

SEQ ID NO: 685106 - DNA, 82 bp, Homo sapiens
tcgtgaggttcagctgatgaagcttctgaaccatccacacatcataaagctttaccaggtagctacagcaagctgggtagca

SEQ ID NO: 685107 - DNA, 82 bp, Homo sapiens
aaaaccttgcaacttacatggaaagcatgagactatatgctagaggtttctacgataaagacagttcagggtggagttctag

SEQ ID NO: 685108 - DNA, 74 bp, Homo sapiens
tgctgccaacgccccggtggagaagctgaggacattggctccctggattatcaagagtttgtagttgacattga

SEQ ID NO: 685109 - DNA, 75 bp, Homo sapiens
tggcaaccaacctaaggtggcctcagatgttcctcctgctgatcaagagaagctttttatccagaagttacgtca

SEQ ID NO: 685110 - DNA, 87 bp, Homo sapiens
tccatctctgaagcaacaaggggaatggggtcaaaatgagcagcaaccccaaggtccaggtggaggccatcgaagggggagccctgc

SEQ ID NO: 685111 - DNA, 75 bp, Homo sapiens
gcagcccaggtggataaggaacatctcttcccagcggctcaggcagccaacatgcctgactctgagctattcgag

SEQ ID NO: 685112 - DNA, 100 bp, Homo sapiens
gctgctgctcctgcggttggtgagattacctgggtctagagtgcggagctgctccgtggccacgaggacgtcaccatggaccaccgcggataccaaaatc

SEQ ID NO: 685113 - DNA, 78 bp, Homo sapiens
ctctacttagctcagcaattcttaccttaccaagatcactccatggatgaaatgacagctgtggtgaaaattgaaaaa

SEQ ID NO: 685114 - DNA, 78 bp, Homo sapiens
caagatggtgctgtcccagagacaacgagatgaactaagactgtgcagtctttgtaactgatgaagagcaaggctttg

SEQ ID NO: 685115 - DNA, 90 bp, Homo sapiens
ggaaggggtcactcaagggacagcccggagacatctaccaccagacctgggccagatactttgtgaatgactgtgaagtgctgaccacac

SEQ ID NO: 685116 - DNA, 90 bp, Homo sapiens
atggaggagcccggggttacccctcaaccgtatttggggctgctcctggaggagctacgcaggctgagatgagtgaactgagtgtggcac

SEQ ID NO: 685117 - DNA, 100 bp, Homo sapiens
gaacttttgaagataatggcctgcattttattggtctacaaagacagcagctgctctttggcgtaaattgcaatcgattagggatcgtttctcagaatca

SEQ ID NO: 685118 - DNA, 75 bp, Homo sapiens
ggcaagaactggcgtcacgtttacaagcttctcaataggtttggcatggacaagatctatgaaggccaagtggag

SEQ ID NO: 685119 - DNA, 82 bp, Homo sapiens
gcagaggggacagaggcaccaaggacctccaagacaggagaatggggtactaagagaaaagcacgaagctgtggatcatagt

SEQ ID NO: 685120 - DNA, 100 bp, Homo sapiens
ccaagttgttggtaccttccctgatgaagttttatacaggtattattaacccaaagaatccaaaggaagctccaaagtccttcagcttcgactattccta

SEQ ID NO: 685121 - DNA, 100 bp, Homo sapiens
ctgaggagcgcctggctgggccctgcctaccgagaatttgaggtcttaaaggttcctttgcccaaagactcaacaggtgcagcagatcccccccagcccc

SEQ ID NO: 685122 - DNA, 75 bp, Homo sapiens
atcatgttcgaatatgggaagttttaaagacagaggaggtgttggatcctgaacaaaaccataacttcacagatc

SEQ ID NO: 685123 - DNA, 98 bp, Homo sapiens
gcctatcatttgaagacgttccttgaggaggtttgaaaaagttaaaaagatcaagtggcatgagcagccttttggggaaaattggtgccaagaagcag

SEQ ID NO: 685124 - DNA, 50 bp, Homo sapiens
gcctccgggcatcttcaactgatacaagaccctcctgaaaggaatttccg

SEQ ID NO: 685125 - DNA, 75 bp, Homo sapiens
catttctgcttgacctcctaaatgcaacagaatgtgaaaacctttgcatcttctgatagtctagccaaggtccaa

SEQ ID NO: 685126 - DNA, 98 bp, Homo sapiens
tgagtcggagctcggcaggaagtgggaccggtgtctggcggatgcggtcgtgaagataggtctgaatttcctgctgctgttcacaaagatgcttttta

SEQ ID NO: 685127 - DNA, 74 bp, Homo sapiens
cctcaagcgaaaacaccgctttatcctgctgcgatccccagggaacaaggaaccttccctgtatactgtcaaag

SEQ ID NO: 685128 - DNA, 96 bp, Homo sapiens
ccacctggtatagtcagtacaagcgggggtccctgccgcagcaatggcgctgagttcctctgctggagttcatcctgctagctgggttcccgagct

SEQ ID NO: 685129 - DNA, 113 bp, Homo sapiens
ccaccccatcttgggacggccagctctaagaattcctgctacgacactgaattcaaccaggagaccctgactgcacctgccccatttgctgatgaaaccaactgccagtgtca

SEQ ID NO: 685130 - DNA, 83 bp, Homo sapiens
ctggaggaaacacctcaggacacggcctacaacaccaagagggcgtctctggccgagcctctttttgtggaaaacgacagcag

SEQ ID NO: 685131 - DNA, 80 bp, Homo sapiens
cagctcagaacagttggatcttgctcagtctctgtcagaggaagatcccttgatgtattcgtgtcaataaatttcagaga

SEQ ID NO: 685132 - DNA, 101 bp, Homo sapiens
aaaacattggaccacacaaagtcttactgtctggatgtggatagtgaagctaagaaactattgggtttaggacagaaacatctggtgatgggggatattcc

SEQ ID NO: 685133 - DNA, 83 bp, Homo sapiens
ggcaggttgggaggagcggccgaagcatttcctgtgttacatctgcaaggaatacgtagaggatctggccaaaatccccagga

SEQ ID NO: 685134 - DNA, 51 bp, Homo sapiens
ccactgacttcggtttctgtgtcaaggctggacctgtcgggacgactgtaa

SEQ ID NO: 685135 - DNA, 100 bp, Homo sapiens
ctttgccattcatggaaacttttctgaacctgcacttgttgccaagtcttccatcttactagatgtgaaaccttgggatgatgagacagatatggcgaaa

SEQ ID NO: 685136 - DNA, 100 bp, Homo sapiens
aacatctaactagaagggatacccttccatttcaaagaacagaatgctaaggaagctgtggcaagcctccggtgtggctgtctctgatggtgtcatcaag

SEQ ID NO: 685137 - DNA, 118 bp, Homo sapiens
gaaatcggtggctgcgggaggtcttcgtggactgggactcgaacctgaccgacccggcagtgcggactgtgccctgtccacggtgcctcctgcatgtcctgctgccctgagctgtccc

SEQ ID NO: 685138 - DNA, 100 bp, Homo sapiens
cggtggagactctgtccccggactgggagtttgaccgcgttgacgacggctcgcagagaaatgccacaatcattttctgcaatcacattaagtaacacag

SEQ ID NO: 685139 - DNA, 88 bp, Homo sapiens
gcgactgaggccggacggggcggacggcgacgcagcccgcggcagaaggggtgacagtccaaagattgacttggccggcagttcgcta

SEQ ID NO: 685140 - DNA, 75 bp, Homo sapiens
cgcagatgttgtcaaggtggcctaccaggaggccaggggtgtcgccatgtgtcacccgcaactacctagactggc

SEQ ID NO: 685141 - DNA, 75 bp, Homo sapiens
aagcccgggaccgtttaaaaaactgaaatcttaaagaaactctccaccttttctaagtagtgtatcaaaatctaa

SEQ ID NO: 685142 - DNA, 98 bp, Homo sapiens
caaacttgaccggaccagcagctttcgccagatcctgcctcgcttccgaagtgctgaccatgaccggaatagccaggtctggctgggtcggcacaacc

SEQ ID NO: 685143 - DNA, 100 bp, Homo sapiens
atttttgcgattgtcctatgagaagcaggacacacttttgaagcttctcattctgtcaatggctgctgtattatgtcctacgttttctgtaatagagagt

SEQ ID NO: 685144 - DNA, 96 bp, Homo sapiens
gcagtgaagctcaagttgctactcgggacgctgcacctcccgcgccgcacggtggacgaggtgcaaattgagcatgacccagaattagaaaaagaa

SEQ ID NO: 685145 - DNA, 88 bp, Homo sapiens
agaagagtcaaggacagttcagggaggagttctccaaggcgaggaattgccttggcttccttaggaggcccaatttatgcaattggag

SEQ ID NO: 685146 - DNA, 87 bp, Homo sapiens
gcagaggatccatctgtcttagcaaggctgtcatcacattgtggacatcggatacccaaggagacgaagctgaagcaggagaaggag

SEQ ID NO: 685147 - DNA, 100 bp, Homo sapiens
gcagagccgctgcagccatggccccaatcaagtggatatcaaagtattgcagagtgccttagcagccatccgacatgcccgctggttcgaggaaaatgct

SEQ ID NO: 685148 - DNA, 83 bp, Homo sapiens
atttagcctatgatgaaacactcaatgtattgaagttctccgccattgcacaaaaagccgcattgacaggaagattgagttcc

SEQ ID NO: 685149 - DNA, 90 bp, Homo sapiens
caaattgttggtcttggcatttcaacacagagagcaacttttattacgtggaacaaacatgtcatgctgcccaaggacatagccaagctg

SEQ ID NO: 685150 - DNA, 95 bp, Homo sapiens
aacaatgatgaaggctcactggacatatacgctgggttggacagtgctgtttctggcagaagtcaattcatctggaaagactatctctgagtcag

SEQ ID NO: 685151 - DNA, 82 bp, Homo sapiens
gtggagtgtaggtcatatcgccgcgttatttctcaaactctgaggctgcggagttcacacattgaaatctgtcatctttttc

SEQ ID NO: 685152 - DNA, 101 bp, Homo sapiens
ttgagattgggcgtcctctgggcaaagagaatccaggagtcctgccaaagtggcaccaagtggctggtggagacccaggtgaaggccaggaggcggaagag

SEQ ID NO: 685153 - DNA, 100 bp, Homo sapiens
agctttggcaagagtgtacctggtccactgaaaaattcttcagattggaaaataccacaggatggagactacgagttttaccttgcagaagccggctgga

SEQ ID NO: 685154 - DNA, 83 bp, Homo sapiens
tctgcagccagtgcggagagaggctgcctcctgcagcccccatagcaggtgtgagatcaaccatgagttccgttgcagttttg

SEQ ID NO: 685155 - DNA, 75 bp, Homo sapiens
cctcagctgcactgtggcaaggcttttgcttccaaatacaagctgtatagggatcttcattgccttgctgctgcg

SEQ ID NO: 685156 - DNA, 80 bp, Homo sapiens
gtgatttggtaactgaagacactggtgtgagcactggcttagtgatgtgaaggacaagaattcagtgttttcagtcctgg

SEQ ID NO: 685157 - DNA, 74 bp, Homo sapiens
cgccatgtacttggagcactatctggacaatggtggatgcttccaaaagcatcgaagctgtccatgaggacatc

SEQ ID NO: 685158 - DNA, 74 bp, Homo sapiens
ggaggaaagaagacaagagagaacgcaaacagtttgaagctgaggattttatcacaaatgttcacagcagccgg

SEQ ID NO: 685159 - DNA, 100 bp, Homo sapiens
ctttctcttccccttgctgcgtccctcctctcccccggggtgggcatgcaacccaaggagatctgtgcgctggttgggttctgtgatgaggtgaaagaga

SEQ ID NO: 685160 - DNA, 75 bp, Homo sapiens
cctggccaagggctccacacaccaagaccaagaatcctcactatggatgggctcattgaggacattaagcatcgg

SEQ ID NO: 685161 - DNA, 100 bp, Homo sapiens
gatccggagcagccggggtcggagcggaattaaacaaccaccatgtcgagcaaaaaggcaaagaccaagaccaccaagaagcgccctcagcgtgcaacat

SEQ ID NO: 685162 - DNA, 82 bp, Homo sapiens
cgcacttcgtcatgttcttcgcgccctgttttctttttaaaagcggaaggagagttttacatggaagtggcttacagaaact

SEQ ID NO: 685163 - DNA, 83 bp, Homo sapiens
cgatctcctcgtctcccgctccgccctcccttttccctgtttggtgccctggttgtcagatgttggaaagcagtaggacggaa

SEQ ID NO: 685164 - DNA, 74 bp, Homo sapiens
acaggtcccaccccaacaagcaggatattcaaatagaagccttgctgatgagagcctgtgagcccataattcag

SEQ ID NO: 685165 - DNA, 100 bp, Homo sapiens
cacaaacaaactacccattttcttttttggaactcatgagacgtgttggaaatcaatagctcttctagcctttgcattgtttaaatataatagtgtcatt

SEQ ID NO: 685166 - DNA, 104 bp, Homo sapiens
tggttcttctgtcgccggcttcagcagcccgcgcccgggcagggacatgagagatggctttagaagaaaaagtttctactcttcccattatgcgagagagcggt

SEQ ID NO: 685167 - DNA, 90 bp, Homo sapiens
gaagatgcgcccattggctggtgaggtgtgaacatgtatgccatgttgaccgggacgctgcctttcacggtggagcctttcagcctgagg

SEQ ID NO: 685168 - DNA, 100 bp, Homo sapiens
ctggtctacatcctgcgggtgcctttgaaaatcaacgacaacttgagcacagatctgccggaggcgctgggcaatgaccccgggactccaggccagaggg

SEQ ID NO: 685169 - DNA, 83 bp, Homo sapiens
tcagctccgagtccagggcgaggtcctgaacgaggctgtgggggccctgatgtaccacaccatcactctcaccagggaggacc

SEQ ID NO: 685170 - DNA, 75 bp, Homo sapiens
ccagaaggttctctggtggaggcgctcttcctggtgtcccgcccagtagcgggagatacagatgacccaccaaga

SEQ ID NO: 685171 - DNA, 82 bp, Homo sapiens
cagactccttctccagcatgggctcgcctgtcaacgcgcagttggattggatgctgctggcaagacaaccattctgtataaa

SEQ ID NO: 685172 - DNA, 102 bp, Homo sapiens
cagaggacaacgaagtgttcgaaaagaacgccctatatcattaggaattttcccattacctgctggagatggattgcttacacctgatgctcagaaaggagg

SEQ ID NO: 685173 - DNA, 98 bp, Homo sapiens
ctgtgaactgtgaacagaagcaaggtgggcctcatgagagatgtggagtcctcatcacggggttgcctggtgattatggaataagcagcggacttaca

SEQ ID NO: 685174 - DNA, 50 bp, Homo sapiens
tggccgcagcgcttatctgtgaaatgctgtgagagaagtaaggaaatatt

SEQ ID NO: 685175 - DNA, 90 bp, Homo sapiens
ctcggctgagttgcaggggaagtaccagaagctggctcaggagtactcgaaggtgaggaattttaaattggaacaagagcaagaaaaaaa

SEQ ID NO: 685176 - DNA, 50 bp, Homo sapiens
cgccgctgcctcagtcatgccgggtggcccttgggtagggtgaagatccc

SEQ ID NO: 685177 - DNA, 83 bp, Homo sapiens
ggagttccctggatttttggaagtgtcgtgaaaactacccctaaaagccaaaatgggaaaggaaaagactcatatcaacattg

SEQ ID NO: 685178 - DNA, 97 bp, Homo sapiens
gatcaaatggcacttcattggccacctacagaaacaaaatgtcaacaaattgatggtggtccttcggggtgacaatgtgggagattgccacaagagg

SEQ ID NO: 685179 - DNA, 100 bp, Homo sapiens
cacgcggcgatatggaagaggagggcaagaagggcaagaaggatggatggtcacaataccactttgtagcctcgtcttcaaccatcgagagggaccggca

SEQ ID NO: 685180 - DNA, 88 bp, Homo sapiens
ctcctggccaccgactcctacaagggatacccacccaccatcccagggtctacaacatccacagccggaccgtcacccgctatcctgc

SEQ ID NO: 685181 - DNA, 90 bp, Homo sapiens
gtttaaacagccaaaacagttcattcatattcagcggatgacttgtcaagctcgaacatcatatactgaagatgaagttctttggggtca

SEQ ID NO: 685182 - DNA, 82 bp, Homo sapiens
tctggtctcggccgcagaagcgagatgatcaggatcctcatgaccagccaaagagaagaagaattaggaagcataaatcaaa

SEQ ID NO: 685183 - DNA, 98 bp, Homo sapiens
tccgctagaggaccgagccgcccagccccgctcccccggacccatcggcgcgctgcccacacctccaggcgaccggaaacatgccaagggacaagtgt

SEQ ID NO: 685184 - DNA, 75 bp, Homo sapiens
ttccgttgccggtgccggcctagcgtcctggaattacttcaatcaaggtctccgtctctccaccgggggcttcat

SEQ ID NO: 685185 - DNA, 82 bp, Homo sapiens
gagctggacggcgagcgcgagcggcgcgagaaaggttttttgattaactcaaaaccagagaatgcctgtgaacccatagtgc

SEQ ID NO: 685186 - DNA, 90 bp, Homo sapiens
aaggagagaaatcaggaagattatgggaggcctgaccgccgctgcctacagagtcacactcaatcctccgggcaccttccttgaaggagt

SEQ ID NO: 685187 - DNA, 90 bp, Homo sapiens
gtcaccgagaagtccccgaccgactggttgaaggtcgaggagctggaaggcgagcggagtcggctggaggaggaaaagaggatgctggag

SEQ ID NO: 685188 - DNA, 100 bp, Homo sapiens
cgtgatctccagcgccggcctcctcagtgcgaagaagctgcagccgcacctggccaagggtgccaagactggctagaggccctgcactggtacaacactg

SEQ ID NO: 685189 - DNA, 50 bp, Homo sapiens
ggaaccgccacagcactcaaccgattacacctcaacaagaaggcaactga

SEQ ID NO: 685190 - DNA, 83 bp, Homo sapiens
cgcggacagcgttcggtgctgtgtgccggcgcctctggcaggaggacactgcatgtgagacttcagattggacctggagatag

SEQ ID NO: 685191 - DNA, 100 bp, Homo sapiens
gctatgggcccatcgactacaaacggaacttgccgcgtcgaggactgtcgggaaattgattccagtggaaacattaactcctgaaattgctttgtattgg

SEQ ID NO: 685192 - DNA, 82 bp, Homo sapiens
tatgatttactggatgaactgataaaacccaccagtctagggtgaagttgaacaaattgctatgatgaaaccaaaaggccag

SEQ ID NO: 685193 - DNA, 89 bp, Homo sapiens
tttgaagatgacgccacattaaccctttcattttgtttggaagatggaccaaagcgatacacccaaagcagtgtccacaccagcaccag

SEQ ID NO: 685194 - DNA, 92 bp, Homo sapiens
gggaaagacgaggaaagaggaggaaaacaaaagctgctacttatggaagatacaaagggatgaccagtgtcccagtgaaggaacgagtgaag

SEQ ID NO: 685195 - DNA, 96 bp, Homo sapiens
aggacatggagtatgaaagacggctccacaaggctgacttcaggacctgggcctgcatggatttgtgccgagaccagctcggtcgtggagactcca

SEQ ID NO: 685196 - DNA, 75 bp, Homo sapiens
ggttgatacagcagagacgtcatacttggaaatggctgcaggttcagaatatgtgtcacaaagatgtctacacgg

SEQ ID NO: 685197 - DNA, 85 bp, Homo sapiens
tcattcctgagtagcattacctacagctggtatgacagcccccttacccaggaatggaacaacctccacaccatccttactatca

SEQ ID NO: 685198 - DNA, 119 bp, Homo sapiens
agaggtgctgatatcaacacggtcaacgtggacggcttgacagccctgcaccagagtgatcagcagctggactgtgccttggacctaatgaggcgcctgcctccccagcaaatcgagaa

SEQ ID NO: 685199 - DNA, 85 bp, Homo sapiens
tctccgcgaggtgtgcagagtgctgagaccggccttcaatcaagcaggggcagggccgtacagtgaacttgtcctttgccagacg

SEQ ID NO: 685200 - DNA, 75 bp, Homo sapiens
ttttaaaatattacttaagagaatctcaagctgctaagctgcaagctttcttcctggtggcagatgacatcatgg

SEQ ID NO: 685201 - DNA, 85 bp, Homo sapiens
tggtgaaatgcacttctatgagcttgtggaagacacaaaagatggcatctggctggttcaggtgtggtcactcacctgtctacca

SEQ ID NO: 685202 - DNA, 106 bp, Homo sapiens
tgagctcgcggctcacgctgagagggacacgcagtgacgagcggccgaagcagctttgcgacaatgcagatcttcgtgaagactctgactggtaagaccatcaccc

SEQ ID NO: 685203 - DNA, 100 bp, Homo sapiens
ggggccttctgtggattggggaaaaatccagagaccccctgaagattcgcaggtattaatctctggagaagacacatccacagttagcactttcttcaga

SEQ ID NO: 685204 - DNA, 97 bp, Homo sapiens
ggggggccacctgacccctcggacatccacgtccataagcaggactcatctgatgatgtgagaagagttcagaggagggagaaaaatcgtattgccg

SEQ ID NO: 685205 - DNA, 100 bp, Homo sapiens
catgtccaccaaagcggagcagtatcactggggtgatcctgctggctgttggagtctggggcaaacttactctgggcacctatatctcccttattgccga

SEQ ID NO: 685206 - DNA, 123 bp, Homo sapiens
agcgaggaggagatgaataagtgggttcgttgtatttgtgacatctgtgggtttaatccaacagaagaagtgtcaagatatgccataatactgagaatggaggagtctgaggccctggtccat

SEQ ID NO: 685207 - DNA, 101 bp, Homo sapiens
caaaggaacaacaccaagccctgagacagcaagtacaagcagactcaaaagggacagtgtcttttggaggtgaccaagaatatggcccaggtgaccaaagc

SEQ ID NO: 685208 - DNA, 96 bp, Homo sapiens
atggttggcaagttcctgcatatggaatgtatggccaggcatggaaccagcaaggatttaattcatggggagatttccttttggataccatctcgg

SEQ ID NO: 685209 - DNA, 80 bp, Homo sapiens
agaaggatatcgacgtcgtgatccagaagtccagagctgaggactgcctgtttgcagagacgaggtcttgctacattgtc

SEQ ID NO: 685210 - DNA, 75 bp, Homo sapiens
ttcctgggacacaacgacgacattatcagggtttggtgcaattctccattaatgaagataacatttgaattcccc

SEQ ID NO: 685211 - DNA, 100 bp, Homo sapiens
gggagtccgcaccaggggccctcagggaagagaccctgcaaagatcctgggagaccaagattttccgcagatttccagtggccccactgatcccttatcc

SEQ ID NO: 685212 - DNA, 75 bp, Homo sapiens
cggactggaagatcaaaagaggtcgtgagatggagaataaagaaactctcaaagggttgcacaagatggatgatc

SEQ ID NO: 685213 - DNA, 80 bp, Homo sapiens
ctacaacgaaggtgaagccacggaagataagcaggaccattgactatccaggaagccctgacttactttggtggagcggt

SEQ ID NO: 685214 - DNA, 95 bp, Homo sapiens
gtcagcaacctgcagtcattcttccgggcctccaaggaacttaagcaaagatcgttctgaagtctccagcctgagttcagaggcccctgagaccc

SEQ ID NO: 685215 - DNA, 48 bp, Homo sapiens
tttcatcagactaaaaagttacagggtgaatgttggatgtgtacccaa

SEQ ID NO: 685216 - DNA, 100 bp, Homo sapiens
ttgtggcacagcatctgacaaacactgtattcgttgacagagctttgatagtcgtaccatatgcagaagtgcaaggatgatgctgaaaggaataacaagg

SEQ ID NO: 685217 - DNA, 101 bp, Homo sapiens
gattctggaaccgtggagacaccgagaaaccatgagtgtaaggttaccccagagtatagacaggtctcctctgagcctccggcctccataagacccaaaac

SEQ ID NO: 685218 - DNA, 87 bp, Homo sapiens
tcgcagtccagccgccgcctgccctcagccgcccgctggccgggagcggagcccctgtggtttccaacatggctagatccatcagaa

SEQ ID NO: 685219 - DNA, 75 bp, Homo sapiens
caggattcggcaaagacggacacacagctgagatctgtatctgtggacctgaatgttgatccctcgcttcagatt

SEQ ID NO: 685220 - DNA, 90 bp, Homo sapiens
caagggccagcctgtttcctcccggtcacctccaaatcttgctgcttttaattcaactcagaggagaagtgtgcccagtactggccatct

SEQ ID NO: 685221 - DNA, 90 bp, Homo sapiens
tctactgctcctgccgcgcaggctacgtcctgcaccgtaacaagcgcacctgctcaggattgcacaacatgggcggggacccaattactg

SEQ ID NO: 685222 - DNA, 75 bp, Homo sapiens
aaagaagatgcctcgaactaaacaaattcatcccagaaatctaagaggagggtgcatctgcccggaagactcaga

SEQ ID NO: 685223 - DNA, 100 bp, Homo sapiens
ccgcaggtgctggcagcagcccccgaagaccccagggcggctccgacgcgccctcaggaggctactcacagtcgaactacaactccccggggtccggcca

SEQ ID NO: 685224 - DNA, 50 bp, Homo sapiens
cgggagtttgaggaggttgtggaaaaagacgtctacctggtggagcaccg

SEQ ID NO: 685225 - DNA, 75 bp, Homo sapiens
cgctgccgctgccgcacctccgtagctgactcgggccaattcctgtccccccagcagcatggcatcgtgtgctga

SEQ ID NO: 685226 - DNA, 100 bp, Homo sapiens
acgtaatgaggatgaagattcaccaaataagctatatactttggttacctatgtacctgttaccactttcaaaagcttattcaaacctccttagagctaa

SEQ ID NO: 685227 - DNA, 85 bp, Homo sapiens
ggtgtccgtggaggtggagaagccacgagaggagctcttccagctgtttggctacggagacgtgcactcctggaagcctgcactt

SEQ ID NO: 685228 - DNA, 98 bp, Homo sapiens
ctcagggccccagcgccgacggcgacgtcggggccgagctaacccggcctctggacaagagtgaattatgtaacctcattacgctggatgtagctcac

SEQ ID NO: 685229 - DNA, 83 bp, Homo sapiens
ctgcggcctggcggcttccaggcgcactaccgcgacatgcaagaaagcacttcagccaagcagaagggagccagctggacgag

SEQ ID NO: 685230 - DNA, 74 bp, Homo sapiens
ttccacctgaacttgatatgtctttattactggagttcattgggtggtgaaggttgtcgtattgaactgtgagc

SEQ ID NO: 685231 - DNA, 105 bp, Homo sapiens
cctggatccaagaagttggttgtagccacagagaagaatgtgattgcagcattaaattcccgaactggggagatctgactcagaattcatgattgaagaaatgca

SEQ ID NO: 685232 - DNA, 77 bp, Homo sapiens
atactcctgtaaatttgagtgtggattctcaaagttggattggtggaaacaatgaaccattgacaggctttacatgg

SEQ ID NO: 685233 - DNA, 101 bp, Homo sapiens
gaggaaccgcccaacatggcctcggagagatgacctgatcagagccatcaagaaactaaaggcacttggcactggcttcggcatcatccctgtgggcggca

SEQ ID NO: 685234 - DNA, 75 bp, Homo sapiens
acttggccctgtgtttaagcagcaggagccaatccaggtgctgtaaaatacctggagtgctcggcgctcacacag

SEQ ID NO: 685235 - DNA, 96 bp, Homo sapiens
ctggccgggctggctgcggccgccctgggccgggccccaccggacgcagcccctgtcaaagggaacaggaagcagtccacggagggtgacgcccta

SEQ ID NO: 685236 - DNA, 82 bp, Homo sapiens
cacagcagtcaaacagcctgagaaagtggcagctaccaggcaggagatcttccaggacctcctgccccccgaggtctgcagt

SEQ ID NO: 685237 - DNA, 100 bp, Homo sapiens
cccgctgccgacgccgcctggacggccgcactctccctgcccgagacccggaatgaatctgaagtctgctgcagtaaaacacagaaggctttaaaatgtt

SEQ ID NO: 685238 - DNA, 50 bp, Homo sapiens
ctccagtactggggatttgccaaaagtgtccgaagttcgcttgaatttag

SEQ ID NO: 685239 - DNA, 95 bp, Homo sapiens
gtgcttgctgctttttctaactatttcaagatgatatttattcaccaaacaaggccgtcgctttcgggttctctcatcgcttcgtcgttcgccaa

SEQ ID NO: 685240 - DNA, 75 bp, Homo sapiens
cgcagtggtcgcttcttctccttgtactaaggctcgtacgtctgcatcgattatcttacgtggggcaaatgattt

SEQ ID NO: 685241 - DNA, 95 bp, Homo sapiens
gtcgtcaccatggcagcatccgctggaggcccagatcatggaagggaagtggttgctgtgtatgttactggtgcttggaactgctattgttgagg

SEQ ID NO: 685242 - DNA, 83 bp, Homo sapiens
tggacaggcagagtgctgatgtgaaaaataccacgacaaaaccaccctagtctacgacgttcctccatcggtgagcaaggatg

SEQ ID NO: 685243 - DNA, 100 bp, Homo sapiens
ctgcagaccatgcagcaggacatgataggatgcctggtgtgcaggagtatatacaacagcctattctcaatggtctgcgggataaggcttcatatgtcag

SEQ ID NO: 685244 - DNA, 83 bp, Homo sapiens
tgaaaacatcgtggccctgtacgacttccaggtgtcccgacccaggctaagcttgagcatggctgagcaggagcccacagccg

SEQ ID NO: 685245 - DNA, 100 bp, Homo sapiens
cttttttttttgcggaacctgaaaaattcaagaagttgaaaaacgcttttcacgtcacctggagagatgcacaggaaacatgatgaaagtattgaggggg

SEQ ID NO: 685246 - DNA, 50 bp, Homo sapiens
agaggaggagcgcagcccggcctcggttatatacaggcatgtagaggact

SEQ ID NO: 685247 - DNA, 98 bp, Homo sapiens
caacaccaccctctgtcttctttcctgtctttgtccggtttgtgaaagcatataaggtagatcatggcaaccatagaagaaattgcacatcaaattat

SEQ ID NO: 685248 - DNA, 100 bp, Homo sapiens
ctggtgttcttctggctaatggaacacttaatgcatccattcttaatagcctttataatgaaaatttggttaaagaagatgttaccagacctaaaagcag

SEQ ID NO: 685249 - DNA, 83 bp, Homo sapiens
ctcctgtatcaggtgtctgtcggtccaagctagaaggtctgtcagtttgtcgtctctgtcaacgggctcaatgtcctgcatgt

SEQ ID NO: 685250 - DNA, 75 bp, Homo sapiens
gcattccagcctcccatttccaatcatcctgagagacacatctcaattcaaaggcagcttgctgatctagagaat

SEQ ID NO: 685251 - DNA, 101 bp, Homo sapiens
gacctgatcatttttctggaggaaggaaaagagtcctggaatatgaagagacatgagatggtggaagaatccccagctcatctttgggtgaaaaattgtcg

SEQ ID NO: 685252 - DNA, 101 bp, Homo sapiens
attccacccagtatttcaagagtcacttctttacttggtgcaggaaggcagtctttgctacgtacagcaaaaggtgggtcatgataactgggtacgtggag

SEQ ID NO: 685253 - DNA, 51 bp, Homo sapiens
ctaagagttgaccagtcaattctcacaggagacaaggacggcagcaaggtg

SEQ ID NO: 685254 - DNA, 90 bp, Homo sapiens
cctgagggcagctgttcccactggctctgctgaccttgtgccttgttttcggctttgtgagaaaccttaccatcaaacacgatggccagc

SEQ ID NO: 685255 - DNA, 51 bp, Homo sapiens
attagcccaagaaacattatattcatctgtgtattcttattacaaccaagg

SEQ ID NO: 685256 - DNA, 96 bp, Homo sapiens
ggacatcgcacagtaaagcttgttccgtggtcccagtgccttcagaacttaacagtccaggctctgcagacagcatcccacctgtcccagcaggct

SEQ ID NO: 685257 - DNA, 102 bp, Homo sapiens
caggaactgtctttatctgctgtcaaggatcttgtgtgctccatagtttatcaaaagaatggatttctgcctgatcctccaagaatacgttacaggaaaaaa

SEQ ID NO: 685258 - DNA, 80 bp, Homo sapiens
acatggcggaacgcaggagacacaagaagcggatccagagcttactcacatagcatattggtatatcaaaatgaaatgca

SEQ ID NO: 685259 - DNA, 100 bp, Homo sapiens
gtgaaatttcagacatacacaccaaattgttgagagaagctgcagtaaaggaagatgaagaagaagtttcagataagggcagtgattctgaagaagaaga

SEQ ID NO: 685260 - DNA, 82 bp, Homo sapiens
ctgggcggcaccctggccaggaagcggagggcgcgcgaggggcgccatgttttggaagtttgacctgcacacaagctcgcac

SEQ ID NO: 685261 - DNA, 100 bp, Homo sapiens
ggaaaatgtggacagtggagaaggcccagccaatgaagatgaagacataggagagtcaaggaaacttttgagctatttacagcttgtagcaattatgtaa

SEQ ID NO: 685262 - DNA, 75 bp, Homo sapiens
ctgagcctcagcacctgcttgtttggaaggtcttcaaagcttcacctttctccaaaggcagatgtgaagaacttg

SEQ ID NO: 685263 - DNA, 100 bp, Homo sapiens
tgataaaaagagatgtggggggattctcgacctgctaacagaactggaccttttcgatcactgtgtccactactatgatcttcgtaacactaaacagcca

SEQ ID NO: 685264 - DNA, 90 bp, Homo sapiens
atccctgccctgctgctgggcaacaagctggacatggctcagtacaggttaagaatgtctgaggggtcaggcggtgctggcaagatggct

SEQ ID NO: 685265 - DNA, 98 bp, Homo sapiens
tggtctaaggcgccagactcaaggtcgggaaagaggttaaagaagacacgcaagtatgatatcatcaccactccagcagagcgagtggaaatggcgcc

SEQ ID NO: 685266 - DNA, 90 bp, Homo sapiens
agacagcgacggcagccggcacagctccgaccgcgaggacgacttctccgcaggtcaaaatgcagatcttcgtgaaaacccttaccggca

SEQ ID NO: 685267 - DNA, 50 bp, Homo sapiens
cggcgcgctgggctggcgcggcctggatgctggcatcaccatctacatca

SEQ ID NO: 685268 - DNA, 50 bp, Homo sapiens
gttccaacaaaagaatgctgccacaggatggacgtggtagaggtcgcggg

SEQ ID NO: 685269 - DNA, 100 bp, Homo sapiens
tctttatggagaccctgaaagacatcgtggagtattacaacgacagtaacgggcggctgctggcatatcacagagatgaggttctcaaaatgcaaagcag

SEQ ID NO: 685270 - DNA, 76 bp, Homo sapiens
gatggaggggacggaggcaacggtggacacgtcattctgagagatctggccagccaggagaaggagcggctggagg

SEQ ID NO: 685271 - DNA, 100 bp, Homo sapiens
ccaggggcccgagggcggggaccggcggcgctggaggagcgaggcagctgtactaggactgggaacgggagctggaggatcttcagaagaagcctccccc

SEQ ID NO: 685272 - DNA, 88 bp, Homo sapiens
gacaagcaggagctgggagccccaggtgctggagaatctggtaaaagcaccattgtgaagcagatgaggatcctgcatgttaatgggt

SEQ ID NO: 685273 - DNA, 78 bp, Homo sapiens
tggttctttcctttgactccgctggacaaacactaggctcaggagctctgtctgaatggctggctgaccaccccgtca

SEQ ID NO: 685274 - DNA, 75 bp, Homo sapiens
gacgtcactggccctggtggggattgacagccacgggaaggagcaggccgggctctcgccatgggtcactgtcgc

SEQ ID NO: 685275 - DNA, 85 bp, Homo sapiens
ccggacatgctcagggctgcggccgcccgaagaggagagagcgcgggcctctaggaagacaatgcagatcttcgtgaagactctg

SEQ ID NO: 685276 - DNA, 94 bp, Homo sapiens
aatccatccacttctagtcattttacccgcactgcgggagttggtattaaaataccgtgaggacatcattaatgtgcggacagcagcagaccac

SEQ ID NO: 685277 - DNA, 75 bp, Homo sapiens
tcgggagcagtgtgccaggcccgcagtcctaccccattgtgacagagcaacttatgactctcatctctgctgcac

SEQ ID NO: 685278 - DNA, 101 bp, Homo sapiens
cacaggatggagactacgagtttgttgcaaaagcttctcatttcagagagatgccaggatcctaagtgcctgccaaacttaccaattctaaggaataagtg

SEQ ID NO: 685279 - DNA, 75 bp, Homo sapiens
gctagggtcgccgccactgccgcaggaggcgtgagaaggaagaatcctgctcaaaaatgaggtgaattaatactt

SEQ ID NO: 685280 - DNA, 101 bp, Homo sapiens
cttgcacccagacacgacaccatgcatctcctcggcccctggctcctgctcctggaggcctaacatcgtgtcccagctcagccaagcctgcgatggagcca

SEQ ID NO: 685281 - DNA, 101 bp, Homo sapiens
aacgagagaggcaccgggatcgtgaccgagaccgtgaccgagagcgtgaccgagagcgcgaatatcgtcatcgttagaagcactgccctgggaagaactag

SEQ ID NO: 685282 - DNA, 51 bp, Homo sapiens
ttcctgtacagcctgcagaactatagaagaagtcagagatgccatggaaaa

SEQ ID NO: 685283 - DNA, 75 bp, Homo sapiens
gtgctggctgccgcgcggccgaggacccggtcagcccaaggagcaggggtccagcagctctgcggaggcatctgg

SEQ ID NO: 685284 - DNA, 143 bp, Homo sapiens
ttttcgtctggtcttcctcagttcttccagacgctttctgagagaatgggggcaggagctctagccatctgtttacatcatgctgatgacagcttcctggtcctcaccacagatggaattaacttcatggtgaatagtcaaga

SEQ ID NO: 685285 - DNA, 50 bp, Homo sapiens
caagcatgatagtcattgtaagcctttctgagaaaagtctacagcattct

SEQ ID NO: 685286 - DNA, 91 bp, Homo sapiens
cttagctgtgctcgcgctactctctctttctggcctggaggctatccagcgtcagccatgtcatctgagcctcccccaccaccacagcccc

SEQ ID NO: 685287 - DNA, 75 bp, Homo sapiens
ctcaacaagttcctcctcttgacatttgcacccatgcagaatgccaccaagtatggcaacatgacagaggaccat

SEQ ID NO: 685288 - DNA, 82 bp, Homo sapiens
gcagccttgggcctcgcgccggctatggccgtgccctggggctgagccctcaggaatcttgtcgattggcctggctgctgcc

SEQ ID NO: 685289 - DNA, 100 bp, Homo sapiens
agaggcatcctccttgaagtatttggctgaggagttttcaatcccagttgaagatgacagcgatgcagagacctatggagaagagaatgatgaacaggga

SEQ ID NO: 685290 - DNA, 82 bp, Homo sapiens
tcctgcaaaagtggaagcgaagccgaaaaaggcagcagcgaagtgtgactccgccaggaacttggaatggctgaagactgtg

SEQ ID NO: 685291 - DNA, 50 bp, Homo sapiens
cgagacccagcacatcgccgaccaggtgactcctgcacctgcgccggctc

SEQ ID NO: 685292 - DNA, 119 bp, Homo sapiens
gcagcggcggcggggggcagccgctcgcccggacccctcaggatgtagtaactggagttagtcccctgctcttcaggaaactcagtaatcctgacatattttcatccactggaaaagtt

SEQ ID NO: 685293 - DNA, 98 bp, Homo sapiens
aagaaatctgattttgaggtgttcgatgctttaaagttagattctatggaaagttctgagacatcttgtagagatcagttggccttatttcctcagtg

SEQ ID NO: 685294 - DNA, 75 bp, Homo sapiens
tatcagtacttggacaagatgaacaacaatatcggcattctgtgctacgaaggtgctccgggaacgccttccgcg

SEQ ID NO: 685295 - DNA, 90 bp, Homo sapiens
ccgatattgaagattcatttttcttttttccattcttcaggaccttcggcaagggggtccactggacggggcctgagctacaacttcacc

SEQ ID NO: 685296 - DNA, 82 bp, Homo sapiens
aggagtgcggcgcggcggccccgggaccaaggaggaatgtatcctgtcaggtataatgtcagtgaatggcaagaaagttctt

SEQ ID NO: 685297 - DNA, 96 bp, Homo sapiens
ggctgcctcgccgcgtctcgccacgagcttggcggaaaagatgttgaagacttatttacagctgtacttagtcctgcgaacactcagccaactcca

SEQ ID NO: 685298 - DNA, 83 bp, Homo sapiens
agctggagtttgcaatccagccaaatacaactggaaaacagctttttgatcagctgtgcctctgtgggctgagtgaccgtgac

SEQ ID NO: 685299 - DNA, 48 bp, Homo sapiens
aaagtcatgaacgaattaagaagtaatctatgccagcaattatgacaa

SEQ ID NO: 685300 - DNA, 100 bp, Homo sapiens
ttctgcctctgtggataacacagccatcatatgggatgtcagcaaagcattacagacatctttagttttttccagagatttcggtttgcttgtatttgtc

SEQ ID NO: 685301 - DNA, 74 bp, Homo sapiens
aacggcagccccaagaacggaaagacacgaatgcagagtttgagtccagatcccaaagcccagtacacaagtat

SEQ ID NO: 685302 - DNA, 101 bp, Homo sapiens
atcatcaggttcggatgagtctcatgtggctgctgcacctccagatatatgaattagaaggtgacgaggagggagaagacgaggatgatgcggaaattaac

SEQ ID NO: 685303 - DNA, 83 bp, Homo sapiens
gaagcctcagctcttgccaaacagacccgagacccatgtcagccccactggatgcctggaggtgaagccggtgctgccaagag

SEQ ID NO: 685304 - DNA, 82 bp, Homo sapiens
aaagcgtatgcttttgtgcacactggtgacaactcaagagcaatcagtaccatctggtatgaccttgcttctagggagtggc

SEQ ID NO: 685305 - DNA, 73 bp, Homo sapiens
ggcgctatggaggagctcgatggcgagccaacagtcactattgcagcgagaacattgggagatcttgtgcgga

SEQ ID NO: 685306 - DNA, 101 bp, Homo sapiens
ccagtcaggacgcggaaacactccctggaggttctgacccactccctctcagcctccgcctggtctctgtttttggctttcacccccaaccagtgaccaaa

SEQ ID NO: 685307 - DNA, 100 bp, Homo sapiens
agcaaataaaggaattccaccggaagcacccaaatgagcttatcacacagactttcagccaccacaatcagctggcacagaagacccggcgggagaagag

SEQ ID NO: 685308 - DNA, 98 bp, Homo sapiens
ctggaggtctatcaccggcccgtggccatcggcagctgcggccacacgtgagaagccctaccactgcaactgggacggctgcggctggaagtttgcgc

SEQ ID NO: 685309 - DNA, 75 bp, Homo sapiens
atctgttccagggaggtgggattgagctttcttctagtcaagatgagtgataaaccagacttgtcggaagtggag

SEQ ID NO: 685310 - DNA, 100 bp, Homo sapiens
atgcaatgctcccccgaggagatgcaggtgttaagactgtgaaccagaagagctgactgactggtctatggatgaaaaatgttcattttgtaacctacag

SEQ ID NO: 685311 - DNA, 100 bp, Homo sapiens
agaaacaaaggacactgccaaccttgataagatggcttcggagggaatgagaggagaggagacgccgtgagcgggacgaccagatgtaccgagagcggct

SEQ ID NO: 685312 - DNA, 131 bp, Homo sapiens
gtcattgatggtctcaatgttgccaaaatgtttcctaaagttcgtgaatctcaacttgctgaccggttccctgatgtgttacctgcttctgctactgatccaaactgcagaacttctcattcatccccaag

SEQ ID NO: 685313 - DNA, 83 bp, Homo sapiens
accaagtacctgcagatcctgacctctctgatgagatggatcgagtgaagacatttccacctggacacctgaccatgtgcctg

SEQ ID NO: 685314 - DNA, 75 bp, Homo sapiens
gagcctgttggaggaactggcccggaaacaggaggacgttccgaggattctgaagacgacggggagacattgctg

SEQ ID NO: 685315 - DNA, 80 bp, Homo sapiens
ggcccggcggaggatcgacctcaacctggatatcagcccccagcggcccaggcccagtgtcccgacccaggctaagcttg

SEQ ID NO: 685316 - DNA, 100 bp, Homo sapiens
agacgttttgaaaaaccaggacgaaaagatgtagctgtccctttccccccaacacatcgcttgacatctgaagaagtatttgatttggatgggataccca

SEQ ID NO: 685317 - DNA, 101 bp, Homo sapiens
ccaactggaccgtcaccaacacccgcttctctgtggatgaaggccataggaaaaggatacagagtagagtttcatgaacctgaaacttggtggaaatttga

SEQ ID NO: 685318 - DNA, 100 bp, Homo sapiens
ccgtgctgacctcaataaggacaagcctgtcattcctgctgctgccctagctggctacacagtcctcctccgcctcctcctctctgcatgcgcgtcagag

SEQ ID NO: 685319 - DNA, 100 bp, Homo sapiens
tggtgtcttctctcttctttcatgtccctgctggattactggccctcttcaccctcagacatcacaaatatggctgaagagagacacggcaacattgaag

SEQ ID NO: 685320 - DNA, 95 bp, Homo sapiens
gcagagtcttccactgtgggaagttacatcatgctgatgacagcttcctggtcctcaccacagatggaattaacttcatggtgaatagtcaagag

SEQ ID NO: 685321 - DNA, 100 bp, Homo sapiens
ccctgactaaagcttgaaatgctacatttccaagacagcaaggccatcgtggacgggaacctgaagctgatcctgggcctcatctggaccctgatcctgc

SEQ ID NO: 685322 - DNA, 100 bp, Homo sapiens
tatctagggacgagatctagaatcaactgagagagatgcttaaaaatcaccagttactttaatgacaagagcctcctgatctagcagccaagactccccc

SEQ ID NO: 685323 - DNA, 100 bp, Homo sapiens
gaacgggcaggcaagcagtgtcaatattgcagctactgcttctgaggcggcaaagatctgcaacaacatgctgttagctattagtatgattggaactgct

SEQ ID NO: 685324 - DNA, 113 bp, Homo sapiens
ggggggtaccacacaacaccccagcaaacctccgggcccccaggcatggctagctcgaggccgagcatggttatgcgtccctgtgcccgcatcgcagtccaggccccatccac

SEQ ID NO: 685325 - DNA, 100 bp, Homo sapiens
ggtgaccggcgcgcgggagcgctacggccccaacggcctccggtgtggctgtctctgatggtgtcatcaaggtgttcaacgacatgaaggtgcgtaagtc

SEQ ID NO: 685326 - DNA, 78 bp, Homo sapiens
acgtttcttctcttggcaagagagctctgcatcaatgcgccggccatagatgagattgtggggaacctgggtgaaggc

SEQ ID NO: 685327 - DNA, 80 bp, Homo sapiens
cagccggcacctgacggcgtgaccgacccgagccggcacggatgggcagaagcctttgcaggtatcagaagttcacatat

SEQ ID NO: 685328 - DNA, 75 bp, Homo sapiens
ccgagtggttccatggtgcaatctcaagagaaacacagaatgttcttggtgagaagggccggcggattcgggaac

SEQ ID NO: 685329 - DNA, 82 bp, Homo sapiens
ccccgtggctctgccagtccgcagagcccggcgacgaagagccgagcctcttgaagccattcttacagatgatgaaccagac

SEQ ID NO: 685330 - DNA, 74 bp, Homo sapiens
ataaaattttcccatactgaggaatctggaaacatcaaagctggattagaacatctggtaagttctcattttct

SEQ ID NO: 685331 - DNA, 100 bp, Homo sapiens
attatttcaaaggaattgtttgaaaccaaacatgttatccagtaatggagcctctaaggtctacatccggataaaagacgatgaatggaatatttatcgc

SEQ ID NO: 685332 - DNA, 90 bp, Homo sapiens
ggaacatccccttccaggcccacagccgggagatccgagagctcttcagtatacgctcaacggcaagaaagtggaagttgccgtcaaaca

SEQ ID NO: 685333 - DNA, 100 bp, Homo sapiens
ggcggatctggaggagcagttgtctgatgaagagaagctggtggaagttaaaggccccaatgatcgtctttcacataagcagatgatctggctggctgaa

SEQ ID NO: 685334 - DNA, 80 bp, Homo sapiens
cgcagcagaagaaggcagacaggttggaggtgcagttcatcatcacaggcaccaaccaccactcagagaaggagttctgc

SEQ ID NO: 685335 - DNA, 51 bp, Homo sapiens
gcgacgccaggctgagaccgtccagctcctgagaaccatgtctatgcccaa

SEQ ID NO: 685336 - DNA, 96 bp, Homo sapiens
catgcgagatctgtgagaagaagttctacaccatggcccacgtgcgtaagcacatggttggaatcgggcgcctgattgctgagtgtcatctcaacc

SEQ ID NO: 685337 - DNA, 74 bp, Homo sapiens
ctggggatatacatgcatgcaccaaaacgaggacaggcagctgagtatgtcccagagaaggtgaagaaagcgga

SEQ ID NO: 685338 - DNA, 98 bp, Homo sapiens
gtgggcgaacttctgagctaccagagctccctctttgcccactagcagggcattagctggtgctgaagacagtggctgcttggcgagcctggatctcc

SEQ ID NO: 685339 - DNA, 75 bp, Homo sapiens
gcggctgcaactgcctgccgcgccgagggaccgccgggcggcggaaagcagggttcatagtggcgtcatgcacgc

SEQ ID NO: 685340 - DNA, 75 bp, Homo sapiens
catgtgtttcaaaatggccctatgcttaggggctgatcccttatccaacatggttctaaccttcagtactaaaga

SEQ ID NO: 685341 - DNA, 100 bp, Homo sapiens
gcttggtagaggtggctttagtgaagtgtataagatcatggaagggaagtggttgctgtgtatgttactggtgcttggaactgctattgttgaggctcat

SEQ ID NO: 685342 - DNA, 50 bp, Homo sapiens
ccggagcgtcccagctgcgaggagccactcatctctgcccagctgctgcc

SEQ ID NO: 685343 - DNA, 90 bp, Homo sapiens
tgcaggccaagcgcagcctccaccagggagtgcatccgccccaacccttttccccctcgtctcctgtgagaattccccgtcggatacgag

SEQ ID NO: 685344 - DNA, 96 bp, Homo sapiens
acggaaggaagccggccccctgcctgcccgcgcctagaccccattcatgaagatagtgatccggggagacaggaacacgggcaagacagcgctgtg

SEQ ID NO: 685345 - DNA, 96 bp, Homo sapiens
cagccagctggagcgatgcaagctcggatccgagactggcagcatgagcagcatgaggactaatggctgaaggataaatcaacatggcaactatga

SEQ ID NO: 685346 - DNA, 100 bp, Homo sapiens
ccatggacatgtacggggatattctgattcagcagtcagtctcagcacgtgttctggtctcaggcttttgatattatgagagtgacacatggcagagaac

SEQ ID NO: 685347 - DNA, 100 bp, Homo sapiens
ccctcctgtcactatcagcaagtcacaatcagatatgattcatcaacttccactgttgacagaaaaacagtacattgcaacaattcactctcgtcttcag

SEQ ID NO: 685348 - DNA, 78 bp, Homo sapiens
gcagtggtcgcttcttctccttggattttctgccgtctcttggcaaaaatggcaaataatgatgctgttctgaagaga

SEQ ID NO: 685349 - DNA, 95 bp, Homo sapiens
gtggctccagcatgtatcagccgaggtggagctgcggggccctggcatgaaagccttgaaaagatcttttgaggtcgaggaggtcgagacaccca

SEQ ID NO: 685350 - DNA, 99 bp, Homo sapiens
ctccaaggcccacttctatgaggtgattctgggggtccacttgtctgtaatggtgtgcttcaaggtatcacatcatggggccctgagccatgtgccctg

SEQ ID NO: 685351 - DNA, 98 bp, Homo sapiens
gcttctatgtcctgtacacaatcttcatgaaagggcctgccttaagtgtgaaagtaatgactgatgaaagtggaaaatccaaaggatttggatttgta

SEQ ID NO: 685352 - DNA, 75 bp, Homo sapiens
actctttggatataacaccaccttcaaaaatttctatggccgccctgctcccccaatgaaaggccagcttcgaag

SEQ ID NO: 685353 - DNA, 75 bp, Homo sapiens
tggccgccaaaccccagctggaactccggccacagccagcatgcaggatcccttggttccagtaccccattatct

SEQ ID NO: 685354 - DNA, 100 bp, Homo sapiens
tcagagaccaataaaaataaactgcttgaacatcctttgactggttagccaggatggacggaatgatttctactgctgggtttgtcaccgggaaggccaa

SEQ ID NO: 685355 - DNA, 100 bp, Homo sapiens
aagatgtccttaccagctttgacaatacaggaaatgtttcttttcgatgtgcctactgttttttcttgaaccctgcaagaaaaaccagacctcaggctcc

SEQ ID NO: 685356 - DNA, 100 bp, Homo sapiens
ggcatactgaatgcacatgacaccacaaagttgcagcaatatcagtactacagtgcaggcctgctctccacatatgaccctttctatgagcaacaacggc

SEQ ID NO: 685357 - DNA, 101 bp, Homo sapiens
gtagccatcgagaacatcctcagctttatgtcctacgacgaaattagccagctccgcctggtacagcagggaagaactggaaactcagagaaagaaactgc

SEQ ID NO: 685358 - DNA, 75 bp, Homo sapiens
atcatcccgtcagagctgaggtacttcgtgaagatgccatggacaatattaccaggcagaaccaattctacgata

SEQ ID NO: 685359 - DNA, 108 bp, Homo sapiens
cgggcccgggacaacgtgtatcacctcgactgcttcgcctgccagctctgcaaccagagagcacagactgtgacttctgaccaagagaaacggttgctacatcagctc

SEQ ID NO: 685360 - DNA, 99 bp, Homo sapiens
ggaaaagctcttggatgaagccatacaggctgtgaaggtccagtcattccaaatgaagagatgcctggctgagaatcaggctgaaagccgggcagcagt

SEQ ID NO: 685361 - DNA, 90 bp, Homo sapiens
ccgacatggaaggagatggcgaaaggtttacccaaggtccagcctagcccctaggcaccatgtcggacagtgatctaggtgaggacgaag

SEQ ID NO: 685362 - DNA, 82 bp, Homo sapiens
gctgtatggacctctgtgtggttttcatggagtgataatgaaaggagcagcagccgcattaatatcccagagagagcaagtg

SEQ ID NO: 685363 - DNA, 90 bp, Homo sapiens
aaagctgggaatcctattttttattatgttgcacggaggaaaatggctttgtaaagaagtttgaacctaaatctggctggatgacttttc

SEQ ID NO: 685364 - DNA, 90 bp, Homo sapiens
gcccatagaccttggcttattaccaaagaacacattgagaatgtggtccaacccatgaaggagctatatggaattaacctctcagatggc

SEQ ID NO: 685365 - DNA, 143 bp, Homo sapiens
cgggaccctccccttggaccgagccgatcgccgcggggcagttcgggccggctgtcctggcgcgagagaagaagaaggaggttcctgctgtgccagaaacccttaagaaaaagcgaaggaatttcgcagagctgaagatcaag

SEQ ID NO: 685366 - DNA, 74 bp, Homo sapiens
ctcatcggcactctgaacgcggccaaggtgccggccgacaccgcattccaaaatatgcccggtgctatccgccc

SEQ ID NO: 685367 - DNA, 97 bp, Homo sapiens
gctaggaaggttcctggagttaccgccattgagctagatgaagatactggaacattcagaatctacggagaggagaggagttcattacttcggaagt

SEQ ID NO: 685368 - DNA, 100 bp, Homo sapiens
ggccattagtgaggagcttccctatagtggcggtcaaacagtgagcaccactgattcctcaaccagcaaccgggaaagcgtcaagtcggaagatggggat

SEQ ID NO: 685369 - DNA, 50 bp, Homo sapiens
agttgaatcattgttcaaataaggtgggcaccatgtccttgaagcttcag

SEQ ID NO: 685370 - DNA, 74 bp, Homo sapiens
aagcagaagccactggagaaaaacggccaagaggcagacctaggaaatggcaagaaggacctcaccagatgctg

SEQ ID NO: 685371 - DNA, 100 bp, Homo sapiens
cagggcccggtcctgcgcctcgggagtcggcgtccaggctcggagcgcgacacggagactaggtggcagctgagatctgtatctgtggacctgaatgttg

SEQ ID NO: 685372 - DNA, 82 bp, Homo sapiens
ctcacattccagcctacttacaagtatgatacgggctctgacgactgggataccagcagcatctggaatcaagagacccatg

SEQ ID NO: 685373 - DNA, 74 bp, Homo sapiens
atcgggctgaagcgactgagtccgcgatggaggtggttgtgtcaaaccgattggtgacatctccatgctgtatt

SEQ ID NO: 685374 - DNA, 98 bp, Homo sapiens
tcacaccctggcacagcttatttctgcttactcacttgtagatccagagaaagccaaagcctatacacagaatgggattttacatatgctggacagaa

SEQ ID NO: 685375 - DNA, 76 bp, Homo sapiens
caactggattttttaactgaagatagtgcctttcagccctaccaggtatctctcctctttgtcacaacctctttgc

SEQ ID NO: 685376 - DNA, 100 bp, Homo sapiens
agtttcgctctaaactgcccttgaaatgaagctggacttggaggtttgatctgtggatgaaatgaatcatgattttcaagctcttgcattagaatctcgg

SEQ ID NO: 685377 - DNA, 103 bp, Homo sapiens
cgcagatgttgtcaaggtggcctaccaggaggccaggggtgtcgccatgagtggaaggccgtctctgagactactttcagagaagatccttgggctccaggtc

SEQ ID NO: 685378 - DNA, 100 bp, Homo sapiens
gactgcctgaagttacatttagagactgaaatcactgcaccttaaaaacaaaagattgagctgcactgtattcctgcctgtgattggaattgaaacagta

SEQ ID NO: 685379 - DNA, 75 bp, Homo sapiens
tttggcttgagagaagccaaggacccgactcagaaacccaggtaactaggatttctacctcaaccgcgagaccta

SEQ ID NO: 685380 - DNA, 75 bp, Homo sapiens
ctctggcagttggtgagcatcatggcaaccgttaacattgatgatggcacctcagatcgcccctacagccatgct

SEQ ID NO: 685381 - DNA, 82 bp, Homo sapiens
ggccatctgaataactttactaagcccggcaccttttttgctccctgatggactggttcgcttggttaataaacagataaac

SEQ ID NO: 685382 - DNA, 50 bp, Homo sapiens
cagccgcatcttcttttgcgtcgccaggtttggtgcacctcgatttggag

SEQ ID NO: 685383 - DNA, 88 bp, Homo sapiens
ggggtgggcacctgggggctgcggcgagtggcgatgggcgagccggacttgcacgtggagaaagcaatgtgaaagatgttgcagaagt

SEQ ID NO: 685384 - DNA, 90 bp, Homo sapiens
tttacaaagccagctgactgaaaaggactctatgattgaaaatatggtactgggcctaatcgctacgtgcctctttggctatgatgccta

SEQ ID NO: 685385 - DNA, 74 bp, Homo sapiens
gagaactatagcaatctggttttcttgggttgaaatcacaaagattagacacctttttagataggtgttcttca

SEQ ID NO: 685386 - DNA, 100 bp, Homo sapiens
cgagcagccttcagggagcgtggagacaggtatgaacgctgccgtccgtgccgtggtgcgcatgggtatctacgtgggggccaaggtgtacttcatctac

SEQ ID NO: 685387 - DNA, 101 bp, Homo sapiens
tgtgggctggtatcattcccatcctcatataactgtttggccttcacatgttgacatatctgaagagatggattaagaatgctttggattaaggattgtgg

SEQ ID NO: 685388 - DNA, 90 bp, Homo sapiens
tactcggacaagtacttcgacgaacactacgagtaccgcgctcctttaccctcatcgtggaggcctgggactgggacaacgataccaccc

SEQ ID NO: 685389 - DNA, 96 bp, Homo sapiens
aacaatagctcaaggaaacctttccaacacagatgtccaagctgccaagaaacctcgacctgtctcccagttggttgcacagcaggttactcagca

SEQ ID NO: 685390 - DNA, 96 bp, Homo sapiens
gaagaacttgtacagagatgtgatgttggagaactatagcaatctggttttcttgggactatggcaaggagtctcaggccaaggatgtcattgaag

SEQ ID NO: 685391 - DNA, 96 bp, Homo sapiens
cacagctcagaacagttggatcttgctcagtctctgtcagaggaagatcccttgtgctccagcttttctgcagctcacccaaggctgctctccgct

SEQ ID NO: 685392 - DNA, 87 bp, Homo sapiens
gaagggggactacaggttcgagactgagatgccgcggcagtttcccaagctgaacatctctgaagtggatgagcaagtccggctcct

SEQ ID NO: 685393 - DNA, 100 bp, Homo sapiens
ctgaatccatcattgcagctgcatgttcaagaagtggccggagagttctgcatgttgattcaaggagttttggagcacctacacaaaagcgcaacaaggg

SEQ ID NO: 685394 - DNA, 74 bp, Homo sapiens
ccttcctccagaacttcatcataaaggttttaagaggatttgttggtattgaggaaaacggtgaaatccttttt

SEQ ID NO: 685395 - DNA, 100 bp, Homo sapiens
ttttgacaaaatccctgagtcctgtgcactcaaaagttggagacatccaggtctgcaccatgatttgaaagaagccaacactaaaccacaaatatacaac

SEQ ID NO: 685396 - DNA, 83 bp, Homo sapiens
cctcgcgtttgtcttcggtgacgggaaacaatgcagatcttcgtgaagactctgactggtaagaccatcaccctcgaggttga

SEQ ID NO: 685397 - DNA, 100 bp, Homo sapiens
cccgaactcgcccggccgggagccgccgcgggcaggacgcgcgctgcaggtccagctgggagctccccgacctccaggagggcaagatccaagccatcag

SEQ ID NO: 685398 - DNA, 101 bp, Homo sapiens
tgaaacggattgccagagaattggcagaagtctggctggatgagacagggtcgtgcccagatgatggagaaatcgacccagaagcctgaggaggtgtcctg

SEQ ID NO: 685399 - DNA, 100 bp, Homo sapiens
gtttcccagtgcaggacgcgctgacagctcgagtgagcggactgcccaggacttcggaactagacgagtggtgggggaaaagtagctccagctcaaccat

SEQ ID NO: 685400 - DNA, 75 bp, Homo sapiens
gattacataaaccagtcacccaagtgcattgcctttggaaacgaggttgtgagaactgctttattggatgctgct

SEQ ID NO: 685401 - DNA, 75 bp, Homo sapiens
agacttcactgtgaatgatgtcaaaatgtgtgtggatttggtgcttccagatgtgagttatcaggtggaatccag

SEQ ID NO: 685402 - DNA, 75 bp, Homo sapiens
ggaaagtgctcctgcggctgtatggagcgattttgcagatggaactgtggctgcaccatctgtcttcatcttccc

SEQ ID NO: 685403 - DNA, 75 bp, Homo sapiens
ggggctgctgagatatcctgtgccctggcagttagccaagaggcggataagatcgacgtaattaacacattccag

SEQ ID NO: 685404 - DNA, 137 bp, Homo sapiens
ggggcggctggagagccgggagtcgctgggtgcgtggggctgcctcgccgcgtctcgccacgtgccggtggtggtgtgcacattgagccccggtatagacagttcccccagctgaccagatcccaggtgttccagag

SEQ ID NO: 685405 - DNA, 105 bp, Homo sapiens
ccgggctgcggcgtgtgcgcgcccgccagctgctccggagatacggtctcggcgcggaagatggccggcggcgtggacggccccatcgggatcccgttccccgac

SEQ ID NO: 685406 - DNA, 101 bp, Homo sapiens
tctcagaactgttccttcagccaaagaaacaagccgtggaataggtgtatcaagtaatggtgcaaagcctgaattcctgagactggcccagacgctgcggc

SEQ ID NO: 685407 - DNA, 74 bp, Homo sapiens
taccagagaatcaagctatccaaatgcgattagttgatgtggcctgcaaggctcacttatctaaagaatatgag

SEQ ID NO: 685408 - DNA, 83 bp, Homo sapiens
cgaaccgcagtatcatgctggccaagaagatcatcattaaggacggaggcacggctcgcttctcatatgtgcggatgaaatat

SEQ ID NO: 685409 - DNA, 100 bp, Homo sapiens
aaatttaaccctagaagagaagagcgagaatgaagcaaaatgcttctttcagatgatggtggtgctaccccagtacaggatgaacgggattcagggtcag

SEQ ID NO: 685410 - DNA, 74 bp, Homo sapiens
atttgaggttggagttacctcccagttcatctccaagaaaggttgatatgtcagatctctctccagaagagcaa

SEQ ID NO: 685411 - DNA, 75 bp, Homo sapiens
gaaatgattgaatctggtgttatcaacttaaaagatgccacctctaagagcggcactgcagaggtggagctgaag

SEQ ID NO: 685412 - DNA, 75 bp, Homo sapiens
tgtaggatttacatattatagcaatcgtagaatgctgcttctaaattacttgggcaaaattgggtccaaaacgcc

SEQ ID NO: 685413 - DNA, 75 bp, Homo sapiens
acgggacaaggaccgtaaacgatccaggtgggattgttcctccagcagctcaacagcttcacagagaaaatattc

SEQ ID NO: 685414 - DNA, 82 bp, Homo sapiens
atctgagctcagacctgccaatttaccagagataattgataacaccctgtaacagctgacctggtggagttgacagaagaga

SEQ ID NO: 685415 - DNA, 80 bp, Homo sapiens
gcctggtgtcggtggttagtttctgcgacttgtgttgggactgaggccacaagaggaagctgaatgaagaggacgccgcc

SEQ ID NO: 685416 - DNA, 74 bp, Homo sapiens
cgaatctctcaggctgcatcaggatgaatgatgacccaagtatggaatgcaaaatggcaactcttaaggaaaaa

SEQ ID NO: 685417 - DNA, 90 bp, Homo sapiens
cggttcctcccattgctccagggatattgaaagtcattgcagagaaaacagatttctatcagggggagagcaaggacctgctgtttatct

SEQ ID NO: 685418 - DNA, 75 bp, Homo sapiens
ctgatatctcaaaaggtgatctggacaaaggaacaggtatctcaggtgatagaaattgaagatgcttcacccacc

SEQ ID NO: 685419 - DNA, 100 bp, Homo sapiens
gagagcgtgccaggcgtgtactgcctatgtgtgcttgaatatcacctctgccaggcaattaaccggctgtagtcgctttggtcatattttcccttcatct

SEQ ID NO: 685420 - DNA, 75 bp, Homo sapiens
cgagcagcgtcatgtacccctttcagaatgaccgaagaagcatgccgaacacggagtcagaaacgagcgcttgaa

SEQ ID NO: 685421 - DNA, 96 bp, Homo sapiens
gcgccgcggacgcgtcatcgagtgtgacgtggtgaaaggatgtcacatgtacttcagtttgaggataaaagcagaaaagtgaaagatgcaagcatg

SEQ ID NO: 685422 - DNA, 82 bp, Homo sapiens
agaggcccgtcatctggcggatgaggctaagaatcttgtgggaaactacctccgtatgttccgaggttctctgtacaagaga

SEQ ID NO: 685423 - DNA, 98 bp, Homo sapiens
ccgagagctgctaccattgttgctacctcagaaggctccctttggggactggacccatacaatgtactggccccaaagggagcttcaggcaccaggga

SEQ ID NO: 685424 - DNA, 75 bp, Homo sapiens
ttaatccagcatacataaaagccagaattagttttggctataatttgcagacttaattcagtgcacaaatgagat

SEQ ID NO: 685425 - DNA, 82 bp, Homo sapiens
gtccacccaccgccgccgcctcccagatgtggacgagtgctcactagcagaaaaaacctgtgtgaggaaaaacgaaaactgc

SEQ ID NO: 685426 - DNA, 75 bp, Homo sapiens
gcgcgatgacggctacgaggccggcaccatggtgcaggaatttgtacacctgggggccatagacatgtatctgcg

SEQ ID NO: 685427 - DNA, 96 bp, Homo sapiens
acggggggactggccacatccctctgaaggagatgccggccgtgcagctggacacgcagcacatggactgggctggcttagatgaagatgaagatg

SEQ ID NO: 685428 - DNA, 78 bp, Homo sapiens
acggattcatttagagctgcggaacaggacgccctctgatgaggcatacacggaatacctgaggagcatccactatat

SEQ ID NO: 685429 - DNA, 74 bp, Homo sapiens
cgaattagcaaaggaaacttttgaataactgaagtgaagtgatggactccgatttggagagtagtaagacgtga

SEQ ID NO: 685430 - DNA, 100 bp, Homo sapiens
attctaatctttcacagacacagcaatgctgtgactgctgtggcctgggcctccgcgtgcgggccgagggccagtcgtgtgagtccaatcctaacctggg

SEQ ID NO: 685431 - DNA, 90 bp, Homo sapiens
cgttgcgagcgcgaatggcacgagctggagggagaatttcaagaactgcagctttgatgaccatgacccagctgtgatccatgagaacgc

SEQ ID NO: 685432 - DNA, 96 bp, Homo sapiens
cttcagactgttttctcactgtacttctgggtaaactggagaagagcttcaactctgttcacctgcttgcagggactttctccctcgagggtcggg

SEQ ID NO: 685433 - DNA, 82 bp, Homo sapiens
gcggcggccacggcatcctgtgctgtgggggctacgaggaaaggaggtacactcagtgaaatttgcaaactctcgaacaagt

SEQ ID NO: 685434 - DNA, 98 bp, Homo sapiens
cacagcccgccgccgccgccgcctcggggacctttgcggggaggcctcaggtgtgccacggaccacaatgtggacaacaccacagagatgctgcagga

SEQ ID NO: 685435 - DNA, 100 bp, Homo sapiens
tccgagtggaggcgactgggggctgaagagcgcgccgccctctcgtcccactttccagtggtctcggaaagagggtcgtggtcccgcacggatgcgcttg

SEQ ID NO: 685436 - DNA, 100 bp, Homo sapiens
cttctgctttatgttggctacacgagtctgtatctggatagtcgtaaacttcctatgataatatgcacccaatgtccagggagcgtgcaaaatttgtcaa

SEQ ID NO: 685437 - DNA, 50 bp, Homo sapiens
cctgtttagggcacgaggctgaatcaatgataaaactatggtttgacaag

SEQ ID NO: 685438 - DNA, 82 bp, Homo sapiens
agcttgtttcacatgctggtggactcacccatcgacccgagcgaggaccctaataggagtattcataccagcagcagcagca

SEQ ID NO: 685439 - DNA, 100 bp, Homo sapiens
aggactgcgccgcgtcttcctcaaggttaatttggagtggcccctggagtcagtttcctacaccatccgaggccccacccagcacgagctacagcctcca

SEQ ID NO: 685440 - DNA, 96 bp, Homo sapiens
gccggttcgcgtctctctgctgcggcgcggggaccgctgtgctctcggattgtcagtggcttcgccccgaggagagctgactgccctgggctgctg

SEQ ID NO: 685441 - DNA, 96 bp, Homo sapiens
ctcagatcctgtggtcatcgtctcggcggcgcggaccatcataggtgtcctcatgacttctcttgtggaccatgtccgtgatcttttttgcctgcg

SEQ ID NO: 685442 - DNA, 75 bp, Homo sapiens
gtctccgccggctactgccgcttcagttctcccggtgtggccacgagtcgggtggggaagaaaacatgacagaaa

SEQ ID NO: 685443 - DNA, 74 bp, Homo sapiens
ggagctgggcgacgagctgaccctgggagacatcgacgagcaagtgcaccggcacctggaccaacacgaagtga

SEQ ID NO: 685444 - DNA, 51 bp, Homo sapiens
gctgcgttcacggcaggattcggttaggctgcaagaagtgaaagtcatggc

SEQ ID NO: 685445 - DNA, 82 bp, Homo sapiens
acccagacgaggctcgggactttgcagccggccttagtgctcgcgcaggtggcgttcaagatgtacttgggcatcactccaa

SEQ ID NO: 685446 - DNA, 83 bp, Homo sapiens
aggcgaagctggccgagcaggctgagcgatacgacggtatcgagaaccttccctgcgaacttcagaggaacttccagctgatg

SEQ ID NO: 685447 - DNA, 82 bp, Homo sapiens
gccccgcgagcacagagcctcgcctttgccgatccgccgcccgtccacacccgccgccagtttggtgccctggttgtcagat

SEQ ID NO: 685448 - DNA, 97 bp, Homo sapiens
tcattgctctttggcgactcttattggtacaccaggggttggaaaaaccacactaggcaaagaacttgcgtcaaaatcaggactgaaatacattaat

SEQ ID NO: 685449 - DNA, 98 bp, Homo sapiens
tccttgacctttaggtgcttttatattcatctcaaaaacaaaattctgaactcaggacttggcaagcctccatgaagaagtggactattctgagaaac

SEQ ID NO: 685450 - DNA, 83 bp, Homo sapiens
caagctcagggctcccactgattgtacattatggagagaagatgactgaggaggaggtggagaccgttctggcaggacacgag

SEQ ID NO: 685451 - DNA, 100 bp, Homo sapiens
gctcggtggagcagaccccgcgcaagaggctgcggtgagccaagtgggggaccttaggcttgcattgcagcgtacagaacaagcggctgccagaaaggag

SEQ ID NO: 685452 - DNA, 90 bp, Homo sapiens
gtttccttaaagtgcctcgatctaaggatgaccctggaaagaccccatatcatgtgaacctcctcctggctggctatgatgagcatgaag

SEQ ID NO: 685453 - DNA, 83 bp, Homo sapiens
ggcctgggcgctccggtggcggcggagactgattcttgctattccaaatcctcttccacgttgacagcccttcagatatttca

SEQ ID NO: 685454 - DNA, 75 bp, Homo sapiens
cagaaactgtggttccaccattcactgtcttctcaggctgcccaggaccccgagaaccaggcgctggcgaggttt

SEQ ID NO: 685455 - DNA, 87 bp, Homo sapiens
tacttttaattttgcaaagaatccaggacaaaaaggattagcctatgaaagagacaaccagcaccaagatgaagcagaaggagatcc

SEQ ID NO: 685456 - DNA, 58 bp, Homo sapiens
caggtactggaaacccacaggcacacccaagtgactattatatggttaaaaagatttt

SEQ ID NO: 685457 - DNA, 100 bp, Homo sapiens
cgttggatacacttccaaagaaaccccttttctctcaaatccagatcaggaagcaccatacctcctgcgaaacctcagtgatcacacagtggccatcagc

SEQ ID NO: 685458 - DNA, 100 bp, Homo sapiens
gctgattgctgctaacagtcagggtacaattaaggtgtcttctgtttatgaagcaagatgtacaggagagagagattctggagcaaagtcagatggcttc

SEQ ID NO: 685459 - DNA, 98 bp, Homo sapiens
ttacatcccattccctgaagatgattctaattcaacaaatcataacttggctctcctagcaggcatgcggaaccgtgagaacagctcgccctgccaag

SEQ ID NO: 685460 - DNA, 98 bp, Homo sapiens
cgccggcctccggggagaaacggttcttgggtgtctctggggagtccctgggccagaccttcctccagactccagcccacctcttcggagcagctctg

SEQ ID NO: 685461 - DNA, 100 bp, Homo sapiens
caagtatctttttacaggacttaaattggccatttatttctcagaaaatccattttcctgatttttctaccagagacatacataggaattatgttgattg

SEQ ID NO: 685462 - DNA, 98 bp, Homo sapiens
ctggagaaggtgtgcaggggaaaccctgctgatgtcaccgaggccagacctcttcctgtgccaaaactgccacctggggagcaatgtgagggtgaaga

SEQ ID NO: 685463 - DNA, 76 bp, Homo sapiens
acccatcacaatgacacagagctcatcagaaagttgagagaggagattggtttttcagcagcagatgctgtaacag

SEQ ID NO: 685464 - DNA, 74 bp, Homo sapiens
cattaacagacaagacacttttcagaaagacagggagtaactattcccagtcagaggcgctatgtgtattatta

SEQ ID NO: 685465 - DNA, 82 bp, Homo sapiens
cttggactgagtcctgcaggacacagccgttggacataccagatggtcgaagagctccacttcctgctcattaccggagcag

SEQ ID NO: 685466 - DNA, 82 bp, Homo sapiens
tgaaaacgcaattattcctttaccaacaatcaaatggaaacccttaattcgacaattccttcggcgaggggaggtgttttgg

SEQ ID NO: 685467 - DNA, 97 bp, Homo sapiens
cctcatactaacttagtaactgaagctataaaaaatgatcacctcaggcaaatggaacgtgaaagatccaaaaggtaattctggcacttggagacta

SEQ ID NO: 685468 - DNA, 71 bp, Homo sapiens
ccgcacagctgctgagaatgagtttgtggtgctgaagaaggcaattgaagatgaaggtggtaatcctgacg

SEQ ID NO: 685469 - DNA, 97 bp, Homo sapiens
tgaattctctctccactcttcgagattggcacacccagcttgaaggatgccaatgatgtaccaatccaatgtgaaatctctcctcttatctcctatg

SEQ ID NO: 685470 - DNA, 90 bp, Homo sapiens
gccacaggaggctgtgcgggccccgctccgcttcgaatggggtgagccactgcgcctgatcaaggcatcaccgttgaacctcctaagagg

SEQ ID NO: 685471 - DNA, 98 bp, Homo sapiens
gtgctttcccgaatctcagaatgccacatgacaatggatgaagtccgagaatttgaacgagccactcaggaagccaccaacaagaaaatcggcatttt

SEQ ID NO: 685472 - DNA, 100 bp, Homo sapiens
ccttcacttgctcattctgcaaaagtttgtagatcttctgcaaggagaacggcattgttaactacctacaggaagtggcaattccgttccttgtgctcag

SEQ ID NO: 685473 - DNA, 96 bp, Homo sapiens
gcgacaagccgctggcagccgcggatctcaccgccgctcagggtgctgactgggttacttttttaaacactaggaatggtaatttctactcttctg

SEQ ID NO: 685474 - DNA, 100 bp, Homo sapiens
cagcgcaaattccgaccctactgagccgtgagagccgcagtggatggctggaggtgcagggccaggaggaacatgaggagaagataagcgaggacctcag

SEQ ID NO: 685475 - DNA, 100 bp, Homo sapiens
ggcgctcaacaagaatcactcggagggcggcggagtgatcgtcaataacaccgagagcaaaaaagggagacgctgtccccgctgtgcctcatccccatgg

SEQ ID NO: 685476 - DNA, 98 bp, Homo sapiens
ctggtcccgtataacatgcagatcgacttggtggaagcacacaccactgaggcggctcccagctgcgttggcgacatggccgacacccccagagatgc

SEQ ID NO: 685477 - DNA, 50 bp, Homo sapiens
ctacgagatgctggttggcgaggtgtgtgagcccgaaaacccatgcaagg

SEQ ID NO: 685478 - DNA, 74 bp, Homo sapiens
ttccactgatatctcaaaaggtgatctggacaaaggaacaggtatctcaggatagaatttttgcggcatttgaa

SEQ ID NO: 685479 - DNA, 87 bp, Homo sapiens
gaggacggcatgagttctggacacttcaggagtcctcagctagtgacatggtcggggctagtgacatttgaagatgtagctgtggat

SEQ ID NO: 685480 - DNA, 98 bp, Homo sapiens
cagtggaagctggatatttgacaattttgtgccagtcactcctagaaaatctagacaaattctacaagggggttgctcctctctggatgagacagata

SEQ ID NO: 685481 - DNA, 100 bp, Homo sapiens
ttggcgattatgtggacagaggttattttagtatagaggccaaatttgagtttcatcatggtgactatgaaaaacagtttctgcatgtactgagccgcaa

SEQ ID NO: 685482 - DNA, 83 bp, Homo sapiens
aggatctgggtgctgcttatgagctgataggaagatgtcttcaggaaatgctaaaattgggcaccctgcccccaacttcaaag

SEQ ID NO: 685483 - DNA, 74 bp, Homo sapiens
gttccattggcaagctacaataatggggccaaaagggctattgcaagacacgaagtccgagaaattgagcagcg

SEQ ID NO: 685484 - DNA, 100 bp, Homo sapiens
gagcgtgaccgagagcgcgaatatcgtcatcgttagaaggtggctgggagcccgagccccacacctgccgggcagcaggtgctggacgtcgacagctgcc

SEQ ID NO: 685485 - DNA, 50 bp, Homo sapiens
gtcctttatatagaagggagagtaggtggcttcccacacttctgactcgg

SEQ ID NO: 685486 - DNA, 95 bp, Homo sapiens
gcagccgcacactggagacccagctggatgccctcttggctgcactgcactcccagagtgagcctcgcagctggtccctgctagagcagctgggc

SEQ ID NO: 685487 - DNA, 98 bp, Homo sapiens
atctcagctgttgtggaaaagggccccagcgtcctcttgtcaccgacagggcgattgcagtgcgttccgctacaccctctcggttttctctgctctgc

SEQ ID NO: 685488 - DNA, 88 bp, Homo sapiens
gtcattgaacaaatgtttccttaaagtgcctcgatctaaggatgaccctggaaagggcagcagaagaagcctttgtaaatgacattga

SEQ ID NO: 685489 - DNA, 74 bp, Homo sapiens
caatgcaatgctgtttgccctgaacatcatgaattcccaagaaggaggtaaaaatgtctccatcgtatcatcag

SEQ ID NO: 685490 - DNA, 75 bp, Homo sapiens
ggtgatcaatgtgaacaatattctcaagatcaccggcgtaatcaacccagcgttggacaaatactttccgtcaga

SEQ ID NO: 685491 - DNA, 90 bp, Homo sapiens
ccaaaaaaggataagcagggcttcacagaagaggtgacagcttcacagcgcatcgaactccatttaaaccacagcagaggctttatagaa

SEQ ID NO: 685492 - DNA, 96 bp, Homo sapiens
tttcaaccataaagacatcttaattgggcacgaaagagatcctgagagtgagaagcctgactgaccccgcctagacgccaggcccacttcacgccg

SEQ ID NO: 685493 - DNA, 75 bp, Homo sapiens
gaatctggaaacatcaaagctggattagaacatctgagtctctgttgcccaggctggaatgcaatggtgcgatct

SEQ ID NO: 685494 - DNA, 75 bp, Homo sapiens
ccgaagaattagctggaaattctgagacactaaaagaacctggtggatactttaatactgataagccacacccca

SEQ ID NO: 685495 - DNA, 100 bp, Homo sapiens
cctgtgtttctccattctgttggttttatgcatctttatccaatcaagtgcccttggacaaagcctgaaaccaggttttgcactgattgcaaaaataaag

SEQ ID NO: 685496 - DNA, 75 bp, Homo sapiens
ccatgagcgtcccggccttcatcgacatcagtgaagaagatcaggaaataagatatgtggaacggagttatgtat

SEQ ID NO: 685497 - DNA, 101 bp, Homo sapiens
aactgaggacaatggacctgcctgggcatagacttccttaagtcttcaggagacatatgaagcaaaaaggaatgaattcctgggagaactgcagaagaaag

SEQ ID NO: 685498 - DNA, 83 bp, Homo sapiens
ggacaggataaactgttacgcatatatgacttgaacaaacctgaagcagaaaataattctgaggtaggggcctctggctatgg

SEQ ID NO: 685499 - DNA, 75 bp, Homo sapiens
tcatattctgaccagattcagcaacctctaactaaccagatctcacattcttgaaggtggcattgaagagcacta

SEQ ID NO: 685500 - DNA, 80 bp, Homo sapiens
acatggcaagacggtggtgggccaaatcactgtggacatgattgcacagccaggagcagcatatttttatgttgaacttg

SEQ ID NO: 685501 - DNA, 100 bp, Homo sapiens
cgcgtccgccccgcgagcacagagcctcgcctttgccgatccgccgcccgtccacacccgccgccagctcacccgacgactgccacccatcaaagaagct

SEQ ID NO: 685502 - DNA, 82 bp, Homo sapiens
gccgcagctggcgctggcggcagcccatccttgagagagctgcgggcacggatggctcattgctatggacagtgctatcacc

SEQ ID NO: 685503 - DNA, 100 bp, Homo sapiens
ccggatgttcggtgcagctgccagatccgctgatctagtgcttctcgaaaaaaaccttcaggcggcccatgggggaactgatcacagccgcacatgagct

SEQ ID NO: 685504 - DNA, 83 bp, Homo sapiens
cccagatccatttacactttacaacggagtctcactgtgttgcccaggctggagtgcagtggcgccatcttggctcactgcag

SEQ ID NO: 685505 - DNA, 75 bp, Homo sapiens
caagcagcaagtgcgcggttggggccactgcgaggccgttttagggagaagaaatgggtgaccgttggtgacaca

SEQ ID NO: 685506 - DNA, 100 bp, Homo sapiens
gctgggagctgtagaccggagctgttcctgttcggccatcttggctcctccctgccagatagctcttattttgagcaaaagctgatgaagcattgaaagc

SEQ ID NO: 685507 - DNA, 75 bp, Homo sapiens
ggaaggtcttggagcgaagagctcggaccaagcgctcagaattatatccagatcgagagacagaagattctgaaa

SEQ ID NO: 685508 - DNA, 100 bp, Homo sapiens
ccatgggcctccttgtggtcctgctcgttggaggctgtgcagcagaaggcatacccagagtatcttatcacttaccagatcatgaagccagaagcccctt

SEQ ID NO: 685509 - DNA, 73 bp, Homo sapiens
agcgtgaccgagagcgcgaatatcgtcatcgttagaaggttctccagagagcgggcatccagagaggagtcct

SEQ ID NO: 685510 - DNA, 98 bp, Homo sapiens
gccggtagacttaggtctgttagaggaagacgacgagtttgaagagttccctgccgaagggaagctatgcgaaattatttaaaagagcgaggggatca

SEQ ID NO: 685511 - DNA, 90 bp, Homo sapiens
cacgcggcgatatggaagaggagggcaagaagggcaagaaggtggcgcctggactctcgccctcagagggaggcccgtcccacggtctgt

SEQ ID NO: 685512 - DNA, 98 bp, Homo sapiens
tgtcaaaaagcctaaaagcatgcagtgcaaagtgatacttctcgatggatcagaatatacctgtgatgtagaggtgctgctggtgagtagcagccggt

SEQ ID NO: 685513 - DNA, 75 bp, Homo sapiens
ctgtattgcagaacagcctcagcctgagtggcaaaattctattcagaagaatgcaggccttgcttttatcgaact

SEQ ID NO: 685514 - DNA, 74 bp, Homo sapiens
gccgacccgcagcgcgagaagctcaagcaggagcttttcgccttcaacaaggtcaaaatgcagatcttcgtgaa

SEQ ID NO: 685515 - DNA, 51 bp, Homo sapiens
acactgagattataagggagccaggtacttccccattatcctggtttcggg

SEQ ID NO: 685516 - DNA, 100 bp, Homo sapiens
tcagaaagaaaacctcaggaaattctacaagctgaaggaagaggatcaccttccaagacaaaacagtcttcatgggggaaaaatgacgcttgtccagcag

SEQ ID NO: 685517 - DNA, 82 bp, Homo sapiens
tggaaagctttaggagttcacagtactggatacacgtctgtttaactacgcaaaaggtaatgctggcatggcttactgggac

SEQ ID NO: 685518 - DNA, 74 bp, Homo sapiens
gggtctcggcccgcaccaggagcggaacaagagagaagatgactgaggaggaggtggagaccgttctggcagga

SEQ ID NO: 685519 - DNA, 50 bp, Homo sapiens
gaaggccttgactacggaggggttgccagcaacacagtcactcctggcgg

SEQ ID NO: 685520 - DNA, 75 bp, Homo sapiens
ggaaacctgtgatccattctcattaaataaatctctgggattaacctccatttcagctaatcatgggagagatta

SEQ ID NO: 685521 - DNA, 100 bp, Homo sapiens
aatgaatcagttcaaagaaagaatgcagtctttctatacctggaaatggagttgttttttccttcaagtggaggttgtgggccggcaaacactgctaaat

SEQ ID NO: 685522 - DNA, 100 bp, Homo sapiens
ggccagaatgtgaatgtattgactggagtgagagaagaaatgctgtggcatctgttgtcgcaggtatattggccactggagaatgcacggcaaccgtggg

SEQ ID NO: 685523 - DNA, 80 bp, Homo sapiens
ccgccgctgccgctgccgctgccgcacctccgtagctgactcggccctgggctgcatcttgtacctgctgtgcttccggc

SEQ ID NO: 685524 - DNA, 50 bp, Homo sapiens
ctccccgcccgcggcccgtgcagggagaagaaatgggtgaccgttggtga

SEQ ID NO: 685525 - DNA, 101 bp, Homo sapiens
gcccttcagaaagtgaagaagtctgtaaaagcaatatataattctggtcaagggctaccctgagaggaatctacatgcagagaagttcaggagactgaact

SEQ ID NO: 685526 - DNA, 50 bp, Homo sapiens
cccagagatgaccccttatgaaggtgaaaggtgtagcagtcactcggcct

SEQ ID NO: 685527 - DNA, 83 bp, Homo sapiens
tctgcggaagtgcagctgcctcagttcttagcgcagcttcgcaaacctgggtatacttcatgtgacaaagaaaaaagtatttg

SEQ ID NO: 685528 - DNA, 95 bp, Homo sapiens
aaaaacatcttgatctggagaaaaactggatgttggtagaaaaagcaagagtttgttatatagcagtgtggatgaggtcaccattgtcaacattt

SEQ ID NO: 685529 - DNA, 83 bp, Homo sapiens
tatctggagtgaggtggccggttcttggtgggatctgagcaggtaactaggatttctacctcaaccgcgagacctatgcaagg

SEQ ID NO: 685530 - DNA, 51 bp, Homo sapiens
cgatgtcgggaaggtcactgaacctatctttaagcaagcgacaatgaaggc

SEQ ID NO: 685531 - DNA, 100 bp, Homo sapiens
cgggaagatggcggcgccgctcatccccctctcccagcaggagtgctacctggagggtgaccagacgagcctgtaccacgcagccaaggggctgatgacc

SEQ ID NO: 685532 - DNA, 75 bp, Homo sapiens
aagctcctacttccagaaaaagtgctcctgggactccaggataccaggtcttgatgcagaactttattatgtgag

SEQ ID NO: 685533 - DNA, 74 bp, Homo sapiens
atgacattaacagacaagacacttttcagaaagacaggagtctcgctctcagtcaaaatctccaacgggaactc

SEQ ID NO: 685534 - DNA, 51 bp, Homo sapiens
ttccagcttcggaacaagagaccctgtgtgaccgcaacaagggaaaacatg

SEQ ID NO: 685535 - DNA, 51 bp, Homo sapiens
gcccttgggccgcgtctcctttgagggctgtgcttaagagtaaaacttcag

SEQ ID NO: 685536 - DNA, 87 bp, Homo sapiens
ttttgactacaattctcaacaacagcctccaggatcactaagttcaaggcccctttggaacctaaggagccctgccgaggagctgaa

SEQ ID NO: 685537 - DNA, 106 bp, Homo sapiens
agcgcccggcggaaaaccgaagttggaagtgtctcttagcagcgcgcggagaagaacggggagccagttacaggcccaaaaactgcgactggcatacacaaggagc

SEQ ID NO: 685538 - DNA, 76 bp, Homo sapiens
gacgatgcctgagcaggagagacagatcacagccagagaaggggccagtcggaaactccatgttcatgcatgtctt

SEQ ID NO: 685539 - DNA, 96 bp, Homo sapiens
ccgacgaggaagttttctactgtaaagtcaccaacgagatcttccgccactacgaccaccaattaccctagttatgggcccatcatctcacctgga

SEQ ID NO: 685540 - DNA, 100 bp, Homo sapiens
gaataattcaccttgatctaaaacttatagctgatgtaggcctagtaggtgtgtttcctgtaacaaatcgttcaagaaactctggtcccttcatgaacat

SEQ ID NO: 685541 - DNA, 82 bp, Homo sapiens
gcggtggtggtggcggccgctggccagttatacgctcaacggcaagaaagtggaagttgccgtcaaacagatcatcgctgga

SEQ ID NO: 685542 - DNA, 90 bp, Homo sapiens
ttgcgaaccagttcagcagtgcctcaggtgattggcatgcactacttctctcccgtggacaagatgcagctgctggagattatcacgacc

SEQ ID NO: 685543 - DNA, 100 bp, Homo sapiens
ccagcgcgcgggcgcgcggctggagccggcgccgggcacggcatcgggggcctggactgcacggcccggcagcagcgtagccttccccagctgcgggccc

SEQ ID NO: 685544 - DNA, 100 bp, Homo sapiens
tatgaagatgtgatgcaggagaccttcaaaaacctggtttgtctaggttcaccaggctggtttaacctgcgattattcagaacttcctcaccatatcagc

SEQ ID NO: 685545 - DNA, 75 bp, Homo sapiens
tgactgcagttcttctgagtgtgctgctataccagtggatcctgtgccaggccgtcatggaaatgatgagtcaga

SEQ ID NO: 685546 - DNA, 90 bp, Homo sapiens
ggacacccctgaagccgagaaatggacacaactcagatgggaagttcatcgcccgggcacagcggatagagtacgactgtgaactagttc

SEQ ID NO: 685547 - DNA, 97 bp, Homo sapiens
tgggccctgggccagaggcagaaaacggacggaagaaaaggtctggccgatgaagactggcccatttgcagagcactccaaccagctgtggaacatc

SEQ ID NO: 685548 - DNA, 74 bp, Homo sapiens
aacatatgaggattttgataccaggatacttgaggccatgggtatcaatgatctgctgtcctttgatttcatgg

SEQ ID NO: 685549 - DNA, 50 bp, Homo sapiens
ccgggagcagcaccgcggggccagagccagtcttggtgctctgtgttcac

SEQ ID NO: 685550 - DNA, 100 bp, Homo sapiens
gttctcctgagggaagaggagtggagtaggggggacgcggcggcggcgttgacaatggcttttggattccgtgcctcccactgccattagtcacttcaaa

SEQ ID NO: 685551 - DNA, 76 bp, Homo sapiens
ggaagtggttggaaatggcacctatggacaagtctataaggaagggatgagaccatgcagcctgcgaaaccatcct

SEQ ID NO: 685552 - DNA, 74 bp, Homo sapiens
ttcttttgtgcaagatgagcctcaagtgcttctgcattacaccaacacatatctctttatggtacaagctcgag

SEQ ID NO: 685553 - DNA, 75 bp, Homo sapiens
ggtcgagcagaacgtgtagccgcgtcccctccagtccgctccgggcagttccagggtctccctccactgctgtag

SEQ ID NO: 685554 - DNA, 100 bp, Homo sapiens
ggaccgtttttaaatcacaggggcgtgtgtcagcctgccctaggacttcatgtctatatatttccccattcactggtgctggagaatctggtaaaagcac

SEQ ID NO: 685555 - DNA, 88 bp, Homo sapiens
ccgtcatcaccatcaccttcaatccgctctactggaatgtggatggagagcaatacatcatcatctttggagaatttagcgacggcgc

SEQ ID NO: 685556 - DNA, 82 bp, Homo sapiens
aagaccccaggcaggggtggcgccaaagacctgatggccaaaagaaaggaagaaaatttttcctctcctaaaaatgccaaaa

SEQ ID NO: 685557 - DNA, 75 bp, Homo sapiens
ccttcagtggactgagaggggctgccgacaggacatggatttgattgacatactttggaggcaagatatagatct

SEQ ID NO: 685558 - DNA, 71 bp, Homo sapiens
tggattcgttactgctttgcaacgcgcacctaactccagctttgtgacaacaaactgtgctctgcagtttt

SEQ ID NO: 685559 - DNA, 100 bp, Homo sapiens
ctaaacttcaccaaataatagctgtttgtattttggctgctgcaggagccattttaggatcttaagattgaaagtgatgttcaagaaccaactgaaccag

SEQ ID NO: 685560 - DNA, 80 bp, Homo sapiens
atgcaatgttcttaggatcctcctcccgtccttctcatccttcctacgtcaaaagctacctcctcccggataagcagagc

SEQ ID NO: 685561 - DNA, 100 bp, Homo sapiens
ccttggcctcctcctgctgctactgtgtccagcgcagttcaacctggtgtgtgctgactcctggaagctggacctctttcagtcctgtttgaatgcgggc

SEQ ID NO: 685562 - DNA, 103 bp, Homo sapiens
agcatctgtgaactggctttgcaacctcctgtggtctctaaggaaaccctagagatgttctcaggacctctggtcctcaatcgagttcctctacgaagaacac

SEQ ID NO: 685563 - DNA, 100 bp, Homo sapiens
acaaagagcttgctccctacgatgagaactggttctacacgcgagctgttagttgaatccatggacatgaaacccacagatatagagggttggcccggtg

SEQ ID NO: 685564 - DNA, 73 bp, Homo sapiens
ctctttcgaatcaagttgtccccaacagtgggaggactggaatgaaattgaccccattaaaaagaaagacctt

SEQ ID NO: 685565 - DNA, 51 bp, Homo sapiens
gcttcgagaaaggaaacctgtgagagaatgtaactggtcactacatttccc

SEQ ID NO: 685566 - DNA, 100 bp, Homo sapiens
gggaggacaactgcaacctgtaccacctgaatgcgactctccacagtgccctagaagatgaggagcgggaaggcctcctgcaccctggagaccgtgtggg

SEQ ID NO: 685567 - DNA, 83 bp, Homo sapiens
gacgaatcgttaaacatctgaaagggtcagacctgcctagagctggaacgttacctccagagcgagccctgctatgtttcagc

SEQ ID NO: 685568 - DNA, 50 bp, Homo sapiens
ggaaccgggaccgccagcgcaggagggcattttggaagtgtcaaaggcca

SEQ ID NO: 685569 - DNA, 100 bp, Homo sapiens
gaaggaacgaggcaaggagctaaagcagcgtgcgttcagccctggggtgtttccaagccaggaccctctagatcgagcagatttcaatgctgttgagtat

SEQ ID NO: 685570 - DNA, 101 bp, Homo sapiens
acgtaggtactgtgtgaggcccaacagcggaatcatcgatgcaggggcctcaattaatgtatctgatgtggaattagaagaagctattagaagaagtcttg

SEQ ID NO: 685571 - DNA, 75 bp, Homo sapiens
cttcgctccggtcctcggatcccgagcgcggggaggcagaccgatctcacattcttgaaggtggcattgaagagc

SEQ ID NO: 685572 - DNA, 80 bp, Homo sapiens
cagcaccgcagatgttgtcaaggtggcctaccaggaggccaggggtgtcgccatgtcttctcaagtcttaggattgcagc

SEQ ID NO: 685573 - DNA, 101 bp, Homo sapiens
ttcagagagaggaagccgaaaacaccctgcaatctttcagacaggtctatgttaacaatgaatgggcaaccagtgttggggaaggagggagctttggagaa

SEQ ID NO: 685574 - DNA, 75 bp, Homo sapiens
gccgcccctgccccgagtctgttccccgccgcccagtatcctgtggagcacccagacaaattcctgaagtttggc

SEQ ID NO: 685575 - DNA, 100 bp, Homo sapiens
tgggaaccttctctctttcgctctttggactaatgggagttgcttttggaatgaatttggaatcttcccttgaagaggttcgaatgcaagcactgaaatg

SEQ ID NO: 685576 - DNA, 73 bp, Homo sapiens
acagaatatgccaaaaatggagaaatttttggctgtgattctaggattgaaaaagaggaaatgattccaaagc

SEQ ID NO: 685577 - DNA, 82 bp, Homo sapiens
cctggaggcagccggtccaacatgatatcatcaagttgaatcgaaaggaagggaagaagcagaattttccaagactaaatag

SEQ ID NO: 685578 - DNA, 100 bp, Homo sapiens
gtcctttggtcccaggcatcatcacagttattgacaccgaaaccgttggagagggccaggatagagattccttctgccatcagatgtctttctgcttgac

SEQ ID NO: 685579 - DNA, 80 bp, Homo sapiens
cgattcgtgaccctcagcgccggtgcatgtcgatttggagtcattcgttgcccagtttgcagccaagaatgtgcagagag

SEQ ID NO: 685580 - DNA, 75 bp, Homo sapiens
gttgggactacactaaaccatatttgggaagacgaggtgagtgctccagttgtaacatctaccactcaggaaaag

SEQ ID NO: 685581 - DNA, 101 bp, Homo sapiens
cggcaaccgagggacccgcgtccagatgctggacgagaaccaccacctgatccagtgcatcctggagtaccagagcaagggcaagacggccgagtgcacgc

SEQ ID NO: 685582 - DNA, 100 bp, Homo sapiens
gtagctctactggctgctgtcaccctcctgggagtcctgctgcaaggggaggatactgaggcacacagaggggagtcaccagccagaggatgcatagcct

SEQ ID NO: 685583 - DNA, 100 bp, Homo sapiens
caaagaagatgcctcgaactaaacaaattcatcccagaaatctaagagacccagaacagaatgaagttgatggcagacaactatgatgatgaccatcacc

SEQ ID NO: 685584 - DNA, 104 bp, Homo sapiens
cctggagcctcagttggaagcagccgatccagcctgcggagcctgtggggcaggttattcagcttctcaaggctggaaaagcgaaggaagtttcctacaatgca

SEQ ID NO: 685585 - DNA, 100 bp, Homo sapiens
cttccgagttgcgatgctgtacttctctttgttttgggcggctcggcgttgcatgatgggagaaatagtctactttccggtagcggtgccagggcagtgg

SEQ ID NO: 685586 - DNA, 75 bp, Homo sapiens
agaggataaaacagagactatagattacaaggacccgtgtaaagccgatgttagtaggcaggaagaggcggaggg

SEQ ID NO: 685587 - DNA, 121 bp, Homo sapiens
gacgaggaccagtgggaggatggagcagaggacattctagagaaaggctctgtgaagctggtgaccccggaggggtccccagtccggggacttcgcacacctgagatccccatgaccgaag

SEQ ID NO: 685588 - DNA, 75 bp, Homo sapiens
ctggaatgtgttcaagtcttggcagagccagcatgcatatgcgctagaacttctatttgatcagttgcatgaagg

SEQ ID NO: 685589 - DNA, 82 bp, Homo sapiens
gggacccaggagtttcctgtgtccagcgctgccggagccgcctgaggatggcaatgattcagatgaattcatgtaaaaggag

SEQ ID NO: 685590 - DNA, 80 bp, Homo sapiens
gtgatgctggagaattataggaacctggtctccctgggtggctgggagcccgagccccacacctgccgggcagcaggtgc

SEQ ID NO: 685591 - DNA, 75 bp, Homo sapiens
cggctcatggcatcaagtggcatccatcataagtggaagagaaagccaatacccacctcctcttgggcatgtgct

SEQ ID NO: 685592 - DNA, 75 bp, Homo sapiens
tgttcagttgattatgccagccagatgcaggactatacaggctccaacccaagttccagtggttgtgtctcctag

SEQ ID NO: 685593 - DNA, 97 bp, Homo sapiens
ttctcagtcatctactgacagctacagctcaggtcttgctcagtgtgcagaactctgctggcagctgagaggggaagccggaaagaggcaagttcct

SEQ ID NO: 685594 - DNA, 75 bp, Homo sapiens
aactcatatatttaacccccctccaaaaagtcactcctggaagcaaggcggctctagctaatttatgtattggag

SEQ ID NO: 685595 - DNA, 100 bp, Homo sapiens
ttgagcaggctacagtccactccagcatgtccaaaagaaactcttccttcaaaacctgtgaagaaagagaaggaacagaggacacgtcacttactcacag

SEQ ID NO: 685596 - DNA, 107 bp, Homo sapiens
tcctgggtggcatggcgctcctgctcctccaggcgctgcccagccccttgtcagccagggctgaacccccgcaggagagccagtgtaactccttcaagactggagtg

SEQ ID NO: 685597 - DNA, 100 bp, Homo sapiens
gccgccgccgccccctcctgaggaggacccagagcaggacagcggcccggaggacctgcctctcgtcaggctctccccggaggctcagccccctctgctc

SEQ ID NO: 685598 - DNA, 100 bp, Homo sapiens
cggacagcatcagcctcgagctgcgcaagcccgacggcaccctcgtctccttcaccgccgacttcaagaaggtggagctggccctgctacagcgctccta

SEQ ID NO: 685599 - DNA, 100 bp, Homo sapiens
ttcccaccttgtcagaaagaagcctccttctgaagaaataaaaacaggtgaggatgaagatgaggaagataatgatgctctactgaaggaaaatgaaagt

SEQ ID NO: 685600 - DNA, 75 bp, Homo sapiens
gtctggtcaggcgtcaggctagtccgacgaagagtgggagtctaccatggctcaagaatctcccaaaaattcagc

SEQ ID NO: 685601 - DNA, 100 bp, Homo sapiens
gctcttcaaagagcagcggaaccggcctccggtgtggctgtctctgatggtgtcatcaaggtgttcaacgacatgaaggtgcgtaagtcttcaacgccag

SEQ ID NO: 685602 - DNA, 118 bp, Homo sapiens
atgggcaaggaggttggcttcttcatcatccgggccagccagagctccccaggggacttctccatctctgtcagaaggagaacttatggattgtgatggaaaatcagaatctagtcct

SEQ ID NO: 685603 - DNA, 100 bp, Homo sapiens
gatgacctgccgtgccgaaggcttcccgcccccagccatcgagtggcagagagatgggcagcctgtctcttctcccaggctggagtgcaatggcaccatc

SEQ ID NO: 685604 - DNA, 76 bp, Homo sapiens
actctctgaagctgtgcaggctgcctgtatgaacattaaccaggtggtatttgttggaaatttcttgagaattaat

SEQ ID NO: 685605 - DNA, 99 bp, Homo sapiens
gagctccagccgaaggagaagggggggaatgggtactgttcaaaaaggaatgccccacaagtgttaccatggcaaaactggaagagtctacaatgttac

SEQ ID NO: 685606 - DNA, 74 bp, Homo sapiens
gccggcgctccaaggcccgcccgggagggccggggccgcgctcagtgctgggattacaagcgtgagctaccaca

SEQ ID NO: 685607 - DNA, 100 bp, Homo sapiens
gctgagattctgcggggagacaagttcatccccattttccaaggggacgacagcgtcgttattgggaaaatggagctggcgctggtgcctgtgagcgccc

SEQ ID NO: 685608 - DNA, 100 bp, Homo sapiens
acctcatccgggagagccagcggcagccagggacctacactttggctttaagaattaaggaagttcactggagtaaaatggaggcctcagtaatattacc

SEQ ID NO: 685609 - DNA, 109 bp, Homo sapiens
tttcgataaatctattcgaatctttcctgtagacaaaagtcgaagcagtaataaaagactagtggccttagtgcccatgcccagtgaccctccattcaatacccgaaga

SEQ ID NO: 685610 - DNA, 100 bp, Homo sapiens
ctggaactgtgtcattcaggactctgcaaattccctaaagtaggaggaaaaatgaccatgtccaagcgggctacattgagagacctcagctgattcgagc

SEQ ID NO: 685611 - DNA, 75 bp, Homo sapiens
gcacctttcggcttctgagacggcggcagcagcggcattcagataaacattgacgatcttgaggatgaccctgtg

SEQ ID NO: 685612 - DNA, 80 bp, Homo sapiens
gaagaacccgagtcgaagcgggaagatggctgcagacaagcctgcagcctgggttactaggtgtctttcagaagctgatt

SEQ ID NO: 685613 - DNA, 96 bp, Homo sapiens
accaacagatgaagacagatgcaccaacgaggaatctgaacctgtgatgttaagaaatcagtaaatattaaaaagaagatggatgcaagaaggatg

SEQ ID NO: 685614 - DNA, 75 bp, Homo sapiens
aggcgccccgcgcagctggctggcggagcatgagcgccccaggtctggctacctgcagtaaaggctaaaggcttg

SEQ ID NO: 685615 - DNA, 74 bp, Homo sapiens
gaaaatggggtgaggaagattttgaagacaatcgtcacttatacagggcctcggcttcacaggatggggctgcc

SEQ ID NO: 685616 - DNA, 98 bp, Homo sapiens
tgacatgtgtgggctgcaggtcctgcatccaatggatgctgcccagagatcgcagcatatcaaagaaaggacggttcttgttccagtatgacaactat

SEQ ID NO: 685617 - DNA, 51 bp, Homo sapiens
tctcgaggctgctaagagactaatgtgtgatccagtcttgggtgacaagtg

SEQ ID NO: 685618 - DNA, 100 bp, Homo sapiens
tactgttgccactgatattctgaaagcaccaccagaggatgacaatcgagaaattgccacatgctcctcttttgacttggactatgactttcaacgggac

SEQ ID NO: 685619 - DNA, 75 bp, Homo sapiens
gccgtggctctagcaggctccactaactggggctacgactctgatgggcagccaaggccacctttgatgccattt

SEQ ID NO: 685620 - DNA, 100 bp, Homo sapiens
cgccgcggccctgctgctcctggccctctgcttgcttgtccggcgcaccagcatgttggcagataaattgaacatgactccagaagaagctgaaaggtgg

SEQ ID NO: 685621 - DNA, 82 bp, Homo sapiens
cttcggtggactccttcggcagtccacccaccgccgccgcctcccaggcaccatcatgactccaagcggaggagatccgatg

SEQ ID NO: 685622 - DNA, 100 bp, Homo sapiens
gggaagagggcttcgtgccctgtgcacgtttgccacctagtgaccaaactgaaaaaatggagtgctggcatacattgggaattttcgcctgcttgcagag

SEQ ID NO: 685623 - DNA, 83 bp, Homo sapiens
cagaagcccattatggctgtaactggagatgacacagattggccggtcgactgaaagccccattgattttgtagtaactgaca

SEQ ID NO: 685624 - DNA, 75 bp, Homo sapiens
gtgaaattgcagtcaatgcattatggcctaaaacaggttatcaatagtctggctgtctatcgtcatcgtgagact

SEQ ID NO: 685625 - DNA, 75 bp, Homo sapiens
attatcggaccccgaggatcaggaaaaactatgatttggcaatgtggaggctccttggagattgttacttgctcc

SEQ ID NO: 685626 - DNA, 96 bp, Homo sapiens
cgtccgagcccttcctgaccccgtacctgctggggccggacaagaacctgaccgagagggaggacatggatttgattgacatactttggaggcaag

SEQ ID NO: 685627 - DNA, 98 bp, Homo sapiens
ccaacaaatccctcaacttgctaaaaatcaaggcactgcgtggacctgccagacacaggactctgcaaggagagcatcccgcgctggtactacaaccc

SEQ ID NO: 685628 - DNA, 59 bp, Homo sapiens
gagggcgtcgcggactctccccgcgatgatgccgaaccctgccatcagcatcactgaaa

SEQ ID NO: 685629 - DNA, 75 bp, Homo sapiens
tggtgctggccaagcgcaacggaggcgtggtctcctctgagcctccggcctccataagacccaaaacagatgaca

SEQ ID NO: 685630 - DNA, 101 bp, Homo sapiens
cgatgtgccaccgaggctgaggatgatggtagattgccagcatgtttggatgtaaccaagcagaaagatctcagtggattttataggcacctattaaatca

SEQ ID NO: 685631 - DNA, 75 bp, Homo sapiens
tcgagacaagcctggccaacatgattacaatgaaccaactcagcttcctgctgtttctcatagcgaccaccagag

SEQ ID NO: 685632 - DNA, 75 bp, Homo sapiens
ttccgatttaaagctgagctgcgaggaaaatggcggcgggagctgtttgcagacaaggtcccaaagacagcaggt

SEQ ID NO: 685633 - DNA, 90 bp, Homo sapiens
tggaattttgccgatttcatgactaaccagttgtaaacaggaacatcgataagtagtgtaaaaacttgcacaatgaaatccgaagccaag

SEQ ID NO: 685634 - DNA, 75 bp, Homo sapiens
ggacactgacaactctgagggaggtctgtttctgtcgactgtggaccacttatgtgcgatccgtggaccacttgc

SEQ ID NO: 685635 - DNA, 74 bp, Homo sapiens
agagactgtggagtttgatgttgttgaaggagaaaagattctgctagcctaccaagaatccaagacacattttg

SEQ ID NO: 685636 - DNA, 100 bp, Homo sapiens
gaaggaccccaactctggactgcccaaatttgtcctcatcaactgggtgggcgaagatgtgcctgatgcccgcaagtgcgcttgtgccagccacgtggct

SEQ ID NO: 685637 - DNA, 100 bp, Homo sapiens
ctgctgtcgccgctgctgggagatgggcctactcgcccgccaccctgcgctgccgccgctctgaggagttaaaggagggtttgcatttgtgtatgaagct

SEQ ID NO: 685638 - DNA, 100 bp, Homo sapiens
ttcaaggggagccagtttgccattcgctggggctttatccctcttgtgatttacctggaatttcgctaaggagtttgtgatcagtgatcggaaggagctg

SEQ ID NO: 685639 - DNA, 95 bp, Homo sapiens
atcccttgctcccatccctgcagcatgaacaagggttacgactcactgattaaaaagagggactttttcaaatactttgcacttttgattgtgta

SEQ ID NO: 685640 - DNA, 75 bp, Homo sapiens
catgtctgcgagccaggattcccgtttgatgaaggccggaacaactttgaaggggaggtcaccaaggagaacctg

SEQ ID NO: 685641 - DNA, 100 bp, Homo sapiens
gggaaacttggggagcttgttgatggtctggtggtgccttctgctctggtcacccgcttacaaacacgcagatggcaagaagattgatggcaggagggtc

SEQ ID NO: 685642 - DNA, 75 bp, Homo sapiens
cctgtccaggagctggcatgacgtgcaggtctctagcgcgttttctgtctcaactggtctctgacaagcctctga

SEQ ID NO: 685643 - DNA, 96 bp, Homo sapiens
actcagatgacgtccgtgatgagaaggtcttggctgctgtgtacaaggccctgagtgaccatcatgtatacctggaggggaccctgctcaagccca

SEQ ID NO: 685644 - DNA, 98 bp, Homo sapiens
ttatgatttactggatgaactgataaaacccaccagtctaggcacagatagatcattatctaggacttgcaaataagaatgttaaagatgctatggct

SEQ ID NO: 685645 - DNA, 101 bp, Homo sapiens
ggtgaaaacaatgaagattatttacaatgctaccctgctttttctggtgtcctgaacctggaagttgtgctttttaagaatacagtcgctttgaatcgaag

SEQ ID NO: 685646 - DNA, 100 bp, Homo sapiens
aagaactggaggctgagttcttggctttggtcgggggccagcccccagccctggagaagctcaaaggcaaagggtgttgattgcctttgctcagtatctt

SEQ ID NO: 685647 - DNA, 82 bp, Homo sapiens
tcctggcctgggcgctccggtggcggcggagatgaaggtcaccgtgtccaaagggggcgaccgggacagtgacgacgacagc

SEQ ID NO: 685648 - DNA, 100 bp, Homo sapiens
tcatgaattccggagttgccatgaaatatggaaacgactcctcggccgagctgagtgagtctttcccagggaactccgatgaagtgttccaacaaaatga

SEQ ID NO: 685649 - DNA, 98 bp, Homo sapiens
aaatatcggagaataatttctttctcgctgatcgcctaacttctactgacgaagcttggaagttgcagaaggtagctacagcaagctgggtagcaggc

SEQ ID NO: 685650 - DNA, 90 bp, Homo sapiens
gcgagagtgggcgagaacgtccactgcgggccggcgaaagctgcttatgttcctgaggaagaattgaaggcagcagaaatagatgaagag

SEQ ID NO: 685651 - DNA, 91 bp, Homo sapiens
cctgcagtacctgcagaaggtctctggagacatcttcagcaggagccttcacgtaaatgggtccagtcatgcctcccagtaagaagccaga

SEQ ID NO: 685652 - DNA, 50 bp, Homo sapiens
gcaccggctcacggaaaatgtctataaggattatatctgtccaagatgcg

SEQ ID NO: 685653 - DNA, 101 bp, Homo sapiens
aagatagggttaaataaggagcgactcttacatgatgaacaaagtactgatgacaggagtctactcttcatcttgtgttgagacttcgtggtggtgctaag

SEQ ID NO: 685654 - DNA, 98 bp, Homo sapiens
gtctgagtctgtggaatgcaagtctgccgatgaagatgtcattaagattccttggtgttactcagttttcgcctacacatgccagaaaggcatttcct

SEQ ID NO: 685655 - DNA, 74 bp, Homo sapiens
actcacaggagaccaaggaatcccagaaagtggagttgagtgaatccagtataaaggtgcacatgtaaagccag

SEQ ID NO: 685656 - DNA, 74 bp, Homo sapiens
ctactttcatccttaggaatgttatcgaaggacaaggtctctctgaagaggctatcatggagctgaacctgccg

SEQ ID NO: 685657 - DNA, 74 bp, Homo sapiens
gagcacaaagaattatggtaaaaccatccttacaaagcctcttgttgctgtaccacatagaattcactcaacaa

SEQ ID NO: 685658 - DNA, 100 bp, Homo sapiens
atttgatgaagatgtcttttgaaaggtgtactgcaaggaacaaaatgtttgtaaattctccttttaccaagttgtcatgggaggccagccgcctgctggc

SEQ ID NO: 685659 - DNA, 74 bp, Homo sapiens
cgaattggagaaaaagttcagtgggaagcatgtcgtctttatcgctcaggaaaatcaggaaaatgtttccaacc

SEQ ID NO: 685660 - DNA, 50 bp, Homo sapiens
aaatgaaaatgtttggcatgtgctgctcttggtgctggacaggcatcttt

SEQ ID NO: 685661 - DNA, 88 bp, Homo sapiens
cgtacatcggcgagggcgcctacggcatggtgtgagttgaagaggacttggaccagattctgaacctgggagctgagcccaaacccaa

SEQ ID NO: 685662 - DNA, 51 bp, Homo sapiens
cattgtttgtcaccacaaaaaggacaggcagctgttgtgctgtgtatggac

SEQ ID NO: 685663 - DNA, 100 bp, Homo sapiens
gaccttctggagcccctacctcggagcccgagggaggagaaagcggcagccgctggaggtcctcagaatggttggaatgaccctccagctttgaacagag

SEQ ID NO: 685664 - DNA, 100 bp, Homo sapiens
acgcagccctggagccgaggccccccgacggcggaggcgcccgcgggtcccctacagccaagaaatgacatcagatgtaccatcactgggtccagccatt

SEQ ID NO: 685665 - DNA, 82 bp, Homo sapiens
ggatttcaacctgaaagtggaggctgcgaaaatagatgatatcatcaagttgaatcgaaaggaagggaagaagcagaatttt

SEQ ID NO: 685666 - DNA, 75 bp, Homo sapiens
cagggatcagcaaacttgctgtaaagagccaggataaccctattggcaactgggatggaagatttgatggagtgc

SEQ ID NO: 685667 - DNA, 95 bp, Homo sapiens
ctgggagagaggtacctctccttttccctctccctttccctaagttacttatgaaatgaagacaaagaaaaggtttggtaataagaggagaagcc

SEQ ID NO: 685668 - DNA, 75 bp, Homo sapiens
gactttgaaccactttccaccaccgcactcatcctcgaggacagaccagctgttcctctgaacaacagggagaat

SEQ ID NO: 685669 - DNA, 74 bp, Homo sapiens
agggctccaggcatccggtcctggtccctgctggttgacctgcctagagctggaacgttacctccagagcgagc

SEQ ID NO: 685670 - DNA, 83 bp, Homo sapiens
cggaaccagacgatgagacagagttgcgaccgcgcggcagattccttttggttccaagtccaatatggcaactctaaaggatc

SEQ ID NO: 685671 - DNA, 75 bp, Homo sapiens
atccagcctgcggagcctgtggggcaggctttggaactgcgacataactagcgatggctgctgcgatctcacaaa

SEQ ID NO: 685672 - DNA, 76 bp, Homo sapiens
cttcaaggataagggcgacagcaacagctctgccggctggaagaacaggccgcccgcctgaagaaactacaagagc

SEQ ID NO: 685673 - DNA, 75 bp, Homo sapiens
gaataccggctctcagcggctgagccatgtggctagaaatcctcctcacttcagtgctgggctttgccatctact

SEQ ID NO: 685674 - DNA, 149 bp, Homo sapiens
attaacagaagcactggaaaatgctggaattttctatgaagcacaatacaaagaagtaaaagtggtggctaataatcctcactatggatgggctcattgaggacattaagcatcggcggtattatgagaagccatgccgccggcgacag

SEQ ID NO: 685675 - DNA, 75 bp, Homo sapiens
ccgcgctccaaccgcctcctcctcctcagtaacgcggaaatcaatgtggactgaacataaatcacctgatggaag

SEQ ID NO: 685676 - DNA, 83 bp, Homo sapiens
ggcttttccacccctccaggccggctctccatgatgtccttcatcctcaacgccctcacctgatcttggccctgattgcattc

SEQ ID NO: 685677 - DNA, 75 bp, Homo sapiens
caaagtcatttcccaggctggcggagaatttgagtatgagcacagtggaagaggattctgacacagtaacagtag

SEQ ID NO: 685678 - DNA, 75 bp, Homo sapiens
cagggagaagggataaccctacacccagaccccaggctggtacagaaggcagagctggtacgactgtcccagaca

SEQ ID NO: 685679 - DNA, 51 bp, Homo sapiens
ggccaaccctaaagccatcaagatagcagggtctcactctgttgctcaggc

SEQ ID NO: 685680 - DNA, 55 bp, Homo sapiens
gtcgccctcaaggccatgatcaaaacggagtgcatccgccccaacccttttcccc

SEQ ID NO: 685681 - DNA, 82 bp, Homo sapiens
ccgggcaccgcggtgctgctggtcacggccaacgtgggctcgctcttcgacgacgtgagaagccctaccactgcaactggga

SEQ ID NO: 685682 - DNA, 100 bp, Homo sapiens
aggacctggcgggagacttttctggataatcttcgtgcggctgggctgtgtgtagaccaggtatgactcttatgagtcctgcgactcgagggccgtcctg

SEQ ID NO: 685683 - DNA, 74 bp, Homo sapiens
tgttcgatatatacagagacagtagggtgctggagaatctggtaaaagcaccattgtgaagcagatgaggatcc

SEQ ID NO: 685684 - DNA, 75 bp, Homo sapiens
gaaatgcttacacacagaaatgggtggcatggagaaatcgttgtcaaaacagagatgtccgtcagtatgttcaag

SEQ ID NO: 685685 - DNA, 51 bp, Homo sapiens
gctgagtcctgctttaaggaagcaggtacaggtttgcagattccgccagca

SEQ ID NO: 685686 - DNA, 74 bp, Homo sapiens
ccttcttacagagttggaaaaccgaaagcagagacagcagtgtgttagatgatgaagatagcaacaacatcaca

SEQ ID NO: 685687 - DNA, 82 bp, Homo sapiens
cagccgcggcggcagcagcagtgagagagtttatgtggccgaggcagacaagtggaattaggccttgctgcaggggacttca

SEQ ID NO: 685688 - DNA, 100 bp, Homo sapiens
cagcggggccgtgaggagcagccagcgggaggcggcggcgagtcggaaaggccgagggggacggcaagatgcacatcaccctctgtgacttcatcgtgcc

SEQ ID NO: 685689 - DNA, 75 bp, Homo sapiens
aaaagaccaatccgagaagttcctgttaccaaactcatagacttgattagtgatgatgaaccaggttatgacctt

SEQ ID NO: 685690 - DNA, 93 bp, Homo sapiens
tggacgcctttcagaaagtggctgacatggccaccaacacacgtggattacttccttaggatagattgccagaagtggagttactgggtcaga

SEQ ID NO: 685691 - DNA, 75 bp, Homo sapiens
ggagctctgaccgaggcgcctcgctggggcggggaccttgccttgcccggggtgttcttcttttgggagacgcat

SEQ ID NO: 685692 - DNA, 98 bp, Homo sapiens
ctcatccatgtgaccatgaggaaatgagagaaatgcttacacacagaaatggttggttcatgtgatcctggttaatggaacataagtgagattttatg

SEQ ID NO: 685693 - DNA, 96 bp, Homo sapiens
tgcaagcactgaagagctgaggaaccctgacttccagaaaaccagtctgggtaaaatcacaggtctaggcgttttacactgagattctccactgcc

SEQ ID NO: 685694 - DNA, 97 bp, Homo sapiens
cctgggacaccgcggaagtcgggaaatggtgtcatggagaaactccagctgggcccagagattctgcagcgggaaaatccaaggcttatttatgcca

SEQ ID NO: 685695 - DNA, 90 bp, Homo sapiens
aagagatcaaagtgaagatcatcccgccacagctttaagtgctgtggggctgctaactacacagattgggagaaaatcccttccatgtcg

SEQ ID NO: 685696 - DNA, 100 bp, Homo sapiens
gcaaaatccgggagcacttggagaagaagggaccccaggtcacaagctacctaactaagaagtttgctgaactacgcagccccaatgagttcaaggtgta

SEQ ID NO: 685697 - DNA, 98 bp, Homo sapiens
tttcaacatcttgaagccttatatgaagattttcaacaagagtgtgaacatcatgcacgctcgggacgtgtacgaggaggccatccggacagtgatga

SEQ ID NO: 685698 - DNA, 75 bp, Homo sapiens
tccttctccactttcgccagcccgtgccgcgagcgcggcctgcaggagctcttttgaaacagatggtcaccatgt

SEQ ID NO: 685699 - DNA, 100 bp, Homo sapiens
gacaaaagatcctggctaactgttcttctccctaccagggatcgcttacacctgagacgaactacagaacagcacgtaccagaggtggaagtccaagtca

SEQ ID NO: 685700 - DNA, 75 bp, Homo sapiens
cacagataatgaagactttccatcaagtcaagagaatccatcccattaaatgacctgaagtcagaagtatcacca

SEQ ID NO: 685701 - DNA, 103 bp, Homo sapiens
cctgaaccggcacctgcacacctggatccaggataacggaggctggctctattaccaggttttaaacttcgccatgatcgtgtcttctgcactcatgatatgg

SEQ ID NO: 685702 - DNA, 50 bp, Homo sapiens
atctgtgcgtttcagcggcgacacggcaaaacaacgagtggatgagaaac

SEQ ID NO: 685703 - DNA, 74 bp, Homo sapiens
gcaactcccagctcaatgcaatggtttcagaggtgccgggaagtctgagccttcgccctcctgctctccctcca

SEQ ID NO: 685704 - DNA, 51 bp, Homo sapiens
cttctcaaatgccttctcatccccacataatgccacagtggagctatcctt

SEQ ID NO: 685705 - DNA, 75 bp, Homo sapiens
cttccaacaagatgtgggcacaaaaactaccattcgcctgatgaactctcagctatccgtggtcctgaaccagtt

SEQ ID NO: 685706 - DNA, 51 bp, Homo sapiens
catctcaccaatttcaaatctgatgccagaattccagaaaagttcagttcg

SEQ ID NO: 685707 - DNA, 100 bp, Homo sapiens
aacgtctccgagtccctcaactctctacgctttgcctccaaggtatttacatgaggaatttccagagtcctggtcagttcccaggttggctgaaggcttt

SEQ ID NO: 685708 - DNA, 74 bp, Homo sapiens
tcttcgcctcccgaagggaaactagagactaaagctggacacccgcccgccgacatatgtagagtgtgtcggtc

SEQ ID NO: 685709 - DNA, 75 bp, Homo sapiens
ggacactgcaaatacctcacccttcaaagtaccagaaagaccacagcaagattctttcattcgtctcctcctagc

SEQ ID NO: 685710 - DNA, 97 bp, Homo sapiens
tcccaggaccctcttcgcgggcgattcgcgtagcctcaggtaaaataccatgaagattttgaaaaaacaaaggggagaggctttactcccgtcgtgg

SEQ ID NO: 685711 - DNA, 75 bp, Homo sapiens
gaagatcctggaggtggatctgaagaacggggggcttgtacatgacagctggaatagcctccagttgaggggctt

SEQ ID NO: 685712 - DNA, 87 bp, Homo sapiens
ctggatgaggcaggcaacctgttcgtgtggcgcttggctctggttaatggcaaaattcaatacggctacgtcaccaactccaaggtg

SEQ ID NO: 685713 - DNA, 119 bp, Homo sapiens
cagtgacgaagagaactgtctcctggtgaccgagcacccgcctccgggcatcttcaactgccggaagctgagaggaaaagccttttattttgtcaacggcaaagtgttttgtgaagaag

SEQ ID NO: 685714 - DNA, 89 bp, Homo sapiens
ggacttcgacacctacgacgatcgggcctacagcagcttcggcggcggcagaggcccatctgctggcaaggctaagattagaacagctc

SEQ ID NO: 685715 - DNA, 133 bp, Homo sapiens
cttgtctcttatttagttctggggagcgcctcgtcgacatgagtgatgtggaggaaaacaacttcgagggcagagtttggtgcacctcgatttggaggaagtagggcagggcccttatctggaaagaagtttg

SEQ ID NO: 685716 - DNA, 75 bp, Homo sapiens
gccgtggcgctcggctgcgcgctgctcctcgccctcaagttcacctgcaggggtcgggccccggctcagtggtcc

SEQ ID NO: 685717 - DNA, 90 bp, Homo sapiens
cttggcgaagccttgggtttctttcttaaaggactgatttttagaactccacatttgagggtgttctgagaatcagccatgtcatccctg

SEQ ID NO: 685718 - DNA, 90 bp, Homo sapiens
ccgagctccagccgaaggagaagggggagtcgggaagacatcactcatgaaccagtatgtgaataagaaattcagcaatcagtacaaagc

SEQ ID NO: 685719 - DNA, 101 bp, Homo sapiens
ccatgctctttttgctgcagtggtggaacagattcacaagtttgcccaggatagtggccaaagcctccaagaacctcatgtccacgcaaagcttggggatt

SEQ ID NO: 685720 - DNA, 99 bp, Homo sapiens
cagcaagaacagagagagaggtggacagatctgagagatactgaggtaataatagacgtggatggaatacaactagccagagatattccaatgtcatcc

SEQ ID NO: 685721 - DNA, 75 bp, Homo sapiens
gcggcgcagcgcagctcctgagtggaatgcagtagccctctgggcctgggatattgtggttgataactgtgccat

SEQ ID NO: 685722 - DNA, 90 bp, Homo sapiens
ggattcacgggtagagattggcttcgggctgagctagcagtgagcaccttttggcccaatgaatatcagagtcccaagagtggcccaaaa

SEQ ID NO: 685723 - DNA, 90 bp, Homo sapiens
cacaacccgcagagacttctactggctgcgctcctttctggccggagactggatacacgtctgtttaactacgcaaaaggtaatgctggc

SEQ ID NO: 685724 - DNA, 100 bp, Homo sapiens
gctcctcaagaatctcgtgctcaccggtttctcccacatcgacctggtgagcagaagtggcctatatcgctccccgtcgatgccagagaacttgaacagg

SEQ ID NO: 685725 - DNA, 100 bp, Homo sapiens
ccgaccccctccccgaagctgccggagccctctgtcctccatgaggacggcaccgtgaggttctgggatgcctcgggtgtggcgctgcggccgctctata

SEQ ID NO: 685726 - DNA, 98 bp, Homo sapiens
ttggacgtcgtcctgtctgggtgtcgcgggccggccccgcggggagcgcccccggcgcgatgcccttcaggaaagcaccagcagacgtttttgaatca

SEQ ID NO: 685727 - DNA, 98 bp, Homo sapiens
gaaactgcaccttatcacccggaacctgcaggttatgaagacagtatggagtttccagaccatagtagacatttgctacagtgtctgagcgagcagag

SEQ ID NO: 685728 - DNA, 80 bp, Homo sapiens
agagtttcctcgcggtaacagcctccgtggcctccggcctgtctccactaactctggaccctaaaacagctcacccaaat

SEQ ID NO: 685729 - DNA, 100 bp, Homo sapiens
taaagcagcgtgcgttcagccctggggctgctgagaactagccctagacctctgcgtgagggttcttctgccgaagacatcaccagtgtgtggagcctgc

SEQ ID NO: 685730 - DNA, 75 bp, Homo sapiens
cccggcccgggccatgtcggtgggcgagctctacagccaggttaatgttgaagaaggaaaatgcggaagtcgtca

SEQ ID NO: 685731 - DNA, 100 bp, Homo sapiens
atttcctgcttctccttttcatgagtgttcctgtggtctctgcacctcctttctgcttattcaaacctccttagagctaacatggatgggctgaagaaga

SEQ ID NO: 685732 - DNA, 100 bp, Homo sapiens
caccttgccgggattgtacctgcaggcagaaagtcttcctacgaccgtcttttcccttagaggcaccaggtggcagcacaccctgggccccccactcccc

SEQ ID NO: 685733 - DNA, 74 bp, Homo sapiens
cctgttggaggaactggcccggaaacaggaggacttggagagaggcgatttcctctcagaagagtggagggagc

SEQ ID NO: 685734 - DNA, 83 bp, Homo sapiens
gcaatgtcacttacaacattaatcagatactgcatttaaggttgattcttcaccacactgaaaccattaggaaaaatccttgt

SEQ ID NO: 685735 - DNA, 75 bp, Homo sapiens
cacaatttagcatcaggcaaaggaagcaccgcacatttttcaggtgactctgacatcattagaagcatgccagaa

SEQ ID NO: 685736 - DNA, 82 bp, Homo sapiens
cggcgtacgccctcatggggaaaatctccccggtgactttcaggccaagactaaggggctgcagagcggggtggacattggc

SEQ ID NO: 685737 - DNA, 87 bp, Homo sapiens
tagggaagctgagctaaggaaacagaggtgagaaagatcagtctaaagaaaaggagaagaaagtgaaaaaaacaattccttcctggg

SEQ ID NO: 685738 - DNA, 50 bp, Homo sapiens
gagaaattcagacggctcccgagggtctcagtgctgtgccccccccagag

SEQ ID NO: 685739 - DNA, 100 bp, Homo sapiens
cagctaagctaacctctgaccccactgatattcctgtggtgtgtctagaatcagataatgggtgttggggatgtcctttgcactgaccctgaactgccag

SEQ ID NO: 685740 - DNA, 83 bp, Homo sapiens
gagctttaccgcaattatggcatcctggccgatgccacggagcaagtgggccagggccagatattcgaagcttacaacatggc

SEQ ID NO: 685741 - DNA, 75 bp, Homo sapiens
gacttcggttcgggtgcgctgctcaaggacacggtctacaccgacttcgacgggcgaagctgtgctcaggcccgg

SEQ ID NO: 685742 - DNA, 100 bp, Homo sapiens
acttctgtttgcaacactgtacatcctctgccacatcttcctgacccgcttcaagaagcctgctgagttcaccacagagcgttgagggtgagcagcatga

SEQ ID NO: 685743 - DNA, 100 bp, Homo sapiens
aaagatcgagaagcagctgcagaaggacaagcaggtctaccgggccacgcaccgcctgctgctgctgggatttttagactctgaggagcagttggagcta

SEQ ID NO: 685744 - DNA, 82 bp, Homo sapiens
ctttcagcgatatgaagttaaaaccagtaaacaaatccgagctatgctgggccagttcagccaggcagaagccttattaatg

SEQ ID NO: 685745 - DNA, 101 bp, Homo sapiens
cttcacaatccaagttccacaatatattgactactgccacaattccgactgtcttctgaagattgatgtctatttccttgagctctttaattttgttgcca

SEQ ID NO: 685746 - DNA, 83 bp, Homo sapiens
gggcgtccgagtcaacaaccgcttcgagctgcgccgtgccgtccctgcagtgacaccgaggtgctcctagccgtctgcaccag

SEQ ID NO: 685747 - DNA, 74 bp, Homo sapiens
aacccttttggaggtgcttctcatgcaaaaggaatcgtgctggaaaaagtggcatacggagtggtgtccatgtg

SEQ ID NO: 685748 - DNA, 95 bp, Homo sapiens
caacgtgaacctggcatatctgggcgccaagccgcggagcctccagacggtgttctagaacagatcagacattttgtaatgatgcctgaaataaa

SEQ ID NO: 685749 - DNA, 139 bp, Homo sapiens
ggaaaagcagttgctcgaagaactcgagcgacagagacaagctgagcttgccgcacaaaaagctagagaggactactgttcgaagatttttggaagaatactgagaacggcataaagtgaagatcgacatttaaaaaat

SEQ ID NO: 685750 - DNA, 75 bp, Homo sapiens
gccttctcatcatcggcatttcttgtgcagttcacttcacaaggaaggttgaaaaataccggccacagaccctga

SEQ ID NO: 685751 - DNA, 98 bp, Homo sapiens
cctcccaaagtgatgggattacagctactacttatacatgtgtgataaagtggttgccccaaatgtgtcacttacttctgctgtatcccagtctaaag

SEQ ID NO: 685752 - DNA, 80 bp, Homo sapiens
ttccagcaggctgcagatacgagtggacaaatgaagactggcccatttgcagagcactccaaccagctgtggaacatcag

SEQ ID NO: 685753 - DNA, 98 bp, Homo sapiens
aacacctttaataaaacccatacattccactttctgtttactcctggcttgggggcattaggaagcactggaggctcttcgggaactaatggatctaa

SEQ ID NO: 685754 - DNA, 100 bp, Homo sapiens
atcgcaaagggaaacttatcttcttttatgaatggagcgtcaaactaaactggacaggagactcgagtccgggcaggggagctggaccaggctctaggac

SEQ ID NO: 685755 - DNA, 90 bp, Homo sapiens
ggagcaggatttagaggaccactagttggaccccatcctcgtgctggaggaacagtcctacaagattatcaattttgcccccagtttact

SEQ ID NO: 685756 - DNA, 98 bp, Homo sapiens
ttctataagcagttaggatctggagtctgcaggcccaggtggggcttcatgttcagctcactgttggacttcattgacatcaccctgaaaaaggtgga

SEQ ID NO: 685757 - DNA, 97 bp, Homo sapiens
gccaggctggccccgagcggaactggagaaagctgagggacaaaaggagttattcttgtcctgtttgtgaaaagtctttttcagaggatcgattgat

SEQ ID NO: 685758 - DNA, 100 bp, Homo sapiens
catcctgaaggacgtggccactgtggccttctgcgacgcgcagtccacgcaggagatccatgagaagctacgagttccagggagctctgtcctggtgacc

SEQ ID NO: 685759 - DNA, 100 bp, Homo sapiens
actagaaggggaggggagtggaaaggctctcagtgaaaaaggtgatggaattttactgccagtcctgtgagactgccatgtgtcgggagtgcacggaggg

SEQ ID NO: 685760 - DNA, 83 bp, Homo sapiens
ccatctgattggagctggacacagcagtgagttcaaacccatgacacagctttaggttggtctcagccttgtgatgtttggag

SEQ ID NO: 685761 - DNA, 82 bp, Homo sapiens
catggctcagcggatggtctgggtggacctggagacaatgcagatcttcgtgaagactctgactggtaagaccatcaccctc

SEQ ID NO: 685762 - DNA, 75 bp, Homo sapiens
tacacttgcctatccagaaagcaacagcagagtactggagaaaatgaaactgggattgacccatcaagatgcttg

SEQ ID NO: 685763 - DNA, 100 bp, Homo sapiens
gggtctgtcatcatgtcgcgttacgggcggtacggaggagaaatgctttgtggtctacagccacaccaccccaaatgtgcctgatcttgtctgatcttgg

SEQ ID NO: 685764 - DNA, 50 bp, Homo sapiens
ggagagctgtcgagattggtgttaaaaagtctcaggaggcccaggtgctg

SEQ ID NO: 685765 - DNA, 75 bp, Homo sapiens
ccgcgtgtacccggttgtcctcaggcgctgtcagtgtaatgttcaagctcagaaatgccttatgtggatcgtcag

SEQ ID NO: 685766 - DNA, 75 bp, Homo sapiens
cgacccgctgctcagcgtcctcatgtggggggtaaaccactcggagcttgaagaaatccgcaaatgtgggatgaa

SEQ ID NO: 685767 - DNA, 100 bp, Homo sapiens
cgacgtgctgtgcttactggtcgagccgtacacggtgcgtgaggcccgcatccacgtgcgccatgtccgagacctgctcaagagcctggacccatccgat

SEQ ID NO: 685768 - DNA, 99 bp, Homo sapiens
gaaattactgtctcaagtgatacggttccagcaacagatagaaatgctttaagttcactctggggaaagctggcctctgaaatcttaatgcagaattgg

SEQ ID NO: 685769 - DNA, 82 bp, Homo sapiens
gtggagccccggcagcaggagcgtcgcagcacatggattaattgatgtatgttgagtttatggagctgccttttggtggctt

SEQ ID NO: 685770 - DNA, 85 bp, Homo sapiens
ggaacctcttccagttggaattgaagaatattcccaagtccttcacccggagaggcgtttccatcaaccagttttgcaaggagtt

SEQ ID NO: 685771 - DNA, 88 bp, Homo sapiens
aatgttggattttcaatggcagttgcaatggccatttatgtggctggcggtgtctctgcttccttcaaaatgtctactgttcacgaaa

SEQ ID NO: 685772 - DNA, 87 bp, Homo sapiens
ggtcactgtgctattatacatgatggaaagttgccttattaaaagtgagctacaagggaagtaagcaatggcatagaaaaaaaagga

SEQ ID NO: 685773 - DNA, 101 bp, Homo sapiens
ggtctctgtttgttttcttcaatcaccccaaaggtcgcgataatattattgacctcttcctttatcagccacaccctggtacctgacagtgtaaagaagga

SEQ ID NO: 685774 - DNA, 74 bp, Homo sapiens
agagggatggcgcgaaagaggccagggatgccggcgacggttgtgtcgcagggctttgttcgcgggggtcacag

SEQ ID NO: 685775 - DNA, 51 bp, Homo sapiens
ctttgggagtggacagcccatctgctggtcacattaactttactattagta

SEQ ID NO: 685776 - DNA, 75 bp, Homo sapiens
ccaaaaagttgcctatgttttgtgagagcaactacccagtcctctgcatgaaagagccctccctcaagagcttgg

SEQ ID NO: 685777 - DNA, 102 bp, Homo sapiens
tcaaggacttcctgctcacagcccgacgaaaggatgccaaatgtgctggagaatctggtaaaagcaccattgtgaagcagatgaggatcctgcatgttaatg

SEQ ID NO: 685778 - DNA, 90 bp, Homo sapiens
gaaggagacacagttccatggatcagaaggcagacaagcagcttttcagatgcaaatgcaccctgaagcgggcccttgaagtcttcaagc

SEQ ID NO: 685779 - DNA, 100 bp, Homo sapiens
cggggaactagggagcgtctccggctgcacagcgctcaggtgctggagaatctggtaaaagcaccattgtgaagcagatgaggatcctgcatgttaatgg

SEQ ID NO: 685780 - DNA, 98 bp, Homo sapiens
tggcctgcggcgcctgggcgctctgagaagctgcacacatacatgtaagagaagcaaaaatgtcagatgatatcaggaaaaggtttgaatttccaaat

SEQ ID NO: 685781 - DNA, 75 bp, Homo sapiens
gccctgagggcagctgttcccactggctctgctgaccttgtgccttgtgtgcaccggcacagacatgaagctgcg

SEQ ID NO: 685782 - DNA, 83 bp, Homo sapiens
aaaacaccctgcaatctttcagacaggcttcaacggaccacaccaaaatgccatctcaaatggaacacgccatggaaaccatg

SEQ ID NO: 685783 - DNA, 51 bp, Homo sapiens
agggagtccatctggagcggccaagtgttgacttcaaaatcaaaactgtag

SEQ ID NO: 685784 - DNA, 90 bp, Homo sapiens
tcgccctcgagatgattatcgtaggaggagtcctccacctcgtcgcaggtttatgatttgctgtgaccgctgtgaagaatggtttcatgg

SEQ ID NO: 685785 - DNA, 75 bp, Homo sapiens
tcgtgaagatccagtccttcctggcaaagaacagtctgaacttgatcaagatttggatgatgttgaagaagtaga

SEQ ID NO: 685786 - DNA, 98 bp, Homo sapiens
tggggaagtctagtttcctcatgagactttgcaagaatgaatttcgagaaaatataagcgccaccctggggaagaaggagaaagggccaacccctgaa

SEQ ID NO: 685787 - DNA, 100 bp, Homo sapiens
catcggctgcaggggtcagtgatggagctgcttcagcttttgtctggtcctctgagccccagtgagagtttcctgaggtacctcacccttccacaagaca

SEQ ID NO: 685788 - DNA, 100 bp, Homo sapiens
cattcattcagcttctgcggcagtttggaaaggtttaatagactacaacttccactgtttccgaaaagctattcatgaggtttttgaggtgggtgtgact

SEQ ID NO: 685789 - DNA, 98 bp, Homo sapiens
ggagacccccgccctcaactgaggatgaatttcacccattcatcgaggcacttcttccacatgtccgtgcaattgcctatacttggttcaacctgcag

SEQ ID NO: 685790 - DNA, 99 bp, Homo sapiens
ggaactagggagcgtctccggctgcacagcgctcaggccagtactgatgcaggcactgcaggagccctgactccacagcatgttcgagctcattcctct

SEQ ID NO: 685791 - DNA, 75 bp, Homo sapiens
cctagtgcgccagggcctcaagtgcgatggaaagaccacagcaagattctttcattcgtctcctcctagcctggg

SEQ ID NO: 685792 - DNA, 100 bp, Homo sapiens
tgaaagtccacctccttacaggcctgatgaattatcgctccttcgatatcctaaaaaaatccaagccgccctcgacattgcttgctgcaggccggctttc

SEQ ID NO: 685793 - DNA, 83 bp, Homo sapiens
ccatgagggccgggcccagtcaccgaccgtgatcatggagctcagcttggtctccatggggctggtggtgatggaatacatga

SEQ ID NO: 685794 - DNA, 98 bp, Homo sapiens
ggtgctgaagaagcaaagacctttgatcagctgacaccagaagagagcaaggaaaggcttgggacctcagcagccatgtcgaagccccatagtgaagc

SEQ ID NO: 685795 - DNA, 83 bp, Homo sapiens
gagaaggggaagatcacattcggagggtgaggacaaaatcttcttaatcaacaagcttcactccatctacgagaggaaggaga

SEQ ID NO: 685796 - DNA, 75 bp, Homo sapiens
cggaggcttcgagtgacccgggtgccgaggagcgggaagagttgctggggcaaaggccggcgtgtgcagccccag

SEQ ID NO: 685797 - DNA, 83 bp, Homo sapiens
aaatcttccaagtccaaggatgtaaacgcttcgttaagggactcaggcagtacgggaagaacttcttcagaattagaaaggag

SEQ ID NO: 685798 - DNA, 101 bp, Homo sapiens
ctgttgaccgcttgtgcctggggattccccctggtgagaggtctgcggggtttccgagaggctcgccgggatttctggcggggggctgagagcctggaggc

SEQ ID NO: 685799 - DNA, 82 bp, Homo sapiens
tctgtgtggactcggagaaacgcggacaatgcagatcttcgtgaagactctgactggtaagaccatcaccctcgaggttgag

SEQ ID NO: 685800 - DNA, 100 bp, Homo sapiens
tttcctgcagaaagacttgaaggcgtatacaggaacaatattgatgatgtagtaagaaggaagaatcctgctcaaaaatgaggtgaattaatacttgggc

SEQ ID NO: 685801 - DNA, 100 bp, Homo sapiens
ttgctctgctcttccaacaccagtggaagatgatcacatcccaggtcgccttcgtcagacgtcagaatgattccttgcagagccgcgctgacctttgccc

SEQ ID NO: 685802 - DNA, 100 bp, Homo sapiens
gcgcgttccggaggcccggccacctctgagaagggagacgacgctgctgggtccgctgagcggggcgacccgaggtggtatcacggaaaacttgacagaa

SEQ ID NO: 685803 - DNA, 75 bp, Homo sapiens
ctaccacaagaagcggaagtatgagttggggcgcccagctgccaacaccaaggacgccaggaaagcatgtgcaga

SEQ ID NO: 685804 - DNA, 100 bp, Homo sapiens
gtgaaagcttatatgatccatatcggaattggagacatagaatttcaggcaatatgttaaggatacctgtaagaaaggccttagtaggcctttctaagtc

SEQ ID NO: 685805 - DNA, 75 bp, Homo sapiens
aaagtggcactgaggctctggaacttctgcccagctctccttggctcattggtgggcagtattacttatgggaat

SEQ ID NO: 685806 - DNA, 75 bp, Homo sapiens
attccaagtaactcttatttgacatcacttagtgctcttacccagctgatgaaaaagatgccccatttccgaaaa

SEQ ID NO: 685807 - DNA, 73 bp, Homo sapiens
ggctggaggactagggcggtggcagtggccagggtgaaaaggaacagcctgtatttgcaatgaccggccttcg

SEQ ID NO: 685808 - DNA, 100 bp, Homo sapiens
ccaaaacccagggctggaagatgtggcagccggccacggagcgcctgcaggtccatctgaactgtttactgtttgttcatcgattagcagaagagtccag

SEQ ID NO: 685809 - DNA, 98 bp, Homo sapiens
gatgcaatcaaagctcgacttctcaatcccaagtggccaaaggaaatgggtcctgatgaatatgaagagatggaagaagaggaggaggaggaagagga

SEQ ID NO: 685810 - DNA, 100 bp, Homo sapiens
tcgcagtggtcgcttcttctccttgggcccagaggctttctccgatgtctaactctttgtgccttgagctcctttatgtttgggtggcatgttcatgaaa

SEQ ID NO: 685811 - DNA, 74 bp, Homo sapiens
agaggcttgtggagttgatccacccgagccaggatgaagatgctccacataaacacggtttccttgaaggccgc

SEQ ID NO: 685812 - DNA, 95 bp, Homo sapiens
ggcactgaggcagagattcagcggtgtgtcaggcctgatgggcgggtgccactgctggaaaacctcatgctggacaaagatggccacatcaagat

SEQ ID NO: 685813 - DNA, 101 bp, Homo sapiens
cgaggagggggaccttgaagacgacttcgaccctgcccagcacgaccagctcatgcagattgcctcggtctggcatggtaccctctcgaagctgctgggaa

SEQ ID NO: 685814 - DNA, 80 bp, Homo sapiens
ggttgaaccacctttaaaagcagtaatggaacaagctactaataagcacaagtgggtaccactccacttagatgttgtaa

SEQ ID NO: 685815 - DNA, 109 bp, Homo sapiens
cctggagcctctacagactcggaaccctcaagggccccttcagagaggctttggccctcgtcatcctgcccacccagcggggcttcccaacccaccacacagccatgga

SEQ ID NO: 685816 - DNA, 97 bp, Homo sapiens
ggaatggatggtgcctattgggcgatgcacctgcaagcctggctatgagcctgagaacagcgtggcatgcaaggaaagcataacccctactgtagaa

SEQ ID NO: 685817 - DNA, 97 bp, Homo sapiens
gaagcccttcgcctgcacctggccaggctgcggctggagtgggaggcgaaagtgcaacaaggggaaagagattttgaacagatatctaaaacgattc

SEQ ID NO: 685818 - DNA, 51 bp, Homo sapiens
ataacaccctgtaacagctgaattccagatgacctgaggaagagactaaat

SEQ ID NO: 685819 - DNA, 75 bp, Homo sapiens
gtgaccccaggctttttatggctgtgagacacgttaaaatttcaggaaccaggacaatcctgtgattgatgaaat

SEQ ID NO: 685820 - DNA, 100 bp, Homo sapiens
gctatgtctcaggagtattttacgcattttattgtaataacaatgtgaaaacctttgcatcttctgatagtctagccaaggtccaagaagtagcaagctg

SEQ ID NO: 685821 - DNA, 75 bp, Homo sapiens
ggcaagatccagatcgggatttacgtggagatcaagcgcagcgatgaaaccaaggtgtatgttggtaacctggga

SEQ ID NO: 685822 - DNA, 83 bp, Homo sapiens
agtcaactggcccggcaccgagttctctctgcatgaagagctaatgctaggggatccctgccttaaggatttgaaaaaaggag

SEQ ID NO: 685823 - DNA, 96 bp, Homo sapiens
gatggttccttgcaaagggcacgtatagcattggtaaagaacgatcgtccagtggagggtgccaagctgttctacctttctggaatggtgcatgga

SEQ ID NO: 685824 - DNA, 82 bp, Homo sapiens
ggagggcaccccgggcgggcggcggctgctattgctcatttagaaagtggatgtgtgggataacatgtccaatgtgtccgag

SEQ ID NO: 685825 - DNA, 75 bp, Homo sapiens
ttgtcagtgaaattgattggctcaaaaggattagggtacatcaggaacgtctctatcaagaatacaatttcagca

SEQ ID NO: 685826 - DNA, 101 bp, Homo sapiens
acaggggctgtcatgcaactggcccctaagccaaagcaaaagacctaaggacgacctttgaacaatacaaaggatggaaagccatatcttggaagatgtca

SEQ ID NO: 685827 - DNA, 74 bp, Homo sapiens
tttcggcaaccgctgctggcagttttgccaggtgtttgttaccttgccacttctgccccaccaacgttgggcca

SEQ ID NO: 685828 - DNA, 80 bp, Homo sapiens
aaaaggagcggcgcggtcttcgtggtgttcgtggcaggcgaggattaaatccaccacacagggtgaaatctatctccatg

SEQ ID NO: 685829 - DNA, 90 bp, Homo sapiens
ccacctgagaaccatgctcaccgacccttttgcagatggcgtgtacctggttctgctcatgggccttctggaagactactttgttcctct

SEQ ID NO: 685830 - DNA, 100 bp, Homo sapiens
agccaatcccaggaggaaaaacgctgcctgtggaggaaccgattgtgtccacagatgaggtcatcttcccactcaccgtttcactggatagactgccccc

SEQ ID NO: 685831 - DNA, 75 bp, Homo sapiens
gttgtggcggttgctggtcagtaacagccaagatgctgcggaatctgctggatggtgccatgacaatggtgtgaa

SEQ ID NO: 685832 - DNA, 98 bp, Homo sapiens
gagccaggggcatttgaaggggtgacggtgttccatatcagaattgcagaagcaaaactgacctcagttcctaaagatgaagtcttgctctgtcaccc

SEQ ID NO: 685833 - DNA, 75 bp, Homo sapiens
gcgtttccacttcagagatctggaatgctgtctctgcaatttgagaggaggtgctcttaagcaaacgaagaacaa

SEQ ID NO: 685834 - DNA, 80 bp, Homo sapiens
cagagatattctactccatctcattcattgtacaggtagatgacattaatgctgataagaatatctcttctgcacagatt

SEQ ID NO: 685835 - DNA, 82 bp, Homo sapiens
tatttgtgtgacttgactcttcaaacacaaagatgatgataattccgaagaaggcttccacactattcattcaggaaggcat

SEQ ID NO: 685836 - DNA, 100 bp, Homo sapiens
ccttggtcaatgacctcattcatggcaaaaatggaggataagatcaatgccctcattaaagcagccggtgtaaatgttgagcctttttggcctggcttgt

SEQ ID NO: 685837 - DNA, 100 bp, Homo sapiens
ccacctacagaaacaaaatgtcaacaaattgatgggtgagacacagtaacctggttgaactctgcatctggaaagctgaagactgaagaaagataagaga

SEQ ID NO: 685838 - DNA, 88 bp, Homo sapiens
aaacaaatttggaaagaaaaagaatggcgtccgtttcaggcactactgcagtcttcagttaagcaacaagtagaagctattgaaaaac

SEQ ID NO: 685839 - DNA, 75 bp, Homo sapiens
tttacgagcacggcctcttgcgctacgccctggatgagatggcagacttctgcgttatgacccggctgctgggct

SEQ ID NO: 685840 - DNA, 87 bp, Homo sapiens
ggaagaaaatggtttggctgtgataggagtatttttaaagttgcttttgaaatcagaaagtcagtgcagggttgtagtgttgatggg

SEQ ID NO: 685841 - DNA, 74 bp, Homo sapiens
cgcgctcgcctccctcggctcggcccaaagcagcagcttcagccccgaaaaacaagccaacgacctggtggcca

SEQ ID NO: 685842 - DNA, 101 bp, Homo sapiens
cggagggaggatgttaaagccccgcggtgccttggaacactatgttaattgcctggatctggtaaacaagaggctaccttatggccttgctcagattggag

SEQ ID NO: 685843 - DNA, 89 bp, Homo sapiens
gagtacctcacagcttagacctgtccagtctatccttcactggagtctgatgatgatgaccctgctttgaaatctcgacccaagaaaaa

SEQ ID NO: 685844 - DNA, 83 bp, Homo sapiens
tcgaagtttcctatagaggataccccattggttccaacaatgcagatcttcgtgaagactctgactggtaagaccatcaccct

SEQ ID NO: 685845 - DNA, 100 bp, Homo sapiens
aagataaagtgattttttgcctttgttgattaactggacaaattcagtatgccgagattttgctgtcctggaggaccacaccctggctcacagcctgcag

SEQ ID NO: 685846 - DNA, 100 bp, Homo sapiens
ggcggtgctgtcatggctggagtaaggcccctggctcccagaggtgcaccaaacgtgtatgtttaagctcaggctggaaaaggatcactgaaagtcactt

SEQ ID NO: 685847 - DNA, 90 bp, Homo sapiens
aacacagctgagatgttccttagtaatcatataccactaagtccagttacaacacagggatcacaacaaacacaaccgccacagaagcac

SEQ ID NO: 685848 - DNA, 100 bp, Homo sapiens
aaaagatcaatagattgcctacccccattgcaggactgaatcttcagctacttggagcaacagccattgaggataaattacaagatcaagtgcctgaaac

SEQ ID NO: 685849 - DNA, 74 bp, Homo sapiens
cccagcgccgggcgctggccacgtgcaggtcagatgggcagacctggaagagaagaaggatgcagataggaaaa

SEQ ID NO: 685850 - DNA, 75 bp, Homo sapiens
tgtgagcagagatggcacctttgatgctgatggcagagcagctcatgaccttggcctatgataatggcatcaacc

SEQ ID NO: 685851 - DNA, 131 bp, Homo sapiens
tggaaaacagtaggaaagcaatgaaagaagctggtaagggaggcgtcgctgattccagagagctaaagccgatggaagctctacagaggatcatttcaactctggcaaataaaaatgatgaaattcagaac

SEQ ID NO: 685852 - DNA, 100 bp, Homo sapiens
cgaggatgtgctggagcggtacaaagagtgcctagaaagatgacaactcaagcaccgacgtttacgcagccgttacaaagcgttgtggtactggagggta

SEQ ID NO: 685853 - DNA, 97 bp, Homo sapiens
gtggaagggtcgttcgcattgctgttcacccagattatcaagggcctaggatgtggcattggatatggttatttgcatcgaatacctacacgcccat

SEQ ID NO: 685854 - DNA, 75 bp, Homo sapiens
tggagaggttccttcaggaggatcaggaagccctcaatctagaagagtagaggtccaaaggtgccatatgttcac

SEQ ID NO: 685855 - DNA, 100 bp, Homo sapiens
gcggggaggtgggtactacacaaccgtctccagccttggtctgagtggactgtcctgcagagagggagccggcatcagaaaacaacactgggagctgggg

SEQ ID NO: 685856 - DNA, 100 bp, Homo sapiens
agatgatgctgacagagcacaaaaggcttttgaagataagacagctggcttttgggatccaggatctgtcacatctggtctgcatttgcacgggatggcg

SEQ ID NO: 685857 - DNA, 98 bp, Homo sapiens
atcaataccctgttcccaaccgagcaaggacgtccagatcggtgacatcgtcacagtgggcgagtgccggcctctgagcaagacagtgcgcttcaacg

SEQ ID NO: 685858 - DNA, 100 bp, Homo sapiens
taccacgaaagaatctggatgtcatgaaggaagcaatggttcaggcggttccggcggcaagacgtaaggaatggcgaccccagcacgttgtgctccggag

SEQ ID NO: 685859 - DNA, 100 bp, Homo sapiens
ggccatcatcatgaaggacgtgcccgactggaagtccttcagtgaatctacagacctattttctcaggagctcagcctggccttacttcagtgataaaag

SEQ ID NO: 685860 - DNA, 76 bp, Homo sapiens
aaatgggaaggtttccccaaagtcagtattctcctcaggagcagtttttgcaagaaaggatcaaagtgaacggaaa

SEQ ID NO: 685861 - DNA, 75 bp, Homo sapiens
cagcgcctatgagtttgtcacctggctcgatggcattaaactgacatcaatttgccctatcttacaatggattct

SEQ ID NO: 685862 - DNA, 91 bp, Homo sapiens
cttacgacgggttggggatggcgtgcagcgcaaccacgagacggccttccaaggtgccgacgccaccgccgagcccatgatcctggaacag

SEQ ID NO: 685863 - DNA, 82 bp, Homo sapiens
aggagcggatcagaagcaagacccagcggctctccaagggcgaccattgacgaggtggagacggacgtggtggagattgagg

SEQ ID NO: 685864 - DNA, 75 bp, Homo sapiens
agcattacaagccagcctctgggaccgagaaaggatcttgttcgagtagaagccacagtcattgaaaagacagaa

SEQ ID NO: 685865 - DNA, 74 bp, Homo sapiens
cagtgttcaccatcctggccccggaagggaaaccctatattcagcccaagagggaaatcccagcagaggagcag

SEQ ID NO: 685866 - DNA, 83 bp, Homo sapiens
tgcctggtgcagaggatcctggaggcctgggaagccaacgaccacacgcagtcatcaagagagagggcacaggtacagagatg

SEQ ID NO: 685867 - DNA, 83 bp, Homo sapiens
atttgcaccaaattgaaaacatctcccaatgaagataacacttacttgtgcctggctgtgctggatggtatattctgtgtcat

SEQ ID NO: 685868 - DNA, 82 bp, Homo sapiens
cgaggcagctgtactaggactgggaacgggccccttcacagatgtagtcactacaaatcttaaattgcgaaatccatcggat

SEQ ID NO: 685869 - DNA, 74 bp, Homo sapiens
atcagccacgcatctgaccttgttggctgaccccgcactacatctacccaccagccatcgtgcagcccagcgtg

SEQ ID NO: 685870 - DNA, 100 bp, Homo sapiens
gcaggaatggaatcctacgatgaacaaaaaccagttgcgaaatggtctgaggcagagtgtggttcaagattactgcaatgacctgaaaatatcggataat

SEQ ID NO: 685871 - DNA, 100 bp, Homo sapiens
aatcagtatgttgtgcaagaggtactgtccatcaaacatcttccaccacagcttagagcaataagagctaactgccatcaagagccatcagtatgtcttc

SEQ ID NO: 685872 - DNA, 75 bp, Homo sapiens
gaaaaactggatgttggtagaaaaagcaagagtttgttatatagcaatgaagtctggcaaactgatgacctaata

SEQ ID NO: 685873 - DNA, 100 bp, Homo sapiens
tgggaagatgaaaagcaacggcgaagaaacagaaatgaaacttctcaaatgagccaacctgagtcacaaggagtcctttgcaagagcaaaaaattgggtt

SEQ ID NO: 685874 - DNA, 75 bp, Homo sapiens
ggtgggactctccggccctgtgcagtgtaagaatgattgatgttggctgatattggagtgctcattcacatgaag

SEQ ID NO: 685875 - DNA, 75 bp, Homo sapiens
catggtgtcctggggaggcgtcagcatccccaacagccccttcaggatatctatcatcatcaactcttctgctcc

SEQ ID NO: 685876 - DNA, 110 bp, Homo sapiens
ggtgcctggtagaactttatttacatgttaggaaattttaacatgagcttttcaagaaatggaattgaaaagtccagaggaagaggaaaacggacgatgtattactaagc

SEQ ID NO: 685877 - DNA, 90 bp, Homo sapiens
cgtaggagcaggaaatccactgtcttcaataggccgtgtttaagaggcgtcttacactccctgttgccagtggctggaacacaatggatc

SEQ ID NO: 685878 - DNA, 49 bp, Homo sapiens
attccaagtaactcttatttgctcggggtgtggttttctctcggttgtg

SEQ ID NO: 685879 - DNA, 114 bp, Homo sapiens
aggcgcccggtggctccgaagcggggaagtgggacaagatggtttacatctcgaacgacaatgcagatcttcgtgaagactctgactggtaagaccatcaccctcgaggttgag

SEQ ID NO: 685880 - DNA, 101 bp, Homo sapiens
attgacaccacctccaagtttggccatggccgcttccagaccatggaggagaagaaagcattcatgggaagcacactgagaaagcggaagatgtatgagga

SEQ ID NO: 685881 - DNA, 90 bp, Homo sapiens
gcgcggtggtcgggacagactggccgttgctgtggagacgcctgatcctatgaatgcactccagagcctgactggcggacctgctgcggg

SEQ ID NO: 685882 - DNA, 75 bp, Homo sapiens
caagatgttcatcgggggactcagttggcagactacgcagggcacttaaagagaaggctgagctgcaggcccagc

SEQ ID NO: 685883 - DNA, 75 bp, Homo sapiens
cacatgttttgttcaccttgagttcacaccaagacaatgcaaactccagtgaacattcccgtgcctgtgctccgg

SEQ ID NO: 685884 - DNA, 75 bp, Homo sapiens
catgtggtggtgaaaaatgaccctgaactggaccagcaggtcaaaatgcagatcttcgtgaaaacccttaccggc

SEQ ID NO: 685885 - DNA, 100 bp, Homo sapiens
ttgaaacagttcatagatactacactgaatttcctacagttcttgatattacaggtgcttttgaagatgatgatatcacgcacgttgaaggaagtgtaga

SEQ ID NO: 685886 - DNA, 90 bp, Homo sapiens
cagcatcagcatgtcggtggagatcaacggcatcatgtacacagatgccatggacaatattaccaggcagaaccaattctacgataccca

SEQ ID NO: 685887 - DNA, 90 bp, Homo sapiens
gccgcgtcgaagacatggaccagggctacggagggagtgcatccgccccaacccttttccccctcgtctcctgtgagaattccccgtcgg

SEQ ID NO: 685888 - DNA, 88 bp, Homo sapiens
catgctgaaaaactgagtgaatatgatcagatttctccaccaaattctcagcctgataaggggcatggtgctgatgtgaaatgtgtag

SEQ ID NO: 685889 - DNA, 74 bp, Homo sapiens
gacttggacaacatgtcccaacattacatcccagttatgatgtgattgctcaagcccaatctgggactgggaaa

SEQ ID NO: 685890 - DNA, 98 bp, Homo sapiens
tggaggagccactgtggaagcagagcaatcgccatggagtttgtgatgaagcaggctctaggaggttacgagaagtttctgagaagctgaacaaatat

SEQ ID NO: 685891 - DNA, 75 bp, Homo sapiens
tacacctgtgctcctatacaagattaacattcaaaaagatgttggtttaaagcgattttttcctaagagtttact

SEQ ID NO: 685892 - DNA, 51 bp, Homo sapiens
tggatatagcacaccatccccagccagcacagagcagatgctgtcccatgg

SEQ ID NO: 685893 - DNA, 100 bp, Homo sapiens
ctgcgggcgccgccaggcccagaccaagatctgggacttggctagtggcaaattaaaactgtcattgactgggcatattagtactgtgcggggcgtgata

SEQ ID NO: 685894 - DNA, 98 bp, Homo sapiens
cggaacccggcgcggcggcggcacgatggtcatggcgtatttcgtcgagaatttttggtgttccttgcctgtatctccccttggttcaatagctacca

SEQ ID NO: 685895 - DNA, 50 bp, Homo sapiens
agtaatgatattgtaaatgcgattatggtgtggcatgcagcattttggaa

SEQ ID NO: 685896 - DNA, 50 bp, Homo sapiens
ggaacttcctgttctgatagcgtggaaggattgctgtcacgtctaatgtg

SEQ ID NO: 685897 - DNA, 75 bp, Homo sapiens
tgccttccaccatgattgtaaatttcctgaggcttttccagtcatgtggaactagctctcgatgttctgaagtat

SEQ ID NO: 685898 - DNA, 50 bp, Homo sapiens
agtcattcctttcctgtcccaagagctgtgttggggtggaagaggaggag

SEQ ID NO: 685899 - DNA, 78 bp, Homo sapiens
tgtaactacctggcattgccttttgttgagaccataaatactgtatcagaagttattcgaggctgccaagtaaaccaa

SEQ ID NO: 685900 - DNA, 100 bp, Homo sapiens
ctacagaaacctcgtctccctggttttgtttggctatgccaccacagtcatccccagggtctatacatactatgtttcaactgtattatttgccattttt

SEQ ID NO: 685901 - DNA, 97 bp, Homo sapiens
gaaacctcagacagatcgccggggaggcagcgcgggatcccagcctcaggcgtgcgcggacggtgtgcgggcccacccttcctccattctgagcaca

SEQ ID NO: 685902 - DNA, 83 bp, Homo sapiens
tcggcggcggcggccgaaccaaccgagtcggatcctgaccctaaaacctaagtgcctggtgaagaatgtgatgggatcactag

SEQ ID NO: 685903 - DNA, 100 bp, Homo sapiens
ggatctcatcggcaagtgtggaacagagacatgaaaatcgataattgtaactcagtatggagttggcctgggccctgccctggagttttgtattgctgtc

SEQ ID NO: 685904 - DNA, 88 bp, Homo sapiens
ctccgagcggccgcgagcagagccgcccagccctgccagctgcgccgggacgttcgtgtttagtaggagcacagtagctgtttgggga

SEQ ID NO: 685905 - DNA, 100 bp, Homo sapiens
gtagctggtgcgctgctcacggccattcactgcccatgctgagcgcctctcacacagatccgtgattctaactgcaactatgaggcctttatgaacatta

SEQ ID NO: 685906 - DNA, 100 bp, Homo sapiens
gggaaaggcaaaggcaaaggcggctcgggagattcagccgtgaagcaagtgcagatagatggccttatcatgactgagagattgttaataaaagcattga

SEQ ID NO: 685907 - DNA, 80 bp, Homo sapiens
cttcatcttcacttgaaataccggatgattttggagagagacaagagagacacctccaacttcgacaaagagttcaccag

SEQ ID NO: 685908 - DNA, 100 bp, Homo sapiens
cgacaggcagcggccggaggtcagactgttgcacgccggctcgggggccgacacagagctcgtccgcatggtgctgaatggctgaggaccttcccagtct

SEQ ID NO: 685909 - DNA, 100 bp, Homo sapiens
gttgtacctggaaaacaatgcccagactcaatttagtgagggctacagaactggctacccttatcgataccctgctctgagagagaagtctaaaaaatac

SEQ ID NO: 685910 - DNA, 75 bp, Homo sapiens
aggaagctttggatcagacttttgtgttgcagttcggtctgttggacgagctcccccagtcagtgcttaaatggg

SEQ ID NO: 685911 - DNA, 82 bp, Homo sapiens
aatatgttttacatccaagaactacaggctttacttttgtggtagaccgtctaagagaaggatttttacctcctataactcc

SEQ ID NO: 685912 - DNA, 74 bp, Homo sapiens
agagatcattgcaaagcagggaggaggtggaagtcattttgacagtccatttgaatttggcttcacattccgta

SEQ ID NO: 685913 - DNA, 100 bp, Homo sapiens
ggctctgttagtgcgcctctaagatggcgacgcctttggcggtaaattcgggtcgtcaaagtcctacattttagctttcagtgctgaacttccttctccc

SEQ ID NO: 685914 - DNA, 97 bp, Homo sapiens
ttaggggtgttacgtataggctcactcaaggtgaatcccagaccttgctggcagcagcagttgagagagaacgtgcagctacagaagaactccttgc

SEQ ID NO: 685915 - DNA, 100 bp, Homo sapiens
cggaggtacaatttgccagtgtttccacaatggaaccaattgttttacagtctgttccacatgatcattgtaataaggaggaggcaaaacagattcagaa

SEQ ID NO: 685916 - DNA, 101 bp, Homo sapiens
cagccccgagcgggacagcgcggcggggagcgacgagatatgttcaaggaatgagtgatttactttcccctcttttatatgtgatggaaaatgaagtggat

SEQ ID NO: 685917 - DNA, 75 bp, Homo sapiens
caggctctcagggtgacactgaagcaagacactcatggggccatcccagccaagaaggccccggctgggcaggag

SEQ ID NO: 685918 - DNA, 99 bp, Homo sapiens
acggcgacgactcgctgtaccccatcgcggtgctcatagacgaactccgcaatgaggacgttcaggaatccctaacactggaggatgtggctgtggact

SEQ ID NO: 685919 - DNA, 90 bp, Homo sapiens
ggccgaaggcgagcggctctacctgtgcggggaattttctaaagccgcgcagagcttcagcaacgaatccatgtcagtgaacgcctcaca

SEQ ID NO: 685920 - DNA, 75 bp, Homo sapiens
gctcgcggtgttcatctccgacatccggaactagtggggtcaacagtggattggtccgcgccaaagactccatca

SEQ ID NO: 685921 - DNA, 75 bp, Homo sapiens
gactggctccttttaactggatatatggctccctaatgagtagaatgagacctgtgtgccaaccctggcctagtc

SEQ ID NO: 685922 - DNA, 75 bp, Homo sapiens
cgattcaacggggttccggaccgcgctgcgctatggagcaggaaggccaggcccctgaccccagccctgccccag

SEQ ID NO: 685923 - DNA, 78 bp, Homo sapiens
tacgagacgtgtgctacatacgggctgaatgtggagagggtcttccaggacgatattgatgatgttaagaagttcaaa

SEQ ID NO: 685924 - DNA, 97 bp, Homo sapiens
ctgagggagatggaagttgagcaagagcagcggcgcagaaaggtggaggccgggaggacgaagttccaaaagctgagacaagatcttgaaatggtac

SEQ ID NO: 685925 - DNA, 75 bp, Homo sapiens
agtatatcaatgtggattgtgcaaaattaaaacgactcctgaagggtggccaaggtggaatacgtcaggaagaag

SEQ ID NO: 685926 - DNA, 100 bp, Homo sapiens
agactggtgtctttgtactttgataccaagaggtaccaggaagcattgcatttgggaagagagaagggcacagttacctaagtatcaacgtaatcttcct

SEQ ID NO: 685927 - DNA, 75 bp, Homo sapiens
tggttacaccatcacccccaacaccctcaagaggccgggaagttaaacttgtagccaccacctccgctcttcccg

SEQ ID NO: 685928 - DNA, 78 bp, Homo sapiens
gagaattgatgtttctcatgaaatgggtcaacagttgtcaccgacagatggctgagattgctgtgaatgccgtcctca

SEQ ID NO: 685929 - DNA, 120 bp, Homo sapiens
agttcgtctcttacgtctgcggaagtgcagctgcctcagttcttagcgcagacttaattcagtgcacaaatgagatgaatgtgaacatcccacagttggcagacagtttatttgaaagaa

SEQ ID NO: 685930 - DNA, 100 bp, Homo sapiens
tcaagtggaaacaactgtctggttagcatggcctcattgaaagaactagatcaaagactctttgaaaattacatcgagttgaaagcagatcccatcgttg

SEQ ID NO: 685931 - DNA, 82 bp, Homo sapiens
gggatcgtggagacacacttcaccttcaaggacctacacttcaagtcagaagccaatgacctggccctgaggctggctcgcc

SEQ ID NO: 685932 - DNA, 97 bp, Homo sapiens
gagagcctgcaggacggcgcggcagagtccccgtacgcctacagtaacgaacccttaggagaaatcttgagagtggacagcaattgtgaagatcgcc

SEQ ID NO: 685933 - DNA, 100 bp, Homo sapiens
cgggctccgcgcccggccggacccgggcccgagggccgcctgggcagaatgtcacgatggacgagggcggcacgcccctgctccccgacagcctggtcta

SEQ ID NO: 685934 - DNA, 74 bp, Homo sapiens
tgaatttctccgcaaatttcctgccggcaaggtcctagccaatggtctggacaacaagctccgtgaagacctgg

SEQ ID NO: 685935 - DNA, 89 bp, Homo sapiens
cgggccgctcccctagccaggaagagccgccgtccgcaccgggaccggagaggaagcggaggcttgggcactgtttaaaggaaagttcc

SEQ ID NO: 685936 - DNA, 51 bp, Homo sapiens
gaagaaattattggtacctgcaatctgagtgggacatacttttgaaggatg

SEQ ID NO: 685937 - DNA, 83 bp, Homo sapiens
actaccacccccatgatggggatgagggttgtgagtcccggcccagcccctccacccccctgcccccccgatgcgaccatggg

SEQ ID NO: 685938 - DNA, 88 bp, Homo sapiens
tctccgggagccgtccgtgtcaccgccggaacctggcgcagtctttcccagggaactccgatgaagtgttccaacaaaatgagcgagt

SEQ ID NO: 685939 - DNA, 50 bp, Homo sapiens
tggagctgcccggctcggcagcgggaagtactatactggcaattgctgga

SEQ ID NO: 685940 - DNA, 98 bp, Homo sapiens
tggctagttaaacaaagaggctgggtttatcttcgagaagcaccatggccatctgcacaatcagaaatcaggacaataagtgcttataaaaccccccg

SEQ ID NO: 685941 - DNA, 96 bp, Homo sapiens
agatgatcgcccggctgggcaaggagatcaacaacccagagtccgtgtattactgggcccagaagaggctgacccgcggctgattgagtccctctc

SEQ ID NO: 685942 - DNA, 98 bp, Homo sapiens
ttttggacctgaaacagaaattctggaacacctatatggtctgtttctgtcgactgtggaccacttatgtgcgatccgtggaccacttgcgtgcgatc

SEQ ID NO: 685943 - DNA, 101 bp, Homo sapiens
ggcgttaggagtccgggggttcgcccgcggaggccggggagcagccgaccatggagccccagatgccctataaggactgccaggcaataatgaaggttctt

SEQ ID NO: 685944 - DNA, 75 bp, Homo sapiens
cagaaattggcggcatcaccattgcttggaagtttgattctcggtcgagaggaggagagtgatcaaatccgggag

SEQ ID NO: 685945 - DNA, 75 bp, Homo sapiens
aagacaaacttgccaaagctacaagagacagcgatctagggcagccctgcagaggtacctgttctactgtaatcg

SEQ ID NO: 685946 - DNA, 76 bp, Homo sapiens
aattcttgatcattttaacatccagattcgacttccacctgaagtaaatcggatattgtatataagaaatttgcca

SEQ ID NO: 685947 - DNA, 100 bp, Homo sapiens
ggtcggcccagcaacgaggaaagctgctaaagatgtgattaaagagattgaagactttgacagcttggaggctctgcgtctggaaggcaacacagtgggc

SEQ ID NO: 685948 - DNA, 95 bp, Homo sapiens
cagaaggaacttgcagaaatcacattggaccctcctcccaactgtagctgcatgaaagcggttacgatgctggcaaagccctgcagcgcctggtg

SEQ ID NO: 685949 - DNA, 83 bp, Homo sapiens
agatggcggcgccgctcatccccctctcccagcagggtgtccgtgccgctgctgaagacgctggaccacgtgctcacccacgg

SEQ ID NO: 685950 - DNA, 100 bp, Homo sapiens
cacccattgcctgaagtgttagcaccttcactccggtgaaaggtgtagcagtcactcggcctacacccacagcatcgaccttgtgaacccagcgacctga

SEQ ID NO: 685951 - DNA, 75 bp, Homo sapiens
cttctgaatttcctggacctacgcattggatcctcaaagaactggagccagcaccgctctttgaccttgccatgc

SEQ ID NO: 685952 - DNA, 100 bp, Homo sapiens
aaaagctgccctgagacggtgtcccgccgaaagaaactatgttccaacttcctgtcaacaatcttggcagtttaagaaaagcccggaaaactgtgaaaaa

SEQ ID NO: 685953 - DNA, 75 bp, Homo sapiens
gagaagcgcagcgacggcgtcgggagagcgcgcctagccggctcgcgagtgagccctattcccagaggcaggtgg

SEQ ID NO: 685954 - DNA, 75 bp, Homo sapiens
gcccgtcaggggggcaccgcggagcaagcccgtggaccgggagcccgtggaccgggagccggtggtgtgccaccc

SEQ ID NO: 685955 - DNA, 74 bp, Homo sapiens
gagccggccgcgcgggccgggaggggacggccgccggagccgcgaggccaagtgagaagccctaccactgcaac

SEQ ID NO: 685956 - DNA, 83 bp, Homo sapiens
gagagagatagacggagatctctggagcagacctcaagccaccaattaccctagttatgggcccatcatctcacctggactat

SEQ ID NO: 685957 - DNA, 75 bp, Homo sapiens
ccactgtgtgccggcagctagcagagaagagaatgctggcatgtgctgataagttgaaaagagaaatagagctgt

SEQ ID NO: 685958 - DNA, 78 bp, Homo sapiens
cacttcgtgcccgaaacgccgaatataatcccaaggctagagtaccgtggcacaatctcagctcattgcaacctctgc

SEQ ID NO: 685959 - DNA, 73 bp, Homo sapiens
tacctgctgtacaccctcaacaaacaccagcgctttggagtttgctctccaaagctcggggaattgattccag

SEQ ID NO: 685960 - DNA, 97 bp, Homo sapiens
ttccagattctgattacatcaatgcttcattcatcaacggccttctctcagaactgttacataattgtgatggacaactgaaaggggaggtggcaca

SEQ ID NO: 685961 - DNA, 115 bp, Homo sapiens
tgcaaaccctctctctaccacgagcagcgccctgggagccctcacgagtcccggcatattctcaagatgcctacctgaaaggcaacgaagcttatagcggcaatgcccgcaatat

SEQ ID NO: 685962 - DNA, 97 bp, Homo sapiens
tccactgccgtcaactcctgttctcctcagagcctggagtttggatcataatacaagagaagcacagggcaaagacactgcataacctcaagaacta

SEQ ID NO: 685963 - DNA, 101 bp, Homo sapiens
gctgggggtgctgggcgacctgcaggcagcaccggaggcccaggtctccgtgcagcccaacttccagcaggacaaggactatggtgcagccctgcggggcc

SEQ ID NO: 685964 - DNA, 77 bp, Homo sapiens
tggtgcttcctgttcgcagctgcggcagcgcatattaaatttcctattgactacccctattcaccacctaccttcag

SEQ ID NO: 685965 - DNA, 83 bp, Homo sapiens
ttcatggattctaatggaatcaggcagttttgtgtccatgtgaacaactaatccacattcatctcaatggaaggatcctgcct

SEQ ID NO: 685966 - DNA, 98 bp, Homo sapiens
tgtgtgctgagcaaatggaagaacaaatatgtctgtcagactatgtcttcagcagtggtgcagttatatgcagcagatcggaactgtatgtggtcaaa

SEQ ID NO: 685967 - DNA, 82 bp, Homo sapiens
caagcgcgacgcccggcgcgagctcaagctgctgctgctcggttacgggcaggacttgagtggcttcggacagggcttctca

SEQ ID NO: 685968 - DNA, 100 bp, Homo sapiens
cccggtttgacgcacacggcaccaaactatgccttcaattaagttgcagagttctgatggagagatatttgaagttgatgtggaaattgccaaacaatct

SEQ ID NO: 685969 - DNA, 100 bp, Homo sapiens
tcaagcccagtcgggactcgagcctagggaggcgaggttcccgcaccggataggatgttggcaaaggatgaactgatgaccatacttgagaaatgtttca

SEQ ID NO: 685970 - DNA, 90 bp, Homo sapiens
agatgaatttgaggagcgagcaaaggctattattgtagaatttgcacagcagtttatttggcaacccaaggagttaatcctaaggaacat

SEQ ID NO: 685971 - DNA, 90 bp, Homo sapiens
attcgtggtgaaggtccggggcttgccctggtcttgctcggccgatgaagtgcagaggtttttttctgattcctgggcactcctccccgc

SEQ ID NO: 685972 - DNA, 97 bp, Homo sapiens
cattgaacatgccttcatcctctataacaagtatatcaccagcagccgctcttctaaaacattcaaaccaaagaagaatatccctgaaggatctcat

SEQ ID NO: 685973 - DNA, 98 bp, Homo sapiens
actttgagtacttggtgaaaggagccatcctgcttcaggataagaagctcatggccatgttcctagactcagcccgcctgcacccaggtgaaatatac

SEQ ID NO: 685974 - DNA, 50 bp, Homo sapiens
ggctcttcctcctcctcccgcgacggtggaaagttaccgaggctggacag

SEQ ID NO: 685975 - DNA, 100 bp, Homo sapiens
ttgggacaaaactgtatttaccttgaattatatccagatcgagagacagaagattctgaaagggttcaatgaaatgagagtcatcttggacaatgaggag

SEQ ID NO: 685976 - DNA, 59 bp, Homo sapiens
aagaatctcctgatatgactaaaaacttccaacaggtttctaagcatgaattgaggaac

SEQ ID NO: 685977 - DNA, 50 bp, Homo sapiens
aacaagaaataagaatccttctaaggtttctccacagacactacccaaag

SEQ ID NO: 685978 - DNA, 75 bp, Homo sapiens
taatgctgtggattcctgtctccaaaagtccagagacaacaagttcagcaagaaagattgtctttcaatcaggaa

SEQ ID NO: 685979 - DNA, 78 bp, Homo sapiens
ctgacaaaccccattccgctttgccagaagaggaacttgatgggaaacctgcttctcctactccggttattgtggcct

SEQ ID NO: 685980 - DNA, 96 bp, Homo sapiens
tgaccctggagctcttggcttccatacgtgtctcagacagaagtccagaaagatgatgaccagcttgaaaatatccagaaatctcaaaacaaactc

SEQ ID NO: 685981 - DNA, 74 bp, Homo sapiens
cgctgatggagctcaagaccagggccctgcagctggaagaggagctgttccagacctccaggtgaaggtacaag

SEQ ID NO: 685982 - DNA, 154 bp, Homo sapiens
cagcagcgaggcggcggcggcggctgcggaggcgcaggcagcaactgaggcagcggcaggctcaggtgcagccgctgtctcagcttttagcaagaagccacggtcagtggaagtggccgcaggcagccctgccgtgttcgaggccgagacagag

SEQ ID NO: 685983 - DNA, 75 bp, Homo sapiens
tggaacctgctgtatctactcaagagtggaagttttcacagacgctctgctgttgcccgtattcaggagttcttc

SEQ ID NO: 685984 - DNA, 100 bp, Homo sapiens
tacatcattgggcagctgggcctggccaaggaccccctggaggacaaagatcattccactcagcctgggacgatggggaggaaaaaaatccagatctccc

SEQ ID NO: 685985 - DNA, 97 bp, Homo sapiens
actgctccgtggtctcagcccaggacctccaggggaacaatgaggcctacgcagagctcatcgtccttgagacgagttgtactgctgtcacaggaaa

SEQ ID NO: 685986 - DNA, 90 bp, Homo sapiens
gggcccgcaagggcggagggggcccgaaggacttcggcgcgggactcaagtacaactcccggcacgaggacctctaatttctgccagtta

SEQ ID NO: 685987 - DNA, 96 bp, Homo sapiens
gccgcgaacttggtggccagcgccgcgcccggggccgtgcgctctcgggccactcggccgcaggatagtgacaacctctggtgggacgcctttgcc

SEQ ID NO: 685988 - DNA, 100 bp, Homo sapiens
gccttgagagcttcaggggaaatggcttcagcgcagtatattactgcagaagcagatagcaaggtaatttttgcagcagcggcctgtgttatcaagaaag

SEQ ID NO: 685989 - DNA, 83 bp, Homo sapiens
gtcagcaatagcaaacaaaacttatctcctgaggagaaggtgccgtgagcgatgtggagatgcaggaacactatgatgagttt

SEQ ID NO: 685990 - DNA, 100 bp, Homo sapiens
accttccctttgaattacagagaaactttcagctcatgagggacctagaccaaagaacagaggatgatgaggagtctgatgaggaagctgtgaagaaaac

SEQ ID NO: 685991 - DNA, 76 bp, Homo sapiens
gtaatccacccccaaccactctcttctgagggctcccagacatatataatgactgccactctccgcccctacctga

SEQ ID NO: 685992 - DNA, 90 bp, Homo sapiens
ccagggttcagctctttttctgagatcatcaccaccccgacggagacttgtgacgccagaagatcagctgccatgttacttgactcacac

SEQ ID NO: 685993 - DNA, 100 bp, Homo sapiens
acagttgatccagactcctttacatgatagtcttcctatcacgggcactagtgtggctctcctgttccagcaattgggagcaggaaaattcagattcgaa

SEQ ID NO: 685994 - DNA, 74 bp, Homo sapiens
gagcctgttggaggaactggcccggaaacaggaggacctccgctctgcaccgaaggggatgggtccgacccagc

SEQ ID NO: 685995 - DNA, 97 bp, Homo sapiens
taatggatgaaaggaaccgacagtggaagccgtgaggtggtggatgaaggcttgatccctggagatgggctgggtgccgcagggctcgattccagct

SEQ ID NO: 685996 - DNA, 80 bp, Homo sapiens
ccttgaaaaagctgccctgagacggtgtcccgccgaaagtcaccttcaggccattcagaggaggaaagagaggggaatat

SEQ ID NO: 685997 - DNA, 98 bp, Homo sapiens
ctgagctacattgcgaaaattaaactcccgaagaagagggatgggcgtgttttgggcgtgctagaggtgtcacgctccattggggacgggcagtacaa

SEQ ID NO: 685998 - DNA, 100 bp, Homo sapiens
ccgggaggggacggccgccggagccgcgaggccaaagcgcatcagcgaggaggtggggctgctgcagctccttggggaccccccgccccagcaggtcacc

SEQ ID NO: 685999 - DNA, 100 bp, Homo sapiens
accacgaactgaaccagttctgcagtgtgcacacgcttcaagaggtctacattgagctgtttggtagtgggcagcagtcagtgacaggtgtaacctctgt

SEQ ID NO: 686000 - DNA, 82 bp, Homo sapiens
tggtggtggccaagtatgcgcccagcggattctacattgcctccggagaaagcgtggatacccatcaacgaagttttgatat

SEQ ID NO: 686001 - DNA, 130 bp, Homo sapiens
aggaaattgaagctcaagaaggtgaagatgatacctttctaacagcccaaggctctctaaatacgtacagattctgcgataatgtgtggacttttgtactgaatgatgttgaattcagagaggtgacaga

SEQ ID NO: 686002 - DNA, 51 bp, Homo sapiens
cagacagaatccctgctaccaatttggacacctcccacactgagtccccaa

SEQ ID NO: 686003 - DNA, 82 bp, Homo sapiens
gcttgaacagggctgacaacatttttccttttccgctcccaaaatggcgatgacaccggcacctggcccaacaaccagtttg

SEQ ID NO: 686004 - DNA, 51 bp, Homo sapiens
tgaagagggaagacacgcggaaacagcggagctccctgggtcctcagcagt

SEQ ID NO: 686005 - DNA, 82 bp, Homo sapiens
actgttggtacagagggctggggagaggatgcagagctgcagttggatgaagtggtggggtcagatgctgtggactctggga

SEQ ID NO: 686006 - DNA, 102 bp, Homo sapiens
agttgatccatccagatgaggatatatccctggtggacccccaaaagtacaagggcatatttaacggattctcagttacacttaaagaggatggtgttcgtg

SEQ ID NO: 686007 - DNA, 75 bp, Homo sapiens
gtggtcgccgcggcggcgtgtgcgcccctcaggtggcacaagatctctgtaaagtagcaggcatagcaaaagttc

SEQ ID NO: 686008 - DNA, 97 bp, Homo sapiens
gagatggctgcgacgcgtgcgcaggtgtcatggagaaactccagctgggcccagagattctgcagcgggaaaatccaaggcttatttatgccaggct

SEQ ID NO: 686009 - DNA, 50 bp, Homo sapiens
aaaaatagtgatagctttgataaagtccctgtgaagcaggaagagtgagg

SEQ ID NO: 686010 - DNA, 75 bp, Homo sapiens
ctgctccgtggagatcgtcccgcgcctgccggaagcggggagaggtggtgagagatgacccctgttgaggatttc

SEQ ID NO: 686011 - DNA, 83 bp, Homo sapiens
ctcagcgcagcgctgcggcctttcggcagccgaacggccgcggcaggggttatggttttgtgaaattcacagatgaactggaa

SEQ ID NO: 686012 - DNA, 106 bp, Homo sapiens
cacgccagccgcaccatgccgctcctaagcctgcacagccgcggcggcagcagcagtgagagcacgtctgccatgtctctcctctatgaatgtgtgaacaccgtga

SEQ ID NO: 686013 - DNA, 82 bp, Homo sapiens
gaagaggaaaactctaccggtgcagatgagtgaccgaggaggtggcgttcctttgaggaaaattgacagacttttcaactac

SEQ ID NO: 686014 - DNA, 82 bp, Homo sapiens
actggcccggaaacaggaggactttgtttcgacgccggaccgcgtaagagacgatgatgttgggcacggaaggtggagaggg

SEQ ID NO: 686015 - DNA, 98 bp, Homo sapiens
gccggtactgttgaaagcgacaagtggaggcgccgctctagcggccgggactctgaactatggcgatctccctggtgagccaggagcccgtgctgttc

SEQ ID NO: 686016 - DNA, 75 bp, Homo sapiens
tgccgctcctaagcctgcacagccgcggcggcagcagcagtgagagtgaataaccctataccttccaatttgaaa

SEQ ID NO: 686017 - DNA, 83 bp, Homo sapiens
atttgaacaagctccagagtttctcctaggatgggatgctgttatggactggaaagatgtcctgtcaggaggggaaaagcaaa

SEQ ID NO: 686018 - DNA, 74 bp, Homo sapiens
ggtgtctcgtgtgtgaacatcacaggttttcaaatggaacattttgatgcatcacttagtacctatttcaaggc

SEQ ID NO: 686019 - DNA, 104 bp, Homo sapiens
gatggccagtttttcgtttgtgcgtcatcctctacctgagaaatggtcgcttgcccctagtctagacacggtttggtgcaagtgccaaagttgtgcatttcctg

SEQ ID NO: 686020 - DNA, 87 bp, Homo sapiens
acgggtttagcggcagcctcttcgatgtggtggtacagtgggagctattctgacatgtccactggaagttgtaaaaacacgactgca

SEQ ID NO: 686021 - DNA, 51 bp, Homo sapiens
aacattcagacccatttccagtcatgagggtattccctcagcggatactac

SEQ ID NO: 686022 - DNA, 83 bp, Homo sapiens
atagacaacaagatcgaacaggccatggaactgtggctgcaccatctgtcttcatcttcccgccatctgatgagcagttgaaa

SEQ ID NO: 686023 - DNA, 100 bp, Homo sapiens
attaccaactgctttcctttccctcagcacacagaggatgatgctgactttgatgaaggacccatgccccctttgtgatgaagccaaggaagtactcaag

SEQ ID NO: 686024 - DNA, 100 bp, Homo sapiens
ctcagagaagtcggaagaagcagacccagaaggctgacaagctccatgaggctgtgggtgagcgtggaggatgctcagatgcacaccgtcaccatctggc

SEQ ID NO: 686025 - DNA, 82 bp, Homo sapiens
tcgcagcacttggagcgcagaaccggccgcgcccggcatggaagaggagatggttcgtgttacgcagtggccgtttaactgg

SEQ ID NO: 686026 - DNA, 100 bp, Homo sapiens
aatggcacttcattggccacctacagaaacaaaatgtcaacaaattgatgggctaaagatacttcaagtgaagaagttaacctgagtcacattgtaccat

SEQ ID NO: 686027 - DNA, 100 bp, Homo sapiens
acacaagtgttatgacatcgttccaaccagttcaaagcttgttgtctttgatactacattacaaattgggaaaatgaggtacgttagtgttcgcgatttt

SEQ ID NO: 686028 - DNA, 75 bp, Homo sapiens
aacggcgcacattggtatgatgtggaagccaagaaggatcaagaaggtggagaagaaaagaaatctgtgcaaaag

SEQ ID NO: 686029 - DNA, 100 bp, Homo sapiens
acattgctgttcatgagtggaatccatgtttctggacgcggatttttggcctcatactctgttatagataaacaaggaccaatgccaaaggtgctcccct

SEQ ID NO: 686030 - DNA, 83 bp, Homo sapiens
tagacgacaaaatgcaaaaaaggaggccaaagactttctgtctgtggaagcccgtaaagagatgactagaaaggctattaaga

SEQ ID NO: 686031 - DNA, 123 bp, Homo sapiens
gcggggaccgagcctgggaggccggccggtgccagcacctttcggcttctgagacggcggcagcagcggcattcagatcaatgcaatgtcccggaatggcttccatttgccaggcctaccaac

SEQ ID NO: 686032 - DNA, 75 bp, Homo sapiens
cggcccaagaaatcaaaataaaggaaacacatttcatatactgcaggatttccagatgtgacttgcactcagaag

SEQ ID NO: 686033 - DNA, 100 bp, Homo sapiens
ccatgaatgaaatgaagagttattctcaagctgtcacaggagtgcccctgggcgctgggattgctctagcctgtaagtataatggaaaagatgaggtctg

SEQ ID NO: 686034 - DNA, 102 bp, Homo sapiens
gaaggttgtgactttagtatacacctcctgacaaggtgatccgggcgggccccgcaggaattttatcccctcaccggcctcacactagtatcgcatgtccac

SEQ ID NO: 686035 - DNA, 100 bp, Homo sapiens
cagaagtacctgcttcagagacatgagaagattcatactgcttcagtatcagacacagcacagcagccatctgaagagcaaagcaagtctcttgaaaaac

SEQ ID NO: 686036 - DNA, 80 bp, Homo sapiens
ctgcacggatggtcttgaaacacaaatggtttttgtgtgtatgtacagagaaccatcgctacatgaaattggagaaaaac

SEQ ID NO: 686037 - DNA, 76 bp, Homo sapiens
tccgaaaaacactgaatgctggggcgtactccaaagttgttcaggaacggttgctccttgagggcaggacagttct

SEQ ID NO: 686038 - DNA, 106 bp, Homo sapiens
tatcactcgctcccttgatgatcttgaggtcagcccaaggccaaccccactgtcactctgttcccgccctcctctgaggagctccaagccaacaaggccacactag

SEQ ID NO: 686039 - DNA, 98 bp, Homo sapiens
gtttccaggtgccaatggagagaaaggtgcacggggtaagaaggtggatggctctgtaaatgcctatgccataaatgtctctcagaagaggaagtaca

SEQ ID NO: 686040 - DNA, 90 bp, Homo sapiens
caattcaagaggaggagaggggttgttttataaactgcctggccgaatcagccttttcacgctcaagctacatctggtaccttggctggc

SEQ ID NO: 686041 - DNA, 100 bp, Homo sapiens
ggagagtagcagccggggcccaggatgtctcagtggtacgaacttcagcagcttgactcaaaattcctggagcaggttcaccagctttatgatgacagtt

SEQ ID NO: 686042 - DNA, 138 bp, Homo sapiens
gaaagaaaatatggaaattgaggaaagagagagagcagaaaagaagaaacgggcaactaaaactccaatggaaattgcagcttatttaataacatttgagaaacacgaagaatggctaaccacctcccctaagacaag

SEQ ID NO: 686043 - DNA, 123 bp, Homo sapiens
gtcatctccgcggtgtcgaggctctccctgcacagcatcgcgcagaacaaagggatcagaacttctccttgtgaggctgagcttcaggaattaatggaacaaattgacatcatggtaagcaac

SEQ ID NO: 686044 - DNA, 82 bp, Homo sapiens
cgggtctcgggggccgctctgggatcccggccaccagcaattgtccgtcctattttgtaacggattatgatccaaccattga

SEQ ID NO: 686045 - DNA, 100 bp, Homo sapiens
gtcgtttttccttgagctgaacgtcttgcaacagtggccgcacgcataggttctgtgaagtggccaaagagaatggcatggatgtcttccgtgtgtttga

SEQ ID NO: 686046 - DNA, 83 bp, Homo sapiens
cggggcttactgctgatgctagactgttatgagagtaaaacttgtctcggcacagagtcaagtaaagaaagccaacatacagt

SEQ ID NO: 686047 - DNA, 100 bp, Homo sapiens
ccgctgcctagagccaaggagctcatcctgccaatggagatcttcgtggatgatgagacgaagttgacgctgcatgggttgcagcagtactacgtgaaac

SEQ ID NO: 686048 - DNA, 100 bp, Homo sapiens
ggagaccacaaagaatgtacaacagacagtgagtgctaaaggcccccctgaaaaacggatgagacttcattttaacttctagtcatggcgaatgatcgca

SEQ ID NO: 686049 - DNA, 100 bp, Homo sapiens
gcgctgtgctgggcgctgtcatgatcgtgatggtgccgtcgctcatcaagcagcaggtccttaaggccatcagcatcagcaaagccatcaacacccagga

SEQ ID NO: 686050 - DNA, 80 bp, Homo sapiens
cacccagacacgacaccatgcatctcctcggcccctggctcctgctcctggtactacgacatttctgccaaaagtaacta

SEQ ID NO: 686051 - DNA, 101 bp, Homo sapiens
ggatctactactgcaatggccatgggcccccagatgccgacggccctctctacctcccctacaagacgctggtctccacggttgggagcatggtgttcaac

SEQ ID NO: 686052 - DNA, 82 bp, Homo sapiens
gtccccagagtccattaacttccgacgcttcacgacagccagtgacgtctggatgttcggaacgatggcactgaatttggag

SEQ ID NO: 686053 - DNA, 51 bp, Homo sapiens
caatcaaaacttaactcctggatacagtaacaaatgtggcaattattttgg

SEQ ID NO: 686054 - DNA, 100 bp, Homo sapiens
tcaacagagttacatagctgctatcagtgcccgctttgttcagctgcagcatggagagatagataaacgggtgggagaggtctaccaacagctacacgca

SEQ ID NO: 686055 - DNA, 98 bp, Homo sapiens
cgcagctgcccgccggggcggggatctaagcattgaagaacagtcagagtgtgctcaggatttctaccacaatgtggccgaaaggatgcaaactcgtg

SEQ ID NO: 686056 - DNA, 100 bp, Homo sapiens
cgtctgccctggagcagttcgtgaacagtgtccgacagctctcagctcaagctaaagcagcagcacacccttctgtacaaggtgaatggaatcctcacgc

SEQ ID NO: 686057 - DNA, 74 bp, Homo sapiens
cacgcctagctggcaaagaagtgaggatagcattgctgaccagatgggtgctaagttccctattaagtggacgg

SEQ ID NO: 686058 - DNA, 100 bp, Homo sapiens
ccctcgggtggaagaagtggggccatacacctacagtaactctcaggagccttctccgcagttggcttcctcggtagcttccacacggagcatgcccgag

SEQ ID NO: 686059 - DNA, 82 bp, Homo sapiens
ctaaggcgggatgtgtcagtcaaagcagcctctgaacttctcatgaaactctcagttattttaccaagaaaatggtttgcac

SEQ ID NO: 686060 - DNA, 78 bp, Homo sapiens
ttgactttgccagccagccgtcagacagcccaggcttgtccagccggaagccctgagggcagctgttcccactggctc

SEQ ID NO: 686061 - DNA, 96 bp, Homo sapiens
ccgttctagtcagaagaacaaaaggatgattctgatctatttgcttccagtaaaaatgctattggccaacagagcacttatggcaaggcatctcga

SEQ ID NO: 686062 - DNA, 109 bp, Homo sapiens
gccatcttgtgggagcaaaaccaacgcctggctcggagcagcagcctctgagggagtgcatccgccccaacccttttccccctcgtctcctgtgagaattccccgtcgg

SEQ ID NO: 686063 - DNA, 74 bp, Homo sapiens
atacggcacttcactgggcttgctacaatgcctatcagcttatcactgtggtgatcgcagccgcgggaggtggg

SEQ ID NO: 686064 - DNA, 99 bp, Homo sapiens
agtccctcgccgcttggaaagtgcagccttctacaggactcatctgatgatgtgagaagagttcagaggagggagaaaaatcgtattgccgcccagaag

SEQ ID NO: 686065 - DNA, 74 bp, Homo sapiens
tcagagtggaggaagtacagccagcaaatgatatggaacctagcaaagctgttccactgaatgcatctaagcaa

SEQ ID NO: 686066 - DNA, 100 bp, Homo sapiens
ggacggatgcagagcaactgctctctcggcccttctgcgatgttttacctggctgcggctgtgtcagatttctatgttcctgtctctgaaatgcctgaac

SEQ ID NO: 686067 - DNA, 100 bp, Homo sapiens
ctattccaaatgttctcagatggctgataatggagaaagatcacagcagtgttccaagttctaaagagcatccgcacttccactaatagccaagtagaca

SEQ ID NO: 686068 - DNA, 80 bp, Homo sapiens
cggagtactagtctcaacgagagacccaagagatcgggtgctaccaaggttttgcttttgcatggaaatgtctactgcac

SEQ ID NO: 686069 - DNA, 73 bp, Homo sapiens
tggttgtgtggtcgcgtctcggaaaccggtagcgcttgcagcatggccctgagacgggagttaaaggagaaag

SEQ ID NO: 686070 - DNA, 102 bp, Homo sapiens
acacctactctccgtacatccatgtaccagaagtgtaccactgtggatgaagcaggatctggctttgctgcccacgctggagtgtggtggtgtgatcacagc

SEQ ID NO: 686071 - DNA, 100 bp, Homo sapiens
aagttatgacaccatggatctcttcaggcacactacagaactaaatatgcatctctggattaatcgaattacagctgctagccaggaacatggactgaag

SEQ ID NO: 686072 - DNA, 98 bp, Homo sapiens
cgtgggtgagcggcgcagcggcggcagcggagagcgagagaggggagcaggacgcaaatcaatttcacagtggctattgattttacagcatcaaacgg

SEQ ID NO: 686073 - DNA, 82 bp, Homo sapiens
ttcaaggaggtgctgaagagcgaggagggagcatttcctgaagacgtagtcatgcagcacgtcagcagctcccagagcagcc

SEQ ID NO: 686074 - DNA, 100 bp, Homo sapiens
agctagttagctgtctgttgtctgtagcccagaatcctcactatggatgggctcattgaggacattaagcatcggcggtattatgagaagccatgccgcc

SEQ ID NO: 686075 - DNA, 100 bp, Homo sapiens
atgtggtccttgctgctctgcgggttgtccatcgcccttccactgtctgtcacagcagttttgacagtgtttcctgccttgctgactcttcttccctctc

SEQ ID NO: 686076 - DNA, 51 bp, Homo sapiens
tgcatcattttttcaaaatagggtcacagagttgtcaagtgaaactcaaag

SEQ ID NO: 686077 - DNA, 97 bp, Homo sapiens
gatgggggcgcaggaccggccgcagtgccacttcgacatcgagatcaaccgggagccggtgtgacaacatctggggtgatggaaagtatgaagaaag

SEQ ID NO: 686078 - DNA, 90 bp, Homo sapiens
tgcccctctatgcagtcatgtatcctgtgtttaatgagatgtcatttgtcagagtgaaccgctgtggtccccgagttggtgtaagaaaga

SEQ ID NO: 686079 - DNA, 75 bp, Homo sapiens
acttcctcgaatttcagcgtaaactgcagcatgatgttctgaagcttgagccacctgaagtccaaaaagggtcag

SEQ ID NO: 686080 - DNA, 82 bp, Homo sapiens
ggatattctggtggggagatgaacccaacctagtgggtgtaatacatcatgaactgcaggggaatgacagaggaagaggaag

SEQ ID NO: 686081 - DNA, 50 bp, Homo sapiens
cgagagcgtggagcgggctgggccagtagagatggggtttcgccatgttg

SEQ ID NO: 686082 - DNA, 100 bp, Homo sapiens
gagggtggttcaaaaggcatcaagacgagtggggagagtgaagatgtaggtgcaaaaaactacagacatctctgtgctgtttattacaacaagaatcctg

SEQ ID NO: 686083 - DNA, 100 bp, Homo sapiens
gcggaagaacagcctgaagaagggctccctcgtgaagaacctgaaggacacactaggtcacttcatcctggcccaggtactgcagctccaaatcgtgggg

SEQ ID NO: 686084 - DNA, 100 bp, Homo sapiens
acccagttcccatctttggatatagaggtcgatggtggagtaggtcctgacactgtccataaatgtgcagaggtgttaatgttgactttgcaaaatgatc

SEQ ID NO: 686085 - DNA, 87 bp, Homo sapiens
ggcccgaggggccgacccgcagcgtccctggtctctccagccctcactcggaaccgcacagctgtccgaggttctgtgggccatggt

SEQ ID NO: 686086 - DNA, 50 bp, Homo sapiens
ggcctcccaaagtgctggaattacaggtcatagacatgaatgactaccag

SEQ ID NO: 686087 - DNA, 75 bp, Homo sapiens
ggggtgcagtgtgtctggtcttatgagaggatgtgaagccactgaaagcttgactcagggaaaagaaatgtggga

SEQ ID NO: 686088 - DNA, 75 bp, Homo sapiens
aaagaccatcaagtttaccatggaaggaatgaaggccagctgaatggtgaaacaaatacacccattgaaggaaac

SEQ ID NO: 686089 - DNA, 75 bp, Homo sapiens
tcagctgcacctgttgtgttcagaagcccaggtgctttaaggaagcctcctatttcagtttctcaacatgaaagt

SEQ ID NO: 686090 - DNA, 75 bp, Homo sapiens
agatcaaaggtcacctggaaattgccttattggaaaaacatttcttacgatgaagccccacccgcccttcaggat

SEQ ID NO: 686091 - DNA, 100 bp, Homo sapiens
tcctggtgaagcatctgatgcacgttccatccggcgctcagctgggcttgagatgaaaacacaccatgtcatatcaagcagatcttcacacatccacatt

SEQ ID NO: 686092 - DNA, 82 bp, Homo sapiens
gaagcgattgggcgcggggccccagggggcacaagaagtccggaaccatcccttcttccagatcttcgtgaagactctgact

SEQ ID NO: 686093 - DNA, 75 bp, Homo sapiens
gcgcccctccgagctggggttggacgctgccagtttgcacagcagcaggaatggtcctcgtccgaagtgagaatg

SEQ ID NO: 686094 - DNA, 90 bp, Homo sapiens
cagagatggcagcagaagctgcatatcaaactggtccccgcggaagccgcggtgtcggcgccatggcggagctgacggctcttgagagtc

SEQ ID NO: 686095 - DNA, 106 bp, Homo sapiens
cgccagcgaccagatgcagcactggaaggagcagcgggccgcgcagggtaagcttgatgattaccaggaacgaatgaacaaaggggaaaggcttaatcaagatcag

SEQ ID NO: 686096 - DNA, 100 bp, Homo sapiens
gtggtgctaggggaaatgaagaggaaagtcttgcctctccattttcttccgttcatgagcacccagaggcctccattcaggctgttttttcagatgccca

SEQ ID NO: 686097 - DNA, 75 bp, Homo sapiens
tcaaggatgggactggaaacccaataccaccttggaaagtgccggtggagcagctgcgccaggccattgaagaac

SEQ ID NO: 686098 - DNA, 82 bp, Homo sapiens
agagattctgcaaatgcgacaagcctcccaggccataaaattttgagtagaaaaatccagaaatttgaaaatcagtatcgtg

SEQ ID NO: 686099 - DNA, 82 bp, Homo sapiens
cccagatgccgaagggaatccatttgatcattttagtgctggagaatctgttcattgtggaaccagcacagattttcatacg

SEQ ID NO: 686100 - DNA, 99 bp, Homo sapiens
cggatccagacagtgaaatagctacaaccagcctaagggtttctctactatgtccagtgatcgtgcagtccggccgccaccccacagtgctgcagaagc

SEQ ID NO: 686101 - DNA, 98 bp, Homo sapiens
atccctgggacaccgagattctgagaggcatcagtcaaggagcagtttttgcaagaaaggatcaaagtgaacggaaaagctgggaaccttggtggagg

SEQ ID NO: 686102 - DNA, 74 bp, Homo sapiens
ataaaagatctcagtacagtagaagctctgatcaaacagatgatggaggcagcaacacgacaaatcgaggagag

SEQ ID NO: 686103 - DNA, 82 bp, Homo sapiens
attttatgatttactggatgaactgataaaacccaccagtctaggaaaacgcagcacagttcccttgaccagagttctccac

SEQ ID NO: 686104 - DNA, 90 bp, Homo sapiens
ctcctttgccacttactgaacggtctgatctctggagaattcactgttatgtcaagtttaatgctccatctttgttgtatggggctctca

SEQ ID NO: 686105 - DNA, 82 bp, Homo sapiens
gctctctagaaactcgctctaaagacggaaccgccacagcactcaagatgcctaaatcaaaggaacttgtttcttcaagctc

SEQ ID NO: 686106 - DNA, 89 bp, Homo sapiens
tcttcttcgagtatttgtagaaggaccaggagaaagtttcagactatgaaatgaagttgatggatttagatgttgaacaacttggaatt

SEQ ID NO: 686107 - DNA, 100 bp, Homo sapiens
cagagaccagaatgaaagtcggggaagtccttatgcgaatcgtcagggcattaggaacaagcacatcatgattgacttggggactggcaacaacaacaag

SEQ ID NO: 686108 - DNA, 108 bp, Homo sapiens
cagcaagtagcccttggaaccatgatgcattgtcagaccctaaaggatcaaccctctgcatacagtaaaaacatggacttcccgtgcctctggctagggctgttgctg

SEQ ID NO: 686109 - DNA, 75 bp, Homo sapiens
gagcggaagaatggcagtgctcaaactcaccgaccagaaatcaatgtggactgaacataaatcacctgatggaag

SEQ ID NO: 686110 - DNA, 100 bp, Homo sapiens
ctggcaaattcagtgcagatcagccattcgttcctggttaactcggaaacacatccagaggctgcatgcagctgccacagtcatcaagcgtgcatggcag

SEQ ID NO: 686111 - DNA, 100 bp, Homo sapiens
agcggccgaagcagctttgcggctccctggggaagggaatgcagggttgctggggctgggcccagaagcagcagcaccagggaagaggattcgaaaaccc

SEQ ID NO: 686112 - DNA, 100 bp, Homo sapiens
ggctcccctgagggttcccttggatcagactcctcttttttatccatggcagtttcttgcagaacataaattattaggaaacattaaaaatgtggccaag

SEQ ID NO: 686113 - DNA, 74 bp, Homo sapiens
gccgcgctgcgccttccacactgtgcgctgaactgtggctgcaccatctgtcttcatcttcccgccatctgatg

SEQ ID NO: 686114 - DNA, 100 bp, Homo sapiens
ctaaagagctggtctacctcgtgcagattgcttgtcaggcatgctgcagacagacctttccgtccttcatgaacacacgtgtggtagacagatgactgtc

SEQ ID NO: 686115 - DNA, 80 bp, Homo sapiens
ctcgagtcatcaggctacagcatcatcggatcgcccagatctactccccggatcactcaagcaataacttctcgtccagc

SEQ ID NO: 686116 - DNA, 75 bp, Homo sapiens
cagcaggcatcatccgctatgcaattggggccaatgagtgccaggagcgccctgttgagtgtaagttctgcaaac

SEQ ID NO: 686117 - DNA, 103 bp, Homo sapiens
caggtttctgcacaggaatatcgagagcgtcatgaacccgagctatagagaaaggagatgaggtgagaagccctaccactgcaactgggacggctgcggctgg

SEQ ID NO: 686118 - DNA, 75 bp, Homo sapiens
ctttgcttcatcaggacctggcagccttggacgcaaacatgcagatctttgtgaagaccctcactggcaaaacca

SEQ ID NO: 686119 - DNA, 82 bp, Homo sapiens
cggagagaaccctgtcctgatcttcctagcctcttgaagccagggctcagggctgttgtgggaggggccgccgccgtgtcca

SEQ ID NO: 686120 - DNA, 100 bp, Homo sapiens
cttcagctgtcacaagaccaatatttggtatactgggcacaatccatctggtggcaggttttgaagccgcttctctggccgagttaggtttcgcccagcg

SEQ ID NO: 686121 - DNA, 100 bp, Homo sapiens
acgccaccatggacctggagcagcagcggcagcttgtgagcaccctggagaagaagcagcgcaagtttgaccaggctggagtgcggtggcgtgatcttgg

SEQ ID NO: 686122 - DNA, 83 bp, Homo sapiens
caagtacatcataatcggcgacacagagagaagaagaaggaggttcctgctgtgccagaaacccttaagaaaaagcgaaggaa

SEQ ID NO: 686123 - DNA, 100 bp, Homo sapiens
gtcattaattggacacagtgccagagtgtatgcactttactacaaagatggacttctctgtacaggatgcaggcagccagcaggttgggtttctgctggg

SEQ ID NO: 686124 - DNA, 100 bp, Homo sapiens
tggacaaagctgttgtctcagggagcacagaagattccccagctttccgttgcacaaacagtgaagtgacagtccagcccagcccctatttgagttaccg

SEQ ID NO: 686125 - DNA, 89 bp, Homo sapiens
agattcgcagtggtcgcttcttctccttggatccggatcacctgtttgaaaccatctcccaagccatgctgaatgctgtggaccgggat

SEQ ID NO: 686126 - DNA, 100 bp, Homo sapiens
aagccatccagatcaatcactgtgttaacaagtttaccgacaagactgtgaaactttcgggatggtggtgaaaatgctgattgaaaaagatccttcatta

SEQ ID NO: 686127 - DNA, 151 bp, Homo sapiens
ggcgtggagacgagataacacggaagccaggggaggtctgaagcctgagtatgatgcggtggtgataggagcaggactactggctctctctcctctacaagcgcctgatcggccccaaagtcttggctgtgcatgtggctgggctccagcg

SEQ ID NO: 686128 - DNA, 100 bp, Homo sapiens
gccggtcaggctcgccgccgagctggcccagccccagcctagggggctccagaagtctccaacccctttgatggcctggaggagttaggaaagaccctgg

SEQ ID NO: 686129 - DNA, 75 bp, Homo sapiens
cttgtggaagacacaaaagatggcatctggctggttcagcagcaagatgaagagcgacgtcggcagctgagagag

SEQ ID NO: 686130 - DNA, 95 bp, Homo sapiens
tcctctcccagagccggggacatcagagctgagagagtgaccctccacgaaaaggagaatcttatgaatgcagagaaccttggaatcgtctttgg

SEQ ID NO: 686131 - DNA, 90 bp, Homo sapiens
ggctacacagcactggttgtttctggtgggatcgttggctatgtaaaaacagagttgctggagaatgtaaccctaatccataaaccagtg

SEQ ID NO: 686132 - DNA, 100 bp, Homo sapiens
cggagctgacggtggaggttcgcggctctaacggggctttctacaagcgagtaaccagctcataaatcacatcgaacagtttttggatactaatgaaaca

SEQ ID NO: 686133 - DNA, 75 bp, Homo sapiens
ctcgcctgggttctggaggctgcggggccatcgctccaggaccaagaagctgataattgatgtgatccggaacca

SEQ ID NO: 686134 - DNA, 83 bp, Homo sapiens
gcgccgcggacgcgtcatcgagtgtgacgtggtgaaaggagtccaaaactacttacctggaagaccttccaccaccccctgag

SEQ ID NO: 686135 - DNA, 100 bp, Homo sapiens
tggtctttcctctgcattgctgatcttgtacttggattcagcaaggaaccttccgggatatctgcattacctccacctcctccacctccaccaccaccag

SEQ ID NO: 686136 - DNA, 75 bp, Homo sapiens
tgccgccgctctgaggagttaaagctgtcccctttcctccaacccaacggcttactttcaaggaagtatttgaga

SEQ ID NO: 686137 - DNA, 100 bp, Homo sapiens
ttcgtcgcctccttgcccgtgaccgtcgctagaactcagttgtgcgttgcggccagtcgccactgctgaagactatgaccgtctgaggcctttatcttac

SEQ ID NO: 686138 - DNA, 107 bp, Homo sapiens
gccctgtatataggagatggctacgtgatccatctggctcctccaacatttcagcaggaacttgatgcaaggcatgacaaatatgagagacttgtgaaacttagtcg

SEQ ID NO: 686139 - DNA, 74 bp, Homo sapiens
tacaaagccacaataggagctgactttctgaccaaggaggtgatctgtgaaaatggttcgctattcacttgacc

SEQ ID NO: 686140 - DNA, 100 bp, Homo sapiens
tgctctaggagctgaaaccagtgggtagatgtcgttctgaaacgcagattatctttctcaaggaatagatctttctggaatagaagtgatagaaaatgat

SEQ ID NO: 686141 - DNA, 75 bp, Homo sapiens
tttgatgttcctcccaggagacagctatatttgcccatgttattcaaggctgcaataggatctgtggctttggac

SEQ ID NO: 686142 - DNA, 73 bp, Homo sapiens
agatactcatcagaacaaaatggagccaaaatagttgcaacaaaagagtggctgcgggcctctcgggtgcttc

SEQ ID NO: 686143 - DNA, 95 bp, Homo sapiens
aaatatttgtcacagcaatgggctaaagcctctggaagaggtgaagttgggaaactgcggattgccaacaattctgtggtgttcttggtcacaca

SEQ ID NO: 686144 - DNA, 100 bp, Homo sapiens
ctcaaggtgacaggccagagcccaggtccccaggacagtgcagctaagtgttaggcggaaaaatactaaagagatgtttggtggcttcttcaaaagtgtg

SEQ ID NO: 686145 - DNA, 90 bp, Homo sapiens
aaaagaacaaattcagtcccttctccatgaaatggtacacgcagaacatgggaagatcagttttcctgccatccaggctgctccctcctt

SEQ ID NO: 686146 - DNA, 73 bp, Homo sapiens
tacatccaggaaagacatggagattctcttaaaaaggtactgaacgacacctgggtctccttcccttcctggt

SEQ ID NO: 686147 - DNA, 118 bp, Homo sapiens
gagagcgtgaccgagagcgcgaatatcgtcatcgttagaagggatgcccgggtagttaaagacatggcaactggaaaatccaaaggctatggttttgtatctttttataacaaactgg

SEQ ID NO: 686148 - DNA, 80 bp, Homo sapiens
aactttcacaaaatggatcaactctcatctggccaagatagtcgtgcaagcactgcagtgttcccattattcgattcttt

SEQ ID NO: 686149 - DNA, 83 bp, Homo sapiens
ctgaggaggacccagagcaggacagcggcccggaggacctgcctctcgtcaggtgctgactgggttacttttttaaacactag

SEQ ID NO: 686150 - DNA, 100 bp, Homo sapiens
cagtttctgagaatcaatggcttccccaatgagtactggggctggggtggcgaggatgatgacatcttcaaccgatctacccagacccggagctggaagt

SEQ ID NO: 686151 - DNA, 83 bp, Homo sapiens
ccttgttcccccaaatgtctgactctgactctcggactgagaaacgcaagatgaggacggggacttggttgccttttccagtg

SEQ ID NO: 686152 - DNA, 74 bp, Homo sapiens
gatttgggggctgtagcccccccagtcagtggagacttaaccaaagagacaatgcagatcttcgtgaagactct

SEQ ID NO: 686153 - DNA, 75 bp, Homo sapiens
tgttgccattatagagctggaattaggcaaatatggacagaatatttcagaaccatactttacgaacagaaggac

SEQ ID NO: 686154 - DNA, 97 bp, Homo sapiens
gagctccagagatgattactctcgggatgattataggcgtgatgatagagccccgggaaatggatacaagtagaagaaaattccatttataaagtac

SEQ ID NO: 686155 - DNA, 100 bp, Homo sapiens
aattaatgacaataatggatagtatgaatgatcaaggttcctggtacagttcagacaggacaaagtatgtgtgaagtttattcagggaaaccagaaaaat

SEQ ID NO: 686156 - DNA, 50 bp, Homo sapiens
aggaccggtaccggaatcccaaagaggtctgcggggtttccgagaggctc

SEQ ID NO: 686157 - DNA, 74 bp, Homo sapiens
aaaaatacttgcaaatacgtttataacatacactactcagacagattcagtgctcaagagtgaagaaaattcta

SEQ ID NO: 686158 - DNA, 113 bp, Homo sapiens
ctgagaccgtcttcattgtggagatctccctgacatgcaagaacagggtccagcaatggccaatgtacatggtggactatgccggcctgaacgtgcagctcccgggacctctt

SEQ ID NO: 686159 - DNA, 82 bp, Homo sapiens
cgacgctgctcaaaacctcgctccggaaaggggacacctgtatggtttgaagtggtgaacatggatttttctcggcttcaca

SEQ ID NO: 686160 - DNA, 50 bp, Homo sapiens
gcagcagcggcgccgtgctcgctccaggagaatgcagttgaaactaattt

SEQ ID NO: 686161 - DNA, 50 bp, Homo sapiens
tttcagaggggaatgctaagagatgcatggtcatggaggctatgattctg

SEQ ID NO: 686162 - DNA, 51 bp, Homo sapiens
tggaacaggatcatgatttgcaagcagcttcacaggctgctcaagaagccg

SEQ ID NO: 686163 - DNA, 101 bp, Homo sapiens
gacacgacaccatgcatctcctcggcccctggctcctgctcctgggaatttgatgaatcttcacccaaacaacctacaaatccttatgcatcatctaaagc

SEQ ID NO: 686164 - DNA, 100 bp, Homo sapiens
gaacgagcgacggcggaacccgtgggcctgtggactgcagcctcggcggtcagcagctgcatggctacttggagaatgagccgctgatgctgcagctttt

SEQ ID NO: 686165 - DNA, 100 bp, Homo sapiens
atcgaatcccagacctgtgcttctgactatcttctcttcaccagctcttcagatcaatatggtcagacatatttccaacatttgggtcaaaaccttgtcc

SEQ ID NO: 686166 - DNA, 51 bp, Homo sapiens
gggaggagaggagcggccggcccgccttgaaactggaacgccaagctgaag

SEQ ID NO: 686167 - DNA, 100 bp, Homo sapiens
gccatcgtgctgggggacctgaagcttaggaagttcgtcttctccacggaggagagggacttaagtcacaacagattatctttcatcaaggcaagttcca

SEQ ID NO: 686168 - DNA, 75 bp, Homo sapiens
cgggtgttcaagagctttctgagcctacatacagatcacttttgtggagccctactttgatgagtatgagatgaa

SEQ ID NO: 686169 - DNA, 82 bp, Homo sapiens
caaagttctctcgatcagggcatacatctttcttcgacaaagggagaatggggtactaagagaaaagcacgaagctgtggat

SEQ ID NO: 686170 - DNA, 75 bp, Homo sapiens
cattgatccgatggtggttactgacacatcaccttcactttgggatatggaatttgataagcagttagccacaga

SEQ ID NO: 686171 - DNA, 90 bp, Homo sapiens
gcagtacctgcagaaggtctctggagacatcttcagcaggtgaacttcacggtagaccagatccgcgccatcatggacaagaaggccaac

SEQ ID NO: 686172 - DNA, 99 bp, Homo sapiens
ggagtccatattcctgaacgtggctgctgtgaacacgcaccgggacaggcctcaggagaaagtatacctgttacaaagacaccattgccccagatggag

SEQ ID NO: 686173 - DNA, 75 bp, Homo sapiens
ccacagttggcctcttttggaatggcaacggcagagacatcactgtccaggctggagtgcagtggcacgatcttg

SEQ ID NO: 686174 - DNA, 98 bp, Homo sapiens
aatgcatcaagtgtcagatggttttctacaatgaatgggatattcaggttcatgttgcaaatcacatgattgctcctgagtattggtgttccattgct

SEQ ID NO: 686175 - DNA, 90 bp, Homo sapiens
ctggtcatggcgcagccgggcccggcttcccagcctgacgatgaataatacggcagctagtccaatgtctactgcaacttcaagtagtgg

SEQ ID NO: 686176 - DNA, 75 bp, Homo sapiens
ggggggagaacgttactgtggagaaccaaccaaggtgtatgcaacagcgttattgcaacaggctaacgaaaacag

SEQ ID NO: 686177 - DNA, 100 bp, Homo sapiens
ccccagaaaggattgtgacatatcgttggacccagaattgaggtggatccataaagaacccagccaacccgcagagggaggggaggggctgagctgtgag

SEQ ID NO: 686178 - DNA, 92 bp, Homo sapiens
gggccagagttccaggggctctgggagtggctgccaggatcccctgaggagagagctgtcttcatgaaggcttctcggaaaatgctgggccc

SEQ ID NO: 686179 - DNA, 51 bp, Homo sapiens
gaccaaaattgtggaaaagtcactctggctgaccccgcactacatctaccc

SEQ ID NO: 686180 - DNA, 50 bp, Homo sapiens
ctaaaatccgaggactttctgggcctgttcacaatgagcttgcattccag

SEQ ID NO: 686181 - DNA, 75 bp, Homo sapiens
ctggaagaggaacagaaagaggcagaaggggccgtggccgaggcagagaaactcaagtcaaggaatcttttgaag

SEQ ID NO: 686182 - DNA, 98 bp, Homo sapiens
cttgccgcttcatgaagtgtttaaaagtgggcatgctgaaagaaggatttgtaggtgaaaatgcccagccaatcctagaaaataatattggaaaccga

SEQ ID NO: 686183 - DNA, 76 bp, Homo sapiens
ctactctgatgtcaatcttgagggctagctccttcgagaactcatagaacggaagaccagctccttggatcccaac

SEQ ID NO: 686184 - DNA, 100 bp, Homo sapiens
ccaaatgcgcacgaggaggacactgcgggggcacctggccaagatctacgccatgcactggggcacagactccaggttgttcctggtcattgagtacgtc

SEQ ID NO: 686185 - DNA, 75 bp, Homo sapiens
ttggaccccgcggcgcccctcggcctcggagcaacgagcgcagcgccgggggaaatttgcagtggtgagaaaatg

SEQ ID NO: 686186 - DNA, 90 bp, Homo sapiens
gcagctgcctcagttcttagcgcaggttatggccattgcaccaacccattatatctggcaaagagaacgttctgttcatcacagtggagc

SEQ ID NO: 686187 - DNA, 90 bp, Homo sapiens
cacttcacctgcaccatctggaggcgtcacctcctcctgtcgcctggccctcgccatgcagaccccgcgagcgtcccctccccgcccggc

SEQ ID NO: 686188 - DNA, 75 bp, Homo sapiens
accatcttattaattcactctggagtagatcccataatagatcacgttcaagacagaaagacagacgtagatcta

SEQ ID NO: 686189 - DNA, 83 bp, Homo sapiens
tggaagcctatactaagctgacaggtttatgatagttctcaatctcatgagagcttctcagactggcgaggtgaactactgct

SEQ ID NO: 686190 - DNA, 50 bp, Homo sapiens
agtcaagtatgtcccaaacgtctgcagttatacttaagcatgaacattga

SEQ ID NO: 686191 - DNA, 100 bp, Homo sapiens
tggcagtggcgagaacttggcgccctatcaccccatcaagccccagggcgtgctggtgctgggccaggagcagagtgaccgccttctgatcagaggtggg

SEQ ID NO: 686192 - DNA, 96 bp, Homo sapiens
gcaggcccccccgcgccgaccgcgttcctatggacagacgcacagacacctgcagattgccttgggtccccagtgtttactcccatcaaggcagac

SEQ ID NO: 686193 - DNA, 90 bp, Homo sapiens
gaacaagcagctgggccatgaggaaggagcaaatggaatgatgactttgaaaaccactggcttacgcccaccatttccgaggtcctgtcc

SEQ ID NO: 686194 - DNA, 98 bp, Homo sapiens
tgctggaccagctcatgggcacggctcgggacgtttgcctatctggggcgcctggctcacgaggttggctggaagtaccaggcagtgacagccaccct

SEQ ID NO: 686195 - DNA, 96 bp, Homo sapiens
tgggggtggtgcaccgggacctgaaggttgtgatgatgattggcttgccaggagctggaaaaactacctgggttactaaacatgcagcagaaaatc

SEQ ID NO: 686196 - DNA, 98 bp, Homo sapiens
ccgaagcccacccagggagttgatgaattaaacaaccaccatgtcgagcaaaaaggcaaagaccaagaccaccaagaagcgccctcagcgtgcaacat

SEQ ID NO: 686197 - DNA, 100 bp, Homo sapiens
cggagactcaccccttcagcgtcgctgcccccagctcagctcttactgcgggccgctccgacggcggtccatcctggacatcggtgggatcaagtgaaaa

SEQ ID NO: 686198 - DNA, 95 bp, Homo sapiens
tcgcgccgctgctggttgctgtccctggcgtggcgttcagcaacggggagcgcgccaagcagctcctgcgctttgccatcgccaccctgagggac

SEQ ID NO: 686199 - DNA, 50 bp, Homo sapiens
cttcaacctgtctgtggagtggacgcgtatcccacgtgtgaggtggttga

SEQ ID NO: 686200 - DNA, 75 bp, Homo sapiens
agaaaaggagaaggataaagggaaggacaaggaattacataacatcaaacgtggccacagtacacgaacctgggg

SEQ ID NO: 686201 - DNA, 83 bp, Homo sapiens
agaccattcagatgggatctttccggatcaatccagatggcagccagtcagtggtggaggccatggtggcgtgttacccaggc

SEQ ID NO: 686202 - DNA, 83 bp, Homo sapiens
atccgcgcgctctacaacgtgctggccaaggtgaagcgcgagcgcgacgagtataagcggagatggagaaggatgaaactgtg

SEQ ID NO: 686203 - DNA, 96 bp, Homo sapiens
gagagagggaaggacggggcctggcccccgggactccctgtgccttgcttggagctgacgccgacggagagaagaagaaggaggttcctgctgtgc

SEQ ID NO: 686204 - DNA, 100 bp, Homo sapiens
cctacccaagacacccacatggaaacggacctgctcagcagcctccggcacagtcttcactaccgtagaagaccttggctccaagatactcctcacctgc

SEQ ID NO: 686205 - DNA, 90 bp, Homo sapiens
gacatggatgtcaaatactttgcacaggaagctataagtgatacaagtactggttgaacctgaccacttcaaggttgcagtgaatgatgc

SEQ ID NO: 686206 - DNA, 76 bp, Homo sapiens
gggaggcaagatgatccaccagcggttccatcctacacttggcctttccgctgtgcccattgccattactcctgca

SEQ ID NO: 686207 - DNA, 90 bp, Homo sapiens
ggaggatttgctgatctcatggcagtgagcccaaagagatagttgaaaagtccaaaatcccaggccgaagaaactcccgaactgaagagc

SEQ ID NO: 686208 - DNA, 73 bp, Homo sapiens
cgcagtcgtgcacgtcagttggcagtgccctgtgtgctgaccctcaatcaagatggcaccgtgtgggtgacag

SEQ ID NO: 686209 - DNA, 89 bp, Homo sapiens
gacgagggggccaaggcttcctccgggttttccaagagataacttcaccaagatgtccagtgataggcaaaggtccgatgatgagagcc

SEQ ID NO: 686210 - DNA, 75 bp, Homo sapiens
acggtcatgatggaccccaactccacccagcgctaccggctggaagccctcaagccgcttacaaacacgcagatg

SEQ ID NO: 686211 - DNA, 75 bp, Homo sapiens
acagactttattcagagccttttagtaaaaaatccagagatgatggcttggaaaaaagtccaatgaaaaaaaaac

SEQ ID NO: 686212 - DNA, 51 bp, Homo sapiens
agaaaatcgactcagctgtcactgatggactcagaattcatgattgaagaa

SEQ ID NO: 686213 - DNA, 97 bp, Homo sapiens
gggaaactaggtcgatggtcggcggcgcccggatgggcagctgaggtgattttacaacgagatgctgctctccatagggatgctcatgctgtcagcc

SEQ ID NO: 686214 - DNA, 75 bp, Homo sapiens
gtgtgagctgcctgaaaatgcactcggatgccgccgctgtcagtagctacagcaagctgggtagcaggcagatcc

SEQ ID NO: 686215 - DNA, 100 bp, Homo sapiens
tttggcagctactaaccgtccagataggatagacaagtaaaggcatgacttcctggcaccacagggaaaatcgggtgcaagcccagaaactatttcccca

SEQ ID NO: 686216 - DNA, 90 bp, Homo sapiens
aggacagacaggcagaagaggacagacagatggacactgaggtgatctgtgaaaatggttcgctattcacttgacccggagaaccccacg

SEQ ID NO: 686217 - DNA, 100 bp, Homo sapiens
gaaacgcaagacggtgccgagaagcagctgcgagtctccaacctgtcccagtatttcagcccagcctcggtgtccagcagcccggcccgcgcgctcctgc

SEQ ID NO: 686218 - DNA, 100 bp, Homo sapiens
cccggagggagacgcgctgccgaggagaacccagcggtgatcgtaaacttgttgataaagaagatatcgacactagcagcaaaggaggctgtgtccaaca

SEQ ID NO: 686219 - DNA, 51 bp, Homo sapiens
cagcagagaagccttcctggaaaagctttcccatggtttggcatggacatt

SEQ ID NO: 686220 - DNA, 95 bp, Homo sapiens
cccacctgcccggtgcccgaggaggcagccaagctcgtagcctgccactccgtgcatagcagaccccacgttagctgaaatgggaaaaaacttga

SEQ ID NO: 686221 - DNA, 75 bp, Homo sapiens
acctgcacatcttgttttccctaacatcaagaatgtttatcgatggtcgactggcaaaactaaatgcaggaaggg

SEQ ID NO: 686222 - DNA, 132 bp, Homo sapiens
gctcgattggttctactgtgggtctggactgatctccatgtcctgttgtggggcttttacagcctttggtgccggtggtggtgtgcacattgagccccggtatagacagttcccccagctgaccagatccca

SEQ ID NO: 686223 - DNA, 75 bp, Homo sapiens
cccggttccccggcccacagtgggggtgtgcaaacccgagagaactggtgaaagccctgtgtaaggaatgtgtag

SEQ ID NO: 686224 - DNA, 50 bp, Homo sapiens
ggagtgcccccagcccagagcccggttgttgatcattatgaaaatcctag

SEQ ID NO: 686225 - DNA, 100 bp, Homo sapiens
tcatactctgttatagataaacaagatgacagtttgatttacatggatcctcattactgccaatcttttgtagatgtcagcataaaggatttccctcttg

SEQ ID NO: 686226 - DNA, 100 bp, Homo sapiens
cagcgtggtacagctgtacctcactatgggattcattacaggttatgatgtgattgctcaagcccaatctgggactgggaaaacggccacatttgccata

SEQ ID NO: 686227 - DNA, 100 bp, Homo sapiens
tagcttccgttcctactaaacagatgaagtttgcagcctcaggcggctttctccaccacatgatatcagaaaaccaggactctgcagatgttgatcctca

SEQ ID NO: 686228 - DNA, 109 bp, Homo sapiens
ggaagctggcgctcaagtaccacccggacaagaacccggatgagggcgagaaggtcctgctcaatctggaattttgtcagatcgtgaagtggtaaacctctttcttcat

SEQ ID NO: 686229 - DNA, 101 bp, Homo sapiens
gcgagatgctgctgaatgggacgggaccctgcacctataacaaatcgggctccagggagtgtgagagaacatcatgggaatgctatgcagccatctgtcaa

SEQ ID NO: 686230 - DNA, 98 bp, Homo sapiens
cacgggggctccgcggcgtcctcggcgctgaaggggttaattcaacagttcaccaccattaccggcggcttcaatgatccatcctaaagaggtgcccc

SEQ ID NO: 686231 - DNA, 100 bp, Homo sapiens
gggccctgcgcgcctgatgggtcgaggcggacgcgcggctgcgtcagtccttcattacagtttgaagctgcttgggcattaactaacatagcatcaggaa

SEQ ID NO: 686232 - DNA, 82 bp, Homo sapiens
atactgctgaaataatgtttgagtccttcaatgttccaggcttgtacattgctgtgcagtcaacgcaaaatcatgctgccgt

SEQ ID NO: 686233 - DNA, 50 bp, Homo sapiens
agtcatcagactgcataaaatcaggacctgctgcagctacagtatgaagg

SEQ ID NO: 686234 - DNA, 102 bp, Homo sapiens
ttggaaacacctactttatagtcctgattcaagtgttggcggatggaagggaggagactcctgaccctcagaatgggtttgtgtttagtgaatcagagggat

SEQ ID NO: 686235 - DNA, 75 bp, Homo sapiens
gcgcagggcctgcagcgggagctggacggcgagcgcgagcggcgcgagaaagccgacggtcgcaaggtcctacgg

SEQ ID NO: 686236 - DNA, 78 bp, Homo sapiens
aatggagaagtaaagattttgctgaaaagacagctgggaagtggtggaaggactgaggggggagatgaattacaccca

SEQ ID NO: 686237 - DNA, 105 bp, Homo sapiens
tggcaattaagaagatgtcctatagtgggaagcagacccatgagggtgtccgcaatgttgccagtgtctgtctgcagattggctacccaactgttgcatcagtac

SEQ ID NO: 686238 - DNA, 98 bp, Homo sapiens
ggaagaactccgtgcccagatgctcataaggattgtcctctttctacaaaaggttactttccgcaccagaatctatcactgcaacatcaacagtcagg

SEQ ID NO: 686239 - DNA, 82 bp, Homo sapiens
gaagagacattagaggtcatccaaagcagccgtcccctctgcagcctctctgacaagtggcaaggggagagccagttgcgca

SEQ ID NO: 686240 - DNA, 88 bp, Homo sapiens
gctgctgaccgagagagctcactcagccaggaagtggttacctggaaggaaaggagctgcagaacttgatccaggagctccagcaggc

SEQ ID NO: 686241 - DNA, 87 bp, Homo sapiens
ctacacaaccctcaaaaacctgctggcccaaatcaaggtgctgggtttgtgcggagccgcttaccggcccacggaggagatcgatct

SEQ ID NO: 686242 - DNA, 83 bp, Homo sapiens
gtatatgcacatgctgggctaccctgctcactttggacagcatgcttttcacttccactgcatctctcgctggctcaaaacac

SEQ ID NO: 686243 - DNA, 100 bp, Homo sapiens
ctcccggtctcggtgtagctgccgtggttgccaggagagctgcgccggcgagaagcggccgagccagcagcaggaatggaaattaagtccaatgaaagat

SEQ ID NO: 686244 - DNA, 126 bp, Homo sapiens
ctcagggcctgccattaccctggaaaacactcgtgtggttagccaatcattgcagcattacttagagctcggaagggctattcaggcagctatcagccaggcctttaaaaccccagaggtcatcag

SEQ ID NO: 686245 - DNA, 100 bp, Homo sapiens
gcttcccgggagcaagctggtggactggctgctggctcagaattaatgcaccatctggaaacctctgagatcatgccataaaaggaatttggactttttt

SEQ ID NO: 686246 - DNA, 75 bp, Homo sapiens
gcagcgtgcgttcagccctgggtacttgattctaaagctcgaaaggcctgctatagttcagaatatcacatttgg

SEQ ID NO: 686247 - DNA, 101 bp, Homo sapiens
gaaaagtctgtcaccattcaacctcccactggagagcccctgttgggaaatgattctactcggacagaggaagttcagtagagacgggggttcaccatgtt

SEQ ID NO: 686248 - DNA, 99 bp, Homo sapiens
gacctggaccagccagaggacgcgggctctgaggatgagctggaggagggggtgatgctgaacaggagcttggcccccctccatctgtagatgaggcag

SEQ ID NO: 686249 - DNA, 100 bp, Homo sapiens
ttgttcattaagacttcccagcattcctacagatataaataggtcagtactcctgcatttgtaccaacgaaaactcacgtgctgcttcatcgaatgagtg

SEQ ID NO: 686250 - DNA, 75 bp, Homo sapiens
gcagcagcagaccatcctcatgctgaaggagcagaaccgactcctcacccaggccaaacgtaccaagaaagtcgg

SEQ ID NO: 686251 - DNA, 83 bp, Homo sapiens
ggatcatgtctgcgagccaggattcccgaacatccagtcatggataaaaatgagctggttcagaaggccaaactggccgagca

SEQ ID NO: 686252 - DNA, 75 bp, Homo sapiens
tcggacaaagccctcgcgtcggacccttgccagaacttcctcatcaccgggggcatcgtggccacagctgggcgc

SEQ ID NO: 686253 - DNA, 100 bp, Homo sapiens
agcattcgcctccatggcccactcgccggtggctgtccaagtgcctgggatgcaggtcgggaaagaggttaaagaagacacgcaagtatgatatcatcac

SEQ ID NO: 686254 - DNA, 80 bp, Homo sapiens
tggtggtttggagtcaaatttgctgcagtgaagcctgcctacagttttcacaaatctgtatcctttcagtaaagaatggc

SEQ ID NO: 686255 - DNA, 98 bp, Homo sapiens
gactgccgagggtctcagcgggatctggagtcagggcaagagtgagccatggagctacgtgtggggaacaagtaccgcctgggacggaagatcgggag

SEQ ID NO: 686256 - DNA, 83 bp, Homo sapiens
gagttcctgcctccagctgccaggggggacagccagccagcagcaggaggcctacagacctggtacctggatttttgcccgag

SEQ ID NO: 686257 - DNA, 82 bp, Homo sapiens
ggatgcagcagataaccggaaaatcacacctcttatgtcagcatttcgcaaggtaatctgtaagtcagatgctccaacaggg

SEQ ID NO: 686258 - DNA, 100 bp, Homo sapiens
cctggcggtgcccgaggagtagtcgctggagtccgcgcctccctgggaagtgggaaaactcttgcctttgccatcccaatgattcatgcggtgttgcagt

SEQ ID NO: 686259 - DNA, 100 bp, Homo sapiens
gaggaagatagtcttgggacccttgcatggtgtttcaaagggtggtgaagaactaaggatgagaacaagttgagcagtgccaacggccatgaagaacgta

SEQ ID NO: 686260 - DNA, 90 bp, Homo sapiens
acatacctgcttgtcagccagctccgggcccagggagaggcctgtgtgcagttccaggcaggaagttatgttcgtgatgatgcagtcccc

SEQ ID NO: 686261 - DNA, 100 bp, Homo sapiens
tcctggaggatgtgcggggtgcgccggcagaggatccagtgttcaccatcctggccccggaagggactggtgattgcagctggaagtgcccatgaccgag

SEQ ID NO: 686262 - DNA, 100 bp, Homo sapiens
ggaacatggcgcaagctctgtctgaggaggagtttcagcggatgcagaggaacaatcctgcaccatgactcaacagccacttcgaggagtgaccagcctg

SEQ ID NO: 686263 - DNA, 100 bp, Homo sapiens
cagaagtgattccagtgcctatagaggtacctcttaccagaaagaccttgaatctgacctgcacggtgtttggaaaccctgaccccgaagtgatttggtt

SEQ ID NO: 686264 - DNA, 107 bp, Homo sapiens
ggccgacttcgatgatcgtgtgtcggatgaggagaagtatgaagtgtaacagaacagactttaccacctgaaactgctgcttcaagttcagatcaggcaaggaacaa

SEQ ID NO: 686265 - DNA, 51 bp, Homo sapiens
actactacaagcactatttatcaacaaaggagctcattttgcagctctcaa

SEQ ID NO: 686266 - DNA, 75 bp, Homo sapiens
gatttgttaaggattccaagtaactcttatttggtgaccttgggaaaggtgttgaaagtgatcgtcgtcatgcgg

SEQ ID NO: 686267 - DNA, 101 bp, Homo sapiens
gcgtggttcccacaaagagtataagcgagggaagtcgtgcacgaacaccaaggcatcctgtacacgtcaaagaagagcccctcgatccagaggaagctgaa

SEQ ID NO: 686268 - DNA, 100 bp, Homo sapiens
attcagtggtgtttttctcaggtgaaaggagcagtagatgatgatgtagcagaagaatggtagataacgcagatcatctctggaaaggatattgatccgc

SEQ ID NO: 686269 - DNA, 99 bp, Homo sapiens
gtggccgtagcggcttgttggataagatcagcggtttgagtgctacgtttgcagaaattttcttggaaataatccaaagcagtcttcctgaaggagtca

SEQ ID NO: 686270 - DNA, 100 bp, Homo sapiens
cgagcctaagagggcagccgcctgaaggaacgcgacggcggcgcccgcagccatgaaccagagaatcagtcagagtgctccagtgaaacagccaccaccc

SEQ ID NO: 686271 - DNA, 82 bp, Homo sapiens
tgcagaaaggcttcactacccttatcccggagagctgacaatgatgaatctcagatggctggctgtggtgaaattgatcatt

SEQ ID NO: 686272 - DNA, 75 bp, Homo sapiens
aacaatgaaagcaagcaggaagtttcctatattgggataaccagttggtcctgagaaaagggtgccagcgatgcc

SEQ ID NO: 686273 - DNA, 100 bp, Homo sapiens
gtggagaacgtgaacgtcatcatctccacctacggcgagggcgagagcggccccatgggcaacatcatgctcaaatccttttaataaagaagagctgaca

SEQ ID NO: 686274 - DNA, 75 bp, Homo sapiens
gacccgactgcctctctcagtgagagctcttcagaaaccaggctgctttcaggaacattgctgtggattcccagg

SEQ ID NO: 686275 - DNA, 98 bp, Homo sapiens
cggggtggagttccgcaccctgatgaaagcctacgggatccgctttgacgtgatggtgaacggcaagtccctgaagaggaaggagaaggaatatgagc

SEQ ID NO: 686276 - DNA, 100 bp, Homo sapiens
gctgagctccccaccaagacagtttgctgcggtcagcatcacaactaatcaggctggaatgactatgcatagttctggaaactcttcatcccaagtaccc

SEQ ID NO: 686277 - DNA, 94 bp, Homo sapiens
cttgaaaggaggcccctgccgtgtggacccgtaaaataaaatggaattcagaaggagctggcggacatcactttagaccctccacctaattgca

SEQ ID NO: 686278 - DNA, 100 bp, Homo sapiens
ctcgctgtggtcggccatcggactctccattgccctgcacgtgggttttgacaacaattcgttcagggcaccgagcaaacatatttagtgcaaagttctt

SEQ ID NO: 686279 - DNA, 95 bp, Homo sapiens
gcaacatctttcctaaccctgaagcgacttttgtcaaggaaatgtatgatgccgggcgggacggcttcatcgacctgatggagctaaaactcatg

SEQ ID NO: 686280 - DNA, 100 bp, Homo sapiens
attcgaagtgacctcagcagggcatccaggtttttgaagaggatgctctcagctgggaagataagctgaacaggatcatggctctctttgatgtgtggat

SEQ ID NO: 686281 - DNA, 82 bp, Homo sapiens
cttgaagccaggacagtgtaccaaactcaaagtgttgtggcagcactgcctgaaggtatgagaccagattctaatctttatg

SEQ ID NO: 686282 - DNA, 116 bp, Homo sapiens
ctaagatgatcgcccggctgggcaaggagatcaacaacccagagtccgtgtattactgggcccagaagacaggggcaagtgtccgagtggtgaatcagctacttacagagatggat

SEQ ID NO: 686283 - DNA, 83 bp, Homo sapiens
cttccccctgtctctgccctcctggcgggcccggcggctctcactatccagcgggctgacgcacgaggcacacaggaaggagg

SEQ ID NO: 686284 - DNA, 75 bp, Homo sapiens
gcaccagttcaagtggccctcagggcatccccgttttcgtacagaacctgctaaggccatcaaacctattgatcg

SEQ ID NO: 686285 - DNA, 100 bp, Homo sapiens
gtgcagggtaacatggcggatgcggaagatcctgaaggacacgcaggtgactcgacaggccttaaatgagatctcggcccggcacagtgagatccagcag

SEQ ID NO: 686286 - DNA, 75 bp, Homo sapiens
ccgtcgtggaagcaggactgcgccgcgtcttcctcaaggctgacgtgatggcagacagggttccccgctgcccgg

SEQ ID NO: 686287 - DNA, 74 bp, Homo sapiens
ctcaccttttgtacctgctacctggcttcttacctcacgaacaagatgaagttgcggagaataatgaacatgat

SEQ ID NO: 686288 - DNA, 75 bp, Homo sapiens
atggtggccggcctgacaacacagggcgtggagaactggaccccatcctgactgaggtcaccctgatgaatgccc

SEQ ID NO: 686289 - DNA, 100 bp, Homo sapiens
caatatttctcagaggatagcctttcacttattcatctgtccagcatgactcatccccgggagtgttgaattgtcactgctgttccaagggcacacgcag

SEQ ID NO: 686290 - DNA, 83 bp, Homo sapiens
agaaaaagtgctcctgggactccaggataccagacatcaacgagtgtgcaacaccgtcgaaagtgtcatgcggaaaattctcg

SEQ ID NO: 686291 - DNA, 98 bp, Homo sapiens
cgcaggcccagtgttcgtcaaagtcaaccgcaggacgcagcaagagtgagccatggagctacgtgtggggaacaagtaccgcctgggacggaagatcg

SEQ ID NO: 686292 - DNA, 90 bp, Homo sapiens
gggaagaagtatctgctgaggatcttggaggtgctgatcttcattgcagtctttcccagggaactccgatgaagtgttccaacaaaatga

SEQ ID NO: 686293 - DNA, 90 bp, Homo sapiens
gcagagtggcaagaagaagaaaaagcagaagatggtccgagcagatcccagtttattagatgtgttcagagcaacattgttttgttgaca

SEQ ID NO: 686294 - DNA, 100 bp, Homo sapiens
gtgagcagcagtgaaggaatccatcatcccatcagcaaagttcgagatacaaatccaatttttctttttaacaaagaaatgatcttatgtgatcgtccac

SEQ ID NO: 686295 - DNA, 100 bp, Homo sapiens
gacttggtgttggaagaggacgtcaccgtccctgggacgctcagcggctgcagtgtgctcatgggagcttagaagatcccaaaagtataacccatcataa

SEQ ID NO: 686296 - DNA, 101 bp, Homo sapiens
ggaagaacgcgccagagcaaaatgggacacacccctggtggcggcggcgtgtaacaccttcccgaggaaactccgctgccgaccctgcctgagcgcgggag

SEQ ID NO: 686297 - DNA, 80 bp, Homo sapiens
ggcagctagcagggcgcttcgggtgatgggcagaggcttcagtgtccccttcgcctccgcaggagaggagaggcagcagc

SEQ ID NO: 686298 - DNA, 133 bp, Homo sapiens
ctggtcttcaactcttggcctcaagtgatcctcctgccttagcttccaagaatgctgaggttacaggatcgacgagaacgtgctaggagcccagctggacgttgaggccgcccattcagagatcctcaagtac

SEQ ID NO: 686299 - DNA, 51 bp, Homo sapiens
ctgaactggatgcattacaaccagacagaagaggatgtggagaactttgac

SEQ ID NO: 686300 - DNA, 75 bp, Homo sapiens
atcctgagagagagaattaaagtctaactctccaaataaagtgttgtgaagagcgaagacttttcgctcccagct

SEQ ID NO: 686301 - DNA, 100 bp, Homo sapiens
aacaagaattagaaactccaatgagagaacgttttaggaatctagatgaagttgactatagtcaatggggccaatggagccaagtgtatggaaacccaca

SEQ ID NO: 686302 - DNA, 82 bp, Homo sapiens
gctccgtggccttagctgtgctcgcgctactctctctttctggcctggaggctatccagcatttcgggcagacaacttgaac

SEQ ID NO: 686303 - DNA, 122 bp, Homo sapiens
tatttcttgtggatattatggctaataacacaacaagtttagggagtccatggccagaaaacttttgggtacctggagtagaacagaaaaattattatgtctgtgttcccttgggactcatt

SEQ ID NO: 686304 - DNA, 82 bp, Homo sapiens
tgcctcgtggtctaaagcttcggcacaagggcccaactggaattccacttacggcaattctgtggtgttcttggtcacacat

SEQ ID NO: 686305 - DNA, 112 bp, Homo sapiens
tccaccaactccagcaggttcccaccttcacccctggcttctaagcccacaggaatccattacattgggcgtatggaagagggcagcattggccgttttatcttggaccaga

SEQ ID NO: 686306 - DNA, 100 bp, Homo sapiens
cagatttgtttgtcatccttgtacagcaatctcctcctccactgccactacagggaagtgcatcacatgtcagtacactcagaagaagccttgtttttac

SEQ ID NO: 686307 - DNA, 51 bp, Homo sapiens
tgctctgggacctggttgacaggataggaatttcagaatgcatggatagtg

SEQ ID NO: 686308 - DNA, 74 bp, Homo sapiens
agaaaacaagtggctgcctcctggtgacggacatgcaagacctttaccagaagatgatagtattgaagcagata

SEQ ID NO: 686309 - DNA, 83 bp, Homo sapiens
ggcggcggcgctttcggcgcgggcccgggccccgagcgcccgaacagggcgtgatggtgggcatgggtcagaaggattcctat

SEQ ID NO: 686310 - DNA, 82 bp, Homo sapiens
tccgacccgcgaacccctctgggatccccgccgctctgtctacaacccgaggagcaggccgggctctcgccatgggtcactg

SEQ ID NO: 686311 - DNA, 98 bp, Homo sapiens
aggcagctcagatgcatctggttcttctaaaggagcaattctccaatacttacagtaatctcatattaacagttaccctgcagtttgtgaatttttgc

SEQ ID NO: 686312 - DNA, 83 bp, Homo sapiens
gctggcagggtggacctcaggagcctcctaaaaccacaggaaaaccaattctgtgtcctcggaggaccacagcccagttgggc

SEQ ID NO: 686313 - DNA, 83 bp, Homo sapiens
ccagcagctggactatggcatctatgttatcaaccaggaagagcctaggctggatgtcttgatcaataacgcagggatcttcc

SEQ ID NO: 686314 - DNA, 51 bp, Homo sapiens
atgagggaatacaagtgtcatgtctgtggatgttgataccacctatccaga

SEQ ID NO: 686315 - DNA, 96 bp, Homo sapiens
tttcattatggagggaggtttggcagatggagaacctgatcgaacttcggtcctggcattgatgtgcctgctccagacatgagcacaggtgagcgg

SEQ ID NO: 686316 - DNA, 96 bp, Homo sapiens
gcagattattgacagagatggggaagaggaagaggaagaggaggatttgaggctggcactgaaagaggggcacagtgtcctggagagcctcaggga

SEQ ID NO: 686317 - DNA, 98 bp, Homo sapiens
ccaaattgtccccaagagaggaggaagaactggatcctagaatacagcatacggcggcatcaagaaaggagagcaattttgacccccgttttgacaga

SEQ ID NO: 686318 - DNA, 75 bp, Homo sapiens
cccagactggagatgctctggggaaagcacttgcttcggataccttaggaaagccagctgctaaggatgtccatc

SEQ ID NO: 686319 - DNA, 73 bp, Homo sapiens
caagaccgactacacgggccctgagagctacgtggcccagatgatcaaggtcccactctatgaccagtgggag

SEQ ID NO: 686320 - DNA, 101 bp, Homo sapiens
gcggagctgacggtggaggttcgcggctctaacggggctttctacaaggctttacaggaagtatggtgctggcatctgcttggcttctagagagtcttaca

SEQ ID NO: 686321 - DNA, 100 bp, Homo sapiens
agcaacagctctgccggctggaaggtccacaactcccaggcctgttgcagatctccaactcctgctttgtgtgaccccccagcatgctctctgccggtgg

SEQ ID NO: 686322 - DNA, 75 bp, Homo sapiens
tttcgaggagctctcccagggccagcagctctgcaagtgacagccccaatgctgttcatgaggtggagaagtggc

SEQ ID NO: 686323 - DNA, 82 bp, Homo sapiens
cagggctctatcaaggggctggtgtactccagcaacttccaggggctatgccattgccagcagcagtgacgatcggatgaat

SEQ ID NO: 686324 - DNA, 100 bp, Homo sapiens
caatcacctgaaggatctgacttccagaaggtaaagtgaacagagttatctgtgacattccatcaggcacctatgtaacgaaatcataccgtaataactc

SEQ ID NO: 686325 - DNA, 89 bp, Homo sapiens
gccgtagtgcgcctgcgcgcggctaggaggggccgtcaggcggggatacagcctggaagctttcctgctctgggaccctaccaaggtgc

SEQ ID NO: 686326 - DNA, 123 bp, Homo sapiens
catgttttcttggtgcaacagtgaagtatcttcaaaaattcatccctgaaattactatcagtgatatacttagatcaaatgatgccgtttggaaaaatttcccagcagttgtgtggcgtaaag

SEQ ID NO: 686327 - DNA, 75 bp, Homo sapiens
acgccagtctttgaagggcttgccttcaaggacaccatgtggcggatctttactggatcgctgctggtagaggag

SEQ ID NO: 686328 - DNA, 74 bp, Homo sapiens
atatgggtcctgctctttttgcacttacaggacaaattgcagaaaatcttggagaagaagagcagttggtccaa

SEQ ID NO: 686329 - DNA, 90 bp, Homo sapiens
cagggaccaggcggaggcgtcgcgggagcctttggggcaccacagagatgcggggaggagagagcgatggcttttttcacccagaaggcc

SEQ ID NO: 686330 - DNA, 83 bp, Homo sapiens
ggccacgcaccgcctgctgctgctgggtctcctctgagcctccggcctccataagacccaaaacagatgacacctcttcccag

SEQ ID NO: 686331 - DNA, 100 bp, Homo sapiens
gggctggaacgcgccggaatctgaggtgtgagtagagcctgggggagagtggatccaggtgaagggggcagagactatcttgctaatcatggccggttaa

SEQ ID NO: 686332 - DNA, 74 bp, Homo sapiens
ctgagcccgtccgtccgccgccaccacccactccggacacaggcttctcacggcattcagcagcagcgttgctg

SEQ ID NO: 686333 - DNA, 49 bp, Homo sapiens
ttgctgcactttattatgccggagaattataggatattccaagataaat

SEQ ID NO: 686334 - DNA, 98 bp, Homo sapiens
gactgtggagatgtggtgcgactagatttggagtctctctacctttggtcttctccatacttttgtcagtgaacatgctcggcagtccatttttagaa

SEQ ID NO: 686335 - DNA, 83 bp, Homo sapiens
aagaaattgaagaactcagatcaaaacctgttactgaaggaactggtgatattattaagaactcccccactggaaaggattct

SEQ ID NO: 686336 - DNA, 100 bp, Homo sapiens
cacgcctcccaatgctgtggaccggccctgcctgcgactgaaggtgtacgtgcggccgaccagtatggacctgtctgccaatcaggacgaggagaccgac

SEQ ID NO: 686337 - DNA, 100 bp, Homo sapiens
gggcaacaaagctagtgattacctggtagacctcattgcctttcttcgtagcacctttgctgtattcacacaccttcctagtccgaatgtcattcagaat

SEQ ID NO: 686338 - DNA, 100 bp, Homo sapiens
ggctgagagcgttacaggctgcgctccggggccagataggccgggcgctcagaaggaaaccagcctggacaccaagtctgtgtcagaaggccacctcaag

SEQ ID NO: 686339 - DNA, 75 bp, Homo sapiens
tggtccttaaaaccgaagaggaggacggttggatcgtcaaacgcaggctactaccttggtccatcaaatttttgg

SEQ ID NO: 686340 - DNA, 74 bp, Homo sapiens
attcccagaccttcagcccgtggcccggatgcaggacagacccctcagcaccaggaatatcttagatgatttta

SEQ ID NO: 686341 - DNA, 101 bp, Homo sapiens
ggggccgccatcccctcagagcgtcgggatatcgggtggcggctcgggacggaggacgcgctagtgtttctgagtcccttcaacatgatcctgggaggaat

SEQ ID NO: 686342 - DNA, 100 bp, Homo sapiens
ccagctcagccatgcaggccccaacaggtcagctcggtgcccttccttggagctgccggccaccagcagagcctaccctcttcatggaaagcctcgtgca

SEQ ID NO: 686343 - DNA, 90 bp, Homo sapiens
gcgaggagctgagaacagaagtgagacagctgaagcgtgttggggaaggagctgtaaagagactggagaatgctggaggagaccttaagg

SEQ ID NO: 686344 - DNA, 87 bp, Homo sapiens
gatctcagagaaggaggaggtgaccacgcgcgagggagtgcatccgccccaacccttttccccctcgtctcctgtgagaattccccg

SEQ ID NO: 686345 - DNA, 83 bp, Homo sapiens
caaggccaagtatccgccagtcaataggaagtacgagtgtttgggccccatggtatccctgtgacagtatttcccaaaaggga

SEQ ID NO: 686346 - DNA, 90 bp, Homo sapiens
agatgcccctcctccaccagaggactgggaggagcatgtcaacaggttttggcacaaataccagtgggaatagtatttttggaagtaaac

SEQ ID NO: 686347 - DNA, 75 bp, Homo sapiens
gcctaggcattttgctgtctcctcctaatacgccattcgatgaggactatctaaaccatctcgagcctcccgtga

SEQ ID NO: 686348 - DNA, 80 bp, Homo sapiens
ctggatggaagatagcttgaacagggctgacaacatttttccttttccgattgtagaaggcatgaaacaaaaaatgtgga

SEQ ID NO: 686349 - DNA, 75 bp, Homo sapiens
atctatgatgaaatcctgcagtccaagggaatgtagtttcacaaagcagcttaaccccattgatggtgaacggga

SEQ ID NO: 686350 - DNA, 98 bp, Homo sapiens
tctgtagttactgtggaatcaataagccatggcatctaagaaatttgctgttaaactgagatctgtatctgtggacctgaatgttgatccctcgcttc

SEQ ID NO: 686351 - DNA, 97 bp, Homo sapiens
atgaatacattgcaattgcaaaggaaaagcatggctacaatgtggaacaggtgatcagaggactgctgaaattttggccaaaaacctgcagtcagaa

SEQ ID NO: 686352 - DNA, 58 bp, Homo sapiens
ccggctgaggcagcgcggccgcagcagccctattctgattcccagcatagccacgaag

SEQ ID NO: 686353 - DNA, 75 bp, Homo sapiens
ggatgtattttgatgatgctcatgtcaaggaggctttgagcataagatcacagtccaggcctctccaactctgga

SEQ ID NO: 686354 - DNA, 75 bp, Homo sapiens
aaattacctccgagggaaacaagaaaacatcaaagaggtctagcaaagagcagcccgacggccatggaggctgaa

SEQ ID NO: 686355 - DNA, 100 bp, Homo sapiens
ggagagttagagaagtgccttgaagatccagaaaaactaggatccctttttgttaaacacgctgtaacagaagacaagtacgaaatactgcaatctgtcg

SEQ ID NO: 686356 - DNA, 82 bp, Homo sapiens
ccgcgcgcagggcctgcagcgggagctggacggcgagcgcgagcggcgcgagaaatggtggtcctgctccatgatgtccgtg

SEQ ID NO: 686357 - DNA, 100 bp, Homo sapiens
cgagcgcggaggcttcggttccggtggcggcgatggcttctctttccacctggagcagggggctgttgtggttccgactataaacagtacgtgtttggcg

SEQ ID NO: 686358 - DNA, 88 bp, Homo sapiens
agaggctcaacttcatcactgagtacatcaagggcggcacgctccggggcatcatcaagagcatgatcagtgtgcgtgtgaccaccat

SEQ ID NO: 686359 - DNA, 100 bp, Homo sapiens
cccagagcccctgcgtacctatgggcttccttgccactgtcccttcaaagaagaccgccgggagagcctgcccacctccccaccctggacgccgggcgcg

SEQ ID NO: 686360 - DNA, 100 bp, Homo sapiens
gtgcgtgctcagcgagctccagaagaccgagcgggactatgtgggcacgctggagttcctggtgtcgctgccactgcagagccccgccatggaagacacg

SEQ ID NO: 686361 - DNA, 82 bp, Homo sapiens
acgcgagcgggaacagtctcctccactcggagcggaagctcaggtgacattagaatgtgctataccccagaaattccatcga

SEQ ID NO: 686362 - DNA, 90 bp, Homo sapiens
actgcaccagaatgaaggagaaccagaaacatatctattatatcacaggagaaaatgtccaccttggttctggtgatgggcagtcaaaag

SEQ ID NO: 686363 - DNA, 82 bp, Homo sapiens
cagctgtcctgacttctcccgtattggtgcctggctgccctagcaagatggtggtgagtgccattgtggacaccttgaagac

SEQ ID NO: 686364 - DNA, 114 bp, Homo sapiens
ttcagcaaccctctacacctggacccgacctcctcgccttggaggaagaatataaaaacgaggtctcactctgttgctcagcctggtcttaaactcatgtcctcaagcaatctt

SEQ ID NO: 686365 - DNA, 75 bp, Homo sapiens
ctggaacaatggataacttcttcaccgaggttctccacatacgattctacttgtcaaattgcccaagaaattgct

SEQ ID NO: 686366 - DNA, 98 bp, Homo sapiens
tgaagaacctgaaggacacactaggttccattttttgggcggaggatgcatcacacttgcccatgtctgccaggcttggcctgtttacggacttcatt

SEQ ID NO: 686367 - DNA, 100 bp, Homo sapiens
cagggacgtgctggccgtgatcaaacactgcaaggaccccctccggctcaagtgtgtcaagcaaggttcagccctatgtagctacaacctaaagccttct

SEQ ID NO: 686368 - DNA, 51 bp, Homo sapiens
acagtatcctaccaggccgcacattgcagaggagaaggcagagccccccca

SEQ ID NO: 686369 - DNA, 74 bp, Homo sapiens
cgcaatgtgatgctggagaactttacacttctggcctctctgggtatcccacctgaccagcagcgtctgatatt

SEQ ID NO: 686370 - DNA, 90 bp, Homo sapiens
aggagtcatggatgaatgtactcatgtagcaaatttctcaggaatggaagttggatacactttgtgacttgtacgagacactgaccatta

SEQ ID NO: 686371 - DNA, 74 bp, Homo sapiens
gggtttccaccgttcgttcaagtatgctatgaacactcacctctccaaatgaataatgtaaacgatttagaaga

SEQ ID NO: 686372 - DNA, 100 bp, Homo sapiens
tggagagggattcgtggtgaaggtccggggcttgccctggtcttgctcggccgatgaagtgcagaggtttttttctgacacctagctcccctgtttgaca

SEQ ID NO: 686373 - DNA, 82 bp, Homo sapiens
gcaaaagatttgatgaaagtacttcagggagtcaacggtgagaactgttgggaatcaaagagctttccaaacctgcctacgg

SEQ ID NO: 686374 - DNA, 100 bp, Homo sapiens
gagaaaaagaagatatgtatgacgagattattgagttaaagaagtcacgccgatgatggagctgaagcccaacgcaggtagcgaccgtgcctgggtctgg

SEQ ID NO: 686375 - DNA, 116 bp, Homo sapiens
catcttggacaatgaggagcagagagagctgcaaaagctggaggaaggtgtggtatctgtgcgctttgaagaagatgaagacaggaacttgtgtctaatagcatatccattgaaag

SEQ ID NO: 686376 - DNA, 100 bp, Homo sapiens
gactgcaacctggctgtacagctcctcaagtgcaacaagtcccacttccgaaaccacaagtttgccgataacccgagcaacttcccgagaagagaagaac

SEQ ID NO: 686377 - DNA, 83 bp, Homo sapiens
caggagtagctcagtgtgagatccaagagcatgccaagcctatccagggaactgtggctgcaccatctgtcttcatcttcccg

SEQ ID NO: 686378 - DNA, 134 bp, Homo sapiens
tgtgaatctactagggcaacatacaactgccctctgagtcagaagatcagaagttgctgtggctacacatagcaatgaatcgctccctggctaatgtgattcttggaggctatggcaccacttcaacagctggt

SEQ ID NO: 686379 - DNA, 100 bp, Homo sapiens
caggaagatggtggccgcaaagaagacgagagttcctgtgagaacaagcgggcagacctggttttcatcattgacagctctcgcagtgtcaacacccatg

SEQ ID NO: 686380 - DNA, 75 bp, Homo sapiens
aaaatgttcaactctatatgagaacaggagtacagctgtgtagtaaagatgccttctggtgaatttgcacgtata

SEQ ID NO: 686381 - DNA, 100 bp, Homo sapiens
gcatgagtatgacatgaccaagatgcccgagtgctacttctactccaagttcgtgtctgcactgcttggggaggaagatgaagaggcactgcattatttg

SEQ ID NO: 686382 - DNA, 50 bp, Homo sapiens
cagaaatacgtctttgcttctgtgggggcctgttctccaagacagagatg

SEQ ID NO: 686383 - DNA, 101 bp, Homo sapiens
tgtccccagccagacgccagcctgacgtggagcaaaggaaactgctctttgagcgcgggaaggaggccctggagtccgaatttcgcagcctgatgacgcgg

SEQ ID NO: 686384 - DNA, 101 bp, Homo sapiens
ccgccggccgctggcccggccatgtcgtcgtccttcttcaaccccagcttcgccttcagctcgcacttcgaccccggacctgccttgtccaccatgaaagg

SEQ ID NO: 686385 - DNA, 75 bp, Homo sapiens
tcgattccgcttcttgcatgaaactggaggagcaatggtgtatggaggctctgtcggtggtgagcgacgaccagt

SEQ ID NO: 686386 - DNA, 75 bp, Homo sapiens
gcgggctcctgcgagaagcaagcggaacttcctgagagtggagagaaggagcccctggaccttggcgcccctata

SEQ ID NO: 686387 - DNA, 50 bp, Homo sapiens
cgcggggcggcggcgaaaggacggatttttagactctgaggagcagttgg

SEQ ID NO: 686388 - DNA, 100 bp, Homo sapiens
tcagtttgttgtgcttgtcaagatcaggagtttgtggaaaacagtaggaaagcaatgaaagaagctggtaagggaggcgtcgctgattccagagagctaa

SEQ ID NO: 686389 - DNA, 100 bp, Homo sapiens
caaatgttcagactttgttgtggtacagtttaaagatatggactccagttatgcaaaaagaggtctcattcaggaacgtcgcctgataacactgcaccac

SEQ ID NO: 686390 - DNA, 119 bp, Homo sapiens
gtggtggatgtggatgcaaacaaggttattcttaatcctgtaaatacgaatctttccaaaggagatgcccgcctgcaggatgtttcctcaatgaggggaaggctgctgcacaatggcag

SEQ ID NO: 686391 - DNA, 100 bp, Homo sapiens
gcagaaaaagctggagcttgagctagagcaagctaaggcacagttggctgtagaaaatctctgttcttacaagatttctgcaaacttgtacaaacagctg

SEQ ID NO: 686392 - DNA, 75 bp, Homo sapiens
aggggaaagcctggagtcctggctcattcccagtgacctgacagcagaggagcgtcaagaactggagaacatccg

SEQ ID NO: 686393 - DNA, 83 bp, Homo sapiens
caagtttgccctggtggcccctgtccaggctgaagaagactctgggctcacgagcagctaaatgtgaaacatgaaccactcca

SEQ ID NO: 686394 - DNA, 51 bp, Homo sapiens
aggcttgtccatctgtaacttcattaaggctgtcacccttgacccaaactt

SEQ ID NO: 686395 - DNA, 90 bp, Homo sapiens
cttttatagacgacgtgatatttccaacacacttataatgctcgcagataagcatgctagcatttcagaagatggacacaaagaagaagg

SEQ ID NO: 686396 - DNA, 82 bp, Homo sapiens
ttaaatgcaatagcccttcagtactgttgtacgccaagccctataccaagtcctgttttggggcgaaagccaaatgctagtc

SEQ ID NO: 686397 - DNA, 75 bp, Homo sapiens
aagaaggtgtactgctatgtgtcaccaaaggctgagggtaaaaagctgggattggtaggctgggtccagaacact

SEQ ID NO: 686398 - DNA, 75 bp, Homo sapiens
acagcaaaccggggtctccctcccaggacacaggagtcaagaggccctaacccaagcaaactgattcagcagttc

SEQ ID NO: 686399 - DNA, 100 bp, Homo sapiens
cttaggtgccagtccttctaggcagaagggccctcttggtttcactgttacatgccttgaagtgatgaggaggtttctgttactatatgctacacagcag

SEQ ID NO: 686400 - DNA, 81 bp, Homo sapiens
tttgtgaggataaacagctcgttggcagtagcagcttatgaggatgggcactgtgttggcactcactgaaaataacttcga

SEQ ID NO: 686401 - DNA, 98 bp, Homo sapiens
gccaaaggctgccaggaaggagctcttttggtacaccagaaggccagaatggaacgacttcaaagagaacttgagattcaaaagaaaaagctggataa

SEQ ID NO: 686402 - DNA, 100 bp, Homo sapiens
aatacgaagggcatgaagacaaagctgcagaggggcattatgcttcccagagcaagaaacctattggaattcgagacttaattaatgaagctttgcatcg

SEQ ID NO: 686403 - DNA, 50 bp, Homo sapiens
tttgctctgagcatcagtcacgggcctgatgcctttaacctacttcagga

SEQ ID NO: 686404 - DNA, 83 bp, Homo sapiens
aactagtttcccaaacagatgttaagacattcttggaagccttaccgttggaagatgctggctcaagtagtttagataatcta

SEQ ID NO: 686405 - DNA, 75 bp, Homo sapiens
ctttggcaaagctggggattggccagctgactgctcaggaagtaaaatcgatgacatcatggattcatcccttac

SEQ ID NO: 686406 - DNA, 76 bp, Homo sapiens
gacgaggaagaggaggtttctgagggtactatttttctgcctggaaataaagtttctgagcatccctgcaatgaag

SEQ ID NO: 686407 - DNA, 82 bp, Homo sapiens
gcccgatagccccgggggcggcctgcaggcgccggtgccggtggtggtgtgcacattgagccccggtatagacagttccccc

SEQ ID NO: 686408 - DNA, 100 bp, Homo sapiens
actgagcgtatgtgccacgccgcccaggagacccctctgctgcaccacttcatgcagcatcaggcggggcaggccccacacttgggcagtggacagccac

SEQ ID NO: 686409 - DNA, 112 bp, Homo sapiens
ctctgacactgggtctctgtcacctccatgggaccaggaccgtaggatgatgtttcctccgccaggttacacggtgtgggcacacaacctcattgccattgctcgtcttcgg

SEQ ID NO: 686410 - DNA, 100 bp, Homo sapiens
gaaaaagcagagcgactcggttaagggaaagcgccgagatgacgggctttctgctgccgcccgcaagcagagctgatgcagctgtacagtgcgcgccagc

SEQ ID NO: 686411 - DNA, 80 bp, Homo sapiens
agatggcacatggcccaggcagaccttgcagtcaaagtatttgtaccgcatctacaccttttgtattgttgggagatgtt

SEQ ID NO: 686412 - DNA, 100 bp, Homo sapiens
agaactacagcaacctgatctcattggcccacatttttggattatgtccggccacgttcctggacttgtcgttacgtgttttagaagcttggactttgtt

SEQ ID NO: 686413 - DNA, 99 bp, Homo sapiens
gcgggctgcggacgctcggtcccgcgctgcgcatccccgcggacgccacagcgctggactttgaacatgtcggggatcgccctcagcagactcgcccag

SEQ ID NO: 686414 - DNA, 83 bp, Homo sapiens
tctcttggcaagagagctctgcatcaatgcgccggccatagacaatgcagatcttcgtgaagactctgactggtaagaccatc

SEQ ID NO: 686415 - DNA, 50 bp, Homo sapiens
tgttcagctcccacaggtttcaggaaactatggtccaggaggcagtggag

SEQ ID NO: 686416 - DNA, 100 bp, Homo sapiens
gggagatcagcatttgcatggaacacatgcagtggaagacaggaagctgtttattggtatgatttccaagaagtgcactgaaaatgacatccgagtcatg

SEQ ID NO: 686417 - DNA, 91 bp, Homo sapiens
cacaccaccaacattcttggcattacgcaggccagcaactcccagctcaatgcaatgatgcagattttcttttacaatccagatgactttg

SEQ ID NO: 686418 - DNA, 80 bp, Homo sapiens
cggaggctgaggagaaggaggagcgggccgtggaggcttcgccgcctagagccagcagccacccccgcccagccaacacc

SEQ ID NO: 686419 - DNA, 75 bp, Homo sapiens
gctacttccattccagaaagatggcatcatttttgccctcaaaagaaatggcagtgccgcagaatggaattcggc

SEQ ID NO: 686420 - DNA, 90 bp, Homo sapiens
gccttgagagtgacccaaagatgagatggaccgccagccagctcctcgaccattcgtttgtcaagataccatgtttgtgtggaagtgccc

SEQ ID NO: 686421 - DNA, 101 bp, Homo sapiens
aacctgaggaccattattttttaatgggcaccagaactagcacctctgaaaagtaaaatgatctatgcaagctccaaggatgcaattaaaaagaaatttca

SEQ ID NO: 686422 - DNA, 100 bp, Homo sapiens
cctgagctcctgctttgcacagctttgccacaaagcccagtctgtgtctcaaatcaaccacaagctggagaactttgcagaaaacaccatgaatgaactc

SEQ ID NO: 686423 - DNA, 100 bp, Homo sapiens
ctggtctctagtcaggtgtccagtttgcttcagtccattttacagctctataagcttcacctccctgctgattttgtctcttgcagctgaatggggtaaa

SEQ ID NO: 686424 - DNA, 75 bp, Homo sapiens
ttcctgtgatgtcaagctggtcgagaaaagctttgaaacagcagaattacctgattctaggacaaaggaaattga

SEQ ID NO: 686425 - DNA, 100 bp, Homo sapiens
tgctcctgctcctggtggccgccagccggcgcgcagcagagccacgctgaagaatggaaggaaaatttgcttggacctgcaagccccgctgtacaagaaa

SEQ ID NO: 686426 - DNA, 83 bp, Homo sapiens
caactttggaggccccctggaaggctttaggatccaggtgtcgtgaaaactacccctaaaagccaaaatgggaaaggaaaaga

SEQ ID NO: 686427 - DNA, 136 bp, Homo sapiens
gttggctgccaatggaatacagagaaacactctcaacattgacaaattgaaaatagaaactgctcagaaacaggaccttgccctgtcactcaggatggagttcagtggtcctatcatggctcattatagcctcaaa

SEQ ID NO: 686428 - DNA, 90 bp, Homo sapiens
aaagtgagcagtccagaaagcggcttatcgaacagagccgggagttcaagaagaacactccagaggccctgaagtactctttccagaccc

SEQ ID NO: 686429 - DNA, 122 bp, Homo sapiens
aaccaagtaaaaaagaaggaggcacacaaaagacatctactcttcctgcagtactttataggacacagcaagaggcaacattttggaagcagagggcaactctcactggaaaccaaatctcc

SEQ ID NO: 686430 - DNA, 100 bp, Homo sapiens
acccactgcggcccttgcaggaggacaagatgcaatacctgcagcccgagaccgaggacgagaagaagcgctttgaggaaggcaaagggcggtacctgca

SEQ ID NO: 686431 - DNA, 100 bp, Homo sapiens
gggaaggcggctaccagtgtaaagccagagctgagcccgagcgggaagaagttccgcagcaagccgcagctggcgcgctacctgggcggctccatggacc

SEQ ID NO: 686432 - DNA, 51 bp, Homo sapiens
tggaagcggccgccggcgcctagctggtggagctgtctaaggctcaagata

SEQ ID NO: 686433 - DNA, 83 bp, Homo sapiens
cgtgttggaccttccggagcttctcagaagacagagggttttcttttgaggtactccaaagattcaggtttactcacgtcatc

SEQ ID NO: 686434 - DNA, 100 bp, Homo sapiens
gcccgaaacccccatctccggcggagagaccgtccgaggtaattgtctgccacgagtgcacattctgaaaacaggagattcagcgattgcaggaggacac

SEQ ID NO: 686435 - DNA, 100 bp, Homo sapiens
gcctccatcctcaccaatcccatggatgtcatacgaacccgtgtgcaggctgatctactggctgacctttgccgtgggccgctccttccgaggcttcggc

SEQ ID NO: 686436 - DNA, 75 bp, Homo sapiens
gatccgtatactgcagcaggattggctgcagcagctacattagcagggtgatcagcccatgacctaaacctccag

SEQ ID NO: 686437 - DNA, 97 bp, Homo sapiens
gacctgtttatctctgatttctggagttcagcactagcactatgagatgcttgctaatcgaacagctgcaaatggtcactgcattgatatttatgct

SEQ ID NO: 686438 - DNA, 74 bp, Homo sapiens
gaagcaaactgcaatttggacatctccaacaaggatgcgtattggatagcaatgaatagttctctgaaatgtaa

SEQ ID NO: 686439 - DNA, 101 bp, Homo sapiens
aggaggacttgcagaagtaccacaacagggacacctggttccagctgcagcacgtggacgctgactcggaagtgcagagttttgctcttgttgcccaggct

SEQ ID NO: 686440 - DNA, 82 bp, Homo sapiens
gccatgttgaacttattcagaatggttcctacaaacttgatgacttttgagtagaagcctgagaaaaaaagagaggtgaact

SEQ ID NO: 686441 - DNA, 75 bp, Homo sapiens
caggtggagcaccctttgctgagtggcctcttataccccggactgcagggacaagaatccttcaagaaacaggaa

SEQ ID NO: 686442 - DNA, 82 bp, Homo sapiens
ggggcgctcacggccacggcgctggtcaccggggtctgcctggggattcactcatgtttcgtgtgtaaagagagcaagacag

SEQ ID NO: 686443 - DNA, 51 bp, Homo sapiens
gaatacatgctttaccagaaagtgttgactttaaggtgaaaacaatttcag

SEQ ID NO: 686444 - DNA, 82 bp, Homo sapiens
ggcgggcctgaggcgaaggagcggccgggagcccgccgcgctggtagcgggatgtttcagcagcccctgagaaggaagagga

SEQ ID NO: 686445 - DNA, 75 bp, Homo sapiens
tcccagtgtgccttcaatgggattttcttgccaccactccagggggattttgggaataacctgggtatcttgtgg

SEQ ID NO: 686446 - DNA, 98 bp, Homo sapiens
ccagccgcgggtcaccctccgtcaggctgtcattatttgtatcaaaaacaaagaatttgaaaaggcttcaaaaattttgaaaaaacatatgtccaagg

SEQ ID NO: 686447 - DNA, 100 bp, Homo sapiens
tccagagcaagcacattagcaaagtttgccctcagttccaactcacaggattaaactgcaaatatctcatgaagctgctgcctgtatcactggtctccgg

SEQ ID NO: 686448 - DNA, 82 bp, Homo sapiens
gtaaagtgcaagttaagagttcagacatacaagttggagacctcatcatagtggaaaaggaccttaaaggctttgatccagg

SEQ ID NO: 686449 - DNA, 100 bp, Homo sapiens
ttttgcagtaatccttctgatgtaccagaaaagcccagatctgagtgggacatacttttgaaggatgtgcaatgttcaatcataagtgtgacaaaaactg

SEQ ID NO: 686450 - DNA, 100 bp, Homo sapiens
tcaggaccggcccccacctttcctcaggagtcatttctgttccgcacaggcctgctgaactgggtgctttatataggttctttaaggaaaaacagtagtg

SEQ ID NO: 686451 - DNA, 83 bp, Homo sapiens
gcggtgggtcctcgcttgcagttcagcgaccacgcattttgaaagcgaagcagaagccgtagaatcagcggcgagcctgttga

SEQ ID NO: 686452 - DNA, 100 bp, Homo sapiens
tccgagccagccgctgttttgccggaggagcccctcaggccaacacaccacagccatcagcactggaatgcaaagaccagaacaaacagaaggaagccag

SEQ ID NO: 686453 - DNA, 50 bp, Homo sapiens
gaagtgaactctttgtcatttccccgctctggctcttccagcaaaccagc

SEQ ID NO: 686454 - DNA, 75 bp, Homo sapiens
gagccatccaacatttagctgggatgaaagacagcaagatgcaaataatacggcactccgaacagacactaaaaa

SEQ ID NO: 686455 - DNA, 88 bp, Homo sapiens
gccaaagagcttttcctaggcaaaatcaagaaggattccatatggctctcatatcattccattccatctctgccaagatttggatacc

SEQ ID NO: 686456 - DNA, 98 bp, Homo sapiens
ggtggtgcaaatggccacgctgacctacgagacgccacagggttattcagcttctcaaggctggaaaagcgaaggaagtttcctacaatgcactagcc

SEQ ID NO: 686457 - DNA, 50 bp, Homo sapiens
cttgctcgtgcactttacacacatgagaaaactctcccaccatgtcgcag

SEQ ID NO: 686458 - DNA, 83 bp, Homo sapiens
ccgggaccggagaggaagcggagacaatgcagatcttcgtgaagactctgactggtaagaccatcaccctcgaggttgagccc

SEQ ID NO: 686459 - DNA, 82 bp, Homo sapiens
ctccgtctgccacacgctgatggtgcagcaccgcatgatggtacccaaagtcagtgtggccatgaggtctgccggaagtgac

SEQ ID NO: 686460 - DNA, 78 bp, Homo sapiens
gggccgtcctcggcggcagtgtcagggcagaggtggaggagacactgaagcgactgcagagccagaagggagtgcagg

SEQ ID NO: 686461 - DNA, 99 bp, Homo sapiens
cacaatttagaggagtatctaagagtttctgacgtagaagagcttacccctccagagcatctttctgatcttccaccattttcaaggtgtttaatagga

SEQ ID NO: 686462 - DNA, 75 bp, Homo sapiens
gactcagaagctgggagctggaattagtggtccagttagagttttgcggcctccaggtggtggatccaatttttc

SEQ ID NO: 686463 - DNA, 100 bp, Homo sapiens
gtcttttttgtcttcattcactttcccccctcagtttctgaaatgattctccagaatttctcctcataaaaaagggaaatgtttcaacgtgcgcaagcgt

SEQ ID NO: 686464 - DNA, 82 bp, Homo sapiens
gacagttgcatcatcaaagaaggagacgtggggtcactggtgtatgtcatggaagtctggctcttgctgattgaattccttt

SEQ ID NO: 686465 - DNA, 75 bp, Homo sapiens
accaacgcctttcccggagagtacatccccaccgtgttgttaccccttctacaaaactgacccgttcatcttccc

SEQ ID NO: 686466 - DNA, 100 bp, Homo sapiens
ggctgggcctgggcgtgtggagccaggcagtctcgaatcctctcctggtttagggaggggaagatgatgaggagtctgatgaggaagctgtgaagaaaac

SEQ ID NO: 686467 - DNA, 75 bp, Homo sapiens
gatctcatagacaagtttgtacatccaaatgaataaccctataccttccaatttgaaatcagaagcaaaaaaggc

SEQ ID NO: 686468 - DNA, 100 bp, Homo sapiens
ggagaccactacatccacatcaagatacgagttccaaaggtggctacggaccacaacatggataacacgtcaactgtgctgcgggagtggctggtggccg

SEQ ID NO: 686469 - DNA, 90 bp, Homo sapiens
cgaggcgccctgtaggatactgcttgttacttattacagctagagctcctgacccctgaggattaccagcgatttctagacctgggcatc

SEQ ID NO: 686470 - DNA, 100 bp, Homo sapiens
ccgagctggacccggaccggttttgggttcttcccaggagactctgccggccttttccccaccagccccagcttggccatccctcacccgagtgtcggag

SEQ ID NO: 686471 - DNA, 75 bp, Homo sapiens
cgattgcgttatttcttctactccagtggtgagaaggtcatgtccatcctgttgcatggggatgctgcatttgct

SEQ ID NO: 686472 - DNA, 123 bp, Homo sapiens
aagatttgctgggtatgaataatgactttcctccaagagcacattgcctggtaagatggttatcaagttatacccaaccagcagcaaaactaccaaggaatagttggagttcagcaaccccag

SEQ ID NO: 686473 - DNA, 98 bp, Homo sapiens
caccaggctgttgaggaagaatctatggcaacattgtatctattaatatacagcttctgtatttatcaggaacggaaaacagttcttccttcaaagca

SEQ ID NO: 686474 - DNA, 71 bp, Homo sapiens
gtccacccccactgcactgttgcagctctccaggagcagaaaatgatgcatcctgttgccagcagtaatcc

SEQ ID NO: 686475 - DNA, 98 bp, Homo sapiens
cagaccttgccagagacctggcaaatgacatcatgacactggtcagaatggcggcagtggagcatcgtcattcttcaggattgccctactggccctac

SEQ ID NO: 686476 - DNA, 121 bp, Homo sapiens
tgcccggtgaccacttttggaccaaaggcctgtgtgctgcagaacccccagaccatcatgattttttatcaagcagaaatgcatcgaacaacgagaatcaagatcactgagctaaatcccc

SEQ ID NO: 686477 - DNA, 124 bp, Homo sapiens
gcggacacgtgcggagagccgactgacactcgcagccccctcgggaggcccgacgcgactgggcccctcagcattctcagacaccatccacattgaaccccacaatgccagcctctgagcggac

SEQ ID NO: 686478 - DNA, 110 bp, Homo sapiens
gttggaagcagccgatccagcctgcggagcctgtggggcagatgttcctcctgctgatcaagagaagctttttatccagaagttacgtcagtgttgcgtcctctttgact

SEQ ID NO: 686479 - DNA, 87 bp, Homo sapiens
agagctttacgtcatcttcgattagctaataaccaactgcaattcctacctccaggtatgatctcgtgaaatcttgagagaaactga

SEQ ID NO: 686480 - DNA, 83 bp, Homo sapiens
tctctctcatctcgctcggctgcgggaaatcgggctgaagcgactgagtccgcgatggagggcagctgcaatgactctccgca

SEQ ID NO: 686481 - DNA, 82 bp, Homo sapiens
ccaagccatgggagacaagaagagccccaccaggtgcgcgcggagccatggttatcatgtcggagttcagcgcggaccccgc

SEQ ID NO: 686482 - DNA, 90 bp, Homo sapiens
tatgcaacacattttcctatacctctgggtggctttgtccactatggtgaagtgaccaatgactttgtcatgctgaaaggctgtgtggtg

SEQ ID NO: 686483 - DNA, 83 bp, Homo sapiens
tctttctggcctggaggctatccagcgtgctttgcaagatatcaccttgtcacagcagaccccctccacttggaaggacacgc

SEQ ID NO: 686484 - DNA, 100 bp, Homo sapiens
aaacattaagaacttggatcccattcacctgaggcacccgaagaagagaccatccatatttccaggtgctgcagggtgcacagctgatcgccgtggcctc

SEQ ID NO: 686485 - DNA, 98 bp, Homo sapiens
ttgcggcggccgtggaaggcgacccggcggctgtggaggccacgctcagctcgccaggcggcgcagggttggaaaagagactgttcaaaccactgagg

SEQ ID NO: 686486 - DNA, 126 bp, Homo sapiens
atgggtcctcgacctgcagggagcagaggggacagaggcaccaaggacctccaagacaggtgcgttcttcacaaaggtggtggatgtgggtgccacctctctgaagcttgagatctgggacacagc

SEQ ID NO: 686487 - DNA, 82 bp, Homo sapiens
tagtgaggctgacagaaattccatgcatgtagatatgacaacgactgaaagacctttcattcagaagctgtttcgtcctgtg

SEQ ID NO: 686488 - DNA, 83 bp, Homo sapiens
aaggaggtcacccgcgtgctaatggtggaaacccacaacgctggagctctcaaacactgctgtcctgcaccagatgcggcggg

SEQ ID NO: 686489 - DNA, 98 bp, Homo sapiens
cggtaggagcctccgtgcggagaccactgttcaaggccacagggtgaggtggctttgaccccgggttgcccggccagcacgaccgaggaggtggctgg

SEQ ID NO: 686490 - DNA, 98 bp, Homo sapiens
ctattgtgtgctggctgccaccccaactgctattggatcagagaaggctgaagaaggtggagaaactgaggcacaaaaagagggcagtgaagatgtgg

SEQ ID NO: 686491 - DNA, 90 bp, Homo sapiens
gtgtatgagcttgatggaaaagaactctgtagtgaaaggggttgtggaaaccagaacttcgcctggagaacagagtgcaaccagtgtaag

SEQ ID NO: 686492 - DNA, 90 bp, Homo sapiens
gccggccgtggacatcggggcagctgacctcgcccacgcccagcagcagcagcaacaggtcttcagaactactagcagataatttggggg

SEQ ID NO: 686493 - DNA, 95 bp, Homo sapiens
gaaaggcatagtccggttcttgtccaagactgataagaggctattgaagatgggtgtgaacctgacacgcagcaacaaggagacggtgaagcaca

SEQ ID NO: 686494 - DNA, 100 bp, Homo sapiens
aagaattaaaaggaagaacaacttaagagcttcttcaaagaaataagcgggttttgaaaacaaaaaaaagaaggagtggaagagggggccaggatccagg

SEQ ID NO: 686495 - DNA, 100 bp, Homo sapiens
gccgaaccgtgaagggctggaggccccggcggctagcccagatggctacctgtatgagcgtgaggccatcctggagtacattctgcaccagaagaaggag

SEQ ID NO: 686496 - DNA, 74 bp, Homo sapiens
aacagtgatgaggaaagctgtgaaagttctcaaggaacagcttcagctgcggggctcctttacctgcacacatg

SEQ ID NO: 686497 - DNA, 100 bp, Homo sapiens
caccctggcaggaatcccaatttgcctccacttagtgagcggaagaatgttgttgacctcctgtactggagagacattaagaagactggagtggtgtttg

SEQ ID NO: 686498 - DNA, 83 bp, Homo sapiens
gcggtggcggctgcgctggcgcggcttttggcggcctttctgctcctcgcggcccagacaatgcagatcttcgtgaagactct

SEQ ID NO: 686499 - DNA, 75 bp, Homo sapiens
aggagtgcaggcgcttcaccacagacggcacagctttggtcccctatggtcttccctgcatccgcgagctcttcc

SEQ ID NO: 686500 - DNA, 90 bp, Homo sapiens
ggaaaatgaagaaggaacgatctcgtaagaaggattcaggtcatgatcagagttcgactcttgcccaacactctgttgaactgactttac

SEQ ID NO: 686501 - DNA, 100 bp, Homo sapiens
cactgagaacctgctgaaggccccaaccatcgttgggaaatcatctctaaatcccatcctctttcgaggtgttgggacagtcattttgtttactcattca

SEQ ID NO: 686502 - DNA, 119 bp, Homo sapiens
cagcaccgcagccttgggcctcgcgccggctatggccgtgccctggggctgagccctcaggtttggtgcacctcgatttggaggaagtagggcagggcccttatctggaaagaagtttg

SEQ ID NO: 686503 - DNA, 100 bp, Homo sapiens
gcacacagatggggcgcatgaacgtcccggaggtgaccaagaatatggcccaggtgaccaaagccctggacaaggccctgagcaccatggacctgcagaa

SEQ ID NO: 686504 - DNA, 75 bp, Homo sapiens
tggatctacggccctttccatagccagagcagtacaagagtggttaaataaacttggatcggctgtaatccatca

SEQ ID NO: 686505 - DNA, 90 bp, Homo sapiens
aactggaccgcgttcctgttccagctggtggatgattacgtggcctctgagggtgcagtacagcgagttctggtccctgcttatgccaag

SEQ ID NO: 686506 - DNA, 75 bp, Homo sapiens
atttgaagcacatttgggaagccacattttgcagtatttaggtcagttaacgtccataccaggatacctgaatcc

SEQ ID NO: 686507 - DNA, 97 bp, Homo sapiens
gaacgaggcaaggagctaaagcagcgtgcgttcagccctgggtcgtgagatggagaataaagaaactctcaaagggttgcacaagatggatgatcgt

SEQ ID NO: 686508 - DNA, 75 bp, Homo sapiens
tgtaattcagagagtccacacaccctttgaaaggtctgccatcatggatgttctcgcagaagcaaatggcacctt

SEQ ID NO: 686509 - DNA, 110 bp, Homo sapiens
ccagggcagagggcacctgagcggctggagagcctgttggagaaacacaaagagatacccttcatgagacccaactctgccacagctcatcctcggaggcaatcccggaa

SEQ ID NO: 686510 - DNA, 100 bp, Homo sapiens
ttctaaatactgtcctttcccagatagaagagcacaaggtgagggtggaactactccacaatccagccttctgcagcctggccaccaccaagaggcgtca

SEQ ID NO: 686511 - DNA, 82 bp, Homo sapiens
cccggagcccctcctttggtgacccacagctatcccctgaggcccgacccagttgtcggacaagtaaccgcaagagcttgat

SEQ ID NO: 686512 - DNA, 82 bp, Homo sapiens
aagaagatccatttgtatttattcctgaagatgacccattatttccacctattgatactatactggcaattgctggagaaga

SEQ ID NO: 686513 - DNA, 74 bp, Homo sapiens
gaggtggccgcctccttggtcagggagttcctcagcagaaagatcagcggtttgagtgctacgtttgcagaaat

SEQ ID NO: 686514 - DNA, 97 bp, Homo sapiens
gtggctggaaggagaactaaatgggagaagaggaatgttccctgacaatttcgttaaggcagaaggagaagacagcctgaagaagatgcagctgatg

SEQ ID NO: 686515 - DNA, 110 bp, Homo sapiens
gctgccacctgcctttgacctttttgaagcctttgcaaaaatgctgaaattttcttctaaggagaaatatcccttatttacttttgtaaatggtcattccagagactatg

SEQ ID NO: 686516 - DNA, 90 bp, Homo sapiens
caaggataagggcgacagcaacagctctgccggctggaagatttgcttgtaaatgcatcacgaagaggcagcccagaatgaagaaagcaa

SEQ ID NO: 686517 - DNA, 119 bp, Homo sapiens
agaagaggaagtagccaaagagcaactaactgatgctgacaccaaagacttaattcagtgcacaaatgagatgaatgtgaacatcccacagttggcagacagtttatttgaaagaacta

SEQ ID NO: 686518 - DNA, 100 bp, Homo sapiens
cgccgaagtcaccgtgatcctgttagatatcgaaggtaccacaaccccgattgctttcgtgaaggaacctggcttctgtatttaccatgtacctggagca

SEQ ID NO: 686519 - DNA, 100 bp, Homo sapiens
acacctctagtggacccctcagtatatggatacggagtacaaaaacggcccttggatgatggaggctatcaagtactagctccaactgcctattatgatc

SEQ ID NO: 686520 - DNA, 100 bp, Homo sapiens
ccggggcccccgtcgttgctgccgggattttggaggccggggccgcgctgagggcgcccagctggttccagcaacagatagaaatgctttaagttcactc

SEQ ID NO: 686521 - DNA, 100 bp, Homo sapiens
gaagagctatggtgaaacaccactgaagcattgccaagatgagacaaggggccttcctggtgaacacagcccggggtggcctggtggatgagaaggcgct

SEQ ID NO: 686522 - DNA, 98 bp, Homo sapiens
agcagaggacgacatgttgcttttcgtggagattccccagtttagagggccacaagctctggggccagttcccactgccattggggtcagcatagcta

SEQ ID NO: 686523 - DNA, 74 bp, Homo sapiens
cagcccctttcaactctacttcaacccgcaccttgtgttccggaagttccagtttttcagaagaagtgaagtca

SEQ ID NO: 686524 - DNA, 75 bp, Homo sapiens
ccgctcattcggactcgtcgggcaggttctttggcatggacacaagttcagtgggaggattagaattgactgatc

SEQ ID NO: 686525 - DNA, 51 bp, Homo sapiens
aaaggcccagacatatcacttggttcaaaccttgtactactcagctgatca

SEQ ID NO: 686526 - DNA, 100 bp, Homo sapiens
caacccccagccagggtcaccatcaaaatggaatgtaaccctagccaggtgaatggctcaagttacgccccatggtgtccatcctgccagcagactgatt

SEQ ID NO: 686527 - DNA, 75 bp, Homo sapiens
tttcaggaattttcacattccagaagaggcgtccttctttgcacgcttagcagtgtctgcaaaaacgaatctttt

SEQ ID NO: 686528 - DNA, 75 bp, Homo sapiens
gtgctcgcgctactctctctttctggcctggaggctatccagccggaatcggacatgtccaaaccaccgtgttac

SEQ ID NO: 686529 - DNA, 50 bp, Homo sapiens
atggacagacgcacagacacctgcaggtcatttcttcagatagctcccca

SEQ ID NO: 686530 - DNA, 97 bp, Homo sapiens
acgcaggatgagccccgcgaccactggcacattcttgctgacaggtgtatgcaacagcgttattgcaacaggctaacgaaaacagacaaaattcaac

SEQ ID NO: 686531 - DNA, 75 bp, Homo sapiens
gtgtctcgtgtgtgaacatcacagtacttgattctaaagctcgaaaggcctgctatagttcagaatatcacattt

SEQ ID NO: 686532 - DNA, 75 bp, Homo sapiens
cagtctggtgaagttccatgcccatccagagaggaatccctggggttggcactgggccaagcccaggagcccttg

SEQ ID NO: 686533 - DNA, 82 bp, Homo sapiens
gctggagctgggttcgggcaccggggccgtggggctcatggctgctaccctcggacttcccagactcccggccagccatcga

SEQ ID NO: 686534 - DNA, 110 bp, Homo sapiens
cggcgtgtgcgcgcccgccagctgctccggagatacggctgacaaacgggctcatcataatgcactggaacgaaaacgtagggaccacatcaaagacagctttcacagtt

SEQ ID NO: 686535 - DNA, 98 bp, Homo sapiens
ctggctgcgcgcgcggcccctcctccccggcgcctcccaggagagaagcctcatcagtgccaagtctgtgggaagaccttctctcagagtggaagcag

SEQ ID NO: 686536 - DNA, 77 bp, Homo sapiens
aggaaattcgttgatgttctggtggattatggatcagatccaaatcagattctttctactaatccagatacttgttg

SEQ ID NO: 686537 - DNA, 50 bp, Homo sapiens
caagccgcggagcctccagacgggcctgtttaaagaagaaaacccgtatg

SEQ ID NO: 686538 - DNA, 100 bp, Homo sapiens
gactgctcagacaccctccgaagaggtggccctgcctgcgctcctcctggctgcagagtaccccaccagcgcacttcccaagtaagaagcggaagaggag

SEQ ID NO: 686539 - DNA, 83 bp, Homo sapiens
tccttgcagctgcttagacgctggatttttttcgggtagtggaaaaccaggtggagccttttgccagcttgaccgaggccgtg

SEQ ID NO: 686540 - DNA, 90 bp, Homo sapiens
gtaaaaaatgtgaagcttaatgaagataaacccaaagaaaccaagtctgaagagaccctggatgaggtattggcatactccacacatctg

SEQ ID NO: 686541 - DNA, 88 bp, Homo sapiens
gcctgcggtgcctgagctgagtgaggccgaggccgggaggccgtgcccggaggcagatgatgttgagggcaaaattagacaaatcatt

SEQ ID NO: 686542 - DNA, 100 bp, Homo sapiens
gcggcggcaccgggaggccgggccgagcggacagtcggcccaatatgtcaagacctctgatcactagatcccctgcatctccactgaacaaccaaggcat

SEQ ID NO: 686543 - DNA, 100 bp, Homo sapiens
tcctccattataggatatactggaaggaacgggactccaactcccagcctcagctctgtggtgagtgtggctgtgaagtgcctgaagcccgatgtcctga

SEQ ID NO: 686544 - DNA, 100 bp, Homo sapiens
tacgagtggatggtcaagagcgtgccctacttcaaggataagggtgacagcaacagctcggcgggctggaaggacacattggcgtgagacctgggagtac

SEQ ID NO: 686545 - DNA, 75 bp, Homo sapiens
gggcgagaacgtccactgcgggccggcgaaagctggagaaatggcttccctgaggcaagtgtaacctacattccc

SEQ ID NO: 686546 - DNA, 83 bp, Homo sapiens
ttctgcctcagaacggcgtgactcggagtcgagcaaaagatgtgataataccagcaaagccacctgtcagctttttctccttg

SEQ ID NO: 686547 - DNA, 100 bp, Homo sapiens
ccaggccagggcggcagcaccagcgccttcgagcagctgcagaggtcccgattttcagattctacttcaaagactcctcctcaagaagaattacctactc

SEQ ID NO: 686548 - DNA, 100 bp, Homo sapiens
attcagtgtataatggactctcagaataaaggaaagacctcagagtgttctcaaggtgaagttccagcagcgatttgtgtttccagtacagtttggtggc

SEQ ID NO: 686549 - DNA, 83 bp, Homo sapiens
ccgacccggcccggtcaggccccatactcaggtgtggacactgccagcggctgcagccgacttggaatgacctgggagacaaa

SEQ ID NO: 686550 - DNA, 50 bp, Homo sapiens
ccaagttccctgcggagctggagaaccggagacaaagcatggaggacaca

SEQ ID NO: 686551 - DNA, 100 bp, Homo sapiens
ggggaacgactgcggcgcgctgctggacgaagagctctcctccttcttcctcaactatctcgctgacacgcaggccaggtcagagcagcccaccatggga

SEQ ID NO: 686552 - DNA, 75 bp, Homo sapiens
gtcacgccatcgttgctgccttcttcgtcaaggtcctgcaaccctggttccagtctggcaagcattgtagacctg

SEQ ID NO: 686553 - DNA, 100 bp, Homo sapiens
acagtttacatcttcacggaagtttttcacaatttctccaataattctatatgaatgccacaatacgaaggattgaccagttaaccaacatcttagcccc

SEQ ID NO: 686554 - DNA, 78 bp, Homo sapiens
gtcatttggaagaagcgaagaggtggaatccatagagctccccatggacaacaagaccaataagaggcgtgggttctg

SEQ ID NO: 686555 - DNA, 83 bp, Homo sapiens
ttacagacgctgccagcatcgccgccgccagacccttcgcaggtgttacagtcgggtgaaagaacatggtgttgggaaaagaa

SEQ ID NO: 686556 - DNA, 82 bp, Homo sapiens
tgatattgaccatgatggaatgcttgacagagatgagtttgcagttgctgtggatgagatgaacggaaaggagctcaatgga

SEQ ID NO: 686557 - DNA, 49 bp, Homo sapiens
ctcgccgtccgagtcgtttattggattttgacattgctgggaactttga

SEQ ID NO: 686558 - DNA, 100 bp, Homo sapiens
aggctgcaaatgttgtggtcaagtgcctcacccctttctacaaggagggcaagtttgcttccaaggtcttcgccttgatcgtgttctcctgcatctatgg

SEQ ID NO: 686559 - DNA, 75 bp, Homo sapiens
cggcatcctggccttgccacgcagaaggtctggaaatctctccaggcaccctgctttggccctctagaatacaga

SEQ ID NO: 686560 - DNA, 75 bp, Homo sapiens
cggggcccgcgcccggagctggcgccagtattggtaaaggttttcaaggtgtcatgaaaagatggggatttaaag

SEQ ID NO: 686561 - DNA, 74 bp, Homo sapiens
ccgcccaccagttcgcccgtccccctgccccgttcacaattgcagagcagagcgggcggaggaccccgggcgcg

SEQ ID NO: 686562 - DNA, 75 bp, Homo sapiens
catggccagctatccttaccggcaggatttaagtgccctgtatgctcaaaatttgtatcctcagatgaaatggat

SEQ ID NO: 686563 - DNA, 75 bp, Homo sapiens
gtggaggaatcctgatactgagcgtcaacaagtggaagaagctgtactcgaccccactgctggccatccctacct

SEQ ID NO: 686564 - DNA, 83 bp, Homo sapiens
agagctctccgggttccccggctcgcggggcccggcgaagggcagggtggcccagttgaaatccttcccttcctctaccttgg

SEQ ID NO: 686565 - DNA, 100 bp, Homo sapiens
gccagctgctgaggaaatgcataaaaatgtggagcaagatgagttgcagcaagtcatacgggaggtttcagcaagcagatggtggaaattcttcacaaac

SEQ ID NO: 686566 - DNA, 75 bp, Homo sapiens
cttcgtcatgttcttcgcgccctgaacactctgctccagccaaggtggtgagggcagctgttcctaaacagcgca

SEQ ID NO: 686567 - DNA, 109 bp, Homo sapiens
aagcagtcaaacatgctgaccgctcaagagattctacatcagtttggtttcactcagaccggttcctggaaagcaactggtttgtgtgggtgacacagatgaaccatat

SEQ ID NO: 686568 - DNA, 99 bp, Homo sapiens
aaagcagagctctgtagaactctgtggtgtaaagattgtggtagtagatgaactgggaatggaggaagaagatgtgattgaagtttatcaggaacaaac

SEQ ID NO: 686569 - DNA, 74 bp, Homo sapiens
ccggcgccgccgcgtcttcccggtctcctttcccggccgcacagggtacattttgaccaatttaaagaagcatt

SEQ ID NO: 686570 - DNA, 75 bp, Homo sapiens
cccctatccctccccctaaaccagctcacagaaatagcaaccctgtcattgaccccatgccacagctggatgtga

SEQ ID NO: 686571 - DNA, 50 bp, Homo sapiens
cttcggatggtgaactcattagaaaatggcattgtgcccatcgtggagcc

SEQ ID NO: 686572 - DNA, 75 bp, Homo sapiens
gtccgagtctccgccgctgcgggcccgctccgacgcggaaggttgatgccggcccaggatggatcagacctgtga

SEQ ID NO: 686573 - DNA, 82 bp, Homo sapiens
ggcgctgttcgacgtgcggcccgaatgccagcgcctcttctaccggggcaagcagggggaaatttgcagtggtgagaaaatg

SEQ ID NO: 686574 - DNA, 75 bp, Homo sapiens
atctcgtgctcaccggtttctcccacatcgacctgacctcagttggatgaacccattccactgtatgaggcaaaa

SEQ ID NO: 686575 - DNA, 50 bp, Homo sapiens
tatctctgataccatcatcccagccttttcctccctctccatgaactctg

SEQ ID NO: 686576 - DNA, 98 bp, Homo sapiens
gatcaagcagtttgagaagcaagttgagatgctgcagttggagaagaaacttgaacgtgaacttgaggatgatgcacgagttattgcttgccggttcc

SEQ ID NO: 686577 - DNA, 50 bp, Homo sapiens
gctaactccagaatcccccattgcactatttacaagagccaagatttgga

SEQ ID NO: 686578 - DNA, 101 bp, Homo sapiens
gacaccgtgggctgcgtgtgggacgggtttagcggcagcctcttcgtcagcgtcaccgtggggggcaagcagtacctcctaggactctatgacacggccgg

SEQ ID NO: 686579 - DNA, 49 bp, Homo sapiens
ccgccagctgctccggagatacggtatcggctgtcggatgagggcgagt

SEQ ID NO: 686580 - DNA, 80 bp, Homo sapiens
ggagtacgttgttcagtggaataaagatccagagtcaccgtactgtgtcatagaagaccagagcaaattctccagctgtg

SEQ ID NO: 686581 - DNA, 82 bp, Homo sapiens
catggatgaagatgggcttgaattacaacaagagccaaactcattttttgatgcaacagtttccaagccagcgccctactgg

SEQ ID NO: 686582 - DNA, 83 bp, Homo sapiens
ctgcgcccccgggagcgggcgcccagagattgtcctgggtcacataatgccagctgagcgtaaaaagccagcaagtatggaag

SEQ ID NO: 686583 - DNA, 100 bp, Homo sapiens
actgtccatcacatgttactttttggatgcaatatgccttcatccactggaagttactgaaatcatattccatgcccatcagcattgaatttcagcggag

SEQ ID NO: 686584 - DNA, 98 bp, Homo sapiens
gatgacactggtttggcttatatatgtcagacgtatgagcgtttctcccatgttgccatgatcttggaagcagttcaggtacttttgaagcattctgc

SEQ ID NO: 686585 - DNA, 51 bp, Homo sapiens
ggctgccgaaaacaagccggaaggaaagaccggcagagaccaatgccaatg

SEQ ID NO: 686586 - DNA, 89 bp, Homo sapiens
cttggactgagtcctgcaggacacagaaatgacagactttttcattgaatgatgaggacacagcagccatattatgccaagaggaaaaa

SEQ ID NO: 686587 - DNA, 117 bp, Homo sapiens
ctccgaaccccttcatgcccaaatcccggaaactccagcgtgtctccagccgtgcggagcgtgctttggacaccatgaattttgatgttataaagggcaagccagtacgcatcatgt

SEQ ID NO: 686588 - DNA, 100 bp, Homo sapiens
gcccgctactctccgggaggggcgcttcccgacgccaagagaccctgaaatatggcgtctggcctgcttgaaagtttggggcagaagctgtattaaactt

SEQ ID NO: 686589 - DNA, 75 bp, Homo sapiens
attccggccagcttcacgaagtcagagaggaatatattattcgagtgcaaagaggaatttctgtggaaaacagct

SEQ ID NO: 686590 - DNA, 98 bp, Homo sapiens
tgagtcggtgacctggcctgtgaggctgggagtcctccgtcagcatcagctccggctccggtgtcctccttctctcgcacttctatcacgccatccag

SEQ ID NO: 686591 - DNA, 100 bp, Homo sapiens
aggtgactgtgactgaggaagagtgaatactctggagcagtgcaatgtgtgttccaagcccatcatggagcggattctccgagccaccgggaaggcctat

SEQ ID NO: 686592 - DNA, 83 bp, Homo sapiens
cttcgtgaaggattcgggcgcctgcttcagtggttttaaaatcaaagatgggaaaatcggagaaaattgcccttccccatggc

SEQ ID NO: 686593 - DNA, 100 bp, Homo sapiens
tgggatgcactttctcaaaccaaggctgctgacagtcattttgtttactcattcagccctgttgcaggtcccaataaactcttcataaggttgacagaag

SEQ ID NO: 686594 - DNA, 82 bp, Homo sapiens
acccccattgctgagccagcggagctgcttgagacatcattaatctggtggctcaggtggttccaatttatgctgtttccca

SEQ ID NO: 686595 - DNA, 100 bp, Homo sapiens
tggcggaccgcttctcccgcttcaacgaagaccgagactttcaggttgtaggtgacgtggacaccagcctcccacggaccctagacgagcttggcatcca

SEQ ID NO: 686596 - DNA, 75 bp, Homo sapiens
ccgctcacctgcgctgtgatgcctgcagagctgtggcttaccaggtgctggcccagcagggggagtacagtgagg

SEQ ID NO: 686597 - DNA, 97 bp, Homo sapiens
ccaggtgggcaactgctggtttgtggcagcctgctcgtcacttgcctcccgggagtcgctgtggcaaaagaccaatgatgcgagctcagagtcaata

SEQ ID NO: 686598 - DNA, 74 bp, Homo sapiens
gtgccccccacccagaatgcccttccagaagtgcttgctgttatccaggtccaagcatctcattttgaaggcct

SEQ ID NO: 686599 - DNA, 74 bp, Homo sapiens
gctggcagtcatggccatccagagcctgcacccttgccctggtggggtcagatgctgtggactctgggacctgc

SEQ ID NO: 686600 - DNA, 75 bp, Homo sapiens
gtttgatgatgctggaggtgaagggcaggacacgtcctcacagaaaattgaagacttgatggaaatggtgcaaaa

SEQ ID NO: 686601 - DNA, 83 bp, Homo sapiens
aaccgggacccggtgtctgctcctgtcgccttcgcctcctaatccctagccactatggagcatcagatccatgctgctgctga

SEQ ID NO: 686602 - DNA, 51 bp, Homo sapiens
gcggccaagactccgtcctgcaagaggatccacctggttcatgaaccctcc

SEQ ID NO: 686603 - DNA, 100 bp, Homo sapiens
cacgccccactacattcgctgcatcaagcccaacagccagggccaggcgcagacctttctccaagaggagggccacgactgcttcccggtgctgttcacc

SEQ ID NO: 686604 - DNA, 98 bp, Homo sapiens
atgagaccagaggtgcggaaggaacagaaagatacgtaggtaacctttccagagatgtgacagaagtccttatacttcagttgttcagtcagattgga

SEQ ID NO: 686605 - DNA, 100 bp, Homo sapiens
ccgataccttaggatacaacatagaacctattatgctctatcaggatatttttaaacaagctactgaagatagattaacaagtgcaaaggaattgcctta

SEQ ID NO: 686606 - DNA, 100 bp, Homo sapiens
ctctaggaagcgctagacacatatggtgatgacgacccacaactctcctgggtggcctcgtctccctccagcaaggatgttgcgtcacccacgcagatga

SEQ ID NO: 686607 - DNA, 74 bp, Homo sapiens
atgagacatttgctacagcatcccacattaagtcaacgaacactcctatgccaccttcaccagctgtacaagtg

SEQ ID NO: 686608 - DNA, 101 bp, Homo sapiens
catgaacctgaggggcctcttccaggacttcaacccgaggtatgcagtggaactgatgaagaccctgatgataaaaacgcaccctttcggcaacggccatt

SEQ ID NO: 686609 - DNA, 97 bp, Homo sapiens
ccaccttagcctcctaagtagctgggaccacagcaactcttatctaaatgcccctggaaggaatacaaatcagattctggaaagccttactattata

SEQ ID NO: 686610 - DNA, 78 bp, Homo sapiens
tcacttctgcacttcagtaaaccaggatggggattcgacggcacggaggaggagacccacccggtggacttgagctcg

SEQ ID NO: 686611 - DNA, 75 bp, Homo sapiens
gaaaatttctgtttcatgtgaagaattccgatttggtactttcagcaaccttcaaaagatcctgtcccatgatca

SEQ ID NO: 686612 - DNA, 51 bp, Homo sapiens
cgaggagaaagacgccaaccagtcttggtcttgatgccaagtttgggaaag

SEQ ID NO: 686613 - DNA, 100 bp, Homo sapiens
cgcctgcggttactggccgggccgacgggtcctgagtctccagagctcgtgtgaaatatgagttggcgaggaagatcgacctatcggcctagaccaagac

SEQ ID NO: 686614 - DNA, 50 bp, Homo sapiens
acagggcacaccaaactccatctggttttgagcaaaattttggactgtga

SEQ ID NO: 686615 - DNA, 90 bp, Homo sapiens
tgcaagcctcctggggaacggaacatacatggcctgaagaacaatcggcgaggatctccagggggtcctcatgacctttgctcgccatct

SEQ ID NO: 686616 - DNA, 82 bp, Homo sapiens
ctggggagcgcctcgtcgacatgagtgatgtggaggaaaacaacttcgagggcagagtagcagtagctgatgtgcagtttgg

SEQ ID NO: 686617 - DNA, 83 bp, Homo sapiens
ctcctgtcgctgcccgtgtgattactgagactcagctcagagtcaagatctccactgaagttggcatcacaaatgttgatctt

SEQ ID NO: 686618 - DNA, 100 bp, Homo sapiens
aagccacatagttgggccagagtcgggcgccagctgcatggtgcagatcatgaaacaaagagtcctcttcgtggaaaagaaaaaaatacgctccctttaa

SEQ ID NO: 686619 - DNA, 90 bp, Homo sapiens
ctgtgatcgaggacataaggaactagtcacagtgttgctgcaacatagagctgacattaactgtcagcctcaaggaataggttctcctag

SEQ ID NO: 686620 - DNA, 100 bp, Homo sapiens
ctccactgccaccagaacccaagagcagtggattcccagtgtccccacgagctgtgtggtccatgatgaggggcttctttcctgtcgttgttggctttat

SEQ ID NO: 686621 - DNA, 100 bp, Homo sapiens
taatcctactcagaagaacttgtacagagatgtgatgttggagaactatagcaatctggttttcttgggatggcttctggaaacttacaccagaactggg

SEQ ID NO: 686622 - DNA, 95 bp, Homo sapiens
gcaggatctgcagaagacgcagggctcaagccagacctccccacagtggatcctatctcatcctcattgacctctgctccagcccctatgctgtc

SEQ ID NO: 686623 - DNA, 75 bp, Homo sapiens
cgaggagataccagtcggtagaggaggctgggaggcggcagaatgcagccagaggagggcacaggctggctgctg

SEQ ID NO: 686624 - DNA, 100 bp, Homo sapiens
atatccctagaacgttgagggcacgagtcgggtcctgagaccagccgcctgtcttggttagatggctctggattaggattctcactggaataccccacca

SEQ ID NO: 686625 - DNA, 100 bp, Homo sapiens
ggagacattttggcaggatgccatcctaatcctatgaagctactgaactataaccctgaggaccctccaggatcagaagcctatatgaacccaatagcaa

SEQ ID NO: 686626 - DNA, 74 bp, Homo sapiens
gccattttgagcaatggggaacgctcacggactgtgtggctatgtccaaactgggtcttcggcaggttacagga

SEQ ID NO: 686627 - DNA, 98 bp, Homo sapiens
ggagggcgtgttgtcgcaggtggacttcttgcaacaggttaacgtgtatggcgtgtgcgtgccagctgagtcagtgctgattctctcaaatagagctt

SEQ ID NO: 686628 - DNA, 95 bp, Homo sapiens
aactttcctggcccttttgaagaggaaatgaagggtattgccgctgttactgatatacctttagatgtgttcagagcaacattgttttgttgaca

SEQ ID NO: 686629 - DNA, 83 bp, Homo sapiens
gagatcctgctgacgccggctagggtgaggaagaggatggagatgaagatgaggaagctgagtcagctacgggcaagcgggca

SEQ ID NO: 686630 - DNA, 75 bp, Homo sapiens
tgttactgcagacagatgggaaaaatatttgatcaaggtggcagtgctccttttggacttttctctaggtttggc

SEQ ID NO: 686631 - DNA, 78 bp, Homo sapiens
tctgtatcagaagacaatatcatgcaagtgtggcaaatgtctaagccagaaatccagtacgcaccacatttggagcag

SEQ ID NO: 686632 - DNA, 83 bp, Homo sapiens
gcggaggctgcactgagcgggacctgcgagcagcgcgggcggcagcccgggggaagcgcaatcccactccaggaattgtgatc

SEQ ID NO: 686633 - DNA, 83 bp, Homo sapiens
cgcggtggaaacagcagcagcggaaggggatcccaacaagccctcaggattcagaagtgttaaagctcctgtcactaaagtgg

SEQ ID NO: 686634 - DNA, 50 bp, Homo sapiens
tatttagaggacattatcatggccaataatttctgaagatcagacagcag

SEQ ID NO: 686635 - DNA, 73 bp, Homo sapiens
gccccggcggcggcggcggccttgggccggtggacgtacccagcgctcggatggtgattgctcacaccaaagc

SEQ ID NO: 686636 - DNA, 127 bp, Homo sapiens
aattaagtaaacctttggaagatggacagcccacaagtgattcaaaagaagccaagtgggtgtctttaacgtgcaaacggttagagcaggagcttcatcatgtgaaagagcagaaccagacttcagc

SEQ ID NO: 686637 - DNA, 100 bp, Homo sapiens
acaaattttgctactgtcagatggattgactatggaaaagttgccaaattgggtgagaaggactggcagaaatacgagactgctcggcggctgaaaaaat

SEQ ID NO: 686638 - DNA, 100 bp, Homo sapiens
gacagccaccgccgcccccaacgtccatgcctgatgtcaaaaacggtatttcgctgcctggcacaagctgattcttgatcataggattaagctggggaaa

SEQ ID NO: 686639 - DNA, 115 bp, Homo sapiens
acggcgcagacgcgggcgagctgcggctcggacgccagcggacacgcgggcgagggaaatcctcattgacgattcaatttgttgaaggccaatttgtggactcctacgatccaac

SEQ ID NO: 686640 - DNA, 83 bp, Homo sapiens
gggaggaataacccagactaggaatgccagcatctgccaagcattggatatgtcaagtgaccagatagctgccaatctgcaag

SEQ ID NO: 686641 - DNA, 100 bp, Homo sapiens
actcctctgaccctgtggagatgcggaggctcaactaccagaccccaggtcgcagaaccctagctgtaatcactaaacttgatctcatggatgcgggtac

SEQ ID NO: 686642 - DNA, 83 bp, Homo sapiens
ccctggagcctcagttggaagcagccgatccagcctgcggagcctgtggggcaggtgtactttcggctccatgcttccatcct

SEQ ID NO: 686643 - DNA, 75 bp, Homo sapiens
caggtgcccagggctgcttccacgacgtgggtcccctgccagatttgtgaataatatgtggattcgagaccatga

SEQ ID NO: 686644 - DNA, 98 bp, Homo sapiens
cagctctcgccgcgcagccagaggtcaccggagcatcttcggagctggtatagtggaggattacaagccaccgttctacgatgtggttcccaatgacc

SEQ ID NO: 686645 - DNA, 100 bp, Homo sapiens
catagatggccagctttcccccgagggtcaacgagaaagagatcgaacaaaatccagtctcatagcagaggagaatataatgtttacagcaccttccaga

SEQ ID NO: 686646 - DNA, 50 bp, Homo sapiens
tttactccatgcagttgtcaggaggttactataacaacagtaccaaggtg

SEQ ID NO: 686647 - DNA, 74 bp, Homo sapiens
tcgaagaaggggacgccgacaaggcctgggccgaggccactggtgcatatgttcccgggagggataagccagac

SEQ ID NO: 686648 - DNA, 82 bp, Homo sapiens
aaagcagcgtgcgttcagccctgggggccttggtgtaccttgttgtagtgtttgaaaacatctgaggctgcatccatctcca

SEQ ID NO: 686649 - DNA, 100 bp, Homo sapiens
gagggttgaagataatgaggacagatgaagaaatgtttgattgtgccatacttacagttgctgattttcaaggaatagccaggtctggctgggtcggcac

SEQ ID NO: 686650 - DNA, 96 bp, Homo sapiens
tccggaggcttggtgactccagtggcccagcgcctagaagcctgcagctccggagcagtggccgcgccacgccggccccagcgcgcagaaccctgc

SEQ ID NO: 686651 - DNA, 83 bp, Homo sapiens
atatgacattgccagtcaagcacacttgcacctaaagcatattgcaggacaaacaacgagtaaatgtatcgagtggatggggg

SEQ ID NO: 686652 - DNA, 100 bp, Homo sapiens
gtgcgctcactctgaacctctgtgcacacgatgggcctgcatctcttcccactatctgctaggaaacacgagggatgccgcagctgagcctgtcctggct

SEQ ID NO: 686653 - DNA, 99 bp, Homo sapiens
tcacgaaagcctacaaaagtgtggagaggttccttcaggaggatcagagtgatcagcagctggactgtgccttggacctaatgaggcgcctgcctcccc

SEQ ID NO: 686654 - DNA, 98 bp, Homo sapiens
tggatgacagtcaccgacagaaggaagaagccattgaagatgttgaaggacccagtgaaacagctgctgatccagaggagcttgctaaggaccaagag

SEQ ID NO: 686655 - DNA, 100 bp, Homo sapiens
atttgttttgagctaaatattgagggaacagatgttgttattgtaaagaatggaagaagaatatgtggaacaggaggttgtttagccagcgcacctttac

SEQ ID NO: 686656 - DNA, 99 bp, Homo sapiens
tccccagtgtgtgccggagaacacgggctacacgtatgcgctcagatgatggtggtgctaccccagtacaggatgaacgggattcagggtcagacggtg

SEQ ID NO: 686657 - DNA, 90 bp, Homo sapiens
cggagaagcagtggtgggttccatgtgatggtggagtaggaggcaggtctccgcggtcatgttggcagcttcctattggtctcttctggc

SEQ ID NO: 686658 - DNA, 90 bp, Homo sapiens
gctcgatctaggttctgcggcacgggatggcggaggcgcctcctgtctcagaaacagatgattatgctgagattatagatgaagaagata

SEQ ID NO: 686659 - DNA, 98 bp, Homo sapiens
atggcgtgtatctggtacgtcattggaaaaatggagagggaagacaacagccttctgaagtgggaagttgtacctgccatcctggctggacttgaccc

SEQ ID NO: 686660 - DNA, 83 bp, Homo sapiens
acgttaatgaaatcttagaatcacccaagaaggcaaagtcgcgtttaataacgtaatagcctgcagctggtgttttgagaagc

SEQ ID NO: 686661 - DNA, 100 bp, Homo sapiens
acggctcacctgtgcgggatggaacaaaaggtgatcagcttgaaattcagctaaccgagcagctacggtccctcatccccaacgaggatgtgagaaagtt

SEQ ID NO: 686662 - DNA, 98 bp, Homo sapiens
acgacacatgcagtggcttctggactgcgcgatgactggacggccaaagaactgccaactctgaaagataatgatttcattaatgagggccaaaagat

SEQ ID NO: 686663 - DNA, 88 bp, Homo sapiens
gaggacattgatacccgcaaaatcaacaacagtttcctgcgcgaccacagctatgcgaccgaagtcatgatttcattggagaatttac

SEQ ID NO: 686664 - DNA, 103 bp, Homo sapiens
gtccagtctctccagacactgggtctgactatttctgaacaacaagcagagttgattcttcaaaggtggagtattgctcctggaaaatccaaaaggtgacaat

SEQ ID NO: 686665 - DNA, 83 bp, Homo sapiens
cagtctccaaattcgcctccatctgtaccatgagcgtttcccaaagtgtattctgcggaactagcacctactgtgttctcaac

SEQ ID NO: 686666 - DNA, 82 bp, Homo sapiens
ccttcggccagagcggcaagttcaagatccacatcccaggtggatccataaagaacccagccaacccgcagagggaggggag

SEQ ID NO: 686667 - DNA, 74 bp, Homo sapiens
gtggacagcctcatcacccggctgctggagggccataaagaatgctgatgggagaaccattttcctaattttca

SEQ ID NO: 686668 - DNA, 100 bp, Homo sapiens
tgatcctggtatttcaagcattggtcttccaggtcttcctggtccaaaggaaagaccacagcaagattctttcattcgtctcctcctagcctgggggacc

SEQ ID NO: 686669 - DNA, 76 bp, Homo sapiens
cattgatgccacaaccataatagaatgtctacattcctgtgggaagaagagcgctatcctgaaggcatcaagtgga

SEQ ID NO: 686670 - DNA, 75 bp, Homo sapiens
ctacgaaccaggagtcaggcgagccgatctggggctgcaggggccggtgagcccaacttcgatggcctggagagt

SEQ ID NO: 686671 - DNA, 78 bp, Homo sapiens
tcatctttgaactactgccggagcttctgccaggtcctcttcctgatggatgggaacaagccatgactcaggatggag

SEQ ID NO: 686672 - DNA, 83 bp, Homo sapiens
cttagaagtggtgatgcaagaagtttctaggaaaggccggacaccaggttaaagatcgaggtccggaagccactaggagattt

SEQ ID NO: 686673 - DNA, 100 bp, Homo sapiens
tgttctcataataattcagatggagaatatatggctggacagctagctgcttatggctataaaattacagtgcctacaccaactaatgttacaattgaat

SEQ ID NO: 686674 - DNA, 50 bp, Homo sapiens
gagctgcttcccaataaggaaacaaagagcttaaagcagcgcctgggtaa

SEQ ID NO: 686675 - DNA, 100 bp, Homo sapiens
ctgcaccttcagaaacagtgctgaagcctttaaatgcagcatctgcgatgtgaggaaaggcacctccaccagcgtcgagggcgaggcccccagcagtgag

SEQ ID NO: 686676 - DNA, 90 bp, Homo sapiens
cgcatggaagaaagaagagcttattttgacttgcagacacataaagtgactgagaccgaagatgatagtgatagtgacagcgatgatgat

SEQ ID NO: 686677 - DNA, 74 bp, Homo sapiens
gaagacactctggacaccactatggacagagaggagccatcaaaactcgatcaggatgttttggccgctcttga

SEQ ID NO: 686678 - DNA, 98 bp, Homo sapiens
gaaacgaccacctttacgagaattctttgtcgatgactttgaagaattattagaagaaatgcactcggtgatggaaagagagccactattctgaagaa

SEQ ID NO: 686679 - DNA, 75 bp, Homo sapiens
aaagaacactgttgttgccacaggtgttgcaaacaggaacccgaggtgttcacttcactgttgaaggaacgagag

SEQ ID NO: 686680 - DNA, 50 bp, Homo sapiens
cgcggctcttttctaaaagtgaatgctgtctctgcaatttgagaggaggt

SEQ ID NO: 686681 - DNA, 73 bp, Homo sapiens
ctcatcctggttctggaatcctcagttcaaggtaaacctagcctttaagcaacctggaaagaggctagaacac

SEQ ID NO: 686682 - DNA, 82 bp, Homo sapiens
gataagcctcgacttagaagctaccgagttaccctaagaaaggtgaaaaattagacgatttcaagaattggagctgaatctg

SEQ ID NO: 686683 - DNA, 83 bp, Homo sapiens
ctgcgctctccgcaccgcggcttaaatgatgtattttgtgatcgcagcgatgaaaggtgagaagccctaccactgcaactggg

SEQ ID NO: 686684 - DNA, 100 bp, Homo sapiens
tttggtggggtcttaagttgtggtctgacacacactgctgtggttcccctggatttagtgaaatgccgtatgcaggtgatcacgaaactcgctggcatgg

SEQ ID NO: 686685 - DNA, 74 bp, Homo sapiens
gtctacctgaccgacttggtgctgaagatgttcacgtaaacataatttcccaacatccagtcctacccttctta

SEQ ID NO: 686686 - DNA, 50 bp, Homo sapiens
gtctgaactaggatgtcccgacatgaagatgtgttcagagcaacattgtt

SEQ ID NO: 686687 - DNA, 100 bp, Homo sapiens
ctcggatgcgaccctcccagaccggccgctctcccctcctctcacggcacctcccaccatgaaggacctcagcagccatgtcgaagccccatagtgaagc

SEQ ID NO: 686688 - DNA, 82 bp, Homo sapiens
cgagaggaggaggaggatgatgaatgatttattattaatccggaagaatagaatggcactttttcaacatttgacttgtgta

SEQ ID NO: 686689 - DNA, 100 bp, Homo sapiens
gttcaagcttggtgtgctaggctgggagtaatcaagtcagaggattatatgacttttatctgcctagagaagaactatggatctacaacatggagactgg

SEQ ID NO: 686690 - DNA, 76 bp, Homo sapiens
caggcgccggccggctgcgaagacgcggtgggccgcccctccgttgcacctggacttgatatgaaagtaaccatca

SEQ ID NO: 686691 - DNA, 75 bp, Homo sapiens
agaaagatgacaccacctttgatgaggtgctgactgggttacttttttaaacactaggaatggtaatttctactc

SEQ ID NO: 686692 - DNA, 83 bp, Homo sapiens
agcctccgtgcggagaccactgttcaaggccacaggtggtataagttgaaatccaaaccaggaaagaaggacaaggagcgagg

SEQ ID NO: 686693 - DNA, 80 bp, Homo sapiens
accgaggggcctgtgcggccgcccggcccggccgcggatcagggactctctttctgtggatgttttggcccagctttaac

SEQ ID NO: 686694 - DNA, 75 bp, Homo sapiens
agtctgcattagtcaccggaggcttacacacaggcccttcataacacaaggcttttatctgcttattccgccatt

SEQ ID NO: 686695 - DNA, 100 bp, Homo sapiens
tttgaaagaaaaaggctacaaagctgctttcattggaatagccatgaatcatcttaatggacagaaaatgtatggaaaaattattcgtgttactctgtct

SEQ ID NO: 686696 - DNA, 96 bp, Homo sapiens
cagacccttgctgcggagcgacggagagagactgtgccagtcccagccgccctaccgccgtgggaacgccctggaacagctgctgacagagttgga

SEQ ID NO: 686697 - DNA, 74 bp, Homo sapiens
gaaagacacacctaccaagaagccagtcaagcggccagaccagccttctggccaactgccaggcgccgcgccgg

SEQ ID NO: 686698 - DNA, 83 bp, Homo sapiens
gattttcctagtctaagagaatacaatgatttcttggaagaagtggaagaaattggtcagcccaaggccaaccccactgtcac

SEQ ID NO: 686699 - DNA, 75 bp, Homo sapiens
gcctcaagtttcacctatcctcactgatccgtggacttctgtatgatcagggaaatcctcattgacgattcaatt

SEQ ID NO: 686700 - DNA, 100 bp, Homo sapiens
atgaacattgtattgagaacaatatagatttgcagttggataacagggcaagattcagaggaagaaaaggatattgatgcattatgttgaagccaacatg

SEQ ID NO: 686701 - DNA, 76 bp, Homo sapiens
caagaaagaggacgctttactctaccagagcaaggaaatggtggagtcaatgaagaaagtagcagggatggatgtg

SEQ ID NO: 686702 - DNA, 110 bp, Homo sapiens
gacagtcttctagaagagagaaggaggaaaagaagcagttcctgatgttacaaatgaacaaggatctcccaggcatagcgcgctggctaggactccagtaccgtgaaggg

SEQ ID NO: 686703 - DNA, 111 bp, Homo sapiens
agcgactagtaagcctatgtcatttcatccaccacattacttaggatcttcagcctgttaaacaagaaaacgaaaaaccccttccagaaaacatggatgcatttgaaaaag

SEQ ID NO: 686704 - DNA, 80 bp, Homo sapiens
caggccaagagggatccttcacccgtgtctggtcaccatccttgtcagcctggccctagctttccttgcgtgcatcgtgt

SEQ ID NO: 686705 - DNA, 75 bp, Homo sapiens
gcagggttctctaccctcgagtgaactctcttgatagagcccaagcagccaagaataaaggcaataaatatttta

SEQ ID NO: 686706 - DNA, 98 bp, Homo sapiens
tggtatccattacctccatgcaaattgggtgcttcacagagacttggtccttggatgtggctgtgttgcccaagctattctcagtcgaggacgttttg

SEQ ID NO: 686707 - DNA, 82 bp, Homo sapiens
gttggcaacctcactgagttagaatcagaggcattgggatcccgtggcagttgcagcactgaagtggagaaggagacccagg

SEQ ID NO: 686708 - DNA, 90 bp, Homo sapiens
ctgagcttggcctcggcgtcctcgggacacattcagctaacgtattttagcaggtggagtgaggttgaagattcctgtgacagcgatgcc

SEQ ID NO: 686709 - DNA, 75 bp, Homo sapiens
tgttcattgtttgtcaccacaaaaaggacaggaacttgtaatagctggcatcgttgagaatgaatggaaaagaac

SEQ ID NO: 686710 - DNA, 75 bp, Homo sapiens
gatgcttatatcaatttaggaaatgtcttgaaagaggcacgcatttttgacagggcagggcgatgtagacctgga

SEQ ID NO: 686711 - DNA, 75 bp, Homo sapiens
cttcaagcttaggaccacccaccatgcctatccagaccccaccaacaactgaacgctttggtcaggctgctacaa

SEQ ID NO: 686712 - DNA, 82 bp, Homo sapiens
tgggtgagaagatcctgggcagcctccagcagggacctgtgacaggctactgcagcactggggtgtcagttgttggtccgac

SEQ ID NO: 686713 - DNA, 107 bp, Homo sapiens
tgcgttacaagctttgtctccttcgacttggagtctttgtccaggacggacatggatttgattgacatactttggaggcaagatatagatcttggagtaagtcgaga

SEQ ID NO: 686714 - DNA, 98 bp, Homo sapiens
ccagtaggccgggactagctgtctcggggccttccatccgcttggccccacaggtctgctgacatttgtgaactgtgcctatgtcaagtggggcacac

SEQ ID NO: 686715 - DNA, 100 bp, Homo sapiens
tgaccaagggcaaaggctacaaaggtggtccgcgcaaaggagcgcctggatgaggaactcaaaatccaggcccaggaggacagagaaaaagggcagatgc

SEQ ID NO: 686716 - DNA, 50 bp, Homo sapiens
cctacacggtctcctgggtcaagcctcttcgagcactactgctactcccg

SEQ ID NO: 686717 - DNA, 100 bp, Homo sapiens
gcacctgcctgagcggcctgctgcggcaccgcggcggcctttctcctgggaagacggacctatgatgcctactccactttctacctgaattccagtggcc

SEQ ID NO: 686718 - DNA, 90 bp, Homo sapiens
cacctcctcgccagcagccgtccggagccagccaacgagcgaccattgacttcctgaacgacaacattcgaagaggaattgagaactact

SEQ ID NO: 686719 - DNA, 75 bp, Homo sapiens
ctgatgaagattcacctgtgcatgctgaaacagaaccgcatgagggaaagaggaaagtggaatctctgtggccca

SEQ ID NO: 686720 - DNA, 101 bp, Homo sapiens
ggtccatgttgctggtcctggccccacagggcccatcaagattttccccttcaaatcccttcggcacctggagacaggctacatgtttggtaaagggatct

SEQ ID NO: 686721 - DNA, 100 bp, Homo sapiens
ttggaggcctcaccgtgagaccttacaaagccggataccctgcagtgcactgtagaacagaagataagaacttttctctgaatttgggtcttctagactt

SEQ ID NO: 686722 - DNA, 90 bp, Homo sapiens
ctcagagaagtgaagcaacttgcccagctatgagagacagagccaggatttgaaaccagaaactggcgatggaatatgagaggagccctc

SEQ ID NO: 686723 - DNA, 98 bp, Homo sapiens
aatcatctccatattctcaggcacagagaaagcggattttggagtatcagctaaaaacacgaggacaattcaaagaagagattcctttattggtacac

SEQ ID NO: 686724 - DNA, 89 bp, Homo sapiens
caaataccttgcatacatggagtctaaaggagcccatcgtgcgggtcttgcaaaggtcccctcttgctgttggctgcacatcaggaagg

SEQ ID NO: 686725 - DNA, 100 bp, Homo sapiens
ggcgtggttgcatttcagaatggagacttggaagtctttttgcatgttactgttccactgaagtcactcaggcaatatgggatggatatctacaacaagc

SEQ ID NO: 686726 - DNA, 100 bp, Homo sapiens
aagagacaccaatggagatctgcctcaatggaacccctgctctggcctacctggcggaatcagagatcattgatttcttcctgggggcctctctcaagga

SEQ ID NO: 686727 - DNA, 100 bp, Homo sapiens
gatgctggtggagctggtccggcggatagagaagagcgagtcgtcgtgagcgcggtcggcgtatccgtaccgtcctgacgttttgaaacaatacagatgc

SEQ ID NO: 686728 - DNA, 50 bp, Homo sapiens
cactgggatcagagatcggaagaagatatatttattgccagagaattgat

SEQ ID NO: 686729 - DNA, 82 bp, Homo sapiens
ggaaggagctggagacggtcgtagctgcggtcgcgccgagaaagctggaaaacctcatgctggacaaagatggccacatcaa

SEQ ID NO: 686730 - DNA, 83 bp, Homo sapiens
cggaaaaccgaagttggaagtgtctcttagcagcgcgcggagaagaacggggagccaggaggcatacacggaatacctgagga

SEQ ID NO: 686731 - DNA, 90 bp, Homo sapiens
ccggcgccgggcactgagcaccgccaccatggggaaggggtcatccgtccttggctcaggatttggagagcttgcaccaccaaaaatggc

SEQ ID NO: 686732 - DNA, 100 bp, Homo sapiens
accatttcgagggtgaagctcctcgacaccatggtggacacttttcttcagaagctggtcgccgccggcagtggtggtgaccgcggtggcttcaaaaatt

SEQ ID NO: 686733 - DNA, 100 bp, Homo sapiens
gaagcagttctacaaggcgagccaggtaaagaggatgaatatccaaagaagcccttggggcagcttccacctgaacttcagtcttggggcgtccatcact

SEQ ID NO: 686734 - DNA, 100 bp, Homo sapiens
tgcggggacctacgcctggatggcgccggaggttatccgtctctccctcttctccaaaagcagtgatgtctggagggtgtccgcaatgttgccagtgtct

SEQ ID NO: 686735 - DNA, 100 bp, Homo sapiens
ctgcagcctcggtggccccgacatgattccttacttctccgccaacgcggtcatctcgcagaacgccatcaaccagctaaagctgtctgccaaggagaag

SEQ ID NO: 686736 - DNA, 100 bp, Homo sapiens
gtccgagccagccgctgttttgccggaggagcccctcaggccactttgagcaaagcatggtcctggttgcctgtggaccatacaccacatctgacagcat

SEQ ID NO: 686737 - DNA, 90 bp, Homo sapiens
cttgtggagccggagctgggcgcggattcgccgaggcaccgaggcactcagaggagatttcctcctctgatgctcctcttcagcctttgg

SEQ ID NO: 686738 - DNA, 75 bp, Homo sapiens
ggcagggaatggctcatggggatatccgtgggtaattccagaattgattggccataccattgtcactgtattact

SEQ ID NO: 686739 - DNA, 50 bp, Homo sapiens
atcttgaaggaatggacctcaaagcagagctgcaaccctcttgtcctctt

SEQ ID NO: 686740 - DNA, 82 bp, Homo sapiens
aggccaaggaccccaagctccgagaagaccggcggccaatcacagtccactttggacagtaatctcaggggcgatataatca

SEQ ID NO: 686741 - DNA, 100 bp, Homo sapiens
tgcctggcctggtgccatgacaacaagtcccggctccggaagatgaagatgttccaggtcatccagccagagcgtgcgctgtacatccaggccaacaact

SEQ ID NO: 686742 - DNA, 97 bp, Homo sapiens
cggagcttatactcctcccagtgacgggtctggagtgcgtgggggaccggctgttggcggccccccagcgtccacgcggagcatgaacattgaggat

SEQ ID NO: 686743 - DNA, 51 bp, Homo sapiens
gctacttctcccaagtggcagaatgaggacggggacttggttgccttttcc

SEQ ID NO: 686744 - DNA, 100 bp, Homo sapiens
cattatgtcaacagcatctgtggaaatcgatgatgcattgtataggtgtgttctactccctcttctgggaatgaagcctccccagcaaagcctatacctg

SEQ ID NO: 686745 - DNA, 50 bp, Homo sapiens
cctggatgaagtgcacaccataccaggtctgcactacagagcttacacaa

SEQ ID NO: 686746 - DNA, 100 bp, Homo sapiens
tttgctaccaggacctacggcaccagtggcctggacaacagacctctgtttggggagacgtccgccaagacggtctggaaaatcccgaagcagaagcccg

SEQ ID NO: 686747 - DNA, 82 bp, Homo sapiens
ccaaatgtctgactctgactctcggactgagaaacgcaagcttcgagagctgtgcccaggagtgaacaaccagccctacctc

SEQ ID NO: 686748 - DNA, 83 bp, Homo sapiens
gtttacctgcatgacttccagaggtttctcatacatgaacagcaggcgtttactgaagcatttgaaagggaactaagaagaca

SEQ ID NO: 686749 - DNA, 75 bp, Homo sapiens
ccaccatgatggaagacgacgggcagccccggactctgaaacaatgtgatgagaaccattcatggggtgggagag

SEQ ID NO: 686750 - DNA, 100 bp, Homo sapiens
tggttctcgaaggcccgcggcgccccgtgctgcaggtgtcatggagaaactccagctgggcccagagattctgcagcgggaaaatccaaggcttatttat

SEQ ID NO: 686751 - DNA, 121 bp, Homo sapiens
gtctgttccacattgctgcatttgttctgcctgacttggaccctggaaaacctggccctcttcaatttctgacaaaaggtcaccgctgtcatatccaggaacacaggagcaatatgcggta

SEQ ID NO: 686752 - DNA, 100 bp, Homo sapiens
cttgaatccattaaggggattgcggtcatggacaaggaaggcaatgtcctgggtcattccagaattgctgggacaaagagtctcgctctgtcgcccaggc

SEQ ID NO: 686753 - DNA, 90 bp, Homo sapiens
tgggaggtggacggctccagccccagctgcgtgcccagggggggccctcagcctcttggccttgaacgggctgttcatcttgattcacaa

SEQ ID NO: 686754 - DNA, 75 bp, Homo sapiens
aaaaacatgcaaaaacttcctttgcttgtgctcaggatccagcaagtaggcaatgaagcctatgttatagggctc

SEQ ID NO: 686755 - DNA, 71 bp, Homo sapiens
agttgggaggacccgggacaccgcacagccgggaaatgagaagttgatgacgcctgagatgttttcagaaa

SEQ ID NO: 686756 - DNA, 98 bp, Homo sapiens
aagtggctttttatcagttgcaacaggactgtgacctgagctgtcagatcaccattcccaaaggagttccatctggaatatgacaaattagaagaacg

SEQ ID NO: 686757 - DNA, 51 bp, Homo sapiens
actactggtgcctgcgctgaaaaaggaattgaaacctgacatagtaactaa

SEQ ID NO: 686758 - DNA, 101 bp, Homo sapiens
tttgcagcgtagcccgagtcggtcagcgccggagggacctgatgcccagaaccctggacgggcagatcaccatggagaagacgcccagttacttcgtcacg

SEQ ID NO: 686759 - DNA, 74 bp, Homo sapiens
acagccccggcatcctttctggggagaagcagcgcatcagccgaggtttcctatcctgggagcaggagagtgtg

SEQ ID NO: 686760 - DNA, 50 bp, Homo sapiens
cggagcgccccgccgcgcacaggggggccctcagcctcttggccttgaac

SEQ ID NO: 686761 - DNA, 90 bp, Homo sapiens
ctgttattcacctacctcaactccttcctgcatcagagatgccggtggccgtgggtccctacggacagtcccagccaagctgcttcgacc

SEQ ID NO: 686762 - DNA, 75 bp, Homo sapiens
atttcgcccctcgcgtccggagtccccgtggccagatgccatggacaatattaccaggcagaaccaattctacga

SEQ ID NO: 686763 - DNA, 100 bp, Homo sapiens
aagctaaagaaatttctacacctacccattggtctaaacttgatccaaagacaatgaagcttcctcggttatgtggacatgcttggtgtagcctatgaag

SEQ ID NO: 686764 - DNA, 73 bp, Homo sapiens
acaatgtcaccctcccagcaacagaaatgagtggtggattggctccaagtaagagcacagtgtatgtatccaa

SEQ ID NO: 686765 - DNA, 99 bp, Homo sapiens
caagcttccaagatgccgcccaaaggaaaaagtggttctggaaaagcggggaaaggagggaattgatgtgggaactttgctgaaatcaacctgtaatac

SEQ ID NO: 686766 - DNA, 80 bp, Homo sapiens
gaaagtcctctcgggagaagcagcgcctgttcccggggcagatccaggttcaggcctccaagcctttgggagtagcttct

SEQ ID NO: 686767 - DNA, 51 bp, Homo sapiens
gctgatccgggaggatgagaatcttcaggcagtgggacctggtggtgtcaa

SEQ ID NO: 686768 - DNA, 75 bp, Homo sapiens
aaacaagccgtggaataggtgtatcaagtaatggtgcaaagcctgaaatggcctgtgagtatctgtctgtggaag

SEQ ID NO: 686769 - DNA, 100 bp, Homo sapiens
ctggacccaacacaaatggttcccagtttttcatctgcactgccaagactgagtggttggatggtcccggggagccagatgtgcgggatggcttcagcgc

SEQ ID NO: 686770 - DNA, 100 bp, Homo sapiens
tgtcttccccagctctgcagccacatactatccgtttgttcaggaaccaccagtgacagatgataatatgcagcatgcatactgggaactgaagagagaa

SEQ ID NO: 686771 - DNA, 98 bp, Homo sapiens
tcctacctcctcacggctcttcccggcgctctcctggctcccttctgccccagctccgtctcggcggcggcgggaaccctaaggactctgcaatatga

SEQ ID NO: 686772 - DNA, 100 bp, Homo sapiens
aatagatgcttctgtcagtaagaaagcagctgatagcacatcacagatcagtgtgcgtgtgaccaccatggatgcagagctggagtttgccatccagccc

SEQ ID NO: 686773 - DNA, 98 bp, Homo sapiens
tcaagtccagggttaagtacagaaggtattgggagagttgctgctacatctttaggaaatttgactaaccatggttctgaagatttaccccttcctcc

SEQ ID NO: 686774 - DNA, 90 bp, Homo sapiens
cgggcagaaggctggtgacaagtgtaatcgctcaaattcctcttctcctgttgacaaacttaatcagcagcctcgtctaaccaaactgac

SEQ ID NO: 686775 - DNA, 96 bp, Homo sapiens
ggtggtgctccggcttgcgacgggcttctcccaccccctcacgcagagtgcagtcatgggccaccgcaggaacgccagcgcctggagaccatcctg

SEQ ID NO: 686776 - DNA, 75 bp, Homo sapiens
cgcggagggagccgcgggatggaccgcaggattcagcaccatggcggaagacatggagaccaaaatcaagaacta

SEQ ID NO: 686777 - DNA, 82 bp, Homo sapiens
ccttgagctcctcaatgtgggtgtagagtctaaactcatccttaaaggggtcatactgctgacagtgatgtgtgttctgaaa

SEQ ID NO: 686778 - DNA, 50 bp, Homo sapiens
ctgcctccttcccgccgccccctggggctattcaggcagctatcagccag

SEQ ID NO: 686779 - DNA, 82 bp, Homo sapiens
atctacggggctgacatcagcggctctttgtatgatgacgggaacgcccttttgcttgtgactggcagggctgcgacaagaa

SEQ ID NO: 686780 - DNA, 74 bp, Homo sapiens
caaatttatatcattaccttagaggaagaagcactccagagacgactaaatgtgagctggagattggatcacag

SEQ ID NO: 686781 - DNA, 83 bp, Homo sapiens
catggaggctgagcatttattcagatgatatcatcaagttgaatcgaaaggaagggaagaagcagaattttccaagactaaat

SEQ ID NO: 686782 - DNA, 75 bp, Homo sapiens
atttctcctattgaggagtcaacacatgagaagcctacagatccagatgacccccttgctgatcagaatattaaa

SEQ ID NO: 686783 - DNA, 118 bp, Homo sapiens
acttacccgaagttgccgcggggccttccgatcccctgagccggcatcatggattccttcaaagtagtgctggaggggccagcaccttggggcttccggctgcaagggggcaaggact

SEQ ID NO: 686784 - DNA, 83 bp, Homo sapiens
tttgatttattaaatttaaatagattagtaactggcatagacaactatgggcagcattgtcttcagtgttaagaaatgtggac

SEQ ID NO: 686785 - DNA, 98 bp, Homo sapiens
tgaagagacaggaggcagtagccaaacacccaggcagttgcagtggtgcagaatggctgacctcagtcttgcagatgcattaacagaaccatctccag

SEQ ID NO: 686786 - DNA, 82 bp, Homo sapiens
gaaaaagggagcggtggcggaagacggggatgagctcaggacagggagtgcatccgccccaacccttttccccctcgtctcc

SEQ ID NO: 686787 - DNA, 99 bp, Homo sapiens
gggggtcacacattccttccatacggttgagagtggagactgctgcacggactctggaaccatgaacatatttgatcgaaagatcaactttgatgcgct

SEQ ID NO: 686788 - DNA, 101 bp, Homo sapiens
cggctcacggaaaatgtctataagcattttgaaagcgaagcagaagccgtagaatcagcggcgagcctgttgaaagaacccacaggtgcatttcacagcac

SEQ ID NO: 686789 - DNA, 75 bp, Homo sapiens
cccggtgcaagaggcgcaaacaagccaatcccaggaggaaaaacgctctaagcgaaagacatgaggcctcagcct

SEQ ID NO: 686790 - DNA, 82 bp, Homo sapiens
ggactgcctgagacaagccacaagctggttaattatagaaaatgccaagtaggaaatttgccgatggtgaagtggtaagagg

SEQ ID NO: 686791 - DNA, 90 bp, Homo sapiens
ggaacatgggattgggaatatttaggatttgcatcaccagagatcaagcgacgtgcctcagaggctttgcccgaattgcttcgtcctgtc

SEQ ID NO: 686792 - DNA, 90 bp, Homo sapiens
cattatgcatgccccctcccagtgaccccaggctttttatggctgtgagacacgttaaaatttcagggcacggatgggcagaagcctttg

SEQ ID NO: 686793 - DNA, 83 bp, Homo sapiens
cggagaaccattaatcatctctaaggactatcggacaaaacctttctgctgcagcgcttgtccattttcctcaaaattcttct

SEQ ID NO: 686794 - DNA, 90 bp, Homo sapiens
gcgttttctgataactcacaaccctaccaatgctactctcaacaagttcacagagttaacaagcacaagccctggctggagcccacctac

SEQ ID NO: 686795 - DNA, 75 bp, Homo sapiens
cttgttgaatggcttcagagtcaaatgaagaatcctgcaaaaatgtctctctatccatctctcgaagacttgaag

SEQ ID NO: 686796 - DNA, 96 bp, Homo sapiens
ttaaaacatcatccctgccctggatcggcctggagccagtgcccaagtacggtttgtgcaagaactatatcagccagtattctgaaattgctatcc

SEQ ID NO: 686797 - DNA, 96 bp, Homo sapiens
ggcactggatgatgcaatcaaagctcgacttctcaatcccaagtggccaaaggtgtcatggagaaactccagctgggcccagagattctgcagcgg

SEQ ID NO: 686798 - DNA, 83 bp, Homo sapiens
tgctcgaagaactcgagcgacagagacaagctgagcttgccgcacaaaaagctagagaggccagccagctgggtgtgtaccgg

SEQ ID NO: 686799 - DNA, 75 bp, Homo sapiens
gccagaggatggaataggaagacaatggtgcttgaggaatccaaagccctcgtgcgctgcaacatgaagatggag

SEQ ID NO: 686800 - DNA, 142 bp, Homo sapiens
agaaagcattggctcaggtcttctgtgaggaatctggattgtcacctttgctgcaaaaaattacggatacgggagcagaaagacaggcgctaagagaaaatgtatatcctaaactgagagaattctgcagagaaaactatgg

SEQ ID NO: 686801 - DNA, 75 bp, Homo sapiens
gcctcccggtacggatagagagtattaaatgtgggagtggagcaactgctgtagtccaagcagcttattgtgccc

SEQ ID NO: 686802 - DNA, 101 bp, Homo sapiens
caggtattgggagatccacagctaagacgccaggacccactggaagcctagaaatggcatgggctgatgcctttcgaagcagtcctgatctcaccggcgtt

SEQ ID NO: 686803 - DNA, 74 bp, Homo sapiens
gccagccactcgcccctggcctcgcgggccgtgtctccggcatcatgtgtgatcaggaagtgtgctgcaccact

SEQ ID NO: 686804 - DNA, 99 bp, Homo sapiens
ggcagcggaaacgcactttgggtttgagactgtgtcggaagaggagaaggggggcaaagcatgcttttcacttccactgcatctctcgctggctcaaaa

SEQ ID NO: 686805 - DNA, 75 bp, Homo sapiens
gcgccggagccgaggcgagcgccgcgcgcaccactggagcaccagcatgtttgacatgcggtgtgaggaggaggc

SEQ ID NO: 686806 - DNA, 74 bp, Homo sapiens
gcctgttggagaaacacaaagaggtggtgggcacatcaaagaggtcatcgtggctgctgaggcggagctgggag

SEQ ID NO: 686807 - DNA, 90 bp, Homo sapiens
gcagtccagcgtgaactacagtcagggcagcctgaaggatgcaaccaggtgataggtttgatcgagacagaccgttgagaggacgtggag

SEQ ID NO: 686808 - DNA, 101 bp, Homo sapiens
tgctgtgcaatgtcacccaggacatgctgtgcactcatgaagagactttcgggcctctggcaccagttatcaatgactgcaacctgcctgagaaccctctg

SEQ ID NO: 686809 - DNA, 75 bp, Homo sapiens
gagagcaaaatttaaggagttatatttggctaaagaggagacagaagagatgggtgatgaagaagttttctcctg

SEQ ID NO: 686810 - DNA, 75 bp, Homo sapiens
cccagacgcggcacagagagggcctgggagcttgctgcagcttcagtaatagctcttcaagtctgcaataaaaaa

SEQ ID NO: 686811 - DNA, 100 bp, Homo sapiens
cgtgaacatccttttaccacagcctcagccacagtcaaaatgcagatcttcgtgaaaacccttaccggcaagaccatcacccttgaggtggagcccagtg

SEQ ID NO: 686812 - DNA, 90 bp, Homo sapiens
tgatggtgaaaatctgagaccaatagttattgatggcagcaatgtggcaatgagatggggtcacagtggttataaagagttataccctga

SEQ ID NO: 686813 - DNA, 107 bp, Homo sapiens
aaaaagaatgggtcaaccaagaacgtcaaacactccaacgattgagagcatttaaagatgggcactaagacctggaaatggccctgaaattttattgggtcagggac

SEQ ID NO: 686814 - DNA, 76 bp, Homo sapiens
cggcggacggctgcgtcgcccgaggcgaggaggagcgctggcggcagcataattcgttgtatgaggcgcctggaag

SEQ ID NO: 686815 - DNA, 114 bp, Homo sapiens
agaagtcgcgtgtctaggtgagtcgcggtgggtcctcgcttgcagttcagcgaccacgagttgtctgctggttctcagcttgaagaagattctgcagtccttattgatcctttt

SEQ ID NO: 686816 - DNA, 101 bp, Homo sapiens
aaggaagtcaccagcagagcgaaggagagacaggagaatggcgctgtggtgtcccagccagacgggcagccttcaggtgctggagaatctggtaaaagcac

SEQ ID NO: 686817 - DNA, 100 bp, Homo sapiens
gcccatgttccatgacgaggagcacgcccgagcccgcggcctctctgaggacaccctggtgctaccgtgctgcggatcggcctgctgggctgcaatgcca

SEQ ID NO: 686818 - DNA, 73 bp, Homo sapiens
ttgagctccctgtcaaagaggaagaaccccctgaaaaaactgttgatgttgccggtggtggtgtgcacattga

SEQ ID NO: 686819 - DNA, 104 bp, Homo sapiens
ctccctctgcccccccttccccacgcaaccccagatccatttacactttacagtgtccctggccagtgtccttccacctgtccacaagcatggggaacatcttc

SEQ ID NO: 686820 - DNA, 75 bp, Homo sapiens
cccaggcgactgcctcatcttcaaggtgaaaggtgtagcagtcactcggcctacacccacagcatcgaccttgtg

SEQ ID NO: 686821 - DNA, 83 bp, Homo sapiens
taaaaatggctgagtgtcttgtcatgctagcactgcattaagtgatgcatacaggctatggaacaccatatggttacagcaca

SEQ ID NO: 686822 - DNA, 83 bp, Homo sapiens
ctttcagctccccacccaggcctgagcgaagcccacaaccccgccgggcacatgtgaaaggagaaaagccttacagatgctca

SEQ ID NO: 686823 - DNA, 90 bp, Homo sapiens
ggaatgatgccgcagatgatgccccctatgggagggccaccaatgggacaacgctagtcctgctgatgggcaaagaaggtgtccacggtg

SEQ ID NO: 686824 - DNA, 51 bp, Homo sapiens
gaatcagttgttggagaaaattaaaggtggagccgccaccaaaatgcagat

SEQ ID NO: 686825 - DNA, 51 bp, Homo sapiens
cccacaaggagttagcgacctactggggtgcctgtgtagatcatcctagaa

SEQ ID NO: 686826 - DNA, 88 bp, Homo sapiens
cttcatctatgagaccttctacaagctggtgaagtccatctcaggttttgcgcacagctgcttccagtatgccatccagaagaaatgg

SEQ ID NO: 686827 - DNA, 95 bp, Homo sapiens
tgaacctatcgaaggacatgaagactaccacatgatggaactagaacagtctttggctagctggactcagaacttgaaagaacttcaaactatga

SEQ ID NO: 686828 - DNA, 91 bp, Homo sapiens
atgccgctcctaagcctgcacagccgcggcggcagcagcagtgagagctggagcagatccgcagggacatccgagacttccggtctagcgc

SEQ ID NO: 686829 - DNA, 75 bp, Homo sapiens
gaacatcaccgtggtgaagggcatccggacgcagtaaaacgcaggactcttcccgcttggattcgcgaaggtctt

SEQ ID NO: 686830 - DNA, 100 bp, Homo sapiens
gtctcttacgtctgcggaagtgcagctgcctcagttcttagcgcagattttgtggaagtataatactttgtcattatgagatgtcgtctctcggtgcctc

SEQ ID NO: 686831 - DNA, 98 bp, Homo sapiens
aaggctgcctctctgcaaagttgagcacatgggaaggtaaggagaagaccttgaccctaatcaacgtgtactgcccccatgcggaccctgggaggcct

SEQ ID NO: 686832 - DNA, 98 bp, Homo sapiens
aaaagactgattggctcttcctcaatgcttgtgtgggttattcaagaagcccaagcgaaagacctgctgagaagaccatttgatttaatgttggttgt

SEQ ID NO: 686833 - DNA, 74 bp, Homo sapiens
tctgtccagttttcaaaccacacagaactggtcatgctgctggagtggtggtcctgcacggagtgtacactgtt

SEQ ID NO: 686834 - DNA, 100 bp, Homo sapiens
ggctttgtccagggatctgaaaccactttgcagtcgacatactcggataccagcgctcagcccacctgtgattatgaagaaggacccagcccagttcctg

SEQ ID NO: 686835 - DNA, 100 bp, Homo sapiens
gctcggagaggtgctcggattctcgtagctgtgccggctgttgttggcctactgtacccctgtatcgacagtcacctcggagaaccccacaaatttaaga

SEQ ID NO: 686836 - DNA, 90 bp, Homo sapiens
cagtcttcccgcgtccgccgattcctcctccttggtcgccgcgtccttggctggcgtgtatggaacgccgtggactccgggcactgcctg

SEQ ID NO: 686837 - DNA, 78 bp, Homo sapiens
gccgaggagccgggcgcaatggagcggaagaggtgctggagaatctggtaaaagcaccattgtgaagcagatgaggat

SEQ ID NO: 686838 - DNA, 80 bp, Homo sapiens
gttggctgccgtccccgctgctgtgcattgggccaaacgtaccaagaaagtcgggatcgtcggtaaatacgggacccgct

SEQ ID NO: 686839 - DNA, 83 bp, Homo sapiens
atggagaacatgcaacagtacgttttgctggtgttgtccctcccgtggcagtggttaaatgaggagaaaattatccagaggct

SEQ ID NO: 686840 - DNA, 75 bp, Homo sapiens
aaattgaaggcacaggaatatccatgtcggcttgtagagagattgcaagacctaggcttccactgttccatttta

SEQ ID NO: 686841 - DNA, 82 bp, Homo sapiens
ccagctttctaatctacagaaagagctgaataccactagaaacatacctgtaaccagagacagctgattatagctttctgca

SEQ ID NO: 686842 - DNA, 75 bp, Homo sapiens
tcgactatgcagagacatgagatggtagccaacccctcaggacttggatgttgtgggtgatggtatgcagtgtcc

SEQ ID NO: 686843 - DNA, 101 bp, Homo sapiens
cgctgccaccatccgcgaggcaggagagaggaggaggagtgcggcgcggcggccccgggaccaaggagatgaagacttccggggcaggcgtcaggaggcac

SEQ ID NO: 686844 - DNA, 74 bp, Homo sapiens
gaagaggaaaactgtcataaagtcacctactgtaccagagtttcagcttttccagaagcctgttaaaagcaagg

SEQ ID NO: 686845 - DNA, 100 bp, Homo sapiens
ctccatgcttgaaaacatggggattggaattcgagtgtgaacatggctacgcctcttcattcccgtccatgccgagcccccgactgcagcattcaaagcc

SEQ ID NO: 686846 - DNA, 50 bp, Homo sapiens
gtcgggtagaaacctcagtgaaggacaaggtgcaacgctggttgatagag

SEQ ID NO: 686847 - DNA, 80 bp, Homo sapiens
acatcacccccatggaggccctggcagagcagtgcctcaacctggtgttcctgctggcagacgtgtggttcggctttctg

SEQ ID NO: 686848 - DNA, 96 bp, Homo sapiens
caagacccgacacaaggcagcttcccacagcaggttggacagttcacaggaagggaaaaggccgaggcatcagcgtgtgaagaccgcaaagacgat

SEQ ID NO: 686849 - DNA, 100 bp, Homo sapiens
cagtattctagtaatgatgctgtcgttgaggaattgtactctcagagatgttgagaaaagatacatgggtcttggaagataattactcaaaatatgcagg

SEQ ID NO: 686850 - DNA, 98 bp, Homo sapiens
gcagactcggacgtggacgcctttttccggacaggattcagtggtcccaatttaaaggctattttattttcaaactggagaaagtgatggatgatttc

SEQ ID NO: 686851 - DNA, 100 bp, Homo sapiens
atcaacttgaacgaatatttctggtgaccaagaatatggcccaggtgaccaaagccctggacaaggccctgagcaccatggacctgcagaaggtctcctc

SEQ ID NO: 686852 - DNA, 76 bp, Homo sapiens
aataacctttgacaagattttcaatcagaaaattgaggcagaggaggtggacacggtggacgtctccggcgtgccc

SEQ ID NO: 686853 - DNA, 50 bp, Homo sapiens
ttctgctgtcaatggtgttgtccagtatctttaggtggtgttgatcttac

SEQ ID NO: 686854 - DNA, 98 bp, Homo sapiens
gaagaagtattaaggagacactggcaaggtgatttgtggagctatgatttcttcagtggtgaatttgtggtgtcacctgaaccagacacaagtgtcca

SEQ ID NO: 686855 - DNA, 100 bp, Homo sapiens
gcatcctgccgtcttcctatccttacccgacctcagatgctcccttctgctcctgagtaaccagagagcacagagaaatgctggtgaaactggccaaaca

SEQ ID NO: 686856 - DNA, 51 bp, Homo sapiens
ggatgctctactaccagacagagaagtcgccactgggacactgtgaaccag

SEQ ID NO: 686857 - DNA, 100 bp, Homo sapiens
aacacagaccctgcggctgatgccccacctggccacagccttggccctgaccttcgtcagcaggaatactcccccagttgcaagaggcgcaggaccgtgg

SEQ ID NO: 686858 - DNA, 74 bp, Homo sapiens
cagacacgacaccatgcatctcctcggcccctggctcctgctcctggccctggaagagaggccggcagtgatga

SEQ ID NO: 686859 - DNA, 100 bp, Homo sapiens
caacgggcagctgggctgcagtgaccccgctttcctcacgcccagtgtgaagcctcagtttaggtcatctggtggttcagaacactcaacagagggctct

SEQ ID NO: 686860 - DNA, 100 bp, Homo sapiens
tgatccagaaaccactgggattcaaatctggagtgaagttttcactgtggagaagccaggtgggaagaaggttatgggtgctacatgtgtgctttcagag

SEQ ID NO: 686861 - DNA, 100 bp, Homo sapiens
ttacgcagaaggacctggccacgctgtggtcgccaggacccccccagagccaagaccttctccagaaggtgacccttcccccccaccaccaccaatgtca

SEQ ID NO: 686862 - DNA, 100 bp, Homo sapiens
ggatagtgtcatcggttcggtaaagtttctgttctctggaatgtatacaaagactatcgcttccttgagctggcatgtgattcccaggaggatgtcgaca

SEQ ID NO: 686863 - DNA, 99 bp, Homo sapiens
ccggcccacagtgggggtgtgcaaacccgagagaactggaccgatttgggatgttgcccctggatgagcctgctattcttgttagtgaattcctagatc

SEQ ID NO: 686864 - DNA, 100 bp, Homo sapiens
tgcactgccaccctgggcaacttcgggcgcactgtgtgaggagaacatgcggggtgtgcgcttcgacgtccacgacgtcaccctgcacgccgacgccatc

SEQ ID NO: 686865 - DNA, 96 bp, Homo sapiens
gattactgcgagaacaactacatacagaacccctgaacagtgcccaagtgttgtctctttgttgtcagagagttacaaccctcatgtgcgctacgg

SEQ ID NO: 686866 - DNA, 82 bp, Homo sapiens
ggcagtgcaaaaggctggcagtacagagaaaagaaaccttgtttattccctgtgaaaatgagaagatttctaaacagctcca

SEQ ID NO: 686867 - DNA, 100 bp, Homo sapiens
agaagtgttatcttcccaaaaaacaaattcatgtgtggtctggacacacaaagagatcttgcagctgctatagatcgaatggacaagtataattttgata

SEQ ID NO: 686868 - DNA, 82 bp, Homo sapiens
agacactgcgtcaagcaggtgccccgaataacgagcaggccgggctctcgccatgggtcactgtcgcctctgccacgggaag

SEQ ID NO: 686869 - DNA, 100 bp, Homo sapiens
aacgatggcgcgaggccgcagagctaaatgggggcctctccagggagtgctctgttcacggctccatcgctgttaatgtgttcagagcaacattgttttg

SEQ ID NO: 686870 - DNA, 75 bp, Homo sapiens
aaagcagtaaagccagaggaaggcaacatttcatttgttgcatttccagtttccaataccaactcacctacaaag

SEQ ID NO: 686871 - DNA, 82 bp, Homo sapiens
ttttattttcctgtaatatatctgtatcatcggaggcatattttggtggtgaagctcgctgcgatgctgaggctggacgggg

SEQ ID NO: 686872 - DNA, 89 bp, Homo sapiens
taaagtccagagacagagcactaattaggagaaactcccatgtatggaatcccactgtatgatttataaacagacaatatgtgagtgcc

SEQ ID NO: 686873 - DNA, 75 bp, Homo sapiens
tgcatatttgagacaacatctggatggttggggagaacggctgctgatactttggctgtgaggcaaaaaaggaga

SEQ ID NO: 686874 - DNA, 100 bp, Homo sapiens
aaaagaagcagctcaggaggctgttaaactgctgaagaaatcaggggagaaacccctgcttggtggaagcctgatggaatatgcaatcttgtctgccatt

SEQ ID NO: 686875 - DNA, 96 bp, Homo sapiens
gccttatgtggaccattttctcagcactattcctgatcagagaactccagttgcttcaacacacagtatcagtagtgcagccaccccagatcgaat

SEQ ID NO: 686876 - DNA, 75 bp, Homo sapiens
agttggtcacttgaaccttgggaatattgagcatcctgatgaaaagagattggaaggcctctccaagcaactgga

SEQ ID NO: 686877 - DNA, 101 bp, Homo sapiens
gcagtaaaggcaccagcattttgcggcaccgtagatcactggggtgatcctgctggctgttggagtctggggcaaacttactctgggcacctatatctccc

SEQ ID NO: 686878 - DNA, 75 bp, Homo sapiens
cagcgcctgagcatccccgtcatggtggtcaccctgggcacgccagccccacgggcctgctcctgacggtgctgg

SEQ ID NO: 686879 - DNA, 78 bp, Homo sapiens
tcgaaaggagcaagagcaagatcaccgtgacatccgaggtgcctttctccaaaaggtgctggagaatctggtaaaagc

SEQ ID NO: 686880 - DNA, 90 bp, Homo sapiens
agagtggcagccaaaagattgaaggaaggtgatacaatgatggggcagcaagtggccaagttttgcactgattgcaaaaataaagtcctc

SEQ ID NO: 686881 - DNA, 76 bp, Homo sapiens
gtcaagtgcctcacccctttctacaaggagggcaagtttgcttccaaggccggctgcgtgcacttttcctacaaag

SEQ ID NO: 686882 - DNA, 100 bp, Homo sapiens
gtgaggcctccccagccacgtgaaactccggcagcaaaagtggaccaagaaaccttgacagaaatggtgaaacccagtattgattatgtgcgccacaaaa

SEQ ID NO: 686883 - DNA, 99 bp, Homo sapiens
aacaagacaacgctgaaggctcggtgcagcagccctgcaaaggtttgatgtgtgaataattacattgactgagaaagaaacccagaagaggaagaagag

SEQ ID NO: 686884 - DNA, 80 bp, Homo sapiens
agtccaccatgtgcttttgcacatccaacggccgaagccctgcagcccacgctacagccggagatgcagctcgagcacgg

SEQ ID NO: 686885 - DNA, 83 bp, Homo sapiens
cagaccctggagcctcagttggaagcagccgatccagcctgcggagcctgtggggcagcaattctgtggtgttcttggtcaca

SEQ ID NO: 686886 - DNA, 75 bp, Homo sapiens
ggactaccttatgatttcctttcgaagcattcagcaaacaatggcaaggcagagccaccagaaacgtacacctga

SEQ ID NO: 686887 - DNA, 82 bp, Homo sapiens
aatctatacacagccatgccccttccgattgggagggacaagtacctggagtagaacagaaaaattattatgtctgtgttcc

SEQ ID NO: 686888 - DNA, 100 bp, Homo sapiens
gcaggggcggccaagtctccccagcgccaggtgcccccggccacacggtccacgctgcttttatgagctgtaacactcaccgcgaagatctgcagcttca

SEQ ID NO: 686889 - DNA, 83 bp, Homo sapiens
cttccccaagcgcggccagacctgcgtggtgcactacaccgacaatgcagatcttcgtgaagactctgactggtaagaccatc

SEQ ID NO: 686890 - DNA, 95 bp, Homo sapiens
ataagagctgaaacttcagagcaagttttcattgggcaaaatgggctttggagtttaacccttctgccaatccagaggcaagcacaatattccag

SEQ ID NO: 686891 - DNA, 50 bp, Homo sapiens
gcgggaggagcctgttcccctgaggcctctttgtgcagcgccttgctgac

SEQ ID NO: 686892 - DNA, 95 bp, Homo sapiens
ttacagacttcacatcaagttcaaggagtctcttgttaatcaccccgagcagaaggcagaccggtattttgtgttatacaaaccgccccctaaag

SEQ ID NO: 686893 - DNA, 100 bp, Homo sapiens
cctgattacctgccacccattgtgtcttctcaagaaggaaggatctgagtctctccctgcggagacagccctgaagaactcctgtaacgtcaagctggca

SEQ ID NO: 686894 - DNA, 90 bp, Homo sapiens
gttggcacacatggttaaggaacaggaggaaaccattcagagccaaggccacctttgatgccatttctaagacctacagctacctgaccc

SEQ ID NO: 686895 - DNA, 80 bp, Homo sapiens
gctgttgtctttcgggatgtgttggtgggttactacaatcaaaatttacaagtggagcttttctttcaccaagtgtctct

SEQ ID NO: 686896 - DNA, 85 bp, Homo sapiens
attgtgaggcctccccagccacgtggaactcactgttgcaagaattcaattccgtcttcctgatggttcttcctttacaaatcag

SEQ ID NO: 686897 - DNA, 103 bp, Homo sapiens
gcgagtcctgagcggccaggacgacgaggagcagggcctgactgcgcagaaggccaatgatgaggccaatcagagtgatacaagtgtctccttgtcagaaccc

SEQ ID NO: 686898 - DNA, 100 bp, Homo sapiens
gtttgcaacatccttcttctggataacactgtacaagctttcaaagtcaatgttctgccaccagctggatttctccaccagcggggcgctgtgcgtggcc

SEQ ID NO: 686899 - DNA, 100 bp, Homo sapiens
cgccgcctggctttcgtattcgttgttctcggcgggctgtggggcctccgcgccgcggccgttagtcatgtcggctgcaagctttcttcctggtggcaga

SEQ ID NO: 686900 - DNA, 90 bp, Homo sapiens
ggccctcagggcatccccgttttcgggcttccgagtggacctgccaatcaagtcggcccgctaccgtggccagtacaacacctatcccat

SEQ ID NO: 686901 - DNA, 82 bp, Homo sapiens
caagggggagtcgctgggtatcaagcacgaggagctgtctgtccccagaccccagagcacgtccggcaccaccatgactggg

SEQ ID NO: 686902 - DNA, 74 bp, Homo sapiens
aggagaacgaacatcttctggacctttgtccaggtgtccatctcttcacagtcatggctgatcttgtcatccac

SEQ ID NO: 686903 - DNA, 100 bp, Homo sapiens
aggcttgacctaagcaacaatgatattagtagataacaacgaacttgatgcaagtgataggtttgccaaggtcagacctctcatcatccggatgaactgc

SEQ ID NO: 686904 - DNA, 49 bp, Homo sapiens
cgaaggacaaggaagctgttgatgcttatggtgaaggctctggtgctga

SEQ ID NO: 686905 - DNA, 90 bp, Homo sapiens
accggggcatccacaactccatcggcgactatcgctggcagctggacaaaatcaaagccgacctgttaagtgggcagaccaacatccacc

SEQ ID NO: 686906 - DNA, 89 bp, Homo sapiens
cgggggctcagagatccaagtgcgcgccctggcgggtccggaccaagaagtaaaatgcccattcccatcaagaccagacaatggatttg

SEQ ID NO: 686907 - DNA, 50 bp, Homo sapiens
tccagactcgtgggggaaaggctgctacatcatggagaaagcagatcttg

SEQ ID NO: 686908 - DNA, 75 bp, Homo sapiens
gcctcccagcaccacagtccttctgcagtccctcgtccagccacccccaggtatataagaatgtgattctacaag

SEQ ID NO: 686909 - DNA, 75 bp, Homo sapiens
ccagtcccttgtgtatggcaaagtggatagcttctggaaggtggaatatgtgatcaagtgtgacatgtcagctct

SEQ ID NO: 686910 - DNA, 83 bp, Homo sapiens
catggcccaggctcctgctgacccgggcagagaagccttatgccagcctggaccatcttggaggcagtgtaggatcatggaag

SEQ ID NO: 686911 - DNA, 98 bp, Homo sapiens
gcggctgctgctctccggcctcgtcctcggcgccgccctgcgtggagccgccgccggccacccgggtatcgagaaccttccctgcgaacttcagagga

SEQ ID NO: 686912 - DNA, 82 bp, Homo sapiens
tgctggcccagctggtcagcgacgggagccccatggtccggaagataagaccatcatcatgtggaaactgaccagggatgag

SEQ ID NO: 686913 - DNA, 75 bp, Homo sapiens
ccgggagcctagatcctgtgctttactctgaagactcgtattaaccacctgggtgtctgccctgcacccacagaa

SEQ ID NO: 686914 - DNA, 106 bp, Homo sapiens
cgctctgtaacctgcgggtattggatgattcgtagctaagacttcgcgacacccttgaagctgagaaatggtgatatccgacatccaaagcacgtccaacagacgg

SEQ ID NO: 686915 - DNA, 74 bp, Homo sapiens
ttatatcgcatcctatggctcaaagaaagatgattatatccttcatggatttaaaaatcaagttggcgatgaaa

SEQ ID NO: 686916 - DNA, 100 bp, Homo sapiens
ggcgttttggtgtcttcgtttgttatggccgctgctgtcgctatggagacaggccaatgagtgccaggagcgccctgttgagtgtaagttctgcaaactg

SEQ ID NO: 686917 - DNA, 75 bp, Homo sapiens
aaggactcatactacactttcttggtagagaggaggtggaaaagatgaataagaagatggaggaagtaaaggaag

SEQ ID NO: 686918 - DNA, 75 bp, Homo sapiens
agatgatgatatccttctcaaccttgtgggatgtgaaaactctgttactgaaggacatggaggagtgaatcagct

SEQ ID NO: 686919 - DNA, 100 bp, Homo sapiens
ctgcaggatgcctgggactacgtgcaggctcagcaaccatgtccaagggacctgcagttggtattgatcttggcaccacctactcttgtgtgggtgtttt

SEQ ID NO: 686920 - DNA, 82 bp, Homo sapiens
tgtgctcgcgctactctctctttctggcctggaggctatccagcaatgagtctgcaggtcttaaacgacaaaaatgtcagca

SEQ ID NO: 686921 - DNA, 100 bp, Homo sapiens
cttaccaaatgtgagccagctgcggagcagtgcgtcagagtttcagtgtgccggtccaacaaaagcccttgggtctgtttgacttgttcaagtgtccact

SEQ ID NO: 686922 - DNA, 83 bp, Homo sapiens
gcgggaatcacacacatacctcagggatttatttaatggggatgtgttcaaggcaagagcgaattcagaaggatatcgacgtc

SEQ ID NO: 686923 - DNA, 82 bp, Homo sapiens
ctcctccgaggtggcgcggcacctggaattaagtagactggctggacagattcgaaggttgtatggttcaaacaaaaaagct

SEQ ID NO: 686924 - DNA, 100 bp, Homo sapiens
tggctggtctcacaaagatctattaagattgtcacatcttaaaccttccagtgaagttggtgcttcccgtgctgctgttgatgctggctttgttcccaat

SEQ ID NO: 686925 - DNA, 50 bp, Homo sapiens
tgtctacacccggcaggcaccaaagcagcaactagaagccatttgtgtca

SEQ ID NO: 686926 - DNA, 100 bp, Homo sapiens
agctgcgcatgatcgtcatgggacacagaagggtttggagaacattgattaaggaagcattttcctgattgatgaaaaaaataactcagttatggccatc

SEQ ID NO: 686927 - DNA, 100 bp, Homo sapiens
gctggagacagagctgagggagcaagaggtgtcggaggtctcatctttgaactactgccggagcttctgccagctcctgagaaccatgtctatgcccaaa

SEQ ID NO: 686928 - DNA, 75 bp, Homo sapiens
ctctgaccactgtgcctggtgtcatcagatacaaaggtgccaagatccaggtgaagatgtctggaggtgtccagg

SEQ ID NO: 686929 - DNA, 82 bp, Homo sapiens
ggtcgcgaagagaagatccaggcctcagaggaggagaaaggccggagccagccgaggcgtccgagctgggccacagcctgaa

SEQ ID NO: 686930 - DNA, 83 bp, Homo sapiens
ggactggctagttaaacaaagaggctgggccctccctatcctgaagacattagctgagagtctggcaccttttaaaggtctga

SEQ ID NO: 686931 - DNA, 90 bp, Homo sapiens
aaggccacgacccacgagatcatggggcccaagaaaaagcacctggactctattgacctgaaaagtggttctggaaaagtgtaccaaggc

SEQ ID NO: 686932 - DNA, 100 bp, Homo sapiens
ctgagtggttgtgtggtcgcgtctcggaaaccggtagcgcttgcagcatggacttgcaccttcgagatcccctgtgtttacccagctggaggatgatgaa

SEQ ID NO: 686933 - DNA, 100 bp, Homo sapiens
tgtaatgctgtccgccaggccctgcaggacctgctttcggagtacatgggcaatgctgccgcgggcggacacgccagaggaggaggccggggaatggccg

SEQ ID NO: 686934 - DNA, 100 bp, Homo sapiens
gtgccacatcaacgtgtatccacacaagcagtatatttaaagttggagttcgttgctaaagatggcagacccagatgtcctcactgaagttccagcagca

SEQ ID NO: 686935 - DNA, 75 bp, Homo sapiens
ccacgagcctcagcttcacctccatgggcatcaacatgagtgtgaacatggctacgcctcttcattcccgtccat

SEQ ID NO: 686936 - DNA, 100 bp, Homo sapiens
cattgtggccattgagcacagcagccgtcctatcaatgtgattaaagacattttaaatcctaaggatgtgatcacaactcgctttgagaattcctatcct

SEQ ID NO: 686937 - DNA, 98 bp, Homo sapiens
cgacagtgcccaggggtctgagtctcacagcttgtaaaggaactttgctgccttggaagtgctgcgggaggaggaattttccccactgaagaacgcag

SEQ ID NO: 686938 - DNA, 98 bp, Homo sapiens
ctggggagccacggcggagacccccgccctcaactgagcaatttttccagctagtcaaattacgaaagcttggacttagtgataatgaaattcagcgg

SEQ ID NO: 686939 - DNA, 98 bp, Homo sapiens
tgaaattgaattgaagaaaattgcacgtaatcacccaaatgccaaattagaatatggctacatattcccgctgtcatgcagcacattataccttttag

SEQ ID NO: 686940 - DNA, 74 bp, Homo sapiens
atgacatccgagcgaaagagaaagagtatggaagctccaaaaggaaagataccagattgatcttgatcacctct

SEQ ID NO: 686941 - DNA, 50 bp, Homo sapiens
ctgggaaacatcattaaatcggatccagattagatgatcaaagatgtgct

SEQ ID NO: 686942 - DNA, 75 bp, Homo sapiens
ggcagatccagtcttgctcagctctcacaggagagggcgttcaggtcacttggtacatatgaccgtggtctccgg

SEQ ID NO: 686943 - DNA, 100 bp, Homo sapiens
caaaatgtcaacaaattgatggtgcgtcagcatttatcccgtttgccaaccattgatccgaataccaggaccctgcttttgtgtgggtacccaaatgttg

SEQ ID NO: 686944 - DNA, 98 bp, Homo sapiens
caggtcctcaactttgaagagatcgactacaaggagatcgaggtggaagaggccgaaatagaactatttgtgaacagacttgattcagtggaatcagt

SEQ ID NO: 686945 - DNA, 75 bp, Homo sapiens
tgccaaagcagctcattcacatacagcacatatctgaagagatggattaagaatgctttggattaaggattgtgg

SEQ ID NO: 686946 - DNA, 82 bp, Homo sapiens
agtatgcttcgtttttcgccgtcatgggcgcctcggccgccatggtcttcagcgagtgaagacatttccacctggacacctg

SEQ ID NO: 686947 - DNA, 75 bp, Homo sapiens
gaattttgtctttggacaggcctctttgacagatggtacagtgaaggtgaaattcgatttaatttaatggccatt

SEQ ID NO: 686948 - DNA, 76 bp, Homo sapiens
cggttgtaactcggccctagttacctggccagggtacgcgacaattggcggaggtcacccgtgtgaacagaaagtg

SEQ ID NO: 686949 - DNA, 100 bp, Homo sapiens
caatccacctaagaaattcagaggagactacctaggtggagaagcgtactgggccggcggcctgcacctctacaccccattacctttccggccaggccag

SEQ ID NO: 686950 - DNA, 100 bp, Homo sapiens
tttttgtataagatgcgtgatattttaaacatggaaaagacactgaaaggcctcaacagaggagtctttgtttacagtttcaggagtgaggctaaagcca

SEQ ID NO: 686951 - DNA, 75 bp, Homo sapiens
ctctctggtccgcagcggcaacagtaacgaaaaacagggctccagaagatcagctgccatgttacttgactcaca

SEQ ID NO: 686952 - DNA, 100 bp, Homo sapiens
ataagttctatttgcagaatcgcagtctgcctcagtcagataaagtcagacctaaagccaaaaggaaagaagaaccaagctctatttttcagagacaacg

SEQ ID NO: 686953 - DNA, 100 bp, Homo sapiens
gaaaaacaagagatgcagattctgggtcacgaaggcctccatgaagaagtggactattctgagaaactgaagttcagtgatgatgaagaggaggaagaag

SEQ ID NO: 686954 - DNA, 80 bp, Homo sapiens
ccatctggggaaaaggcaaaaatcccatctaccgcaactctcagttcgagagtaaaggaaagatgaatgggagggctgat

SEQ ID NO: 686955 - DNA, 88 bp, Homo sapiens
agacaaagcagcgcccgtctgcttcgggcctctggaatttagcgctcgcccagctagccgcagtaagcggcgggctcgccagcctcga

SEQ ID NO: 686956 - DNA, 75 bp, Homo sapiens
gagacgtattgctaccccagaagaagttcgtcttcccctccaacatggtggttggaataaaaacagggttgaatg

SEQ ID NO: 686957 - DNA, 100 bp, Homo sapiens
ctcttccggctgttaatagagcctgtaattagcttacaagaccctatgaaaaaattagttgagaaagaagagaagaagaaaatcaaccagcaggaaagta

SEQ ID NO: 686958 - DNA, 102 bp, Homo sapiens
agccgggatctcaggtcctcgggggcggcggccacgccaaggacggggaaactttatggtgatgttccttttatagaagaaagacacagacatcggttcgag

SEQ ID NO: 686959 - DNA, 98 bp, Homo sapiens
gtcaccctaaaaatcttaccaagttatagagataccattactcctcaacaggaacatggaggagacatatttccacctatttctctccataagtataa

SEQ ID NO: 686960 - DNA, 101 bp, Homo sapiens
cagaggccttctctagaccttgccaagatggcacaggtcttgagtcaccacgtccgaatataattcttgggttagtaatctgccaaaaaatcaaacgtccc

SEQ ID NO: 686961 - DNA, 100 bp, Homo sapiens
agcaagaaagaccatcaagtttaccaagagcacagtcagacgaactcgaaaaaatagaaaagcatggccgatcttccaaagacaaggaaaatgccaagtc

SEQ ID NO: 686962 - DNA, 50 bp, Homo sapiens
atgagcgagcgcctccgtcccagttccagggtctccctccactgctgtag

SEQ ID NO: 686963 - DNA, 101 bp, Homo sapiens
tgcagccgtgtgacagtaactgaacattggtctaaagtctttccaaaaggtcaaggttcacaagcatccataccccagtttaccaattcccccacaatggt

SEQ ID NO: 686964 - DNA, 75 bp, Homo sapiens
acaaagagcttgctccctacgatgagaactggttctacacgcgagctggggtacacatctttctggaatgactgc

SEQ ID NO: 686965 - DNA, 90 bp, Homo sapiens
gtgacagccctgccccccaaggaagcgtgcaaatgccagaaagaggatttggccagagcgttttgtgtgactctgacatcattagaagca

SEQ ID NO: 686966 - DNA, 82 bp, Homo sapiens
cagcctgcggagcctgtggggcagggaggaaatccttcaacaatctttgtgggaaagagtatcaactcatgtgattgaaaac

SEQ ID NO: 686967 - DNA, 94 bp, Homo sapiens
tgtcggcttcaaagagaaaaggcaacatcctgtcacaggccatgctctggcaaaaacggactggtgattgcagctggaagtgcccatgaccgag

SEQ ID NO: 686968 - DNA, 60 bp, Homo sapiens
ggaagaatgatagcacagaaaatctctgtcagaactgccaaaccaaacaggaagcttact

SEQ ID NO: 686969 - DNA, 75 bp, Homo sapiens
gacgtgcaggtctctagcgcggcgaccattgacgaggtggagacggacgtggtggagattgaggccaaactggac

SEQ ID NO: 686970 - DNA, 99 bp, Homo sapiens
ggactgtgaggaccccaacaacttctccgtctccacactgtccccatctggaaagctcggacgcaagctggtgaagctgtgcagtggcatggtggaagc

SEQ ID NO: 686971 - DNA, 51 bp, Homo sapiens
tggaagagaatctgagtacaaacagtgactttccatttcctgtgaaagcac

SEQ ID NO: 686972 - DNA, 98 bp, Homo sapiens
aagaagttcaagaagatcattatggagcagagatcaggccaagtttggaatcactggctcctgcaaaatcttccttattctgaaaagatgacagtttt

SEQ ID NO: 686973 - DNA, 100 bp, Homo sapiens
ggcagttgcagtgttggagctaaagccacggaaaggtatgatatatttgatccaagacagtccattccagtccgggaatctacagtggtgacaaggacat

SEQ ID NO: 686974 - DNA, 100 bp, Homo sapiens
ggagaaccagtaccggctgacctcgctgtacgccgagcacccaggcgactgcctcatcttcaaggcctccgagagcttccacagcggtggcagcggcagc

SEQ ID NO: 686975 - DNA, 80 bp, Homo sapiens
tcacggctggatttctctctggaaaggattttcattcatcatggatgaagatttgataaagtggaaggcactgtttgagg

SEQ ID NO: 686976 - DNA, 100 bp, Homo sapiens
ggaagcgaagccgaaaaaggcagcagcgaagctggagctgtgaagttaaaccgacaacagactgatatggctgttaattgggctggaggattacatcatg

SEQ ID NO: 686977 - DNA, 100 bp, Homo sapiens
tgaaactcaagctttgatcttggctcccacaagagagttggctgtgcagatccagaaggcagaggaacgaggacgcctgaaggaagagctggaagaggct

SEQ ID NO: 686978 - DNA, 51 bp, Homo sapiens
ccgaagtctgcgagtgcagctgtgcacagggaaatcctcattgacgattca

SEQ ID NO: 686979 - DNA, 100 bp, Homo sapiens
acgaggggagccaagctggagtttacacaggcaaactgtcagaaaagagtagcctgggctgtctggaaatctgaggatcgcggaggccatgcatcaccag

SEQ ID NO: 686980 - DNA, 87 bp, Homo sapiens
tggaaaagtaagcacagaaaatggagacgcacccagagaaagaggctcatcactgtcagggatccatatggctttggagacagtcga

SEQ ID NO: 686981 - DNA, 100 bp, Homo sapiens
aaatgccacccacattcagagacacaagtgcagcagtttggttctgcgttagacctgcatcttagcaatgtgaatattgcatccctagagaaggacctgg

SEQ ID NO: 686982 - DNA, 90 bp, Homo sapiens
agcgcgaatatcgtcatcgttagaagggctgaagaagatgcagagcagcctgaagctggtggactgtatcatcgaggtccacgatgcccg

SEQ ID NO: 686983 - DNA, 75 bp, Homo sapiens
ccagccccgggccccagcccgcggcactaacgacagtttcagcaagaaaaacatctgccagccagtgacccggaa

SEQ ID NO: 686984 - DNA, 75 bp, Homo sapiens
catgctgtcccgggtggtactttccgccgccgccacagcgggaatgtatcctgtcaggtataatgtcagtgaatg

SEQ ID NO: 686985 - DNA, 95 bp, Homo sapiens
ttgaggcggcagtatgaccgggtttctttgatgcgacctcaggaaggagatgaggaaaatgtttataggaggccttagctgggacactacaaaga

SEQ ID NO: 686986 - DNA, 100 bp, Homo sapiens
gcccactccaacctctgcatcaaccagcttgtacgcaatgggaatgaggcccagaaagagaagtatctcccgaaggatgactttgacaacgatgtggatg

SEQ ID NO: 686987 - DNA, 51 bp, Homo sapiens
gaaaaacttcgcaagatgatgaagattgctgggacgatgccggagtgtgaa

SEQ ID NO: 686988 - DNA, 75 bp, Homo sapiens
cacgcattttccaggataactgtgactccaggtaagaatgattgatgttggctgatattggagtgctcattcaca

SEQ ID NO: 686989 - DNA, 82 bp, Homo sapiens
aaaagagatgtggggggattctcgacctgctaacagaactggaccttttcggtaaaatctgtaaaaactgggtcagtttttt

SEQ ID NO: 686990 - DNA, 100 bp, Homo sapiens
gtatcacaactgtatcagagtcattcctgaggccatcgttaatctgcagatgctgacttacctgaacttgaggacccagatgatgtggtaccagttggcc

SEQ ID NO: 686991 - DNA, 100 bp, Homo sapiens
acagagaaagataggcggccatggtccaaccttgaagcgcatttgtagccatgaagtgccatcttgcccaatatgcctctatccacctactgcagccaag

SEQ ID NO: 686992 - DNA, 75 bp, Homo sapiens
aagccatctctagcaagtggtcaggacgctgattgttctgcgcaggttggaggccacggcatatgcctccaagga

SEQ ID NO: 686993 - DNA, 100 bp, Homo sapiens
ggctgcatgggcagcgcccgcgccccgccgctgagccgtcgcggagccgcgcagccctcggagcacgcttactttgacgcctgcccagcaacagttacta

SEQ ID NO: 686994 - DNA, 73 bp, Homo sapiens
aaaaaaaattcatctgggcggtatctggaacttgtttcaggtttagctgtgcctcccagtgactataatgaca

SEQ ID NO: 686995 - DNA, 75 bp, Homo sapiens
cagccctcccaggtggagtacacggcagactacacgatgaggcgagtggtacgacagagcaagtttcggcatgta

SEQ ID NO: 686996 - DNA, 100 bp, Homo sapiens
aacagctacaagttggcccggtggacctgctgtgctttgctggctggatctgagtacctcaagcttgggaaatggtgttcacactggccctgaatcaagg

SEQ ID NO: 686997 - DNA, 100 bp, Homo sapiens
cacccaacaggtcctggacctgctgttcaaaagtcagattgttcgatatggtgagattccagctgaattaagggcggcggccactgaccaccggcaggag

SEQ ID NO: 686998 - DNA, 100 bp, Homo sapiens
ccagaatttcccaaagcagtgcatgctgtcccttacgtcctagcagaagatgtgactcagactgcctctgggtggggctggctggcccacagatcctgcc

SEQ ID NO: 686999 - DNA, 80 bp, Homo sapiens
gcctcagttggaagcagccgatccagcctgcggagcctgtggggcagatttgcatctgctggtgatgatggaattgtagt

SEQ ID NO: 687000 - DNA, 75 bp, Homo sapiens
tggaacacagcagagggtgtgtaataaaatacagatcacttatttgagacatagtcctcaagtggaattatgaaa

SEQ ID NO: 687001 - DNA, 87 bp, Homo sapiens
caaatccaagatggcggccagcaggaggctgatgaaggtacttgaactggcaggaaatgcatcaaaagacttaaaggtaaagcgtat

SEQ ID NO: 687002 - DNA, 75 bp, Homo sapiens
caccggtggcgaggagctctacttgctctgcgacaaggtgcagaaaggtgacacccctgcgctttgggaaggacg

SEQ ID NO: 687003 - DNA, 101 bp, Homo sapiens
ccctgagagaacagggtggccgcttggtccagggggattcccgaagtcttccgttttctgagaatgtgagtgctgttcaaaaattagacttttcagataca

SEQ ID NO: 687004 - DNA, 92 bp, Homo sapiens
cctcggcggccccggcgccggcaaggggacccagtgcgcccgcatcgtcgaggttagctttatacgtctacgaatatttactgcacgtagga

SEQ ID NO: 687005 - DNA, 75 bp, Homo sapiens
atgccctcaagtcgacaggggatgggaccctagaaattgacattgaacgctgtgtgagagaatctatcaacctgt

SEQ ID NO: 687006 - DNA, 90 bp, Homo sapiens
cacagggaaaatcacctttgaagattttaatgaagttggttggtcaaagaaaaagtgatgtatgaaaaagaggcaaaacaacaagaagaa

SEQ ID NO: 687007 - DNA, 105 bp, Homo sapiens
ccttgtcagccagggctgaacccccgcagaagagagagcatggagctggagaggatcgtcagtgcagccctccttgcctttgtccagacacacctcccggaggcc

SEQ ID NO: 687008 - DNA, 138 bp, Homo sapiens
caccgactttgaggatctggaggacggagaggacctgttcaccagcactgtctccaccctagagatgccttcaattaagttgcagagttctgatggagagatatttgaagttgatgtggaaattgccaaacaatctgt

SEQ ID NO: 687009 - DNA, 100 bp, Homo sapiens
cacttactggctttgattttaaccaacttctcttgtcctcggacccagatgatgtggtaccagttggccaaagaagagcctggtgttggtgcatgtgctt

SEQ ID NO: 687010 - DNA, 75 bp, Homo sapiens
gtatttgtttaatgagaacttccacctactcagcactccctggctccagccccggggcccagcgacctgacagtt

SEQ ID NO: 687011 - DNA, 98 bp, Homo sapiens
gttggatctacactttctcaagcactgtgatcttcaaatgcatggaggagtgacggcaggaactttctgtgctctgacaacccttatgcaccaactag

SEQ ID NO: 687012 - DNA, 101 bp, Homo sapiens
ccagcgtcctctggccatggacaccccggaaaatgtccttcagtggcacaagatctctgtaaagtagcaggcatagcaaaagttctggtggctcagcatga

SEQ ID NO: 687013 - DNA, 100 bp, Homo sapiens
ttggtgaccagccagatatccgctgtccaattcccaggaggcggcaacacagtcactcctggcggcaaaccaaacaaaaccagagtcatctggggaaaag

SEQ ID NO: 687014 - DNA, 98 bp, Homo sapiens
ggcaggcgcggccatggcgcagctgggaaagctgctcaaggagcagaagtacgaccggcagctgagaatgattacggacctgaagccaaagaacaaga

SEQ ID NO: 687015 - DNA, 100 bp, Homo sapiens
gcccagtatccaggtcgaggttctgcagaaggttgtgactttagtatacaggatggaagcttcctggcgccaggtggccggtggccgaggccgatcccgg

SEQ ID NO: 687016 - DNA, 98 bp, Homo sapiens
agatgatgaggatgaagacctttatgatgatccacttctacttattaaatagagctgaagaagaagctgttcaaacgccggcgggtgttgaatcggga

SEQ ID NO: 687017 - DNA, 82 bp, Homo sapiens
gtgattgctgcggtgtttgaccgagacataaactgcagaagagcagcctctcctgtcttcacacattcctccaacagctgtt

SEQ ID NO: 687018 - DNA, 98 bp, Homo sapiens
ggaaatgcaagaagtgggccttacatattttagcaagactttttgaaagaggcatttcatccttcatgaagccattcaggattttgaattgcatatga

SEQ ID NO: 687019 - DNA, 122 bp, Homo sapiens
cgcgagtccagcgtcgccgcagccccccaatgcggccgcgagaagcagcgggggggcaggcgatcgaaggcatcccgggcccaaatcctagacaaagccacagaatatatccagtatatgcg

SEQ ID NO: 687020 - DNA, 75 bp, Homo sapiens
cagaaggcccagggctcagcaaagcagtggtggtgctagagaatgaattgatgtatggggttccttttgaatttc

SEQ ID NO: 687021 - DNA, 75 bp, Homo sapiens
gggctgaccgctctggcccagggtgcgctcctttaccctcatcgtggaggcctgggactgggacaacgataccac

SEQ ID NO: 687022 - DNA, 108 bp, Homo sapiens
caaccgccagatcaacctggagctctacgcctcctacgtttacctgtccatgtgaattccaaggcagaagtcaggttccatttggcaactgccgagtggatcgcggag

SEQ ID NO: 687023 - DNA, 119 bp, Homo sapiens
gccggttcgcgtctctctgctgcggcgcggggaccgctgtgctctcgccggtggctgctggcagcggaatcccccagatcaagtgcttcctcaacggggtgaagatcccccacgtggtg

SEQ ID NO: 687024 - DNA, 100 bp, Homo sapiens
cgaaaacatgaccgctgagcccatgaggaacatcatttacagcgagcaatttcagcacagcaagtgtttagagaaaaaaaagagagtatggtcattcctg

SEQ ID NO: 687025 - DNA, 75 bp, Homo sapiens
tcggagagtgttgccaaaagtcagagtagctaaaattggtgctttctgctgtggccttagtttatgtaaccagca

SEQ ID NO: 687026 - DNA, 75 bp, Homo sapiens
tggaggaggacgacagctacggtatggacctgtctgccaatcaggacgaggagaccgaccaggagaccttccagc

SEQ ID NO: 687027 - DNA, 75 bp, Homo sapiens
ccctgggtctgatctggaccattattttgcatttccaggtgaccaagaatatggcccaggtgaccaaagccctgg

SEQ ID NO: 687028 - DNA, 82 bp, Homo sapiens
tcaaggtggcctaccaggaggccaggggtgtcgccatgcctcttagcaatgcataccacgagttagcacaagtgtattcaac

SEQ ID NO: 687029 - DNA, 98 bp, Homo sapiens
tatcctggattgatgacacatcagcatttgtttcccttagccagcccgagcaagtaaagattggacctccggctagcctgtttcagccacctcgtcgt

SEQ ID NO: 687030 - DNA, 100 bp, Homo sapiens
ggggaggtcacctgacgaggagggagagcctggggatgtacaggagatgcctgctccagaatctcctcctggaagggatccagctgcaaatttgagtcta

SEQ ID NO: 687031 - DNA, 74 bp, Homo sapiens
aggccgccgccgcctctccttgctgcagccatggaaacccagcgggtgccgcttctccacccgaggcttccacc

SEQ ID NO: 687032 - DNA, 75 bp, Homo sapiens
ggcgtccccggcgcgaagaggctggactcggattcgttgcctgagggcagtcagggcgacagcaagaatgccaag

SEQ ID NO: 687033 - DNA, 100 bp, Homo sapiens
aatgccgtctgggctgtgctggccgccatcctgcagctgggcaacatctgcttctcctcctcagagatatgtgttgagacggattctccgccgagctgtc

SEQ ID NO: 687034 - DNA, 100 bp, Homo sapiens
tccaagtttcagaaacctcgacaattaaaagacaaagctgatttttgcattatacattatgcagggaagcttagcagtgtctgcaaaaacgaatcttttc

SEQ ID NO: 687035 - DNA, 83 bp, Homo sapiens
ctttggttacctatgtacctgttaccactttcaaaaggaaatcgtggaacacatggtccagcactttaaaacacagatctttg

SEQ ID NO: 687036 - DNA, 100 bp, Homo sapiens
tgaagacgttccttgaggaggtttgaaaaagaaaaccagtagattcccagacatcgcgaagtgaatctgaaattgtgccaaaagttgctaaaatgactgt

SEQ ID NO: 687037 - DNA, 80 bp, Homo sapiens
cggggccgctgctcaagttccagatttgtattggtaaaggttttcaaggtgtcatgaaaagatggggatttaaaggccag

SEQ ID NO: 687038 - DNA, 127 bp, Homo sapiens
gggatcgtgaccgagaccgtgaccgagagcgtgaccgagagcgcgaatatcgtcatcgttagaagtgcagtcattggagaaatcgatgaagaaacagattctgcgcttgatttggggaatattcgag

SEQ ID NO: 687039 - DNA, 100 bp, Homo sapiens
tgtggccgcctcggacaagagacccaggagcttcaggatggttcgtactaagacatggaccctgaagaagcactttgttggctatcctactaatagtgac

SEQ ID NO: 687040 - DNA, 90 bp, Homo sapiens
ccagttggagagggaagaaaagctttggatgaaggagcttcaaacccaaagagcacacacatgccctcttggttctgtttctttgaagaa

SEQ ID NO: 687041 - DNA, 100 bp, Homo sapiens
gaattctcctgccaccgcgtggtgcttgccgcagccagcaactatttcagctctcgtgctcattcccccatgatcgccgtaggaagtgatgacagtagcc

SEQ ID NO: 687042 - DNA, 73 bp, Homo sapiens
gtccttctttgtggagagcaagatgtgtcttgctgaatcagggctctcttatccctgccatcgacttacagtg

SEQ ID NO: 687043 - DNA, 100 bp, Homo sapiens
aatgccttgggatacgactctgtctccattgccgtcacattagcaggtgtcatggagaaactccagctgggcccagagattctgcagcgggaaaatccaa

SEQ ID NO: 687044 - DNA, 100 bp, Homo sapiens
tggagtttatcagtgacctgattgcctgcctgcttcagggctgctatcaacgaagagatatcacggaagcgtgacagcaatgacagtgttttttcccctg

SEQ ID NO: 687045 - DNA, 75 bp, Homo sapiens
agaaggtgtactcctttctattttaaagagccaagcctcagagaagtggctacacacttataaggaaagatagtg

SEQ ID NO: 687046 - DNA, 100 bp, Homo sapiens
acggcgtttctgcgtctgccgtggacagcgaagctgctgcggttcctgagccggaggaaaagtacccagatgccgtgtacctctcggaggggccctcctc

SEQ ID NO: 687047 - DNA, 101 bp, Homo sapiens
cggaggcaggatgaagatgactgtggatttcgaggagtgtctgaaggactcgccccgcttcagtgtttcctgaggttataggcgggtgtttgaggagtaca

SEQ ID NO: 687048 - DNA, 100 bp, Homo sapiens
gccgtgtcagtttggggcatctccgcggtccggcccggggccccgggatctcggctgtccttcctcccgatattttggggactttgaaaaaagaattcct

SEQ ID NO: 687049 - DNA, 82 bp, Homo sapiens
gagatgattatcgtaggaggagtcctccacctcgtcgcaggccaagatcaaggctcgagatcttcgcgggaagaagaaggag

SEQ ID NO: 687050 - DNA, 100 bp, Homo sapiens
agcgcttgagggggactggcctggcgtgcactccgcacctcggggacattattgcgcgtggaacggctgcttttggaagaacaatgagatggtggagcta

SEQ ID NO: 687051 - DNA, 100 bp, Homo sapiens
gactcgctgtctaggccggagcaaaggccggaggtatccagatatggacactgaggagggcatcctggctgtttcacccgtggacttgaacttgccattg

SEQ ID NO: 687052 - DNA, 83 bp, Homo sapiens
caagaggtgtcggaggtctcatctttgaactactgccggagcttctgccagataagaaggctgactgcacaatcacaatggct

SEQ ID NO: 687053 - DNA, 90 bp, Homo sapiens
gagattttgatgtggatgatgccaaagttttattaggtgtggagctgctgtgtgatagagatgtagacatggcaactcgggtccaggacc

SEQ ID NO: 687054 - DNA, 89 bp, Homo sapiens
ctagaaaagaagtctaactatgaagtattagagtatttaacatgaagtcgctccagattgtgttacctgcccgagcagaccccgaaagc

SEQ ID NO: 687055 - DNA, 100 bp, Homo sapiens
tacgacctgttcttgaatacattgatctggtcagcagtgatgatgaagagcctagcacctcttatactgatatgccatggctagtccagggaaagataac

SEQ ID NO: 687056 - DNA, 96 bp, Homo sapiens
aagggcaatcattccttctcacttggcctatggaaaacggggatttccaccatctgtcccaggttggcctgtcaggccatgaggcagctgcaccca

SEQ ID NO: 687057 - DNA, 82 bp, Homo sapiens
caaaaggagcggcgcggtcttcgtggtgttcgtggcaggaggtgtgattgcctatatcagttcttccagctcagcctcaagc

SEQ ID NO: 687058 - DNA, 46 bp, Homo sapiens
cactgcgaaagcaaaccgaggaggcaaagcgaaggctggagctagg

SEQ ID NO: 687059 - DNA, 75 bp, Homo sapiens
gaagtgggattgagacattctcacctcctcctccgcctccaaagtcgcggtaaaacgaaccattaccagacaaca

SEQ ID NO: 687060 - DNA, 82 bp, Homo sapiens
caaaattctgaactcaggacttggcaaagaagtacaacagttccatcctgctgttagaaactcatctgaggtgaaatttgct

SEQ ID NO: 687061 - DNA, 90 bp, Homo sapiens
aagcagttctggtggccgatagcttcgatcgccgcttcttccccatctccaaggaccagcctcggacgcagtaaaacgcaggactcttcc

SEQ ID NO: 687062 - DNA, 100 bp, Homo sapiens
tattcagaggtttgaaatgaaacgaagccctgaagagaagcaagagatgcttcaaactgaaggcagccagctgtgcttgcattggagactgagcaaaagg

SEQ ID NO: 687063 - DNA, 78 bp, Homo sapiens
ggagggatatcgggctgtcggtgacgcacaggtcagaatggcggcagtggagcatcgtcattcttcaggattgcccta

SEQ ID NO: 687064 - DNA, 75 bp, Homo sapiens
agagaccagacctgcaagctctttgacacacagcagttcttgtcagctcttttggtacaccagaaggccagaatg

SEQ ID NO: 687065 - DNA, 100 bp, Homo sapiens
tccaaagagaaaaacctactcttgatacacaatctaaaaagaattaggaaggtccttcagagaaccatggagtctggcagtaccgccgccagtgaggagg

SEQ ID NO: 687066 - DNA, 74 bp, Homo sapiens
ggggaaggtgaaggtcggagtcaacggatttgttggacgatttaagtctcgtaaagaacgagaagctgaacttg

SEQ ID NO: 687067 - DNA, 51 bp, Homo sapiens
tctacaacgacttcgagcgtggcgcgggtttttgggaaagccaaatggagc

SEQ ID NO: 687068 - DNA, 100 bp, Homo sapiens
cgccaacccggactggatcaacaccggggagtctgcggggccttgcccgagatggacagccggattccttatgatgactacccggtggttttcttgcctg

SEQ ID NO: 687069 - DNA, 52 bp, Homo sapiens
tcagtctcccgagtagctgggactttagtaagcactatcctttgtactccct

SEQ ID NO: 687070 - DNA, 87 bp, Homo sapiens
ccgctcacctgcgctgtgatgcctgcagagctgtggcttaccaggtttgctggtgaggcccatgacccgctagttgaagcactagtt

SEQ ID NO: 687071 - DNA, 75 bp, Homo sapiens
aaaagcgtctggcaaagaaggagaaggatatgaggaaatgcgattcttctcagcccattgcagatgcaaaggctc

SEQ ID NO: 687072 - DNA, 74 bp, Homo sapiens
ttactcgatgatggaactctggtggtttcaggaaggtggtcttcgagggatagcacgaggtggtctgacaggac

SEQ ID NO: 687073 - DNA, 75 bp, Homo sapiens
ccgcgggagccgcccgggctgatcttcaataagacccgtgcctgtatattccacgctttgcgcacctgctggaat

SEQ ID NO: 687074 - DNA, 83 bp, Homo sapiens
aagcaggtccggacccactggctgctggagcttgtcaccaccagggagtaccctgacttctaccggaagctctacggcctctt

SEQ ID NO: 687075 - DNA, 80 bp, Homo sapiens
agccacaccgagaaccgccgcggagccctcatccctaacggtgaaaggagaacatattgtgatgttcgtgcctcagagct

SEQ ID NO: 687076 - DNA, 80 bp, Homo sapiens
gtggcagcctgaacggagtgtgcgacggattgggaggtttattgttggccaaaaccaggctttgattgaaccaggatgaa

SEQ ID NO: 687077 - DNA, 100 bp, Homo sapiens
ccctgatcatcctgctgggcttcgtccagatcgggaaggaaaaatggctacaaacttcctagcacatgagaagatctggttcgacaagttcaaatatgac

SEQ ID NO: 687078 - DNA, 75 bp, Homo sapiens
cagctgcctcagttcttagcgcagatttcctcctctgatgctcctcttcagcctttggtatcctctccttctctg

SEQ ID NO: 687079 - DNA, 96 bp, Homo sapiens
cttcgcatgaaatggaagagagggtggtgcggatagcttgaggaagaaaagtcctccatacattttctccccaattccattccttgggcatgccat

SEQ ID NO: 687080 - DNA, 75 bp, Homo sapiens
acaggcagaaaacgagaggctcaccgcagtcgtgcaggatctgaaggagagcagcccgacggccatggaggctga

SEQ ID NO: 687081 - DNA, 82 bp, Homo sapiens
ctactacgtggtgcttggaaagatgagcctgaagtcttgacagaacctccaagtgccacaaccactactaccataggtatat

SEQ ID NO: 687082 - DNA, 83 bp, Homo sapiens
ggaagctactactacgtggtgcttggaaaggtgttggagagcacaatggctgaacaagtccttcctcaggctttgtatttgag

SEQ ID NO: 687083 - DNA, 100 bp, Homo sapiens
atgttggaagatcaaaggcacagaagttgcttgatagatttgactatgatgatgagccagaagctgtggaagaatcaaagaaagaggataccactgccgt

SEQ ID NO: 687084 - DNA, 87 bp, Homo sapiens
agctccccgacgaggagcgcggcgagatctacgtgccaggttcgtgctggccgtgggcagcgccgtctttgatgccatgttcaacgg

SEQ ID NO: 687085 - DNA, 75 bp, Homo sapiens
gcctgaagttgtcagagtacccaaatgttgaagagctcaggtggactctggttcaatttaattttttgaaattta

SEQ ID NO: 687086 - DNA, 90 bp, Homo sapiens
gcggtggcggtggctgagcagaggacccggcgggcggcctcgcgggtcagggcgtctctggccgagcctctttttgtggaaaacgacagc

SEQ ID NO: 687087 - DNA, 113 bp, Homo sapiens
caggaactgtctttatctgctgtcaaggatcttgtgtgctccatagtttatcaaaagacagccagctaaaggtgtggatgagcaaatacggctggagtgccgacgagtcgggg

SEQ ID NO: 687088 - DNA, 89 bp, Homo sapiens
ctttgccatggaaacatgggttcttgtggctaccagcctggtactcctctatataacaccttccaccatgaccacctcagcaagttccc

SEQ ID NO: 687089 - DNA, 90 bp, Homo sapiens
catatgctactgctgactgtgaccttggagctgttttaaaagttaggcaagatctggtcaaaggatctatattggaaggcgtctgacaac

SEQ ID NO: 687090 - DNA, 90 bp, Homo sapiens
ctgcacacctggatccaggataacggaggctggccacccacacagaatatgcctatgggtcctggagggatgaatcagagcggccctccc

SEQ ID NO: 687091 - DNA, 83 bp, Homo sapiens
aaaactctacggcaccccaacatcctggcttacatcgatggactggaggccgctgcgcggccctgcgcatgctgctggcagat

SEQ ID NO: 687092 - DNA, 90 bp, Homo sapiens
agaagctttcagattcctttggaaccaggcaacagcattattgagaaaagcccttacagaagagtgtggccgtaggtcagctattcacag

SEQ ID NO: 687093 - DNA, 90 bp, Homo sapiens
tgcaaccccgcagagcgcatccatcaaagctttgcgcaacgccaacctcaggcgagatgtttggctgtagcagcaattcctgaaggtctc

SEQ ID NO: 687094 - DNA, 100 bp, Homo sapiens
gtgcacctgccagacctgtctctgagccatctggggaggctggccctggcctcccacgactacatcctgaagattgtgcccacggtttatgaggacaaga

SEQ ID NO: 687095 - DNA, 82 bp, Homo sapiens
gtgggagcaaaaccaacgcctggctcggagcagcagcctctgaggcataatcaccagcaacacccgggacaataatacgggg

SEQ ID NO: 687096 - DNA, 100 bp, Homo sapiens
tgagagaaaggctggaagacgagacaaagaggcagctgaacgtctttcaaaaacagtagatgaagcatgtctgttactagcagaatataacgggcgcctg

SEQ ID NO: 687097 - DNA, 82 bp, Homo sapiens
cagcttcacaccatcccagaccaggcaacaaggacagagcgggatgccaccagcttgtccaaagggaagttccaggagctcc

SEQ ID NO: 687098 - DNA, 126 bp, Homo sapiens
ccgttgggtcggttcctgctattccggcgcctccactccgtcccccgcgggtctgctctgtgtgccatggacggcaggttacgggcaggacttgagtggcttcggacagggcttctcagaccccag

SEQ ID NO: 687099 - DNA, 100 bp, Homo sapiens
ccccatgatcgacatcaatggcatcatcgtgtttggcacccggatcctggatgaggaggtgtttgaggaacatgaatctgaaggtggaagaacacctttg

SEQ ID NO: 687100 - DNA, 100 bp, Homo sapiens
tcgccgctgactgtgcccctgtggaaggaggtaactgcatcctgcccagcatgacggccccctgcccgccgccacctccagacccccagtttgtcctccg

SEQ ID NO: 687101 - DNA, 100 bp, Homo sapiens
acgggcctgactcacagtcctaaatatctgacagcgagatcgcttgtaggaggaagttaacatccctaataggagggttctggttactggtgccactggg

SEQ ID NO: 687102 - DNA, 99 bp, Homo sapiens
caaagtgcaagacggacatgactgtgatggaggatgctgtggaggtcagtcttttatcacgagtcatgaatacaggatcacagtttgtgatggaaggag

SEQ ID NO: 687103 - DNA, 100 bp, Homo sapiens
tgcaagttaagggttagatttttttattttttaaaaatatgctttctgccacatgtaaaccaagctatggagatattttgcatagaatgaaggatctctg

SEQ ID NO: 687104 - DNA, 105 bp, Homo sapiens
attctttattagaagattctacaagtgacttaagaagcaaaaaattcaagaaactgactaaagctatatgtggactgaatgaagctgataggaccttgatatata

SEQ ID NO: 687105 - DNA, 75 bp, Homo sapiens
gggccattggatcctgtaaatccctatccagagtttttggagctgtacaggaggacgaatccatgaaccaaccag

SEQ ID NO: 687106 - DNA, 75 bp, Homo sapiens
cctgtacagcctgcagaactgacacagcattgttggttttgccatgtactattttacctatgacccgtggattgg

SEQ ID NO: 687107 - DNA, 100 bp, Homo sapiens
cccagcccggccagaagcccgccgcctccccgcggccccggcgagcagccgccgcccgccgcacccatgaggattgtgcagactggtgcttaaaatggaa

SEQ ID NO: 687108 - DNA, 75 bp, Homo sapiens
caggattttcagcttcagcaagcagcctgcagaattttcttcctgccccttgaactctgatgaagaagtgaataa

SEQ ID NO: 687109 - DNA, 75 bp, Homo sapiens
cttgtccataaggctgaaccggcaagtaaaaagcaggacatctggtatgttattgacctcctgaccggagagaag

SEQ ID NO: 687110 - DNA, 90 bp, Homo sapiens
tgccacttccattttatcagcccactgaagaggatgcagccaatggagatcttcgtggatgatgagacgaagttgacgctgcatgggttg

SEQ ID NO: 687111 - DNA, 82 bp, Homo sapiens
caagtcggcggaaagtttggctgcgcgggttcccccgaagttcaggtttggtgcacctcgatttggaggaagtagggcaggg

SEQ ID NO: 687112 - DNA, 89 bp, Homo sapiens
gctcaacaagaatcactcggagggcggcggagtgatcgtcaataacaccgagagccaaggccacctttgatgccatttctaagacctac

SEQ ID NO: 687113 - DNA, 82 bp, Homo sapiens
cattgctgctacttctggcaggtgtggcctgcctccgaggtgaaatgacaatggatgctctgttggctcgattgaaacttct

SEQ ID NO: 687114 - DNA, 98 bp, Homo sapiens
aacacactcatggacgtccttcgccacaggccaggatgggtggaagtgaaggaatggatgatgatgacgacgacgatgacgtaggagatcatgacgat

SEQ ID NO: 687115 - DNA, 50 bp, Homo sapiens
ctggaaccaagtgtggctacaaccatgctgtagtacatgagcgagctaga

SEQ ID NO: 687116 - DNA, 104 bp, Homo sapiens
ccatcctgccgtccttctccactttcgccagcccgtgccgcgagcgcggcctgcaggagcttccccgggcgctgcctggacaggcctgcctgcgtgctgggaca

SEQ ID NO: 687117 - DNA, 86 bp, Homo sapiens
ggatcttcggaatgatgagcacacaaggcgggagctagccaagatgaagcaggagatcctagaggaggtggtgagagagctccaca

SEQ ID NO: 687118 - DNA, 90 bp, Homo sapiens
gaaacagtgctgaagcctttaaatgcagcatctgcgatgtgaggaaaggcacctccaccagcggttgtggaacaggaaatgaaaaaggac

SEQ ID NO: 687119 - DNA, 100 bp, Homo sapiens
ttggaacaagggaaagagccctggatggttgtgagggatgagaaaagaagatggactctagataagcatggattcctggttcattcttgttctgctcggc

SEQ ID NO: 687120 - DNA, 90 bp, Homo sapiens
ggcccccagcgcccctggtaactgacaaggaggccaggaagaaggttctcaaacaaggaccgagatctcactcagcagacagcagcagcc

SEQ ID NO: 687121 - DNA, 87 bp, Homo sapiens
ctgtattcagcatagctattcctgttgatggtgatgaagacagacatatctgaagagatggattaagaatgctttggattaaggatt

SEQ ID NO: 687122 - DNA, 90 bp, Homo sapiens
ggagtgtcctggctcctggcaacaggaccactgcccacctaagcttactgagaaagagtctttggagcacactctagaggagaccaaggc

SEQ ID NO: 687123 - DNA, 100 bp, Homo sapiens
caggtaccagacagcctgtgaacaaccggggcagattaaagagcaccttgctaaggggcagcgaatgctggcaggtgatggaatgtcccaggtgaccaag

SEQ ID NO: 687124 - DNA, 53 bp, Homo sapiens
gccgccacttgggctcccagggaggtggctcctggaggtcaatgcgtccccat

SEQ ID NO: 687125 - DNA, 82 bp, Homo sapiens
ttactcggagcgtagaatcatggggaactgtggctgcaccatctgtcttcatcttcccgccatctgatgagcagttgaaatc

SEQ ID NO: 687126 - DNA, 75 bp, Homo sapiens
tggaaagtcaaattacgtgtggcatatggactcctgacgaccaacaggtgttggagagcacaatggctgaacaag

SEQ ID NO: 687127 - DNA, 101 bp, Homo sapiens
ggagcctttggcctcggtttacatgggaggcccctcgaaacaggaagaataactgtgtgatgcctgaagatgtgaagaacttttacctgatgaccaatggc

SEQ ID NO: 687128 - DNA, 73 bp, Homo sapiens
ggcggcgcccccgcccgtcagcagcgacagttgcctgctgtcagtaagctggtacagaaggttgacgaaaatt

SEQ ID NO: 687129 - DNA, 99 bp, Homo sapiens
ccaacacccgctgctgcccgcccgctgcctgcctgcctggcatctctctctcccgcattttgaaagcgaagcagaagccgtagaatcagcggcgagcct

SEQ ID NO: 687130 - DNA, 100 bp, Homo sapiens
gccagatcaacctggagctctacgcctcctacgtttacctgtccatgggtccagattttggctatgtaactcgagggccccaaacagggggtatcagtgg

SEQ ID NO: 687131 - DNA, 100 bp, Homo sapiens
accgactggaccgggaaggagcatcccaggacctaccagaatctggtactaggttttgacaagcttgcatcatgcgtgagtataagctagtcgttcttgg

SEQ ID NO: 687132 - DNA, 75 bp, Homo sapiens
ccggccaggagaaattcggtggactgagagatggctattatatccaaggaggccagatgctccagtgcctgatgg

SEQ ID NO: 687133 - DNA, 98 bp, Homo sapiens
cccaaggcaattgatcccaagttgtcgacgaccgacagggtggtgaaaggtggatttgccgctgcagtcaccacccctctagacgtggcaaagacaag

SEQ ID NO: 687134 - DNA, 83 bp, Homo sapiens
tgtgtggcgcgcccagagccccgcgtttcagccctagggaagggcgtgtgatgaggaggcgagcttggctttggagtgctggg

SEQ ID NO: 687135 - DNA, 50 bp, Homo sapiens
agaagattacctttgactcttgtcccagggccgcgatgggcctcttggaa

SEQ ID NO: 687136 - DNA, 100 bp, Homo sapiens
agtccgagcgggagccgagccgggcggggcgagggcagctccgacttaattcagtgcacaaatgagatgaatgtgaacatcccacagttggcagacagtt

SEQ ID NO: 687137 - DNA, 97 bp, Homo sapiens
agagactaccacgtggcatgttaccactgtgaggaccctgatgcttggtgtgacctgagtaaatttgacctccctgaggaaccatctgcagaggaca

SEQ ID NO: 687138 - DNA, 100 bp, Homo sapiens
aatgacattgtggacagtgacagcgatgctgaggatcgaggaacgttgtctggtggacgtctgatttatgaagctccccatccacctatctgagtacctg

SEQ ID NO: 687139 - DNA, 100 bp, Homo sapiens
accaccccgcccctgccggtcgcagtcgcgatgtcggtggccgggctgaagaagcagttccacaaagccagccaggactgccctccagatgcagaagatt

SEQ ID NO: 687140 - DNA, 100 bp, Homo sapiens
cgccctggtgctcaccaagcaagatttaggcctattaaaggaaggcaggaagaactaaaggaagtaattgaacgttttaagaaagatgaacacttggaga

SEQ ID NO: 687141 - DNA, 83 bp, Homo sapiens
gtcgccgtggagatgggccacgtggagaatctttgtggagttcacctctgtgtttgactgccagaaagccatgcagggcctga

SEQ ID NO: 687142 - DNA, 100 bp, Homo sapiens
ctgaaggccctacgggagaaaaccgggcgcaaggggctttgttatgcacctaaagccatattggaagctccagaagaaagagcaccccccggaagtcagc

SEQ ID NO: 687143 - DNA, 80 bp, Homo sapiens
gcctgtgtggactcgcatcttgcccgaagccgggcggaggagagctcaagctaaggtgcagtctttgcaagccacatttg

SEQ ID NO: 687144 - DNA, 100 bp, Homo sapiens
acagactgtatgaactggacatctcgttccctcccagcacccgagaacccctcctcagcagctctgagaacggcaatggtggccgagagacgtctccagc

SEQ ID NO: 687145 - DNA, 100 bp, Homo sapiens
tctgttccagaagagaaaaagcccaggcataaaatcatctccatattctcaggcacagagaaagcaacacagtcactcctggcggcaaaccaaacaaaac

SEQ ID NO: 687146 - DNA, 99 bp, Homo sapiens
ctgtccacctggattagaatatttaagtcaggcatgttatttgaaagcaattgagacgcaaccgaactttgcagtagcttggagtaatcttggctgtgt

SEQ ID NO: 687147 - DNA, 74 bp, Homo sapiens
gaagaacaagaatctccagtgaactgctttagaaaattatttgctctgagtctcttccaaacatcccacacact

SEQ ID NO: 687148 - DNA, 100 bp, Homo sapiens
gtgctgacagcaatgaaccagacctggcacccagagcacttcttctgctctcactgcggagaggtgtttggtgcagaagttcacacaaaagatgttggac

SEQ ID NO: 687149 - DNA, 75 bp, Homo sapiens
cggctctcggagccggcgcgaatccggcccccgcagcgggacccggttgtcgccgtgatcctgaaggcgctgacc

SEQ ID NO: 687150 - DNA, 100 bp, Homo sapiens
tagagaaattcagaaagtcggcagagcactgtgattgcttgcagtgtttctttataatacattccatgggaggagtgttcagaatcaagtggatgaagtt

SEQ ID NO: 687151 - DNA, 98 bp, Homo sapiens
gataacgttctccagtccagcgtcccagatttttcggaattaacactaaacggtagcctggaagaaaggatattctttactaacatggttacctgcag

SEQ ID NO: 687152 - DNA, 100 bp, Homo sapiens
gagtccggggctcgggcctcagggcccgcgagtctgcgaagccagccctttcagtaggagccttcgctgccaagcagcatctggaatcaagagacccatg

SEQ ID NO: 687153 - DNA, 88 bp, Homo sapiens
acggctcttcccggcgctctcctggctcccttctgccccagctccgtctcggcggcggcggctgtcaaagacttcgtgattatccccc

SEQ ID NO: 687154 - DNA, 80 bp, Homo sapiens
accagccatttcggtgtagaagtggcagcacggcaggtcggaactatgaaaatttggtagacaccttgctagatggtgtg

SEQ ID NO: 687155 - DNA, 83 bp, Homo sapiens
ccgggagctgggcggccatttaccagtatggaaatttcatcgataagctaagactcttcaccaggggaggatccggtggaatg

SEQ ID NO: 687156 - DNA, 100 bp, Homo sapiens
gcggcacagagagggcctgggagcttgctgcagcttcagggagtaccctgacttctaccggaagctctacggcctcttggacccctctgtctttcacgtc

SEQ ID NO: 687157 - DNA, 95 bp, Homo sapiens
ccacctcggcctcttcctgttgcaccaggttcttcgaaaactgaagcagatgttgaacaacaaggagtatgctgctgctgttccgctttgcgtcc

SEQ ID NO: 687158 - DNA, 95 bp, Homo sapiens
gagagaagagattccatcttccagaggtttgtttaagcatcttaaacacgtggcatggaagaccagaagagaagtggaatcctcagacctcaagc

SEQ ID NO: 687159 - DNA, 78 bp, Homo sapiens
tcagcatgctgtgtctagctcaagaatgtgacagtgatgataacatgggtgccaaaaatacttcaataggagaagaat

SEQ ID NO: 687160 - DNA, 74 bp, Homo sapiens
caacgagtttgtcatcatgtgagagagaataggtctcagccacctttgcggctagtcttgtcagcagcccggcc

SEQ ID NO: 687161 - DNA, 96 bp, Homo sapiens
taggagtttaaagctcaattgacctagccttcagatcctggccaacgtcttcctctacctgtgcgccatcgctgtgggcatcatgtcctactacat

SEQ ID NO: 687162 - DNA, 80 bp, Homo sapiens
ctgaatatgatgattttttggacgaattcatggaggcagtttcttccaagcctatatgaacccaatagcaatggcgagat

SEQ ID NO: 687163 - DNA, 82 bp, Homo sapiens
ataccaccttcagtacttggcaagatttgatgctcttgtgctcagtgacatcattcaggataattgatcgcttagatggagt

SEQ ID NO: 687164 - DNA, 83 bp, Homo sapiens
ccgcctttcaagaacgtaattgtgaatgggcttgtcctggcaagatgataacaccctatgcccattgtcctgatctgaaaatt

SEQ ID NO: 687165 - DNA, 82 bp, Homo sapiens
gccatcatcgtggtagttattgtaagatggataaggtgggggatgccctggaggaagtgctcagcaaagccctgagtcagcg

SEQ ID NO: 687166 - DNA, 83 bp, Homo sapiens
tccgttttcgcgtggttcttttgcaagaatagcctaacatggcagaccagagacagcgctcactgtctacctctggggagtca

SEQ ID NO: 687167 - DNA, 100 bp, Homo sapiens
gctcactgccgacttcagggaggatccggacccccgcaaggtcaacctgggagtgggagccgtactctgacagctgtgcacgatgccatccttgaggact

SEQ ID NO: 687168 - DNA, 97 bp, Homo sapiens
tctgcctacttccagacccatgtaaaggagaattgcctgcactatgcccgcaaggtgggctacaggctcaagttgatgaaggagtccctctgaagat

SEQ ID NO: 687169 - DNA, 78 bp, Homo sapiens
tcgtgggcagcctcccctcggaactcgggcatcatggcctcagactgtattggtgatcacgtaccgagaacccccaaa

SEQ ID NO: 687170 - DNA, 76 bp, Homo sapiens
tccaaatcctgtagccataaatgtctggctaatggcatttacaggagggcgacataccttctgttgaatacctttt

SEQ ID NO: 687171 - DNA, 74 bp, Homo sapiens
cggaagcggagagcaacagcgcgccgaacatggtccaagacaattcctgggaaagttcagttcttctcaagtga

SEQ ID NO: 687172 - DNA, 100 bp, Homo sapiens
gtcgggaaggtcactgaacctggatgggcgtgttttgggcgtgctagaggtgtcacgctccattggggacgggcagtacaagcgctgcggtgtcacctct

SEQ ID NO: 687173 - DNA, 73 bp, Homo sapiens
aagatccctggaatatgaagagacacagtatggtagccacacccccaggtgcaggctgccccatggatgccac

SEQ ID NO: 687174 - DNA, 100 bp, Homo sapiens
atttgctccacttgtgcaaccaagtaagaatgataatggcaaaccagattctgtgggactccgtgtctggaaatgaagtatggaaatgaaatcatgaata

SEQ ID NO: 687175 - DNA, 82 bp, Homo sapiens
gggaccgcttgcagcggggacgcgaggacccgggctgggctttcctcacccggcaaattgtggctactaatttgccccctga

SEQ ID NO: 687176 - DNA, 100 bp, Homo sapiens
ccagatattaggtcacagcagaagcagccaaaatggatccccagtggttgatatctgtgcagaagaattggggaataatgtaaagcccgctgttactttg

SEQ ID NO: 687177 - DNA, 82 bp, Homo sapiens
tggcctgggcgctccggtggcggcggagccccaggttccggaggaatgctcgctccccgctggagtcctaccagcccaacac

SEQ ID NO: 687178 - DNA, 98 bp, Homo sapiens
acgacaccggcgaggaacttggcagggttccaagcttgaactacccttgtggctggcaaaaggactttttgacaacaagcgacggatcctttctgtgg

SEQ ID NO: 687179 - DNA, 80 bp, Homo sapiens
agcacctatcacttgttccctccaagacaactgaatgggtgatacaattctggagactggagaagtaattccaccaatga

SEQ ID NO: 687180 - DNA, 100 bp, Homo sapiens
gccggctactgccgcttcagttctcccggtgtggccacgagtcggggcttccttctgaactctccccagctattgaggaagaagagtcaaagagtggctt

SEQ ID NO: 687181 - DNA, 90 bp, Homo sapiens
tacctggcctacttcgtgcgtgagcgaggttcttgggtgtctctggggagtccctgggccagaccttcctccagactccagcccacctct

SEQ ID NO: 687182 - DNA, 51 bp, Homo sapiens
agctactcctctgggaggacagaggaaattcagggcttggtttcagcattg

SEQ ID NO: 687183 - DNA, 100 bp, Homo sapiens
ccttctttggaggcagttcctcatcccctatcacccggaagttcaggctgaattctgaaggcaaacttgagcagacggtctccatggcaaccacgacaca

SEQ ID NO: 687184 - DNA, 100 bp, Homo sapiens
aagaggagcttcaagcattgcagatagagcaaggaggtactccaaagattcaggtttactcacgtcatccagcagagaatggaaagtcaaatttcctgaa

SEQ ID NO: 687185 - DNA, 100 bp, Homo sapiens
cttcgcctcgcctcgggacccgcggtccccgctcttgctggctccctggggaagggaatgcagggttgctggggctgggcccagaagcagcagcaccagg

SEQ ID NO: 687186 - DNA, 90 bp, Homo sapiens
gattgcttcgtgactggaaagtgggaagatgataaagatgcagccaaggtcttagcagaagatgctcaaaagccaaaagtctctgagaac

SEQ ID NO: 687187 - DNA, 82 bp, Homo sapiens
cgcggaggccgcctggggtagcggcggcgggagtcctggcgctctgcaggtacatgtcccagagcaagcacacggaggcccg

SEQ ID NO: 687188 - DNA, 113 bp, Homo sapiens
gtttttttgaagaagcaggatgctgatctaaacgtggaaaaaatgtgctcccggttactatggaaaccccttactcattggaagcacctgtaagaaatgtgactgcagtggaa

SEQ ID NO: 687189 - DNA, 100 bp, Homo sapiens
atacagaacagattacaaatgagaagctggctatggttaaagcgtattttcgtgttccagacagtgctacttttagcatttgcccaggtggagagcagcc

SEQ ID NO: 687190 - DNA, 87 bp, Homo sapiens
ccaaaactttctactataaatcccggttttggctgcttaaactgctggtctggaacaaaaagaatgcaaatgaaaaaggaagaagcc

SEQ ID NO: 687191 - DNA, 100 bp, Homo sapiens
cagcagttagagagatatatgggccacatgcagtttctctcagggtgtgtttgaccatcgaatgaagtgctggcagaaatgggaagatgctcaaattact

SEQ ID NO: 687192 - DNA, 91 bp, Homo sapiens
gatgataccttttctatatggattacaatttgatcgctgggaattctccaccttaaagaaggtggtatctgatgctgcaggacagggtgtg

SEQ ID NO: 687193 - DNA, 75 bp, Homo sapiens
aggatgaagacctttatgatgatccacttctacttattaaatatactgtcccactgaccaggctgctgcaggcac

SEQ ID NO: 687194 - DNA, 100 bp, Homo sapiens
agaaaccaagaccacctcctgctctgggaccggaggagacatcggcctctgcaggcttgccgaagaagggaggatgagtgtgcaaaccatccgaaatgtg

SEQ ID NO: 687195 - DNA, 76 bp, Homo sapiens
gtcctccatgcgcagtcatgagtcgcttcaagtttatcgttgggcagatgtacagagtcagctcaggcacatagaa

SEQ ID NO: 687196 - DNA, 100 bp, Homo sapiens
cggtcatctgtatgcataatatggaatgttcttaacccagaagtagctgaatgtgttactccattgctgaggagtgctctaagcgaaagacatgaggcct

SEQ ID NO: 687197 - DNA, 82 bp, Homo sapiens
gaactgttgacaattgaagacagaaaccgggaaacgattatatatggaagtatttgaatatactcgccctatgatgcatcct

SEQ ID NO: 687198 - DNA, 100 bp, Homo sapiens
tgataactattgatgggaaacagataaaacttcagatatgggatacgagacaaagcatggaggacacaagaatgggaggaaaggcggactctcaggaact

SEQ ID NO: 687199 - DNA, 100 bp, Homo sapiens
cggcgccggctgctctagcgagcagttcgaggagaggaggtggccaagttggagaagcacttgatgcttctgcggcaggagtatgtcaagctgcagaaga

SEQ ID NO: 687200 - DNA, 75 bp, Homo sapiens
cagctggaaaaatcaagcagttttgtaaaacctgcaacactcaagtttgaaaagttcacagtctgtgcagtctat

SEQ ID NO: 687201 - DNA, 85 bp, Homo sapiens
tgcgtgccccgacggggcgcgcgcgaagcgagcgagaaggcacggagtcgccgcggagcgcaggcatacccagatggaagtagca

SEQ ID NO: 687202 - DNA, 75 bp, Homo sapiens
gttgggaaaggaattacctttgacagttacaaggagaacatcatgcgcctctccagccttcacaaggaccgcccg

SEQ ID NO: 687203 - DNA, 75 bp, Homo sapiens
ggctcagccacccgctgggaatcgtgcagggattcttcggatcatggggttgacagcagcattttccagaatcct

SEQ ID NO: 687204 - DNA, 100 bp, Homo sapiens
cagacagcccggtagagtgtatgggccaggagaaaggggaattcagagacgagatgatgcctattggccagaaggaaagcgtgtggcaatggaggaccga

SEQ ID NO: 687205 - DNA, 110 bp, Homo sapiens
ttgtatactccagttaatgagtttgaagaaagagtctctgtgtcgttcattcgtactatacagggtctggattcccgatcctgaagaagtttggaagtctgctgaaatag

SEQ ID NO: 687206 - DNA, 76 bp, Homo sapiens
agaccttcccaggaagccagagccacacacaccatcatggtcctgcaaagaagatgttgctatggaattggaaaga

SEQ ID NO: 687207 - DNA, 74 bp, Homo sapiens
agaagctcatccgcaaggtgtccacgtcgggtcagatccgacagaagggagaccaaattttgaggaaggtggac

SEQ ID NO: 687208 - DNA, 100 bp, Homo sapiens
cacgtcccatttcgcccctcgcgtccggagtccccgtggccagtgagacggtttaagcggaagcatcttactgccattgactgccagcatttggctcgga

SEQ ID NO: 687209 - DNA, 144 bp, Homo sapiens
agctgaaccaagaaaaccttatcagcactatttgaaacttttatctcatctggcttggcgcctgaggttctcccattagaaaagaggcacagttagatgaagaaggacagtttcttgtcagaataatatatgatgactccaaaa

SEQ ID NO: 687210 - DNA, 97 bp, Homo sapiens
gtgcctgtgctccgcgtctctcatgcagaggaggaaggcctatcactgtcccagcttctggatgaaatgcgggaggaccaggagcatcagggggcac

SEQ ID NO: 687211 - DNA, 90 bp, Homo sapiens
cctctgtgtctcattatctacttgagacctccagggtggtgtttcagggccggctggatgaggcccgacagatgctctccaaggaagccg

SEQ ID NO: 687212 - DNA, 50 bp, Homo sapiens
gtcgccgaggcgattcccgcccagcttagagtatacttgcgaacatcaaa

SEQ ID NO: 687213 - DNA, 100 bp, Homo sapiens
tctgatcaagccaacaacagtgacggaatgcctccatacatacaccctgacgtggaataagcccagtctcagcggggtggcgcctcttcctcgcagtctc

SEQ ID NO: 687214 - DNA, 101 bp, Homo sapiens
gcccgccccgcccgcctcgcccgccgtgagcgcccggagcggtccgcgagccaccgaggcccaggatcacaccagggtgggtgcagatacctctcaagata

SEQ ID NO: 687215 - DNA, 100 bp, Homo sapiens
gcgtacctgtcggaagcttgcagccctgtgccttgacaagagcctcatccacaccgtgttgctgcaaaaggactatcagcttgctctgtcaccatcgccc

SEQ ID NO: 687216 - DNA, 98 bp, Homo sapiens
tgaacgcaggcagtgatgtggctgtgtcggtcggtggccggccctgctccttctcctgctatgaggtgtcaggtcgcattgaggccattgagggctca

SEQ ID NO: 687217 - DNA, 97 bp, Homo sapiens
gaacgccagggaccctgtgcaggcctgctcctccgtttgcaaggagggtgtgaagacagagaatgaccacatcaacctgaaggtggccgggcaggac

SEQ ID NO: 687218 - DNA, 100 bp, Homo sapiens
gctgggacttcccgtccgcggcgtggagggtcctgtccaaaatgcattgctgtcttcacaagagtcagtgagccaaggatacaatttccagcttccagga

SEQ ID NO: 687219 - DNA, 98 bp, Homo sapiens
gatggtacaggaagggaacgtggaaagcgcatacaggaccctaaacagagccacctgagctgaagattcccttgagaacaagtactgtcctgtggttt

SEQ ID NO: 687220 - DNA, 50 bp, Homo sapiens
atggcccaggcagaccttgcagtcaaacggttcctggctcagagtttgag

SEQ ID NO: 687221 - DNA, 89 bp, Homo sapiens
cctgtcctatgtggacgtcagcactgggaaggaacttgatgggaaacctgcttctcctactccggttattgtggcctcccacacagcca

SEQ ID NO: 687222 - DNA, 75 bp, Homo sapiens
gtatgctcgaaatcctggatactgcagggacactgcaagctttcttcctggtggcagatgacatcatggattcat

SEQ ID NO: 687223 - DNA, 100 bp, Homo sapiens
ctcaaagcgagtctcaaaggtgttcctggatttggtatacccgaaatcttgtggatcaaggaaatggaaaatttaatctgatgattctctgttggggtga

SEQ ID NO: 687224 - DNA, 75 bp, Homo sapiens
catgctgcattccagccaaattcccaggaacagcatatgccatatatgagctggctgtggcttcatttcccaaga

SEQ ID NO: 687225 - DNA, 110 bp, Homo sapiens
acagtggcaaagaaacttggttttcattacagcctgttgactccaattcagaggttcagtgttctggacttggtgcctctttctgttatatgctttcctatttagttggg

SEQ ID NO: 687226 - DNA, 82 bp, Homo sapiens
aaagaagttatgcttgttggaattggtgacaaaatcagaggcatactttataggtgagatcggactggaactgttcggctgc

SEQ ID NO: 687227 - DNA, 90 bp, Homo sapiens
gctgtgcattctctcctgactcttctatgctgtgttcagtcggagccagtaaagcagtggaactgaaaggctgcagttcagttttgggcc

SEQ ID NO: 687228 - DNA, 100 bp, Homo sapiens
tcaggtacacaaatgcacgcgacaggaaccagggtgataaaagaaaatgtggctgaagttacccgaagttcagcttgcagtgtaattcagaagagttaag

SEQ ID NO: 687229 - DNA, 50 bp, Homo sapiens
gggctgacaacatttttccttttccgggacattagtcatgagtgccgagt

SEQ ID NO: 687230 - DNA, 74 bp, Homo sapiens
ggagaagctgaaactgaggatgcagaaggcgctgaacaggcagttctattatcctcccagtccacaacgctgaa

SEQ ID NO: 687231 - DNA, 83 bp, Homo sapiens
ctaggctgcaggcagctcgaggacccgcggccccgccccggctcggcctggcagccgcttacaaacacgcagatggcaagaag

SEQ ID NO: 687232 - DNA, 83 bp, Homo sapiens
gctggacggcgagcgcgagcggcgcgagaaaggcaaaataacatggcagccagacgaattacacaggagacttttgatgctgt

SEQ ID NO: 687233 - DNA, 75 bp, Homo sapiens
gtggggcccaacgaggcgctggtggtttcagacctgcctagagctggaacgttacctccagagcgagccctgcta

SEQ ID NO: 687234 - DNA, 74 bp, Homo sapiens
ggggatcgctacggaccttaaaatacccgcaacagccccttcgtcccaaatatctcttccaaatgcatgatgaa

SEQ ID NO: 687235 - DNA, 82 bp, Homo sapiens
ttgacatttttctcataatgaatcctctcaggacattgtgtagcctatgggctggtgaattaccatatctccgtcaagtgca

SEQ ID NO: 687236 - DNA, 82 bp, Homo sapiens
cgtggttgccaggagagctgcgccggcgagaagcggccgagccagcagcagagatactttctagttgggagcaataatgcag

SEQ ID NO: 687237 - DNA, 95 bp, Homo sapiens
ctgatgttgctaaatgtagacaatggttagagaagaattttccaaatgaatttgcaaaacttactgtagtaagaagactgttagaatgccctcgg

SEQ ID NO: 687238 - DNA, 74 bp, Homo sapiens
gaaagtggactgtccggggccgggctcaggagcagaggtcaaaatgcagatcttcgtgaaaacccttaccggca

SEQ ID NO: 687239 - DNA, 83 bp, Homo sapiens
gtctgctcaggttgcagcaggagagagcacttgcacctcctgcgccgccgccccccatccaaggatatgccttcaagcctcca

SEQ ID NO: 687240 - DNA, 74 bp, Homo sapiens
tgaaggagagagctcatatatcatatttcaacagtttgatgggatgttggcaaaggatgaactgatgaccatac

SEQ ID NO: 687241 - DNA, 100 bp, Homo sapiens
gcacgatgattgaccccacttccaaggaagaccccaagttcaaggaactggtcaaggtcgggaactacaagcggactgtgaagcggatcgacgatggcca

SEQ ID NO: 687242 - DNA, 98 bp, Homo sapiens
cgagtgcagccggtgacccggcgagaggcggcgccgctcccaagatgtcgcagacggccatgtccgaaacctacgatgcctgtgaggagccaccaaca

SEQ ID NO: 687243 - DNA, 83 bp, Homo sapiens
tgctgacgacctgctacaacagaagttgacatcatggacatatgtgagtccatcctggagaggaagcggcatgacagcgaaag

SEQ ID NO: 687244 - DNA, 96 bp, Homo sapiens
ggccattggcttctcatggatgctttgtttgctagcaaaatgctttaagcctgcccttccatatcttgacgtggatatgatggatatctgtaaaga

SEQ ID NO: 687245 - DNA, 90 bp, Homo sapiens
cccgaggtctggctcccggggtggggcagcaattccatttccgtgagggcgtttctagatgaagatgacatgagcttggaagaaataaaa

SEQ ID NO: 687246 - DNA, 82 bp, Homo sapiens
gggacaactccgggatgatcgataagaacgagctgaagcaggccctctcaggtttcggtgtgaacccacatccctgccccca

SEQ ID NO: 687247 - DNA, 80 bp, Homo sapiens
ggcattttggttttaggagcaattgctgaaggtatgaaaatgaaagtcttcagaatggaaggaagtcaactgaatttcca

SEQ ID NO: 687248 - DNA, 74 bp, Homo sapiens
ttttacctacgttggcggccccagaagatggaccagcttttgggaaatatgattgaaatgtgggttgatcgaat

SEQ ID NO: 687249 - DNA, 100 bp, Homo sapiens
tgactgtggatctcaagtactaccggccaactgaagtggttcagggtcacatgcctccgctcatgatcccaatttttccacatgaccagcggactctggc

SEQ ID NO: 687250 - DNA, 100 bp, Homo sapiens
atcgaacagagccgggagttcaagaagaacactccagagtttcctgtgggccgcatccacagacacttgaagactcgcaccacaagccatggaagggtgg

SEQ ID NO: 687251 - DNA, 100 bp, Homo sapiens
gtgattccagatatactaaaacttgcaaaacagtgtgaagttctttccatcagagggttcaaaccttgtactactcagctgatcacaagctgcttgatgg

SEQ ID NO: 687252 - DNA, 82 bp, Homo sapiens
agtgtctgtagcgtccctccctctcaaccacaataacaggcggagggtcggcgtagttgatattcactgatggactccaaag

SEQ ID NO: 687253 - DNA, 90 bp, Homo sapiens
gggcggcggccacgccaaggacggcattccatattggaagaagagatttctacacatgaaaaaaatgcctttgtttagtaaatcacacaa

SEQ ID NO: 687254 - DNA, 82 bp, Homo sapiens
ctgaaccgcgcggccgaaccctccggattttttatcaagcagaaatgcatcgaacaacgagaatcaagatcactgagctaaa

SEQ ID NO: 687255 - DNA, 102 bp, Homo sapiens
agtccataatctcatcacagatttccttgcacttatgccaatgaaggttcctgggctatataagtccagttctgcagactctctttctacaaccaagatcaa

SEQ ID NO: 687256 - DNA, 100 bp, Homo sapiens
tattgtcaccagcaccacccagcaggttaatgatgaaatggcaggtaattcacacttttggacagagcgcaccgcccccgtggaatcaccctacagaaga

SEQ ID NO: 687257 - DNA, 52 bp, Homo sapiens
cggagatggcggcgcgctcggcgcagggtttctatgttgcactgagactggt

SEQ ID NO: 687258 - DNA, 90 bp, Homo sapiens
ggaactagtcggacaaagccctcgcgtcggacccttgccagaactaacatggctctctatgctgacgtcggtggaaaacaattccctgtc

SEQ ID NO: 687259 - DNA, 100 bp, Homo sapiens
acccccagccagggtcaccatcaaaatggaatgtaaccctagccaggtgaatggctcaagttgatgcggatgaaattaaaaggctaggaaagagatttaa

SEQ ID NO: 687260 - DNA, 100 bp, Homo sapiens
ccgcagatgatgccccctatgggagggccaccaatgggacaacttgtaacacttcaagaagcaaaactgctgctaaacgaagatgattaccttattaaag

SEQ ID NO: 687261 - DNA, 90 bp, Homo sapiens
ccacttccgagacccaaccctgcacgcccagctccagtgattactcggacctacagagggtgaaacagagtttcactctatcacccaggc

SEQ ID NO: 687262 - DNA, 100 bp, Homo sapiens
ctgaactgggctcttgacgggcatcatctcttaatcctcagaacatcccagggagatttcgctgcctcatcacccacatctcccaatgcattgcctcctg

SEQ ID NO: 687263 - DNA, 90 bp, Homo sapiens
acatgtcacaagagtcggacaagtggatccataaagaacccagccaacccgcagagggaggggaggggctgagctgtgaggagagcgggg

SEQ ID NO: 687264 - DNA, 98 bp, Homo sapiens
tgaaattgccggcaagagggagttaaggacattccaggcagaggcaagttcagcaatcagcaaacattgggaggctgaactggctaccctcaaaggaa

SEQ ID NO: 687265 - DNA, 105 bp, Homo sapiens
ccaaacaggctggctcccgtctccaggccccaaggagccacacctggaccagaccccaggaaagtttgactttggggacaccatggtccaccaggccatccacac

SEQ ID NO: 687266 - DNA, 74 bp, Homo sapiens
tgaggatgaagaagagatcgaggttgaggaggaactctgcaagcaggtatgggccagcagtttcctgccagata

SEQ ID NO: 687267 - DNA, 83 bp, Homo sapiens
cttcgttgcttgcttgcctgtgcgcgcgtgcgcggacatggcctcaaacggtgctggagaatctggtaaaagcaccattgtga

SEQ ID NO: 687268 - DNA, 90 bp, Homo sapiens
ggaacttttaagtggagtggtggatcagaccaaagatggggtattcttggctgaacagtttgagttccttcagccacatctggatgctgt

SEQ ID NO: 687269 - DNA, 123 bp, Homo sapiens
aaagagttatggatattctggtggggagatgaacccaacctagtgggtgtaatacatcatgaactgcagggaaaggccattgctgctctggagctgtgtgtgtgtgtgatgactaaagcaaag

SEQ ID NO: 687270 - DNA, 75 bp, Homo sapiens
tacagcagctacagcagctgcgagacagtggcgagaaggtgctggagaatctggtaaaagcaccattgtgaagca

SEQ ID NO: 687271 - DNA, 100 bp, Homo sapiens
gtgctttcacatcttgtggaaggaccagtctccaattgagaaacatggcactgtttttcctgcactctacccacctattgctggacttctgttgtacaag

SEQ ID NO: 687272 - DNA, 82 bp, Homo sapiens
gtaacatttgtagcaggttacatagatttgtttagtgaatgaccctaggccccagcacaagtacaacaaactttacacagtg

SEQ ID NO: 687273 - DNA, 75 bp, Homo sapiens
gaagcaacacgttgctgcttttattctacagataatggtgatggcatcagctgagaagggaaggaagcccatgtg

SEQ ID NO: 687274 - DNA, 75 bp, Homo sapiens
gtgggtgcctggagatgaagctggaaaggaactgtggctgcaccatctgtcttcatcttcccgccatctgatgag

SEQ ID NO: 687275 - DNA, 107 bp, Homo sapiens
ttcaacaagggcccttcctatgggctctcggccgaagtcaagaacaagaaaaatggagtgctggcatacattgggaattttcgcctgcttgcagagctttccagccc

SEQ ID NO: 687276 - DNA, 90 bp, Homo sapiens
cgtatcgccagcacgatcccaccgcacgttcagaagtcggtagccggatcgagctgggagatgtgacaccacacaatattaaacagttga

SEQ ID NO: 687277 - DNA, 82 bp, Homo sapiens
tcaatatctgtcttcggtggactccttcggcagtccacccaccgccgccgcctcccagatgctgtgtgctgtggacccacct

SEQ ID NO: 687278 - DNA, 74 bp, Homo sapiens
cttcggagatcctttctattcaggataacacaagtcccttgccggttctgactaataagaagacgaccttcttt

SEQ ID NO: 687279 - DNA, 100 bp, Homo sapiens
gttttttgatgctgaggagctcctggtcgatgaagaggatgatgtttttggtgaaggtgacaaaaggtgagacactcacctagaacagtgccgtgctgct

SEQ ID NO: 687280 - DNA, 50 bp, Homo sapiens
gctcacctgtgcgggatggaacaaaagggtaacaagatgctcaactatag

SEQ ID NO: 687281 - DNA, 100 bp, Homo sapiens
aggaggctctactatggctgggactgggaagccgactgtagcctggaggagctctccagcccggtggcaggtcaaaatgcagatcttcgtgaaaaccctt

SEQ ID NO: 687282 - DNA, 74 bp, Homo sapiens
ggaaagagttttctccatttggtacaatcactagtgcaaaggcgcagttgtgtagcagttgagtaatgctggtt

SEQ ID NO: 687283 - DNA, 75 bp, Homo sapiens
gacatttaattttagggtcctttatatagaagggagagtagccattgaagccatgaagaaggcctaccaggaaga

SEQ ID NO: 687284 - DNA, 101 bp, Homo sapiens
tcttggcagactttgggacgtgctcaacttggtttaggagagataatcctggtgctcaaaaatgtgataactttgctgaaaaaagacccctccttggtgtt

SEQ ID NO: 687285 - DNA, 75 bp, Homo sapiens
ccgcctttccagcatgcaggggctgctcagggaagcccgtcagcctgagctacagatgcccatgccgattcttcg

SEQ ID NO: 687286 - DNA, 83 bp, Homo sapiens
aaccaggaggttttccgagacaacaacggcaccgcgcaaattgtggctactaatttgccccctgaagatcaagatggctctgg

SEQ ID NO: 687287 - DNA, 100 bp, Homo sapiens
tccgcagcagctccccagggcccacgggccagccccgccgccctcgcaacctggcagccgccgccgtggaaggtgaagtattacagacacttagcacctg

SEQ ID NO: 687288 - DNA, 75 bp, Homo sapiens
gcgtgaccgagagcgcgaatatcgtcatcgttagaagacgagatgatgcctattggccagaaggaaagcgtgtgg

SEQ ID NO: 687289 - DNA, 83 bp, Homo sapiens
agcagacacggtggctactctgcctcggggacgaaagcagagtgctgatggcagagattggtgaggatttggataaatctgat

SEQ ID NO: 687290 - DNA, 100 bp, Homo sapiens
gttctaaccttcagtactaaagaagatgcagtttcctttgcagaaaaaaatgattcttcaaacttcatgagagaaagtgtgaacctattattatgactgt

SEQ ID NO: 687291 - DNA, 50 bp, Homo sapiens
ttgaggtgtacggacctatcaaaagaaggttggaaagaaccatgactgta

SEQ ID NO: 687292 - DNA, 96 bp, Homo sapiens
aggagggagaagacgaggatgatgcggaaattaaccccaaggtccccagtctatgtgaggatctcctgtcttctgttgaccagccactgaaaattg

SEQ ID NO: 687293 - DNA, 100 bp, Homo sapiens
cttttgccgcaagcaggctggtgttgtgatgacgaggacgaggaggaggaggaggaaggagaagaggaagaagaggaagcagaagaagaggaggaggaag

SEQ ID NO: 687294 - DNA, 100 bp, Homo sapiens
atactctagaatatacaaagacaaaaggagattctgatgaagaagttattcaagatggtccagaggtgtccttctaaagctggtagaggtttcacgagtc

SEQ ID NO: 687295 - DNA, 96 bp, Homo sapiens
cttcgccatcgccagcatcgccaacccggactggatcaacaccggggagtctgcgggtctgatgctacaggacttggtttcagctaagctgatttc

SEQ ID NO: 687296 - DNA, 71 bp, Homo sapiens
tgggatcggcccaaggccagttctccgcagtgacttctgacagctctctccatggaaggaggcggcggccg

SEQ ID NO: 687297 - DNA, 90 bp, Homo sapiens
gtttcttacaaagtggaggtttgtggcagccctgcatggagcaagtctgtcagcaccatctttctaacaatgtgaaggaatggacaagag

SEQ ID NO: 687298 - DNA, 75 bp, Homo sapiens
tggtacaaggaccagaagaaactgcaccggaaatgtgcctaccagggtgagaactctgtctcagtcgacgggaag

SEQ ID NO: 687299 - DNA, 82 bp, Homo sapiens
gattcatcagattttgcattggatattcgcatgcctggggttacacctaaacagttttcggctttgtgagaaaccttaccat

SEQ ID NO: 687300 - DNA, 83 bp, Homo sapiens
ctgctgctgctgctgtggccacagggttgcgtctcaggacattcactgaacaatgccagggatacaagtgccatggatactct

SEQ ID NO: 687301 - DNA, 75 bp, Homo sapiens
acagcctccggggcattgtcaagcatctggaggaggagaggagacgccgtgagcgggacgaccagatgtaccgag

SEQ ID NO: 687302 - DNA, 100 bp, Homo sapiens
gagctgcagcgaagcacctctttacattctgtttctggcgtctgcatacgcaagtccccaactcgctgaggagagctgttcagctatggctgctgtcaca

SEQ ID NO: 687303 - DNA, 74 bp, Homo sapiens
ggaggctttcctgctggtggcaaccgcctacgagacactcaaggtacagcaggtacagactgtgcagcaggtac

SEQ ID NO: 687304 - DNA, 121 bp, Homo sapiens
ggatgctggaggacatctgggggccacaaatgctccttctcctggagacgcaactcaaggttattcagcttctcaaggctggaaaagcgaaggaagtttcctacaatgcactagcctcaca

SEQ ID NO: 687305 - DNA, 80 bp, Homo sapiens
ttctgtggctgctaccccactcctgggccgtccctgaaggagcggcattgcccccgaatgtccagattatccctgttttt

SEQ ID NO: 687306 - DNA, 100 bp, Homo sapiens
tttcacatcagtgatgtttgggacccaggtgcactccatctgcacagatgagacgcccatcatcttcgtttcggacagagcaaacagcaacaaggagctg

SEQ ID NO: 687307 - DNA, 80 bp, Homo sapiens
ggaatggcccaaatggcatacatgaagaaggctcaccaattccatttagaaatgtaatgacagctttgcagtttccgaag

SEQ ID NO: 687308 - DNA, 75 bp, Homo sapiens
ggaatgtttctaatgatgaaagttctcaacaggaggtgtgtagaagcggcggtgatgacaggcctggctctgaac

SEQ ID NO: 687309 - DNA, 82 bp, Homo sapiens
tgccgtctccaagaccgcggtcgcccccatcgagagggtcaaactgctgctgcagataacaacgaacttgatgcaagtgata

SEQ ID NO: 687310 - DNA, 89 bp, Homo sapiens
atttcaagaacaaaggccgcgacttggagccatgaagctcatgactgctctggtgaatgttgccttaaacctcagtattcatcaggata

SEQ ID NO: 687311 - DNA, 76 bp, Homo sapiens
cgtggaataggtgtatcaagtaatggtgcaaagcctgaaaattcttccatctctatgacaacaagcccattttagc

SEQ ID NO: 687312 - DNA, 97 bp, Homo sapiens
gtgggggtgtcctggtgcacccccagtgggtgctcacagctgcccattgcctaaagaatgaagtgaagacttacgatccttctggtgactccacact

SEQ ID NO: 687313 - DNA, 50 bp, Homo sapiens
gctgagtctccccagaagaggaagtttgcaaaagaatggaccccagcagg

SEQ ID NO: 687314 - DNA, 100 bp, Homo sapiens
aatttttaaacttggtttgaaaggaacggaaaacagttcttccttcaaagcatgcagtacctgaagtaatagaagactttctctgcaatttcttgatcaa

SEQ ID NO: 687315 - DNA, 50 bp, Homo sapiens
cagaaagctaaatcaaggtgtacaggacggcatcagaattaatgtaacta

SEQ ID NO: 687316 - DNA, 115 bp, Homo sapiens
gagacacagttgccgctgactcgggaggaggacctgatcaagactgatgatgtcctggatctgagagagaaaatacaggctcaggaattgagtcatccaagttcacaagcctagc

SEQ ID NO: 687317 - DNA, 75 bp, Homo sapiens
tgatagtctccagcgggcctggactgtgggctggtgtgtggaactggaacgtcaaggtcgtgggaaataaaaggc

SEQ ID NO: 687318 - DNA, 83 bp, Homo sapiens
accccagatccatttacactttacagtagcccctgaagaagatgaaaggaaaaagaggcgacgagaaagaaataagattgcag

SEQ ID NO: 687319 - DNA, 98 bp, Homo sapiens
ggagccaagaaaatcaatctaaacatttgtgggaagttgtattcatcaataatgaaatgctgactaaggaacaaggcgcatattaaatttcctattga

SEQ ID NO: 687320 - DNA, 83 bp, Homo sapiens
attaattatcagtatatgtgaaatcatgtccactgatcaaggacttcctcgttctgcccatcttcctaacaaggctatggctg

SEQ ID NO: 687321 - DNA, 73 bp, Homo sapiens
tttcttccagaatccaaaatcatttttcttgaaaaaggacaagatttctctatgaatcatcatcaagaactct

SEQ ID NO: 687322 - DNA, 90 bp, Homo sapiens
tgcttacacacatcctggacggcagccccgagaaaacccggcgccgccgagagatcggctattgagggcacctacattgacaagaaatgc

SEQ ID NO: 687323 - DNA, 82 bp, Homo sapiens
gactatgaatcggagccggaccaggtattaataggggaccctattaccacatgtctttctccctcagtgtatgatataattt

SEQ ID NO: 687324 - DNA, 58 bp, Homo sapiens
gacacaggctccaaactccactaagtgagactgggtgcctgcatcgccatggacacca

SEQ ID NO: 687325 - DNA, 50 bp, Homo sapiens
aaacacacctgtctacgctacagaattcaattcgccacaatctctctctg

SEQ ID NO: 687326 - DNA, 100 bp, Homo sapiens
gacagacagctactccacgtgcaatggtcctcttcctgatggatgggaacaagccatgactcaggatggagaaatttactatataaaccataagaacaag

SEQ ID NO: 687327 - DNA, 82 bp, Homo sapiens
ctctccaagacctccggccagcccagtgatgcgggcagcaggcccctcctgcgcacagcaaacggggattcagcgtccgatc

SEQ ID NO: 687328 - DNA, 75 bp, Homo sapiens
aatgctttgaccattactacagaaggtactggtcttcttggacattaatctttgaatacttgctgactgctaaga

SEQ ID NO: 687329 - DNA, 98 bp, Homo sapiens
ggcgctgctctgtggggctctggccgcgcctggcctggccgggaccatgcgccgtgccgtccctgcagtgacaccgaggtgctcctagccgtctgcac

SEQ ID NO: 687330 - DNA, 99 bp, Homo sapiens
cagtctgatcacctcagcgttgcagcctcgattcattcaactctttcaggctaaaagatggcggcaaggcagcccaggcaaatgtaagaataggcgatg

SEQ ID NO: 687331 - DNA, 89 bp, Homo sapiens
ggagctgtgcgagagcctcctcacttggggttctccaaaaaatgtggaatcctttgcatctatgctgagacattctcctcttacacaga

SEQ ID NO: 687332 - DNA, 82 bp, Homo sapiens
cagcatttatcaagtcttacaggagcatcagcacaggcttgttagcagtggcacaagatcttacagaggatgaagaaacagt

SEQ ID NO: 687333 - DNA, 108 bp, Homo sapiens
atcagctgaatcagagtttgcattgttaacaaggacctgcagagaaacgcctcctgattttgtcttacaatggaacttaaaaagtcgcctgacggtggatggggctgg

SEQ ID NO: 687334 - DNA, 50 bp, Homo sapiens
ggaggaggcgaggaggagagactgaaacaaaccatcaggcctcccagaaa

SEQ ID NO: 687335 - DNA, 90 bp, Homo sapiens
atgaaagaattttctgtagatctgggatctggacacctgccccccgtcatgccaccattggttcaggcaatcttcagcggtgatccagag

SEQ ID NO: 687336 - DNA, 130 bp, Homo sapiens
gtggatattatggctaataacacaacaagtttagggagtccatggccagaaaacttttgggatttttcgaaagaaagcagtggaacttggggtaaaattgctacctgcatttcatactccctctggaata

SEQ ID NO: 687337 - DNA, 97 bp, Homo sapiens
taaagatggagaaattgtatacactggaacagaatcaacccagaacggatagctccctcctggaaaaggctgaagccgacgtagcttctctgaacag

SEQ ID NO: 687338 - DNA, 100 bp, Homo sapiens
gaaggggcaagacgggttcagttcgtcatggggctgtttggaaagacccaggagaagccgcccaaagaactgatgatcatgggaacagcaatagtagtca

SEQ ID NO: 687339 - DNA, 98 bp, Homo sapiens
cagattattttgtggattttcctgttccattttgtgcctcctggacacctcagacttcacagagaatgcagttgtcttgacttcaggtctgtctgttc

SEQ ID NO: 687340 - DNA, 75 bp, Homo sapiens
aaaaggaagtattagaaatgagctgaagaccattcacagagcgagatgcgagaacacttttggctaaaaatctcc

SEQ ID NO: 687341 - DNA, 82 bp, Homo sapiens
tgggagctggatacctgccctggcagcatggctcagactgcatgacagagctggaagtcgagtgtgctactcaactcaggag

SEQ ID NO: 687342 - DNA, 126 bp, Homo sapiens
gtgtggatgctttggacacagcctcccacactaataaaagtggttatcatgatgactcagatgagcccaagatcatctggctgaagaacaagatggatatccaaggcaaccctaagtacagagccc

SEQ ID NO: 687343 - DNA, 100 bp, Homo sapiens
ctcgtggctttccgaaggctgctgggaacctcagaacctgttctggatccacagcaaatccaagcatttgatcagctttgccgtctctaccgaggaagct

SEQ ID NO: 687344 - DNA, 82 bp, Homo sapiens
cctccgggcccccaggcatggctagctcggatgctccaggatgaaacgccataggcctgtcagcagcagtgacagttcagac

SEQ ID NO: 687345 - DNA, 83 bp, Homo sapiens
cgctggaagggatgtcgtctcagcagtgctcgggcgcaggtgcccgtggttgacacgagctgtgtccccagctgttcccgtct

SEQ ID NO: 687346 - DNA, 50 bp, Homo sapiens
gcagagaccccgctatggctgtactccaaagattcaggtttactcacgtc

SEQ ID NO: 687347 - DNA, 50 bp, Homo sapiens
cttatatttccctgattacagcataggtgcgtatagcagcaaaattcatc

SEQ ID NO: 687348 - DNA, 50 bp, Homo sapiens
aagctgctgccgccccttgggctaaaagaggccgggaagttaaacttgta

SEQ ID NO: 687349 - DNA, 100 bp, Homo sapiens
ggtggctaactggaggcatcacccagcagtggtggagcagtggagcaaggtcatttgtgcactcacttccaggtgtagtacagcgaatagccgattggca

SEQ ID NO: 687350 - DNA, 74 bp, Homo sapiens
caagaacctccaaagagcattgaagaattcttaaagtttcaaaattgggtgaccaagaatatggcccaggtgac

SEQ ID NO: 687351 - DNA, 100 bp, Homo sapiens
gtccccaagggtagtcagcacatcccttgactgcttgcagagcactggccttggttcccttcagcattaagcccctgctgcggcgagcatctgcttatga

SEQ ID NO: 687352 - DNA, 50 bp, Homo sapiens
attaaagttactgctgttaaaaagatttaaggaacagtgacaccccaccc

SEQ ID NO: 687353 - DNA, 97 bp, Homo sapiens
gagaacttctggagctggccaacgtgcaggaggtgcagttagagcggatccggcaagctgactccttggagagaatccgggcaattctgaatgatac

SEQ ID NO: 687354 - DNA, 75 bp, Homo sapiens
cgtgacttcccggacgctgggaaatgggaccattggaatttagagatgtggccatagaattctctctggaggagt

SEQ ID NO: 687355 - DNA, 90 bp, Homo sapiens
cggcgcgggagcagcacttccacagccaagtgcgggagtccacgatttattcaggagattgagcatgctctgggtcttggcccagccaaa

SEQ ID NO: 687356 - DNA, 83 bp, Homo sapiens
ccagctttctgttgggaacactcaaaggtaaattggcaggatgaggagcagcaaatcaaaagaggtgcctttaccaaatccaa

SEQ ID NO: 687357 - DNA, 100 bp, Homo sapiens
ccagggtgtcaggactaagagaagtcacaaaacagcagatttcccaagagcagcggaaaatgatccagtcacaggcatgcatatcattctgtttcaactc

SEQ ID NO: 687358 - DNA, 98 bp, Homo sapiens
aggcgccagcctgcgaaggtggcggcgctgctgctcgggctgctcttggaggttacgaaggtgagaatctgatgaaaattctaaaagacattgaaaac

SEQ ID NO: 687359 - DNA, 50 bp, Homo sapiens
cgcaggcaccttcgggccctcctgccttctactgaccaagtgccaggaag

SEQ ID NO: 687360 - DNA, 75 bp, Homo sapiens
ggatgagggggaagggcctcaaagccagaaggaattgaatgatctggcacgggaccctccagcacagtgttcagc

SEQ ID NO: 687361 - DNA, 100 bp, Homo sapiens
cgcagcccccgcgctggtgcagccaccctcgctccctctgctcttcctcccttcgctcgcaccatgctcggcaagatgtcggtgaaggagggcgcacagc

SEQ ID NO: 687362 - DNA, 100 bp, Homo sapiens
ctggaaaagacatatgtatccaaaattgccagggaaacctgctgtgtagatacgctttctgagaaaccacatgcttttgctctgcatgcctgcaggaatg

SEQ ID NO: 687363 - DNA, 74 bp, Homo sapiens
ggatggcggcatgagtatctgggatgtgaagatcccgcccaatgacccccgcatcaagaaccaagccgactgca

SEQ ID NO: 687364 - DNA, 147 bp, Homo sapiens
tgtatgacagcacccggatctcactgtttggcaccttcctgttcaactcccctcaccagcgagtgaagcaaagcacgagttgaaaatatgtcaatgaggttggaagaaatcaatgaaagagaaacttttatgaaaacttccctgcag

SEQ ID NO: 687365 - DNA, 80 bp, Homo sapiens
ggcgggtcccggggtgcgagcagcgcacttccgcacttgcacctcctgcgccgccgccccccatccaaggatatgccttc

SEQ ID NO: 687366 - DNA, 73 bp, Homo sapiens
gtaaagccgggagtgtcgtaaaccaggtgctggagaatctggtaaaagcaccattgtgaagcagatgaggatc

SEQ ID NO: 687367 - DNA, 50 bp, Homo sapiens
ctggtgaagctctgtcaaccataacagtcttcactcctatgctgattttt

SEQ ID NO: 687368 - DNA, 97 bp, Homo sapiens
caagtttggtgtccagatggacagagttgatcagccctcggagtacagcggccacctcaactccagctcccgcgcctcctccagggccagctcggcc

SEQ ID NO: 687369 - DNA, 100 bp, Homo sapiens
ggcagctgcagtgacatgtccagcatgaatcccgaataggatcgcttacacctgagacgaactacagaacagcacgtaccagaggtggaagtccaagtca

SEQ ID NO: 687370 - DNA, 85 bp, Homo sapiens
ggtggacagatctgagagatactgaggtggtgtggaccctgcaagatcctggggccgaggttagagaagatggtggccaagcagc

SEQ ID NO: 687371 - DNA, 88 bp, Homo sapiens
gcctcctctgccagttcaatgagaagagggtgctggagaagtggatcaacctgaaggcgggagacactatattcaatcgtgctaagct

SEQ ID NO: 687372 - DNA, 100 bp, Homo sapiens
tcgcatctcagcctcccaaggagctgggacctcaggtgaatcagctcccggccgactttaggattcttctggattttaaattttttctttttaaaaaaac

SEQ ID NO: 687373 - DNA, 83 bp, Homo sapiens
ccgggatctcggctgtccttcctcccgtcacttatataagaagaaccttgatgtgaccaagatccggaagggaaagcctcagc

SEQ ID NO: 687374 - DNA, 82 bp, Homo sapiens
cccgggctttagctatggcagcggcagcaccgggagtcagcagagtgaagatggttggcaatggctgataaatgacactttg

SEQ ID NO: 687375 - DNA, 100 bp, Homo sapiens
ggcgaacgcttcgctggccatttaggagctctgctcaaagccagacggcaaataagggcgagactgaaaaatcaagtcactcagttgaaggagcaagtac

SEQ ID NO: 687376 - DNA, 90 bp, Homo sapiens
ctgtggggagctggtgctgttctcagtcatccgtccttggctcaggatttggagagcttgcaccaccaaaaatggcaaacatcaccagct

SEQ ID NO: 687377 - DNA, 75 bp, Homo sapiens
cgagcaggagcgagagtgtgtcgagaatgggtaccacagaccatgtcatcgtcctggcgtccacgaaccgagctg

SEQ ID NO: 687378 - DNA, 75 bp, Homo sapiens
tgaacgaattttctttcgatggcattaccagagtataggcactgggacgttcgggcgggtgcacctggtgaagga

SEQ ID NO: 687379 - DNA, 100 bp, Homo sapiens
atcacaccatcagcttcagagaatggcagccatttatttgtcccgtggttcctgatgaaaagttatgatcaggtgcactcaggaaagttggtgtgtggca

SEQ ID NO: 687380 - DNA, 100 bp, Homo sapiens
cgctgtgtccccaagctccccgtcctcgggtctctttaatgtggggaacaagctgctggtaagcctggacttgctttttgcaatcagaaatcagatcaag

SEQ ID NO: 687381 - DNA, 100 bp, Homo sapiens
gggcatgccaagaagatgagaccgggggaggcgacgctaagttgctgatcgtggcggtcagccatgtcatctgagcctcccccaccaccacagcccccca

SEQ ID NO: 687382 - DNA, 100 bp, Homo sapiens
aaatataacgttttcacaagagtgaacattagctactgggaaggtaaagacttccggacaatgctatataaaggggacacttaacaaatccactagttca

SEQ ID NO: 687383 - DNA, 76 bp, Homo sapiens
gatgctatgtgagatcttgaaagtgggcgagttgcgtggaacaatccaaagttttaatcaaagaaggtggtattca

SEQ ID NO: 687384 - DNA, 75 bp, Homo sapiens
tgatacaccttttccacagggaattgagttggtttattttcttgaaaaggctccaggcttcggcttggaaaatcc

SEQ ID NO: 687385 - DNA, 98 bp, Homo sapiens
aaaattgtgaactaaggccccctgcccccttttcctggtgcatgtgaagttatcaaaaacaggacctgacatgaaacgcagatctagtggcagagagg

SEQ ID NO: 687386 - DNA, 75 bp, Homo sapiens
ttcagatgggatctttccggatcaatccagatggcagccagtcagtggtggagataaaggataggttacagttac

SEQ ID NO: 687387 - DNA, 85 bp, Homo sapiens
aaaagagttgattgaaattatctctggtgctgcagctctgaaaatgtttcaacgtgcgcaagagttgcggtggcgggcagaggac

SEQ ID NO: 687388 - DNA, 100 bp, Homo sapiens
cgtcttcgtgccacggtgctgcctcctttccaagcgcgacccgttgaggaagaggagcaggacttggatggtgagaaggggccatcatcggaagggcctg

SEQ ID NO: 687389 - DNA, 115 bp, Homo sapiens
gaggatggagaccggttcccggcgcaccatgtcatcgtcaccgtgcccttagaccagcatctcagacatgtcgaaaaagatgttttgatccctaaaataatgagagaaaaggcca

SEQ ID NO: 687390 - DNA, 100 bp, Homo sapiens
tcaggacaacccagatgtgcaacaaagtgcgatgaccctatatctacggacctacgtctcagggggaaaggatgcaaattctccagaatttcaagcacaa

SEQ ID NO: 687391 - DNA, 75 bp, Homo sapiens
tggctttccaagctatgggtgccatgaagatggactcaccctgtcacccaggttggactgcactggcctcaacct

SEQ ID NO: 687392 - DNA, 90 bp, Homo sapiens
aagctcatttctggcacataagagctttttttctcaaggtgcaatgaaagccttccacactttctgtgttgtccttctggtgtttgggag

SEQ ID NO: 687393 - DNA, 73 bp, Homo sapiens
ggtcagcgcttcgatcctgagaccaattccgacggaggctctgtcggtggtgagcgacgaccagtccctcttt

SEQ ID NO: 687394 - DNA, 98 bp, Homo sapiens
gggacgccatgtccatggaggaccccttctttgtggtgaaagggagcggtggtgccccccccgggcacggggccatgtacaacgggatcgggctgccg

SEQ ID NO: 687395 - DNA, 83 bp, Homo sapiens
ctcagacctgccaatttaccagagataattgataacaccctgtaacagctgagaaaatctggagaagatggggcctcgtattc

SEQ ID NO: 687396 - DNA, 100 bp, Homo sapiens
ctggaggctgtgcgcatgcagcacctggatcgactgcgggccacctgcacactctcagggaaccgggacaccctctggcatctcttcaatacccttcagc

SEQ ID NO: 687397 - DNA, 98 bp, Homo sapiens
acgagctgagcttcaaaaggggggacatcctcaagctttttgctaggcttcctgccatctttaccaagttgagattatccgggttctggcattaacag

SEQ ID NO: 687398 - DNA, 100 bp, Homo sapiens
cgggacctggccagcgctgctggcgggcgttagggttatcaatactctggctgaccatcatcatcgtgggactgactttggtggaagtccttggttacat

SEQ ID NO: 687399 - DNA, 100 bp, Homo sapiens
ggccccgcgagtgccatggcggccgccctgggagcgagcggaggagcaggcgccggaggtggacatcgagcagctggatccccgcggccggactcccctg

SEQ ID NO: 687400 - DNA, 83 bp, Homo sapiens
gcatgacgcacacaggagagccaggattcatgctctacatccccatagagagaaaattcctgttccaagagaaaataaggcaa

SEQ ID NO: 687401 - DNA, 80 bp, Homo sapiens
ctcgcttgcagttcagcgaccacgtggtctcggaaagagggtcgtggtcccgcacggatgcgcttgttgggagaaacctt

SEQ ID NO: 687402 - DNA, 75 bp, Homo sapiens
aagtggcggcatcgagaccatcgccaatgagtacagcgacaggtgtacccctgatgtcttggcattgcccatttt

SEQ ID NO: 687403 - DNA, 83 bp, Homo sapiens
gcacaggaatctcactctgttaaagctggtctgttctaactgagaaaagactactgagagccagtaagactgaaagaatggac

SEQ ID NO: 687404 - DNA, 98 bp, Homo sapiens
ctttgagttcatggatgatgccacactgctgatggttcttcagaactcaggaatcgtgttgcatgcattgtttctacccacctgagatggttggaaac

SEQ ID NO: 687405 - DNA, 50 bp, Homo sapiens
atactactaactttgaaatggaataagggaagtaagaagttacagctcag

SEQ ID NO: 687406 - DNA, 83 bp, Homo sapiens
tgctccgtggagatcgtcccgcgcctgccggtggctatggaccgccccctgcaggaagaggagcccccccgccacccccaccg

SEQ ID NO: 687407 - DNA, 101 bp, Homo sapiens
gtctatgacatttatctaccaacacatctggaaggggtctgtgtacatcagcaactttcaaacccattttatttggagaaaatgtactctctggatgcctg

SEQ ID NO: 687408 - DNA, 75 bp, Homo sapiens
cctggtctggccttctccatggcctcaacacgtccctaacttgtgtgcaaagagccgtctcactcttctctctga

SEQ ID NO: 687409 - DNA, 92 bp, Homo sapiens
cgggaggaaggaacgaggcaaggagctaaagcagcgtgcgttcagccctggggtcgcaatggaagaagagatcgccgcgctggtcattgaca

SEQ ID NO: 687410 - DNA, 75 bp, Homo sapiens
acgccagtctttgaagggcttgccttcaagagcatgcaagttgtccccttggacaaacagatcacaatcatagat

SEQ ID NO: 687411 - DNA, 80 bp, Homo sapiens
ccccgggccaggccgcggccggggcaggagcgcagttccagggtctccctccactgctgtagtaacccgggtccggggcc

SEQ ID NO: 687412 - DNA, 73 bp, Homo sapiens
gagaatcaaagggccgggagcgatgttggtcgcattatgtttcagctcttctcagacatatgtccaaaaacat

SEQ ID NO: 687413 - DNA, 100 bp, Homo sapiens
taaaaatgaggtgcttgaagatcatgtgcagaacaatgggtgagagtatggacaatttcaactggggagtgcgcagacgttctctggacagcctggataa

SEQ ID NO: 687414 - DNA, 99 bp, Homo sapiens
aaccctcttttccagtataagtatttggctcttaatatgcattatgtaggtagcacaggcggagtgcagcggaggcccctgccgctgccgtcatgccgt

SEQ ID NO: 687415 - DNA, 96 bp, Homo sapiens
tttttctcctgtggtgagagatgtgactgggtacctggatatgtgatcgagtattcttctgggtgtttctatgaggatgtttttggatgaaattgg

SEQ ID NO: 687416 - DNA, 75 bp, Homo sapiens
tcgcgtgtctaggtgagtcgcggtgggtcctcgcttgcagttcagcgaccacggcaacatgagtgagaatgagga

SEQ ID NO: 687417 - DNA, 74 bp, Homo sapiens
aaatgactctccctggattaagaacatcagattcttctgcacagtcagtatcctcgggagttcgtgcaccatct

SEQ ID NO: 687418 - DNA, 75 bp, Homo sapiens
cggagcttgaagcaaagctgcaggttttaaaggtatagtggaggattacaagccaccgttctacgatgtggttcc

SEQ ID NO: 687419 - DNA, 75 bp, Homo sapiens
tttctttgtggtttatctaaaaaccaaaggttccttcaatggtgccttagctgctgttcctgtccaggacctggg

SEQ ID NO: 687420 - DNA, 100 bp, Homo sapiens
ctggcgcacctggtgcgggccctctggaccctggagtacaccccgcagcacagccgcgacttcaagtggaagagaaagccaatacccacctcctcttggg

SEQ ID NO: 687421 - DNA, 100 bp, Homo sapiens
gtatctttcgttctcttttttgactgtaataatgagactaaacttcagtggctctgtgaggaactgaaagagagagaaaacagagagaaaaatctgcgac

SEQ ID NO: 687422 - DNA, 71 bp, Homo sapiens
ggccaatccacgaaagcatcaagactctgaaacagcacgtcctgaacagagcgcaggacatcaccctgccc

SEQ ID NO: 687423 - DNA, 100 bp, Homo sapiens
tggcggttcagcgcgaccacgaaggccgctactccgaggcggtgttttattacaagactgcctctttaagctatgtcccatgaaccgctactctgcccaa

SEQ ID NO: 687424 - DNA, 74 bp, Homo sapiens
tccagcctttctggagggatgcagagcctttccttaggacaaacaagccaccagctgaacaggccaaagccaga

SEQ ID NO: 687425 - DNA, 110 bp, Homo sapiens
gtcgtcgtctgccttcgcttcacggcgccgagccgcggtccgattactggggcttccggatgcagatgacgatgcgtttgaagagtacagtgctgacgtggaagaagagg

SEQ ID NO: 687426 - DNA, 82 bp, Homo sapiens
gccagggaaccctggtcaccgtctcctcaggtgttggagcgggccggagagaagtagagtgggctgcgaggagaaggaaaca

SEQ ID NO: 687427 - DNA, 100 bp, Homo sapiens
atgtgacgctgctggaggaaacacctcaggacacggcctacaacaccaagaggaactttatattgctgttggaatatctggagccatccaacatttagct

SEQ ID NO: 687428 - DNA, 97 bp, Homo sapiens
atcattactcctccaacaccaatcatcccagacggaaggttgtgcaggaccagcgttccctgtgcaggcgccactgcgtttcctgcagattccgacc

SEQ ID NO: 687429 - DNA, 83 bp, Homo sapiens
aatggcaatggcacaaagttctctcgatcagggcatacatctttcttcgacaaagggtgtccctggccagtgtccttccacct

SEQ ID NO: 687430 - DNA, 73 bp, Homo sapiens
gcacgtgtttgcggttcagccctttgatgaccgcagcaggtgtggatgaggtcaccattgtcaacattttgac

SEQ ID NO: 687431 - DNA, 75 bp, Homo sapiens
agctctcctccttcttcctcaactatctcgctgacacgcaggctgaaggtgatgtggccgccctcaaccgacgca

SEQ ID NO: 687432 - DNA, 75 bp, Homo sapiens
ttacaccatctgaattgcctgcaaacccagatctcacattcttgaaggtggcattgaagagcactaagatcggaa

SEQ ID NO: 687433 - DNA, 100 bp, Homo sapiens
caggattataatgagactgactggtcccaagaattcatctctgaagttacaggtgctggagaatctggtaaaagcaccattgtgaagcagatgaggatcc

SEQ ID NO: 687434 - DNA, 97 bp, Homo sapiens
ggagagcaaacttggctcagcccagaaccttttgaggatggctttgcaaatggggaagaaagtactccaaccagagatgctgtggtcacgtatactg

SEQ ID NO: 687435 - DNA, 87 bp, Homo sapiens
acctcattgctctttggcgactcttattggatctatctggttcaatagatgacctccccatggggacagaaggagctctgagtcctg

SEQ ID NO: 687436 - DNA, 83 bp, Homo sapiens
aaaaagaacattactgtcttggttcaaaccttgtactactcagctgatcacaagctgcttgatgggaacctactagatggaca

SEQ ID NO: 687437 - DNA, 89 bp, Homo sapiens
tggagatcaacatcgaccacaagttccacaggcacctcattgggaagagcggtgccaacactgcaagctttcttcctggtggcagatga

SEQ ID NO: 687438 - DNA, 100 bp, Homo sapiens
cacagagtattggtcctaaagtccagagacagagcactaattaggtcatcttttcttgagtcccttctgcaaccagagtctttaaggttggattggctgc

SEQ ID NO: 687439 - DNA, 83 bp, Homo sapiens
agtgcagaagatctgggtgcccgtggaccacaggccctcgttgcccagatgagcatcagatccatgctgctgctgactcggag

SEQ ID NO: 687440 - DNA, 101 bp, Homo sapiens
attcaataagctcaaccttgaacaggagaaaactggttgtcctggatgtttgaaaagttggtcgttgtcatggtgtgttacttcatcctatctatcattaa

SEQ ID NO: 687441 - DNA, 50 bp, Homo sapiens
ttcctgtacagcctgcagaactggactggtgattgcagctggaagtgccc

SEQ ID NO: 687442 - DNA, 82 bp, Homo sapiens
ggaaaatttcgatattgaagtgtcaaaatccatagatggaaaagatggcagaagctcctcctggggtagagacagatcttat

SEQ ID NO: 687443 - DNA, 76 bp, Homo sapiens
gattcgcagtggtcgcttcttctccttgggctgttttgctgcagcttctgaagtgttaaagcacttgaaggaacga

SEQ ID NO: 687444 - DNA, 126 bp, Homo sapiens
aactaagcaaaccataagcctcttcaaggagggaaaagaaagaatgtatgaggagaattctcagcctagatccaatggatttgaacagaagcgctttgccaggcttgccagcaagaaggcagtgga

SEQ ID NO: 687445 - DNA, 83 bp, Homo sapiens
cggcgcaggcccgccagacttaagggacctggtcaccacgctcgaaggatgccctgcagtggtctcgccatccagctacagtg

SEQ ID NO: 687446 - DNA, 75 bp, Homo sapiens
ttcagttctcccggtgtggccacgagtcggagcactgcagtttcctcctgaaggctggctccggctctccctcaa

SEQ ID NO: 687447 - DNA, 50 bp, Homo sapiens
cgagttgcgtctccctcgcgcgaggtttttggattcaaagcataaaaacc

SEQ ID NO: 687448 - DNA, 83 bp, Homo sapiens
ggagttgtatttagtgtgacgactgttgacctgaaaagaatctatgtactttcatcagcgcggccagtaagtttgcacagctc

SEQ ID NO: 687449 - DNA, 74 bp, Homo sapiens
aacgggaaatcggcgccatccttcagaatgcagttttcagaagagcagcgctttaacaacttcctgaaagccct

SEQ ID NO: 687450 - DNA, 83 bp, Homo sapiens
gtcgccatcttggatccgcgggacaagaaaattcatgcgtggcagaaatctgaagctatcatggaacaattgaagtcttttca

SEQ ID NO: 687451 - DNA, 90 bp, Homo sapiens
gccgtcttccccaggcctgcgtccgagtctccgccgctgcgggcccgctccgacgcggaagctaaaccaggtggacaggtgaaatgtcag

SEQ ID NO: 687452 - DNA, 75 bp, Homo sapiens
gcctggaggcggccgcactcgggtaaatcagaagactgaagcacggcatatactcaccttagtccataaacactt

SEQ ID NO: 687453 - DNA, 100 bp, Homo sapiens
ttctcccggcagcagcccgacgcaaaccaaggatctggggatcttcgcactatcccaaggatctttcgaagatggtttggctgccttggagatttggaga

SEQ ID NO: 687454 - DNA, 112 bp, Homo sapiens
ggcggcagtcacttgtacagcgccggtcaacatcgcggtcatcaagtactacaatgcagatcttcgtgaagactctgactggtaagaccatcaccctcgaggttgagcccag

SEQ ID NO: 687455 - DNA, 82 bp, Homo sapiens
ctgacactgaaggcatctctcatcctcgtcttgaaaccctgaatctcaaaggtcatgtaatgtttgcagaaataaaaatgga

SEQ ID NO: 687456 - DNA, 98 bp, Homo sapiens
ttgtttaatgactttggtgccctcaacatctctcagagacgaaagatggatggagcaccttcagaatcagagaagctttactcattttatgatctgga

SEQ ID NO: 687457 - DNA, 100 bp, Homo sapiens
gccccctgtgcgccaccattgcagccaaagatcatgactgagagattgttaataaaagcattgagtggtggtaaaaatacgaagatcattactttgaatg

SEQ ID NO: 687458 - DNA, 100 bp, Homo sapiens
caaggagttcctggagcccccggaccacccggagaagccggaaggaaaatcacctcggcagtgtttgaaggaaggatactgcaactctttgaagtacgca

SEQ ID NO: 687459 - DNA, 75 bp, Homo sapiens
catccaggtcctgctgcaggcggccgagttcctggagcgccgtgagagagagcccggcaggagccccaacaggaa

SEQ ID NO: 687460 - DNA, 78 bp, Homo sapiens
ttacactgaaacagcactagatgaaatccggttgctgaagtcaactcctcgtgaagtggcccagcaggctgtggatgc

SEQ ID NO: 687461 - DNA, 50 bp, Homo sapiens
acaacttgataaatcagcttcatgagatctaccaaaagttttaaaccttc

SEQ ID NO: 687462 - DNA, 100 bp, Homo sapiens
cacccaagccccagtctcgctgcacctctacccgctcagcagcaaaattctgtggcatctctggaatactacctgagaatttttgtgtgccatgtcgaag

SEQ ID NO: 687463 - DNA, 90 bp, Homo sapiens
gaagaaatggcggacttctacaaggaatttttaagtaaaaattttcagaagcacatgtattataacagaccttaactgatgtaagaaatc

SEQ ID NO: 687464 - DNA, 74 bp, Homo sapiens
tggctctagcagagttttgattaccactgacctgctggagtttgggctttgcaaaactgagaacaaagccaagt

SEQ ID NO: 687465 - DNA, 103 bp, Homo sapiens
ccgagtgctacttctactccaagttcgaaaccagcctggacaccaagtctgtgtcagaaggccacctcaagaggaacatcgtggtgaagaccgtggagatgcg

SEQ ID NO: 687466 - DNA, 96 bp, Homo sapiens
gtgaacagacacgggtgaatgctgctaaaaacaagactggggctgctcccatcattgatgtggtgcgatcgcaacaaaggagagagcgggaagcta

SEQ ID NO: 687467 - DNA, 96 bp, Homo sapiens
agagaagcaggacctcgggccatgggttgaaggtttagaacagatgtggaaaaatgtttacttcagagaaaggggttgtggaggaatggttgtcag

SEQ ID NO: 687468 - DNA, 100 bp, Homo sapiens
tccgtcctcgggcccgcaggtcgcagggcggcctgcagctgggccgcggccgaggaggcagcgcgacctccgcacggttcaccggaacagcacaatccgc

SEQ ID NO: 687469 - DNA, 90 bp, Homo sapiens
tgccttattttttctcatggatgttcttcttcgagtatttgtagaaggggcttcgtgggacacatatgcaacatgcctatgatttttaca

SEQ ID NO: 687470 - DNA, 91 bp, Homo sapiens
cctcgcgccggctatggccgtgccctggggctgagccctcagctgtgagccgtgagctttgaggcggtgggatgtgtcagcagaatgtctc

SEQ ID NO: 687471 - DNA, 96 bp, Homo sapiens
cgcagctgccgaacgacgtggtcctacagatgccacctcagtatggacagcaaggtgtgagtggttactgccagcagggccaacagccatattaca

SEQ ID NO: 687472 - DNA, 76 bp, Homo sapiens
gctgtttgacccctttgacctcttcgatgtgcgagactttggaaagacaatgaatgattttgactatttgaaacta

SEQ ID NO: 687473 - DNA, 97 bp, Homo sapiens
atattacatcatataccgaaatgtttttgataagtgagctggaagaatctctacttgtgctgcctttctcttatgtcccagacattcttaaactctt

SEQ ID NO: 687474 - DNA, 90 bp, Homo sapiens
cctgtgggcacagacaaggagctcagtgacctcctggacttcagcatgggaaagcaggcaggatgggagagtcgccgatagaaccacctc

SEQ ID NO: 687475 - DNA, 88 bp, Homo sapiens
cgccggcgagatgcctttgttcaccgccaaccccttcgagcaagacgtggctgcagaaccttggcctgaaaatgctacattatatcag

SEQ ID NO: 687476 - DNA, 100 bp, Homo sapiens
gtgctggaaaagtgagaggtcagactcctaaggtggttatcactaggctaaaactggacaaagaccgcaaaaagatcctcgaacggaaagccaaatctcg

SEQ ID NO: 687477 - DNA, 83 bp, Homo sapiens
cgacagcaacagctctgccggctggaaggtaaagagaaatgtgtatgaccttacaagtatccccgttcgccaccaattatggg

SEQ ID NO: 687478 - DNA, 104 bp, Homo sapiens
aaatcaacaccaggactacagtaaggctgaaatcattgaagtgcttggagtgcagaactgaaagagtatgagcccagaggacctggtcggcccttgtaccaaag

SEQ ID NO: 687479 - DNA, 50 bp, Homo sapiens
cgcggggcaagtggctcggaacacaggttgcagccccacccacgtcacgg

SEQ ID NO: 687480 - DNA, 96 bp, Homo sapiens
caacgcgcttatcagcgctatgagaaccaatgaaggaggttgtgcgatcttgcacccccatgaaagagtctacaactatggagatctggattcatc

SEQ ID NO: 687481 - DNA, 82 bp, Homo sapiens
cctctgcaccatggctctctgcaaccagttctctgcatcacaaacttgaagattgtgacagaaaagccgttcaccaaatcga

SEQ ID NO: 687482 - DNA, 100 bp, Homo sapiens
gagtactcggtgaaatcctgtcctgaagactgtaagtctgagaataaaggattagaaactaccaagaacaatgtagttcagccagtttcggaagagggaa

SEQ ID NO: 687483 - DNA, 50 bp, Homo sapiens
gactggcctcccccaaggcaagaaaagatgttcttgagtcgaagaacagc

SEQ ID NO: 687484 - DNA, 74 bp, Homo sapiens
cttcgcagggcccctgagtccagccaaggaaagaccacagcaagattctttcattcgtctcctcctagcctggg

SEQ ID NO: 687485 - DNA, 82 bp, Homo sapiens
gggtccgcgctgcttccacccaacttcctgttaggagaagatggggagccccgaggatgacctgattgggattccattcccg

SEQ ID NO: 687486 - DNA, 100 bp, Homo sapiens
cggacgggccatacccaataaccaggtgcttggcaaaatcgagcgggccattgccttgaaaagatcttttgaggtcgaggaggtcgagacacccaactcc

SEQ ID NO: 687487 - DNA, 83 bp, Homo sapiens
ccggctttcgcatttgggaccctgcaggaaggaacccagccagccggcggaatgcaagcagcagtaggaagcggaggcgggtg

SEQ ID NO: 687488 - DNA, 100 bp, Homo sapiens
gcctgacccgaagtaccgacccgagttatgcccaccctccaactttgcgacggaaatgtgtcatcgaaagccaggactttgcctcccgggccaaactggc

SEQ ID NO: 687489 - DNA, 96 bp, Homo sapiens
aaggtctaatgaacgaaagctaaaacaaaccttggaagcagaaatgggttaactccgttgactgccaaaatagcatccccaacgtgcagccctccg

SEQ ID NO: 687490 - DNA, 96 bp, Homo sapiens
caactcaggccatctggcgccgactctgggatgaactgatgaagacaaggccttccagtttggaagagcaccggcagcaccagtgtgtgaggggag

SEQ ID NO: 687491 - DNA, 50 bp, Homo sapiens
agaagattacctttgactcttgtcccagatcgtcagtatttaaacagatc

SEQ ID NO: 687492 - DNA, 100 bp, Homo sapiens
ctgctgcgttcacggcaggattcggttagggtaactaaggaagtggatgctacatctaaagaggccaaatccttcttcaagcagaatgagaaagaaaaac

SEQ ID NO: 687493 - DNA, 50 bp, Homo sapiens
gtcggcgtaactatcgcctgacaggctgcagatctgggacacggccggcc

SEQ ID NO: 687494 - DNA, 90 bp, Homo sapiens
atttatgaaggacaggcacagctgtggaccgatttgcagtacagggagaaagagtttgcaggcctttcagatatatccatctcacaagac

SEQ ID NO: 687495 - DNA, 115 bp, Homo sapiens
ggaggataagatcaatgccctcattaaagcagccggtgtaaatgttgagcctttttggcctggcttgtttgcaaaggtcggcttcttcaagcggaaccggccacccctggaagaa

SEQ ID NO: 687496 - DNA, 75 bp, Homo sapiens
gtgaactggaaaagatcattgctgagattactcttgtctctgctgctcctgggaaagtgatttgtgaaatgaaag

SEQ ID NO: 687497 - DNA, 80 bp, Homo sapiens
actgaagacgtctgcgtgagaatagagaccaccgagtctctgctttctatccgtcaagatgataaagtcgtgtgcccgag

SEQ ID NO: 687498 - DNA, 74 bp, Homo sapiens
cagccacagcagcctcccaaggagtctgcaagttgttgattatggaagattcccacaagagtaccacgtcagag

SEQ ID NO: 687499 - DNA, 75 bp, Homo sapiens
ctaaaaattatccctactacaggactgcggacaagggctggcagagagaattccctaaattttttacattccgag

SEQ ID NO: 687500 - DNA, 75 bp, Homo sapiens
ctgaaatgtttgacgacactgatggtttgcacaacattctgaaattttttggttattgtaatgatgttgatcggg

SEQ ID NO: 687501 - DNA, 96 bp, Homo sapiens
acttctgagtacatcatttcatgtcatcctgttggcactgatgaagaacccttacaggtgcagcggaactgctgcctgacgctctgcaacttcagc

SEQ ID NO: 687502 - DNA, 82 bp, Homo sapiens
gagtatctgaacggccaggactgctcgcttctgctgacggccacaggattttttatcaagcagaaatgcatcgaacaacgag

SEQ ID NO: 687503 - DNA, 101 bp, Homo sapiens
aaatagaacaatcggagttgcagccaaaaatcagacttcattagaggggtggtagactcggaggatctccctctaaacatatcccgtgagatgttgcaaca

SEQ ID NO: 687504 - DNA, 100 bp, Homo sapiens
gttgccggctcccctctcaggacaacccagatgtgcaacaaagtgcgatggttttgctgttactgctcagtgtagtcacaccttgaataagaaatggaaa

SEQ ID NO: 687505 - DNA, 76 bp, Homo sapiens
tgtcctcatcatcccgtcagagctgaggtacttcgtgaagacaaagatcattccactcagcctgggacgatgggga

SEQ ID NO: 687506 - DNA, 100 bp, Homo sapiens
ggctggcccagcagctgagatcacaggtacaagaagctggaagaccttctggagaagagcttttctctggtgaagatgccgtccctgcagcccgtggtga

SEQ ID NO: 687507 - DNA, 49 bp, Homo sapiens
agaaagtctctcggactttttccaacttttccttccctccatgagaaag

SEQ ID NO: 687508 - DNA, 96 bp, Homo sapiens
ccagtcctgctccttctgcatggaggaggtcattctgccctttcttgggctgtgttcacgatgctctacccatggtaccccaggaccagaaggcaa

SEQ ID NO: 687509 - DNA, 82 bp, Homo sapiens
gcccgtcagaggaatagcagtgtggcagcattagtgaccagaaggatcccaaggatcgaatggttcaggttgtgaaatggta

SEQ ID NO: 687510 - DNA, 82 bp, Homo sapiens
cttgtgggatgtgaaaactctgttactgaaggggggacacagcgattgccacgcgccattggaatgtccctggccaaggagc

SEQ ID NO: 687511 - DNA, 95 bp, Homo sapiens
gccatgtgcaggaccctaacgacaggcgcctccggcccatttacgaatgattacggacctgaagccaaagaacaagatgcgctagtggacagatt

SEQ ID NO: 687512 - DNA, 71 bp, Homo sapiens
gtaatcccagctctttgggaggccaaggtatatgttgtcggtggctatgatgggcaaaacagacttagcag

SEQ ID NO: 687513 - DNA, 74 bp, Homo sapiens
aagtcttcgtttttaccttagtctcggggtgtcaaattgagaaccaggtagatccccaccacctacagtaaaaa

SEQ ID NO: 687514 - DNA, 75 bp, Homo sapiens
ggcggcgggtgaagctgcagctctgcttccgccctgcgctgccagtctcctacctgcaggccgagctggccttcg

SEQ ID NO: 687515 - DNA, 78 bp, Homo sapiens
tcccaatgctgaagtaagattgtcttggaaatactaagttgggtctgcagaaccatagcttccacgcacctgaacgag

SEQ ID NO: 687516 - DNA, 75 bp, Homo sapiens
aaagaagccaacaaagcattgcagaaggccaatgatgaggccaatcagagtgatacaagtgtctccttgtcagaa

SEQ ID NO: 687517 - DNA, 50 bp, Homo sapiens
gcctcatcacccggctgctggagggcgtccgacctccgatcatgaacggg

SEQ ID NO: 687518 - DNA, 90 bp, Homo sapiens
attaaagactgtgttgcattatcaggatcacagaagaactgcagcttcctggggagcagtttcacctccacaggcatcgcttcatactcc

SEQ ID NO: 687519 - DNA, 100 bp, Homo sapiens
ccgcaggctctggtgtgttaccaagaggggattgatctgctcctgcaggttctgaaagggttttcagagaaagatgctgatgaggtgaaaggaatttttg

SEQ ID NO: 687520 - DNA, 100 bp, Homo sapiens
gtcaccgacagggcgattgcagtgcgttccggtggcccacaaactctttaacaacttgaaataaatgtgtggacttaattcaccccagtcttcatcatct

SEQ ID NO: 687521 - DNA, 98 bp, Homo sapiens
gggccacgcacctcgtcaccaaggccaaggtgaatggaagagaatccgaagaagaaaatctcaataaatctgaaataagtcaagtgtttgagattgca

SEQ ID NO: 687522 - DNA, 50 bp, Homo sapiens
gagcagcccagacagcggccacctcaaggactttccgtgacatttctgaa

SEQ ID NO: 687523 - DNA, 50 bp, Homo sapiens
aagatcatcgagcatttcaaacgagacagggcagggcattgttcatgcac

SEQ ID NO: 687524 - DNA, 75 bp, Homo sapiens
ctcctcggcccctggctcctgctcctgggttccagcaacagatagaaatgctttaagttcactctggggaaagct

SEQ ID NO: 687525 - DNA, 96 bp, Homo sapiens
ggaactgttttgtcttcctgtatgacacagacagggctccagggttccttgaaaagaaaacaggtagttaacctatctcctgccaacagcaagcga

SEQ ID NO: 687526 - DNA, 100 bp, Homo sapiens
ctgctgcctgtggcatttattactttgaagtgaagattgtcagcaaaggaagagatggcaacatgtcatggtttagtggcctcctggtccctaaagtgga

SEQ ID NO: 687527 - DNA, 83 bp, Homo sapiens
gggccagctgccctctgaggagatggtcatgacaggacatggatttgattgacatactttggaggcaagatatagatcttgga

SEQ ID NO: 687528 - DNA, 82 bp, Homo sapiens
gaaggaacgaggcaaggagctaaagcagcgtgcgttcagccctggggccccagggagcgccatggcccgcgcacgccaggag

SEQ ID NO: 687529 - DNA, 108 bp, Homo sapiens
aagcaatgaaagaagctggtaagggaggcgtcgctgattccagagagctaaagccgatgacaaatgtagtaggacattctttaggatgtacttggcattccttgagga

SEQ ID NO: 687530 - DNA, 98 bp, Homo sapiens
cctccccacaccaccgaccaggacctggtgaagctctgtcaaccgttctctgttaatggaaactgaagtttgtaagagtttaaggccaaacgtaagag

SEQ ID NO: 687531 - DNA, 90 bp, Homo sapiens
ggggcccggctgctcgggctgaccccacctgagtcctcctgcaaggagaatccttttaaccggaagccatcacctgcagcgtccccagcc

SEQ ID NO: 687532 - DNA, 75 bp, Homo sapiens
ccggaagtcttctcccctgcacttcgctgcaggtactccaaagattcaggtttactcacgtcatccagcagagaa

SEQ ID NO: 687533 - DNA, 100 bp, Homo sapiens
agcgacctcagccacaggaactagagacagcttgctttctgtcgtggcaatgttttgaaactggcaaaatcagaactcttcatcttggcttatacctata

SEQ ID NO: 687534 - DNA, 100 bp, Homo sapiens
gcggatctcatatcttcacttggcaaactcaacaagtccaaaattgaagacattagagcagaacaagagagagaaggtgagaagctgatccgcctccact

SEQ ID NO: 687535 - DNA, 75 bp, Homo sapiens
gcgtgcggctttcgccgcgctattgcttgccagtatgccaccacgggctgttccctgaccctgcaccatacggag

SEQ ID NO: 687536 - DNA, 100 bp, Homo sapiens
cgagaccagaggccgaactcgggttctgacaagatggccgggctgccccgcaggatcatcaaggtagaacgtcatgacatgaataccttaagcctgcccc

SEQ ID NO: 687537 - DNA, 100 bp, Homo sapiens
aaaaagcggatggtggttcctgctgccctcaaggtcgtgcgtctgaagcctacaagaaaggtgatacagacctacttagaacagactggcagcaaccaca

SEQ ID NO: 687538 - DNA, 90 bp, Homo sapiens
aactacctgcactttggggagcctaagtcctggtggagccgccaccaaaatgcagattttcgtgaaaacccttacggggaagaccatcac

SEQ ID NO: 687539 - DNA, 88 bp, Homo sapiens
aactacattgaatatcagaatcttgttgactacataaaggggacccaagtaacagggaggaaagcagatgttattaaggcagctcacc

SEQ ID NO: 687540 - DNA, 97 bp, Homo sapiens
ccaatggcacggaggcctgcgttgaggtcctttggcactgaagaccgtcccacagataggcctgcgccccccagagaggagatttatgagtacatca

SEQ ID NO: 687541 - DNA, 74 bp, Homo sapiens
cgcgaccgagacggcagtgcggcggaagcggtcacatttagggcaggcaaaacataagggatatagccctcctg

SEQ ID NO: 687542 - DNA, 98 bp, Homo sapiens
caacaaggggatcatgggtgaagacacctacccctaccagggcaaggagattccaggtatccattacttggccagccactgcagtacaatcctcctgc

SEQ ID NO: 687543 - DNA, 74 bp, Homo sapiens
tgctccaccaaacacttcagatatggaagctgtgactgtgaatgaaagctggaatgccttagcaaccccatcag

SEQ ID NO: 687544 - DNA, 74 bp, Homo sapiens
ttgaagacttgaattagattacagcgatggggacacagaaggccaaacgtaccaagaaagtcgggatcgtcggt

SEQ ID NO: 687545 - DNA, 74 bp, Homo sapiens
gcagggaggcatagcgcctctctgatcttcctgcatggctcaggccatggttgcttgttatccgggcaatggaa

SEQ ID NO: 687546 - DNA, 83 bp, Homo sapiens
gtggattccaatctctgttgcttcatcccaggaaaggatcaagtagatatagctgttcaagaactccttcagctaaaggcaca

SEQ ID NO: 687547 - DNA, 90 bp, Homo sapiens
ggagcggcccaggagcacgccgcggggagcgcgggcgtccggggctggagtcgcgcaggtgatctgtgaaaatggttcgctattcacttg

SEQ ID NO: 687548 - DNA, 48 bp, Homo sapiens
gttcgtgcattcatcctccataagtccgtggtggatgactggattgaa

SEQ ID NO: 687549 - DNA, 73 bp, Homo sapiens
caggacccgaagcctaaattccaggagggtcaaaatgcagatcttcgtgaaaacccttaccggcaagaccatc

SEQ ID NO: 687550 - DNA, 100 bp, Homo sapiens
tatattctctgtactatgtcgattcgacagggaaaagttttcatttaccgagggaaagagtatgagcgccgggaagattttgaggctcggctcttaactc

SEQ ID NO: 687551 - DNA, 98 bp, Homo sapiens
tacaccaacgcggtgcgcgaccgggagctggacctccgggatgctcgtggtccccagcatccttgagccaccaggagtgagggctgctgctccctgag

SEQ ID NO: 687552 - DNA, 75 bp, Homo sapiens
acagtattccaaccctcctgtgcagggagaagtgatggaggatgcttaaatggcagaggccaagcccagactcca

SEQ ID NO: 687553 - DNA, 108 bp, Homo sapiens
cgcggtgttcatctccgacatccggaactgtactaggttttgacaagcttgcatcatgcgtgagtataagctagtcgttcttggctcaggaggcgttggaaagtctgc

SEQ ID NO: 687554 - DNA, 74 bp, Homo sapiens
cgggcgagaagccctacgagtgcaacatctgcaaggtccgcttcaccagaataccctctaccatctgctttggt

SEQ ID NO: 687555 - DNA, 75 bp, Homo sapiens
ggggcctggctccgggcagtgcggttcctacaacagcagccagtacccctgatgccgttgacaagtatctcgaga

SEQ ID NO: 687556 - DNA, 90 bp, Homo sapiens
tggctgcaaccttagcgacatcaggaagaacagggtcgaggatcgagtttgccgggaggactcatatcactctgtcgtctcatgtgccgc

SEQ ID NO: 687557 - DNA, 134 bp, Homo sapiens
agcccgtggtcctgatgccaacagtgtaccagcagggcgttggctatgtgcccatcacagatgaggacggggacttggttgccttttccagtgacgaggaattgacaatggccatgtcctacgtgaaggatgac

SEQ ID NO: 687558 - DNA, 95 bp, Homo sapiens
tgctgcagaggatggcgtgcgaggtcgccgcggggctggccgccatgcacaagctgcacttcctgcacagctcagtcactaaaagaatttgcaag

SEQ ID NO: 687559 - DNA, 82 bp, Homo sapiens
agatcaacgcgagcaagaatcagcaggatgacggactacagtggtagtggaggccgaagcggcgggaacagctacggctcag

SEQ ID NO: 687560 - DNA, 75 bp, Homo sapiens
tgagggctgtggtgcggcaccggcgagccagcggactgccaaaaagagcaagatcctgtccaaggaagaacagaa

SEQ ID NO: 687561 - DNA, 100 bp, Homo sapiens
caaagatcccatacgtcaccttgagtacagggggcatcgagactttggctgccgtcttctctaatgaagagcttcgaaacttgtctttgtctggccatgt

SEQ ID NO: 687562 - DNA, 80 bp, Homo sapiens
ctggagtgaaggtggctacgaggttaattatagaaaatgccaagtaggaaatttgccgatggtgaagtggtaagaggtcg

SEQ ID NO: 687563 - DNA, 96 bp, Homo sapiens
aaatcccacagaggcatctgaggtgtggcagaaaaaacacagcttctgaaattgaatgtacctgctacctttatgcttgtgtctttagacgaagga

SEQ ID NO: 687564 - DNA, 87 bp, Homo sapiens
gcagctggcaaatagtgctcatggatacgttggagcagacttgaaagtcttgtgtaatgaagcaggcaggagaggaaaacaagtgca

SEQ ID NO: 687565 - DNA, 100 bp, Homo sapiens
aaaaaaccaaaattatcgccaagattcagcaagtgaatgaaaactttgccattgatttgatagcagagcagcccgtgagcgaggtggagactcgggtgat

SEQ ID NO: 687566 - DNA, 96 bp, Homo sapiens
tgtcaaaaagcctaaaagcatgcagtgcaaagtgatacttctcgatggatcagaatatacctgtgatgtagaggttgaaatgttccttcttgccta

SEQ ID NO: 687567 - DNA, 134 bp, Homo sapiens
gatcgcttctggcagaccgaaccggcgctcctgcccccggggtgacgcgcagctcccagccggacacaggcctgtactaccaccggtacctccaggaggtcatcgatgtactggagacggatgggcatttccga

SEQ ID NO: 687568 - DNA, 83 bp, Homo sapiens
tggggcccgaggctagcatctctcgggagccgcaaggcgagagctgcaaagaccctctttcccagctgcccgctcctcagcac

SEQ ID NO: 687569 - DNA, 100 bp, Homo sapiens
accaagtgaagactttgaacgcactcctcagagtccgactctcccacctgctaaggcaaatggcattaaaattggccctcagcatgctgctaccaatgca

SEQ ID NO: 687570 - DNA, 50 bp, Homo sapiens
tatccccacctctgatgattcctcaggtctataagaaggagaaagctcga

SEQ ID NO: 687571 - DNA, 100 bp, Homo sapiens
ccataccatggcccggatccccaagaccctaaagttcgtcgtcgtcatcgtcgcggtcctgctgccaatggcccactgcgtgaccttggttcagctgtcc

SEQ ID NO: 687572 - DNA, 100 bp, Homo sapiens
cccgagcacgccggccccgcgcgcgcctcgaggccgagtcaagactagacgcttgaagcaaagctgccatcccagaagacgacatgctctcagcaacccc

SEQ ID NO: 687573 - DNA, 75 bp, Homo sapiens
tcatgtctggtggctccgcggattataacaggtcaaaaggctgagtttcaaattctggataatgtagactcaacg

SEQ ID NO: 687574 - DNA, 75 bp, Homo sapiens
ttcactggggaacttttgccttagcaaatgagtttgcagaaaaaacttcagcatgtgccaggaacacaacctcac

SEQ ID NO: 687575 - DNA, 101 bp, Homo sapiens
aagtgcagcgcctgtaatgtttggcgagtctgtactataaccaagagtggacattgtgggatcgctttgaggtacaagggctgcagcctaatggtgaggag

SEQ ID NO: 687576 - DNA, 82 bp, Homo sapiens
tgctcccctcgtcgcagtttccagcccgacgagcttgttttgtcccggactcggctcctgctccagcccagcccccagagag

SEQ ID NO: 687577 - DNA, 82 bp, Homo sapiens
ccaatcttgatgctttaatacagaaccagcatggtatgatgtgattgctcaagctcagtcaggtactggcaagacagccaca

SEQ ID NO: 687578 - DNA, 99 bp, Homo sapiens
gcagccatcatacaacgtcaagtctgtctgttccagggagcgaggcagtggtgaaatgacaatggatgctctgttggctcgattgaaacttctgaatcc

SEQ ID NO: 687579 - DNA, 115 bp, Homo sapiens
caaggacagcgcgaggtccgcgcagcccagcgcagccatatgggggctccggaggtggcgcccaggctctgagctaccctaggtctgcagactagcgggcattggccagagacat

SEQ ID NO: 687580 - DNA, 80 bp, Homo sapiens
gaattcacacagagccacctagtacgaattggagcaatgttggcttatacacctctggatgagaagagccttgctttatt

SEQ ID NO: 687581 - DNA, 96 bp, Homo sapiens
aaagaagcaattcaacaacagcaaaaccagctggtatgggtttccgagggaaaggtttatgctggattgaatattttttttggaatggcaagcatt

SEQ ID NO: 687582 - DNA, 80 bp, Homo sapiens
aggccgacaagagccacccggagcagccctgcgcttgctccacatcaggccccaggagctgccagcatgtaccagcctgc

SEQ ID NO: 687583 - DNA, 100 bp, Homo sapiens
cacgaaaatcaaattcaggagttcaagaaacgagatgcacaggcttgaccactatgctatcatcaagtttccgctgaccactgagtctgccatgaagaag

SEQ ID NO: 687584 - DNA, 75 bp, Homo sapiens
cttaaatgaagccactgattagcaatttaaagatcctctccaagtttgcgcgataacaatatctcagaccgaggc

SEQ ID NO: 687585 - DNA, 90 bp, Homo sapiens
tcgcagtggtcgcttcttctccttggtaccttgtggtctataatcctttagaacaagaccgaatctcgttggtctcagtctatgtgagtt

SEQ ID NO: 687586 - DNA, 75 bp, Homo sapiens
tctgatattgcaccttcacagcaacaaggatttccagatgtgacttgcactcagaagatcagtggtcaacttcag

SEQ ID NO: 687587 - DNA, 80 bp, Homo sapiens
gtttcacagaggatcaggcccaggatatccagcggagcctagagagagtgcctccggagccagcgtggtggccatagaca

SEQ ID NO: 687588 - DNA, 83 bp, Homo sapiens
accagcaacaatggatgcagtcattccagcaccaacaggatccaaaaactggcgatggaatatgagaggagccctctggaaag

SEQ ID NO: 687589 - DNA, 100 bp, Homo sapiens
gtccaacgtctctgatgcggtggctcagagcacccgtatcatttatggaggacgagattgaggagctgcgggccgagatgctggagatgcgggacgtcta

SEQ ID NO: 687590 - DNA, 74 bp, Homo sapiens
aatgaggcgggcagcactgcgaggacagttatgggatggatgggaaggttaatcagccccgtctcactgcagac

SEQ ID NO: 687591 - DNA, 96 bp, Homo sapiens
aaatcctgtgcaagctcagcttggagggtgatgaatactctgaagatagtaactccgagccaaatgtggatttggaaaatcagtactataattcca

SEQ ID NO: 687592 - DNA, 100 bp, Homo sapiens
gacagcccctggttcagaggcctttagcaaagtcgccaaaagctggatgaacttgaaaaggactccctggaggaaaagcggaagcggcagcggtctgaac

SEQ ID NO: 687593 - DNA, 116 bp, Homo sapiens
tcctacctgaacagcagtatcaattcagcctggagtgagcacagcttggatccagaggacattcggacgccctgctggcggacttggagtctaccacctcccacatctccaaacgg

SEQ ID NO: 687594 - DNA, 74 bp, Homo sapiens
aagatgagcagtttctgggagccgttatgccaaggcttggggaaggtgtggctcattgactttaatccatttgg

SEQ ID NO: 687595 - DNA, 100 bp, Homo sapiens
cctggcctgggcctgaagtgagtgagaggcacatgaaggtgctggagaatctggtaaaagcaccattgtgaagcagatgaggatcctgcatgttaatggg

SEQ ID NO: 687596 - DNA, 100 bp, Homo sapiens
ctgacccttttcaagaggaaggatgaaaactctacataggaacacgatgtgaatggaagaaacctgtcattctagttcttctggagctcaacttcttgcc

SEQ ID NO: 687597 - DNA, 75 bp, Homo sapiens
gaccaccaggacctccagcaaggttcttgattattacagacctctttctgaaaagcccggaattggtacaagcca

SEQ ID NO: 687598 - DNA, 100 bp, Homo sapiens
tgagtggttgtgtggtcgcgtctcggaaaccggtagcgcttgcagcatggtgaagctcgtgtgtggagtgccacggtacaatcagacgacagatggacag

SEQ ID NO: 687599 - DNA, 50 bp, Homo sapiens
ctcagcctcagagtcagatgcaggagtaaccagagagcacagagaaatgc

SEQ ID NO: 687600 - DNA, 113 bp, Homo sapiens
aattgtgagctttttgagcagcttggagagtacaaattccagaatgcattcatttatgagatagcaagaaggcatcccttcctgtatgcacctacaattcttctttgggctgc

SEQ ID NO: 687601 - DNA, 82 bp, Homo sapiens
gggtcccgattgctgcagccgcttgtcagtgtgatgaagattggcacccaggctgtcctggaggaccacagtcagatgaggc

SEQ ID NO: 687602 - DNA, 49 bp, Homo sapiens
gagacaacaccgagtatgagaatttcagtacaaaacggttcgattcatc

SEQ ID NO: 687603 - DNA, 101 bp, Homo sapiens
ccgtgttgacgtggagagataaagccgagcactgtgaccgattagcactgctccaggtccgggctatcctccagcagctaggtctgaatagcacctgcgat

SEQ ID NO: 687604 - DNA, 100 bp, Homo sapiens
gaccatgggagtgatgttcacgcctctgacagtgaaatacgcgtactacgacactgaacgcatcggaggtgcataaggcaaatccaatacgcaagtacca

SEQ ID NO: 687605 - DNA, 100 bp, Homo sapiens
tccaggtcttcctggtccaaaggaattacatgaacgacagccttcgcaccgacgtcttcgtgcggttccagccagagagcatcgcctgtgcctgcattta

SEQ ID NO: 687606 - DNA, 97 bp, Homo sapiens
gaggaagtagaagtgctgagtaagccgaggtagtaagcattaataatgtctttcatctttgagtggatctacaatggcttcagcagtgtgctccagt

SEQ ID NO: 687607 - DNA, 75 bp, Homo sapiens
aaacgagaggctcaccgcagtcgtgcaggatctgaaggagactaaacttcagtggctctgtgaggaactgaaaga

SEQ ID NO: 687608 - DNA, 83 bp, Homo sapiens
gagcatcttcgtctgcagtgattggcagctcctgcgggaaggcaacagcccccaggggagcaaccagggagtcaaaatcacac

SEQ ID NO: 687609 - DNA, 49 bp, Homo sapiens
ctggcgtgttagcggtggtcagcagaaatgcttccatcatttcttcaga

SEQ ID NO: 687610 - DNA, 75 bp, Homo sapiens
gccagaagttgccacccttttgccagcaggggtacctgaggatgcagggactcgaagcaatgaggctccccaaga

SEQ ID NO: 687611 - DNA, 73 bp, Homo sapiens
cggggcaggggcggaggcggaggcagaggtggaggcgctttgaaagcaactgcatgtccagccagacgaagaa

SEQ ID NO: 687612 - DNA, 75 bp, Homo sapiens
cgttcccttacccgtcaaagtctgcttcacgtgtaacaggactctctttagaggccccaaccgtggggaaaggac

SEQ ID NO: 687613 - DNA, 83 bp, Homo sapiens
gggctgcagacacagcaggctgagcagctgcaaacccccgaaaaagacttacagattccagtctgctgttagatgattattca

SEQ ID NO: 687614 - DNA, 93 bp, Homo sapiens
gtcgagaggaccatcctgggtgctggccctgtgctggagggagttgctggggatgttgatccagccaagaatactgaggcagttggatgaaag

SEQ ID NO: 687615 - DNA, 111 bp, Homo sapiens
ccgtggactaagaacgcattgccgccggtcctgaccaccgtgaacggacagtcccccccagatgccttcaattaagttgcagagttctgatggagagatatttgaagttga

SEQ ID NO: 687616 - DNA, 93 bp, Homo sapiens
gaggaaatttaagaccatttatatgttcaactgatgaaaacactgacccttctcaggtgcagccagagagacactagcccactgatggacgga

SEQ ID NO: 687617 - DNA, 90 bp, Homo sapiens
ctgggttggagttactggtatgccttggtttccatgttgctgaggccatggagattcccagagctggtcacaccgaccgctctcagggcc

SEQ ID NO: 687618 - DNA, 50 bp, Homo sapiens
tctggacaaaggaacaggtatctcagtattaattttaaagacccacagtt

SEQ ID NO: 687619 - DNA, 134 bp, Homo sapiens
ctgtacatagattttggtggaaagtttcattgtgtatgtagaagaccagaagtggatggagagtgtcatggagaaactccagctgggcccagagattctgcagcgggaaaatccaaggcttatttatgccaggc

SEQ ID NO: 687620 - DNA, 90 bp, Homo sapiens
gcgcagccgtgctggacctgggcagcgaggccagaggctcttacaggaggagaatgaagagcttcgccggcgcctggcctccgccaccag

SEQ ID NO: 687621 - DNA, 100 bp, Homo sapiens
cttgaaatcaaggaatgtagaaatcaggaataagacctggaagtttgttgaaggtctccctattaatgatttctcacgtgagaagatggatcttactgca

SEQ ID NO: 687622 - DNA, 100 bp, Homo sapiens
ccggcacagaccagagctgattgagtatgacaagctgaggaaggacgagaaggaacagctgaacgagtacaagggccacctctcaggcctggccaagcgg

SEQ ID NO: 687623 - DNA, 50 bp, Homo sapiens
gaaattacaagaggctgccaggagttgctggttgagaagacaactgactc

SEQ ID NO: 687624 - DNA, 74 bp, Homo sapiens
ttatctggtgacagaatatgctagtggaggggaaatatttgtggctgacaagattttgaaaaagaaagaatacc

SEQ ID NO: 687625 - DNA, 100 bp, Homo sapiens
acaatatgtgtcgcaaccattagaaagggttgacatgatgaacaatcggtttcggaaggatatgatgaaaaatgctagtgaaagtaaactttcgaaagac

SEQ ID NO: 687626 - DNA, 100 bp, Homo sapiens
ctgggcaaagaaagtatccctttgttgaaatcacaaagattagacacctttttagataggtgttcttcagcaccactgacaacacggttctgacagtatt

SEQ ID NO: 687627 - DNA, 75 bp, Homo sapiens
gttgaatgccagccaccagccatgggtgagttgggaatcagactcttgagttgacagctggcctatggtttctgc

SEQ ID NO: 687628 - DNA, 98 bp, Homo sapiens
gaacttcctgatctctctcgctgtgagacatgtctgagactcctgctcagtgtagcattaagagtaattccctcctggtcccagacagtctaagaggc

SEQ ID NO: 687629 - DNA, 100 bp, Homo sapiens
agccgctgcccgaactcccggcccgaactccagctttagccagggccctctgaaggatgcacccaacctcatctgcaccccccatgctgcatggtacagc

SEQ ID NO: 687630 - DNA, 95 bp, Homo sapiens
tctccctgccctccttcaagattgacttctcggaatggaaggatgacgagattctgtacacaccttgacatgtgcaatcatgctgcttaacacgg

SEQ ID NO: 687631 - DNA, 98 bp, Homo sapiens
cctttacttttacctacgttggcggccccagaagcattagtcacaggagggagagaaggaagaggctgttcggatgtggatcccgggatccagggtgt

SEQ ID NO: 687632 - DNA, 50 bp, Homo sapiens
gtgagactgcaggagatgtgggccggttggacgtgataagtatgagcctg

SEQ ID NO: 687633 - DNA, 90 bp, Homo sapiens
ggtttatgccctagatcatgaccctgtggaaaataaggttggtgctatgtaatgacatggatatgaacgagctgcctacgaacctccccg

SEQ ID NO: 687634 - DNA, 82 bp, Homo sapiens
gacagcctcatcacccggctgctggagggttagctttatacgtctacgaatatttactgcacgtaggagcacagaaatctgc

SEQ ID NO: 687635 - DNA, 90 bp, Homo sapiens
ctatatgctggcaacacgcctcttccaggacaggctagcttgtcactttctgcaaaggtttccctcagggagcctcctgctgccaggcac

SEQ ID NO: 687636 - DNA, 100 bp, Homo sapiens
aatgacagctgtgataaaaaaaaaattcatctgggcggtatctggaacttggtatgtcttactgaaagaaagaaacatgcttctaaccctagagcaggag

SEQ ID NO: 687637 - DNA, 102 bp, Homo sapiens
gactttgagcctcatgacaaaagaggtgatgacacatctccacgtgattgaagaaaggaggaaccaaagcctctctctgctctacaaagtaccttatgtagc

SEQ ID NO: 687638 - DNA, 100 bp, Homo sapiens
cgagagccactatcccgacgtgttcatgcgcgaggcgctggcgctgcgcctagacctggtcgagtcccgagttcagactgtgagctgcttgtccccatcc

SEQ ID NO: 687639 - DNA, 97 bp, Homo sapiens
aaaaggaagaggagaaggaaattgtcccgaatccctgcagctgagcgtgagattgtccgggacatcaaggagaaactgtgttatgtagctctggact

SEQ ID NO: 687640 - DNA, 75 bp, Homo sapiens
gcttccacatggtgctgcccacctggcccggaacccccggcagcggggagtacatcaagacctggcggccacgct

SEQ ID NO: 687641 - DNA, 51 bp, Homo sapiens
gggactaaaggatcttcttcaaaagtcacctactgccaccttcgaaaaaca

SEQ ID NO: 687642 - DNA, 100 bp, Homo sapiens
ttgttaaggattccaagtaactcttatttgtctttttgctaaagaacatctgcagcacatgacagaaaagcagctgaacctctatgaccgcctgattaac

SEQ ID NO: 687643 - DNA, 75 bp, Homo sapiens
ccagcttccagttagtggatatagcacaccatccccagccagtatgcctgtgtcaagatgaggtcacggacgatt

SEQ ID NO: 687644 - DNA, 83 bp, Homo sapiens
atccccagtggagccggagtgcgggcgcgccccaccaccgccctcaccatggtgtaatggataggtaacagagaagacctcgt

SEQ ID NO: 687645 - DNA, 99 bp, Homo sapiens
tggatctacattataccaataacgagggcatggtgctgatgtgaaatgtgtagactggcatccaaccaaagggttagttgtttcaggaagtaaagatag

SEQ ID NO: 687646 - DNA, 98 bp, Homo sapiens
ctggatgccgaagtcctggaggtgttccacccgacgcatgagtggcaggcccttcagccagaagctccaccatgaggcgaggtggatggaggaagcga

SEQ ID NO: 687647 - DNA, 73 bp, Homo sapiens
agctgtagtgggagtgttccaggattcgccttgattcagtttaaggagaaagtgctgtggaccgctatcaccc

SEQ ID NO: 687648 - DNA, 100 bp, Homo sapiens
ccaacatggcggagctgacggtggaggttcgcggctctaacggggctttctacaaggtgtattgtacgagcattgaaagatccaaatgcatttctttttg

SEQ ID NO: 687649 - DNA, 98 bp, Homo sapiens
tggaaacctcctacctccgttgaaaggagagccagttactaacttggtgtcggttggtggaaatatgaattctgctatggcaaacatgtacatcaata

SEQ ID NO: 687650 - DNA, 50 bp, Homo sapiens
gacgaatgcctcaacaaagttatcaaactagatacactgtcagatccttt

SEQ ID NO: 687651 - DNA, 75 bp, Homo sapiens
agcaaaggcaagaaggcaacgacgttccatctgtggaaggacctaccaaccagggccatgttctgcaacgattta

SEQ ID NO: 687652 - DNA, 75 bp, Homo sapiens
gactaaatacccgtgtctgaagtcttcaggcgagctcaccacatgctacagatggagttcgctcttgttgcccag

SEQ ID NO: 687653 - DNA, 75 bp, Homo sapiens
gctcctgcagctcgtcagcccatttctgggggaggagtggatgcgggccatccagatggtcgccaacagcctcaa

SEQ ID NO: 687654 - DNA, 74 bp, Homo sapiens
tttcgatctccgccctggggtcattgtcagggtcatctttctgaaggattggttactaaatggtacagatctcc

SEQ ID NO: 687655 - DNA, 103 bp, Homo sapiens
tttgtccccacccagcactgatgatattataaagtgcagtagacattgttgcaatcatgatcggcaatctgaaaggcacaaaaattctgcaatctattcaaag

SEQ ID NO: 687656 - DNA, 83 bp, Homo sapiens
ctcagcaagaacgggaacaaaactctgctgaaggaattgaagaatctgcagcagcaatacttacagattaatcaagagatcac

SEQ ID NO: 687657 - DNA, 98 bp, Homo sapiens
ggttacaagcagcaagtgcgcggttggggccactgcgaggccgttttaggttggcattgctccagcatcatgccctgtaatttctgatgaagatagtc

SEQ ID NO: 687658 - DNA, 87 bp, Homo sapiens
gaagaggagcgccagatggtggaggaatacacttatttatgaacactgatagccattgggcgatacagcatgacaatagagactgtg

SEQ ID NO: 687659 - DNA, 50 bp, Homo sapiens
gaaggagtttgagaccatcgagagagatgttgatgcctaagaagaaccgg

SEQ ID NO: 687660 - DNA, 100 bp, Homo sapiens
actctcctggtccaaggacacctacagccccgacgaacatttctgggtgacactcaacaggattcccgggcaaacttgaagataaatcttttgactccag

SEQ ID NO: 687661 - DNA, 83 bp, Homo sapiens
ccagcagctgtcgccgccgctctcaggcagctgacaccctagctgtacgccagaagcggcggatttacgacattaccaatgtt

SEQ ID NO: 687662 - DNA, 80 bp, Homo sapiens
taacaacctggatcttcgaacttttgacacggctttggaaacgacgtcatgtgttaggaaaatgttggggcttttcagga

SEQ ID NO: 687663 - DNA, 100 bp, Homo sapiens
tggaagcaatgaggacagcttgtgaaggcgctaaggcacatatactcaggggtcctcataaacagacataccagggtctagagagtctagaagaagtctg

SEQ ID NO: 687664 - DNA, 98 bp, Homo sapiens
ttcggtccttccgaggaagctaaggccgcgttggggtgagaccctcacttcatccggatacatgatcccttaattcaggctcaggctgaagaactgac

SEQ ID NO: 687665 - DNA, 96 bp, Homo sapiens
gcagagcatggactgttaaatcttgcacttcttctgagtgaggttatggagacagaacggatgatttatctggtgacagaatatgctagtggaggg

SEQ ID NO: 687666 - DNA, 82 bp, Homo sapiens
tcaatatctgtcttcggtggactccttcggcagtccacccaccgccgccgcctcccagacctttggggggcctgtcttgctt

SEQ ID NO: 687667 - DNA, 82 bp, Homo sapiens
aaaatgaaacaagcctttgctgaattggagagctgaatgtgacagtgatgataacatgggtgccaaaaatacttcaatagga

SEQ ID NO: 687668 - DNA, 75 bp, Homo sapiens
ggggatccctccagaacagccccaccagaggaccctagagcacatggattgggccgtggaacaggcccacttcgc

SEQ ID NO: 687669 - DNA, 90 bp, Homo sapiens
gcattggctcaggtcttctgtgaggaatctggattgtcacctttgctgcaaaaaattacggatggagtctcgctttgtcgcccaggctgg

SEQ ID NO: 687670 - DNA, 82 bp, Homo sapiens
gtgggcaccaaaacgcaggacgagatttttaatccccacttccaccacaaccccgggaacgggtaaaacgacatttatcaga

SEQ ID NO: 687671 - DNA, 90 bp, Homo sapiens
aatgatcatcaaacagctatggtgatgattagagacatactaatgtacatggtacgcaataactgtttggtattttgatgcagatgagag

SEQ ID NO: 687672 - DNA, 100 bp, Homo sapiens
ctgcgcatccccgcggacgccacagcgctcacgtccctcgttccagccacggcagagccccctgcagagacccccgcagagatcgtggatggcggcgtcc

SEQ ID NO: 687673 - DNA, 98 bp, Homo sapiens
ccgaacccagcattttcggcaaccgctgctggcagttttgccaggtgtttgttaccttgaggctttctcagaaatggcaagttatcaaccaaaggagc

SEQ ID NO: 687674 - DNA, 83 bp, Homo sapiens
cggcggccgctcccttccccgcgcagccccgcacggcccgggcccaccgccaaatcttaaaggcagaccacgcaaaaagaaac

SEQ ID NO: 687675 - DNA, 75 bp, Homo sapiens
gttactttgctgcttgcacaacagatacaactatgaatagttctttgccaaaacctattgatgtacaagtcatta

SEQ ID NO: 687676 - DNA, 76 bp, Homo sapiens
atgctgtccaaacttaaacatgtgacctacggcatgatgagctccaatgtgtactactacacccggatgatgtcac

SEQ ID NO: 687677 - DNA, 89 bp, Homo sapiens
gaagaatattcccaagtccttcacccgggcatccggagactctggcagcgggctcggggacgcccgggagcttctcagggaggagacgg

SEQ ID NO: 687678 - DNA, 90 bp, Homo sapiens
caactattcgcggagctggaatgactggcaacccagtaagagatgctaaaaaccttgtacctatggaccccaatggcctgtcagatccct

SEQ ID NO: 687679 - DNA, 126 bp, Homo sapiens
ccgtcctccaccgtttcctccaggacagcacctagtcgtggccggaggagtctcagagctgtcagaaagaccctctttcccagctgcccgctcctcagcacccgaagattcgcctgtacaacgcag

SEQ ID NO: 687680 - DNA, 87 bp, Homo sapiens
gagactcagaatcgaatctcttctccctccccttcttggttttaacgtggaaactgtagaatataaaaatctaaaattcactatttg

SEQ ID NO: 687681 - DNA, 82 bp, Homo sapiens
gcggaagaaaatacaaatcacacgcataatggatgaaaggaaccgacagcatttacagccgaacaataccagcaacatcaac

SEQ ID NO: 687682 - DNA, 100 bp, Homo sapiens
ctagctgcatgacagtccatgacaaggtcctccaaaagctggggaaagctgatgagacaaaagacgaacagttcgaagaatatgtccagaacttcaaacg

SEQ ID NO: 687683 - DNA, 100 bp, Homo sapiens
gacggagcttgatgaagaaatggagaatgaaatttgcagagtatgggatatgtcaatggatgagtacaaggtgaatatcttaaccagacttgccgcagaa

SEQ ID NO: 687684 - DNA, 100 bp, Homo sapiens
cgacaaacaccacgagaattccgcagcccacacggtatgatctcgtgaaaccttgagagaaactgaatgacgaatgaaactattgttcctgtttcacaca

SEQ ID NO: 687685 - DNA, 96 bp, Homo sapiens
agtctgcccatcttccaagcgcgggggcaactgttggcccagctccgaaacctggacaacgcggtcctcatcggaatgatgagaagacagcagctg

SEQ ID NO: 687686 - DNA, 100 bp, Homo sapiens
cgtgcatgaaccaaacccacttcgttcaagacaggtgtttaagcttcttcaccaaaggacatggatgaaaatgaaagcaaccagtctctgatgacaagca

SEQ ID NO: 687687 - DNA, 74 bp, Homo sapiens
ctcccaaggtgctgggattacaggtatctgtaattcttgcccaccaaacaagcctgcagaatctgttcagtcaa

SEQ ID NO: 687688 - DNA, 100 bp, Homo sapiens
acgtccatcgaggagcggatcctgcgcatcactggctactatggctaccagccctgggcagcgagctgcaaaagatgaagtggcacacactctaactgaa

SEQ ID NO: 687689 - DNA, 100 bp, Homo sapiens
caataagaagagaagatggacagtttcagtgcattacaggtcacccctcctaatttctcagtgtcacaagtgcccaacatgcccagctgtccccaggcct

SEQ ID NO: 687690 - DNA, 90 bp, Homo sapiens
ggggctgctcctggaggagctacgcaggatcgttaactgaagacaatatgcaaaattctcacatggatgaatacagaaattctagtaatg

SEQ ID NO: 687691 - DNA, 60 bp, Homo sapiens
aaaatgtcaaggcatgaaatccaagatccctgggtatcagtatgtgtcacctgaaggcaa

SEQ ID NO: 687692 - DNA, 100 bp, Homo sapiens
gagacactgccaagcagccttagccctagtgtagagtgccggtggtggtgtgcacattgagccccggtatagacagttcccccagctgaccagatcccag

SEQ ID NO: 687693 - DNA, 100 bp, Homo sapiens
cagtggcgcaccatctgaaaacaacatcatgcagtggaatgcagttatatttgggagctgatggtacacacatggatggtgatcaaattgttgtggaagt

SEQ ID NO: 687694 - DNA, 74 bp, Homo sapiens
ggttcccgagttgctgcagcagcaggaggaggaccgcagcaagggcaccagaactagcacctctgaaaagtaaa

SEQ ID NO: 687695 - DNA, 100 bp, Homo sapiens
ggggcggtggctgtgctagacttcattcactactgcagagccaccgtgtgctgggaactaaagcagtatcctggtgtgaaccagctatcctccagtatag

SEQ ID NO: 687696 - DNA, 80 bp, Homo sapiens
ccctgtgggtgctgggcctctgctgcgtcctgctgaccttcgtacctggagtagaacagaaaaattattatgtctgtgtt

SEQ ID NO: 687697 - DNA, 51 bp, Homo sapiens
atgatcgaaccacttgtccctgaagaggacttaaccaccaccatgtcgagc

SEQ ID NO: 687698 - DNA, 100 bp, Homo sapiens
cggcgcggtcgttgtcgcattgctctcggccgcactcgcgctgtacgggccgccactggacgcaggttgcccgaagctcagcagagagtcggaggctgct

SEQ ID NO: 687699 - DNA, 97 bp, Homo sapiens
cccgacgagctggagcgcctgtcaggctgggaggaggaggaggagagctggttgaaaggattgttgacaaaaggaaaaataaaaaagggaagacaga

SEQ ID NO: 687700 - DNA, 100 bp, Homo sapiens
taagatcatccacagagatctgaaggctggcaacattctctttaccttagatggagatatcaaattggacttaattcagtgcacaaatgagatgaatgtg

SEQ ID NO: 687701 - DNA, 99 bp, Homo sapiens
agccgctgggctcggaggactcggagtcggagggcttggagttccaggtgttgggggccttggagggagcgctgacccagctgatccagctctatcatc

SEQ ID NO: 687702 - DNA, 98 bp, Homo sapiens
ttctaaaaagaggcgaaaggaagcaagcagttcagaagagccaaggaataaacatgcaatgaacccaaaagggcttggacttaaggatcagcaggaga

SEQ ID NO: 687703 - DNA, 83 bp, Homo sapiens
gcccttgttcccccaaatgtctgactctgactctcggactgagaaacgcaaggctctgccaaggctgagaatgacaaacatct

SEQ ID NO: 687704 - DNA, 50 bp, Homo sapiens
agcccccgacgcacaaatatgtccggtacatgtcccagagcaagcacacg

SEQ ID NO: 687705 - DNA, 98 bp, Homo sapiens
agagctcatctggaattttgccgatttcatgactaaccagtttggtagctggcagtgttgtgatggcttttgaagaagtatgcccggacagaatagat

SEQ ID NO: 687706 - DNA, 74 bp, Homo sapiens
tgaccttcatcacagacaacagcctggtggcagcggccctggtatgcgtccaccactaggcttaagagaatttg

SEQ ID NO: 687707 - DNA, 100 bp, Homo sapiens
cgtggctatgccttcatcgagtacgaacacgagcgagacatgcactacaatgcagatcttcgtgaagactctgactggtaagaccatcaccctcgaggtt

SEQ ID NO: 687708 - DNA, 100 bp, Homo sapiens
gaacgattgggctgagcagaggacgacatgttgcttttcgtggaggcatgaagaccccgtttggaaaggcagctgcagggcagcggtccaggacgggcgc

SEQ ID NO: 687709 - DNA, 100 bp, Homo sapiens
gttagtattgacaactggtgccggagggacaaaaagcaatgcaagagtcgctttgttacacctttcaagtgtctcgagtcgttcaccagacaggtgttat

SEQ ID NO: 687710 - DNA, 142 bp, Homo sapiens
ggcgcggacgcgcagcatggcggtggaggacgaggggctccgggtcttccagagcgtgaagatcaagatcgatcgcccaggaccacaccgcagcgtaactgcaggcctctcagcgaaaaagggggaaagcaaagacccgggt

SEQ ID NO: 687711 - DNA, 101 bp, Homo sapiens
gggaccacatcaaagacagctttcacagtttgcgggactcagtcccatcactccaaggagagaagagtatgatcggttgggcttcctcctgaatctggact

SEQ ID NO: 687712 - DNA, 100 bp, Homo sapiens
ccgagttatgcccaccctccaactttgcgacggaaatgtgtcatcgaaagccagagtctgtagaagaggcgacaccagggcttccaaatgaacaaccgaa

SEQ ID NO: 687713 - DNA, 75 bp, Homo sapiens
ttgtacagaaattgaaaggcttcaaagctagcaggacacattcagctaacgtattttagcaggtggagtgaggtt

SEQ ID NO: 687714 - DNA, 73 bp, Homo sapiens
ttcgacaggtgtgcaggtttcggcacatggagattgataagctttgcatcgtccctatggttgtgatgttgaa

SEQ ID NO: 687715 - DNA, 75 bp, Homo sapiens
ctcagctgccacctgcctttgacctttttgaagcctttgcaaaaaattttgattcagctaaagttccatcagatg

SEQ ID NO: 687716 - DNA, 98 bp, Homo sapiens
gcacgagccaagcatatggaaatgtctctaaaagtatataaagatgaagcgcagctgtataaagaagagcacctgaggaatcggcagcaccctcactg

SEQ ID NO: 687717 - DNA, 83 bp, Homo sapiens
tgattaagattaacttcaagttggaacgaatgatcacacactttgaaaggtccaaaatggagtaaggaatgggaagatttgca

SEQ ID NO: 687718 - DNA, 75 bp, Homo sapiens
aaacaagtgtgtgcatctggctgttagaagaattcatgctcatccgggtacaatgactcttcttgcttttcacct

SEQ ID NO: 687719 - DNA, 75 bp, Homo sapiens
cctgggccagcctgacctccccaaggagatggcctctctgtgagctacctgtgcaccctgcctccggctctcctg

SEQ ID NO: 687720 - DNA, 130 bp, Homo sapiens
cctagctgtacttgcctcatagctggtgaaggattcttctgaacccccaccctaccccctaaaggttcagcagcgtggctggaacgcctgagatccaggaactgaaggcggctgcagaactgaggtccag

SEQ ID NO: 687721 - DNA, 100 bp, Homo sapiens
gaacttcgaaacgtgataagaagcacctggatgagacatttgctacagcatcccacattaagtcaacggttatgatgtgattgctcaagcccaatctggg

SEQ ID NO: 687722 - DNA, 110 bp, Homo sapiens
caagttcatcatatgcagcactcaaaatggcagcatccttcggacctcaccacgcggccatttacaagatggtttcgtccgtgatgaagatgccggaggacgagtcgacc

SEQ ID NO: 687723 - DNA, 74 bp, Homo sapiens
ctccacaaaatcccacaggacctgctccacaaagtgctgaagtcccccagtgcagctcaacaaggacacagtgt

SEQ ID NO: 687724 - DNA, 126 bp, Homo sapiens
caaacttgccagttgggtatcctcctcagtatccaccgacagcattccaaggacctcccggacatattgtctaccctaagcaccaggctggacacactgggaaacaggctgaccacctgggctccc

SEQ ID NO: 687725 - DNA, 96 bp, Homo sapiens
agtatataaaacctattactctgcctgatggaaaaatacaagttaaagctattgctgtctctaagtgtgtgattccagaaacaagtgccattgttc

SEQ ID NO: 687726 - DNA, 129 bp, Homo sapiens
ggaatgaccctagccagactcagggatcaaagagcaaacagattcagtggcctgcattggttcgatggatgatgtactggattgtttttgctctctatactgtgattgaaacagtagccgatcaaacag

SEQ ID NO: 687727 - DNA, 100 bp, Homo sapiens
taatcgaccaggacccccaggcggcgttagagaaactatccaactctggccaatattgaaaggaagaagaagttaaaacttgaaaaggagaagagaggag

SEQ ID NO: 687728 - DNA, 90 bp, Homo sapiens
ggaatttcaacttgccaatgtgcaaagctgcagaaaccacagtggtagaggtatctgcccaaactggaacttatgctgtagacatttctt

SEQ ID NO: 687729 - DNA, 109 bp, Homo sapiens
ccgctcgctgggagagaggtacctctccttttccctctccctttccctaaggcttgggcactgtttaaaggaaagttccgagaaggcatcgacaagccggaccctccca

SEQ ID NO: 687730 - DNA, 100 bp, Homo sapiens
gtctatgcacatcatgctgtttctactcttgggatttccaaaaggaccacaggatattggtcccattctattcaggtgtcagaaatggctgtttctgagc

SEQ ID NO: 687731 - DNA, 98 bp, Homo sapiens
ctgtgccgggcggagagaactcagcgaggattctgagataaacaggggtcacatgacgacagaagccaagagggctgcaaagatggaaaagaagatga

SEQ ID NO: 687732 - DNA, 98 bp, Homo sapiens
atgggatctttccggatcaatccagatggcagccagtcagtggtggagatgtggccaattagatagtgctttgcatgaagctactagtcgcgtgagaa

SEQ ID NO: 687733 - DNA, 82 bp, Homo sapiens
gggaggggaaaaacagatggcaaggctttgctgagctgcagatggataaattggatgtggttgatagttttggaactgttcc

SEQ ID NO: 687734 - DNA, 100 bp, Homo sapiens
catcagtgcccttgtggcgaatggggctcacgtcgagtaaaaatgcatttgcaaagggagaaaatgaaggccaaacagaagcaggctccagcttctgcaa

SEQ ID NO: 687735 - DNA, 108 bp, Homo sapiens
tggatttattcattctggagatacaatggcaaggaaacagctgtggcatacaaatggtgcatcgaggcaatgaaagaaattacagcaggcttaccagtgaaagttgtg

SEQ ID NO: 687736 - DNA, 89 bp, Homo sapiens
ccaacagtgatgtcacaagattgaccacattgatcacagtatcattaatgggattggaaattttaagtgcctttgtggacagattatca

SEQ ID NO: 687737 - DNA, 90 bp, Homo sapiens
ccatggacaagttttggtggcacgcagcctggggactctgcctcgtgccgctgagcctggcgcagatcgcaaaaatattttgattctggg

SEQ ID NO: 687738 - DNA, 100 bp, Homo sapiens
aggaacatctctttcaatgacaaaaagtttgtcattaaacccatcgacaagaaggcacctgccaaggaggagcagcaggatgacacagtctacatgggca

SEQ ID NO: 687739 - DNA, 49 bp, Homo sapiens
acctttcggcgacctcagatagacccctatacacagaatgggattttac

SEQ ID NO: 687740 - DNA, 101 bp, Homo sapiens
cgttcagagaccatttctgtgcctcaagaaataaaagcgttgcagctgtggaaggagatagaaactcgacatcctggtttccagagatgaatgatatgctg

SEQ ID NO: 687741 - DNA, 50 bp, Homo sapiens
gatgaagtgcagaggtttttttctggcttcagggatgacttcttaggggg

SEQ ID NO: 687742 - DNA, 100 bp, Homo sapiens
acggagtccaaccaggttctgatcaagaccttaggcactaagcgaaatagtacccatgagacaggggcaagtgtccgagtggtgaatcagctacttacag

SEQ ID NO: 687743 - DNA, 100 bp, Homo sapiens
agcatggagcggctttggggtctattccagagagcgacttttcccaggtccctcgtatcaaaacattaagagtataatggaagatagcacgatcttgtca

SEQ ID NO: 687744 - DNA, 83 bp, Homo sapiens
caagaagctggtgtgcggagatgaaggttatcaatactctggctgaccatcatcatcgtgggactgactttggtggaagtcct

SEQ ID NO: 687745 - DNA, 100 bp, Homo sapiens
ccagggggacctcgggtgcgggtccccgccccaccggcccccggcgccgtccagcccggagggacctgtgaacaacgtgggaatgtcgtatgagtatcct

SEQ ID NO: 687746 - DNA, 116 bp, Homo sapiens
atttctggctctgaaggcgaacgcttcgctggccatttaggagctctgctcaaagccagacggtcagcccaaggccaaccccactgtcactctgttcccgccctcctctgaggagc

SEQ ID NO: 687747 - DNA, 100 bp, Homo sapiens
aaaaaccccttggaaatagtcagcatacctgctacacagtctcaccagtggtattcttggggcccacctaatatgcagtgtagattatgtgcaatttgtt

SEQ ID NO: 687748 - DNA, 75 bp, Homo sapiens
ggccaagaaactggagaaactcggagtgtactccgcctgcaagcacgctgcagacttggaaaagaagcagaatga

SEQ ID NO: 687749 - DNA, 51 bp, Homo sapiens
gaccaccgtgaacggacagtcccccccagggactttgaacatgtcggggat

SEQ ID NO: 687750 - DNA, 90 bp, Homo sapiens
ggcgagctcgcgatgagtggtctcggcaggctcttcgggaaggatctacggaatccagaggcagcattgtctccaaccttccgtagtgac

SEQ ID NO: 687751 - DNA, 98 bp, Homo sapiens
gccgccaacctgcagtggatctgcgccaaggcctacggccgaggctcttgtcaggatggtgaagctgttcatcggaaacctgccccgggaggctacag

SEQ ID NO: 687752 - DNA, 90 bp, Homo sapiens
atcgggaacttggagatggtcagcctgctgctgagcacaggacaggtggacgtcaacgcccaggggggtacatggtatggagtagacatc

SEQ ID NO: 687753 - DNA, 143 bp, Homo sapiens
agtggatggtgcgttgcgtgccctacttcaaggataagggcgacagcaacagctctgccggctggaagattgataggcagcagtttgaagaaacagttcgaactctaaataacctttatgcagaagcagagaagctcggcggc

SEQ ID NO: 687754 - DNA, 132 bp, Homo sapiens
gccctatccttctgccaccaagatggctctgcccagccagcattccctgcaggagccctacacagcctccgtgggaaagcaatctcccgggcaggcctccagcatctggctcctgcacatcccctcagcctt

SEQ ID NO: 687755 - DNA, 90 bp, Homo sapiens
cctctctttactgctgaagctttacttcgagctcatgatgcagatcgttttcagaaacatggtatggatgagtttatttctgcaaacccc

SEQ ID NO: 687756 - DNA, 74 bp, Homo sapiens
cgaaggtaccacaaccccgattgctttcgtgaagctgttccatttcctccaagtcaccggcttacagcaaaaga

SEQ ID NO: 687757 - DNA, 90 bp, Homo sapiens
cgctgggtgcgtggggctgcctcgccgcgtctcgccacgggacgtccagatcggtgacatcgtcacagtgggcgagtgccggcctctgag

SEQ ID NO: 687758 - DNA, 50 bp, Homo sapiens
ccacggacgagatgatcaaacgcctgaagagtggcagaatttagtgacat

SEQ ID NO: 687759 - DNA, 100 bp, Homo sapiens
ctgagtggagactttcttctagcaaatgcctgcaatggactagctctgctacagaacaccaaggctcctggatttggatttggaattgcaatatctggtg

SEQ ID NO: 687760 - DNA, 51 bp, Homo sapiens
ggatctttatataggatttaatggttgcgagtgatagacagccaagcagag

SEQ ID NO: 687761 - DNA, 98 bp, Homo sapiens
gctgctgcctctgccacgttactacagccaaccgagagaagatgactgaggaggaggtggagaccgttctggcaggacacgaggacagcaacggctgc

SEQ ID NO: 687762 - DNA, 74 bp, Homo sapiens
gcccccgagccgccgccgctgtccggagccccacagggtaattttatggagtgtcagcccgagagcagcatctc

SEQ ID NO: 687763 - DNA, 75 bp, Homo sapiens
ctttggaacatttcaggcctggcacggaatgcagtttttacataagtttctgttctctggggaggcagtaagggg

SEQ ID NO: 687764 - DNA, 100 bp, Homo sapiens
agagaaactgtcctagttgtccagatggttcacaggcaccagccagaccccctaaaccacgaccgcgcaggactgcaccagaaattcaccacagaaaacc

SEQ ID NO: 687765 - DNA, 90 bp, Homo sapiens
gcttgtcaccatcatcaccgtgcccgtggttctgctgaacaaaggcagactaaaaacagcccttgtagaaagagatgatttctcatcagg

SEQ ID NO: 687766 - DNA, 100 bp, Homo sapiens
agccaaattgcagcagaacagaacctggataatgatgaaggattgaaaatcgctgctaaacattaccaggaaagaccacagcaagattctttcattcgtc

SEQ ID NO: 687767 - DNA, 100 bp, Homo sapiens
cacagttgaagcctgattgcagatttggagcaagaggtggtggtggccttcccccgaagaaatttggtaatcctggggagcgtttgcgtaaaaaaaagtg

SEQ ID NO: 687768 - DNA, 71 bp, Homo sapiens
cccctggcctcgcgggccgtgtctccggcatcatgtgtggctgtggaaaatctctgttctcacaaagtctc

SEQ ID NO: 687769 - DNA, 100 bp, Homo sapiens
tacccgcccctctctccgcagcgtggttttgcgatggggggccaccttatcttagttccagaatttagtcttcctttggaatactacctaattcccttcc

SEQ ID NO: 687770 - DNA, 80 bp, Homo sapiens
gagggacagtctaagaagttttgtagttcatcgtgtatcacggcatacaagcagaatggtgaggttctggagaattgatg

SEQ ID NO: 687771 - DNA, 82 bp, Homo sapiens
caaatactatgatgcccttgtgaaggcaaaagagctcaaatctgaaagaggatcccagtgtgactgataagagagaatggag

SEQ ID NO: 687772 - DNA, 100 bp, Homo sapiens
tctcagagaagaaataatggcaaataacttttccttggagagtcataacatatcactgactgggaatatggagccattgatgatgtagatattgatctgc

SEQ ID NO: 687773 - DNA, 83 bp, Homo sapiens
ccactgctgggccctgaggctgcaccaagtggcgaaggagccggctccaagatcatggaagggaagtggttgctgtgtatgtt

SEQ ID NO: 687774 - DNA, 90 bp, Homo sapiens
caactgtgcagaatctacaaattttgctactgtcagatggattgactatggaaaagttgccaaattggactgggctaatgctaatgtcag

SEQ ID NO: 687775 - DNA, 80 bp, Homo sapiens
agaagagcagagcggagggagccccagacacgcaaattgtggctactaatttgccccctgaagatcaagatggctctggg

SEQ ID NO: 687776 - DNA, 81 bp, Homo sapiens
cacattttgcacaagggcagtcaccatgaaaggggacacccgttccagtgagatgcccgagctcacctccatgcacaccct

SEQ ID NO: 687777 - DNA, 100 bp, Homo sapiens
aaaattgaaatcatgaaagtagacaggactaaactgaagaagacacctactgaggctctgatggtgagaccattctaaaaggcctccagtccattttcca

SEQ ID NO: 687778 - DNA, 98 bp, Homo sapiens
cagagttcaaggaggccttccagctgtttgaccgaacaggcctcatggcggtccgagcttcgttcgagaacaactgtgagatcggctgctttgccaag

SEQ ID NO: 687779 - DNA, 90 bp, Homo sapiens
aggactgatttttagaactccacatttgaggaggaggaagccaagaatctggtgagcgaagccatcgcagctggcatcttcaacgacctg

SEQ ID NO: 687780 - DNA, 50 bp, Homo sapiens
aggcgaaaaaggtggatttgctagaactcagcagtaggccttgcctcaga

SEQ ID NO: 687781 - DNA, 82 bp, Homo sapiens
gccgtttggaggaggtctttagaatccccagccttcaattcaaaaggtgatgacctatcaacagccattctcaaacagaaga

SEQ ID NO: 687782 - DNA, 82 bp, Homo sapiens
aaagaaggttggcacttacaagaatttcttctatcttattaaatgggatgaactaacatacatatgatagttgagaaagaca

SEQ ID NO: 687783 - DNA, 51 bp, Homo sapiens
tatagtaaagagcatactccaaggatcaaaaccattcaagtgcaagatatg

SEQ ID NO: 687784 - DNA, 51 bp, Homo sapiens
ggggaaaatctccccggtgactttcagatggtgatggaatttcctgataat

SEQ ID NO: 687785 - DNA, 100 bp, Homo sapiens
acatgctaaacagagaatacaagaggattatcttagaattttaagatacttcaggaggagcatattatttaatatctagaagtctagggccagaatttgg

SEQ ID NO: 687786 - DNA, 98 bp, Homo sapiens
ctcacgctggtcgggcttcagtactcgggcaagaccaccttcgtcaacgtgatcgcgggcctggattccttctgaaaacattcaagatatcacagtca

SEQ ID NO: 687787 - DNA, 129 bp, Homo sapiens
ctggctacctcgtggacaagtttgcagatcgggagcgcaaggtcgccctcaaggccatgatcaaaacgcctgagacctgggaggaagctggagaaaagatgccctctgaatctttgtgtttggctgccc

SEQ ID NO: 687788 - DNA, 82 bp, Homo sapiens
tcaagccaaacatcaagcagaatgtgatttgcttgaagatatgaggtgacttaagagattaaaattaatttggttgctgttg

SEQ ID NO: 687789 - DNA, 75 bp, Homo sapiens
gcgggacctctccgggccatggcagggtttccaggcctgaggtgcccgccctggccccaggagaatgaaccagcc

SEQ ID NO: 687790 - DNA, 75 bp, Homo sapiens
ctacagtatcgtgggacagaagctggaagatgaagatcctgccaaaggtgatcagagtcgatcagttgaccttgg

SEQ ID NO: 687791 - DNA, 82 bp, Homo sapiens
ggagtgtgtgctaaccgttacctggctatgaaggaagatggaagattactggcttctgtctgccacaagagatttagcagca

SEQ ID NO: 687792 - DNA, 100 bp, Homo sapiens
gaaacctttccaacacagatgtccaagctgccaacgccccatcatctccatctgctggggtcaccgggattcgaggctgttgatggcatcaggaccagcc

SEQ ID NO: 687793 - DNA, 75 bp, Homo sapiens
ccgagcttcgggtaactcttacggtggaggcggatcgtgtgaagaagggatttgacttccagtggccccaacccg

SEQ ID NO: 687794 - DNA, 83 bp, Homo sapiens
cggaggctgaggagaaggaggagcgggccgtggaggcttcgccgcctagagttatgcccagccaagtcttcagtatatccagg

SEQ ID NO: 687795 - DNA, 75 bp, Homo sapiens
gccattggatctgctgtgcttgaggcatttctcattgcaattgtggtaccagatgttgagacattatgttcctgg

SEQ ID NO: 687796 - DNA, 83 bp, Homo sapiens
gctctttgcatcttaactgcaggaagtcctgagttgaggcttgcgggatcctttccggagaaagcgcaggctaaagccgcagg

SEQ ID NO: 687797 - DNA, 50 bp, Homo sapiens
agaactcctaaacaggtggatccaggttcgatctggggctaatgttctaa

SEQ ID NO: 687798 - DNA, 82 bp, Homo sapiens
agtaatttgccttctggattgtatggcccatctcctgtacgcttggagcgacctttggctacgtggctggccttgttatttc

SEQ ID NO: 687799 - DNA, 100 bp, Homo sapiens
aatggcgctttgctgtgaatctccgcggggaggctcttccaaccaggggctgagcttctgcgctgtggagaagccaggcacggtgacatgctgaagcgca

SEQ ID NO: 687800 - DNA, 100 bp, Homo sapiens
aggcagttggaagttatgacaccatggatctcttcaggcacactacagaactaaatatgcatggtgagaaggactggcagaaatacgagactgctcggcg

SEQ ID NO: 687801 - DNA, 98 bp, Homo sapiens
ccagatggtgttacctggagcttaaaaagctgcacgcaagtgttaaacttctgtttgtgaatagcacaatggaagaagctggactttgtgggttaaga

SEQ ID NO: 687802 - DNA, 49 bp, Homo sapiens
gtccgcggcttctcggagcttcttcttctcagcctgttgataaccatgt

SEQ ID NO: 687803 - DNA, 80 bp, Homo sapiens
cagttattaaccagactcagaaagaaaacctcaggaaattctacaaggaactgtggctgcaccatctgtcttcatcttcc

SEQ ID NO: 687804 - DNA, 82 bp, Homo sapiens
ccaccctgcgctgccgccgctctgaggagttaaagttcataattggacccttgaagacactcttcagtggttgatagagttt

SEQ ID NO: 687805 - DNA, 49 bp, Homo sapiens
atttaacccccctccaaaaagttctggctccttggcagcaatggctgta

SEQ ID NO: 687806 - DNA, 90 bp, Homo sapiens
agcgtgtgctcaccttcctgcccgccaaggcgttgctgcgggtggcctggctactgcagcactggggtgtcagttgttggtccgacccag

SEQ ID NO: 687807 - DNA, 82 bp, Homo sapiens
cgcggggggcgagtaagccagcggcaggaccagcgggcgggggcccacgagcaagaagacgtcccgtcaccccctgcaccag

SEQ ID NO: 687808 - DNA, 83 bp, Homo sapiens
ttttgagcagttggcactacccgtcttgaggaataacctatgagaaccccaaagacattaaagattgctgaaatacaggcaag

SEQ ID NO: 687809 - DNA, 74 bp, Homo sapiens
ctcgttgcggccatcgccctgccggaccgcgcctcaggctcccccaggtgtcgtgaaaactacccctaaaagcc

SEQ ID NO: 687810 - DNA, 50 bp, Homo sapiens
gagaccgcggccgggaccgaggagcagcccgacggccatggaggctgaag

SEQ ID NO: 687811 - DNA, 90 bp, Homo sapiens
tgccggcagccctgcggctacggagacaggtgaccattgtgaggtagatattttgttctaattttccagatgaggaagctgagaccctaa

SEQ ID NO: 687812 - DNA, 101 bp, Homo sapiens
aagagagagcttgtgaaactgagggaataggtccctccagctacaaggtgggcaccatggcggagaagtttgactgccactactgcagggatcccttgcag

SEQ ID NO: 687813 - DNA, 74 bp, Homo sapiens
gtaaagatgatgatgacattgacctctttggatctgatgatgaggaggggggagccaaaagggtcatcatctct

SEQ ID NO: 687814 - DNA, 74 bp, Homo sapiens
ccggagaaggccgccgggcccgggcatggtggtctggggcaacgcggaagctgcagaaccttggcctgaaaatg

SEQ ID NO: 687815 - DNA, 100 bp, Homo sapiens
gcggggaggacagcacggccgaggctgcccagaggcgcctcctccacaccccccgccgcagcagcaccggcgacagatctctggaaacatggctacagaa

SEQ ID NO: 687816 - DNA, 75 bp, Homo sapiens
gaaaaataccacgacaaaaccaccctaatgccaattctcggaagcaagaagcagagtggaaagaaaaggcaataa

SEQ ID NO: 687817 - DNA, 76 bp, Homo sapiens
tgcgctatcttccctggatttttcttcaccttttccttactcatgagccaggttttgattcccaccatggccatca

SEQ ID NO: 687818 - DNA, 82 bp, Homo sapiens
caggaggagagcccacaggtgctaaagagagcagtaccctgatggagtcccttgcagtgtggacgaatgtggaacctcgctc

SEQ ID NO: 687819 - DNA, 90 bp, Homo sapiens
caaagaatcaagttgcaatgaaccccaccaacacagtttttggaaactttgaaaagcaccccaaagaactgatcagggggcccatatggc

SEQ ID NO: 687820 - DNA, 100 bp, Homo sapiens
gggcaaggatggtggaggcgagaacactgaggaggagctatgaagacatgattggtgaggaggtgccatcggatcaatactactgggctcctttggccca

SEQ ID NO: 687821 - DNA, 100 bp, Homo sapiens
ccgcagcagtggtggctatgaacccagaggtcgtggaggtggccgtggaggcagaggtggcatgggcattgtcttcagtgttaagaaatgtggactcctg

SEQ ID NO: 687822 - DNA, 48 bp, Homo sapiens
gccgcggccggggcaggagcgcagaatcttccacaatctgtaattgaa

SEQ ID NO: 687823 - DNA, 75 bp, Homo sapiens
gcagtgagacagattcagcccaggatcagcctgtgaagggaagtgttcgccagttactacatgaaaagataagag

SEQ ID NO: 687824 - DNA, 96 bp, Homo sapiens
gccggcctagcgtcctggaattacttcaatcaacaaggaccagactggcttgagctctctgagatgaccgagcagccagactatgacctggagacc

SEQ ID NO: 687825 - DNA, 100 bp, Homo sapiens
gagatgcgcaggctcaacatacccgtactacaggatgatggctttctcttcctctgggtcacaggcagcatgttcagctcttgacacaaatccaccttct

SEQ ID NO: 687826 - DNA, 90 bp, Homo sapiens
ttaaagaggaaggggcagtgctcacatttctgggcaggaaggaagtattgagattgacattccagtccccaaatacttatcttctgtgag

SEQ ID NO: 687827 - DNA, 100 bp, Homo sapiens
gggaaatcgtgcacttgcaggccgggcagtgcggcaaccaaatcggcgccaagcacccagtcagcttgaagagtttcaaatggaccctaccactgagaaa

SEQ ID NO: 687828 - DNA, 75 bp, Homo sapiens
cgctggagaaatacaacatagagaaggacattgcggctcatatcaagaagaatgatatggaacctagcaaagctg

SEQ ID NO: 687829 - DNA, 100 bp, Homo sapiens
accaaatgggcgagacacacctgcactcttcaacttcaccactcaagaactggtcatgctgctggagtggtggtcctgcacggagtgtacactgttcacg

SEQ ID NO: 687830 - DNA, 101 bp, Homo sapiens
tcagaaggacctgtaccgagacgtgatgttggagaactatagcaacctcgtgtcagtggggagtcgggccccgggccgccaccgtcacctcggccgctgcc

SEQ ID NO: 687831 - DNA, 82 bp, Homo sapiens
tcgcagaataaatcccgccgcctgccgcgaagccccggcgcaccgcaaacttcaatctcacttccctgctaaccggtgggcg

SEQ ID NO: 687832 - DNA, 100 bp, Homo sapiens
catcgcaaacccaaagatccccgttcctggagattctgattgagaaagatggatactatgatgctgaatgtgcggaatctgtttgagcagcttgtgcgcc

SEQ ID NO: 687833 - DNA, 100 bp, Homo sapiens
ccttacgtccccgagtgcggcagtaccgcctccttcccagccgcgcggcttcctccagacctctcggcgcggaatcgaccacggaaatttgacacctccg

SEQ ID NO: 687834 - DNA, 98 bp, Homo sapiens
aaagagaggcttttgcagagtcactcaggacaagcttgaaggaagctaaagctgtgtgtatttgtggatcagacaagtgcagcaagttaatatcattg

SEQ ID NO: 687835 - DNA, 100 bp, Homo sapiens
gccggggcagcgctcctggcgctgctggctgcgctctgcccggcgagtcgggctctggaggaaaagaaagtggtggtcactctggagccttgtgaaggag

SEQ ID NO: 687836 - DNA, 98 bp, Homo sapiens
aaagcgaaggaatttcgcagagctgaagatcaagcgcctgagaaagaagtttgcccaaaagatggttttttgcatgtctgacacccatgactccacct

SEQ ID NO: 687837 - DNA, 90 bp, Homo sapiens
aaaaagcgatgactgtgaaggagttcaggcagctggccaacagtggcaatactaaggctcgtacgtctgcatcgattatcttacgtgggg

SEQ ID NO: 687838 - DNA, 75 bp, Homo sapiens
agccggacgtcctccgactcaagctcactgaaaactgaagctaatttggaagttttgaagtcaattcctagtgaa

SEQ ID NO: 687839 - DNA, 100 bp, Homo sapiens
caggactttgggtctgggtgagccttctcgtggcggcggggaccgtccagcccagcgattctcagtcagtgatggaatggggagaagatattaaagcagt

SEQ ID NO: 687840 - DNA, 82 bp, Homo sapiens
caagaagggcttcgtgcccaacatgcaggttgaaatcacaaagattagacacctttttagataggtgttcttcagcaccact

SEQ ID NO: 687841 - DNA, 98 bp, Homo sapiens
gccgacgtccgggtgcacgtgccacgcacgggctttgttcgcgggggtcacagctctcatggctgcagctagcgtgaccccccctggctccctggagt

SEQ ID NO: 687842 - DNA, 50 bp, Homo sapiens
ccagtacaccttggccagcactgaagaagagccgtaacgagacatatggc

SEQ ID NO: 687843 - DNA, 82 bp, Homo sapiens
cagcaagcgggagtcggggatagtgtcatcggttcggtaaagtttctgttctctgaacatccagtcatggataaaaatgagc

SEQ ID NO: 687844 - DNA, 105 bp, Homo sapiens
gcagcccctgcgtcgccgggaccctcgcgcgcgaccgccgaatcgctcctgcagcagaggtcatcatcagatttgaaatatttaaagtggatacaaaactatttc

SEQ ID NO: 687845 - DNA, 100 bp, Homo sapiens
gctctgccctccggagatgacaagtgagaaagaagtgtccggccgggccatccccttcagaagcatgcaacagttactggattatccagaagatgacata

SEQ ID NO: 687846 - DNA, 82 bp, Homo sapiens
ggctccctggacaactccgagcagctggagcagttcaacatgatggagaacgccatcagctccagcagcctgtacagcccgg

SEQ ID NO: 687847 - DNA, 90 bp, Homo sapiens
aacgtgttggaccttccggagcttctcagaagacagagggttttcttttgagtcactattccaggtcctcaggatatagccgtgacctaa

SEQ ID NO: 687848 - DNA, 90 bp, Homo sapiens
tgaagagctatggtgaaacaccactgaagcattgccaagccacaagtatatggttatgatgacttgcagatgcttcagacaagatttcca

SEQ ID NO: 687849 - DNA, 74 bp, Homo sapiens
cttgatgtaaatcttcccaaaaagctctgcaacagcactggatgtgtgtgagaagtggggagaaatgccaccac

SEQ ID NO: 687850 - DNA, 98 bp, Homo sapiens
tcagaaggaaccatttgtggagttaaatagaatattagaggcattaaaggtcagagttctgagacctgctctggattggaaaatggatataccttatt

SEQ ID NO: 687851 - DNA, 60 bp, Homo sapiens
gtttgttgcaaggaagaattgggttgtgacaggagcgaattggcagagggggtcgatttg

SEQ ID NO: 687852 - DNA, 100 bp, Homo sapiens
gcctcaatgatgtcatgctcaggctggtgacggagctgcgctggcagaagttcgtcatgttctacgacagcgagtatgatcatgaagtatgcagaacaga

SEQ ID NO: 687853 - DNA, 74 bp, Homo sapiens
atggactcaaaggctatcctgatttgttcccgacaaggagttttctggttcagaccgtagacagagaggccgag

SEQ ID NO: 687854 - DNA, 95 bp, Homo sapiens
gtaccgcagcccccgggcacgacctctcggacacggtgcaggcaggtattgaaattgccaaaaacagaggagcaagatacaggcttggaccagag

SEQ ID NO: 687855 - DNA, 90 bp, Homo sapiens
cgtcggagacggaggccctgccctcagagacgcgccccctagtggaagcagagtgggaagcagtatccggctgctttgatgaacctggga

SEQ ID NO: 687856 - DNA, 99 bp, Homo sapiens
tggaaccgcagacctctgggcttcctgggaagatcagttttcctgccatccaggctgctccctccttcagcaactcattcccacagatcttccgagaca

SEQ ID NO: 687857 - DNA, 97 bp, Homo sapiens
cacctacagccccgacgaacatttctgggtgacactcaacaggattcccgaatgttgctgaggcacagtgcatcgccaaccaagttcagctcttcta

SEQ ID NO: 687858 - DNA, 80 bp, Homo sapiens
tctccttcgctgtggcgggaagatggccggatttgaagcagcctcccgcgacgatgcccctcaacgttagcttcaccaac

SEQ ID NO: 687859 - DNA, 111 bp, Homo sapiens
caggaacagatcttcggtttgcaagtccagcttcttaaccaagaaattgatgcagagaactgccggtgtggtgagtctccagtatgggaggaagtgtccaactctctgctc

SEQ ID NO: 687860 - DNA, 50 bp, Homo sapiens
gcagatggcaactctgatcccaactctgcacttttccagccattaactcc

SEQ ID NO: 687861 - DNA, 75 bp, Homo sapiens
ccaggattggaatacttaagtcaggtgaccattgtgaggtagatattttgttctaattttccagatgaggaagct

SEQ ID NO: 687862 - DNA, 123 bp, Homo sapiens
ggaccggcggcgctggaggagcgaggcagctgtactaggactgggaacgggagtccaaaactacttacctggaagaccttccaccaccccctgagtatgaattggccccgtccaagttagaag

SEQ ID NO: 687863 - DNA, 97 bp, Homo sapiens
ccacgttgggcctggatgtgtcggtgaccatctcgcaggatgccggcagactcccaggctggaatggtgtcctcatatcgaggaagaggatactgag

SEQ ID NO: 687864 - DNA, 90 bp, Homo sapiens
ccggcatctgcaaaattcggccgcccaagggacgtccagatcggtgacatcgtcacagtgggcgagtgccggcctctgagcaagacagtg

SEQ ID NO: 687865 - DNA, 100 bp, Homo sapiens
agaacgacatgatgcaatcttcaggaaagtaagagggtgaggcatgaaattcaagatggaaccatacatctttatatttattctatacacagtattccaa

SEQ ID NO: 687866 - DNA, 90 bp, Homo sapiens
gcgggtcctggaggctgctaacctcttccaggagccagatgaccaagatgctccagatgaacatgagtcgcctccacctgaagatgcccc

SEQ ID NO: 687867 - DNA, 76 bp, Homo sapiens
ctcaatttaagcctgatctaacccctagaaacaggcccttcataacacaaggcttttatctgcttattccgccatt

SEQ ID NO: 687868 - DNA, 73 bp, Homo sapiens
gtgttcactttttacacactcgtgatgtagttcatcttgatttgaagctgtcgacttgctggagaagatgctt

SEQ ID NO: 687869 - DNA, 90 bp, Homo sapiens
ggacccttccgtatctgcctaggcattttgctgtctcctcctaatacggaaggtgcttttgcacttgtgtttaaaagtgttcattttccc

SEQ ID NO: 687870 - DNA, 100 bp, Homo sapiens
ccgtgatccacaaggcattagagcatggccccatcacaggtatatggaggagtgacctactataaccccgcccagcagcaggtgcagccaaagccctccc

SEQ ID NO: 687871 - DNA, 100 bp, Homo sapiens
cttcgcaatgtcaccatcctacgaggaacattcctcgtgaaggactgtgaccagcatagaaaggctgctcagtgtgatccttgcataccgggggtctcct

SEQ ID NO: 687872 - DNA, 97 bp, Homo sapiens
gagcaaagcaacagaagtttatcaaggctgtcacacatcaagttaaatttggtcaacaaaatccacgtcagctaaagccaattcaaatactttcaaa

SEQ ID NO: 687873 - DNA, 98 bp, Homo sapiens
cgggctcggggtggcccccgcttcagtcccagggcaggtcaaaatgcagatcttcgtgaaaacccttaccggcaagaccatcacccttgaggtggagc

SEQ ID NO: 687874 - DNA, 83 bp, Homo sapiens
ctactacatggacgtctggggcaaagggaccacggtcaccgtctcctcagggacagaagatgagcctgtcggtcctggagggt

SEQ ID NO: 687875 - DNA, 101 bp, Homo sapiens
caggttttctgagcgcaccagcggctccaaaagcagagggaagagccctgcgtgcaggcaaagttggccaagaattacggcatgacccgcatggaccccta

SEQ ID NO: 687876 - DNA, 126 bp, Homo sapiens
agcacatccgatctcaacattcacgtcctgccctataaccgattaattaattgatccccagctagactagggccgttgctccagggagaactgcaaatatcttcatccacccccacatttaaaaac

SEQ ID NO: 687877 - DNA, 50 bp, Homo sapiens
cccgtaggagcaggaaatccacatggagtggtttatgcctggggccacaa

SEQ ID NO: 687878 - DNA, 76 bp, Homo sapiens
attggctgttttcctcacattcctcaagcagttggtagctggcagtgttgtgatggcttttgaagaagtatgcccg

SEQ ID NO: 687879 - DNA, 82 bp, Homo sapiens
acagattgtcaacagtggttgatgcagatgaaatcattgtcttggatcagctttttttccagtaggagagattacggttatg

SEQ ID NO: 687880 - DNA, 98 bp, Homo sapiens
gctacatttggaatacagattctataagcagttaggatctggaggtggtcacttctttcatcgaaactccttgtcccctcggagtctggtgtatgaaa

SEQ ID NO: 687881 - DNA, 97 bp, Homo sapiens
aaacagttaatagagatggaccgcggcaaggcttttctgatgtggatcacacctatgctcaaagaactcagctctttgacaccttagtaaatttctt

SEQ ID NO: 687882 - DNA, 100 bp, Homo sapiens
cagatgacacagaggcagaactaatccgtggcatctgcgagatggaactgttggatggtgtggcatgcagcattttggaaggaaaattgaagacgtgttc

SEQ ID NO: 687883 - DNA, 100 bp, Homo sapiens
atcatgaaggcctgttttgaagagaaggggaataagactgcatctgttcatatgaggacataccgagggattgcatatgttaaatggaaattttataaag

SEQ ID NO: 687884 - DNA, 127 bp, Homo sapiens
tggcggatggccccaggtgtaagcgcagaaagcaggcgaacccgcggcgcaataacgaagattctagtgttccagaaactccagataatgaaagaaaagcaagtatatcatatttcaaaaatcaaag

SEQ ID NO: 687885 - DNA, 100 bp, Homo sapiens
gggcccacgggccagccccgccgccctcgcaacctggcagccgccgccgtggaagaactgataaatttcaaacggaagagagtggcagcatttagaaaga

SEQ ID NO: 687886 - DNA, 60 bp, Homo sapiens
gtcctcaagaagttcctaaaagaacggccggtttgtgggcgatgctgaccttgaaagaca

SEQ ID NO: 687887 - DNA, 100 bp, Homo sapiens
ggagcccggcgctttccccgcaagatggacggtttcgccggcagtctcgagctgcagaaactggagggcagcagtggacctgtgcggacgtctcctcaca

SEQ ID NO: 687888 - DNA, 74 bp, Homo sapiens
accatgtgtgtctgatctgctgggatcctagagctggaacagtttggagaggcttatgcggtacctgattcatc

SEQ ID NO: 687889 - DNA, 101 bp, Homo sapiens
caaacttgtgcctaaagataaatgttaaactcggagggatcaataatattcttgtacctcatcaaaggcagcgtctcctccctgggccccgagcatcccgg

SEQ ID NO: 687890 - DNA, 75 bp, Homo sapiens
caccaagtcacatgacaagcactaatgctgcctaccttgggggccaagaaatgatggaggtggtgaagagagatg

SEQ ID NO: 687891 - DNA, 75 bp, Homo sapiens
ggcgaggagtatagtacggcaaaaaactgtcggtggagccgccaccaaaatgcagattttcgtgaaaacccttac

SEQ ID NO: 687892 - DNA, 75 bp, Homo sapiens
cagattcgcagtggtcgcttcttctccttgttgaggagctcaagcttgggaaaatggtgtgcattccttgtatcg

SEQ ID NO: 687893 - DNA, 75 bp, Homo sapiens
aaattagagtgaatgtagttgcaccagagtgtgaacatggctacgcctcttcattcccgtccatgccgagccccc

SEQ ID NO: 687894 - DNA, 100 bp, Homo sapiens
ataaagacaagcgtgtcatcttgaaagaaggaggtggcattaaaaagacttcctcgttctgcccatcttcctaacaaggctatggctgataacagcagtg

SEQ ID NO: 687895 - DNA, 74 bp, Homo sapiens
gccatcattttgtacccttggtgaccctgaaggacagtgggcctggcctacagctgtgaattctttgatttcaa

SEQ ID NO: 687896 - DNA, 100 bp, Homo sapiens
tggaattaccttcactctgggaaaaggcactgaagttgccacatgaaatgaagatcacctctgcctatctacaggacattgagaatgcctataagaaaac

SEQ ID NO: 687897 - DNA, 76 bp, Homo sapiens
cttcgcgctcttcttcttcttccagggactcagcacctggcaggaatccatcaacagcatcaagtccagactaagc

SEQ ID NO: 687898 - DNA, 96 bp, Homo sapiens
ctcctgcgccggccttgcctcgggtagttccaatttgccagcagaatgagtacagaaagagactcagaaacgacatttgacgaggattctcagcct

SEQ ID NO: 687899 - DNA, 80 bp, Homo sapiens
aagcagcgtgcgttcagccctgggggttcatcaccagcagccagtcggcagcttatgctatcagcaagtttgtcagtggg

SEQ ID NO: 687900 - DNA, 88 bp, Homo sapiens
agaatttgagcctctgctgaattggatgaaagataaagcccttaaggacaaggttgcagatatcaagaaagtcaacaacttcatcaga

SEQ ID NO: 687901 - DNA, 100 bp, Homo sapiens
agcgtgaccgagagcgcgaatatcgtcatcgttagaaggatgaaatctttgacatggtaaaaccaaaggatcctttgaaaatctctcttcaggatttaat

SEQ ID NO: 687902 - DNA, 100 bp, Homo sapiens
ctgactgggcaacatgttattcaggaatcatgttcgttcaggaggaggccctggccagcagcctctcgtccactgacagtctgactcccgagcaccagcc

SEQ ID NO: 687903 - DNA, 99 bp, Homo sapiens
actatggcaacaagtacaagcggcgggtgccccggaggcttcaggtacaactggccacagagatagtcctggaagacacgtggcgcctgtggaccggaa

SEQ ID NO: 687904 - DNA, 100 bp, Homo sapiens
aaataaggacaaaagccaagaggaggacagttcgctacacagcaatgcatcgaggtacatcaggaacgtctctatcaagaatacaatttcagcaaggctg

SEQ ID NO: 687905 - DNA, 75 bp, Homo sapiens
gctcgcccggctttggggtcaagcagattgctatatgttctcctttcagccaagacctttcaccagtgcagggga

SEQ ID NO: 687906 - DNA, 100 bp, Homo sapiens
ttggatgtgagttaactgggtcatcaaacccttttgttacatccatagatgttgttcttggtattacaaagagtcctgatgggaaatacctagccagtgg

SEQ ID NO: 687907 - DNA, 75 bp, Homo sapiens
cgccgcttctagaccctactgcggtctcggatattgccggtgaaaccaatccgtaatctaaatggacattcaatt

SEQ ID NO: 687908 - DNA, 75 bp, Homo sapiens
gcgaacccgagagcgtggagcgggctgggccagaaataacatctgctttgctgccgagctcagaggagaccccag

SEQ ID NO: 687909 - DNA, 96 bp, Homo sapiens
aaacaataacatgtagaaacatatcagctgttgacctggcagcctgggtgtcatggagtactacctgatggatgctgcctccttgctgcctgttct

SEQ ID NO: 687910 - DNA, 90 bp, Homo sapiens
tgccaggaccacctggaagcctagaaatgagccagtcttggtgctctgtgttcacctggttcatctgaggagctgcatctaccctgccca

SEQ ID NO: 687911 - DNA, 100 bp, Homo sapiens
ccgggaccgccgccgccgccgccaccatgatgtagatgaatgctcagaaaacagatgtcaccctgcagctacctgctacaatactcctggttccttctcc

SEQ ID NO: 687912 - DNA, 75 bp, Homo sapiens
ctacattatgaacccaccactgggcaaagaaagtatccctttggttagggtaatcaagtctgaagatgatgtcct

SEQ ID NO: 687913 - DNA, 100 bp, Homo sapiens
ggggtcacccctcagcacatggtgggggccacaccatttgccgtggccaggctagaggtctccaattgagaaacatggcactgtttttcctgcactctac

SEQ ID NO: 687914 - DNA, 75 bp, Homo sapiens
ggatcccacacctccggaccgagggacgcggttttgacagtgtttcctgccttgctgactcttcttccctctcgg

SEQ ID NO: 687915 - DNA, 111 bp, Homo sapiens
ctcagctgccacctgcctttgacctttttgaagcctttgcaaaagtgcttttgaagatgatgatatcacgcacgttgaaggaagtgtagatcctattcgagatatagaaat

SEQ ID NO: 687916 - DNA, 83 bp, Homo sapiens
tccttgtttgcacggagcagcaaacgcagagacaaaagaaacgggccccgactggcacctgaatggacagaagaggacctcag

SEQ ID NO: 687917 - DNA, 74 bp, Homo sapiens
ggaaccctggtcaccgtctcctcagatcagccatgcagaagctggggacagaagtatttgaagaggtctataat

SEQ ID NO: 687918 - DNA, 100 bp, Homo sapiens
ctgtgtgcgaatggtaccagcgtgtgtaccagtccctctgccccacatcctggggagaggctagtggtaacaggccgagctggatggatgggtatgggga

SEQ ID NO: 687919 - DNA, 100 bp, Homo sapiens
tgcccaggcctgggccctcagaaatttcttgcagaacataaattattaggaaacattaaaaatgtggccaagacagctaacaaggaccacttggttacag

SEQ ID NO: 687920 - DNA, 75 bp, Homo sapiens
gtcaaccgctcttccatgaccttcttaacccgtcagtactcgcagaaggaagacagatatgaggaagagatcaag

SEQ ID NO: 687921 - DNA, 75 bp, Homo sapiens
cggcggtgtcggcagctgctgtagcgaagagagtttggcgcgatgctccttgaggagaatgaccagctgatccgc

SEQ ID NO: 687922 - DNA, 97 bp, Homo sapiens
ggcagactggtgacttcacttttgagtgcaactgccttccagcattatgccagtacatacaggcttctaaagccagggatggtgccagccctttcat

SEQ ID NO: 687923 - DNA, 83 bp, Homo sapiens
agcgcccccgatccggacaaagaaacgagcgctcgcctcaagctcgaatgtgacaagttggccagtgagaagtcagagatgca

SEQ ID NO: 687924 - DNA, 90 bp, Homo sapiens
tgcgacgcctgcaaggactggttccacggcagatggcagttgaattcctgcatgaactgaatgttccatttttcaaagttggatctggag

SEQ ID NO: 687925 - DNA, 90 bp, Homo sapiens
gaggaattatctagtgaagaatcagaatatgaaagcactgatgatgaggaccgacagagagaatcagatatcaccaaggagagaattcag

SEQ ID NO: 687926 - DNA, 87 bp, Homo sapiens
caggaggagcagcctatacaaagaggttttgcactgattgcaaaaataaagtcctccgagcatacaatatccttattggtgaacttg

SEQ ID NO: 687927 - DNA, 76 bp, Homo sapiens
gcttatcttcaggagcgaagagctgcttctgtatcttaaggactttccttatcccagttgattgtgcagaatacac

SEQ ID NO: 687928 - DNA, 99 bp, Homo sapiens
ttcgctacacagcaatgcatcgaggtttggcatagaaatggtaccccttgttcaaaatgaacaagaagccttagatttggatggggaacctgatctgtc

SEQ ID NO: 687929 - DNA, 75 bp, Homo sapiens
ggaagacaaaatgccgccctacgacgagcagacgcaggccttcatcgatgacaaggaagaggtgcagcggaagcg

SEQ ID NO: 687930 - DNA, 95 bp, Homo sapiens
tttggcatactttgtgcatgcagcagattcaaaggattccaaggagaagaataaaatggaaatcctgtacatactagtgccaagtgtggccattc

SEQ ID NO: 687931 - DNA, 98 bp, Homo sapiens
gcctggcggagctccacgacgagctggaaaaggtgacagatcagtcagtgaaagcatttgctgaacactgtcctgagcttcaatatgtaggcttcatg

SEQ ID NO: 687932 - DNA, 80 bp, Homo sapiens
ccagctcgcgcttcagcgtcccggcgccgtcgcgccactcctccgaataaatttgcgcctcattttggtaagcggaaaaa

SEQ ID NO: 687933 - DNA, 51 bp, Homo sapiens
acccagacgtgcaacaaagtgcgatggttcagaggacagttttggagaagg

SEQ ID NO: 687934 - DNA, 96 bp, Homo sapiens
gccgggttgcgctccgtgcacctcttgcgggatgccctggcccagccccagccctggtggaagacccagctgttcatgtgggagcctgtgctgttt

SEQ ID NO: 687935 - DNA, 82 bp, Homo sapiens
ttctttaaaacccttaaagaaaacttccacactagcaggtactatgaagcatttccaccactttctgagaaaccagtttgcc

SEQ ID NO: 687936 - DNA, 75 bp, Homo sapiens
tgatgtccatggtctctagcagcctgaatccagctgataccccaatgtccttctttgactttgtggttgatcctc

SEQ ID NO: 687937 - DNA, 98 bp, Homo sapiens
tcctttccaacatccagagctgcatcattccttggggcaaaatgtggacaagggcttctccagggaaagtgaccgaggcagtgaaagaggccattgac

SEQ ID NO: 687938 - DNA, 74 bp, Homo sapiens
cttgtttgtggatcgctgtgatcgtcacttgttactatgagaggtgtgttaaaatctctctctgaaagaaagaa

SEQ ID NO: 687939 - DNA, 100 bp, Homo sapiens
aaggtgacagccctgccccccaaggaagcgtgcaaatgccagaaagaggatttggccagagcgttttgtggaccagttactctccacaagaaaattcaca

SEQ ID NO: 687940 - DNA, 97 bp, Homo sapiens
agagagaaacaggggagcaaggtgcaagagtccacaaagggacctgatgaagcgaagatcaagaaaagcaccaaggattctcttttgttgaatttga

SEQ ID NO: 687941 - DNA, 100 bp, Homo sapiens
agctgaaccgttatgaaatgtatcgccgctcagctttccctaaggcagccatcaaaagggttttcctttggaatatggataaatacaccatgatacggaa

SEQ ID NO: 687942 - DNA, 100 bp, Homo sapiens
aggcctaggatttcatgaagtcctcaataatgtagaggaggtcagtcagccttgcgttttgcccgtttaagaatggaaaagcgacataactatgttcgga

SEQ ID NO: 687943 - DNA, 120 bp, Homo sapiens
agtacgtggatgtggtgtttgccaaccgcccggaccccaacaccccgatggaagataactgttcccaggaaaaaaaggaggaaatcctggaaaatgaaaagcccagtggacacagttcta

SEQ ID NO: 687944 - DNA, 98 bp, Homo sapiens
actaagtgaagcaagaaagcatttaaaagaagagacacaattacgattggtgtcccgttcccaaagaatttcatgtctgtggcaaaaactatactcaa

SEQ ID NO: 687945 - DNA, 98 bp, Homo sapiens
gggctgacatcagcggctctttgtatgatgactctgcgggccaggcatcgacatccgcaacgactatcagcagctgaagcgcctggagaactgcacgg

SEQ ID NO: 687946 - DNA, 110 bp, Homo sapiens
cacaatccaagttccacaatatattgactactgccacaattccggaaatgcaacctcaccacaagtacaaagaccatctttcatggactactttgataagcaagacttca

SEQ ID NO: 687947 - DNA, 100 bp, Homo sapiens
gacaatttgcacttagtgaaagactggagaactgtgaatgaaggtggtgaaggagcaggttatgagagcacttacaaccaagcctagctccctggaccag

SEQ ID NO: 687948 - DNA, 90 bp, Homo sapiens
caacctcaacaagctctgcctcacggtgtaccagctgcatgccctgcagcccaactccaccaagggcaaagcgggctgggcaagtccacg

SEQ ID NO: 687949 - DNA, 100 bp, Homo sapiens
gagaaatttaaggtggagagcggtctctttaatgtggggaacaagctgctggtaagcctggacttgctttttgcaatcagaaatcagatcaagctcggag

SEQ ID NO: 687950 - DNA, 75 bp, Homo sapiens
gcggctcctgctcttcctggactcctgagcagagggtttccaggcctgaggtgcccgccctggccccaggagaat

SEQ ID NO: 687951 - DNA, 98 bp, Homo sapiens
tgttgtgccagtgcttaggctttggaagtggtcatttcagatgtgattcatctaggcaattgaaggaacagactaaaaatcgtgtcctggaaggaaac

SEQ ID NO: 687952 - DNA, 83 bp, Homo sapiens
attttgtgatcgcagcgatgaaagtcgtgagatggagaataaagaaactctcaaagggttgcacaagatggatgatcgtccag

SEQ ID NO: 687953 - DNA, 95 bp, Homo sapiens
gcaagccagcgccgtgacccaggtgtgggggatgatggtgacgcttctcactcacgtgtgaaggccatggcccaaaaggaagatatggaagagag

SEQ ID NO: 687954 - DNA, 88 bp, Homo sapiens
cataaagcaattgagaattcaggtcttgcattagataaatatacccactttacttctccaataagaagatattcagatattgtagtac

SEQ ID NO: 687955 - DNA, 74 bp, Homo sapiens
ggggtgaagctggagatatttcggtgaaggagaacgacctgctcagaatgagaagaggaaggagaaaaacataa

SEQ ID NO: 687956 - DNA, 75 bp, Homo sapiens
agtcacccggacccagccacacaggggggccctcagcctcttggccttgaacgggctgttcatcttgattcacaa

SEQ ID NO: 687957 - DNA, 88 bp, Homo sapiens
ccagaatctagaagagccatccagatatctccgactcaacagtattaagaagttatcaacaattgccctagcacttggagtagaaagg

SEQ ID NO: 687958 - DNA, 98 bp, Homo sapiens
gagtttcttcacacggagatggtggctgagctgtgggctcacgaccccgaccccggcccgggggttatgaagacagtatggagtttccagaccatagt

SEQ ID NO: 687959 - DNA, 76 bp, Homo sapiens
attttcatttgattcaggctaataaagagatgcagaaactaccagaggccgttcagctaattgagaaggccagcat

SEQ ID NO: 687960 - DNA, 100 bp, Homo sapiens
cgtcttggtacggtccttggagtacggagcctgcagagggtcccacggtggaagcgagagaggagggactgcctccaagtggaagttggcaggatttaaa

SEQ ID NO: 687961 - DNA, 75 bp, Homo sapiens
aagcagcgtgcgttcagccctgggccatgggaacaaggaggtcttctcctgccggggcatcctgctggcagtgaa

SEQ ID NO: 687962 - DNA, 82 bp, Homo sapiens
gtggattatttggtcactgaggaagagatcaatcttaccagagggccctcagggaatgccagagcagtgggcccgcttgctt

SEQ ID NO: 687963 - DNA, 90 bp, Homo sapiens
gttgactgaaaatggggcggaagaaaatacaaatcacacgcataatggatgaaaggaaccgacaggatttggtgctatggagaaattttt

SEQ ID NO: 687964 - DNA, 101 bp, Homo sapiens
tggatacaagaacgctgcagagaatatcacattccatgtccatatcaggatgcttatagaattttatgagtcaccagatccagaaagaagaaaaagatttc

SEQ ID NO: 687965 - DNA, 51 bp, Homo sapiens
tttagtaaatatctttccctagctgaatatgacagatacctagcatctagc

SEQ ID NO: 687966 - DNA, 101 bp, Homo sapiens
tggcgaagtggagagtgacatgcagttggatggcggtgactgcgtggcgaaaaagaacttctccgtcagtcacctgctagacctggaggaagccggggaca

SEQ ID NO: 687967 - DNA, 83 bp, Homo sapiens
gaagaagaagaagagcatgatcggcatgtccaccaaggtgagaagccctaccactgcaactgggacggctgcggctggaagtt

SEQ ID NO: 687968 - DNA, 81 bp, Homo sapiens
gacgacgacgaggaagaggaggtttctgagtacttcctcgcgtattgctaaaggaggagttgaccacaccaaaatgagtct

SEQ ID NO: 687969 - DNA, 75 bp, Homo sapiens
ccctggtcttgctcggccgatgaagtgcagaggtttttttctgtctgcgaaacttgtatctgttttaaagaaggc

SEQ ID NO: 687970 - DNA, 100 bp, Homo sapiens
gaaagtacttcattgaagccagtcccttgcccagcagttatccgggaaaaacacaaaagtactttgactcaggagactacaacatggccaaagccaagat

SEQ ID NO: 687971 - DNA, 95 bp, Homo sapiens
ccagtccccaatgtagaagaggtgacacttcccaaaacaggtatcgaaggatgatcgcagtgatgtggagagcagctcagaggaagaagatgtga

SEQ ID NO: 687972 - DNA, 90 bp, Homo sapiens
caccctcgtattctcctgcccttccccaggctgagggtaaaaagctgggattggtaggctgggtccagaacactgaccggggcacagtgc

SEQ ID NO: 687973 - DNA, 51 bp, Homo sapiens
cctttgaattaattatggctaggcgtggagctatttcctatgacagttctg

SEQ ID NO: 687974 - DNA, 82 bp, Homo sapiens
ccgagcggcggccgaggcggcggtgtgggcgcgtcaggccgcgacgagggcgctgaggttcgatacaagaggctgttttcct

SEQ ID NO: 687975 - DNA, 82 bp, Homo sapiens
tgagtctgtatgagctgcaccggaccccgcagcacttattttagaggagattgcaattgattgtcataataaggaaactgaa

SEQ ID NO: 687976 - DNA, 50 bp, Homo sapiens
gcttcacctccatcgcctcggagattgatcgtgtcctgtgctgaagatgt

SEQ ID NO: 687977 - DNA, 83 bp, Homo sapiens
tgctgcactgcctgctcaacaagaagttatggctgcagcttcgattgccaatattgtaaaaagttctcttggtccagttggct

SEQ ID NO: 687978 - DNA, 100 bp, Homo sapiens
gctcatccattctcctgccacccccagacctcctcagctccaggtgtgcaactgaggaacatggctcaagaaactaatcacagccaagtgcctatgcttt

SEQ ID NO: 687979 - DNA, 98 bp, Homo sapiens
aggcgaggagcccatcaagtatggtgaactcatcgtcctgggcagggcccatggcggacacccagtacatcctgcccaatgacatcggcgtgtctagc

SEQ ID NO: 687980 - DNA, 74 bp, Homo sapiens
accggaccctgcagccgcagagttaccggtattgtaagaacaagccgtacccaaagtctcgcttctgccgaggt

SEQ ID NO: 687981 - DNA, 75 bp, Homo sapiens
aagcaacatgagatggtggatgaacccacagcatgctacaagtgaaaactgatgagaaactgaatgtgtctgatg

SEQ ID NO: 687982 - DNA, 100 bp, Homo sapiens
cgcagccgcggcttccggagccctcggggcggcggactggctcgcggtgcagaggatgtactgagtaaagatgctggggaatgtgcaatatgccttgaag

SEQ ID NO: 687983 - DNA, 95 bp, Homo sapiens
tgaggaggccgagagatgaggccggagcccaccaagttctgggaagatttttagactctgaggagcagttggagctaatccacattatggaaatg

SEQ ID NO: 687984 - DNA, 87 bp, Homo sapiens
gctccttaccagctcacctctcaccgcgcatgtttggaggttggcagcctcgatggttccttctctgtgggggaatattgtcctatt

SEQ ID NO: 687985 - DNA, 98 bp, Homo sapiens
actttttcgcagtactcgaacgttgttattttcggtgtgcctcagatggagatgaccaggatagtgaaaagtcaaaaccagcaggctcagatggtgag

SEQ ID NO: 687986 - DNA, 74 bp, Homo sapiens
catggtgatcaccatctattatgaattatatccagatcgagagacagaagattctgaaagggttcaatgaaatg

SEQ ID NO: 687987 - DNA, 82 bp, Homo sapiens
gtgtctgccccttagcagacctcagcgaaagaaagcagattacccagcgatatacttcccaagaaggacaacccgaggcgag

SEQ ID NO: 687988 - DNA, 90 bp, Homo sapiens
tccttggggacggagcagcgcgtcgtggggcgagcggcagacctgcctagagctggaacgttacctccagagcgagccctgctatgtttc

SEQ ID NO: 687989 - DNA, 83 bp, Homo sapiens
attagccttttctctgccttgcttgcttgagcttcagcggaattcgaaatgcaattctgtggtgttcttggtcacacatttat

SEQ ID NO: 687990 - DNA, 75 bp, Homo sapiens
aaaatatggcaaagacttcaatgacatacggcaagattttggtattcattcaggagaaggaccctacagatggag

SEQ ID NO: 687991 - DNA, 75 bp, Homo sapiens
attacagtgaccacggatcaagatgcactttatgaaaatgcatgctgagaagaagcacaaatgtagtaagtgcag

SEQ ID NO: 687992 - DNA, 100 bp, Homo sapiens
ttaaaaggtgtcaagaagctcagaatgggggcagctggcattttatgctatgtgggagcctatgtcttcatcacttatgatgactatgaccacttctttg

SEQ ID NO: 687993 - DNA, 84 bp, Homo sapiens
tcgctgcaccaactacaggcaatcaggatatcaagccaatgagagatcaaattgtcagagtgaagagatatgaaaaagtcccac

SEQ ID NO: 687994 - DNA, 82 bp, Homo sapiens
ctggaggtggacgccatcgtcaacgccgcaaacggggattcagcgtccgatcctttggaacagggactcacgtgaagcttcc

SEQ ID NO: 687995 - DNA, 100 bp, Homo sapiens
ggcggcggccggcagcggcgagatcgtccaactgaacgtaggggggaccaggtgtcatggagaaactccagctgggcccagagattctgcagcgggaaaa

SEQ ID NO: 687996 - DNA, 75 bp, Homo sapiens
tcccttcgctccggcccggtgaaactgaacttataatcgtcactggattgatgaccagtgtcccagtgaaggaac

SEQ ID NO: 687997 - DNA, 82 bp, Homo sapiens
agcacctcatcccctggatgggggaccacaagatcctcatcgacagtggtcccaggctgcacccatggcagaaggaggaggg

SEQ ID NO: 687998 - DNA, 75 bp, Homo sapiens
ctgttgacatcctaggatgcacagctttacacagagggatcctcgtggtcattgaaccgctattgattgatgaag

SEQ ID NO: 687999 - DNA, 100 bp, Homo sapiens
ctttgacatctgtcttgcccgagccaaggagaggtggcggtcccttagcacaggaggctctgaagtggagaacgaaggacgactgggtttggattcagaa

SEQ ID NO: 688000 - DNA, 100 bp, Homo sapiens
ggataaagtcatcaataaccgagagtgcctcatctacagcagtccaaaagaaactcttccttcaaaacctgtgaagaaagagaaggaacagaggacacgt

SEQ ID NO: 688001 - DNA, 90 bp, Homo sapiens
cccgtaccgcagcccccgggcacgacctctcggacacggtgcaggcaggtgctgttcaagtcagtagaagaaccatttcttcgaattcct

SEQ ID NO: 688002 - DNA, 83 bp, Homo sapiens
gcgcagcgtgtcaggcggagagacccgccgccagcatgtagagcgcatgaagtacaggacaataaagcttcctacacatatca

SEQ ID NO: 688003 - DNA, 49 bp, Homo sapiens
caaggcctgttggtccatccagagtggcagagaagaggcgatggcggcg

SEQ ID NO: 688004 - DNA, 96 bp, Homo sapiens
gtgactgttgtaaagactgtcgggtactttttgatcatatgggatgtctgaagaaatatgaaactgtgcaagacattctgaaagaattctttgatt

SEQ ID NO: 688005 - DNA, 75 bp, Homo sapiens
tcgtgctgtttctctccctggcttttggggcaagctacggaacaggtgattgctggcttcaaccgccttcggcag

SEQ ID NO: 688006 - DNA, 100 bp, Homo sapiens
agctgtctggttgtgagcagggtctgcacgaaataaagctcctgggcaaggggacgtctgcagctgagtcatttggatccaggattcctagcaagtgaca

SEQ ID NO: 688007 - DNA, 101 bp, Homo sapiens
gccgcgcgctgagggtctcggggcgggcgccgcgggacctctccgggccatggggagaatgaagttgaagaggtaaaagaggagggtccaaaagagatgac

SEQ ID NO: 688008 - DNA, 98 bp, Homo sapiens
gttgggaaatcaagcatcgtgtgtcgatttgtccaggatcactttgaccacaacatcagccctactattgggctcaactttaaagaagcttctacaca

SEQ ID NO: 688009 - DNA, 98 bp, Homo sapiens
gcagcaaataattgtcagtctaacagaatcctgtcggagttgtagccatgccctagcggggatctgatgagcttctttcttctggcatcattaacgga

SEQ ID NO: 688010 - DNA, 97 bp, Homo sapiens
agctacttgaagatagccatcagccgctacgtgactcttttctccaggtaggagcaacggtgggaatgccctctgaggaatgcagtgatgtccatca

SEQ ID NO: 688011 - DNA, 50 bp, Homo sapiens
cggcccggctctgtggtctgtgagtctggaggactgccaccagaagatcg

SEQ ID NO: 688012 - DNA, 90 bp, Homo sapiens
ctggttccggctgcagcccgaccagtccaagagccggcggcatgacgaaccagaagcccctggtccctctgtctccctttcccctatgcc

SEQ ID NO: 688013 - DNA, 100 bp, Homo sapiens
ggttgaggcgattccagagagcggcggaaaggataagcctcgacttagaagctaccgagttaccctaagaaaggttggactccatgaaagaattgcacaa

SEQ ID NO: 688014 - DNA, 75 bp, Homo sapiens
attgacctcaccaagagggcgggagaactcactgaggatgaggtggatcagtacaagggaaagcgggatttggag

SEQ ID NO: 688015 - DNA, 50 bp, Homo sapiens
gcgtgcgcaagctcaactgctgttctgtagaaaatattctcaaaacactc

SEQ ID NO: 688016 - DNA, 74 bp, Homo sapiens
ctgaccccaagaagaccaaaccatcccacggctccaagggtgagaactctgtctcagtcgacgggaagtgcagt

SEQ ID NO: 688017 - DNA, 100 bp, Homo sapiens
agggtctgtcaccgctggaagaggctggtggacgaccggtggctgtggcgacatgtcgacctgacgctctacacgctgaataccaagagatatctcctga

SEQ ID NO: 688018 - DNA, 100 bp, Homo sapiens
ctgtaccaaggcaccgggtccctcgcccaggtccccttggacaaatggcagagtccccaggccccgtttgccgagctggctgatgatgagaaggtcttta

SEQ ID NO: 688019 - DNA, 100 bp, Homo sapiens
cctaaagtctgagagagggaagtcgcctctgtgctcgcagcctggcatcctcgctacaacctcattgttgtgggccgatacccagatcctaatttcaaaa

SEQ ID NO: 688020 - DNA, 90 bp, Homo sapiens
ctcctcctttccagcagtgagccccatgggctgtgttacatagagacagcagaacttgatggaatgtcaaaactggaccaatggggccag

SEQ ID NO: 688021 - DNA, 100 bp, Homo sapiens
tactccaaagcggccgggagtcgcgcttcttccccactcccgagacagggtcagtgaagatatgaaattaactgactcagagctaggaaagctggcaaat

SEQ ID NO: 688022 - DNA, 102 bp, Homo sapiens
gctctgggagggggccatcagcatcccccggctgccctaggggccaggaccggcgtgacagcctccagaagtcattggaacctggagtttgagaaacagaga

SEQ ID NO: 688023 - DNA, 90 bp, Homo sapiens
tgggaagcagagtgtctggatggaacctgagctgggtctctgactcacttctgactttagagagttaattgttaaatccagtatggccac

SEQ ID NO: 688024 - DNA, 75 bp, Homo sapiens
ttgtagcctaccacgcagctgggaaaaaggctttggcaaggcaattgaaggaacagactaaaaatcgtgtcctgg

SEQ ID NO: 688025 - DNA, 100 bp, Homo sapiens
gagaccattccaaatctgggaccagtctcggcaaatattacacttctctccttaccaagatcactccatggatgaaatgacagctgtggtgaaaattgaa

SEQ ID NO: 688026 - DNA, 82 bp, Homo sapiens
agctcgtctctaaacccttctaaaagagcaccaaaacagactgaggaaaattccttgagctcataggcattgctcagggtca

SEQ ID NO: 688027 - DNA, 50 bp, Homo sapiens
cagcaccgcgcccatggcagagccagaccctggaaaacctcatgctggac

SEQ ID NO: 688028 - DNA, 88 bp, Homo sapiens
ttttcttggatgaattgcttgctttggagaccaagatcactccatggatgaaatgacagctgtggtgaaaattgaaaaaggagttggt

SEQ ID NO: 688029 - DNA, 75 bp, Homo sapiens
cgaggaggtggcgcgatggagggactggaagtccctgctatgtggatatttggtagcaatgactgatgtggaaac

SEQ ID NO: 688030 - DNA, 114 bp, Homo sapiens
gcttgaggactcagatgagcaactggattatactgtactgcccatgaaaaaggatgttgaccggacagtgccggtggtggtgtgcacattgagccccggtatagacagttcccc

SEQ ID NO: 688031 - DNA, 100 bp, Homo sapiens
attggggaagtctgttgtatatcaagagaccaatggagtggagaccatcctgggcctcacaggagcgaccatgggaagcctcatctgcttcatctgcccg

SEQ ID NO: 688032 - DNA, 51 bp, Homo sapiens
gggcagctgaaagacagagaccttcagacttaattcagtgcacaaatgaga

SEQ ID NO: 688033 - DNA, 75 bp, Homo sapiens
tctctgcccgcaacacatatcaggtgtggtcactcacctgtctaccactcccgtgaaatggcagctcgtgccttg

SEQ ID NO: 688034 - DNA, 101 bp, Homo sapiens
taaagaatgtaaacattgtaacatcgttgcctactttgggagttatcttagttgcagtacctaccccagctaactggcagcagcatccttccagctttgga

SEQ ID NO: 688035 - DNA, 100 bp, Homo sapiens
tgtcagatctggttcaggcacagatggatcagctcacagaaatgcaagttgagagtagttattacagtccacagaaagtaaaatctaaagaagtattgtg

SEQ ID NO: 688036 - DNA, 82 bp, Homo sapiens
gctggactgcagtgactatgttctagaaacctggggctacaaaaaggaaagacaactctttgatcaaggagttttcagtcgg

SEQ ID NO: 688037 - DNA, 100 bp, Homo sapiens
aggcaggcagcggactccgccaatattatctgtccaagattgaagaactccagtttcagctcctggcatcagctctattcaaatctggttcagattttac

SEQ ID NO: 688038 - DNA, 100 bp, Homo sapiens
agaattgggagacatcagtaagcttgccaagtttgacggacatccaggcctgctcggccgcctggaaggctgacggcgtgtgctccaccgtggccggcag

SEQ ID NO: 688039 - DNA, 110 bp, Homo sapiens
ggcctttttgcataagaaaggcttttctctacagtaactgtggtcgctgatcaatgacaccttcctggtatatttgcttacttaaactaccatgttcctcgaacgagacg

SEQ ID NO: 688040 - DNA, 98 bp, Homo sapiens
ccctgaggttggacgtggggaatttctcctggggctcagagtgtaagcctgcccacggcagagattgattgcagcctggcagagtacattgacatgat

SEQ ID NO: 688041 - DNA, 100 bp, Homo sapiens
cccagctgagtgaccgctctcgagaacgcaaggtgcctgcctcccgcatcagccgcttggccaactttggggctgtcaataccagcaaatatgcagaaag

SEQ ID NO: 688042 - DNA, 95 bp, Homo sapiens
cagagggacagaggcctactgtacatggcacatgcacgagtacacgagacaggattgagaaaggagagattcaaattgtgacttcagattcaaag

SEQ ID NO: 688043 - DNA, 100 bp, Homo sapiens
cgccggagcggggtccgatggttctcgaaggcccgcggcgccccgtgctgcagtccggttccagttgttggcaaaggagaggaagaggaagaggaagatg

SEQ ID NO: 688044 - DNA, 74 bp, Homo sapiens
aactggaggagtcccgctcgaagctaggatcggaaactccatggtacagctcagcaactgctccaggacagcaa

SEQ ID NO: 688045 - DNA, 100 bp, Homo sapiens
taaaacaacttaaagacaggtatcctcggaaacggtttgtggctggagtaggagcaaacagcaaattatttgcatgggtgcaaaagaaaatggtttgccg

SEQ ID NO: 688046 - DNA, 100 bp, Homo sapiens
ataaacgcccccaatttcccagctgctaaaggaagaggaagtgtaaacaggaacatcgataagtagtgtaaaaacttgcacaatgaaatccgaagccaag

SEQ ID NO: 688047 - DNA, 98 bp, Homo sapiens
aaaattgaaaaaatggttgacctcacccaggtacacaaggcttgcttgtagagatggagttacatggagggacagaaggtcactggtcagtgatttta

SEQ ID NO: 688048 - DNA, 98 bp, Homo sapiens
tgctggctccgcctctgcctcagtttcttcccctatggcccgcgtgccgctgggaaaatgtggacacagacttgccaggcagcctggggcagagtgaa

SEQ ID NO: 688049 - DNA, 101 bp, Homo sapiens
cttcatttttattttgacatttctgctgtatgcaagttttcacttatctcgaaagcctatcagcatagttaaggtgtcagctgtgatgcatgtttaaaagg

SEQ ID NO: 688050 - DNA, 100 bp, Homo sapiens
ttttgttgaacaaatttgatttccggagtcagtcattttactgtcaagacatttcttcggcattctgcaacagcagggcatatacttctcttgtcttggt

SEQ ID NO: 688051 - DNA, 48 bp, Homo sapiens
ctgtggctgggacaagctggtcaaggccgccctggtcatatggaacgt

SEQ ID NO: 688052 - DNA, 74 bp, Homo sapiens
cgcaggcccaggccgccccgttccccgagctgtgcaggttgctccgactgtgtgttccaggagtggtggctctg

SEQ ID NO: 688053 - DNA, 83 bp, Homo sapiens
aaaaaacagaatggagcaattggaagaaaggtaatatttctaaagcatgtctaatattgagaagcatagaggagttaaagcat

SEQ ID NO: 688054 - DNA, 75 bp, Homo sapiens
ctccctgtctgggaccttctccctgcctggacccctactattgcaacaagggtggttctcttcccaaagtggaag

SEQ ID NO: 688055 - DNA, 83 bp, Homo sapiens
tgcagcagctgcaccccaccttgatccagcggacttacggactctcagcgttctcatctctcttccttcaccatgaagctgat

SEQ ID NO: 688056 - DNA, 80 bp, Homo sapiens
gtggccctcggcgcggcagcgctccagctcgctctccaccttcaggttgacatcatggacatatgtgagtccatcctgga

SEQ ID NO: 688057 - DNA, 100 bp, Homo sapiens
tttggctttccagagggcagtgtagagcaccaagcaatatcatttatgctggctgaaatggcaatgaaagttgaactagctagaatgagttaccagagag

SEQ ID NO: 688058 - DNA, 90 bp, Homo sapiens
tgccaaaattatcaacaccaaaaagctttctgctagggatgtcatctgaattatgcccatataatcctgtcatggagaacatttccagta

SEQ ID NO: 688059 - DNA, 121 bp, Homo sapiens
ccctctgcctgcccttccgtgccatcatctccaggattaatgaaagggccattcaggaaacagcacagctccagatggataaactgccttcccgccatgccatttctgaagtcatgagttg

SEQ ID NO: 688060 - DNA, 51 bp, Homo sapiens
agctgagatcagaagggaccagctggagaccacggagttcatcatctcgga

SEQ ID NO: 688061 - DNA, 98 bp, Homo sapiens
agcactggaaggagcagcgggccgcgcagtcctggaatcaagatgtgagaccaagaaattatttctgaagaaagaaatttatgaaatagaatcaaccc

SEQ ID NO: 688062 - DNA, 137 bp, Homo sapiens
gtctggagcaagaaaaagagccctggaatatgaagagacatgagatggtggatgaacccccaggagtctccccaggacagtgctatcacccgggatattaaccgaacattcccagcccatgactactttaaggacac

SEQ ID NO: 688063 - DNA, 75 bp, Homo sapiens
tgacggtggaggttcgcggctctaacggggctttctacaagttgcagcatgagaaagccgaactagaacagcatc

SEQ ID NO: 688064 - DNA, 101 bp, Homo sapiens
atatttcaggagtgtcaactgcatgttggcagataaattgaacatgactccagaagaagctgaaaggtggattgtaaatttgattagaaatgcaagactgg

SEQ ID NO: 688065 - DNA, 101 bp, Homo sapiens
ggagccaaagcctcggcgctcacctaagccgcagggagatacacccaactgggaggggttccagaaactttagcagttgcagtgcagaggactttgagaag

SEQ ID NO: 688066 - DNA, 90 bp, Homo sapiens
gctccaaagagatctcagcgctcaccgacttctctggcttggaagcgtttgtgtctgctgccaagaagctaccacgagaagatgtgtatg

SEQ ID NO: 688067 - DNA, 100 bp, Homo sapiens
gcggcggcggaccttttggccatcttctcgcagagtgctccctgctaacggggacaggtttcgacacagccccaactgctggtacctgagaaactggact

SEQ ID NO: 688068 - DNA, 96 bp, Homo sapiens
accgcgcggctgcgacggcccaggagcgcgtctcggcgggagcctcagggaaagcaggcaggatgggagagtcgccgatagaaccacctcttccct

SEQ ID NO: 688069 - DNA, 51 bp, Homo sapiens
ggaatgctgctgttcgctggtgggaaggtgctacagctcgagagggcagag

SEQ ID NO: 688070 - DNA, 74 bp, Homo sapiens
ggtcggattacactcctgcttccagacgacaagtcgggacctcaggatggaaaccagcagcctgcaccgcccga

SEQ ID NO: 688071 - DNA, 75 bp, Homo sapiens
tgctaagattcttggataccacagtatcataaaattcctctaaatgcatctggctcttgctgattgaattccttt

SEQ ID NO: 688072 - DNA, 75 bp, Homo sapiens
cagcaatcagctggcctggtttgatactgacctgtaaatcatcctttaggtggaaaaccatgaattccttgtaaa

SEQ ID NO: 688073 - DNA, 100 bp, Homo sapiens
tatcagatcagtaccaactgtagcagacttcagaacaaggtctctgggaaatttaagcggtgtatccaaagtgtgtacatcagtaagatcataagcagtg

SEQ ID NO: 688074 - DNA, 101 bp, Homo sapiens
ggaatgttcttaacccagaagtagctgaatgtgttactccattgctgaggagtggaaacttggatttaactggccagaagcaggtattcaaagcagagaac

SEQ ID NO: 688075 - DNA, 75 bp, Homo sapiens
cggcgctggaggagcgaggcagctgtactaggactgggaacgggctttatgaaggcaaagaacagatggagtttg

SEQ ID NO: 688076 - DNA, 75 bp, Homo sapiens
tgaccccagaggagtttgctgtgtgttcatcctcgaggtggtgtgattcagagtgtttcttcatggaagcatggc

SEQ ID NO: 688077 - DNA, 101 bp, Homo sapiens
cataaccattacaggaataaaatatgtagttgacacgggcatggttaaagcaaagaagtataaccctgttaccagatgtatgctactcatggtgggtcctg

SEQ ID NO: 688078 - DNA, 88 bp, Homo sapiens
aaaagtttgtcattaaacccatcgacaagaaggcacctacttcccaagtaagaagcggaagaggagccgctggaaccaagacacaatg

SEQ ID NO: 688079 - DNA, 75 bp, Homo sapiens
tggagctgttccgggccgcgcagctgccgaacgacgtggtcctacaggaatttagataatgggctgtgtgcaatg

SEQ ID NO: 688080 - DNA, 100 bp, Homo sapiens
gacatcacggttttacccagtggtgaaagaaggacggacactggatgccaaggtctcagccttagatccaaggacagtccaaggaagtcctaagaccatg

SEQ ID NO: 688081 - DNA, 100 bp, Homo sapiens
gcacgcggatcgagtttgataacgatggatttggtgctatggagaaatttttggtagaatataagagtgcagtggagaagaaactggcagagtacaaatg

SEQ ID NO: 688082 - DNA, 82 bp, Homo sapiens
gtgaagctcaagttgctactcgggacgctgcacctcccgcgccgcacggtggacgaggatgatcggctgaatgtaacagagg

SEQ ID NO: 688083 - DNA, 98 bp, Homo sapiens
cgctgttctcgctccggagccgctgcacatttcgtgtctgtgtttcactgatggcaagactgtggcccccatgcccccagcacaggaccataagcgat

SEQ ID NO: 688084 - DNA, 75 bp, Homo sapiens
gccccagggcaagccccgctccggccaacaagttaacacagaaatctgcctcctgggccatgccgcttctaaggc

SEQ ID NO: 688085 - DNA, 90 bp, Homo sapiens
ggtccgcctcctacctccttctgcttcgggaacatctaaaggcctttgatgatgaaatcaatgcttttttggacaatatgtttggaccgc

SEQ ID NO: 688086 - DNA, 100 bp, Homo sapiens
actggattttggagagactttggatttgggatgacgtgtcagtatcggtcagacttcatcaatataggtggggaagctgaggcaggaagccctttagtca

SEQ ID NO: 688087 - DNA, 75 bp, Homo sapiens
tgttggacagtgatgtgaagaggttcagctgtcctaatcctcactgccgaaagaatttctctgcaaagaatgtcc

SEQ ID NO: 688088 - DNA, 100 bp, Homo sapiens
caaagaagagcctgaaagagccaaatcttaccttctggaccatgttcttgcagatacagcgctaggaaaaggggagtaattcaggtctagaatggaaaaa

SEQ ID NO: 688089 - DNA, 75 bp, Homo sapiens
ccctttagaaggcattcctggatatggcgaaagggcgtgtggttgcgcctgaggaagatacttttctgtgttttg

SEQ ID NO: 688090 - DNA, 82 bp, Homo sapiens
cgcgtgtctaggtgagtcgcggtgggtcctcgcttgcagttcagcgaccacgggcgccatgttttggaagtttgacctgcac

SEQ ID NO: 688091 - DNA, 100 bp, Homo sapiens
gctagaaaatgccatacaggacactgtgagggaacaagaccagagtttcacgggagactgccagactcgggaggaggcagtggcgctcggcgtgggtctg

SEQ ID NO: 688092 - DNA, 100 bp, Homo sapiens
ggaagaagtgggctgaagaatttaatgatgaaactaatgtgagcacaggagaaaacgacgctccacacctttaacttcttccacacttccttcacaagca

SEQ ID NO: 688093 - DNA, 89 bp, Homo sapiens
gaaaaggaaacctccagttccgttggactgggctgaagtacaaagtcaagaggagaagaagatgattctttggccatcaaaccacccca

SEQ ID NO: 688094 - DNA, 107 bp, Homo sapiens
atgtttctattttctgcttctgtgaaattgcctcttctacatacctcatctgctcagatggaagataaaaagccctttatcctgtcttccatgaggcttcctctcct

SEQ ID NO: 688095 - DNA, 76 bp, Homo sapiens
gattttactaccaagccctgtcagtagctcctcagattgggtgtccgcaatgttgccagtgtctgtctgcagattg

SEQ ID NO: 688096 - DNA, 100 bp, Homo sapiens
tgcagatgaaatcattgtcttggatcaggcagtgtgtgaagaaaccctgaaggtcgggcctcaagtaggtctctttctagatgcagtcgtttttggagga

SEQ ID NO: 688097 - DNA, 100 bp, Homo sapiens
ctggtttccaaacagaggattttagtctatatgcttgtgcttctccaaaaacacccatccaggcagggggatatgcctcaaggaataggttctcctagtg

SEQ ID NO: 688098 - DNA, 82 bp, Homo sapiens
gcgtattcaccacaggaatcatgactcctggagaacggatcaagtgcttattacaggagaactgtgtttatgaaactgtagt

SEQ ID NO: 688099 - DNA, 90 bp, Homo sapiens
gaagtatgttaatttcatggtacatgagtggctatcatactggctattatatgacctctgtgagtgaaagccttcagagggaagctgcta

SEQ ID NO: 688100 - DNA, 82 bp, Homo sapiens
cgcgggccgaagcgcccggagcgggagcgagcggcgcggcccgacaatgcagatcttcgtgaagactctgactggtaagacc

SEQ ID NO: 688101 - DNA, 90 bp, Homo sapiens
gggcgcagctgcccttgtgcccgaggcccaggacagccaggtcaccagcaccaagaggaactctaatgatccaggacaaagaagttaccc

SEQ ID NO: 688102 - DNA, 89 bp, Homo sapiens
caggcatgtccatgccaggtgcccagggctgcttccacgacgtgggtcccctgccagatttgtggctgcgggcctctcgggtgcttctt

SEQ ID NO: 688103 - DNA, 80 bp, Homo sapiens
ggcagctgacctcgcccacgcccagcagcagcagcaacaggcaaggggagagccagttgcgcagagccctgcaaccagca

SEQ ID NO: 688104 - DNA, 74 bp, Homo sapiens
cgtcagcctcatgtacttcgcctttaccaggtaattcatttgcacacctgttagcaagaaacagaagttgaagg

SEQ ID NO: 688105 - DNA, 101 bp, Homo sapiens
tgcatgcttgcataccttgtcaacttcgatgttcttctaatactcctcctctaacatgtcagcgttattgtaatgcaacaggggaaatgctgtctgtagct

SEQ ID NO: 688106 - DNA, 82 bp, Homo sapiens
aggtgagtcgcggtgggtcctcgcttgcagttcagcgaccacggttgtgaactaaaggccgacaaagattatcactttaagg

SEQ ID NO: 688107 - DNA, 80 bp, Homo sapiens
caaggattctcgctgtgacagagacaacaccgagtatgagaacagcctcccgcgacgatgcccctcaacgttagcttcac

SEQ ID NO: 688108 - DNA, 100 bp, Homo sapiens
ctcaacgatacctattttctagtgctgagatcctgagacaatggtgaagctttgttctaagaatatttgtttcatctagtttatgagtccaaatgatata

SEQ ID NO: 688109 - DNA, 75 bp, Homo sapiens
gtcccaccatcttccatccctgatgcttggagaagctgaggacacacaggctgagctgcccctcctggacctgat

SEQ ID NO: 688110 - DNA, 82 bp, Homo sapiens
gcaactgaggcagcggcaggctcaggtgcagccgctggtcagcccaaggccaaccccactgtcactctgttcccgccctcct

SEQ ID NO: 688111 - DNA, 90 bp, Homo sapiens
ccgcagccaggccgggggcgcctgcgactgcggggacagcaacgtgatgcgggagagcgggtcaaaatgcagatcttcgtgaaaaccctt

SEQ ID NO: 688112 - DNA, 80 bp, Homo sapiens
aacttggttcaatgggtagcctcaccatgaaatcacagcttcagatcactggtcagcccaaggccaaccccactgtcact

SEQ ID NO: 688113 - DNA, 75 bp, Homo sapiens
agctgtccgtggtgagcgacccaaagaacaggaaagccatagagaaccagggcacctcgatttaaagatttccag

SEQ ID NO: 688114 - DNA, 100 bp, Homo sapiens
ttagagggactaggctgggtgtggagctgcagcgtatccacaggtctacgtgttgaagcgtcctcacgtggatgagttcctgcagcgaatgggcgagctc

SEQ ID NO: 688115 - DNA, 100 bp, Homo sapiens
aactcaagtcactttacatctattaactgctttggagacttcataatttttctaggaaaggtttcctatcctgggagcaggagagtgtgcctatttgaat

SEQ ID NO: 688116 - DNA, 74 bp, Homo sapiens
atagagctgaaggaagagtgcaaagactttgtggacagtctgtggctcaggacatccccaagctgcagaaacta

SEQ ID NO: 688117 - DNA, 83 bp, Homo sapiens
tggacaagctggaatgcatccaagagaatccctcaacatgctggggctggtgagggtcagcactagtggtgagaattctggag

SEQ ID NO: 688118 - DNA, 50 bp, Homo sapiens
ttaaaaatcaccagttactttaatgagcagaaggccacaagctgtacaag

SEQ ID NO: 688119 - DNA, 51 bp, Homo sapiens
ctggtttgatcacaagacgggcaagtgttgttacagatcttataacagtcg

SEQ ID NO: 688120 - DNA, 101 bp, Homo sapiens
gtattttttggtttgactgtgtatactctacaatctaagaaggatttcagcaaatttggagcagggtcatctctgaatttgagcaatggtgaaacggaatc

SEQ ID NO: 688121 - DNA, 83 bp, Homo sapiens
ggaggaggtcatcagctttgctactgtcacaggtcccccacggcccttcaggatgaaagctgcggtgctgaccttggccgtgc

SEQ ID NO: 688122 - DNA, 101 bp, Homo sapiens
ccggtacatctgaaagccgggaaatgaatcttgcctcctggaatccttcaaatcctgaatgtctcttacttgtggtgaaggaacttgtgcaacaatatcac

SEQ ID NO: 688123 - DNA, 100 bp, Homo sapiens
cctataggctctccaggaaacaagggcatgaatatgtcatattatacagcacctgctgaagattgtatttccagcagtacagaacccaaacctgatccaa

SEQ ID NO: 688124 - DNA, 78 bp, Homo sapiens
gcatttcatggctatcatctacacgcgacattgactacagcaccgtgctcctcggcatgctggtgacgcaggacgtgc

SEQ ID NO: 688125 - DNA, 117 bp, Homo sapiens
gggccaagtacgagcgacaggagttcatctacccggagaagcaggagccctactcggcaggtgcccgtggttgacacgagctgtgtccccagctgttcccgtctacaatggcatcat

SEQ ID NO: 688126 - DNA, 82 bp, Homo sapiens
ggccactccagtcggtgttgagcacggcgagcagtctcaggcctttagtgatgatggacagattgattcactttggagctgt

SEQ ID NO: 688127 - DNA, 50 bp, Homo sapiens
gcctgggagaagcagcagagaaagttcatccatgagctcggatttcccac

SEQ ID NO: 688128 - DNA, 90 bp, Homo sapiens
gacatttcaagtattggtcttaaaacagtaattggagaacttcctccagcttccagtgcgtccaatgcgaatttttgtgaatgatgaccg

SEQ ID NO: 688129 - DNA, 100 bp, Homo sapiens
catgtgaacactcaagtgaagcaaaagccttccatgattacatatttagcttcctgtggtatactgatgagcagaactcttccactacatacctcaattt

SEQ ID NO: 688130 - DNA, 100 bp, Homo sapiens
gcccaaccccaaaagagccaaactcagctcgcccggtttctcggcgaatgacagcacagctggcccccaagaggaccctttccaagtccccagctggggg

SEQ ID NO: 688131 - DNA, 97 bp, Homo sapiens
cttccacctcgacctctggttctacttcacactgcagaactgggttctggactttgggcgtcccattgccatggcccgccaagctgccccctgtgtg

SEQ ID NO: 688132 - DNA, 74 bp, Homo sapiens
gctgtgcgagagcctcctcacttggggccgagaaggagtggggcgatggcatccgtggcctatccctgaacgcc

SEQ ID NO: 688133 - DNA, 96 bp, Homo sapiens
gaatgctggctttcagagagaacagcgtttcagttttggtcatcggaagtggtgccttcagcacagatcgaaggtgccttggaatatggaatcaca

SEQ ID NO: 688134 - DNA, 82 bp, Homo sapiens
ccaattttaatttctaatgctgcagtgtctgaagaagagcgagaagctgagaaagagtggatgattcaacagccacacaaag

SEQ ID NO: 688135 - DNA, 100 bp, Homo sapiens
tggacaggcttacctttgactaccaccagaagctgcagggcaagccacagagccatgagctgggagatcttgtgcgaaaactcaaagaagataaagcacc

SEQ ID NO: 688136 - DNA, 100 bp, Homo sapiens
gcggagcgggagcggccggaggagccatggactgcagcctcgtgcggacgctcgtgcacagatacggtgtgaagaagtttgatgtgccgtgtggaggaag

SEQ ID NO: 688137 - DNA, 75 bp, Homo sapiens
ctcagcagacttgcatatatttgactgcaaggagccccagactctggtaaatgctctgcttcctcctgcctggat

SEQ ID NO: 688138 - DNA, 80 bp, Homo sapiens
gcaagcacgggaagaagcagctggacccgctcaccatctatggcatccggtatagcagaccccacgttagctgaaatggg

SEQ ID NO: 688139 - DNA, 100 bp, Homo sapiens
acttaaaagcaagctggttctctgggatataaataaggaacttagtgatttggcccgtgaccctccagcacaatgttctgcaggtccagttggggatgat

SEQ ID NO: 688140 - DNA, 90 bp, Homo sapiens
gtccgctgtgcccgggcctgcaccatgagcgtcccggccttcatcgacatcagtgaagaagatcagaggctgtgacaacactgaaaacag

SEQ ID NO: 688141 - DNA, 100 bp, Homo sapiens
ggactcacaattccagataattaaacaagctagaactgcagttgggaaagacagtgattgttataatcaaaatttctctatgaatcatcatcaagaactc

SEQ ID NO: 688142 - DNA, 128 bp, Homo sapiens
agaccttccggaggatgtggaagtggctgcaggagccggagttccagcgcatgtccgcgctccgcttagcagcattttgaaagcgaagcagaagccgtagaatcagcggcgagcctgttgaaagaacc

SEQ ID NO: 688143 - DNA, 100 bp, Homo sapiens
cggaatgcttttgtgctgctcacagtcaccgctgtcattgtggaaacgaaatcctgaagttcgacatgtagatttggagatactgtgagtttgatggaat

SEQ ID NO: 688144 - DNA, 50 bp, Homo sapiens
aggattccaagtaactcttatttggaaggggaacagtttgtgaagaaaat

SEQ ID NO: 688145 - DNA, 95 bp, Homo sapiens
cctccccttggattcagacgccgattcgcccagtgaaagctggtggaatgcgaattgtgcagaaacacccacatacaggagacaccaaagaagag

SEQ ID NO: 688146 - DNA, 50 bp, Homo sapiens
gggaccctgagatggggggaaagccggttaatacaatctgttggaatgac

SEQ ID NO: 688147 - DNA, 110 bp, Homo sapiens
attgggcttattcagttttgcttatctgctcccaaaacagacttctctattcagaaacttgaacctttcctaagggacactaagggcttcagtcttgaaagttttagagc

SEQ ID NO: 688148 - DNA, 99 bp, Homo sapiens
gggtggctgcggcgcgggagccggcgtgggcggcggcaacggggcactgacctgggtgccccgaggtactgaagagtgagccgtatggggagaaggctg

SEQ ID NO: 688149 - DNA, 97 bp, Homo sapiens
catacttgtatgccccaaaagatgactacaaacataggatgttttggcgagagatgtattcagtggaggaagctgtggtggacttgctttgtgaaga

SEQ ID NO: 688150 - DNA, 100 bp, Homo sapiens
cccttcggccccggcccctgccctggttccgttgcgcgccccggatgtggcgcggctgcgcgaggagcaggaaaagggcgccctgcgtccggcagaggag

SEQ ID NO: 688151 - DNA, 83 bp, Homo sapiens
atggccgtgccctggggctgagccctcagggaacccgagcgtcatgttagggtgaagcagaggacctcagtgctgaacatgct

SEQ ID NO: 688152 - DNA, 100 bp, Homo sapiens
gagtttgtagaaaaacggagagcagctcttgaaagcactattcctgatcagagaactccagttgcttcaacacacagtatcagtagtgcagccaccccag

SEQ ID NO: 688153 - DNA, 75 bp, Homo sapiens
aatagcaacttctgttgataagttggagctcttcagaaaccaggctgctttcaggaacattgctgtggattccca

SEQ ID NO: 688154 - DNA, 48 bp, Homo sapiens
gcgggcgcccgaggggccgagcgaggacttcattgacttaactagaga

SEQ ID NO: 688155 - DNA, 74 bp, Homo sapiens
aaaaccaacgcctggctcggagcagcagcctctgaggcagacgcgtgccatgcctaccagatcattcaccgcaa

SEQ ID NO: 688156 - DNA, 87 bp, Homo sapiens
cttcaataagaagggccaaattgaattgactgggaaaagggtgaatctgtaaaatatttcctggataacttggataaacttggagaa

SEQ ID NO: 688157 - DNA, 82 bp, Homo sapiens
ccagatcgaatctgggccaaatagaaagttcatagccctgatgaagcaagttactctgctctcctaataaatgcaagaaaat

SEQ ID NO: 688158 - DNA, 129 bp, Homo sapiens
gtggcacgcagcctggggactctgcctcgtgccgctgagcctggcgcagatcggctttgatgaactaggtggacttctcaaaccaacagtggcctctcagaaccagaaccttcctgttgccaaactccc

SEQ ID NO: 688159 - DNA, 82 bp, Homo sapiens
cccggggtgacgcgcagctcccagccgggcgccaatgcttcggcattagagaaagagattggtccagaacagtttccggtca

SEQ ID NO: 688160 - DNA, 90 bp, Homo sapiens
gaggcccaccctggagtaaccctcactggagaatccagagtgcctgaagacgtacactggccacaagaatgagaaatactgcatatttgc

SEQ ID NO: 688161 - DNA, 90 bp, Homo sapiens
ctcggccgagccgggccgcgccgccgctgccgccgccgcgcgcggacatgtcatgctgcccaaggacatagccaagctggtccctaaaac

SEQ ID NO: 688162 - DNA, 50 bp, Homo sapiens
caagaactcaagagcagaatctccgagaatggatcttggagaatgtctga

SEQ ID NO: 688163 - DNA, 100 bp, Homo sapiens
caagctcagtcacaagttcaaagaggaaaccaacatgtctgacaaaagtgacttaaaagctgagctagagcgcaaaaagcagcgcttagcacagataaga

SEQ ID NO: 688164 - DNA, 100 bp, Homo sapiens
ccgacgccacctccgctgctgctgctgctcttcccgctgctgctcttctccaggctctgtgattttctggcatccttaaatcttgtgtcaaggattggtt

SEQ ID NO: 688165 - DNA, 100 bp, Homo sapiens
gtcgctatgagcgggaccaccctgggcacagcaggcatcggagggagtggggaaggccagggccagattctgcagcgcttcccagagaaggactgggagg

SEQ ID NO: 688166 - DNA, 100 bp, Homo sapiens
agaagaacgctctcatccggaggcaggaccagctgcagctgctctgctacaggagctgagagaccctaccctcactttccgtctgcttggctcccccagg

SEQ ID NO: 688167 - DNA, 95 bp, Homo sapiens
ctgctgctgctgctcggagtcttcgccgccgccgccgcggccccgccagagatcctgaaggagctagacgagtgctacgagcgcttcagtcgcga

SEQ ID NO: 688168 - DNA, 82 bp, Homo sapiens
gtccaccatcggtgacctcaccgcctcggttcgccctcagccgccccgaacactctgctccagccaaggtggtgagggcagc

SEQ ID NO: 688169 - DNA, 103 bp, Homo sapiens
caggctgatggcggaggcttcgagtgacccgggtgccgaggagcgggaagagttgctggggctttatcctgtggataaacgcagagtgaacgagtttggggag

SEQ ID NO: 688170 - DNA, 75 bp, Homo sapiens
gagatcacatgcaggactctttcttaatgcagcctgagacaaatggaatcctgtgctgaacccgaatcttccaaa

SEQ ID NO: 688171 - DNA, 80 bp, Homo sapiens
cccactttgtccacagggcaccatgaaacgccattcttcacgagccgcccaggaggctcctcaggccgaccccagaccct

SEQ ID NO: 688172 - DNA, 100 bp, Homo sapiens
cggcacaggaaaaacagccaccttcagtatctcagtcctccagtgtttggatattcagaccaagatcactccatggatgaaatgacagctgtggtgaaaa

SEQ ID NO: 688173 - DNA, 100 bp, Homo sapiens
gccaagagagaccttggagtaattcgtcgacaggtgacagatcagtcagtgaaagcatttgctgaacactgtcctgagcttcaatatgtaggcttcatgg

SEQ ID NO: 688174 - DNA, 100 bp, Homo sapiens
acctacctgcggcgtcggcagctgctgctccgaggccaggccaggatcagatgggaagtggaagcttgtcatgaccagaaactgtttccctacaaagagc

SEQ ID NO: 688175 - DNA, 75 bp, Homo sapiens
ggggcagttcgggccggctgtcctggcgcgctttcctgctctgggaccctaccaaggtgcccccacgactgcagg

SEQ ID NO: 688176 - DNA, 97 bp, Homo sapiens
ctatccatctctcgaagacttgaagctgagcattgaggatttcacagcatatggcggtgtgtttggaaacaagcaggacagcgccttttctaaccta

SEQ ID NO: 688177 - DNA, 102 bp, Homo sapiens
ccccggtggcccaggcctcggactccgcggccggcccggcgcggcccagcgccctcagggatcgtgggactttaccagatcggtttgtaataacacctcgaa

SEQ ID NO: 688178 - DNA, 96 bp, Homo sapiens
caagctcagaactgagaagctgtcaccacagatgatggacctagccaaagtgagtctgctactgagactgccatgacactaccaagtgaatccaga

SEQ ID NO: 688179 - DNA, 90 bp, Homo sapiens
agctacccaagctccaggagcttccggtatggctctgtgggggcagcatggaggtccttccttgctcacgggtggcccacattgagcgga

SEQ ID NO: 688180 - DNA, 75 bp, Homo sapiens
cagatggcaagattgagtttatttcaacaatggaagataactggttaagggaagttaatttatggtgccctactt

SEQ ID NO: 688181 - DNA, 75 bp, Homo sapiens
gtccttctgaccacagccaaacagtggtgaccgaggattttagccacttgcccccagagcagcagcgaaaacggc

SEQ ID NO: 688182 - DNA, 88 bp, Homo sapiens
agggacgtccgcttctggtggacagattgagcaaaggtgaaaggtgtagcagtcactcggcctacacccacagcatcgaccttgtgaa

SEQ ID NO: 688183 - DNA, 90 bp, Homo sapiens
gcttccactgccagcacccgccgtgccgcatgagcatcgcggagcttgacccgtccatcgctgtggctttaaggagttttaagctgagtg

SEQ ID NO: 688184 - DNA, 74 bp, Homo sapiens
tccattggccagtatgaagtggtgaaggagtgtgtgcagcgccaagacaatgcaaactccagtgaacattcccg

SEQ ID NO: 688185 - DNA, 100 bp, Homo sapiens
aatcaatctaaacatttgtgggaagttgtattcatcaataatgaaatgctgactaaggaacaagatattgatgatgttaagaagttcaaaccgggttacc

SEQ ID NO: 688186 - DNA, 95 bp, Homo sapiens
ataaccctgatgaggaagaggaagatacagatccaagggtacgacaccgagcttctggtcaggtgatggctcttaagatgaacacattgagcagt

SEQ ID NO: 688187 - DNA, 82 bp, Homo sapiens
tgtcattccaatgtgactgtccactacatttcactggccgcttctgtgaaaaagccatcactggtgcaagctatatttaacg

SEQ ID NO: 688188 - DNA, 73 bp, Homo sapiens
aggagctgggcctaggtctgcgccctgttggtgaggtaacatacgtggagctcttaatggacgctgaaggaaa

SEQ ID NO: 688189 - DNA, 71 bp, Homo sapiens
ttccacgtgcggtgctcgtcgggagtgatcacctaccctacagacaaatttacatgtattggagaccagac

SEQ ID NO: 688190 - DNA, 101 bp, Homo sapiens
ggagtcagtggaagacggagctggtcggcccgaaggccgccatggcatcagatgaaggcaaactttttgttggagggctgagttttgacaccaatgagcag

SEQ ID NO: 688191 - DNA, 75 bp, Homo sapiens
cacaatcttcaatgagtaaacatattccttgcagggctcgcggcctggcaagaatgtacagctgacagagaacga

SEQ ID NO: 688192 - DNA, 73 bp, Homo sapiens
tcctgtacagcctgcagaactgaggaatgccagctcctgagcaggcctcattggtggaggaggggcaaccaca

SEQ ID NO: 688193 - DNA, 82 bp, Homo sapiens
cgtgtctcaggagcttgatccagacctctacaagcaaatggagaagttcaggaagatcgccaaactgaggcagcaactacaa

SEQ ID NO: 688194 - DNA, 98 bp, Homo sapiens
tgtgctggagggcactaccagatggggatggctgctctttttctaaagaggttaacactacaaactgtaaagtctgaaaatagttgcattagatgttt

SEQ ID NO: 688195 - DNA, 100 bp, Homo sapiens
gacatgagggactcttacctggggcagcgtccctccggtcatggccttccacctgggctccctgggcttcctgaccccattcagctttgagaactttcag

SEQ ID NO: 688196 - DNA, 100 bp, Homo sapiens
cacatcctgagtcttcaccaaaatgggtgtcatcaaaaaccagccagccctccacctcggatgttgctatgaggacagattcatcaaaaatgactgacgt

SEQ ID NO: 688197 - DNA, 90 bp, Homo sapiens
tgctttcacagaattattccagggtttatgtgtcaggaagggaaaaggccgaggcatcagcgtgtgaagaccgcaaagacgatcccgagt

SEQ ID NO: 688198 - DNA, 75 bp, Homo sapiens
ccagtttgtcctgaccgtcatccaggcgattggcttctccggctggggcgcgtgcatgaacttacgagaggtgtt

SEQ ID NO: 688199 - DNA, 50 bp, Homo sapiens
ggcgccggtgtcctggcctcttcctcagagctccctctttgcccactagc

SEQ ID NO: 688200 - DNA, 100 bp, Homo sapiens
ggtgcagccaccctcgctccctctgctcttcctcccttcgctcgcaccatggtattgttgcagcatctggcagtgagactgaggatgaggacagcatgga

SEQ ID NO: 688201 - DNA, 83 bp, Homo sapiens
ttctgaggaccagcagatggccagtcacgagaacccaggatgatcggctgaatgtaacagaggaactaacgtccaacgacaag

SEQ ID NO: 688202 - DNA, 75 bp, Homo sapiens
ctaaatggctccctgattcatgaaaaatcctgggtagaagctggatcagcaagaatgtcactccttatattggtg

SEQ ID NO: 688203 - DNA, 74 bp, Homo sapiens
ctggacgccccggtggactacttctaccgaccagagacccagcaccgatctaagctggaaccagaaccaaatac

SEQ ID NO: 688204 - DNA, 75 bp, Homo sapiens
acgtggttcgatggctgccgcggctacgctgaggctctccgctcagccacagagctcctgatcctggcccatcat

SEQ ID NO: 688205 - DNA, 82 bp, Homo sapiens
accaaaagaagaggaaatggatgcaagccttcccagaacaacaggctgggccagtaataaaggtgaaaattccaaaagataa

SEQ ID NO: 688206 - DNA, 90 bp, Homo sapiens
gaaaaagactgattggctcttcctcaatgcttgtgtggaaagtcattgggtggtacagattccggcgcaatacgcagcagcagatgtcct

SEQ ID NO: 688207 - DNA, 90 bp, Homo sapiens
gccgagccatcccaattaaacagagatcatgatgcagccgtccttttggatttctttttaataatgtgtgacccttcacctttgatcccc

SEQ ID NO: 688208 - DNA, 117 bp, Homo sapiens
atcttccaatagcaaacgtggctaggataatgaaaaatgccatacctcaaacgggaaagactgaaactgttgaggagcccatggaggaagaagaagcagccaaagaagagaaagaag

SEQ ID NO: 688209 - DNA, 100 bp, Homo sapiens
tgatagactgggttgtttcaatctaacagtcaaaggtcatgcgcatcgtggataatgttcgtcctgatcgacagacggttatgttttcagctactttccc

SEQ ID NO: 688210 - DNA, 117 bp, Homo sapiens
aacaaactaaaaatgaacagtcaaaaaatggaagaactggtttatttcagacttcaaaagagggccagtcctgctcctataattgtcaacacagatactttggacacaattccttat

SEQ ID NO: 688211 - DNA, 75 bp, Homo sapiens
ggaacattccaaaggaaaaatttcaggcctcggcaagacgcgcaggaagaccagcgcgcgggatgcgtcccccac

SEQ ID NO: 688212 - DNA, 75 bp, Homo sapiens
ccacctgaacagaaaactgcatttgacaaggtatgatgtggaactcttccagcgcatagaacacttaattgggaa

SEQ ID NO: 688213 - DNA, 76 bp, Homo sapiens
gcgatggtgactttgactgtgaggaccgaactgatgaagccaactgcctctcaggggccagccaagcccccacccc

SEQ ID NO: 688214 - DNA, 83 bp, Homo sapiens
cgcgttcccagcccgggtccccgcgttcacagccccagcgcaggtttgttggcatccaaagctgttggggttgatggtgctga

SEQ ID NO: 688215 - DNA, 83 bp, Homo sapiens
gcgaggccctcatgtaccacacgccatcccagctcagtagcttttcctgggataactgtgatgaagggaaggaccctgcggtg

SEQ ID NO: 688216 - DNA, 75 bp, Homo sapiens
ccgggatctcaggtcctcgggggcggcggccacgccaaggacgggttccagcaacagatagaaatgctttaagtt

SEQ ID NO: 688217 - DNA, 82 bp, Homo sapiens
ctctgctgtgggcgctgctggcgctctggctgtgctgcgcgacccccgcgcatggtattgggagagttgctgctacatcttt

SEQ ID NO: 688218 - DNA, 90 bp, Homo sapiens
gcaggcagcgcgcgaacgtgggcgtggggatggccaccagtttccggacagcttcgtgctgggtgtggtcactcacctgtctaccactcc

SEQ ID NO: 688219 - DNA, 82 bp, Homo sapiens
accgcgcgcagggcctgcagcgggagctggacggcgagcgcgagcggcgcgagaaagaaccccatgggccgcacaggactgc

SEQ ID NO: 688220 - DNA, 100 bp, Homo sapiens
tcttcctcagcgggtccgcggcccgctactctccgggaggggcgcttcccgacgccaaggcaacaattggcattgactttttatcaaaaactatgtactt

SEQ ID NO: 688221 - DNA, 75 bp, Homo sapiens
acaccattgcagaaggaataaccttcatcaagttttatgctccatgttttctggatatgccgcagaaggatccgt

SEQ ID NO: 688222 - DNA, 75 bp, Homo sapiens
ggtgtccaagctcctggagaccatgcatctgaccggagctgcagaggctggagacagagttgggccaacccgctg

SEQ ID NO: 688223 - DNA, 98 bp, Homo sapiens
catctttgtggctgtgcttgccaggcctggctccaggttcccagcaccatgagggcctggatcttctttctcctttgcctggccgggagggccttggc

SEQ ID NO: 688224 - DNA, 74 bp, Homo sapiens
cgagagccgccgacatgaagaaagacgtgcggatcctgctggtgggagaacccctgccataggacaggctgagg

SEQ ID NO: 688225 - DNA, 100 bp, Homo sapiens
cagaccccaacctgcaggtgctgggagcggcctacatccagcacaagtgctacagcgatgcagccgccaagaagcagggcgaccattgacgaggtggaga

SEQ ID NO: 688226 - DNA, 100 bp, Homo sapiens
gggagacgctgggagcgagcgcagcaaagcgcccagcctgccgcctcgctgtccctgcggcttctggggggtgtgggccgaagatatgctcatgtggtgt

SEQ ID NO: 688227 - DNA, 100 bp, Homo sapiens
ggttcagcggagaataacatatcttcagaactgaagcgctgcggcatggcgcgcgcctgcctccaggccgtcaagtacctcatgttcgccttcaacctgc

SEQ ID NO: 688228 - DNA, 80 bp, Homo sapiens
ccgtggacagcgaagctgctgcggttcctgagccggaggactcacaccacccggcaagaactgctcactacggctccctg

SEQ ID NO: 688229 - DNA, 100 bp, Homo sapiens
ccgggagcggcggcagcggcggcgcggaggcggctgaggtgcgagccggttacaacctgccatattcattcatccagtgatgatgaaattgactttaaag

SEQ ID NO: 688230 - DNA, 97 bp, Homo sapiens
gcggcaggagcgcgttgagggactgttaaacccatccagagtaatggctgcggccttacccaggaccctgggggagttgcagctgtatagaatatta

SEQ ID NO: 688231 - DNA, 83 bp, Homo sapiens
ctgccccttagcagacctcagcgaaagaaagcagattacccagcgatattcccaggggcagccactggcctcccagcccccgg

SEQ ID NO: 688232 - DNA, 75 bp, Homo sapiens
gaaggaggacaaggagcggtgggaggatgtcaaggccttgtctctgaaggagtctgagaagatggcgctgtcaga

SEQ ID NO: 688233 - DNA, 100 bp, Homo sapiens
caaacctcacattagctgtgtcaaaaaatgtggcaaagaccatccagttatacagtgtaaaatcagagcagcttctgtagtgatcctgtgcagcgaattg

SEQ ID NO: 688234 - DNA, 142 bp, Homo sapiens
tagcagaggacgcggccaggcgattcggtgaagcgattcctgcaggcgttggttcccctctttgacctggacaaaactttcggtttgaagaataagaaaggagcaaagcaacagaagtttatcaaggctgtcacacatcaag

SEQ ID NO: 688235 - DNA, 49 bp, Homo sapiens
tggcattttcggagcgtttcaaagagagaacgccagatcaagtgtccca

SEQ ID NO: 688236 - DNA, 95 bp, Homo sapiens
ctgagccagtccctagggctcagggagcaggagcttcaggttgtccgagcatctgggaagctccctggcattgggcagtgttacagtgcactctt

SEQ ID NO: 688237 - DNA, 100 bp, Homo sapiens
atttgttaaggattccaagtaactcttatttggtctggtccgagagcaggaggctgggctgctgcagttcctccgcctggacggcttctctgtgttgatg

SEQ ID NO: 688238 - DNA, 48 bp, Homo sapiens
gctttctcgggaggagatccagattcttgtagacactgtttgggctct

SEQ ID NO: 688239 - DNA, 76 bp, Homo sapiens
gaaagagagaataaccgttgtaacatcagtcacagcataatttctctgcaaagaatgtccaaaaattcatattcac

SEQ ID NO: 688240 - DNA, 75 bp, Homo sapiens
agaaatatccgatacagaacatgcagtaatgtgaaaatgtgctggaaatcatattattcaaacacagttgatgaa

SEQ ID NO: 688241 - DNA, 98 bp, Homo sapiens
ataccggcgccatgtccagcgctcggacccccctacccacgctgaacgagagggacacggagcagatgtccagctcgccgctgtccaagaaacgtcgc

SEQ ID NO: 688242 - DNA, 101 bp, Homo sapiens
aatgcgagaagccaaacaacgacctgagtaggtttcgcggctgcataacccttaggagaaatcttgagagtggacagcaattgtgaagatcgccagagagt

SEQ ID NO: 688243 - DNA, 82 bp, Homo sapiens
tggatgggggaccacaagatcctcatcgacaggatctcgaggacctggaagaagcagaggagccagacatggaggaagacga

SEQ ID NO: 688244 - DNA, 95 bp, Homo sapiens
tgaggataacatccctccagaagatgtcactccatggattcctttgggcaacccagaccagaagataatcagtcagtagtcagaagaatgcaaaa

SEQ ID NO: 688245 - DNA, 83 bp, Homo sapiens
gtaccagtttcaaagaagtttcatcaaagcagcaaagtcctgccaaatatcacaaaacctagatattatgaaggagaaagaaa

SEQ ID NO: 688246 - DNA, 100 bp, Homo sapiens
tcaagctccacattggtctgttagagttcgaaaagctgagaatcctcagtgtttgctaggatacaatgtctctttgctatatgaccttgaaaatcttccg

SEQ ID NO: 688247 - DNA, 50 bp, Homo sapiens
ctggcccgaaaggagagcctatatagccagtaccaacgtatgctgagcac

SEQ ID NO: 688248 - DNA, 98 bp, Homo sapiens
ggaagcaatgtttgaacaaactcgaagaacagctgtggaaagaagttgcaaaacactggctggctccaaggctgcatctctccactggactagcgaga

SEQ ID NO: 688249 - DNA, 74 bp, Homo sapiens
aacaggagacaagggcggcagagttgttatttttcagcgtgaacaagagcagccgagaccgacccgcccgcccg

SEQ ID NO: 688250 - DNA, 100 bp, Homo sapiens
gagtcttccagttcatctaactcttatttctccgttggcccaaccagtcccagcgctgtcgtgctcctctactcggttaatctgaagcgaccttgtcctt

SEQ ID NO: 688251 - DNA, 51 bp, Homo sapiens
ggactttcaagatgggaccaaggtgaccgaagaggcctatgtcccagtgag

SEQ ID NO: 688252 - DNA, 75 bp, Homo sapiens
tataatcccaaaattacctcagaattatcaggacagtcattttgtttactcattcagccctgttgcaggtcccaa

SEQ ID NO: 688253 - DNA, 100 bp, Homo sapiens
gaaagtactccgttacataaatattgggcagtgtgccagtgctgccactttgccattcaccagcagttagaaacagcttcatgagtttgccatcacagag

SEQ ID NO: 688254 - DNA, 75 bp, Homo sapiens
ctgccgggcaccgaggaccagctcaatgacagatgagctcacagtgcctgcactttaccccagtagccctgaagt

SEQ ID NO: 688255 - DNA, 75 bp, Homo sapiens
acctcatccaggggctggtgaatatgtgccagagtgccctgcaggtaaccaatggtcaaggtgaaaataagatga

SEQ ID NO: 688256 - DNA, 100 bp, Homo sapiens
cggatcaccggcgtgccccaccatgtcagacgcagccgtagacaccagctccgaaatcaccaccaagcttcatggcggctgaagagatgcattggcctgt

SEQ ID NO: 688257 - DNA, 100 bp, Homo sapiens
ccctgagattggggagaaggtgcggactcttgttcttgcactggtgcttctggaatgtggtggaaatttgtttgatgccatttccattgctgtaaaggct

SEQ ID NO: 688258 - DNA, 100 bp, Homo sapiens
gagcggcatctcctcccagcagcaatccatgcgcctggctaacctcctgatgctcctgtcccacgtcaggcatgcgagacatccacgacagcgatggcag

SEQ ID NO: 688259 - DNA, 75 bp, Homo sapiens
tggcggcgcaaccagccttctagggcggcggagcgagggcggcactgctcacaggacggctacccatccgcaatg

SEQ ID NO: 688260 - DNA, 100 bp, Homo sapiens
tttccagtttgaatgtattggtgatgctgaaacagatgatgaaattagtattggagaataaaggcagccccgttgatgactgaaaatgacaaagcatcca

SEQ ID NO: 688261 - DNA, 87 bp, Homo sapiens
tcagcgaccgggagaacatagacggttgaaaggattgttgacaaaaggaaaaataaaaaagggaagacagagtatttggttcggtgg

SEQ ID NO: 688262 - DNA, 100 bp, Homo sapiens
cactgtgaggcacacagaattctctacatttgtgaaagtcagtttctgaggaatttcatcagaggtctgcggggtttccgagaggctcgccgggatttct

SEQ ID NO: 688263 - DNA, 76 bp, Homo sapiens
ggaagcgatggctgggcccgcgtggatctctaagtgtccttgctggccttgcaaaatgagtttggaagggttgatt

SEQ ID NO: 688264 - DNA, 98 bp, Homo sapiens
tccgagtcaacaaccgcttcgagctggctggaagattatatctggatcaccaccagagcaagccctttctgaagcttcattccaagacccatgtgtag

SEQ ID NO: 688265 - DNA, 76 bp, Homo sapiens
tttcatccacacaccaaggagcccaggctgttcagtgcgattgaccgaggcctggcttttgaacttgtctatagcc

SEQ ID NO: 688266 - DNA, 90 bp, Homo sapiens
gggaaagaaccctggctggggaaaagggaagtgaaaagagatctgttttcaggtgaatgtgggagctggcagccaccccaacaaggtcaa

SEQ ID NO: 688267 - DNA, 82 bp, Homo sapiens
tggaatcgcccaagtccctctactcgcgagggaagagcatggaggaaatcaagaaggtgctgctgctggtgctgggctgtgc

SEQ ID NO: 688268 - DNA, 74 bp, Homo sapiens
gcgggaggaacgctcactgtcagcgcctggaaacttgctcacatcctgtcttcagctgggtcagagaaaacttc

SEQ ID NO: 688269 - DNA, 100 bp, Homo sapiens
gagactgacaacgcggtcccacagaacagctttgctgagccatcaaggtctaatggaagcatggttcggcattcttcatctccatatgtagtatatcctt

SEQ ID NO: 688270 - DNA, 100 bp, Homo sapiens
ctcacctccacaacctccccctttccaatctggcaatcccagctggacccacaaaccgtggagaccaagaactggcacacggacgtgattgagatgaacg

SEQ ID NO: 688271 - DNA, 100 bp, Homo sapiens
gctggtcctgggagccttttccttcggagcagcagccctgtccggcatctgtcttgagctcccagcaagctggtgagcgacctgctggaattctgcttct

SEQ ID NO: 688272 - DNA, 115 bp, Homo sapiens
caggcccgggagcgcgatgtggagcgcttctttaagggctacgggaagatcctggaggtggatctgaagaacgggtacccgcaagatggagtacaagggcagcagctggcatgag

SEQ ID NO: 688273 - DNA, 90 bp, Homo sapiens
agcccggcgggccacgaggaggcgaagcgcggcgggcaggcgctacgaggattctggttgatctgaaaaatgaagtttggtatcaaaaat

SEQ ID NO: 688274 - DNA, 76 bp, Homo sapiens
ctggaattttgccgatttcatgactaaccagtggatagtaaagctctgaaggatgaaaatctacctcctgtcatct

SEQ ID NO: 688275 - DNA, 51 bp, Homo sapiens
attgcaggttgaacagaaagagatatataaactctcttcacaagaagaaag

SEQ ID NO: 688276 - DNA, 89 bp, Homo sapiens
agataatagagcaacaataagccctttacacttggctgtggcgacatgtctaagaatgtgagccagtcacagatggcaaaattgaacca

SEQ ID NO: 688277 - DNA, 100 bp, Homo sapiens
ataatgccattcagagaagtagccaagccaacagagcctgatgagcatgcaggagcgagaacccgagcagcgccatgagcaacactaccgtcgtccccag

SEQ ID NO: 688278 - DNA, 82 bp, Homo sapiens
gcagctgctgtcccgggcctaccccctggactccctggagaagcagatggaaaagctatcatggtgaacttacttcagattg

SEQ ID NO: 688279 - DNA, 98 bp, Homo sapiens
agaagaggagtcctttaggaaggtcattgaatctttgggaattattatttataaagcactggactatggtttgaaggagaatgaagaaagggaattaa

SEQ ID NO: 688280 - DNA, 75 bp, Homo sapiens
cagattcgcagtggtcgcttcttctccttgggtgtgcagatgcctaatttagatcttaaagaaaaagtggagcct

SEQ ID NO: 688281 - DNA, 83 bp, Homo sapiens
ggaaaatctactgcgtggcttgtcaggaactcgactcagacgtggataaagataatcccggcacagaccccacaggctcctcg

SEQ ID NO: 688282 - DNA, 75 bp, Homo sapiens
gatgctgatggggctggacctgctggtgttcgcccacgaccatgagtattgggaaagggtcgttgtggtgcatag

SEQ ID NO: 688283 - DNA, 90 bp, Homo sapiens
aagaaaaacaatcgcttcaatgatgggaaggtggatcccgccgggaggtactttgctgaggcggccttagcaacatgctgttccagtgct

SEQ ID NO: 688284 - DNA, 82 bp, Homo sapiens
cgtgcatttccaggggtcagttgtccagttcatccctgagccttgagctcccagtcgcagtgacgacagtatgggctatcaa

SEQ ID NO: 688285 - DNA, 103 bp, Homo sapiens
agaagattagcaaaggtgctaatccagtggaaatcaggagagaatccgaatcggaaggtgaggaaaattaaatggctcaacaagcacaatacctaggttacca

SEQ ID NO: 688286 - DNA, 83 bp, Homo sapiens
cgagcgcagcaaagcgcccagcctgccgcctcgctgtccctgcggcttctgggggttttgtctggacacgaagggcccatcag

SEQ ID NO: 688287 - DNA, 82 bp, Homo sapiens
tttgctcttacgtatttgtgtgacttgactcttcaaacacaaagtgaactgtatcaattctattgacttcctgctgctttct

SEQ ID NO: 688288 - DNA, 98 bp, Homo sapiens
ttcgacaccaaccccttcgcggacccagtggatgtaaaccccttccagactgtgagctgcttgtccccatcctgcggccgtcctggggacacagagcc

SEQ ID NO: 688289 - DNA, 90 bp, Homo sapiens
gaccttttaaatcactgtgcagtcttggagaagcaggttcaagagctgcaggcggtgagtaaagagaagacggagtctcgctctgttgcc

SEQ ID NO: 688290 - DNA, 100 bp, Homo sapiens
caccccaagcaggcacacacgatggaccctcagctgcggctgctgctggaagtcacctatgaagccatcgtggacggagtcaaggcggataagaaggcgg

SEQ ID NO: 688291 - DNA, 83 bp, Homo sapiens
cgccagcagctggactatggcatctatgttatcaaccagggggatatgagactttctactcggaatatcctgagtgttgcgtg

SEQ ID NO: 688292 - DNA, 75 bp, Homo sapiens
aaaccggtagcgcttgcagcatggtccaggtcaagacctcgtctccgttctcatagtcgtagcagtgaaaggtcc

SEQ ID NO: 688293 - DNA, 78 bp, Homo sapiens
tccattctgtaagctttccgggaacatccaaggcaagactggcacccagcacagcagctgccaatttgtggtgtctga

SEQ ID NO: 688294 - DNA, 100 bp, Homo sapiens
cccctctcactctccaattctgttgttgcctccatgcgccaatccaaaccgaaagccagaaggtgggccatgcacagacacagctcatgtctcattaatc

SEQ ID NO: 688295 - DNA, 100 bp, Homo sapiens
cacaaacaggaacttacggaaaaagatgctacaattgcttctgccatcgaagacggcaatttggaggaaatggaagaggaagtacggcttaagaagcgaa

SEQ ID NO: 688296 - DNA, 83 bp, Homo sapiens
cctctctggtctccaactagtattatgagaggagtcaatcagaggaccctggtttgatatgtacctatctgctcgagactccg

SEQ ID NO: 688297 - DNA, 49 bp, Homo sapiens
ctttagaccctccacctaattgcagttacagcaattggaacttgcacag

SEQ ID NO: 688298 - DNA, 75 bp, Homo sapiens
ggccgagcggcgacggaccgcgaggttgtgatcaattattcaatcgtgaaagggctgaagtacaatcaggccacg

SEQ ID NO: 688299 - DNA, 82 bp, Homo sapiens
cctcgtgtcacatctgaaactcatctgtacctcacttagaaagcacctgttccgcgagcctgagaagaggccccccaccgtg

SEQ ID NO: 688300 - DNA, 75 bp, Homo sapiens
accaaggggcagacccaaaaaactggagaaagtggatgaggaggggctgaagaagctgatgggcagcctggatga

SEQ ID NO: 688301 - DNA, 99 bp, Homo sapiens
gtaaagagtaccatattgatgaagaagtgggctttgctctgccaaatccacaggatgatcctttcaaaaataaagccttgttatttagcaacaacacgc

SEQ ID NO: 688302 - DNA, 100 bp, Homo sapiens
ttgacattcaaccgtacccgccaagctgtcatcacaaaagagttgattgaaattatctctggtgctgcagctctatcctccaggtcctattgacaatact

SEQ ID NO: 688303 - DNA, 75 bp, Homo sapiens
aagcacaaagggcaagatggaagaataggcgtagttggaggctgtcaggagacagaagcagtacaacatccacgt

SEQ ID NO: 688304 - DNA, 87 bp, Homo sapiens
gtcgctgattccagagagctaaagccgatggtttctagagaggaaggatctccccagctgtcttcagcaaggccgtctcctgcccag

SEQ ID NO: 688305 - DNA, 75 bp, Homo sapiens
ctacagatgtggcctccagagggctagattctggattttgggctggcgcgacatgcagacgccgagatgactggc

SEQ ID NO: 688306 - DNA, 74 bp, Homo sapiens
tgctcaagagcctcattatctaccacccgagatgccccaagcatccacccgttttgtcaagtgtgaaaagtgtc

SEQ ID NO: 688307 - DNA, 75 bp, Homo sapiens
cggcgccatggaggagggggcgccgcggcaggtggaaagactatctcccagttggacagcggatgcctgggactc

SEQ ID NO: 688308 - DNA, 82 bp, Homo sapiens
acagagagggcctgggagcttgctgcagcttcagccggcacagtcttcactaccgtagaagaccttggctccaagatactcc

SEQ ID NO: 688309 - DNA, 100 bp, Homo sapiens
cagtggtcagcgacccgcagtccatctgactcctgcttcccgggtgttgctcgtaattcagaaggagctggcggacatcactttagaccctccacctaat

SEQ ID NO: 688310 - DNA, 75 bp, Homo sapiens
tccgatggttctcgaaggcccgcggcgccccgtgctgcaggtgctggagaatctggtaaaagcaccattgtgaag

SEQ ID NO: 688311 - DNA, 75 bp, Homo sapiens
ggacctaggtcgcggcgacatgccgccgccatgatcctgctggaggtgaacaaccgcatcatcgaggagacgctc

SEQ ID NO: 688312 - DNA, 75 bp, Homo sapiens
caccaacagaataaaataaaagatcttcaaaaggagcagaaaactttacagggcctcctcccaaggagaacatga

SEQ ID NO: 688313 - DNA, 74 bp, Homo sapiens
cgcggattagggggtctcggcgagccagatgaaaactcgctggatttttcctcctgtatgttacggcctgggat

SEQ ID NO: 688314 - DNA, 75 bp, Homo sapiens
cgggacccggtcagaagctcaaagagtccgtgggcttgaaaactatttttctagtctgaaaaacccaaaactcag

SEQ ID NO: 688315 - DNA, 90 bp, Homo sapiens
gcagtacgcggggacccggctgcggtggctgcgggactgacgaaggctgcctaccacaaggactttagcttactttttaaagattgaaga

SEQ ID NO: 688316 - DNA, 87 bp, Homo sapiens
aagaggaagcaaatataataatggcagcacagagctacattcgagtgccagccatttttggagtctcctttggtatccgcaaactct

SEQ ID NO: 688317 - DNA, 75 bp, Homo sapiens
ggaagccaacgaccacacgcagcccagggccccggccagtgcccagccccgctgggagacccggccagcaccacg

SEQ ID NO: 688318 - DNA, 82 bp, Homo sapiens
ggaggggagagttgggagaggctttgctgctgaggaaatttatttggtagattgaagttggttgaatctggcgatgtggaac

SEQ ID NO: 688319 - DNA, 80 bp, Homo sapiens
cagtagaaaaggcttttccagtttgcataatttggattggatgctgctggcaagacaaccattctgtataaactgaagtt

SEQ ID NO: 688320 - DNA, 100 bp, Homo sapiens
ttaaagcaattatgaaagaagtcattccttttttgaaggccctggattattgtcacagcatgggaattatgcacagagatgtcaagccccataatgtcat

SEQ ID NO: 688321 - DNA, 90 bp, Homo sapiens
cgtgggcagcttcgtgtgcaccacctgctccggcctcctagcagccatcagcagggaccctttctacgaaatgctcgcagcacggaaaaa

SEQ ID NO: 688322 - DNA, 90 bp, Homo sapiens
gcgagtgcttctgaaacgtcagctgcgctcccctaggagtgctgagcccgcggaaccgcagccatgaaactggcgatggaatatgagagg

SEQ ID NO: 688323 - DNA, 100 bp, Homo sapiens
cagatgtggcctccagagggctagatgtggaagtctgtagtgggccatgatgtgtctgtttccgtggagacccagggtgatgattgggacacagatcctg

SEQ ID NO: 688324 - DNA, 75 bp, Homo sapiens
ctgcactgtcctgcacgtcgtcgctgcccactccccaggatacctcgttaagcggaggtggggaagacagggctc

SEQ ID NO: 688325 - DNA, 75 bp, Homo sapiens
cgcccgcaggctccggcttccgtcccggacagagcccgtggtcgcgcagcggagctggagttcgcccaaatcatc

SEQ ID NO: 688326 - DNA, 50 bp, Homo sapiens
gacccagtgcgcccgcatcgtcgaggttctctcaagtagtgctgccagta

SEQ ID NO: 688327 - DNA, 75 bp, Homo sapiens
gaaaagaatgaacactgtccttcaaaacgagcatttcgtgtcctgtctgaaccaattggtccagaatccccaagc

SEQ ID NO: 688328 - DNA, 75 bp, Homo sapiens
aacggagaatggaactgtatgccagcagcttgttgtacaaagtgatgagagcctatttacaacagctaaggcaag

SEQ ID NO: 688329 - DNA, 100 bp, Homo sapiens
tccaccatgctggtcttctttaagaatgcattccagtatgtcaacagcatacagccatctctcttccaagagaatatgaaactggtgtcaaaatgacatc

SEQ ID NO: 688330 - DNA, 82 bp, Homo sapiens
accggcatctgcaaaattcggccgcccaagacaatgcagatcttcgtgaagactctgactggtaagaccatcaccctcgagg

SEQ ID NO: 688331 - DNA, 75 bp, Homo sapiens
cagcgcccggcgacccctgctgctgctactgctgttgctgctgctcgctgtgtaaatgagtatggaagattatga

SEQ ID NO: 688332 - DNA, 75 bp, Homo sapiens
gaaggagcagcccacagtcaaatctgtccagtaacaacatgctgtaccccaaggaagacaaggagaaccgcattc

SEQ ID NO: 688333 - DNA, 90 bp, Homo sapiens
ccagtacacagacgagcatggggaagatgtacaggtggatcatctgaatctcctgaaacagtttgaacacctggaccctcagaaccagca

SEQ ID NO: 688334 - DNA, 83 bp, Homo sapiens
caggcggcgccatcttcgaacttagacttccggaaggactttggcgaggcgcccgggggctggagaaggccaggcagcagctg

SEQ ID NO: 688335 - DNA, 90 bp, Homo sapiens
cggacatcctgcccaagtggctgcgcttcatccgaggtggtgttcccactgatgaagagcaggcgactgggttggagagggagatcatgc

SEQ ID NO: 688336 - DNA, 100 bp, Homo sapiens
gcgtgccccaccatgtcagacgcagccgtagacaccagctccgaaatcaccaccaagatccagagacaatggccccgatgggatggagcccgaaggcgtc

SEQ ID NO: 688337 - DNA, 53 bp, Homo sapiens
gcaaaaatatggggaagccttgggcaggtgtctgacttccagcaactgctggc

SEQ ID NO: 688338 - DNA, 100 bp, Homo sapiens
agtatgagaaggtgcttgtggaagggggcccggctccctaggcgtcccatctcggacatccagaagaagcgtcagaacaaagacctaatggagctccagg

SEQ ID NO: 688339 - DNA, 75 bp, Homo sapiens
gaagcgatggctgggcccgcgtggatctctaaggtgaccccaaaggagccatgataacccatcaaaatattgttt

SEQ ID NO: 688340 - DNA, 100 bp, Homo sapiens
aggagtgaagctgcagaccttcgcggtgtcatggagaaactccagctgggcccagagattctgcagcgggaaaatccaaggcttatttatgccaggctga

SEQ ID NO: 688341 - DNA, 82 bp, Homo sapiens
gaagacagagatttattcgtaatgcgactcaaagctgcacggcagtctgtttatgaggaattagaaggtgacgaggagggag

SEQ ID NO: 688342 - DNA, 100 bp, Homo sapiens
gtgactccaagcgctgccgggagcgagacttcctgaagaaagtccacgagaccgtggagcgtggtgggaagatcaatgttctgcaggccaagaagaagtt

SEQ ID NO: 688343 - DNA, 100 bp, Homo sapiens
gttgttaatactacctgcttttggatagaatgtaaagtgttgaacagtcatcggatctacaggaccagttgaatcatctgttgaaatagaatgacatgta

SEQ ID NO: 688344 - DNA, 75 bp, Homo sapiens
actggactcatggaggctgagcatttattcagatggaggaacattgggaggctctttattttctgcgtgctaagt

SEQ ID NO: 688345 - DNA, 100 bp, Homo sapiens
cttgggagaaagacacagtctccatcatcccagatgacagtcgtctagaggagctcaaagccactctgcccagcccagacaagctccctggattcaagat

SEQ ID NO: 688346 - DNA, 75 bp, Homo sapiens
gtcctgcggcctggttgagctcgcactgacaatcgcaggtgacccagggcctggtcatcgggcagctgagcagcc

SEQ ID NO: 688347 - DNA, 75 bp, Homo sapiens
gtactttaagcagctatagtcttgtattgatggttttgcactatttacaaagtgagagaactggagcagaccttg

SEQ ID NO: 688348 - DNA, 75 bp, Homo sapiens
tctctttctggcctggaggctatccagcttgtcactcagcccagtccatcagtttctcagcccagtacttctcag

SEQ ID NO: 688349 - DNA, 80 bp, Homo sapiens
ccctgctagaagtgggggactcggcgggcttttcctccgcaaccatgtctgacaaacccgatatggctgagatcgagaaa

SEQ ID NO: 688350 - DNA, 110 bp, Homo sapiens
agattgacccaccactagccccactacccaggccctgcatgtccatcgacttcagagatcctggaaaacacccctgaaaaccacccggaccacagccacttgaagcacgc

SEQ ID NO: 688351 - DNA, 101 bp, Homo sapiens
ctccgtagggagagccacttccgcccaaggccaaagaactgccaactctgaaagataatgatttcattaatgagggccaaaagatttatattgatgacaac

SEQ ID NO: 688352 - DNA, 75 bp, Homo sapiens
aacgaggagaagagccatggacatcatttgcaggtcatacctgcttggaagtttgggaagttgatgaacagatca

SEQ ID NO: 688353 - DNA, 97 bp, Homo sapiens
ggctttgcagcggggacttcggcggcggcgcctcaggcacctcggcccggcaagagtgagccatggagctacgtgtggggaacaagtaccgcctggg

SEQ ID NO: 688354 - DNA, 100 bp, Homo sapiens
cagcttttcagaactgcagggaaacagccatcatgaggtcatcctgtacagttctacagcatgaataggcctgcctctcgccatactcccccaacaatag

SEQ ID NO: 688355 - DNA, 98 bp, Homo sapiens
cagattcctccgggcagcagggtgccgcaccctcggtccctgcctctctgtctccagcaccgctcacagctccgcacccccagaattccctgcattgt

SEQ ID NO: 688356 - DNA, 75 bp, Homo sapiens
tttgggcttcatggagtcgtcttagatgttgattcactgagatctgtatctgtggacctgaatgttgatccctcg

SEQ ID NO: 688357 - DNA, 87 bp, Homo sapiens
gtggagtcggctgagggaaaagcgaggcaaggcaggcggtagccggatcgagctgggagatgtgacaccacacaatattaaacagtt

SEQ ID NO: 688358 - DNA, 50 bp, Homo sapiens
aacttcaacagaatgtggcaaccagtgaatgatttgggaggggacttcaa

SEQ ID NO: 688359 - DNA, 99 bp, Homo sapiens
agcaaaccgggaaaggagaggatcccggagccggtcctgcaggatatggtcccccctaagaagcacctgctccgacaccagcctgccaacgcacagatt

SEQ ID NO: 688360 - DNA, 75 bp, Homo sapiens
atcgatggcttcgccatcgccagcttcgccaccctcgaggccttgcagaatccaattctcagttttgaactacct

SEQ ID NO: 688361 - DNA, 100 bp, Homo sapiens
tcgaagaaggggacgccgacaagtcctggaatcaagatgtgagaccaagaaattatttctgaagaaagaaatttatgaaatagaatcaacccagtgggaa

SEQ ID NO: 688362 - DNA, 126 bp, Homo sapiens
gttctgccgcacggcatgggccggggcctcttgacccggaggccaggcacgcgcagaggaggcttttctctggaggagaaggcagagcccccccaggctatgaatgccctgatgcggttgaaccag

SEQ ID NO: 688363 - DNA, 100 bp, Homo sapiens
tatatagcaaagaaatccttctgtcggcgagccattgaacttacctgactattagaagacacattagtgcagaagcttccaggctgtagagccctgcttc

SEQ ID NO: 688364 - DNA, 90 bp, Homo sapiens
gaatactgagaatgccaaagtaaccagatctaacatgagcccccttacccaggaatggaacaacctccacaccatccttactatcagcac

SEQ ID NO: 688365 - DNA, 75 bp, Homo sapiens
ctgcacactttggaaactaaatcaagtctgccaatggtgcatggaagccagcagacctgcagaacttggctcccg

SEQ ID NO: 688366 - DNA, 100 bp, Homo sapiens
aaagatttgatcaccaggagatttttcgggacattaccaaaccactcattttagctctattaccaggttttaaacttcgccatgatcgtgtcttctgcac

SEQ ID NO: 688367 - DNA, 100 bp, Homo sapiens
ctccaggacccaagggcgccaaaggagaagtgggcccccccggaccaccagggttttgactctgggaggagggctgccttatttggagcaccttaatctc

SEQ ID NO: 688368 - DNA, 99 bp, Homo sapiens
gtccgagccagccgctgttttgccggaggagcccctcaggccctttatcttcaagccaggatgaagggagactgggcaagactcttacgccccacactg

SEQ ID NO: 688369 - DNA, 74 bp, Homo sapiens
gaaaaaattggagtcctatttagacttaatgccggggagctgcattctcagtgtgttgctaagggcttactgtt

SEQ ID NO: 688370 - DNA, 90 bp, Homo sapiens
gtggtttttcggatcatgtctggtggctccgcggattataacagcctgtactgcgagaagcggatcctggaggctgtgggctgcacaggg

SEQ ID NO: 688371 - DNA, 75 bp, Homo sapiens
gttggtcttctgatagcaactttaatgtggtgagctgtcagggagaaatgtcgaaacaggtcaagagatgttctg

SEQ ID NO: 688372 - DNA, 90 bp, Homo sapiens
gtggaaggcagcttccgtcgaagaggagggggctgcggtggccaccgcggcggagcccgaggaaaatgtttataggaggccttagctggg

SEQ ID NO: 688373 - DNA, 90 bp, Homo sapiens
acatgcacagcctggcgacggctgcgattagtcagaagaagttgaaaaaatacgagaaagaatatcacaccatgagggaacagcaggccc

SEQ ID NO: 688374 - DNA, 83 bp, Homo sapiens
cgcctcgccccgccggttcctcaccctcggggagcaacatgggatattagaaatggctactccccagtcaattttcatctttg

SEQ ID NO: 688375 - DNA, 51 bp, Homo sapiens
ctgcccagccccacctccacagacgtttctaccatgaatgaaatgaagagt

SEQ ID NO: 688376 - DNA, 98 bp, Homo sapiens
gccgggctgcgcccgcttcttgcagctactctccagagagaccggatcttcaaacattttaccaggaagcgccaaagggctatgcgaaggcgagtcca

SEQ ID NO: 688377 - DNA, 100 bp, Homo sapiens
caccagaagtcctgaaactaatggcctcctctgtggagaccctgaggaaaactgtgcagattttcagctgaactctcatctctcaacactggcaaatatt

SEQ ID NO: 688378 - DNA, 73 bp, Homo sapiens
tctgctttttgctgggcatctccaacctgtctcaggtccagagcagagcaaacagaaaaaagtggctccccgc

SEQ ID NO: 688379 - DNA, 83 bp, Homo sapiens
ccgaaaccccagacatcaaccagctgccgccgtccatcctgctcaagtagcctctagttcgttagtcaaaacgtgaaaaaaaa

SEQ ID NO: 688380 - DNA, 100 bp, Homo sapiens
tgagaactatgtggcagatatcgaggtggatggaaagcagggaaagtttaaaggaagaggaaatgatcgcagggaaaagctccagtcttttgactctcca

SEQ ID NO: 688381 - DNA, 74 bp, Homo sapiens
tgttgtaaaagatcagccttcaggccttcccttcttcttggtggtgttcttgagtaagataatctggactggcc

SEQ ID NO: 688382 - DNA, 83 bp, Homo sapiens
caatgggtgtcaggagctgagcttgccccgccaggaacccctgagggttcccagtctaagtgggtgactttccaagatagagg

SEQ ID NO: 688383 - DNA, 50 bp, Homo sapiens
tggacgccgtcaacgccttcaaccaggagaccgagtgtgtcagcagccag

SEQ ID NO: 688384 - DNA, 75 bp, Homo sapiens
ggacctgttctccgcactgggcgatgcaaagcggcagctcgagattgcccaagacttgtgcaccatggacaattt

SEQ ID NO: 688385 - DNA, 100 bp, Homo sapiens
ctggaccgcatcgctgaatgtgcccggacctgcgccttctggctcacgtggaaaatgaagagcagtacacccaggctctggagaagtttggcggcaactg

SEQ ID NO: 688386 - DNA, 98 bp, Homo sapiens
agacacccactaacgtgataatactttcagaagccgaagaggaaagtctagtactcaataaaggggggcccttgcaagattccagctggtatgagcct

SEQ ID NO: 688387 - DNA, 83 bp, Homo sapiens
acagcctgatgcagaggaagattgaggactaaggggcttcatccacagactcttagggttcctctcagtttgaagtattcctg

SEQ ID NO: 688388 - DNA, 100 bp, Homo sapiens
gcagggacccgaaccggtgcccatccagtccggtgccatctgaagcccccttcccaggacttggatgttgtgggtgatggtatgcagtgtcctccttcac

SEQ ID NO: 688389 - DNA, 98 bp, Homo sapiens
gcctcaagtttctttcaccgcagtgggctaccataaacacatcaccttgatttttaatcccacgggtctcattctgtcgcacaggttggcgtgcagtg

SEQ ID NO: 688390 - DNA, 100 bp, Homo sapiens
tctgatgaccctggagctcttggcttccatacgtgtctcagacaggcttgtaaacatataacataaaaatggcttccaaaagagctctggtcatcctggc

SEQ ID NO: 688391 - DNA, 97 bp, Homo sapiens
tgttggtcaacagtgtcataaggtaaaataagaaccacatccctgtgtttagtcccgcacttacagacggctcgctgggcgacatgatcttcttcca

SEQ ID NO: 688392 - DNA, 98 bp, Homo sapiens
tcgagaggaccatcctgggtgctggccctgtgctggagtatggtttcaacatggtcatgtctcatccacacgctgtcaatgagattgcactaagcctg

SEQ ID NO: 688393 - DNA, 75 bp, Homo sapiens
tgatggataggagcaaccctgtaaaaccagccttagactatttttcaaacagatcccagaaatgcagatggccac

SEQ ID NO: 688394 - DNA, 99 bp, Homo sapiens
agcgaggagtcagaaactcagccactggttgccttggtaggcaataaaatcactgatcccaagaaccataccgtaatgtttgacacacttaaggactgg

SEQ ID NO: 688395 - DNA, 100 bp, Homo sapiens
cgcgaatatcgtcatcgttagaagggaccttggtagctaatgtccgaagaaagtgactctctgagaaccagcccttctgtggcctcactctctgaaaatg

SEQ ID NO: 688396 - DNA, 90 bp, Homo sapiens
gcctgaacaggcagggccagacccagcccgcggcgccatggctcacgtcggctcccgcaagcgctcgaggagtcgcagccggtcccgggg

SEQ ID NO: 688397 - DNA, 75 bp, Homo sapiens
gaaacagatacagagatgtaagcccatgaaaaccagtagattcccagacatcgcgaagtgaatctgaaattgtgc

SEQ ID NO: 688398 - DNA, 75 bp, Homo sapiens
ggtgccgcagctgcgatggccgtggccgtggggagaccgtctgcacgtctgagaatggtggatgtggtggagaaa

SEQ ID NO: 688399 - DNA, 82 bp, Homo sapiens
gctggctccgtgaaccttagggacaacaccgggacacccgcgaggccggaaaatggcagaaaatctatttcaggaacttcag

SEQ ID NO: 688400 - DNA, 82 bp, Homo sapiens
gaggctcacggtcttttcaaccatctttggcgaggccttgcttccttccactcgacgtctgaccaaacacaccaagttcgtg

SEQ ID NO: 688401 - DNA, 75 bp, Homo sapiens
ggatattcagttgcacatccccacatcaatgcactgccaatgtgtctgctgcacagagctttacatccccgggag

SEQ ID NO: 688402 - DNA, 90 bp, Homo sapiens
gtggcagcaagcgggagtcggggatagtgtcatcggttcggtaaagtttctgttctctggttttatgctgggggctcagagagaagtgga

SEQ ID NO: 688403 - DNA, 100 bp, Homo sapiens
gcaacctcgccccttgcaacaaaggcagactgagcgccagagaggacgtttccaactcaaactgtcacgggaagtctttttaggataaacgtaggcctgc

SEQ ID NO: 688404 - DNA, 100 bp, Homo sapiens
ttcagttccaggaagatgcctttgggaagcatgtcaccaacccggccttcaccaaactccctgaatagccaggccagaagaaggaaggcctgtggtgagt

SEQ ID NO: 688405 - DNA, 75 bp, Homo sapiens
tgtgtttaaatggaaactggacagaaccacctcaatgcaaaggtattgaagcccctgggtgataatttgatggag

SEQ ID NO: 688406 - DNA, 100 bp, Homo sapiens
gcctgcccacgcccaggagaactggctgctcaacagcaacatccccctggagaccagatttatcatagaatccccgactcagacccatcttctagcaaaa

SEQ ID NO: 688407 - DNA, 51 bp, Homo sapiens
gtggttgcacagtttggctaacagatatactttgcccatacagccctgaag

SEQ ID NO: 688408 - DNA, 80 bp, Homo sapiens
ccggtgcagaggacggtttgtctgcccagtaatcctgttcaagggcaagaacattactactggatggaaatccattccga

SEQ ID NO: 688409 - DNA, 100 bp, Homo sapiens
catgtcagacgcagccgtagacaccagctccgaaatcaccaccaagatcctccccggcgtgaaggtcatcatcgcacacaccgagaccaaaggacccttg

SEQ ID NO: 688410 - DNA, 98 bp, Homo sapiens
gaattacatagctggaaaggatcttacaggtcatttaggaaatcgtaaatcatgtgaagatgggactcttggtatttgtgcgcaatctgctgctagcc

SEQ ID NO: 688411 - DNA, 88 bp, Homo sapiens
accgtgaccgagagcgtgaccgagagcgcgaatatcgtcatcgttagaaggggacggcaaaacagaacagaaaggcggagataaaaag

SEQ ID NO: 688412 - DNA, 98 bp, Homo sapiens
ggggagcccgggacccccgggggcgcagccttagattgtaagcaaaagaaatcaaggtcaagatctggaagcaagaagaaaatgctaacattacctca

SEQ ID NO: 688413 - DNA, 96 bp, Homo sapiens
ccggaagtcgcctttgtctaacagatcaacaagttggagaaagctgttgctgcagcacacaccttcttcgtgggcaatcctgagcacatggaaatg

SEQ ID NO: 688414 - DNA, 75 bp, Homo sapiens
cctggtgactttgaacatgctggtgccgctagccaagctgtcctgcctgggtcgtagttcccccgctccctggga

SEQ ID NO: 688415 - DNA, 100 bp, Homo sapiens
cgcggtcacggcccagcgcgttcgatctgactgcagccatgagcagcaatgagtgcttcaagtgtggacgatctggccactgggcccgggaatgtcctac

SEQ ID NO: 688416 - DNA, 100 bp, Homo sapiens
agcagatgaagatccattggtaaattgatcaggatttttggcctaccctccaaagaaaagactggactattcagggattgctcttctaattatggggagc

SEQ ID NO: 688417 - DNA, 100 bp, Homo sapiens
gctggaggactcggggcctcctcctgtccccaaagagacggtggactctttcctcgacctggccagatcctattgatcatcgcttcagttattgggatca

SEQ ID NO: 688418 - DNA, 82 bp, Homo sapiens
acagaaccatcctgggctacaagacgctggccgcgggctccatcagcatggctgagaaatgagccgtcagactgctacagca

SEQ ID NO: 688419 - DNA, 72 bp, Homo sapiens
gggatggctataatgggtatggaggaggacctggagtcttctcacaagactttcaggattaagcgattcctg

SEQ ID NO: 688420 - DNA, 100 bp, Homo sapiens
ttctcggtactcttcagggatgagtcatgtggcagtggaaaatgcgctcgggctggaccagcaggccagttggacaaatgcgagtaaaaagcaacgtgaa

SEQ ID NO: 688421 - DNA, 100 bp, Homo sapiens
agcttttgatttattaaatttaaatagattagtaactggcatagacaactatgggcaggtgaccaagaatatggcccaggtgaccaaagccctggacaag

SEQ ID NO: 688422 - DNA, 87 bp, Homo sapiens
gattctttactcagctgagtgtgccacacaggtagccctggacggcattcagtgttttgagttaaacatgaagtttctggagagaca

SEQ ID NO: 688423 - DNA, 100 bp, Homo sapiens
gcctctcagagtgctgggattacagggtcgagctgtgcagttttagcgggtacaagatctaccccggacacgggaggcgctacgccaggaccgacgggaa

SEQ ID NO: 688424 - DNA, 100 bp, Homo sapiens
caaaatctcaacttcatgtacatagaagttgataaagtaacagagaggttacatgagcatgcagcataccttgtggatagcatgtgggactgtgctactg

SEQ ID NO: 688425 - DNA, 100 bp, Homo sapiens
actccgttagtattttggaattaaggctttcatgttactctgtgatcttctgatgattttcagccaccaattaatgacaggtggcagagagggccttcag

SEQ ID NO: 688426 - DNA, 85 bp, Homo sapiens
ctgtagggtatggtccagctgtgccgcaccgaggcgagcaggagcagggaacaggtaaaatgtccagtgatcgagctttgaggaa

SEQ ID NO: 688427 - DNA, 98 bp, Homo sapiens
gaggagtctccaccaggactgaccgctgccgcccagcacgtccagcctttccgctgtgcccattgccattactcctgcaacatatctggctctctgaa

SEQ ID NO: 688428 - DNA, 75 bp, Homo sapiens
cctgaatggcacgtgcatctgtgcacccgggtttacagacatgcacatgatggtgtccaagccagaacagtgggt

SEQ ID NO: 688429 - DNA, 98 bp, Homo sapiens
cctgtaacccagcctgtttcacttcttggaaaatgttctgctgctgccctggatgttcttgcaaatgtgtatcgtgatgaactgctgccacatatttt

SEQ ID NO: 688430 - DNA, 49 bp, Homo sapiens
gttaaggattccaagtaactcttatttgtaacaacatgctgtaccccaa

SEQ ID NO: 688431 - DNA, 100 bp, Homo sapiens
gggagaaccactgctgagtcttagagtgatgctgattcctctctaaccagataatgccttattgatttgccctggactttgtctcacaagatgaaatgtt

SEQ ID NO: 688432 - DNA, 75 bp, Homo sapiens
gagaattatgcacctgacagcatctattacctttgccttggaatacaggagtgatgagccctcctcttcagctag

SEQ ID NO: 688433 - DNA, 75 bp, Homo sapiens
gaaaatcatcttatcagacgaaggcaaaatgtatggtgtggctggatctcctaaaacccattgtgaaacagatta

SEQ ID NO: 688434 - DNA, 100 bp, Homo sapiens
cttctcaatgcaagaagttaagaagctctttcgaatcaagttgtccccaacagtgggtgccacgggtcggagacagcacggaaggagagacaagccttac

SEQ ID NO: 688435 - DNA, 100 bp, Homo sapiens
gggagcctgatcgcgatggggacaaaggcgcaagtcgagaggaaactgttgtgcctcttcatattggcgatcctgttgtttgaaaatgacccacatttca

SEQ ID NO: 688436 - DNA, 100 bp, Homo sapiens
tcatcagcctggcccgcctgccccttgtcaacagctacacacgtgtgcccccactggtactggtgtggcatactcggacagagaagcccaagatgaagca

SEQ ID NO: 688437 - DNA, 98 bp, Homo sapiens
ctgagtggttgtgtggtcgcgtctcggaaaccggtagcgcttgcagcatgctgctggagaagggcctccctagtgtgcagcagcccctgctccaggtg

SEQ ID NO: 688438 - DNA, 75 bp, Homo sapiens
gaactgagacgtttcgaattccaggtgaccattgtgaggtagatattttgttctaattttccagatgaggaagct

SEQ ID NO: 688439 - DNA, 75 bp, Homo sapiens
gaacgaggcaaggagctaaagcagcgtgcgttcagccctgggtaaagaagaagcggacctggcacaaacacggcc

SEQ ID NO: 688440 - DNA, 100 bp, Homo sapiens
gacattgagaagatctttgcagtggccatcatgatgattggctgtcaagctgggaactgcctgacttgagggaagggagagtaaaagccatcagtgactc

SEQ ID NO: 688441 - DNA, 100 bp, Homo sapiens
cacaactccagtgctaactcaacaggtcgtttatacgcaatgcagactggaatgaagatcgatagtaaaactcctgaatgtcgcaaatttttatcaaagt

SEQ ID NO: 688442 - DNA, 74 bp, Homo sapiens
ctactgccggagcttctgccaggagtatagtcatggccaacagcaaaaaactcaagagggggaactgaaaatta

SEQ ID NO: 688443 - DNA, 74 bp, Homo sapiens
ggaccggagcggaaaaccttctgaagtacatgtgaagattttttggcagcttagcgtggaaaccattgatcacc

SEQ ID NO: 688444 - DNA, 88 bp, Homo sapiens
cagggcaaggcggcggacggctgcgtcgcccgaggcgaggaggagcgctggcggtcttatatccagatggccaggctcagatgattca

SEQ ID NO: 688445 - DNA, 100 bp, Homo sapiens
aaggattccaagtaactcttatttggtctggcccctctttgtgaaaatatgcccagcggcaaggccaacaagccgggggatgttgttagagccaaaaacg

SEQ ID NO: 688446 - DNA, 100 bp, Homo sapiens
gaagattcgatggacatggacatgagccccctgaggccccagaactatcttttcgattcttcgctgctgctgccttaccgccgagaaccaccacccgcca

SEQ ID NO: 688447 - DNA, 100 bp, Homo sapiens
gactgggagacgcgctccacagaaacccggactgagaggcagcgagaggaaaccaggacgtggaccacgccagaagtgaccagccccccaccatccccaa

SEQ ID NO: 688448 - DNA, 100 bp, Homo sapiens
ggattattagctgtcctgaggtcaaaacagacaaaatccactataggagtcatggtaacagcgtcccacaatcctgagtttcgccgtgaggaagatgcgg

SEQ ID NO: 688449 - DNA, 83 bp, Homo sapiens
agccaagctcgtagcctgccactccgtgcaatcggcaaggttggaaaccagaagcgtgttgttggtgtgcttttggggtcatg

SEQ ID NO: 688450 - DNA, 75 bp, Homo sapiens
ctcagggaaggggcagcacaaatgtctacacaaggaagtacaggatttggcttttctagatgtcgtatccaaact

SEQ ID NO: 688451 - DNA, 96 bp, Homo sapiens
cccgagggccggggctggaggagactggcggagctggcggggagtcgcgggcgcctccgcctcagacccaacatgagtgaagtttcctgcaagaaa

SEQ ID NO: 688452 - DNA, 75 bp, Homo sapiens
gaatgcagcatggcacaaacatggctgggaggaattggtatattacacaggaggagatgttaaagtaacccatct

SEQ ID NO: 688453 - DNA, 99 bp, Homo sapiens
cgcagcctgcaagattgtggtgcacacgccctgcatcgagcagctggagaagccaaatgaccctgtgactaacatctgtcaggcagctgacaaacagct

SEQ ID NO: 688454 - DNA, 83 bp, Homo sapiens
gaaccagcaacaatggatgcagtcattccagcaccaacaggatccaaaactcccccactggaaaggattctgaaagaaatgaa

SEQ ID NO: 688455 - DNA, 76 bp, Homo sapiens
tctaagaaatttgctgttaaagaggcaggtggaagtcatcataaagtttctgtttcacccgtcgtccatgttcgag

SEQ ID NO: 688456 - DNA, 82 bp, Homo sapiens
tgactgggcaacatgttattcagtaaggatggggatgataagaagagacctgtgatcattcatcgagccattttgggatcag

SEQ ID NO: 688457 - DNA, 87 bp, Homo sapiens
cacgggctggggacacacccagtatggagggggatatgagactttctactcggaatatcctgagtgttgcgtggatgtaaaacccat

SEQ ID NO: 688458 - DNA, 51 bp, Homo sapiens
atttaacttatatctgcctgtcaggctgcactccccgaaagtgcggcagag

SEQ ID NO: 688459 - DNA, 50 bp, Homo sapiens
ggccttaaggagaaagtttcaggtgtccatctcttcacagtcatggctga

SEQ ID NO: 688460 - DNA, 50 bp, Homo sapiens
gaagagggaagacacgcggaaacaggctgggccctgtctcaggcccccag

SEQ ID NO: 688461 - DNA, 80 bp, Homo sapiens
cctgcctgcgcgcggccaagccatgctcggccccaggctgtatcgcatccattgaatactgtgaccgaggacatgtacac

SEQ ID NO: 688462 - DNA, 96 bp, Homo sapiens
tcagacacatccaagtctacatacagcctgacgcggaggatttcgagcactttccacacatgaggagaagaagagcttctgtttagaagacacgtg

SEQ ID NO: 688463 - DNA, 100 bp, Homo sapiens
gcttctgattgacaacaagacaggcaaaccactgccctttgggactctgggagtacacaaggctgtgggtgagcgtggaggatgctcagatgcacaccgt

SEQ ID NO: 688464 - DNA, 98 bp, Homo sapiens
agatcttcatgtgtctcttctaagctgaataaagctgttttggaactgtcaggtacctcaaagcgtaagaatgattgatgttggctgatattggagtg

SEQ ID NO: 688465 - DNA, 98 bp, Homo sapiens
ctagttccggccagggtcgccccggcaaccacgagcccagccaatcagcgccccggactgcaccagagccatggtcgatcctgtttgaccaaactcag

SEQ ID NO: 688466 - DNA, 51 bp, Homo sapiens
cccaggacaaggaggagatgaaggcttttatcctagatcaccactggattg

SEQ ID NO: 688467 - DNA, 75 bp, Homo sapiens
cagatgctcataaggattgtcctctttctacaaaagtgattcgcctttgccagtctcatctcgtgtctgctttgt

SEQ ID NO: 688468 - DNA, 100 bp, Homo sapiens
gttcatcccatcagcctggattggtgaaactgaatcacaggagatatttccaggccccttcacagatgtagtcactacaaatcttaaattgcgaaatcca

SEQ ID NO: 688469 - DNA, 96 bp, Homo sapiens
gtggacctctcggctttcctggtcagcagcgacttggggcttgcttctgacatgtctgatgagcgcattcctgctgttgctcctggctattacaag

SEQ ID NO: 688470 - DNA, 96 bp, Homo sapiens
cccgcgtcgccatggccgcggttcccgagttgctgcagcagcaggaggaggaccgcagcaaggtctcctctgagcctccggcctccataagaccca

SEQ ID NO: 688471 - DNA, 75 bp, Homo sapiens
ctcagagagggaagagattcagccagcacactcctcgcgagcaagagatgatttacacaatgaagaaagtacatg

SEQ ID NO: 688472 - DNA, 88 bp, Homo sapiens
gctcccctaggagtgctgagcccgcggaaccgcagccatgaaaattgaccctgaggtggccgccttcctgcagaagctacgaagtaga

SEQ ID NO: 688473 - DNA, 100 bp, Homo sapiens
atctaaaccagtgctggacaatagatgctcagtaaagtcatgaagctgagccccaaagcagaggaagtagctacgttctttgcaaaaatgctcgaccatg

SEQ ID NO: 688474 - DNA, 88 bp, Homo sapiens
gcttcagacagcatatttgagtcatttccttcgtacccacagtgcttcatgagagattccagaattctctgatggtttctggactggg

SEQ ID NO: 688475 - DNA, 100 bp, Homo sapiens
ctgttagtcggaaagagtgcatctgtagatgctgaaaaatcaatgctgtccaaacttaaacatgtgaagctcctggaggaactcagtaagttcccattcc

SEQ ID NO: 688476 - DNA, 74 bp, Homo sapiens
acaaccttcgatctcctgacgaataataacggactttgatatgacactcagtagattttcatataaagggaaaa

SEQ ID NO: 688477 - DNA, 95 bp, Homo sapiens
ggagttctacgtgtcccccgaggatctggaggcacagctgcagtctgacgagaggggtcctgacctgagggctgcatcaagatcttgtcattcca

SEQ ID NO: 688478 - DNA, 100 bp, Homo sapiens
aaaagcattgctggtatttcgaaggactctatccaacctattatatttgtccagtggagccccaaaatagaagcaagatgaatattccattccgcattgg

SEQ ID NO: 688479 - DNA, 50 bp, Homo sapiens
ccgcctggcaggccctgcgcaccaggtccctggtgctgaaccgcctgcgt

SEQ ID NO: 688480 - DNA, 75 bp, Homo sapiens
ccaaaaccagaagcagggccgcttccgcagcctggaggaagcactgaaagctggactggtgattgcagctggaag

SEQ ID NO: 688481 - DNA, 90 bp, Homo sapiens
gccgcctgaagcagctgctgtcccgggcctaccccctggactccctggagaagcagatggaaaaggccatccgttgcacactggtaaact

SEQ ID NO: 688482 - DNA, 120 bp, Homo sapiens
gccactgcccgcatggttgggtgggagcaaactgtgagatccactctgagatttgcccacctgatgaccttgccagcttgccatcatgcaaagaaaatcctgaagatgttctgagcccaa

SEQ ID NO: 688483 - DNA, 100 bp, Homo sapiens
ttccagatcgccctgtcctcccgcgtggctgagtgggattccaccgagaagatcggggacctcttcgtggcctcgcatacttccacaggctgcactcgag

SEQ ID NO: 688484 - DNA, 82 bp, Homo sapiens
ttcccttggaggctgtagtggggacctgctgtgtgttggacctttatacgtattgtaaaggagtggacgcttctcttgtgag

SEQ ID NO: 688485 - DNA, 98 bp, Homo sapiens
caggacttacggcagtgggggctgacagggttctgatgactgtcttgtgaaaatatgggcaacagatgatgggaggttgttagctaccttaagaggac

SEQ ID NO: 688486 - DNA, 75 bp, Homo sapiens
cgggctacgctcctccatcacgtgagtcattcttatagaagagcatcagaggaagataaaaaagaatcctcaatg

SEQ ID NO: 688487 - DNA, 85 bp, Homo sapiens
tccagctgtgaaagcaacataaatggaattcattgaagagttgctgtctcccccttttgggggtttagtggcatttgtgaaggag

SEQ ID NO: 688488 - DNA, 83 bp, Homo sapiens
aaaaactggagagcttcatcaaaaatagtgatagctttgataagtctggagataagcaaacaacgcctcctttctggaaacta

SEQ ID NO: 688489 - DNA, 51 bp, Homo sapiens
cggaatgcctgaaccaactgttttgaggccataggaaaaggatacagagta

SEQ ID NO: 688490 - DNA, 83 bp, Homo sapiens
tgatggatccatttctcctattgaggagtcaactgccctgtgggacatcgagaccggccagcagacgaccacgtttaccggac

SEQ ID NO: 688491 - DNA, 75 bp, Homo sapiens
tcggggccccccagcctccgccaacccaggggcaccgttctacccctttctgcctggagaaactgccgtttttcc

SEQ ID NO: 688492 - DNA, 98 bp, Homo sapiens
tgccgcgcagttaggcagcagcagccgcggagcagtagccgccgtgggagggagccatgaagcattacgaggcatttggctttatgtcccgagttgcc

SEQ ID NO: 688493 - DNA, 83 bp, Homo sapiens
gggaacccatggacacatgtggcatgggctcctttgggtgccggtggatcccttcatacgatcttgtagaaaatttcagctgt

SEQ ID NO: 688494 - DNA, 98 bp, Homo sapiens
gcccgaggcgaggaggagcgctggcggcctcaggagtgcaagtagctgatgaagtatgtcgcattttttatgacatgaaagttcgtaaatgctccaca

SEQ ID NO: 688495 - DNA, 75 bp, Homo sapiens
gaagaaaagaggagagttgaaagagaacaggaaaggcagcaacaggtggaagctgttgagttggaggctaaagaa

SEQ ID NO: 688496 - DNA, 83 bp, Homo sapiens
ctatgatgttacagaagagtcaattaaggaattctttcgaggattaaataaactcatcactgctatatatgcagattatgccc

SEQ ID NO: 688497 - DNA, 75 bp, Homo sapiens
cgtcggggccgagctaacccggcctctggacaagatgggtgtataacattctcgacaagaaggctgaagcggacc

SEQ ID NO: 688498 - DNA, 108 bp, Homo sapiens
caggagcaagatgattctactgtagcctgccgtttctttcacttccggagggctttccagccacaacgagctgctggcctcctgcgggaagaagttctgcagccgagg

SEQ ID NO: 688499 - DNA, 100 bp, Homo sapiens
ctcagatcaagctaagtgtgttcacctccaacaagctcccattggatcttaagttaacaagcacaagccctggctggagcccacctaccacggcatagtc

SEQ ID NO: 688500 - DNA, 83 bp, Homo sapiens
gtttgaccgcgttgacgacggctcgcagagtgagaagccctaccactgcaactgggacggctgcggctggaagtttgcgcgct

SEQ ID NO: 688501 - DNA, 113 bp, Homo sapiens
ggagagcatcgactggaccaagatcgagcccagcgtcaacttcctcaagtcgcccaaagaacccagtgacttgattgtaaaaatttacagagcggaatcatatgctggtctcc

SEQ ID NO: 688502 - DNA, 100 bp, Homo sapiens
cctggcagtgcgtcaatcagagcgtcctgtgcggctagcttgtcactttctgcaaaggtttccctcagggagcctcctgctgccaggcaccatgacagtg

SEQ ID NO: 688503 - DNA, 100 bp, Homo sapiens
tcatgttaaagatgagcgggtggcagcgacagagccaaaatcagagctggaacctgaggagagagagagattaacaagcggatcacagaggagcaagccc

SEQ ID NO: 688504 - DNA, 100 bp, Homo sapiens
aggaatgaccctagccagactcagggatcaaagagcaaacagattcagtggcctgcattgtgccggtggtggtgtgcacattgagccccggtatagacag

SEQ ID NO: 688505 - DNA, 95 bp, Homo sapiens
gagcagtcctcccagaaggagtgtgggcaacctgcaggtaagaagactgttagaatgccctcggtaacacagaggctgagagatcctgacataaa

SEQ ID NO: 688506 - DNA, 82 bp, Homo sapiens
cttggccagccaactggacagcggagcacgatgattgatagcttccccgggcgctgcctggacaggcctgcctgcgtgctgg

SEQ ID NO: 688507 - DNA, 97 bp, Homo sapiens
ggtcttgagattctaagtgggaatcatttcagcgcaaatctgtccaaggctgcctggggagcattggagaagaatggcacccagctgatgatccgct

SEQ ID NO: 688508 - DNA, 100 bp, Homo sapiens
gataaaatgacgacgtccttctggaagaggcgaaactgcctggcagtctctgtgaagatgaatgtgctgctcttcgcccctgggttactgtttcttctcc

SEQ ID NO: 688509 - DNA, 98 bp, Homo sapiens
gacgcggcacctacggtcacgtctacaaggcgaggcggaaagatggcctcctctattggcccaggaagcccacccagccccgccacgcagagcccaga

SEQ ID NO: 688510 - DNA, 97 bp, Homo sapiens
ctctcgtctccttcctggtttggggttattcagcttctcaaggctggaaaagcgaaggaagtttcctacaatgcactagcctcacacataatctcag

SEQ ID NO: 688511 - DNA, 100 bp, Homo sapiens
cggaaagcagcgtcaggagccatagtacctacagcagcactccagctttacatgacttcaagggaaataaggctgagacaaaagatgaagcatgaaaaag

SEQ ID NO: 688512 - DNA, 75 bp, Homo sapiens
agcgtccttcccctttattaccgatactgggtccacagttacagaatgtctgaaggggacagtgtgggagaatcc

SEQ ID NO: 688513 - DNA, 50 bp, Homo sapiens
cgtggaggcagaggtggcatgggtaacaaattccaaagcccttaaataaa

SEQ ID NO: 688514 - DNA, 74 bp, Homo sapiens
tcaaagccctgggtcgcttggaagaagccaaggtgctgtgacatgtatatggatgaatgaacagtgtagcagta

SEQ ID NO: 688515 - DNA, 96 bp, Homo sapiens
cctcccctcaggaacgtgtcccggggccgacccggcccgtagtgtggaagcagcttcaggtcactacaggaaaagatatcttcattaaagtgcaac

SEQ ID NO: 688516 - DNA, 97 bp, Homo sapiens
ttattactggcagcatgtatatcttttgcgacattgactacagcaccgtgctcctcggcatgctggtgacgcaggacgtgcagctcgggctcttcat

SEQ ID NO: 688517 - DNA, 100 bp, Homo sapiens
ctgagccccggcactgcctggctgcgagcacatgatggcgatacgggagctcaaagtgtgccttctcgggctgggtttgtcaagtcgcccatgtcagaaa

SEQ ID NO: 688518 - DNA, 100 bp, Homo sapiens
agtattgccgcggtggaaatggaggaattaatgaccaagttaataactgagacacctgaccagccaatcccatttctcattgaccatcttcagtctaaac

SEQ ID NO: 688519 - DNA, 75 bp, Homo sapiens
ggtagcgtctctgtttccttgtgggcgctcgcgcggccctgggttttgggatttgagattgacgcggtgaactct

SEQ ID NO: 688520 - DNA, 75 bp, Homo sapiens
acaggtagccctggacggcattcagtgttttggtgcttctcagaatgatgatggctccagatccaaggatgaaac

SEQ ID NO: 688521 - DNA, 100 bp, Homo sapiens
gaaccgtcgctatgccaagaagtgccaggtggagcggcaggaaggccactcacagggcttcaacaagctagctgagccatccctccattcattatgaaca

SEQ ID NO: 688522 - DNA, 75 bp, Homo sapiens
agccctctgcagcggagccccctgcccatttggttttggaaatcaacgaccgggagcagaagttgcatgccctta

SEQ ID NO: 688523 - DNA, 95 bp, Homo sapiens
tccaggccaagagggatccttcacccgtgtctgtctgcagatctccaggggagcccaccagcctagtcaacatggcctcggaagacattgccaag

SEQ ID NO: 688524 - DNA, 90 bp, Homo sapiens
ggcggcagtcggatagacaataccacaacaacacattttgcagagtgtactttctgatcggagctgtttaagagttacggctggtcccac

SEQ ID NO: 688525 - DNA, 96 bp, Homo sapiens
gttaagagttgcaggtagcggtagcgatggacactctggatcgagtagttggatcaatcttcctgtcctacaactgacaaaggatcccctaaagac

SEQ ID NO: 688526 - DNA, 100 bp, Homo sapiens
gccctttctcctcggcactgtattctttacctgcttcccaatcccactgatgaggatcagcccatgtgatgtccttgcattgcccatttttaagcaagaa

SEQ ID NO: 688527 - DNA, 75 bp, Homo sapiens
ctcggatgtggagaaggccaagaagcagctcctgcatctggcggaggagaaggatgtggagccacccaaaatttc

SEQ ID NO: 688528 - DNA, 101 bp, Homo sapiens
ctaaagttcgtgaatctcaacttgcatgttatttgaaagcaattgagacgcaaccgaactttgcagtagcttggagtaatcttggctgtgttttcaatgca

SEQ ID NO: 688529 - DNA, 50 bp, Homo sapiens
tccctgcaactaactccattcttaattggagcatctttccttgaagaagt

SEQ ID NO: 688530 - DNA, 100 bp, Homo sapiens
tcgccgtcatgggcgcctcggccgccatggtcttcagcggtgaaagaaaatggcccgaaccaagcagactgctcgtaagtccaccggtgggaaagccccc

SEQ ID NO: 688531 - DNA, 90 bp, Homo sapiens
tgcacaagcaccaaaagcaccacaagtaccacaagcatggcaaggacggcccccaagttacatgaactacctgctagactcacaccccag

SEQ ID NO: 688532 - DNA, 100 bp, Homo sapiens
cggtgacctggaccacggcgcagacgcgggcgagctgcggctcggacgccagcggacacgcgggcgagcaagagtgagccatggagctacgtgtggggaa

SEQ ID NO: 688533 - DNA, 74 bp, Homo sapiens
gcgcccaagtggcggggactactggtgcctgcgctgaaaaaggaggccccgtgtgggccgcggcccggccctca

SEQ ID NO: 688534 - DNA, 83 bp, Homo sapiens
gctgtgtctacggcagcctggggatataaactctcagaaattgagcccaatgtattccttcgaccttttctggaagtgattcg

SEQ ID NO: 688535 - DNA, 89 bp, Homo sapiens
cggccgaggacttcgccgaccagaattcagcttagagaactatcaacacaggacaatgcaagcccatgagctgttccggtattttcgaa

SEQ ID NO: 688536 - DNA, 90 bp, Homo sapiens
cttacccgtgacaaaatgtgttccatggtcaaaaaatggcagatccatcacaaagcgaagtcatgggagagccacacttgatggtggaat

SEQ ID NO: 688537 - DNA, 101 bp, Homo sapiens
atgtaggtgatattaaaattgaagtcttctgtgagaggacacccaaaacatgtgaggtggtgatctttgtgaagtctgtgcagcggtgcattgccttggcc

SEQ ID NO: 688538 - DNA, 51 bp, Homo sapiens
cactcgctcccttgatgatcttgagatggtggagccagggcaagatttact

SEQ ID NO: 688539 - DNA, 102 bp, Homo sapiens
ttctttttatttttttaatggctttacagaatcttaaatagaatacagtttgacatgacggcaaaaaattatgtgccaagagttgtaacctctgcacaacag

SEQ ID NO: 688540 - DNA, 75 bp, Homo sapiens
gttttacagtctgttccacatgatcattgtaataaggttttcctttggaatatggataaatacaccatgatacgg

SEQ ID NO: 688541 - DNA, 100 bp, Homo sapiens
agatcattcacaatatctgtgtcgttcttggcagaaattatattttccagcccgtgtctgcagaatggccaacatgcagggactggtggaaagactggaa

SEQ ID NO: 688542 - DNA, 89 bp, Homo sapiens
ctgaaggatggtgctggggatgtggcctttgtcaagcactcgactatatttgtgtcgagttatagcagtgctggattgggagctgtcaa

SEQ ID NO: 688543 - DNA, 98 bp, Homo sapiens
ctagagggaaagcgagagggagacggacgttgagagaacgaggaggaaggagagaaaatggcgtccacgggttatgatgtgattgctcaagcccaatc

SEQ ID NO: 688544 - DNA, 75 bp, Homo sapiens
atggtcttgaaacacaaatggtttttgtaccttctccaggcaaattccgttcccctgcagcaccatctcctttgg

SEQ ID NO: 688545 - DNA, 90 bp, Homo sapiens
gaaagcaagctcttctagaagttggcatttgttgctatcggggactacaatggccacgtcggtctgggtgttaagtgctccaaggaggtg

SEQ ID NO: 688546 - DNA, 74 bp, Homo sapiens
tgaatgtctcttcaatctccagaaaggttaatgttgaagaaggaaaatgcggaagtcgtcatttgacaagtttt

SEQ ID NO: 688547 - DNA, 75 bp, Homo sapiens
ctcttgctctttggcccgtggctccttaggaagggccaattcctgtccccccagcagcatggcatcgtgtgctga

SEQ ID NO: 688548 - DNA, 75 bp, Homo sapiens
gtcattgacaagtttggatcagacatcataaaactgaacccacttccagcgggtgatcccagaagatggccctgc

SEQ ID NO: 688549 - DNA, 75 bp, Homo sapiens
tacatatgtacagcctagaagaaaacagagagatgagcagcttctgagttatggaggttttgatgactatggtgg

SEQ ID NO: 688550 - DNA, 73 bp, Homo sapiens
agtatcatcaacgggaagtgagagctggttggtggagaatttgaactggagatgaactctattatccaggatg

SEQ ID NO: 688551 - DNA, 125 bp, Homo sapiens
aactggtactgattgttccccagagtttggggaccccttgtcttgacagtatcatgcacaggacatggaggagtgaatcagcttgggggggtttttgtgaatggacggccactcccggatgtagt

SEQ ID NO: 688552 - DNA, 96 bp, Homo sapiens
aagtcacacatttgggccagaaagggggcgtggttgctctccagaccctacgaaaattagttgaacttactcagaagccagttcatcagctctttg

SEQ ID NO: 688553 - DNA, 99 bp, Homo sapiens
gatttagatgttgaacaacttggaattccaggtgtacaactatgagcctttgacacagctcaagaatgtcagagcaaattactatggaaaatacattgc

SEQ ID NO: 688554 - DNA, 87 bp, Homo sapiens
gctgtcggtgcagcaggagacggaggaccagaactacggcatgcgtgatgggaaggctctggagaggttcctgcaggattactttga

SEQ ID NO: 688555 - DNA, 100 bp, Homo sapiens
attgaaaggaactggctatctttgatctcttcctccagccctgtatgatgagattcgtcagtttcgcaaggcctgtggggaggctcatcttaaaactata

SEQ ID NO: 688556 - DNA, 85 bp, Homo sapiens
tcaatttacgtttctgtgctccagtttcttggtttataaaaatgcgaggaacgtggcattggaggcctacctcatcaagccgcac

SEQ ID NO: 688557 - DNA, 100 bp, Homo sapiens
taccgggttttggaggctggcaagattgggatatttgagagtccaactggcactaatttctagaaggaggagttggccatgttgaaatgttatttcgctg

SEQ ID NO: 688558 - DNA, 100 bp, Homo sapiens
acccccaagaggagcttgtttgggagtgggggcagacggcgttttgcgcccaactggttgcacgttttcaaaaaatacctaatggtgaaaatgagacaat

SEQ ID NO: 688559 - DNA, 83 bp, Homo sapiens
ccaagatccaaggaaatgctaagaaggctttattaaagtgggttcagtacacagctggcaataaccctccactgagtgaagaa

SEQ ID NO: 688560 - DNA, 90 bp, Homo sapiens
gacctgtgggctgggcagcagctgctgtggaagggctccttcaagcccagcgagcatgcatccttcggaaagctctggacaagatcgcgg

SEQ ID NO: 688561 - DNA, 120 bp, Homo sapiens
ctcagagatgcctgtaccgtgatgtgacgctggagaacctggcacttatgtcctccctggcaggacagaaggagcaagctgtggaatggtataagaaaggtattgaagaactggaaaaag

SEQ ID NO: 688562 - DNA, 74 bp, Homo sapiens
ggcccccgctgtccacacccaaggaaggcccgaacaagacaggaacgtcctgtgccctggactgtggagctggc

SEQ ID NO: 688563 - DNA, 85 bp, Homo sapiens
gccgaacttcagggtttccaccgttcgttcaaggagggagccatggatttgctgcgggagctgaaggccatgcctatcacgctgc

SEQ ID NO: 688564 - DNA, 82 bp, Homo sapiens
gaaattcccagaggactttggagaccagctccgacagttagttaatatgtgcatcaacccagatccagagaagcgaccagac

SEQ ID NO: 688565 - DNA, 50 bp, Homo sapiens
ggggaggccaacgtgaagaaccggctcagttcggggaagctgcaggagtt

SEQ ID NO: 688566 - DNA, 50 bp, Homo sapiens
ctggacgcttgcatggcgcttgagcgatgtgcattttgtaagcactttgg

SEQ ID NO: 688567 - DNA, 50 bp, Homo sapiens
agccctgccagctgcgccgggacgagctgccatcagtcatgctcttaaac

SEQ ID NO: 688568 - DNA, 75 bp, Homo sapiens
cgcgcggctgtggagaaccacgtgaggaatcctgttacacctgggatttaggcactttcaatctgaaaaaataca

SEQ ID NO: 688569 - DNA, 75 bp, Homo sapiens
gcaattgaatatgtgcatggatacttttctagtgaacagaagtgaagctggacaaggtttcatgctgttgctgct

SEQ ID NO: 688570 - DNA, 100 bp, Homo sapiens
acggggtgatgactcaagacctggtccttggagaccattagtcaagccaggaagctgtgctgaatggtttggtggccactgaggtgttgatgtggtttta

SEQ ID NO: 688571 - DNA, 50 bp, Homo sapiens
cggtcatctgtggcagtatatcaaggggtccgaggagcaaacagttgtct

SEQ ID NO: 688572 - DNA, 100 bp, Homo sapiens
aaatctccaagaacaaggaatttgctttggctgattgaacctgcacttgttgccaagtcttccatcttactagatgtgaaaccttgggatgatgagacag

SEQ ID NO: 688573 - DNA, 100 bp, Homo sapiens
gaggctcgtgtggaccccagagcatgcacaggctggtgatggaggacgaggagaaggcagtggagatcttgggcaacacggaagctgctcatcctccatc

SEQ ID NO: 688574 - DNA, 74 bp, Homo sapiens
cagaaggagctggcggacatcactttagaccctccacctaattgcaggtactgtgagaatagagatgtttcgaa

SEQ ID NO: 688575 - DNA, 100 bp, Homo sapiens
gctcactcgggcctctggccaacagggcatggggacatcatatcaggccaagaataaggagacgggtgctttggctgcggccaaagtcattgaaaccaag

SEQ ID NO: 688576 - DNA, 100 bp, Homo sapiens
cgatgttaccattgtgaaagaaggttgggttcagaagaggggtacaggtttgcagattccgccagcagcacagcaagctctacagatgagtggctctttg

SEQ ID NO: 688577 - DNA, 148 bp, Homo sapiens
aaggatctgtcatctcggagcaaaacagatcttgactgcatttttgggaaaagacagagtaagaagactcccgaggtgcccatgggttggacaatgaggctggtcacagcagcactgttactgggtctcatgatggtggtcactggag

SEQ ID NO: 688578 - DNA, 100 bp, Homo sapiens
ccgcagtccaagtcccggaagatcgcgatcctgggctaccggtctgtgggaaaatgtctaatcaacaggagaagtatgaagctcagaatatagtcaattc

SEQ ID NO: 688579 - DNA, 83 bp, Homo sapiens
tactgattgttccccagagtttggggaccccttgtcttgacagtatcatgcacagtattcgaaggacccaagtcattgatgat

SEQ ID NO: 688580 - DNA, 75 bp, Homo sapiens
tccacatgttgctgcaaatgggtgctaatcacaccagccaggaagtactcccactaccccaacctcctctcaagc

SEQ ID NO: 688581 - DNA, 98 bp, Homo sapiens
gtcaggtctggagctcgaccgggccagaagttttcatgggctgagctgctgagttcagcctgggaactgaggccaacaagggagtctcctcggcacac

SEQ ID NO: 688582 - DNA, 100 bp, Homo sapiens
gaagctttggccagcaccgtcactctcactgccattgccgagagtcctgttattgaggtacatggactatatcgcacaacaggtgctagttttgagaagg

SEQ ID NO: 688583 - DNA, 90 bp, Homo sapiens
gcgtcctcaacgagatcttgggcaccgagagggactacgtgggcaccttgcgcttcttgcagtcggattactacagcatcccatttccca

SEQ ID NO: 688584 - DNA, 50 bp, Homo sapiens
atatgaaggcttccccgtcccggtcctctccacccggatcctggccatga

SEQ ID NO: 688585 - DNA, 75 bp, Homo sapiens
tgaatatatgcagcaaaatttagtaagctataaggaagaccagatggatgagaaactaatggaacctctgaaata

SEQ ID NO: 688586 - DNA, 101 bp, Homo sapiens
gtccagagaagcaggatggatcttgcgaggaatgaatctgaagtctgctgcagtaaaacacagaaggctttaaaatgttttcttgcataaaattcaaaact

SEQ ID NO: 688587 - DNA, 98 bp, Homo sapiens
acacaggagagctggctgcagtaaaaatcattaaattggagcctgcaactcaagcatcccaaccttgttaacctcctggaagtcttcaggaggaaacg

SEQ ID NO: 688588 - DNA, 75 bp, Homo sapiens
atcaaaggtcacctggaaattgccttattggaaaaacatttcttacgtgcagaggccaagaccgttttgcccaag

SEQ ID NO: 688589 - DNA, 50 bp, Homo sapiens
tggaaaaggtggagcgattagaatgtttggtgaggattcatcaacctcca

SEQ ID NO: 688590 - DNA, 75 bp, Homo sapiens
gaaagacacctggccagcggtccagagctgatgcagggaaaagaagatctcccggagcagtgccctgaaagtgct

SEQ ID NO: 688591 - DNA, 100 bp, Homo sapiens
ggcccggccatcatcacccaggtgaccaaccccaaggaggacgagggccggttgccgggcgcgggcgagaaagactgtggatattcataaggagaaagtg

SEQ ID NO: 688592 - DNA, 75 bp, Homo sapiens
ggtggaggtgttaaatgaaaaaaatatttacaccagcagctccagttcataccaataaagaagatcctgctaccc

SEQ ID NO: 688593 - DNA, 90 bp, Homo sapiens
gtgctataagatgcgactgctacagggaccatgggacactattacgcaacaggcagccttaagtgccttgaaacaattttctgaacaagg

SEQ ID NO: 688594 - DNA, 75 bp, Homo sapiens
gaactttcacggacaacctcagaggacaacgaagtgttcgctcctcaagagttactgatctatgaaatggcagag

SEQ ID NO: 688595 - DNA, 75 bp, Homo sapiens
gtcgccttgctcctcgccgcggcggggactgcaggggaaaaaggcctttgaacgcatcaacagcctcacattcaa

SEQ ID NO: 688596 - DNA, 101 bp, Homo sapiens
ggggctctacagagaggccacagagctgtgggggaaagcagaaatgatcattgaacagctttggacatcagacagtgcaggagaagaatgtgatgcggcag

SEQ ID NO: 688597 - DNA, 100 bp, Homo sapiens
cagccaccaaccacactaacgagattcaagattatttgcaacagctcacgggagcaagaacgatgcctttgagtaatggacagatgggccagcctctcag

SEQ ID NO: 688598 - DNA, 83 bp, Homo sapiens
accactgtcccatcaaatcgcgcaaaggggatgtcctgcacatgcactacacggaactgtggctgcaccatctgtcttcatct

SEQ ID NO: 688599 - DNA, 100 bp, Homo sapiens
tgatgaagggaaggaaatcatgtcaagcgaagccttgaaaaagctgccctgagacggtgtcccgccgaaagtgtacaagtccccagagtatgagtccctt

SEQ ID NO: 688600 - DNA, 125 bp, Homo sapiens
gggcagaggaaaatgcaagaagactgatggagcaggcttgcaatattaaagtgcacacatcttgaccaactcagcagcaaggtggattttctttgtgtttaaagaaaaaaaatgtccctgtgtct

SEQ ID NO: 688601 - DNA, 100 bp, Homo sapiens
ctggtgtagacatccgtgtccgtgtaaagggtggtggtcacgtggcccagatttatgctatccgtggtcctgaaccagttatgtgtgttgcatgagaaaa

SEQ ID NO: 688602 - DNA, 83 bp, Homo sapiens
gaaagatgttttgcctactgttgatccgaatctacctgttactcgtattttggacaatcttatggagatgaagtcaaaccccg

SEQ ID NO: 688603 - DNA, 100 bp, Homo sapiens
gaattcgtcctgcagaatcacgcggacatcgtctcctgtgtggcgatggtcttcctgctggggctcatgtttgaggcttcttttggaagttcgagcccag

SEQ ID NO: 688604 - DNA, 74 bp, Homo sapiens
tggctggtctcctactcccagatgcatccgtgtcagaatagataatctctatgagagggcgcttcacatccgca

SEQ ID NO: 688605 - DNA, 100 bp, Homo sapiens
caccgctcccagaaatgcatgcgaccgatccccttctcccggaccccaggagccggcgcccccgccctgtagattctggctgtgactcagtcactgacac

SEQ ID NO: 688606 - DNA, 75 bp, Homo sapiens
gagccccagcaccgcccctcctggaagaaggaagagaagagaagctgaatttggacgacagccagtgggaggaca

SEQ ID NO: 688607 - DNA, 50 bp, Homo sapiens
aaggaatgttatttctccctgttgaaggtgaagtggagctaagtccctgc

SEQ ID NO: 688608 - DNA, 107 bp, Homo sapiens
gaccccctggagcccccatgatccctaagaagacagcttgaacctagggttccgagtctgaggaagacataaccttgtgcctgcctgcccacctctctctctggtcc

SEQ ID NO: 688609 - DNA, 100 bp, Homo sapiens
gggaagatggcgaaggtctcagagctttacgatgtcacttgggaagggaggtatatcatacaaagagaatgcaacatgttatctgtgtaaaatggacttc

SEQ ID NO: 688610 - DNA, 99 bp, Homo sapiens
tgaaggcagcttccaaatatgtggatgtacctacttccaagtgctggccttcatctccccgcaagatgcgccccctccaactctcagccttcatcttcc

SEQ ID NO: 688611 - DNA, 90 bp, Homo sapiens
cacgccgccatccgggaggcccagggaagggccatcgatgcacccctcggagctaatagcggagatgagaaacagtgggtttgcactgaa

SEQ ID NO: 688612 - DNA, 90 bp, Homo sapiens
gaaagtgaagcattatctcatcctgccgccctctgacgtccatcatctctgcggtggttggcattctgctggtcgtggtcttgggggtgg

SEQ ID NO: 688613 - DNA, 75 bp, Homo sapiens
caagcagctttccctcaacagacagctttttctcaacagcccaatgtcttagagtttgaaagagtctatcttgat

SEQ ID NO: 688614 - DNA, 83 bp, Homo sapiens
gggcgtcagccgccaccggcagcagcagcaccaccggacggcggctatgagaggttttcctccgagtacccagaattctgttc

SEQ ID NO: 688615 - DNA, 73 bp, Homo sapiens
catcagtggtcacctagacagcgacgatgatagggggcatgtgtccgtttcgccacatcagtggtgagaagac

SEQ ID NO: 688616 - DNA, 51 bp, Homo sapiens
ttagttcgtctttcctagagagtgtgctgacctacatattcatgatagatg

SEQ ID NO: 688617 - DNA, 98 bp, Homo sapiens
ggcgccgtcttggggcctagcggcgaggcgacccgcacaggctccctgactggcagtcctcacctttccgagctgtctgtgaactcgcaggggggagt

SEQ ID NO: 688618 - DNA, 100 bp, Homo sapiens
ggctgaagaagtggaagactccaatgaaacgggtatgcaggagattagaagccagtgggcatgagcgtggctgccaccaggtgaatgcctgtgccctggc

SEQ ID NO: 688619 - DNA, 100 bp, Homo sapiens
aaatgtttggggatgaagaagtgatgtgtttaaatggaaactggacggaaccacctcaatgcaaaggtgaccaagaatatggcccaggtgaccaaagccc

SEQ ID NO: 688620 - DNA, 75 bp, Homo sapiens
tatacatggagttgatattacaaccagtgacactgcaggttactataacaacagtaccaaggtggctgtgaaaac

SEQ ID NO: 688621 - DNA, 83 bp, Homo sapiens
ctgtcggccgaggtcaagaaccgggaatagccaggccagaagaaggaaggcctgtggtgagtgggacaggaaatgacatcacc

SEQ ID NO: 688622 - DNA, 80 bp, Homo sapiens
ctggaatgtcacacgacggggcagctggaagggggatatgagactttctactcggaatatcctgagtgttgcgtggatgt

SEQ ID NO: 688623 - DNA, 51 bp, Homo sapiens
cagagatcacatcaaagatgaatgggaagcttgacccatcttatcaccgtc

SEQ ID NO: 688624 - DNA, 75 bp, Homo sapiens
gaggaagccattgcccactgctgccgcccagtgttgttcatatccagctttcagagtggcaccgtgcaatttttc

SEQ ID NO: 688625 - DNA, 101 bp, Homo sapiens
cgacctgtttgagagtgggaacatgacgcaggtgcaggtgtctcttctcgccctggcggggaaggtgagtcgctctgcctgtctgatgacgacacagctga

SEQ ID NO: 688626 - DNA, 100 bp, Homo sapiens
atttgtggctggctggatctctggacttcctcgttctgcccatcttcctaacaaggctatggctgataacagcagtgatgagtgtgaagaggaaaataac

SEQ ID NO: 688627 - DNA, 100 bp, Homo sapiens
gagccttggcctgatatggtttaccctcgctgacagcacaactgcaccaaatttcaacctgacggatccggcactccacccagagcctctttgagtacat

SEQ ID NO: 688628 - DNA, 75 bp, Homo sapiens
gaagaaagcgatttcctccgcctcttccaaagcggctccctggggaagggaatgcagggttgctggggctgggcc

SEQ ID NO: 688629 - DNA, 75 bp, Homo sapiens
agactcatacgcaacctcaatgacctcctgccccccgaggtctgcagtctcctgaacccagcagccatctacgcc

SEQ ID NO: 688630 - DNA, 90 bp, Homo sapiens
tgagaagttcccgcttgtggagcaaacatttttccccaaccataagccaatgttctaatacccgatttacaattacattgaactacaagg

SEQ ID NO: 688631 - DNA, 100 bp, Homo sapiens
gtggacgagcaggaagctgcggctgagtcgtgagctgaagagacgcctgaaagctgagaagaaagtagcagagaaggaggccaaacagaaagagctcagt

SEQ ID NO: 688632 - DNA, 100 bp, Homo sapiens
cgggagaggcgagctcgcgatgagtggtctcggcaggctcttcgggaagggagttcatgatcaagtgttgcccacaccaaatgcttcatccagagtcata

SEQ ID NO: 688633 - DNA, 75 bp, Homo sapiens
tacacctcccacctgtcctcaggcatatcaaaggataccagaaggccctattgatcaggggccagctataggaag

SEQ ID NO: 688634 - DNA, 50 bp, Homo sapiens
accaaatagcagtggaaaccgatgcctaccttaatgcctctgaaacaacc

SEQ ID NO: 688635 - DNA, 82 bp, Homo sapiens
cgcgtgcagcagtggagccaccagcagcgggtgggcgacctcttccagaagctgcaagagtgagccatggagctacgtgtgg

SEQ ID NO: 688636 - DNA, 75 bp, Homo sapiens
atggatgtgtctcagctaaagaaacatctgcgaacacacacagaggaagaagaggtggataagatgatggaacag

SEQ ID NO: 688637 - DNA, 96 bp, Homo sapiens
tagccacataggctgttgattgcttgaaatgtgactagtctgaattgagaaatactatacagtttatgtaacttgatggaagaaaatggaattact

SEQ ID NO: 688638 - DNA, 90 bp, Homo sapiens
tctctttccagaggccaggctttatgggagcatgggttaccagcgacgcaccctatggcctctccagaggagaagtgtcaacaagtcttg

SEQ ID NO: 688639 - DNA, 50 bp, Homo sapiens
gaggaaaacaacttcgagggcagagaatctaggtaaaaatggcttatcta

SEQ ID NO: 688640 - DNA, 75 bp, Homo sapiens
gcccattacttctgcctggactgcattgtcgaatggtccaaggtgcagcggaactgctgcctgacgctctgcaac

SEQ ID NO: 688641 - DNA, 100 bp, Homo sapiens
gtattaaacaccgtgctgaggcggcttcctatgctatctctcttccgaggttctcacagagttcagttctgggaggtgatcagtgatgaacatggcatcg

SEQ ID NO: 688642 - DNA, 98 bp, Homo sapiens
gcgagtccgggactgcgctggaacaatggataacttcttcaccgagagccgagactgtctgaagctgggcccacctgctgagggagaagtcgtccaag

SEQ ID NO: 688643 - DNA, 50 bp, Homo sapiens
ttgttactcctgcactccccagagctggctgaagaagtcacagatctaaa

SEQ ID NO: 688644 - DNA, 83 bp, Homo sapiens
cccaccatgtcagacgcagccgtagacaccagctccgaaatcaccaccaagatcaatgtccgagttaccaccatggatgcaga

SEQ ID NO: 688645 - DNA, 100 bp, Homo sapiens
ctctgaccctttttttatatcgcggcgacggcgggctgtcgtcacgacgacgtgcggacgcagcggcgggggcattgcccaaggactccagatactccaa

SEQ ID NO: 688646 - DNA, 75 bp, Homo sapiens
aaaaacacagctcgacagtacgcctacttctataaagtcatccagctccatgatgcgttatctgggtctggaaac

SEQ ID NO: 688647 - DNA, 100 bp, Homo sapiens
agaagaacttgtacagagatgtgatgttggagaactatagcaatctggttttcttggctggacagtgccacatcgcttatccaggcagctaaaaacctga

SEQ ID NO: 688648 - DNA, 75 bp, Homo sapiens
agcaaccattgtcttaagcattatgcacctcagtgggataaagatgtagagtcctacattcatcgatccgggcgg

SEQ ID NO: 688649 - DNA, 111 bp, Homo sapiens
tcgttggtggtgttcagttgtggcggttgctggtcagtaacagccaagatgctgcggaatctgctggtcctgcatctgcagctcaagaccctggggctgagttcaaaaccc

SEQ ID NO: 688650 - DNA, 100 bp, Homo sapiens
aattgaggctggcttcatgaccaaggacttggctgcttgcattaaaggtttacccaagtcacgagaagagaatgccttctagatgcaaaatcacctccaa

SEQ ID NO: 688651 - DNA, 74 bp, Homo sapiens
tcgcagtggtcgcttcttctccttgcacttcactacgcttagcagatgtcctctggaattcccagattcctctt

SEQ ID NO: 688652 - DNA, 100 bp, Homo sapiens
gccggcttcgcgcgcgaacccggctttcgcatttgggaccctgcagggtcacgagaagagaatgccttctagatgcaaaatcacctccaaaccagaccac

SEQ ID NO: 688653 - DNA, 75 bp, Homo sapiens
tggagaactacagaaacctcgtctccctggtaataaaagactagtggccttagtgcccatgcccagtgaccctcc

SEQ ID NO: 688654 - DNA, 50 bp, Homo sapiens
ctcggtgtccccacaggatgaaacaaacccagcgggtgccgcttctccac

SEQ ID NO: 688655 - DNA, 100 bp, Homo sapiens
gcggggccggggtccgcaaggccggagaaggccgccgggcccgggcatggtggtctggggcaacgcggaagagtactattaatcccgtagatgcaatata

SEQ ID NO: 688656 - DNA, 60 bp, Homo sapiens
gatgtctgaccagtccccaggtgtacgataatgaagaagaggtctttgcatggaataatg

SEQ ID NO: 688657 - DNA, 75 bp, Homo sapiens
acgctcggacccacccgcagacggcccttctggtttaagctatgaagaaggacatccctcacactctgaaacaga

SEQ ID NO: 688658 - DNA, 76 bp, Homo sapiens
aggtttagtgccctcctgagtgactgcgtcaggcatctcaatcatggtctggaacaaaaagaatgcaaatgaaaaa

SEQ ID NO: 688659 - DNA, 76 bp, Homo sapiens
gccgtttaacctttattgtggtggagtccaccccgctgtggtactttagattgattgccgagcggggcagttttgt

SEQ ID NO: 688660 - DNA, 75 bp, Homo sapiens
gattactcagtctctaaaaagctaagaacactgatatttgcatttaatggggaacaaaagatgaagaaggaaaag

SEQ ID NO: 688661 - DNA, 74 bp, Homo sapiens
tgcgatctctgtggtaggcccagagttgtctgctggttctcagcttgaagaagattctgcagtccttattgatc

SEQ ID NO: 688662 - DNA, 74 bp, Homo sapiens
cttggtcatgatctaccagttcattgttcagaggaatgtcgggtcctcacaattcaaaacaattgaagatgact

SEQ ID NO: 688663 - DNA, 99 bp, Homo sapiens
ctatatgaacaatccgtctggatcacggatgtaggaagtggctcactcagtaacttgatggattttgtgaagaaaacaggcatttgcgcttcaaagtgg

SEQ ID NO: 688664 - DNA, 76 bp, Homo sapiens
ataaggtcacttcccccactaagattggactccttcttgtcctgagccagtgtatatcccaacgggcttagaaacg

SEQ ID NO: 688665 - DNA, 121 bp, Homo sapiens
ttaaagcttgaaactgaattactggatggaaaaaccaagctaatattgtctccatatggattgcacctctgcctccacctcccctactaccacctttggctactaactatcgaactcctta

SEQ ID NO: 688666 - DNA, 75 bp, Homo sapiens
ggaatctttcagatgctgcaactaaacaggatggagatgaagatgaggaagctgagtcagctacgggcaagcggg

SEQ ID NO: 688667 - DNA, 142 bp, Homo sapiens
aagaaaattgagaagcggcgtcaggaattgatggagaaagaaaccgcaaaaccaaaaccagatcctttcaaaggtacaggtttgcagattccgccagcagcacagcaagctctacagatgagtggctctttggcatttggtg

SEQ ID NO: 688668 - DNA, 51 bp, Homo sapiens
ggaagccaagaaactggatgccaaggatatttctacccagctctcagacat

SEQ ID NO: 688669 - DNA, 95 bp, Homo sapiens
ctatgggaaccgaggggagcctgatcctatcgttttgacgccaggaattgtgggaacgtattctgctccagttgttgtaaccagaaggttccagt

SEQ ID NO: 688670 - DNA, 88 bp, Homo sapiens
ccggtgctgctgcgccctgcggagctccgaacacgtgcgcgtatttgaaatatctcaccaaaaaatatttgaagaagaataatctacg

SEQ ID NO: 688671 - DNA, 91 bp, Homo sapiens
cctccttggtcgccgcgtccttggctggcgtacatgtcatgctgcccaaggacatagccaagctggtccctaaaacccatctgatgtctga

SEQ ID NO: 688672 - DNA, 83 bp, Homo sapiens
tttatgaaccagtgtatcccaaatattacagtgacagagagaaacacagaaaactggatgatcacaggagtagagatcacagg

SEQ ID NO: 688673 - DNA, 89 bp, Homo sapiens
cccgctctccatgaagcagttcctggacttcgggggcacacagtatgatcaaaatcacattatcctcaacactgtcagcaaagagaagt

SEQ ID NO: 688674 - DNA, 76 bp, Homo sapiens
ccatagaaattacttcgatccttaatggacttcaaggctccgagctctgtccagtggtgggagtattacatcccct

SEQ ID NO: 688675 - DNA, 87 bp, Homo sapiens
cgctctgcctgcgcgctgctcctgctctgctacctggaaatggaaaggtcagtagttgcacagctgctgagggtagtttcacatctc

SEQ ID NO: 688676 - DNA, 97 bp, Homo sapiens
ttttaactgacccagccaaagtttttgaacacaacatgtggtcacaaacatgtcagacaaaagtgaattaaaggctgagttggaacgtaagaagcag

SEQ ID NO: 688677 - DNA, 74 bp, Homo sapiens
tggagtttatctggagtgaggtggccggttcttggtgggatctgagcaggtcaaaatgcagatcttcgtgaaaa

SEQ ID NO: 688678 - DNA, 80 bp, Homo sapiens
ggcaagccccgctccggccaacaaccttatgccagcctggaccatcttggaggcagtgtaggatcatggaagaactttga

SEQ ID NO: 688679 - DNA, 100 bp, Homo sapiens
atatgatacagatgtattcaaatggatcttcaaagatgatgcagtttgcttggcagagctataagcgttatgcaatggggaaaaacgaactccgtccact

SEQ ID NO: 688680 - DNA, 83 bp, Homo sapiens
gcgacctatggccgtggctaccccggatttgctccaagctatggctatcagttcccagccttatgccagcctggaccatcttg

SEQ ID NO: 688681 - DNA, 75 bp, Homo sapiens
ggaccttataaattttttgagaagcatctttcaagtgtttactcatttgcctcctcctgacaaggtgatccgggc

SEQ ID NO: 688682 - DNA, 100 bp, Homo sapiens
ccccagggcaagccccgctccggccaacaaggttccgagtctgaggaagacataaccttgtgcctgcctgcccacctctctctctggtcctgttcatctc

SEQ ID NO: 688683 - DNA, 76 bp, Homo sapiens
tactgatctgccagaggatggcctattagaggaatcacatgcagcccaactacagattcttatggaattcctcaag

SEQ ID NO: 688684 - DNA, 100 bp, Homo sapiens
ggtgcggactcttgttcttgcactggtgaacggccggtttgtgggcgatgctgaccttgaaagacagaaattttcagatttgaaactcaacggaccccag

SEQ ID NO: 688685 - DNA, 85 bp, Homo sapiens
gctgttcacttcagtcctccgactctgtgggccatgtgtccttcaagcccagcttagaccaacagcgttcatgcccaacctgtac

SEQ ID NO: 688686 - DNA, 90 bp, Homo sapiens
cagaaggaccccaagcaaaggatcatccccttcctcccagtggacatctggtctgtgggctgcatcatggcggagatgatcacaggcaag

SEQ ID NO: 688687 - DNA, 87 bp, Homo sapiens
gaagactctggaagcccacaaagactcccataaggagctggccagctcagcgtccctggaagggaagggacaactgaagttcacctc

SEQ ID NO: 688688 - DNA, 101 bp, Homo sapiens
gtttggaaagctgggagtcctgagatccaaagagaaagtgaacgacaccgtaactatccgcactagaaagttcatgaccaaccgactacttcagaggaaac

SEQ ID NO: 688689 - DNA, 75 bp, Homo sapiens
gccatacccaataaccaggtgcttggcaaaatcgagcgggccattgacacaggctcagtctgctggagcgggtca

SEQ ID NO: 688690 - DNA, 50 bp, Homo sapiens
cctgtccccgaggaggggaccatgacacaaaccagacagcagccttgggt

SEQ ID NO: 688691 - DNA, 74 bp, Homo sapiens
cggagaatggaactgtatgccagcagcttgttgtacagcggtatatattgcacccctaaaagccctagtacgtg

SEQ ID NO: 688692 - DNA, 50 bp, Homo sapiens
gcaatggggaacgctcacggactgtgtgaattgttaagactcgaatcaga

SEQ ID NO: 688693 - DNA, 100 bp, Homo sapiens
tgcaaaggcagtgggaagaactatgccaccaggcacgtgtggttctcaaatataggcattctgatgggaacttgtgtgttaaagtaacagatgatttagt

SEQ ID NO: 688694 - DNA, 75 bp, Homo sapiens
gctgacctggaaacatcttaaatggaaggaattaaggataacctagacgacataaagaggataattaaagccaga

SEQ ID NO: 688695 - DNA, 90 bp, Homo sapiens
ttaggtctgttagaggaagacgacgagtttgaagagttccctgccgaagttcccagtgggaaaagctacagaaagatgacacagatccgg

SEQ ID NO: 688696 - DNA, 90 bp, Homo sapiens
ggatctggtaacatggcaaaagatgtacatgtactgggcagattggggtgagacgccctggatcgagcaggtggggatggacgacagcac

SEQ ID NO: 688697 - DNA, 75 bp, Homo sapiens
ggctaggtcgtcacaggctccggctcatggcatcaagtggcatccatcataagctgggcagatgctcaaactcaa

SEQ ID NO: 688698 - DNA, 100 bp, Homo sapiens
tggctcctcttgatgccaacactctggggaaggtggccagtggcatctgtgacaacttgcttcctacaacacagcagtcccctcaggatgagcaggaaaa

SEQ ID NO: 688699 - DNA, 90 bp, Homo sapiens
cgcggcgcgcgaggacccgagccaggcggggacaggacggcggggcgagccaggtcccgcggcagtgctggtggccatggttcccgtagc

SEQ ID NO: 688700 - DNA, 75 bp, Homo sapiens
tgccaggccgatcccgacctggactcagacaaggcggcttatgacccctacgcttatcccagcgactatgatatg

SEQ ID NO: 688701 - DNA, 74 bp, Homo sapiens
gctgagtacgacagcctcaaacaggagctggagcagctcaaagaggagaatggtgttgaacgcgtgtgtcctga

SEQ ID NO: 688702 - DNA, 75 bp, Homo sapiens
tcgcctcccgagtcactgcagccaacccttcagcaaggagaactacgatgacccgcacaaaacccctgcctcccc

SEQ ID NO: 688703 - DNA, 99 bp, Homo sapiens
gcgccgcgatgttcgccccccggctgctggatttccagaagacgaaatacgcgaggcatgtaatgaatttactacacatgtgatgaaccttctccgaga

SEQ ID NO: 688704 - DNA, 100 bp, Homo sapiens
gacactgtacagggatgtgatgctggagaactgcaggaacctggcctcactagatatgggacccgtacacatggactttttaagagactgggaattccag

SEQ ID NO: 688705 - DNA, 75 bp, Homo sapiens
aaaagtttacctgaaggacaccgccacagcagagctcaaattgaaattattccatgcaagatctgtggagacaaa

SEQ ID NO: 688706 - DNA, 75 bp, Homo sapiens
tcttgcctcaggccagtcgcctccaggccaagagggatccttcacccgtgtctgaattcagaaggagctggcgga

SEQ ID NO: 688707 - DNA, 75 bp, Homo sapiens
gcaccatggaggaggacgacagctacgagacagggacctcgacgcatcctccatacccgctgcggggaaatggac

SEQ ID NO: 688708 - DNA, 100 bp, Homo sapiens
gcctgttcagtactgtgggtgatatttgcctttagtgcactcttctccttcacagtaaagtggctgcccacgacccttcctcagggcaccatcaacatga

SEQ ID NO: 688709 - DNA, 86 bp, Homo sapiens
tactctggggcttcctgctccagctgatcattcccagtgaccccttctgggtgccaactactgaggaggaatacttgcactttggg

SEQ ID NO: 688710 - DNA, 106 bp, Homo sapiens
ggactgcgccgtgtcttcctgaagaaggctgggcattgatatgaaccatggacaagtatattctgctgccacaaagactgtaaagtgcttcatttcaacagctgag

SEQ ID NO: 688711 - DNA, 101 bp, Homo sapiens
aatgcaacagccacggaagattaagcaggtggtaaattcactccagcagcaacctcaggctgcatccccttcagtaccagagccccactctttgactccag

SEQ ID NO: 688712 - DNA, 74 bp, Homo sapiens
ccgggcagtgcggcaaccaaatcggcgccaagaaagatcaactgaaatcggcaaacttctgagttcctacttgc

SEQ ID NO: 688713 - DNA, 135 bp, Homo sapiens
cggagagcagcagccgcccgcttcaaccccaggggaccagaggaactcagccctgattgcggccaaagatgaagaggaagcctttctggattggagtgatgatgatgatgatgatgatgatggatttgatccaag

SEQ ID NO: 688714 - DNA, 99 bp, Homo sapiens
ttgggttcgtgagatttcatgaagatggcgccaggacgaaggccctactgggcaagccacgagactcaaacaacttgctgggaccatcccaaaatgaca

SEQ ID NO: 688715 - DNA, 101 bp, Homo sapiens
gaagattcgggacacacagaaatataaacctttcaagagtcaagtaaagctggcaaaactcaaggctcagaaactgcagggcccccaaaaaagaaaaggaa

SEQ ID NO: 688716 - DNA, 80 bp, Homo sapiens
tttttcatcatagctgtgctgatgagcgctcaggaatcatgggctatcaaagctatttctgcctggttcagaacccctgc

SEQ ID NO: 688717 - DNA, 100 bp, Homo sapiens
tcattctcctaatgttttccttcagcaaggacaaagcttcaaggactgcatcccgcgctccttccgccggcatatccggcagcacagcgccctgacccgg

SEQ ID NO: 688718 - DNA, 75 bp, Homo sapiens
ccatcaccgacctcatcagtgagctgtccctgctggaggagcgcttccggattctggatgaaattgaagaacata

SEQ ID NO: 688719 - DNA, 75 bp, Homo sapiens
gggccgaggagcccggggagggacccggagctccagggagagcctggggatgtacaggagatgcctgctccagaa

SEQ ID NO: 688720 - DNA, 90 bp, Homo sapiens
gcctgagctcgaggcccggctggcgcacctgggcgtgcagatccgagagactgaggtcatcgacccccaggacctcctagaaggccgata

SEQ ID NO: 688721 - DNA, 75 bp, Homo sapiens
tttagttgcgctttcctgcctgcttctagcaaatttgatgcagtttgatgataaaggaaacaagaccaatatacc

SEQ ID NO: 688722 - DNA, 100 bp, Homo sapiens
gccagacaaacagcccgcccgaccccgtcccgaccctggccgccccgagcggagcctggaggatttgtaggtgaaaatgcccagccaatcctagaaaata

SEQ ID NO: 688723 - DNA, 100 bp, Homo sapiens
ccggaagtgacgtgctttcccgagccggatgacgacagatatgagcaggcgagtgacgtccgggcacagctcaagttttttgaacagcttgatcaaatcg

SEQ ID NO: 688724 - DNA, 100 bp, Homo sapiens
tgcatccaaagcacacatgaactcagtgctcatggggatgaagaaccagctcggccataaagaatgctgatgggagaaccattttcctaattttcaaatt

SEQ ID NO: 688725 - DNA, 74 bp, Homo sapiens
gcggggaaccaaggagacgctcctggcactgcagaggtgtgctctgaacaagccgagacggggccgtgccgagc

SEQ ID NO: 688726 - DNA, 103 bp, Homo sapiens
atccgctgtacttgcgtccgctacagtatgtcaatcgcttgccccagcacagtaattcgccaaaatgacgaacacaaagggaaagaggagaggcacccgatat

SEQ ID NO: 688727 - DNA, 83 bp, Homo sapiens
aataccaggatagctgttgtttcagagaaaggtatgcaataagagagagcaacagcattgtaaagatatttaagaactttaag

SEQ ID NO: 688728 - DNA, 50 bp, Homo sapiens
ctagcggcgaggcgacccgcacaggaatcttccacttgactcagatcaag

SEQ ID NO: 688729 - DNA, 100 bp, Homo sapiens
cttccagccctgagggtcgccacctcccttccccacagctaggaaccaagggattatcagcatagaaagaaagccttgtaaccatcaggtagatacagca

SEQ ID NO: 688730 - DNA, 100 bp, Homo sapiens
gccccttcaagccggatcactaccgctactgagagccagtggggtgccgaggctcaggcagcatgacgacggagacctttgtgaaggatatcaagcctgg

SEQ ID NO: 688731 - DNA, 73 bp, Homo sapiens
agcccatgagtagggaggagaaacagaagcttggcaatgtctcaggctgtgcagacaaacggaactcaaccat

SEQ ID NO: 688732 - DNA, 90 bp, Homo sapiens
tgctcaacataaagaaaataagtgaagaggaatatgtggctttagattgttcagattccattctgtggggaaattgactgtgaggactgg

SEQ ID NO: 688733 - DNA, 100 bp, Homo sapiens
gttgaatgccgtctgggctgtgctggccgccatcctgcagctgggcaacatctgcttctcctcctcagagatgcttgctctgtcaaggcacagcctattg

SEQ ID NO: 688734 - DNA, 82 bp, Homo sapiens
tccagcctgcggagcctgtggggcaggagtggagtcaacatatcaatggagcaagtcacagtcgtcgatgccagcttcttct

SEQ ID NO: 688735 - DNA, 90 bp, Homo sapiens
gcataacccacctaggcacaaagccgttcgagtgtcctgtggaagatccaaaatacggagctggcatatacttcaccaagaacctcaaaa

SEQ ID NO: 688736 - DNA, 97 bp, Homo sapiens
gaggtgtttgacaaaacataccaattcttgaatgacatccgagcgaaagagaaagaggcttctgggaacttggcagacgcagcttagagagactcac

SEQ ID NO: 688737 - DNA, 100 bp, Homo sapiens
ctgagccctcctacctcctgatatccagggctgccgatgggaaatcccaggctgccgcggctcctgtgtgctttgaaggcttcccagctggcgtgtatgt

SEQ ID NO: 688738 - DNA, 80 bp, Homo sapiens
cagattcgcagtggtcgcttcttctccttgacctgcctagagctggaacgttacctccagagcgagccctgctatgtttc

SEQ ID NO: 688739 - DNA, 140 bp, Homo sapiens
ggaccagtgggtcgagcagctgaacgagtgtaagcagctgaacgagaaccaagtgcggacgctgtgcgagaagttcttctcaccactaaatccaatacgagttcatattgatattggagctgatggcagagccacaggag

SEQ ID NO: 688740 - DNA, 99 bp, Homo sapiens
taggacctgaagacctccagagaatggaaacagactgtaatcccatggagctaagcagtatgtcaggatttgaagaaggttcagagctgaacggttttg

SEQ ID NO: 688741 - DNA, 82 bp, Homo sapiens
cagaacggctgcctaatttacagcaaccatgaggttttactgcaatcacagcaaccaaccccatttggcttataaagactcg

SEQ ID NO: 688742 - DNA, 119 bp, Homo sapiens
gtcaaagagggcagcacgtctgccaaggtccaatgggatgaagcagaaattactatcaggatgcttgaagcccacatgcagagctacaagggcaatgaccctcttggtgaatgggaaag

SEQ ID NO: 688743 - DNA, 100 bp, Homo sapiens
atcgcctactacatgtactcggggggcggctctgcgctggccgggggcgcgggcggcggcgccggcaggaaggaggagcctgatctggttagtgcaattt

SEQ ID NO: 688744 - DNA, 75 bp, Homo sapiens
cacaaagacctcctcctccacaggggagacagaggcaacaagaatgggtgaatcagcaaagggaagatattgaaa

SEQ ID NO: 688745 - DNA, 105 bp, Homo sapiens
cttggcccttgttcccccaaatgtctgactctgactctcggactgagaaacgcaagacctgcctagagctggaacgttacctccagagcgagccctgctatgttt

SEQ ID NO: 688746 - DNA, 97 bp, Homo sapiens
ccacagcagttcctgcagcttccttgaggtgctggagaatctggtaaaagcaccattgtgaagcagatgaggatcctgcatgttaatgggtttaatg

SEQ ID NO: 688747 - DNA, 100 bp, Homo sapiens
ttcctgaccatcttcaacctgacccacatcagcgctgagaagaggaaagagccatccaaaactctgtttgtcaaaggcctgtctgaggataccactgaag

SEQ ID NO: 688748 - DNA, 82 bp, Homo sapiens
tggtcaagtacgagagtggccctgacggaggggaggaagtgtggacactgccagcggctgcagccgacttggaatgacctgg

SEQ ID NO: 688749 - DNA, 82 bp, Homo sapiens
cgacaagccgctggcagccgcggatctcaccgccgctcaggtgttcttggggaagatcccgactaagccattttccagtggc

SEQ ID NO: 688750 - DNA, 100 bp, Homo sapiens
agccacaccagtgcctttggaatttgtacagcagattggcataaacccgggactaatggctgcttacaaagggcatcattaccctggacctggaaaccat

SEQ ID NO: 688751 - DNA, 100 bp, Homo sapiens
atggtgaaaagggtcctcctgctcacagtgtgaataacaggcatctaataggattcaggaatcaaagaatcagtgtactcaggtggtacaggaaagagag

SEQ ID NO: 688752 - DNA, 75 bp, Homo sapiens
cagctcgccctgttcgctctgggttctccagaagctggggaaggcagatgagaccaaggatgagcagtttgagca

SEQ ID NO: 688753 - DNA, 75 bp, Homo sapiens
atgtcctgggtgccagtcagagcggcgtggcatgaagggcaaggcccgcaagctcttctacaaggccatcgtgcg

SEQ ID NO: 688754 - DNA, 83 bp, Homo sapiens
ccaaaaactcaggcttcgccacctgcgtgcaaagggacggcaaaacagaacagaaaggcggagataaaaagaggggtgttaaa

SEQ ID NO: 688755 - DNA, 100 bp, Homo sapiens
gcaagctgctacaggaccgccgggcccgggaagcggccagcacgcctgcacaccaagccgtcccaggcacccgccgtggaggtggcgcctgccggagctt

SEQ ID NO: 688756 - DNA, 75 bp, Homo sapiens
aaaacaccagatgatgaccctgagcaaggaaaatctgagggcaaatactgtggtctggggttgcaaatgaaccat

SEQ ID NO: 688757 - DNA, 75 bp, Homo sapiens
ttcggcttctgagacggcggcagcagcggcattcagcttattccactaagctcaacaaatttcctgtatttaata

SEQ ID NO: 688758 - DNA, 100 bp, Homo sapiens
cggacatgtccaggcggaagcaggcgaagccgcgctcggtgaaagtgacagagagtcgagggattgtggatagcctgcagaagttttcctcgctccctgc

SEQ ID NO: 688759 - DNA, 143 bp, Homo sapiens
aagagagagatcgctgtctcgggagagaaatcacaagccgtcccgatccttctctaggtctcgtaggcgccatgtcagaaccggctggggatgtccgtcagaacccatgcggcagcaaggcctgccgccgcctcttcggccca

SEQ ID NO: 688760 - DNA, 80 bp, Homo sapiens
gcagcagtcagagctggcgagagccctctccacctcggaagagctatgtatgtccctgggaagctgcatgatgtggaaca

SEQ ID NO: 688761 - DNA, 100 bp, Homo sapiens
acagtgactccaggatttctgaagactattgtggaagaagcatccattaagatcctatgcctgtgactcagaaggaacaggaaaacaaatccaatgcatt

SEQ ID NO: 688762 - DNA, 88 bp, Homo sapiens
gggcaggcagcgtctggcagaggatgaggatgaagaggaggaccagagggctgtgctgaagtttgctgctgccactggagccactcca

SEQ ID NO: 688763 - DNA, 75 bp, Homo sapiens
caatgcaggagacactggtactgccataaaatgggctcagcagttaggttgggtatctacagccattggttgctg

SEQ ID NO: 688764 - DNA, 118 bp, Homo sapiens
ctcctccagaggcctgcacgcggggcgcgggccccgaaggctctccatcgaaggcaacattgatctggcaccactccttctacaatgagctgcgtgtagcacctgaagagcaccccac

SEQ ID NO: 688765 - DNA, 83 bp, Homo sapiens
tcacagacgttctcgtaaggacaaaacgggactggctagttaaacaaagaggctggacaatgcagatcttcgtgaagactctg

SEQ ID NO: 688766 - DNA, 83 bp, Homo sapiens
gctcgatcttgggacccaccgctgccctcagctccgagtccagggcgaggcctccccatggccacccatggaccagtcggcat

SEQ ID NO: 688767 - DNA, 75 bp, Homo sapiens
cagctgtggaaagaagttgcaaaacactgggagtctgtgaccttcgaggatgtggctgtgacatttacccaggag

SEQ ID NO: 688768 - DNA, 100 bp, Homo sapiens
tggctacttcatttcattgctactaactacctcatcttcagtcaaaagcctgaatttcaggatctttcagtgagggccccaaggctgttgcagctcctcg

SEQ ID NO: 688769 - DNA, 75 bp, Homo sapiens
ttgggatcccccagttccaaagtgtcttaaagagtgtgaacatggctacgcctcttcattcccgtccatgccgag

SEQ ID NO: 688770 - DNA, 100 bp, Homo sapiens
cgtgaagcccagttcccctgccagcaagcctgatggattatcagttaagcaggtacgaaacttgagatctgaatgtataggattggaaaaccaaataaag

SEQ ID NO: 688771 - DNA, 74 bp, Homo sapiens
gcatgctgcttttgatgtctgacaacgtggatcgttgttttgaaacgtgttggagcgggccggagagaagtaga

SEQ ID NO: 688772 - DNA, 88 bp, Homo sapiens
cccgccgccggcccatgaggatattgccgtgaaagaccttggcacccgccatcaactggttgccttttctcaacaccatcttctaccc

SEQ ID NO: 688773 - DNA, 100 bp, Homo sapiens
ggaaggaacttggttccccctccctcagcttccgccccaaaagagttctgctgaggaagaatctgaagccataaaatgtgaacgagagatgaaagtatta

SEQ ID NO: 688774 - DNA, 74 bp, Homo sapiens
gatggtacatcaggataactgctcgtatcaggcacgtgtggttctcaaatataggcattctgatgggaacttgt

SEQ ID NO: 688775 - DNA, 96 bp, Homo sapiens
ggtttggaaaaatttcattagagtgctgaattatcccaaggcaatttctgggatgggctaggctctcctccagattccccatctcctgggagtgat

SEQ ID NO: 688776 - DNA, 100 bp, Homo sapiens
gccgtgggagggagccatgaagcattacgaggagaacacaaagttatacctcaatttacttgaaatggaatatagtggtgacctcaaacaaaatgaagaa

SEQ ID NO: 688777 - DNA, 82 bp, Homo sapiens
ctcgctctgtgtcagcgcccgaacccaaaggggtggacgcggcctccaggtgccagaaccctgtggagcatcatgaactggg

SEQ ID NO: 688778 - DNA, 100 bp, Homo sapiens
gaggaagattttgaagacaatcgtcacttatacaggccaggagtggtggctcacacctgtaatcccagctctgggaggccaaggccagtggattgcttga

SEQ ID NO: 688779 - DNA, 108 bp, Homo sapiens
cgtcgtcctgtctgggtgtcgcgggccggccccgcggggagcgcccccggcgcgatgcccttcaggaaaggtgtcatggagaaactccagctgggcccagagattctg

SEQ ID NO: 688780 - DNA, 100 bp, Homo sapiens
ggaactgctggggaaggcgattggcatcgatctctccatcccttccgaggcccgacttcggcagcagcggctcccctgttgtatggacattctgcacccg

SEQ ID NO: 688781 - DNA, 83 bp, Homo sapiens
tcttgatcttacagaatcagaggtgcagccgcaagaaaggcgaacagctgcttggagaactacaagtgaagaaaagaaagcat

SEQ ID NO: 688782 - DNA, 75 bp, Homo sapiens
tgatctggcctcatctgttccagggaggtgggattgagagtgtatggtgaataaattcaagaaaacatctattcg

SEQ ID NO: 688783 - DNA, 100 bp, Homo sapiens
aaattcttcgttctgtgcggcgacctcatccacgccatgccagtgccaaatctttggagtgttgatggagaagttacagtagctgaacagaagccgggag

SEQ ID NO: 688784 - DNA, 75 bp, Homo sapiens
gcagatggcactttccaaagtggatgcctccggggagataagaccatcatcatgtggaaactgaccagggatgag

SEQ ID NO: 688785 - DNA, 75 bp, Homo sapiens
gaccccgcaggggcaggactatgcgggcaagtgctatgcggggaagcagatgacagcgacacaccctcagatagc

SEQ ID NO: 688786 - DNA, 82 bp, Homo sapiens
cagaagttggaacatgggtcctacagcaatgctccacagcacatctcttcaagtccaaaatgtacagcgtgtcaagagagca

SEQ ID NO: 688787 - DNA, 100 bp, Homo sapiens
aggaggcggaggctgcttttctgagtgtttacaagcaattaattgaagcaccaggctggtcttgaactcccagcctcaagccatcctcccgccttggcct

SEQ ID NO: 688788 - DNA, 75 bp, Homo sapiens
ataccaaacctaaaaccacatgtgcatctaaagacagttggcacggggctcacgagcagctaaatgtgaaacatg

SEQ ID NO: 688789 - DNA, 74 bp, Homo sapiens
agcggtcccgcatcaaggctctggcagaatttacaacgggaatgattttaccaacgaaagctatggcaacccag

SEQ ID NO: 688790 - DNA, 73 bp, Homo sapiens
agaactacagaaacctggtctccctaggtagcaatgtacagataaagagtactttaacgcccatgcgtgttca

SEQ ID NO: 688791 - DNA, 98 bp, Homo sapiens
tggaccgacccgtgaccctcgtgagagaagtttagcactccctggcggcgcttcttcacgtctatgccagtctatgccatcatcgtggccaacttctg

SEQ ID NO: 688792 - DNA, 80 bp, Homo sapiens
ccgccggcccgcgggtctacttcctcaaagtgccaaatctttggagtgttgatggagaagttacagtagctgaacagaag

SEQ ID NO: 688793 - DNA, 82 bp, Homo sapiens
cgccccgcgagcacagagcctcgcctttgccgatccgccgcccgtccacacccgccgccagaagaggaatctcttgttggca

SEQ ID NO: 688794 - DNA, 83 bp, Homo sapiens
ctgcctcctgcagcccccatagcagatgctgctagagaaactgaacggcacagtgccctgcctgttggataccagcaccatcc

SEQ ID NO: 688795 - DNA, 100 bp, Homo sapiens
aaggacgtagaccctgacgtcatacagacgcacctggacaagtgtatgatggcagagcagctcatgaccttggcctatgataatggcatcaacctcttcg

SEQ ID NO: 688796 - DNA, 98 bp, Homo sapiens
ccgctgcctgcaccatgtccgccagagtgaataaccctataccttccaatttgaaatcagaagcaaaaaaggctgccaaaatattaagagaattcaca

SEQ ID NO: 688797 - DNA, 75 bp, Homo sapiens
cgggagaacctgcggcggccggagcgatcaatgagctgagcaatgttcctgttcctgtcatgctaatgccagatg

SEQ ID NO: 688798 - DNA, 100 bp, Homo sapiens
gcggcccagctgggcgagtatctggaggagggtgtccgtgccgctgctgaagacgctggaccacgtgctcacccacggctgcttcgacatcttcaccacg

SEQ ID NO: 688799 - DNA, 75 bp, Homo sapiens
ctaccatggtatttgctaacgtttagagagtgcttccccttgccgagcactggattttaccaaatgttgcaagaa

SEQ ID NO: 688800 - DNA, 74 bp, Homo sapiens
cgtggagatatggcgcaactgcggcgcagagcagctctaaattgggaagcaatgccggaaacaagtctcttaaa

SEQ ID NO: 688801 - DNA, 80 bp, Homo sapiens
ttcctgatttaactaaagtgattcaattgaagatggacttcactgcaaacccagaactagttgcccggctggagaagatt

SEQ ID NO: 688802 - DNA, 90 bp, Homo sapiens
gggatccttcacccgtgtctgcagccagacccggtccgtttggaatgcctgggatggtgccgccgcatgttcctcctcagatgctcaaca

SEQ ID NO: 688803 - DNA, 154 bp, Homo sapiens
tacttcctcacctccttcgtggggctcatcgtgatcccggcgacatactacctctggccccgagatcagaatgccggtaactccatttccaaatactggatttataaatgggtttacgtctccagcgttcaagcctgcggcgtctcctctgact

SEQ ID NO: 688804 - DNA, 74 bp, Homo sapiens
cgtgcagctggcgctgcgggcaggacagctccttcgagaactcatagaacggaagaccagctccttggatccca

SEQ ID NO: 688805 - DNA, 71 bp, Homo sapiens
acgacgaagacagcggagaggagagcggtgcggaggactgagaaatacccgcagcccaaagggcagaagaa

SEQ ID NO: 688806 - DNA, 83 bp, Homo sapiens
tcctgatgaagttcgagcactaatatttaagaaagaagatgttaactttcaggttcttctgtgtggcagttcagaatgatgga

SEQ ID NO: 688807 - DNA, 75 bp, Homo sapiens
tataatgaaggtctagtcaaacgcctccacaagatgattccttcagggttaccagaacttacaagtattcaagat

SEQ ID NO: 688808 - DNA, 86 bp, Homo sapiens
aaaacatcaaacggcatacaaatgcaacacagtcactcctggcggcaaaccaaacaaaaccagagtcatctggggaaaagtaactc

SEQ ID NO: 688809 - DNA, 100 bp, Homo sapiens
cgaggagcgcggagccggagctggacgccgccgccgccaccgccacctgcgcggcagtcatcaaggcaggaatttgtggatgcttatgtgaattatgtct

SEQ ID NO: 688810 - DNA, 75 bp, Homo sapiens
aatccagcagcagcatcctaaaacctctcactgcagggaagtcaacatttgtgaatatccttaaacaattgtgtg

SEQ ID NO: 688811 - DNA, 90 bp, Homo sapiens
aattataggaacctggtctccctgggaaaaccaattctgtgtcctcggaggaccacagcccagttgggccccaggcgaaacccagcctgg

SEQ ID NO: 688812 - DNA, 75 bp, Homo sapiens
gcaactggacagatagctggcgtggataaagatggaaggctccgccgcatgcaagagatgattgcaaggatgcag

SEQ ID NO: 688813 - DNA, 83 bp, Homo sapiens
gttccctcggattaaacgccggagagagcgtgaatttgcctcggggacgcctctccaggacttgcaattgtgaccaaatatat

SEQ ID NO: 688814 - DNA, 50 bp, Homo sapiens
gtcactcataagcgcgctcaagagtttggtgcacctcgatttggaggaag

SEQ ID NO: 688815 - DNA, 50 bp, Homo sapiens
cgagtgcggttcgctcccagccccacaggagcgcctgccaacggtaccgc

SEQ ID NO: 688816 - DNA, 87 bp, Homo sapiens
ggcggcgcgctgcccgaggggagcaaggacagatgtgtgcattgcaatgttgtgtactctgatgtggctgctctgaagtctcacatt

SEQ ID NO: 688817 - DNA, 96 bp, Homo sapiens
aaaagatgattttacatccattattgggaaatgtcaaggttggtttgttggaccttgaactcaatcggctgacgaaagcgctatttttggctttag

SEQ ID NO: 688818 - DNA, 82 bp, Homo sapiens
ttcagctccgcaggagccctcaatgaagacacagctgcccagagcagcccaggccgtggtgaggaggcggaggcatcggcgg

SEQ ID NO: 688819 - DNA, 75 bp, Homo sapiens
aaaatgaagaaggaacgatctcgtaagaaggattcagctgttcgctgctatgaatctctaatcttaaaagctgaa

SEQ ID NO: 688820 - DNA, 100 bp, Homo sapiens
ccgctgtgtgccaggccgggtgctgggcacggtcccgcgagccgagggccctgtggtgacagcccagtacgactgcctcggctgtgtgcatcctatatca

SEQ ID NO: 688821 - DNA, 100 bp, Homo sapiens
gcctgaggagccattttgagcaatggggaacgctcacggactgtgtggacattgtcaatacctctggccgcttcttcatcatcaacaaggaaaattacac

SEQ ID NO: 688822 - DNA, 90 bp, Homo sapiens
ggaggatggcgcctgtctcttccgggctgtagagtctcactgtgttgcccaggctgaagcagcctcaaactcctgggctcaagccttcct

SEQ ID NO: 688823 - DNA, 76 bp, Homo sapiens
aatcttcgggcagagagaaggaaacacttagaggaagttctggagatgaagaaatgtggctttagataatctacag

SEQ ID NO: 688824 - DNA, 73 bp, Homo sapiens
tgagctcattgcgcgggactagggaggtccggaccctatttgtcagtggccttcctctggatatcaaacctcg

SEQ ID NO: 688825 - DNA, 100 bp, Homo sapiens
agaacattcctccgcccgcccagagcggttcttgcagatgtgcaacgatgacccagatgtcctgccaaatttacatagtacatgacgaagttaaggataa

SEQ ID NO: 688826 - DNA, 83 bp, Homo sapiens
cacaccctcgtattctcctgcccttccccagggaaatcctcattgacgattcaatttgttgaaggccaatttgtggactccta

SEQ ID NO: 688827 - DNA, 90 bp, Homo sapiens
gagagaagagagagcccggccagacccactgcgatgagacagcataagctgtggccatgactactgaagtaggctctgtgtctgaagtga

SEQ ID NO: 688828 - DNA, 75 bp, Homo sapiens
gctgacaaagattattgaagcaagactaaagcctgattacatcaaccccagagccgtgcagctgggctcccttct

SEQ ID NO: 688829 - DNA, 50 bp, Homo sapiens
gaaaggagagacaattatgttcctgagggcgcggatggcgtcggggcgcc

SEQ ID NO: 688830 - DNA, 115 bp, Homo sapiens
agtttcctggcatcaactacccagtcctgaccccaaatttgaaaggcttcgaggcagcggaactggttcagacagtaagtttgggaggcaactatcttctgaacattggaccaac

SEQ ID NO: 688831 - DNA, 100 bp, Homo sapiens
gagttcacgatcctgtaactgccaaacccaagttggttggagatgtggattttgaagcggttgctgatgctattagaacaagccttggaccaaaaggaat

SEQ ID NO: 688832 - DNA, 100 bp, Homo sapiens
ggctggaaggagaagatctttctgaagagctcaaaaaggaaaatcctttcttgaggcaagagggcctgcaccctagaataatagctgaaggatttgaagc

SEQ ID NO: 688833 - DNA, 80 bp, Homo sapiens
ttcgccgaggcaccgaggcactcagaggaggccaagactaaggggctgcagagcggggtggacattggcgtcaagtactc

SEQ ID NO: 688834 - DNA, 82 bp, Homo sapiens
cttgtttcacatctgtaacaacagattggtccagaaaagggcgtggtgcacctggcgacagcggccgtcctaaacgcggtgt

SEQ ID NO: 688835 - DNA, 74 bp, Homo sapiens
aaacaccagacactggaagtctcactgtctcgagaacttccatgtctggaatgagtgctggatggcccggaagg

SEQ ID NO: 688836 - DNA, 75 bp, Homo sapiens
tggtcgatcctatccagactgtacgaattggagcaatgttggcttatacacctctggatgagaagagccttgctt

SEQ ID NO: 688837 - DNA, 83 bp, Homo sapiens
gcttgctttctgtcgtggcaatgttttgaaactggcaaaatcaggcttagagtgggacctgaatgtgcggctgcatggccagc

SEQ ID NO: 688838 - DNA, 100 bp, Homo sapiens
gggccacaaagtgaccaagaacgtgagcaagcccaggcacagccgacgccgcggggcatgcgaggtgcctttggaaagccccagggcactgtggccaggg

SEQ ID NO: 688839 - DNA, 97 bp, Homo sapiens
agcaggagccactgagatgaggaggcgtcgcgcgcgcctgtagctcgcgggcctcgcaggtacgcatagctgctaaattcatcactcatgcaccccc

SEQ ID NO: 688840 - DNA, 75 bp, Homo sapiens
cggccaccgactactgtcagcagctgtgccagtgaacagagtatctgccaagcccgggcttccgtgatggtctac

SEQ ID NO: 688841 - DNA, 100 bp, Homo sapiens
atgttggtgacatcgtggacattccaggaacctctgttgccatcagcaactgtgatggtctggaataggaaaattgtccacggctgatggtaaagccttt

SEQ ID NO: 688842 - DNA, 75 bp, Homo sapiens
gagtccttggggacggagcagcgcgtcgtggggcgagcggcaggtcgcgtggggcaggcagtggcgctgcgggcc

SEQ ID NO: 688843 - DNA, 95 bp, Homo sapiens
tgagatatgagagacacgaagcaaatgaagttttatactaaccaaactgcagctggaatacccagtacagttctgcttactacacttcaagaaag

SEQ ID NO: 688844 - DNA, 97 bp, Homo sapiens
ccctcagcatgactccccggccaagaaatgccggctgcggaggaggatggactcggggagaaagaacaggccgccttttaatctagacaacgagcaa

SEQ ID NO: 688845 - DNA, 100 bp, Homo sapiens
cgccaagacaggtggagttgatccggaactccagcatggaggagcaggacttggagcgaaggttcgagctgctgagccgcgagctgcgggccatgctggc

SEQ ID NO: 688846 - DNA, 98 bp, Homo sapiens
agacagcgctgcccgggcggtgtctcgggaccccgacagctgcggttggcgggcaccataggccgaagcacccgggtgaaaggtgtagcagtcactcg

SEQ ID NO: 688847 - DNA, 88 bp, Homo sapiens
ggatctcagaaggccagttcaaagggagaaaatcctccacctccgggtttcataatgcatggaaatgttaatccaaatgctgctggtc

SEQ ID NO: 688848 - DNA, 100 bp, Homo sapiens
ctgctccacaagcggcgccgcgccctcggcctgcacggcacacgacggttctgccctttatattaatcgagatgaggacatcgcaccatcagtatcccag

SEQ ID NO: 688849 - DNA, 75 bp, Homo sapiens
cgtcagatccttgagtgataaaggagtagaggtgtggacactgccagcggctgcagccgacttggaatgacctgg

SEQ ID NO: 688850 - DNA, 82 bp, Homo sapiens
ggagcccaaagacccctggagacatgggacccagacatggagctgcgggaagaagcctggtctccggggccgctggattctg

SEQ ID NO: 688851 - DNA, 75 bp, Homo sapiens
cggaccttaaaatacccgcaacagccccttcgtcccaaagagagcaggagattcggatgggtcagatggctatgg

SEQ ID NO: 688852 - DNA, 100 bp, Homo sapiens
ttggagatggcactgctcccccacctacgctcaccagctggattccctcctgggggcttcattcccaaaacggccaccacgcccaaaggcagcagctcct

SEQ ID NO: 688853 - DNA, 100 bp, Homo sapiens
ctaggagcctggggttcggcgctatggaggagctcgatggcgagccaacagtcactatctcacattcttgaaggtggcattgaagagcactaagatcgga

SEQ ID NO: 688854 - DNA, 50 bp, Homo sapiens
ctcagatggctcggtcatcacggatgatatcatcaagttgaatcgaaagg

SEQ ID NO: 688855 - DNA, 90 bp, Homo sapiens
caacagccttctcaattttctttctcagaaagcagaggctcagagcttggagacagacgggtgagatgaaagaggcaagatttaagaagc

SEQ ID NO: 688856 - DNA, 99 bp, Homo sapiens
ctcgaactcctgggttcaagaaattctcatgcctcagcctcatgagtagctgggattacagatttgaacatggaattcaatccttcagatcatcctcgg

SEQ ID NO: 688857 - DNA, 75 bp, Homo sapiens
gaaggccctgtaccgccggcttgccacagtccacatgtcccggagcgatatgaaaggtgaggtctatccatttgg

SEQ ID NO: 688858 - DNA, 75 bp, Homo sapiens
tcccaccaatggagggaaatgtcagcccttatgtttgatcatcggccaaggtcctggcgagaactgcctctgcgg

SEQ ID NO: 688859 - DNA, 100 bp, Homo sapiens
ctgtgacttatcatggagttgataacaagaagaataaagggcagctcactaaagatggacagagacgtatgtgcgttggtctcctaagggcacctacctg

SEQ ID NO: 688860 - DNA, 83 bp, Homo sapiens
atgcacagctgtacaaggaggtgctagaagcctgcgccctcaatgatgacctcagtgtgaatgaaaactttgccattgatttg

SEQ ID NO: 688861 - DNA, 100 bp, Homo sapiens
caaaagtgttcgaagggggctgcagcggagatccgagagcagggggatggggcagaggacgaggagtggctgcattgttgtggaattcacaactactcag

SEQ ID NO: 688862 - DNA, 82 bp, Homo sapiens
gatgtgcaacaaagtgcgatgggaccccagggcggggcagttcccctgcctctccagtgtacagcagcagcgacacagtggc

SEQ ID NO: 688863 - DNA, 74 bp, Homo sapiens
tccaattaaaactgatctgataagacctcagatcagacagaggtttattaacaaaactaggatacccaagactg

SEQ ID NO: 688864 - DNA, 100 bp, Homo sapiens
gtttgaaaggtgtttagattcagaaggtctggtgagctgtaccttctttctggcagtgaatggtctgtattcctctagtgatgatgtgatcgaattaact

SEQ ID NO: 688865 - DNA, 100 bp, Homo sapiens
cttcgccagaggcgagtatataggaaagacgcctcttcccctggaatgggaaagccctacagcttgggatcctttacctcggagcccagatcccctgctt

SEQ ID NO: 688866 - DNA, 112 bp, Homo sapiens
aaataaactgaagtttcttctgggtccatcaccaaagagcagatgccaaatctgataccatgctgtgaagtccaggccacatggaggtgtcctgtgtagatgctccagctga

SEQ ID NO: 688867 - DNA, 80 bp, Homo sapiens
cgcctcccccgcctgtcgcgatacgctcctcagcggcggcgccagctcctgtggtgagaagccctaccactgcaactggg

SEQ ID NO: 688868 - DNA, 83 bp, Homo sapiens
tcttatcctttttggactatcgggatctaatcaaccgtgggggaaaagaccccctctccagccctgggggccctggatctcgg

SEQ ID NO: 688869 - DNA, 95 bp, Homo sapiens
tggtcgtttgtttctccaaggtttgaaaagcagctggcctgcaagagaatggatcttggagaatgtctgaaagtccatgacctggctttaagagc

SEQ ID NO: 688870 - DNA, 75 bp, Homo sapiens
gattgagccaggacacaacaccgcggagccctgcaggcgcatccgcagtgtcatgcagaagtacctggaggaccg

SEQ ID NO: 688871 - DNA, 87 bp, Homo sapiens
tcaggaggacgatttcctggggggcatggagtgcaccctggggcagggagcactcaacatcagtgatagaaccatacctcagccccc

SEQ ID NO: 688872 - DNA, 100 bp, Homo sapiens
tgtggtggccggcttccagtgggccaccaaggaggagcccatcgaagacctcagcccagaccgggtgctggacctccaggctgattcccggctgcacgtc

SEQ ID NO: 688873 - DNA, 82 bp, Homo sapiens
taaagcagcgtgcgttcagccctgggatagttcggatgtcgctgtggcaaagtccgagggccagcgctgccctggagattga

SEQ ID NO: 688874 - DNA, 75 bp, Homo sapiens
gataggagaaggatgtggactgcagtgctgcagtgccaggtgacttcatggtcatgacgattttcttcaatgtga

SEQ ID NO: 688875 - DNA, 51 bp, Homo sapiens
ctgtgacagagacaacaccgagtatgagaaattactgatctctcattaccc

SEQ ID NO: 688876 - DNA, 100 bp, Homo sapiens
cagtgcagaatgggattgatgcagacgtcaaagattttaggcttgcttccggcgtcatggctcaaagggccttcccgaatccttatgctgattataacaa

SEQ ID NO: 688877 - DNA, 106 bp, Homo sapiens
agtgacaagaaatgttccaccaggacttgatgaatataatccattctcggattctagaacaaaatctcctttacagacaataggtgaagaacaaacccagaatccc

SEQ ID NO: 688878 - DNA, 149 bp, Homo sapiens
acacacccaaagatgctgcgcagcaggatgcaaaggccgaagagaacaagaaggagcctctctgcaggcagaaagtgacttgcttttggagggcttcaacaactacaccttcctctccaatggctttgtgcccatcccagcagcccagg

SEQ ID NO: 688879 - DNA, 111 bp, Homo sapiens
ggagttcttacaacatggcagacattgacaaagcattggggagtcagcaatgtccgttgtgttaaatcagctgctgcccatgattaagcctgtaacccagagaaccaacga

SEQ ID NO: 688880 - DNA, 100 bp, Homo sapiens
ggccctggggcccgggggcgcgggccggggtgcctgacatttaccccggtaactgctgggcatttaaaggctcccaggggtacctggtggtgaggctctc

SEQ ID NO: 688881 - DNA, 98 bp, Homo sapiens
gcgtcgtcgcttcactgtggctcatacatgaagacttgcactatctgccagatgctgcttcctaaccagtgcagttatgcatcacaccagagaatcca

SEQ ID NO: 688882 - DNA, 80 bp, Homo sapiens
gctcctactatccatttcaactacagatactttgaagtagaagaagctgatggagaagtacagcatcggggagcccacag

SEQ ID NO: 688883 - DNA, 101 bp, Homo sapiens
gagcccaccgcgccgggccccggacgccgcgcggaaaagcgtggggtagagcagcggctgccatgctcttctgtggcttcatcatcctggtgatctgtttc

SEQ ID NO: 688884 - DNA, 90 bp, Homo sapiens
atgcctgatacattcaattcatggtttcttataaccctactccacgtctggccacgccttggagtcactcttcataaggttgtagtagca

SEQ ID NO: 688885 - DNA, 100 bp, Homo sapiens
agacttggatgaggtgaaagactatgtggccaagatcctattgatcatcgcttcagttattgggatcattgtctataggctctcggtgttcattgtattt

SEQ ID NO: 688886 - DNA, 76 bp, Homo sapiens
gattgatcaggccagcttagactattcatacgctcggtcatcatcagatttgaaatatttaaagtggatacaaaac

SEQ ID NO: 688887 - DNA, 82 bp, Homo sapiens
cccaaatactgtttcccaaactaacgagaagaacggggcccagacccggcctgctggtgccccaccccgaagcctgcagccc

SEQ ID NO: 688888 - DNA, 100 bp, Homo sapiens
ctgctatacagccaaagccagtctggcttgagctttctcttaagtgtgccaagctgccatccaactttcttgagcattttttctcatgggaaatgatcaa

SEQ ID NO: 688889 - DNA, 118 bp, Homo sapiens
cattaaactagactcaggagtcgtcaagaggctctgcaccctggatggaaagcagatgccttcaattaagttgcagagttctgatggagagatatttgaagttgatgtggaaattgcc

SEQ ID NO: 688890 - DNA, 100 bp, Homo sapiens
ggtgtgtggcgcgcccagagccccgcgtttcagccctagggaaggtcttctctgttggttgaaatgtctatgattttatctgcctcagtcattcgtgtca

SEQ ID NO: 688891 - DNA, 126 bp, Homo sapiens
ccggcagtgaccgtgtgtcagaacaatcttgaatcatgaagctactaaccagagccggctctttctcgcaatctgaagaggatgtaagtcagtttgattccaagtttacacgtcagacacctgtcg

SEQ ID NO: 688892 - DNA, 96 bp, Homo sapiens
tgggtctacgataacgcgcttttgctcctcctgaagtgtctttggtccaacgttgttccaggctacctgacagtcaacattgagcctctcccccct

SEQ ID NO: 688893 - DNA, 83 bp, Homo sapiens
aagccggccacagaaggaaagcagctgctccagttacagcaccacccggccgctgcacccggctgctcccaggccccccagcc

SEQ ID NO: 688894 - DNA, 101 bp, Homo sapiens
gacatgaccaccatcaccgaggacgagatctccaagctccgcaagctggaggcctcgggcaaggggccaggcaccgtctgcgtcctgctgtccttcccctt

SEQ ID NO: 688895 - DNA, 101 bp, Homo sapiens
gacaacagaaacagaaacgattgtggaaacaggaagggtatcaagactacgaacctgaagcctaagaaatatctttgctcccagtttcttgagatctgctg

SEQ ID NO: 688896 - DNA, 78 bp, Homo sapiens
ggacctatggcgtggtggcccagtactaccggcccctgcatgacaccgagtttccaggtgtggttgcaagacccattg

SEQ ID NO: 688897 - DNA, 83 bp, Homo sapiens
ccagcaggctctcaccagcgcacagttgcagcaacacgccgcgttcattccaacaggcagggcaagaatcctttcgttccatc

SEQ ID NO: 688898 - DNA, 96 bp, Homo sapiens
tgtccttctattcaggccactcttcgttttccatgtactgcatgctgtttgtggcagtatcagacttggtgataattctgaattatgaccgtgctg

SEQ ID NO: 688899 - DNA, 51 bp, Homo sapiens
ccgttccctggaggtcctgtggaatgatctctgggtcacgttgattctcac

SEQ ID NO: 688900 - DNA, 50 bp, Homo sapiens
ataaccggaccgacccccgacggtgcgtgtatgaatgacccatattaaat

SEQ ID NO: 688901 - DNA, 100 bp, Homo sapiens
gatagcaaaggctttggccaatgagagtggactgaattttctagctataaagcttcgccgacacgaggtgaccatctgcaattacgaagcatctgccaac

SEQ ID NO: 688902 - DNA, 98 bp, Homo sapiens
ttttgtcgtgtgggacctgttctggctgctccagccccaggaaggacccaggacacccggaagccggaaatgaatgtggtaggttggtacaaattccg

SEQ ID NO: 688903 - DNA, 101 bp, Homo sapiens
ggctccagttgtccgcggttcctcctcctgtcgctgcccgtgtgattactgagactcagacttaattcagtgcacaaatgagatgaatgtgaacatcccac

SEQ ID NO: 688904 - DNA, 99 bp, Homo sapiens
cagattatatggccgcatcttcacaactccgtcttacagaggtaaaataccatgaagattttgaaaaaacaaaggggagaggctttactcccgtcgtgg

SEQ ID NO: 688905 - DNA, 98 bp, Homo sapiens
tcattcaaggttacccagttgcatgttggcagataaattgaacatgactccagaagaagctgaaaggtggattgtaaatttgattagaaatgcaagac

SEQ ID NO: 688906 - DNA, 59 bp, Homo sapiens
tctcactgaatgagcctgaagacaaggatgtgactgtgagtggcagtgtgatgagtgtt

SEQ ID NO: 688907 - DNA, 98 bp, Homo sapiens
tgacaaggaggaaccagtcactcctactagtggagggggtccaatgtcaccccaggatgatgaagcagaagaggaagagcttaaagcagcgcctgggt

SEQ ID NO: 688908 - DNA, 75 bp, Homo sapiens
atctattatataagcacacagcaagcaccttctgaggtgatgatgaacagtctacacagatggctgcaagttggg

SEQ ID NO: 688909 - DNA, 100 bp, Homo sapiens
ttcatccaggcctacgaggaggtgcgcgagaagtacaaaggtggacgacatccttggagaaggcagcgacgacagcgacagcgagaagaggaggcctgag

SEQ ID NO: 688910 - DNA, 100 bp, Homo sapiens
caggcgtgctggccggcgtggagagccgccagggctctatcaaggggctggtgtactccagcaacttccagaacaatgctaaagtagctgtgctaggggc

SEQ ID NO: 688911 - DNA, 112 bp, Homo sapiens
gaggacataaggaactagtcacagtgttgctgcaacatagagctgacattaactgtcagcatggccgaaacagaagccctgtcgaagcttcgggaagacttcaggatgcaga

SEQ ID NO: 688912 - DNA, 100 bp, Homo sapiens
gaactaatgcagtcaccgtgggtggtgtggcagctggaattgggggcctcgagggttcccttctggagaagagtcaccgggtttggttctgtttcccctt

SEQ ID NO: 688913 - DNA, 75 bp, Homo sapiens
ttctcctgttcctatgttaagggatctgacacagaacactgtagtcaggaaatcatgaccagatctgaaatggct

SEQ ID NO: 688914 - DNA, 131 bp, Homo sapiens
tcacacccatgcctatgatattcttctcctggttaatcaagaattctctatttctgctccgtcatccatgccactttgttgacctcctgtactggagagacattaagaagactggagtggtgtttggtgcc

SEQ ID NO: 688915 - DNA, 98 bp, Homo sapiens
atttgaaccatgtttggattgaagccgcctctgtattacttaccagacctgcctagagctggaacgttacctccagagcgagccctgctatgtttcag

SEQ ID NO: 688916 - DNA, 80 bp, Homo sapiens
gcgctcacggccacggcgctggtcaccggggtctgcctgggtctcctctgagcctccggcctccataagacccaaaacag

SEQ ID NO: 688917 - DNA, 82 bp, Homo sapiens
agcaaggaagaaattgttcagttcttctcaggagtcaaattgactttatcagctttaatcgatgggaagaacttcagtgcag

SEQ ID NO: 688918 - DNA, 98 bp, Homo sapiens
ctcctgatggcctgttctgtggattttggatttgccaaggcagccctcacaatccgaatctgtcactgcgaaggggatgaagagagccccctcatcac

SEQ ID NO: 688919 - DNA, 126 bp, Homo sapiens
agagccgggagtcgctgggtgcgtggggctgcctcgccgcgtctcgccacgtcgtgatgagaggagatggattgaaaagcagaacagagcaacaagagcacaaagaaaaaaagaagaaatgaacag

SEQ ID NO: 688920 - DNA, 100 bp, Homo sapiens
ggggggcatcgcttctctgcggtgcagcagcagcgggagcaccatcagcatcctccccagcaagactccgtgggaaggaggcttgtttaaactacggatg

SEQ ID NO: 688921 - DNA, 82 bp, Homo sapiens
cgcggccgcggacgaagatggcgaccgccatgtacttggagcactatctggacagaggaggaaggtgaggacggcgatccat

SEQ ID NO: 688922 - DNA, 98 bp, Homo sapiens
ggtttggttctcccggcagcagcccgacgcaaaccaaggatctggggatcttcgcactatcccaagaaacgcttcgttaagggactcaggcagtacgg

SEQ ID NO: 688923 - DNA, 100 bp, Homo sapiens
agaaagcctattttctgtatatgtattccagatatctggttgccaacttggcctgttccatctcaaataatgaagaaggtgtaaagcttgttcgaatgtc

SEQ ID NO: 688924 - DNA, 74 bp, Homo sapiens
ctttattaccattgttgatgttcagcgtgtattagaggctgaggacaagaaaacggcacttccagcagggctgt

SEQ ID NO: 688925 - DNA, 90 bp, Homo sapiens
ctctacccttttgaggatatttcaacaagcaggctctccccggaggctcagccccctctgctccccatgggcaactgccaggcagggcac

SEQ ID NO: 688926 - DNA, 100 bp, Homo sapiens
cccggcttgagcagcgcggtgagacagagttcccgcgctggaggggcgcggtgagacagaggtcctgggctggagagtaactgtagtactgaatggaagt

SEQ ID NO: 688927 - DNA, 83 bp, Homo sapiens
cacagctgaagaactgctaaacaaggactttgccaagcttggggaaggaactgtggctgcaccatctgtcttcatcttcccgc

SEQ ID NO: 688928 - DNA, 75 bp, Homo sapiens
cctcagcctcctgaggagctgggattacaggtttcatttagtggagaaattgggtatgacctcggaggagtcaag

SEQ ID NO: 688929 - DNA, 111 bp, Homo sapiens
aagaaaatccagctgcatttgttagagctatacagcaatatgttgatcctgatgttcagctgagccagacccagggccctccagattaccccaggtttgtggagtctgtgg

SEQ ID NO: 688930 - DNA, 100 bp, Homo sapiens
ggtgaaagaaaatcctgcttgacaaaaaccgtcacttagggaaattgacaatggcccttcagctatgctaggtctataatgggaagtgtcacagttcggt

SEQ ID NO: 688931 - DNA, 80 bp, Homo sapiens
ttggacgaagatggggagaaggaagcgagactcatacgcaacctcaatggtacggctcctacctggtctggaaagagctg

SEQ ID NO: 688932 - DNA, 74 bp, Homo sapiens
ttcattgtttgtcaccacaaaaaggacaggtgaccaagaatatggcccaggtgaccaaagccctggacaaggcc

SEQ ID NO: 688933 - DNA, 75 bp, Homo sapiens
gttaggaggcagctccctgaccgacctggggccggggagcagcaggcgggaaatccccggcttcctgactgatga

SEQ ID NO: 688934 - DNA, 91 bp, Homo sapiens
cggcgtcgtcggatgttgtgttgcccgccaccatgagctacacaggtgagaagccctaccactgcaactgggacggctgcggctggaagtt

SEQ ID NO: 688935 - DNA, 98 bp, Homo sapiens
cgccggtctctgttccgcaggatgatatgcacccaatgtccagggagcgtgcaaaatttgtcaaaagtggccttttattgtaaaacgacacgagagct

SEQ ID NO: 688936 - DNA, 100 bp, Homo sapiens
tttaggtgaaggagcttttggaaaagttgtggagtgcatcgatcataaagcgtctatgttaacaatgaatgggcaaccagtgttggggaaggagggagct

SEQ ID NO: 688937 - DNA, 96 bp, Homo sapiens
cggctccttaccagctcacctctcaccgcgcatgtttggagattctgacaatggagatattaattatgattatgttcatgaattgtcattggaaat

SEQ ID NO: 688938 - DNA, 82 bp, Homo sapiens
gggccccagccccacagaccagcccagcattcaggcaagtgaaccggagcaaacgacttccgatccagtctgcgctgttgcg

SEQ ID NO: 688939 - DNA, 50 bp, Homo sapiens
gctgctgctgctgctgctcctggaaaccgaccaagatcactccatggatg

SEQ ID NO: 688940 - DNA, 109 bp, Homo sapiens
gagcagtcaactcaaatgcaagtccaagaggaggaggaggcggaggtccaagcggaaaggttatgaagacagtatggagtttccagaccatagtagacatttgctacag

SEQ ID NO: 688941 - DNA, 82 bp, Homo sapiens
atcgtctctctcatcgaggcccaaaccgccaagtttggagtttgagaatcagaagactcgcttgggcattcagttggatttt

SEQ ID NO: 688942 - DNA, 80 bp, Homo sapiens
atgattaagctccatgtggtacctgtggaatcagcaggttggcagtggcaatgacccctggtcagcctggagtgcctcca

SEQ ID NO: 688943 - DNA, 98 bp, Homo sapiens
cacatatgacatcagtcagttgtttgatttcatcgatgatctggcagacctcagctgcctggttcaaatctacctgatgacatctttgaaaatggaaa

SEQ ID NO: 688944 - DNA, 51 bp, Homo sapiens
ggatccgatagctctctgcttattaatggacatgggtgtggaggcaaagaa

SEQ ID NO: 688945 - DNA, 76 bp, Homo sapiens
ttgaagtcattgaaaatgaagagctagctagatagacgatcagctgaacactctcttgaaggagttccagctaaca

SEQ ID NO: 688946 - DNA, 73 bp, Homo sapiens
taatggaaaaattaacgtgcatgactttaagaaggaaatcacttttcagcaagtaatgtctcagattgcgaat

SEQ ID NO: 688947 - DNA, 108 bp, Homo sapiens
gtggacaagtttgcagatcgggagcgcaaggtcgccctcaaggccatgatcaaaacttggaatcgaagcctcttaaaatggcagatgacttggacttcgagacaggag

SEQ ID NO: 688948 - DNA, 90 bp, Homo sapiens
ccgcgtcccgctcgctgggagagaggtacctctccttttccctctccctttccctaagttgttgacctcctgtactggagagacattaag

SEQ ID NO: 688949 - DNA, 100 bp, Homo sapiens
gcacaccatccaggagtcagtttattactggaaaaccctgcacttgatggaccagctggcaccacccagatcaataaactggcttatttgaatttgcggc

SEQ ID NO: 688950 - DNA, 82 bp, Homo sapiens
caaataccaggctaccatggtctacaagactctcttcgctctttgcatcttaactgcagattggcggcagtaagcacacaat

SEQ ID NO: 688951 - DNA, 60 bp, Homo sapiens
tttgtctccttagaaggaaggctgagaaactaaaggtgacaaacagcatgtttggtgctt

SEQ ID NO: 688952 - DNA, 90 bp, Homo sapiens
gatatttacagctctgcaaagaagtgtaagaagaagcttgggaagctgccacctcagtatgccctggagctcctgacggtctatgcttgg

SEQ ID NO: 688953 - DNA, 122 bp, Homo sapiens
cagaatctggcaatgggggcaggagctgttggagctttgcagctgacctacatctcgaaggtcaaaatgcagatcttcgtgaaaacccttaccggcaagaccatcacccttgaggtggagcc

SEQ ID NO: 688954 - DNA, 75 bp, Homo sapiens
gtgaaatgggctaataatgctggcaaagtggaaaaatgtgcgattatctttctcaaggaatagatctttctggaa

SEQ ID NO: 688955 - DNA, 83 bp, Homo sapiens
gaagaggaggcggaaaaggacgcaaagttctccggcgaggtgacagagctgaatgaacctctctccaatgaagatcgaaatct

SEQ ID NO: 688956 - DNA, 100 bp, Homo sapiens
gaccggaggctctggatggaagccatggatggccgggaacctcctcaccagcaaacagacatatagaccagtggagcagaacagagacctcagaagtaac

SEQ ID NO: 688957 - DNA, 101 bp, Homo sapiens
gtgattctgaagagggtctggaggagccttctcaagaacagagatataatgaagatctggaacttgaagatgccattcatacagccatcttaaccctaaag

SEQ ID NO: 688958 - DNA, 74 bp, Homo sapiens
ggctcttcctcctcctcccgcgacgactgagcgtgcctaccaaaagcagccgaccatctttcaaaacaagaaga

SEQ ID NO: 688959 - DNA, 74 bp, Homo sapiens
tctctcaagagaagctgcaagagcaacatctttcctcaccccaagtcatccgtccttggctcaggatttggaga

SEQ ID NO: 688960 - DNA, 50 bp, Homo sapiens
catccttttccaccagctaaaggtaaaagtcttgcagtgaaaaacccgag

SEQ ID NO: 688961 - DNA, 106 bp, Homo sapiens
ttccggctccgtcgtggaagcaggactgcgccgcgtcttcctcaagatggcatgatcaacattgacatgactggagagaagaggtcgttggatctcccatatccca

SEQ ID NO: 688962 - DNA, 83 bp, Homo sapiens
gcagaagtccttcttcgccaaatacgtcagcccaaggccaaccccactgtcactctgttcccgccctcctctgaggagctcca

SEQ ID NO: 688963 - DNA, 100 bp, Homo sapiens
agcgacttcaactactcctaccccaccaagcaagctgctctgaaaagatgacttcaaccgagtgatcctttccatgaaaaggggtcaagaatacacagac

SEQ ID NO: 688964 - DNA, 100 bp, Homo sapiens
attccggatttccttgggtcttccggtaggagctgtaatcaattgtgctgacaacacaggaagctcttcgtgggcggtcttgactggagcacgacccaag

SEQ ID NO: 688965 - DNA, 98 bp, Homo sapiens
ggaacgggccagcgctgcaagaggcctacgtgcgggtggtcaccgagaagtccccgaccgactggtatgtgaggagcagcgctgtgaggaggaagtct

SEQ ID NO: 688966 - DNA, 100 bp, Homo sapiens
caaacctgtgaacccacccgagagcaacaaagcaggcgactacagccacgtgaaggatgttgcgcgaggttctccgctcgtagcagtctgtacattcact

SEQ ID NO: 688967 - DNA, 75 bp, Homo sapiens
aaaagaaccagatgtcaaaactgatttcagaaatgcatagttttatccagatgagctttgatccaaaccttctcc

SEQ ID NO: 688968 - DNA, 74 bp, Homo sapiens
gagcgcagagcgccgcgcgttcgcgctcaagatcaacagttcacagaagaaaagcttggccaggctgagaagac

SEQ ID NO: 688969 - DNA, 83 bp, Homo sapiens
tgcagaagttccttggggtgaccaacaccattgactaccacaaaaccttggcggcgaactttctgaccaagtatacaactacc

SEQ ID NO: 688970 - DNA, 95 bp, Homo sapiens
gggagtgatggtcagctaggactcatgactactgaggattctgtggcagtgcccagattggcactgttgaagaaaagcggggaggaagattggag

SEQ ID NO: 688971 - DNA, 87 bp, Homo sapiens
ctgatgatcacgcagctggctggcttcagtggaccagtctcagccttagatccaaggacagtccaaggaagtcctaagaccatggag

SEQ ID NO: 688972 - DNA, 74 bp, Homo sapiens
gaagttcttggctgcggggtgatggaacaacaactggtcaattcaggttaatgactccagagagtaagatcaga

SEQ ID NO: 688973 - DNA, 97 bp, Homo sapiens
gacacgccaaacctgagtttctacagaaatgagatccgcttcctgcccaacgaggagcccaaggtgggcatcaagaccatcaaggtgtactgccagc

SEQ ID NO: 688974 - DNA, 98 bp, Homo sapiens
ctttcctgacatgcacaactccaacatcagcaagatattgggttttacagacatttcaccagaggaattgaggcttgaataccataacttcttaacca

SEQ ID NO: 688975 - DNA, 50 bp, Homo sapiens
gtccacgggggtcatgggcaacattcagggggtccactggacggggcctg

SEQ ID NO: 688976 - DNA, 75 bp, Homo sapiens
ctcatacagagattgaaatgttccttagaaaggagcagcagctcttgcaagcttaggatatgaaaagagctgtgt

SEQ ID NO: 688977 - DNA, 83 bp, Homo sapiens
ggagaagtttttatcaacaaaggcaaaggattcggatttattaagcttaggtccaattacacatttggaatacaaaactagtt

SEQ ID NO: 688978 - DNA, 83 bp, Homo sapiens
gggctgtgagcaagaggaagctgcagcccacccgggcagccctcaccctgcaattctgtggtgttcttggtcacacatttatg

SEQ ID NO: 688979 - DNA, 100 bp, Homo sapiens
cctgaggttgaactggggtgaaccgaatgagtccctggaacgccagatgcgtgaaatggaagagaactttgccgttgaagctgctaactaccaagacact

SEQ ID NO: 688980 - DNA, 119 bp, Homo sapiens
ggccaacatcgcggtgcagcgaatcaagcgggagttcaaggaggtgctgaagagcgaggagccaggactaaaagaagtggtagaatcctgtcgaggaaaaaatctttttttttctacca

SEQ ID NO: 688981 - DNA, 75 bp, Homo sapiens
agcacctccatcaggtacaacctcgaggagctctaccaggagcatctttccttgaagaagtacattattgacatt

SEQ ID NO: 688982 - DNA, 83 bp, Homo sapiens
ccatgtttggattgaagccgcctctgtattacttaccagactgcctctgtcaccgggtccctccacccttgtctcctgtgcgg

SEQ ID NO: 688983 - DNA, 100 bp, Homo sapiens
cgctccagccgcccgcgggccagcgcaccggtcccccagcggcagccgagcccgcccgcgcgccggatagaccactggaacaatgagaaggagagaattc

SEQ ID NO: 688984 - DNA, 75 bp, Homo sapiens
cgggagcaggaaagccagtgttgtggaccctagcacagaggcctggtgtgctgcagggaactgtttcagtctgca

SEQ ID NO: 688985 - DNA, 75 bp, Homo sapiens
gagggcatggacgagatggagttcaccgaggctgagcggaaggaggagaaaaaggcggctgcccctgctcctgag

SEQ ID NO: 688986 - DNA, 75 bp, Homo sapiens
cgggccgtcatgctcatccaggcaggttccaggtaaatacacggtcgtggcggaccacgagaagggaggccccga

SEQ ID NO: 688987 - DNA, 75 bp, Homo sapiens
aaatggtccctggacaggaggattcatctgatctggagttgctgcagaggcattcgacttacagcagtgtgcggc

SEQ ID NO: 688988 - DNA, 75 bp, Homo sapiens
cagaagctgaaagtgaagctgccatgaaagagattgaatccattgtcaaaggagacgttgacatttagggatgtg

SEQ ID NO: 688989 - DNA, 100 bp, Homo sapiens
tttgtgactcacaatctgtcttttgatgaaatcaacaaagcctttgaactgatgcattctggaaagaggtatgaaaactttcaaagacgactagcacaga

SEQ ID NO: 688990 - DNA, 74 bp, Homo sapiens
atcccaggttgccttggaaaatgccaacgccgtgtctgaagaagctgccagtaactcagattctagccatgaag

SEQ ID NO: 688991 - DNA, 100 bp, Homo sapiens
gcagattgcttggccatcaaaactgaagatcggagccaaatccaagaaagatgatgtgatgccagccacttactgtgaaattgatttagataaagaaaag

SEQ ID NO: 688992 - DNA, 75 bp, Homo sapiens
ctcttcagggaccacactgcaattctggatttcctgccaggtccgtggcactcaggtagttggttctgacatgac

SEQ ID NO: 688993 - DNA, 90 bp, Homo sapiens
ggccagggcagagggcacctgagcggctggagagcctgttggagaaacacaaagaggaattgaatgatctggcacgggaccctccagcac

SEQ ID NO: 688994 - DNA, 73 bp, Homo sapiens
aacatcagcgtggcctacaggctcctggagggctgactgtgctgtcctgattgttgctgctggtgttggtgaa

SEQ ID NO: 688995 - DNA, 82 bp, Homo sapiens
cgcggattcgccgaggcaccgaggcactcagaggagctcaaattgaaattattccatgcaagatctgtggagacaaatcatc

SEQ ID NO: 688996 - DNA, 100 bp, Homo sapiens
ctccggctacgggccccttaccgagctcccagactggtcatatgcggatcgttcagaaagaggcagagcgggccgaacgggccaaggagcgggagaagcg

SEQ ID NO: 688997 - DNA, 101 bp, Homo sapiens
tgcagtacctggatctcatcaaaaaggacaccagcaagctgttcaatgaggaggatgtatgttgtgttcacagcgaaggtactcccttcagcctgtcccag

SEQ ID NO: 688998 - DNA, 90 bp, Homo sapiens
cgacgtccctcaaaccttgcttctaggagataaaaagggctgaagaagatgcagagcagcctgaagctggtggactgtatcatcgaggtc

SEQ ID NO: 688999 - DNA, 100 bp, Homo sapiens
gagagctgcaagccggtgcagcagccttcagcttttggcagcatgaaagttagcatgtcgcccttccaaaggcaggaagcggggcttctgctggtgtgtg

SEQ ID NO: 689000 - DNA, 82 bp, Homo sapiens
gagctgtcagagcccggggacggcgaggccctcatgtaccacacggtgatggaggacgaggagaaggcagtggagatcttgg

SEQ ID NO: 689001 - DNA, 98 bp, Homo sapiens
agaaacgacccaggaatgcgcctcgcgcagtagcagaatcccatggtagccaggtgggtgaaggggagcgaggacgttctacctgccttgaagaagac

SEQ ID NO: 689002 - DNA, 96 bp, Homo sapiens
ggaccgacggacgcacgggcgggcggccgggagccatggagcgcggccctggggcccgggggcgcgggccggggtggcaagagcggtgagcggggc

SEQ ID NO: 689003 - DNA, 75 bp, Homo sapiens
gggggatgaggaggtgtggacgtcggacgtgcagtaccaagtgtcgcagaaaggacccaggagcgataacagtaa

SEQ ID NO: 689004 - DNA, 100 bp, Homo sapiens
ggcggcgtctgtctctgcggcttctggttctcacttgtcggtacaaagaggatggtgaagctttgctaattttgctaccctcagaaaaagctatggtgca

SEQ ID NO: 689005 - DNA, 83 bp, Homo sapiens
ctctgaagttgccaggcttcccaacattcttgtctgtgatcagtgaaaagcatgatgtggtgttcttgataaccaagtatggt

SEQ ID NO: 689006 - DNA, 80 bp, Homo sapiens
aaaaagattcagattacgaggattatggatgaacgtaacagacaggttatggaggttttgatgactatggtggctataat

SEQ ID NO: 689007 - DNA, 100 bp, Homo sapiens
gccgactggagcaggcagcagcccaggtgatccgggagccgaagccacgttcagcccgctggctcagcacctctatccccgaggcccagtggcacagcag

SEQ ID NO: 689008 - DNA, 100 bp, Homo sapiens
cgccgcttctcgccagcgccgttgctgcgggggattgtgggagtctccgcgtcccgctcgctgggagagaggtgtcatggagaaactccagctgggccca

SEQ ID NO: 689009 - DNA, 75 bp, Homo sapiens
cagcttctgcaaagacaggaggagtgggccctttgtggcagttgtgaaaaacttcaggacaaaaatgtttcattt

SEQ ID NO: 689010 - DNA, 75 bp, Homo sapiens
gatgaagtgaacagctgagcagctcgcagagagcaggttaacacagaaatctgcctcctgggccatgccgcttct

SEQ ID NO: 689011 - DNA, 100 bp, Homo sapiens
gcagaattcacaagatccaatcccttgtccttaaaagattattgctcagttgtaactattgtggaccagacaaatgtaaaactaacttgcctgctcttta

SEQ ID NO: 689012 - DNA, 100 bp, Homo sapiens
tgttggcgagaaaacactatgcatctgaggaggcagcctggcatcctcgctacaacctcattgttgtgggccgatacccagatcctaatttcaaaagttg

SEQ ID NO: 689013 - DNA, 51 bp, Homo sapiens
ggtaaggcgtgagcccccaagatttcacgattttctaccctagcaaggatg

SEQ ID NO: 689014 - DNA, 88 bp, Homo sapiens
agaggcacgagatgccccctcacatctatgccatcacagacaccgcctacaggagtatgatgcaagaatgtggcagatcagattgcat

SEQ ID NO: 689015 - DNA, 75 bp, Homo sapiens
cactgatagaaatcatttccatcaataccggtttcagactctctggctcaatctgtagttcagcatctaagatgg

SEQ ID NO: 689016 - DNA, 75 bp, Homo sapiens
cattcaagctgataggctgcgctaccggaatgtcatccagcgagtgattaggtccacaaggcgattacaatttcc

SEQ ID NO: 689017 - DNA, 74 bp, Homo sapiens
ctctatatgaaaaggaactccctgacatccttggcatttagtaagaagaagattgatgacagaaaagaatggtt

SEQ ID NO: 689018 - DNA, 75 bp, Homo sapiens
ggggacggggaccagcagctgtcgccgccgctctcagtcgacagaggtacgttcttggagacacagcaatgcaga

SEQ ID NO: 689019 - DNA, 83 bp, Homo sapiens
cggcggccccagaccctgctccgggtcgcgtcctggccgctgccatggcccagacactgcagatggagatcccgaacttcggc

SEQ ID NO: 689020 - DNA, 51 bp, Homo sapiens
tggtccggattgtggtcactcgaagtgagatggagcctcgctctgtcaccc

SEQ ID NO: 689021 - DNA, 100 bp, Homo sapiens
ctatacatggatgtgatgctggagaattatagcaacttactttcagtggttccctactgaaggaacagatgctaaggaaacaggccgagttagaatcagc

SEQ ID NO: 689022 - DNA, 83 bp, Homo sapiens
aaccaaacaaccagaagaagtatttgatgtcttagagaaacttggagaagggcaaagcagagagcagaggttcttcagtccac

SEQ ID NO: 689023 - DNA, 75 bp, Homo sapiens
atgaatagtgctgtattgccagaaatggagaatcagcaaactgaaaccgtgtcagttcagtcttcggtattgggg

SEQ ID NO: 689024 - DNA, 99 bp, Homo sapiens
ctcaatcttggaacagcacccccttctttaaggtaaaataccatgaagattttgaaaaaacaaaggggagaggctttactcccgtcgtggacgatcctg

SEQ ID NO: 689025 - DNA, 120 bp, Homo sapiens
tggtgccggcgtttgggctacggttgttgttggcgactgtgcttcaagcggtggaatgaatcttacttgttgaatatcttctggttactagttggattcatttgtgaaagaatcattttc

SEQ ID NO: 689026 - DNA, 75 bp, Homo sapiens
gtgaagctggagttcccttcccttccacagtgcaaggaagacgccgaggatattgacggccaagcactcctgctt

SEQ ID NO: 689027 - DNA, 100 bp, Homo sapiens
ctaaaacaccagaactcaacctgctgcctgctgaagatgaagtcttactacagaaattaagagaggaatcaagagctgtctttctacaaagaaaaagcag

SEQ ID NO: 689028 - DNA, 100 bp, Homo sapiens
agaatcaaagagctgctttgaatcagcagatcctgaaagccgtgcggatgaggaccggagcggaaaaccttctgaaagagaagaagaaggaggttcctgc

SEQ ID NO: 689029 - DNA, 100 bp, Homo sapiens
cgacgtcgtgatccagaagtccagagctgaggactgcctgtttgcaggtattgttgcagcatctggcagtgagactgaggatgaggacagcatggacatt

SEQ ID NO: 689030 - DNA, 96 bp, Homo sapiens
gcgcatcgggcccatgagactgacgcaggaccctattcagttcctacaacagcagccagtacccctgatgccgttgacaagtatctcgagacacct

SEQ ID NO: 689031 - DNA, 75 bp, Homo sapiens
cttatccagacccaatggaacatcagcaatgcttctgatctacgcagaccccaccaagaggctggagctgtactt

SEQ ID NO: 689032 - DNA, 75 bp, Homo sapiens
tattaactgcctttcttctgtgggctgtgattttcagaggggaatgctaagagccaatggagatcttcgtggatg

SEQ ID NO: 689033 - DNA, 75 bp, Homo sapiens
gcgcaggggagattacttttctggaagcggtttccaacctagatgaggaaagccgatggacagtccactacactg

SEQ ID NO: 689034 - DNA, 100 bp, Homo sapiens
caaaatggcgccctacagcctactggtgactcggctgcaggttgattgtcctgggctgtggctggctgtggagctagagccctggatggcccctgagcca

SEQ ID NO: 689035 - DNA, 74 bp, Homo sapiens
tcgcagtggtcgcttcttctccttggactgttatgaacactatccaacaattaatgatgattttaaattcagca

SEQ ID NO: 689036 - DNA, 80 bp, Homo sapiens
ctggattcgtggcgccacaagctcattcactgtgtaggcgtccgacctccgatcatgaacgggcccctgcacccgcggcc

SEQ ID NO: 689037 - DNA, 100 bp, Homo sapiens
ctgagtacctgaaccggcacctgcacacctggatccaggataacggaggctgggttgaactcccaccacctgatcttggaccaagttctgcactaaatca

SEQ ID NO: 689038 - DNA, 100 bp, Homo sapiens
aaagggataggagaaggatgtggactgcagtgctgcagtgccaggaattggcagcaatgaaacagattctcgttaagatgcatagtaaacattctgagaa

SEQ ID NO: 689039 - DNA, 71 bp, Homo sapiens
ttgtctttgtcctgtactttgtgcagggtggcatgtatgtgtttcagctctttgactactatgcagctagc

SEQ ID NO: 689040 - DNA, 100 bp, Homo sapiens
gggggagctgctgggcgaagcacgctactacctggtgcagggcctgattgaggactgccagctggcgctgcagagactaaggtgtcagtatgttcttcaa

SEQ ID NO: 689041 - DNA, 75 bp, Homo sapiens
ctgatggtcaccagtcaatctttgagtgctacagttgaaactccagcagcgccggacccgggaagaactggtgag

SEQ ID NO: 689042 - DNA, 101 bp, Homo sapiens
cctacgtgcacaacatcacccgcaagggccaccactgcccagttcgggaaatgagcagcactcatcagcctccatcttcgagcacgtggacaggatctccc

SEQ ID NO: 689043 - DNA, 100 bp, Homo sapiens
ttgcctccagcaccacttctaatgacaagttggatggcttgaggactggtactaaaaggaaacgtgactgggaggccattgccagcagaatggaggatta

SEQ ID NO: 689044 - DNA, 90 bp, Homo sapiens
cctcctgagtagccgggattacagcttccaaacagtttcataatgaggtcctgaaggcccacaatgagtaccggcagaagcacggcgtcc

SEQ ID NO: 689045 - DNA, 83 bp, Homo sapiens
aaaaaagagcgacgagtgcaagctcgagcccagaaaactatcctctaagaccagacgtgacaaggagaagcagagctgtaaga

SEQ ID NO: 689046 - DNA, 98 bp, Homo sapiens
cccgggcccccttcccggtccggccaattcctgtccccccagcagcatggcatcgtgtgctgaaccctctgagccctctgccccactgcccgccgggg

SEQ ID NO: 689047 - DNA, 71 bp, Homo sapiens
tctgtcagcaccaagttcccagcttatgagagggttttgctgcgagaagctcagcaaagacccaaatatcg

SEQ ID NO: 689048 - DNA, 82 bp, Homo sapiens
ccgcccagacgctgcccgcgggcccggccacggcggagccaaggggcagaaccccttcgagctggccttctccctagaccag

SEQ ID NO: 689049 - DNA, 82 bp, Homo sapiens
cggcgagcgcgagcggcgcgagaaacgtgaagcctctgcgggccttcttttcgtcttatttgaagtcattgccggatgtgag

SEQ ID NO: 689050 - DNA, 98 bp, Homo sapiens
tgcgcgcggctaggaggggccgtcaggcggggatacagcctggaagggagcgaagaatggtcaagaaagtggactcgaaattggaactgacacaattc

SEQ ID NO: 689051 - DNA, 100 bp, Homo sapiens
gatatcctaattatcccaaccctgctgtgaataatgacatctgccttgacgaagtggcagaggaacttagatgaagactccgggaaggctgacagcgacg

SEQ ID NO: 689052 - DNA, 83 bp, Homo sapiens
ggagaccctcatccagctgatgcccttcttcgtgcaggtcttgacgagccctgcccgggccgacgcatgcggaggatggaaac

SEQ ID NO: 689053 - DNA, 136 bp, Homo sapiens
ctaatttcctgttctggaatcgagagaagactcctcaacaagttgctgcaatgtctgtgtctaatctatcatgtgccggtggtggtgtgcacattgagccccggtatagacagttcccccagctgaccagatccca

SEQ ID NO: 689054 - DNA, 100 bp, Homo sapiens
catgaaaagatgtcttctaacgcagaaaagaagtgaaatcaaatacattgcccatctcgctgcagtctataagaagtagcctactgctaggcttcaggag

SEQ ID NO: 689055 - DNA, 51 bp, Homo sapiens
tctatcgtctgcagtgagggaagtttgcccaagctctaaggaaatttctgg

SEQ ID NO: 689056 - DNA, 144 bp, Homo sapiens
aaacgtaatgaggatgaagattcaccaaataagctatatactttggttacctatgtacctgttaccactttcaaaagaaagctcatcatctgcaatgtcactggcattgcccacaggcgtccccagggtgagagctatgaccag

SEQ ID NO: 689057 - DNA, 95 bp, Homo sapiens
ctgagactcaacatgacactcctggggtctgagcattccttgctgattaggagcaagttcagatcagatcgtgaggaccagtcaattctttgcac

SEQ ID NO: 689058 - DNA, 83 bp, Homo sapiens
ctccgctcaccggtaaaccaggacagtggaggggcgccctgatgcgaatatatacagccctgctctgggacacacctccattg

SEQ ID NO: 689059 - DNA, 83 bp, Homo sapiens
tgggggcagctcagcagagccagggttgatgataattagaagcatgctttccactgaacttcccgacaacatttgttatgcag

SEQ ID NO: 689060 - DNA, 50 bp, Homo sapiens
accgtccagcccagcgattctcagtcaggcttgctatgggtgttctccag

SEQ ID NO: 689061 - DNA, 75 bp, Homo sapiens
ctggtaggagcaattgtctactatgacgacaatccatggacacaagggaccaatcactgcagtggcttttgctcc

SEQ ID NO: 689062 - DNA, 83 bp, Homo sapiens
taccaagctgtttcctaccaggtcacacactgttgcagcgcaggtctctgagcggcccctgatgttcctgttggacactcctg

SEQ ID NO: 689063 - DNA, 100 bp, Homo sapiens
cggcactgggacttctcgatctctggaggcacctgttgcaagtgacagaggcctttgaaattgttgttcgccatgccaagaactacaccaatgccatgtt

SEQ ID NO: 689064 - DNA, 75 bp, Homo sapiens
ccaagtccagaaccatagggattattggagctcctttctcaaagggacaggctctgaacaagaaggaacacagag

SEQ ID NO: 689065 - DNA, 82 bp, Homo sapiens
ccctttccacctcgcggcagttcgactttgtgcccattgacctagacgagtggtgggcgcagcagttcctggcgagaatcac

SEQ ID NO: 689066 - DNA, 118 bp, Homo sapiens
ataaatatggggaatactttcctggcacaggagacttgaggctgtcggaaaaggtaacagaagatggaactcgaaatcccaatgaaaaacctacccagcaaagaagcatagcttttag

SEQ ID NO: 689067 - DNA, 98 bp, Homo sapiens
agccatcaggtaggctgcgttgaggatctttgctcttccatccgcctttgatcgtcttcctcttcagccatccagtgtactaatggtcacttgatgtg

SEQ ID NO: 689068 - DNA, 51 bp, Homo sapiens
tgagccggttgcgccacccgaggacaaggtgattgcagtggtcatggacgt

SEQ ID NO: 689069 - DNA, 74 bp, Homo sapiens
agcttccggacgacgaggaaccgcccaacatggcctcggagaggagtgaattccttaggcgtatcctccttgga

SEQ ID NO: 689070 - DNA, 83 bp, Homo sapiens
gcgcgaatggcacgagctggagggagaatttcaagaactgcaggtcaaaatgcagatcttcgtgaaaacccttaccggcaaga

SEQ ID NO: 689071 - DNA, 82 bp, Homo sapiens
cagggaaccctggtcaccgtctcctcaggcatgtcgggccccaggcctgtggtgctgagcgggccttcgggagctgggaaga

SEQ ID NO: 689072 - DNA, 100 bp, Homo sapiens
tgggcccagaggtgcccccggcttcctcggccatgacccacctctctggacacagccgtctgcaggacaaagcagttccaattccagagaaaatgagtga

SEQ ID NO: 689073 - DNA, 98 bp, Homo sapiens
cagcaacagaggcacagcttcaagggggaggagtgtccagcagaccccaagactgcttctgagacagaaacagatatctgtgctgaatgggagataaa

SEQ ID NO: 689074 - DNA, 90 bp, Homo sapiens
atttccacagaaggactgggatgatacaccttttccacagggaattgagttgaggcaagaatctgcatcaaagagccctggaagcaatca

SEQ ID NO: 689075 - DNA, 82 bp, Homo sapiens
atttctctcacctctcatctttggaacgggagatgactttttgcattgaaacggcggaattctccacgagttttgagcagcc

SEQ ID NO: 689076 - DNA, 74 bp, Homo sapiens
cgccgccggggctgtccccgccgcgtccgtagcgcgtcctgccagccgccaccggcacggccaggccagcatgg

SEQ ID NO: 689077 - DNA, 83 bp, Homo sapiens
cttggggagcagtttctcatagtttgctaatccagactttacacaacctatctcagaagttgtagatgaagtaattcagaatt

SEQ ID NO: 689078 - DNA, 75 bp, Homo sapiens
taactacctggcattgccttttgttgagaatggctatactccgttacatattgctgccaagaagaatcaaatgca

SEQ ID NO: 689079 - DNA, 98 bp, Homo sapiens
ggagcgacgacggccgctgcctaagctggaaagtgctggagaatctggtaaaagcaccattgtgaagcagatgaggatcctgcatgttaatgggttta

SEQ ID NO: 689080 - DNA, 88 bp, Homo sapiens
tcagaaaaggtggaccagatgacagaggttcgttccaccagtcataaaccagatgaaatctatggcatgattgaaagactatctcctg

SEQ ID NO: 689081 - DNA, 74 bp, Homo sapiens
gggcatgtggcaaaacacacagctgagcgcggagacccacatcaagggcttcacactgaacgatgctgccaaca

SEQ ID NO: 689082 - DNA, 74 bp, Homo sapiens
gtggagaagggatcagtgctacggaattagaaggtgacgaggagggagaagacgaggatgatgcggaaattaac

SEQ ID NO: 689083 - DNA, 107 bp, Homo sapiens
actggtgacctgcccattcagggagcactgcacccaggtgttgcagcgctgtgacctcgagcatcactttcaaaccaggagattacctggggcaattgatgttatcg

SEQ ID NO: 689084 - DNA, 88 bp, Homo sapiens
ggaggggccggggctgggctcgcaggattctacaggcaggaaacatcttagaaatcagggttgggcaggcaggagccaggagagtagc

SEQ ID NO: 689085 - DNA, 107 bp, Homo sapiens
caggacaagtcctcaggctaccactatggggtcagcgcctgtgagggctgcaagaatccggagcgtcgtggatattcaaatgatgaagacactaagtatgacgcttt

SEQ ID NO: 689086 - DNA, 50 bp, Homo sapiens
gtcccccgtgtcaactgaactgggttggacgtgataagtatgagcctgca

SEQ ID NO: 689087 - DNA, 100 bp, Homo sapiens
gtcttttctgcctgctcagttccagttgtcacgctccaggaggccagagctctactgaagcggcggcggccccgggggccagggggccggggactactga

SEQ ID NO: 689088 - DNA, 73 bp, Homo sapiens
cacgccgcacctgcgcaacctcgccgtggccatgtgcagccgctacacagtcagtcggatgcggagactgcag

SEQ ID NO: 689089 - DNA, 51 bp, Homo sapiens
ccgtaccaatgtcagtgctaggatgtgtccgtgaccctcagagatcctttg

SEQ ID NO: 689090 - DNA, 98 bp, Homo sapiens
gccgggttgctgtgcgactattctccgggagccgtccgtgtcaccgccggaacctggcgcaggttctgcggggagtgtctccagccctgcctgcaggt

SEQ ID NO: 689091 - DNA, 75 bp, Homo sapiens
ttttgaacatacatattttggaccgattattgaccgacctattcgaggtcgtggtggtcttggaagaggtcgagg

SEQ ID NO: 689092 - DNA, 83 bp, Homo sapiens
gacagagcgctactcctggcagtgcgtcaatcagagcgtcctgtgcggctgcctgctgtttcccggggagatcatgaaacgag

SEQ ID NO: 689093 - DNA, 88 bp, Homo sapiens
tccgcggcccaccaccaaagctcatccctgtctctggaaagctggagaagacttatgcagagatggaccccaccacagcagccttgga

SEQ ID NO: 689094 - DNA, 100 bp, Homo sapiens
gtggttgtgcaggatggcgacggcggcctacgagcagctgaagctgttcttgggtgtctctggggagtccctgggccagaccttcctccagactccagcc

SEQ ID NO: 689095 - DNA, 101 bp, Homo sapiens
cctccgcggtggggcgttgccatggagacgcgggcggcaggtactccaaagattcaggtttactcacgtcatccagcagagaatggaaagtcaaatttcct

SEQ ID NO: 689096 - DNA, 75 bp, Homo sapiens
cacgcacacagaaccctggccaggatcatgaagggcgattgaaaaggaaatgggtcctgatgaatatgaagagat

SEQ ID NO: 689097 - DNA, 83 bp, Homo sapiens
cccggacgagttcgatgacttcgtcacctatgaggtctgcagcccagagggcaccttctgcaaacatgtctgtggatccccta

SEQ ID NO: 689098 - DNA, 92 bp, Homo sapiens
agctggacatcgagcctgagggaggggaaaggcgcaggagctgcctggagttcagcctcagaatccaggagttcattgaactcatccggcag

SEQ ID NO: 689099 - DNA, 50 bp, Homo sapiens
tggagttcacgactctgagtgctgaaggtgggtgcggctgctatttggac

SEQ ID NO: 689100 - DNA, 75 bp, Homo sapiens
gtcacaattacactgccacatatccctgagccggtgaaacctgaagaaggcagagatatggcaaacaggattggc

SEQ ID NO: 689101 - DNA, 88 bp, Homo sapiens
tccagagaatcaagaagacccaggaccagatcagtaacaaatcctggatccaccaccgctgctgttcaccctctcccacccatcctga

SEQ ID NO: 689102 - DNA, 100 bp, Homo sapiens
ctacctggagacagtggcggcttattatgaggagcagcacccatgtgccctgctttacaccagctgtgcagggcagcgtcggctccgcatccataatctg

SEQ ID NO: 689103 - DNA, 87 bp, Homo sapiens
accctactgcctggaggccggggagccgacgcctggaaaaggggaagatagtgatgtactcagtataaatgcagatgcttatgacag

SEQ ID NO: 689104 - DNA, 82 bp, Homo sapiens
tgcgggagatgagggaagatgagaagcccctggtgctggagatgctgaaggctgaaggggatgctaagggagataaagcaaa

SEQ ID NO: 689105 - DNA, 95 bp, Homo sapiens
ggcggcacatgccatatgctcagccgggatacctatgagtgcacctgtcaagtcgggtttacagggccgagatggacgaaaaaatgtggttcctt

SEQ ID NO: 689106 - DNA, 96 bp, Homo sapiens
gtctctcagtattgcctcaaatgctgctcatggaagatccaaatccggcttctcggccggcactgagtacatggacctgcagaatgacctaggcca

SEQ ID NO: 689107 - DNA, 101 bp, Homo sapiens
aggcgctcttgttttgaatacgtagtctgtcctgttctttcaaagatggatagaatgacagaagatgctcttcgcttgaatctgttgaagcggagcttgga

SEQ ID NO: 689108 - DNA, 75 bp, Homo sapiens
cagctatgttctcaatgggatactcaacttgattccatcaaccagagttctatatgaagggaaagaacggcttat

SEQ ID NO: 689109 - DNA, 97 bp, Homo sapiens
gtcagcttgccgccggcggccaagcagccaaccatgctcaacttcggtgcctctctccagcagactgcgatgtgtctgacgtccgagtgagtcccgc

SEQ ID NO: 689110 - DNA, 87 bp, Homo sapiens
gcagcccgacgttccgctgctgggcccgtggaccgggagcccgtggaccgggagccggtggtgtgccaccccgacctggaggagcgg

SEQ ID NO: 689111 - DNA, 50 bp, Homo sapiens
cttctgggcccacgcggggaatgcctttgaagatgagaaacccccaaaga

SEQ ID NO: 689112 - DNA, 100 bp, Homo sapiens
ctgggcctgaagattccatcagcattccaaaatcatgctgtcggcatgaagagctacatgaagctgtgaccaagaatatggcccaggtgaccaaagccct

SEQ ID NO: 689113 - DNA, 75 bp, Homo sapiens
tcatcacagacaacagcctggtggcagcggtaatagcctgcagctggtgttttgagaagccctactgctgaaaac

SEQ ID NO: 689114 - DNA, 75 bp, Homo sapiens
ctcagtggtcctacctggggatattatcaaatctactactgttcatggcagcctggtccgacccccagtggcact

SEQ ID NO: 689115 - DNA, 75 bp, Homo sapiens
cagactttttcattggaggagaagaagggatggcagagaagccaatggagatcttcgtggatgatgagacgaagt

SEQ ID NO: 689116 - DNA, 98 bp, Homo sapiens
ttcaccaacaaagatgcctatacttgtgcaagagtatatcaggcgacagctagaagaggagcagcggcacttggaagtccttcagcagcagctgctcc

SEQ ID NO: 689117 - DNA, 100 bp, Homo sapiens
tggtgtgtcttgcctcaacattgttgagagccagaatggtacttggctcaagtacttatgtggattggaaaccatactgaatttctggatgagaagattc

SEQ ID NO: 689118 - DNA, 93 bp, Homo sapiens
tacggcggccccgcgcagcccccggccgcagcgcaggcagcccagcagacttcccaagtaagaagcggaagaggagccgctggaaccaagaca

SEQ ID NO: 689119 - DNA, 82 bp, Homo sapiens
cagcaagattgcgagggtcccacgactcccgcctgggggatatgagactttctactcggaatatcctgagtgttgcgtggat

SEQ ID NO: 689120 - DNA, 100 bp, Homo sapiens
catcatatatcagtatatggaagaggaccgtataatagacgctggccccaaaggaaactactctcgatttatgaatcacagctgccagcccaactgtgag

SEQ ID NO: 689121 - DNA, 51 bp, Homo sapiens
ccaagtgccaatggatggcaggaatgttgcctttccccatcttcctggttc

SEQ ID NO: 689122 - DNA, 75 bp, Homo sapiens
ctgcctacagaaccgtcccaaaatatggcaaagaaacctattctgagtcatctggggacctggagaatgatgagc

SEQ ID NO: 689123 - DNA, 75 bp, Homo sapiens
tgacgaggttctgtgagagcatgcgaggattaaatccaccacacagggtgaaatctatctccatgacaacattca

SEQ ID NO: 689124 - DNA, 75 bp, Homo sapiens
tgtactttaccaacgagctgaagcaggtttctgaaggattgtcattcttgcatagcagtgtgaaaatggtgcatg

SEQ ID NO: 689125 - DNA, 90 bp, Homo sapiens
ccgccgagccgccaccgcaggtcgaggacggtcggactcccgcggcgggaggagcctgttcccctgagtgttatgtgccaagaaccttgc

SEQ ID NO: 689126 - DNA, 101 bp, Homo sapiens
cattaacctgcgagaagtcatctgcacgtccaggatccacatgaagaccatgcccgccgccatgttcaggctcctcacgggtcaggagaccccgctgtaca

SEQ ID NO: 689127 - DNA, 100 bp, Homo sapiens
cccaggtcgggcgcgtgccagcagccagagtcaggtgacacacagtcttttgcacagaagctccagctccgggtgccctccgtggagtctttgtttcgaa

SEQ ID NO: 689128 - DNA, 105 bp, Homo sapiens
gcgcaccttcccccacgagcgaggcaactgggccacccacgtctatgtaccatggccggagccagttcttggaggagactctgcacagggcatggatcactgtgg

SEQ ID NO: 689129 - DNA, 75 bp, Homo sapiens
tggggtctatcctgacaaatctgtaggagaagacatttttttggacatgtttgaagatgagtataggagcatgac

SEQ ID NO: 689130 - DNA, 100 bp, Homo sapiens
gaagtcttgaatgactggaaactgattggaaactctttgggaaagccactcgaaaagaccttcaatattgatgtacggcagttacattgggcagaatata

SEQ ID NO: 689131 - DNA, 50 bp, Homo sapiens
agaagtttctaggaaaggccggacaccagtatgccgagattttgctgtcc

SEQ ID NO: 689132 - DNA, 100 bp, Homo sapiens
gaaaagcagctttgcttgctttaacccaggaattgtatttctgcccaaaatggagttaatcctgactgggagaagaaagtaattgagtattttaaggaaa

SEQ ID NO: 689133 - DNA, 110 bp, Homo sapiens
ctcccacagtgctgggattacaggaaactggagaggcgtggctggaccaagacctccccccatgtgagcaggcttcctcctcccccaacaaccgttgccaccacgcccag

SEQ ID NO: 689134 - DNA, 75 bp, Homo sapiens
caactggtgtcgagaagtccggaagcttgtggcgctgaaaacgaacgctgccactgcagagccccgccatggaag

SEQ ID NO: 689135 - DNA, 97 bp, Homo sapiens
tggagccaggctaaggacattttctataagaactccttgttccgacatcccaaacaggtaacacgtacacagacctctcggccggaatctccaggga

SEQ ID NO: 689136 - DNA, 114 bp, Homo sapiens
ggctgcagggtgagaagcagcaggtggagcagcaggtgaaggagctgcagaaccgcctaagccaggacaggaagatgtcacccaagcgcatagctaaaagaaggtcccccccag

SEQ ID NO: 689137 - DNA, 100 bp, Homo sapiens
gcggaccccgggagaagtttcccagaaaaaatgcccagcgcggcgcggggctgcggagtcgtccggagccgctgcgcgggccatccagagtagagatgtg

SEQ ID NO: 689138 - DNA, 73 bp, Homo sapiens
aggttcagattaagaaatctgccccaaagtcttagaactgggcccctgggtagacagacacagcttgatttca

SEQ ID NO: 689139 - DNA, 100 bp, Homo sapiens
ttggctgcccaggctcgcctcgactccaaatggttgaaaacagatatacagaagtgtcattgttgcagcaaaaaagtcagcagtctcaccttccaccttt

SEQ ID NO: 689140 - DNA, 100 bp, Homo sapiens
ctgggatccagtacgagttgaatcattgttcaaataaggataccgctacgtgattctggatatccccctgctgtttgagaccaagaagttgctcaagtac

SEQ ID NO: 689141 - DNA, 100 bp, Homo sapiens
aaggagtcctgcttatcacaatggtttggtgcacctcgatttggaggaagtagggcagggcccttatctggaaagaagtttggaaaccctggggagaaat

SEQ ID NO: 689142 - DNA, 75 bp, Homo sapiens
gacccccccaaaagttcgctggttcttaaagatgtgggattgaaaaaagaagatattgcaatgtgggaagtaaat

SEQ ID NO: 689143 - DNA, 85 bp, Homo sapiens
cagccagagcagtgcacgaaaagcagaaatttgatatgatcaaggatcaatttttaaaggcaaatgagcttctccagcgttcccg

SEQ ID NO: 689144 - DNA, 75 bp, Homo sapiens
caactgttcaaccaggagaaaagacagcaatggaccgaggataagttctgaacgtcgaaaagaaaagtctcgaga

SEQ ID NO: 689145 - DNA, 100 bp, Homo sapiens
gggctgtcaaatttacattaactatgagaattaagcagaactttctaaaggacctgctagaaaaagcaaacaagactgttgatgacacaaaattagccga

SEQ ID NO: 689146 - DNA, 100 bp, Homo sapiens
cctggacctgctccgcctgatccgggcagagcggcttgggtaaatccaccttaatcaacaccctcttcaaatccaaaatcagccggaagtcggtgcagcc

SEQ ID NO: 689147 - DNA, 100 bp, Homo sapiens
gcgcagcccgaggaagttcggcgtggctggccggagctgccaggaggtgctgcgcaagggctgtctccgcttccaggtttttcgttggaatatacgttgc

SEQ ID NO: 689148 - DNA, 75 bp, Homo sapiens
atcaagcaggtccggacccactggctgctggagcttgtcaccaccagggctgaagaagatgcagagcagcctgaa

SEQ ID NO: 689149 - DNA, 83 bp, Homo sapiens
tcgagagggtcaaactgctgctgcagaataccaagctgctattttacacttgaagagggagcacaaagaagaaattgaaaacc

SEQ ID NO: 689150 - DNA, 100 bp, Homo sapiens
cgaaaggagcaagagcaagatcaccgtgacatccgaggtgcctttctccaaaagctctggattaatcgaattacagctgctagccaggaacatggactga

SEQ ID NO: 689151 - DNA, 74 bp, Homo sapiens
aggccaggagccaggggcccagaaggtggatccataaagaacccagccaacccgcagagggaggggaggggctg

SEQ ID NO: 689152 - DNA, 80 bp, Homo sapiens
ttgtggccttagctacaggagagacttgggaagacccagggcacaatgataaacatactggctgttgtggtgacaatgac

SEQ ID NO: 689153 - DNA, 90 bp, Homo sapiens
attcaaaccgccaggttaccatgaggaggatttctggccttcgaagtatgatttttgagaccactacaaagaatgaaactatagcccagg

SEQ ID NO: 689154 - DNA, 96 bp, Homo sapiens
cggactgaactggaaaccaagttaaaaagcctggagagcttcgtggagttgatgaaaaccatctatgagcaggccaagatcaaggctcgagatctt

SEQ ID NO: 689155 - DNA, 74 bp, Homo sapiens
tgggatgtcagtactggcatgtgccttatgaccctctttctacagcagtataatcactacaaatccaatgtgga

SEQ ID NO: 689156 - DNA, 75 bp, Homo sapiens
agcttacaactcacaagtgcatgggagattcctgcatcttttgcgctctcaagctcgatcaagtcatccgccaaa

SEQ ID NO: 689157 - DNA, 75 bp, Homo sapiens
tcattgcaatcaagtcacctgacacatttgtgagaactatttatgcaggtcctgtccctgctatcagtggggcac

SEQ ID NO: 689158 - DNA, 100 bp, Homo sapiens
gtcgcgatgtcagggctgcgcctctctgcagcaggtacatgtcccagagcaagcacacggaggcccgggagctcatgtactcgggagccctgctcttctt

SEQ ID NO: 689159 - DNA, 78 bp, Homo sapiens
ggggcacacatcaaacagctggcgagattcgccggagcctctatcaagagacggtaaagaacaggtccaagaaaagct

SEQ ID NO: 689160 - DNA, 98 bp, Homo sapiens
ggttttccagagatgcaaaaatgcaccctactccagcatcgcaccccaagaaaccaggaaattcagttcatgaagataagaagtttcttgacaaatac

SEQ ID NO: 689161 - DNA, 82 bp, Homo sapiens
ctgactgatacactccaagcgcaaaatgatgcttcaacacccaggccaggtctctgcctcggaagtgagtgcttctgccatc

SEQ ID NO: 689162 - DNA, 115 bp, Homo sapiens
atccccagagccccgcggcccggcctcggggcagccatggactcgcaggaattgaaggcaccaagtatagatgagaaagtagatcttcattttattgcattagttcatgtagatg

SEQ ID NO: 689163 - DNA, 73 bp, Homo sapiens
gagaagtgaggagcccctccgcccggcagctgccccgtctgagaagacagctggcctgaagctcagagccggg

SEQ ID NO: 689164 - DNA, 101 bp, Homo sapiens
tggagtaatagatttttccctctaccttaaggatgtgcaggatcttgatggtggcaaggaagctgtaggtaaaacttgcctactgatcagttacacaacca

SEQ ID NO: 689165 - DNA, 100 bp, Homo sapiens
atggcagctatgccccagactgtgtatggggtccagccagctcagcagctgcaatggaaccttactcaggggctgctgagagtaaatacttggcgcctcc

SEQ ID NO: 689166 - DNA, 75 bp, Homo sapiens
ggacgtgaagctggagttcccttcccttccacagtgcaaggaagacgccgagttatgccccgtggtgccctgctt

SEQ ID NO: 689167 - DNA, 75 bp, Homo sapiens
ggaccggtttgcagatctctgtgctgttggcaccatgactcctgtgaggatgcagcactccctggcaggtcagac

SEQ ID NO: 689168 - DNA, 76 bp, Homo sapiens
ctctgatctgcgccgggtcgccacatactggccaaccccttcaaggagcgaatctgcagggtcttctccacatccc

SEQ ID NO: 689169 - DNA, 88 bp, Homo sapiens
gagagcctactgagcagcctgagtggttacccatgggtgtattgtttccacaataaaactttttctaccagatggtatggaagcccgg

SEQ ID NO: 689170 - DNA, 83 bp, Homo sapiens
ctgcagtataaactaggagacaagatccatggattcaccgtaaaccagttgtctggcgccgggagtgagaccctaaaacaaag

SEQ ID NO: 689171 - DNA, 82 bp, Homo sapiens
agaacaccccgcagaaagtgcctgtgcatcaggtgttggtaaatcatgcttattgctacagtttacagacaagaggtttcag

SEQ ID NO: 689172 - DNA, 99 bp, Homo sapiens
agaagtgcttcagcgggccaggaagcgcatccaggagaagttcatctggacccctaccgaacatggtgtcctgttgcagactgtcagacagtgtgccct

SEQ ID NO: 689173 - DNA, 82 bp, Homo sapiens
tgtcctcctctgcaccatggctctctgcaaccagttctctgcatcactgggtgggaggacgctactcgctgtggtcggccat

SEQ ID NO: 689174 - DNA, 75 bp, Homo sapiens
cctggaggaggaggccatcatcatgaaggacgtgcccgactggaaggtggtcatgatcacgggagacaacccgct

SEQ ID NO: 689175 - DNA, 100 bp, Homo sapiens
atgaagatcccgaggatgaagacgccttgccagccagggcctgccttaagtgtgaaagtaatgactgatgaaagtggaaaatccaaaggatttggatttg

SEQ ID NO: 689176 - DNA, 100 bp, Homo sapiens
ctgaccactctccagcaccagcttccagttagtggatatagcacaccatccccagccagaattgaatgatctggcacgggaccctccagcacagtgttca

SEQ ID NO: 689177 - DNA, 80 bp, Homo sapiens
ggcgagtccggtctcaaaatggagtactatgaagtattccttcgacagtctccattggagccctgccttgtatttcatga

SEQ ID NO: 689178 - DNA, 90 bp, Homo sapiens
ggaggtttgtggcagccctgcatggagcaagtctgtcagcaccatctttctaacagaacatggagctgatccaggacacctcccgcccgc

SEQ ID NO: 689179 - DNA, 101 bp, Homo sapiens
tgcacttttgattgtgtattatggataccaaggaagagaagaaggaacggaaacaaagttattttgctcgggctctctaaatacgtacagattctgcgata

SEQ ID NO: 689180 - DNA, 75 bp, Homo sapiens
tccgcgtggctggcacaggggacaatgcagatcttcgtgaagactctgactggtaagaccatcaccctcgaggtt

SEQ ID NO: 689181 - DNA, 101 bp, Homo sapiens
tgaggactctgtagttgaagattataattcagtggataaaactaccacaggaacgaatgcaggaatttgggaactgagctgtgcaagtgctgaagaaggag

SEQ ID NO: 689182 - DNA, 96 bp, Homo sapiens
ggagctgagactgaagtcgcccgtgggggctgagcccgccgtctacccgtggccgctgccggtctacgtggcctgtgagtacggcatggtgcacgt

SEQ ID NO: 689183 - DNA, 100 bp, Homo sapiens
ccgaggactccgctcctgcccagacgccttctggcaagaggggagagcctctggaacagtgtacagtggggaggagaagctcactgagctccttgtgaag

SEQ ID NO: 689184 - DNA, 100 bp, Homo sapiens
gccgtatccagcgcaggggcccgtgcatcatctataatgaggataatggtatcatcaaggccttcagaaacatccctggctggagtgcaatgacgcgatc

SEQ ID NO: 689185 - DNA, 83 bp, Homo sapiens
cgccccgggacccgcgccgctgccctccggctccgcgggcggcccacggcgaggtgcatccactgtggtgtcgtccacctgac

SEQ ID NO: 689186 - DNA, 100 bp, Homo sapiens
aaaagcgaggcaaggcaggcgggtaaaagagaacctgctttcatgcaagatgctgctgcactgcaaacgggatgagcttcggaaactgtggattgaagga

SEQ ID NO: 689187 - DNA, 50 bp, Homo sapiens
gtgaaaagcctccttctggttccaaatggccatggagagtaagttgcttg

SEQ ID NO: 689188 - DNA, 82 bp, Homo sapiens
acggagaagaaggcctccgacgtgtccctggccagtgtccttccacctgtccacaagcatggggaacatcttcgccaacctc

SEQ ID NO: 689189 - DNA, 75 bp, Homo sapiens
tggtgcagccaccctcgctccctctgctcttcctcccttcgctcgcaccatggtccctgtgcgttttattgcgac

SEQ ID NO: 689190 - DNA, 95 bp, Homo sapiens
ccccgtcgttgcctccacttggcccgtccatagagccagggggatatgagactttctactcggaatatcctgagtgttgcgtggatgtaaaaccc

SEQ ID NO: 689191 - DNA, 75 bp, Homo sapiens
gagcactgggtgaaggacctgggcagcctcaatgggtgtggtcccggaacagcaagcccgtgcacaccaccatcc

SEQ ID NO: 689192 - DNA, 75 bp, Homo sapiens
ttacgatccctggaaaattaccactttgtagtttctagagttgtgaatacatacggaccacagactagacctgaa

SEQ ID NO: 689193 - DNA, 75 bp, Homo sapiens
taaacatacaagctacatttcggctgctgtgacttactcgaagcctcgattggccacattttggtactacgccaa

SEQ ID NO: 689194 - DNA, 96 bp, Homo sapiens
ggaccggccccgggttcgtcaaattccgccgatgctttcaggttgtccttctattcaggccactcttcgttttccatgtactgcatgctgtttgtg

SEQ ID NO: 689195 - DNA, 74 bp, Homo sapiens
ataattaaagagtaaagttgtgctcaacggaatcaaacattttaagtccagtgcaggatggaacaaagaaacct

SEQ ID NO: 689196 - DNA, 50 bp, Homo sapiens
tgatggaattatgcagtttattaaggagggaaaacccctgatcctaaaat

SEQ ID NO: 689197 - DNA, 100 bp, Homo sapiens
ggaaatgataccagatggaaacttggatctgaggaatggagaactccagaaatggcatttccggagagttcttttgaagtcacttcagaaggatctacat

SEQ ID NO: 689198 - DNA, 100 bp, Homo sapiens
aatgcctgtttattcaccatcaacaaagaagaccacacactgggaaacatcattaaatcgttcagcaaaaggatgtcactgaaattgatattttagttaa

SEQ ID NO: 689199 - DNA, 88 bp, Homo sapiens
cgaagaggtacgattccggagaatcgcgaggcagagcgggagcgcgcagccagttctctgtgttcgagacaaaccagcctattttgct

SEQ ID NO: 689200 - DNA, 100 bp, Homo sapiens
agcagcccagacgcggcacagagagggcctgggagcttgctgcagcttcaggaggtgcttcccaaggaccgtagatgcctctctagagcatgagctcagg

SEQ ID NO: 689201 - DNA, 101 bp, Homo sapiens
ggaaactgccgccgctctgccacggtctgcccacccaacgcgaagacgttccaccaggtgagaagagtgatgaccatccttttccttactatggttatttc

SEQ ID NO: 689202 - DNA, 75 bp, Homo sapiens
gcagcgacaacatggaggccgtgaagaccttcaatagcgaggtgtctccagtgaaaatctgtgactttgacttgg

SEQ ID NO: 689203 - DNA, 90 bp, Homo sapiens
gggggtccgtttcatgtggatcaaacacaacaacctgtatcatatatagtacaggacctcatggaaacagatctttacaagctcttgaag

SEQ ID NO: 689204 - DNA, 87 bp, Homo sapiens
aggagcgggtccgtcgcggagccggagggcgggaggaacatgacatcgcggagcctccacctcctggatgccctcccaatgctgctc

SEQ ID NO: 689205 - DNA, 82 bp, Homo sapiens
cgaaggcaccgacgtcatcatgctgaccaccaatcagatccgtaagacatgcaagaaagcacttcagccaagcagaagggag

SEQ ID NO: 689206 - DNA, 75 bp, Homo sapiens
ccggaggaggaggggagaggcctggaggacaccaacatgattaccgagtatatgcggcaggcgggatgggcctgg

SEQ ID NO: 689207 - DNA, 50 bp, Homo sapiens
aatagacagctcaactatgtgcagttggggtggcactgaatcaacaagac

SEQ ID NO: 689208 - DNA, 100 bp, Homo sapiens
aagcttcaagactttgacatgtgtgaaaacatgaaatggttcgttccaccagtcataaaccagatgaaatctatggcatgattgaaagactatctcctgg

SEQ ID NO: 689209 - DNA, 98 bp, Homo sapiens
ctagactgtagcagccgagaacctcggcatcaccagtggcttcgtgaagcccaagctggggaccgctccggcttcttgtatccagaggtacagcccct

SEQ ID NO: 689210 - DNA, 82 bp, Homo sapiens
cggggcaggggcggaggcggaggcagaggtggaggcgctttgaaaggtgaagtggatcctaaagagaggatagcacgccaac

SEQ ID NO: 689211 - DNA, 75 bp, Homo sapiens
ttggggcctccagccatgacagtgatgagaaaggtactcatttgcaattgtgggcatcaatataactgacctggc

SEQ ID NO: 689212 - DNA, 75 bp, Homo sapiens
ggccctgccctgggttcgctacatcacccagagtggcgaaactcgcctctttggtgtgccccttgacagcctgct

SEQ ID NO: 689213 - DNA, 82 bp, Homo sapiens
tcgagaaagtcctctcgggagaagcagcgcctgttcccggggcagatccaggttcagggactttgaacatgtcggggatcgc

SEQ ID NO: 689214 - DNA, 102 bp, Homo sapiens
ccagagactgctgagcccgtccgtccgccgccaccacccactccggacacagatgatatcatcaagttgaatcgaaaggaagggaagaagcagaattttcca

SEQ ID NO: 689215 - DNA, 90 bp, Homo sapiens
ggcgattcggcccgacgagctccgctttcgctacagcatggtggcctactggagacaggctggactcagcatgctacaagtgaaaactga

SEQ ID NO: 689216 - DNA, 89 bp, Homo sapiens
cggcaatgctggagacccttcgcgagcggctgctgagcgtgcagcaggatttcacctccggatacactctgtgcagttttagagagaga

SEQ ID NO: 689217 - DNA, 82 bp, Homo sapiens
tctggcctcggaggccaagcctgcagcggtggctgctgaaaatgaagaggaccctgatgcttggtgtgacctgagtaaattt

SEQ ID NO: 689218 - DNA, 101 bp, Homo sapiens
tccagccccaacactgccgggctgcggagccttcagggaaaggccgagctgcgccgcctgctgaccaaggccataggaaaaggatacagagtagagtttca

SEQ ID NO: 689219 - DNA, 98 bp, Homo sapiens
gttcgctacacagcaatgcatcgaggtattggtggcatggatggaacacaacagcagatttttaaaatgttagcagaggtactaggaggaatcaattg

SEQ ID NO: 689220 - DNA, 101 bp, Homo sapiens
tggagaaccgctgccagagcctgcaggaggagctggacttccggaagagtgtgttcgaggaggagttcattgccgttagccagctccgcggctccacccag

SEQ ID NO: 689221 - DNA, 82 bp, Homo sapiens
tttacttccagaagattggtggagcttgatctgaagcatcaattcctgaagattgccaagcccctctccagcctcactccac

SEQ ID NO: 689222 - DNA, 100 bp, Homo sapiens
cagccgctgagacggtttttcacaagatctgagtgggacatacttttgaaggatgtgcaatgttcaatcataagtgtgacaaaaactgacaagcaggaag

SEQ ID NO: 689223 - DNA, 98 bp, Homo sapiens
tgaggttcagattaagaaatctgccccaaagtcttagaactggttatcaatactctggctgaccatcatcatcgtgggactgactttggtggaagtcc

SEQ ID NO: 689224 - DNA, 51 bp, Homo sapiens
agtcttccatcaatcatatctcacagggaattagcttcagtgaagaccagc

SEQ ID NO: 689225 - DNA, 90 bp, Homo sapiens
cacttcgcattttggcattgacatttaattttagggtcctttatatagaagggagagtagatatctacgtctgcatgatctcctttgcgc

SEQ ID NO: 689226 - DNA, 100 bp, Homo sapiens
cgcgacggccaaaaggagcggcgcggtcttcgtggtgttcgtggcagtactatactggcaattgctggagaagattttgcaattgttgcttctgatactc

SEQ ID NO: 689227 - DNA, 101 bp, Homo sapiens
cagtgagggtgtacaaatacccctttgaattaattatggctactgtacaatttgttcaaggaatttttgtagaaaaatacgatcctacgatagaagattct

SEQ ID NO: 689228 - DNA, 100 bp, Homo sapiens
gggaagaaagaaattcaacatggatcccaaaaagaccatcaacgcactgaaggggaggatctcggaactgcagtggagcgtgatggaccaggagatgcgg

SEQ ID NO: 689229 - DNA, 78 bp, Homo sapiens
aggcccaggctgctttcttcggtagctaccgaaacgctctgaaaatcgagccgttcgtgccctcgtgaggctggcatg

SEQ ID NO: 689230 - DNA, 90 bp, Homo sapiens
aaggactcctcgctctatataggtatatgtctcgagtccacggtatgcaccctaaagagaccacccgtcagctgagcttagctgtgaaag

SEQ ID NO: 689231 - DNA, 83 bp, Homo sapiens
agatcccctatgagagtcccatcttcagcagaggagaactatgccatttttgggtcaggactggagatctcctggatggagtt

SEQ ID NO: 689232 - DNA, 100 bp, Homo sapiens
aatttgccgtgttgaccggtttggttgaagttggagaagtatccaatagggatattgtagaaactgtctttaacctgtgtttaactgctgaagagatctt

SEQ ID NO: 689233 - DNA, 90 bp, Homo sapiens
gcgttctcgggtgctacgctgctgcagctgccgcctcttccaggcgcaccaggttcggagtgttcagtggacacacgcttggcagtgtaa

SEQ ID NO: 689234 - DNA, 98 bp, Homo sapiens
agacgggccccacatcagctccaaggtcagggtgattaagctgtcaggtggggttgaccccctgtttacagtgccagcgccaccaccgccgatttcca

SEQ ID NO: 689235 - DNA, 100 bp, Homo sapiens
cggacatcgcgagcctcgtggtgtggtgtatggccgtgggcatctcctacattagcgtctacgaccaccaagaaccacgaagctgccctgagacgctcac

SEQ ID NO: 689236 - DNA, 50 bp, Homo sapiens
tggctaatggcatttacaggaggagcagtagagaactgtggactattctg

SEQ ID NO: 689237 - DNA, 75 bp, Homo sapiens
ttgaatgctgccaaaagaaatgtcttagatagtagttctgacttcccttcaagggatctttctttcatcaaggtg

SEQ ID NO: 689238 - DNA, 74 bp, Homo sapiens
atcctgcaaaaatgtctctctatccatctctcgaagacttgaaggtctacatgttcaagtgcgtgtggcggtgc

SEQ ID NO: 689239 - DNA, 95 bp, Homo sapiens
gaggtgcatgctaccgtcttctgtcccccgctgcgctttgactaccacccccatgatggggatgaggggatgtacgtatttttgcatgcagtgaa

SEQ ID NO: 689240 - DNA, 82 bp, Homo sapiens
gaagggctccctcgtgaagaacctgaaggacacactagatccccttggaaaggacttccagaactgaccaatgagaatgccc

SEQ ID NO: 689241 - DNA, 98 bp, Homo sapiens
cctagactgtgacaacgaccacgtctccaaaatgagtcgcatcttcaacccccatctcaccttgcagagtgaagtcaagcccatcctagagaagctga

SEQ ID NO: 689242 - DNA, 50 bp, Homo sapiens
tgaagagggaagacacgcggaaacagaaaccaaggtgtatgttggtaacc

SEQ ID NO: 689243 - DNA, 75 bp, Homo sapiens
caccctgcggtggattgactacggcaaagtggccactcaggtgacttaagagattaaaattaatttggttgctgt

SEQ ID NO: 689244 - DNA, 50 bp, Homo sapiens
ggacagagcccgtggtcgcgcaggcaagaaattatagagcagcttctatc

SEQ ID NO: 689245 - DNA, 82 bp, Homo sapiens
aaaacggcgagagtgggcgagaacgtccactgcgggccggcgaaagctggtgctcttacagcctgttccaagtgtggcttaa

SEQ ID NO: 689246 - DNA, 128 bp, Homo sapiens
cgccgaccaggcctggctcgcgcctctcccaggacccgcctggctgcgagatatgaaggtgctcgggtcttcggggcactgggtcccatcggtccctcctcacctgggctcaccctcgggggtctggc

SEQ ID NO: 689247 - DNA, 83 bp, Homo sapiens
actttggattcacccacagcggggcggcggcggcggcggctgcggcccaatatagaatgagtccctggaacgccagatgcgtg

SEQ ID NO: 689248 - DNA, 51 bp, Homo sapiens
ttagttcaagtagcaactatatcagagtctcgctctgttgccaggctggag

SEQ ID NO: 689249 - DNA, 146 bp, Homo sapiens
cggggcgggccgggcgggccgcgggagccgcacgcggcgatatggaagaggagggcaagaagggcaagaaggccaaacgtaccaagaaagtcgggatcgtcggtaaatacgggacccgctatggggcctccctccggaaaatggtg

SEQ ID NO: 689250 - DNA, 75 bp, Homo sapiens
gccactgtgacttgcagtcatcatccattaccacaaaattagagtgtgacatgttggcgagccaagtttatggag

SEQ ID NO: 689251 - DNA, 90 bp, Homo sapiens
cagcatcgtccgcgccgcgcgcgggcctcgcacagatcgcctgctttgggccttccatgtcgtcaggaatagacttagcttttattgaga

SEQ ID NO: 689252 - DNA, 83 bp, Homo sapiens
agcttaggaagttcgtcttctccacggaggagagccatcactggtgcaagctatatttaacggagatcctgatgaagttcgag

SEQ ID NO: 689253 - DNA, 83 bp, Homo sapiens
cgtggagtctaggatgatagcactgatggtggcagcatgactatatgaaggaagaggaaggttttcctgaagatgaggcgact

SEQ ID NO: 689254 - DNA, 82 bp, Homo sapiens
cggcagaggatccagtgttcaccatcctggccccggaaggtggccatggtggaggtgcagctggagagtgaccacgagtacc

SEQ ID NO: 689255 - DNA, 101 bp, Homo sapiens
gctgtgctgtggggcactgagcctgctcctcagttgggcatccctggccgctgatggctctgcggcagtggaaagaccacagcaagattctttcattcgtc

SEQ ID NO: 689256 - DNA, 100 bp, Homo sapiens
cgaggacacgggctgcaacctgcagcacatcagcgaccgggagaacatagacgatcacattccagttcatagcaacattttctactctggtgcctttagt

SEQ ID NO: 689257 - DNA, 100 bp, Homo sapiens
agcaatccaaggcatggctttcggagggggactagagctggccctgggctgtcactataggattgcccacgcagaggaatttttcacagacaacctatgg

SEQ ID NO: 689258 - DNA, 100 bp, Homo sapiens
gcggcagtatccttggggcactgtgcaggaccccaccaacaactgaacgctttggtcaggctgctacaatggaaggaattggggcaattggtggaactcc

SEQ ID NO: 689259 - DNA, 82 bp, Homo sapiens
tgcagcagcagcagcacagcgacaagacgccattgtttgatgtcctgtgactgagaaaccaggctttaaactttatgccttt

SEQ ID NO: 689260 - DNA, 75 bp, Homo sapiens
ctgaccgtgaagagacatgagatgattgccaaacccccagaggactactgagcccagccaggctgtatgccattg

SEQ ID NO: 689261 - DNA, 74 bp, Homo sapiens
agtcaggtggggccggtgaagcagtgcttcgtggtgactgaaaaagctgtaaaatttggccgaatgtcaaaaaa

SEQ ID NO: 689262 - DNA, 75 bp, Homo sapiens
cttcgcggtggtcaagcgggccacgcacctcgtcaccaaggccaagcaacatggccaatctttcctaagctgctc

SEQ ID NO: 689263 - DNA, 82 bp, Homo sapiens
gtaaatgcagctccattccaatccatgcaaacggtgtgggcagaagaaaaagctagtgatcaacagtggcaatggagctgtg

SEQ ID NO: 689264 - DNA, 100 bp, Homo sapiens
agggttggggccgtcttcctcatccttccttttctcggggctcccgtggggagtgcctgcagcaccccggcggggccaccccagtctgcgtgtacacgag

SEQ ID NO: 689265 - DNA, 75 bp, Homo sapiens
agcttcagggggcagagtcacaaagctgtaagaaacactaccccaagcagtccttcaccatggtggcggacaccc

SEQ ID NO: 689266 - DNA, 98 bp, Homo sapiens
tgaactcctccagcctccagaaagatccctccccgcggcggcgatggcccgagccatgagagtgaggactttccgcgcccattggtgacccttccagg

SEQ ID NO: 689267 - DNA, 100 bp, Homo sapiens
gagccggcgcggggtcggcgctgggctggaggcggcggagcgcgagagcttcgagcggactcagcttggttctacagccattgggatccagacatcagag

SEQ ID NO: 689268 - DNA, 90 bp, Homo sapiens
tgcgcagctcctcggcgcttcctcggtggcttccccgggtcgagcaaacaggtacaggtttgcagattccgccagcagcacagcaagctc

SEQ ID NO: 689269 - DNA, 74 bp, Homo sapiens
acaatgaaaactgtacttatgttagctgaccaggtgctggagaatctggtaaaagcaccattgtgaagcagatg

SEQ ID NO: 689270 - DNA, 100 bp, Homo sapiens
ccctatcaggacatggagtatgaaagacgagaagaagaagttggatgggataccgagattaaggatgatgtgattgaagaatgtaataaacatggaggag

SEQ ID NO: 689271 - DNA, 75 bp, Homo sapiens
ggaaaatgctttggcagggcaagaaagaaggggcagctgctcccaaccccagaacctttgctgtcttgggacgga

SEQ ID NO: 689272 - DNA, 98 bp, Homo sapiens
gaaagacttgatggtctggtagaaacaccaacaggatacattgaaaggaaaacgggccttactatacatcatatcccccatcaccagatttgtgacct

SEQ ID NO: 689273 - DNA, 76 bp, Homo sapiens
caaaatggcgccctacagcctactggtgactcggctgcagaagaaattttggaatccataagagccaaaaagggag

SEQ ID NO: 689274 - DNA, 75 bp, Homo sapiens
gaagctggagctggcagagaaaaaggccaccgatgtagcagtagctgatgtgcagtttggccccatgagatttca

SEQ ID NO: 689275 - DNA, 100 bp, Homo sapiens
tttttgttgccacctggtaccgagtgaccttctttggaggcagttcctcatcccctgtggtggtgaagtttattaagaaggagaaggtcttggaggattg

SEQ ID NO: 689276 - DNA, 100 bp, Homo sapiens
ctcctcgccagcagccgtccggagccagccaacgagcggttacgaagtgacagtgctggtgcgggactcctccaggctgccatcagaggggccccggccg

SEQ ID NO: 689277 - DNA, 75 bp, Homo sapiens
agtgctcctgcggctgtatggagcgattttgcagatgattgaggaaactcggcttaacattgacaagatctcaga

SEQ ID NO: 689278 - DNA, 87 bp, Homo sapiens
tcggcccagcttcgacaactgctttgcctcaaactcagctttctaccagcagacagcacacaggtgaactccagaaagaagaagcta

SEQ ID NO: 689279 - DNA, 90 bp, Homo sapiens
aaccagttctgcagtgtgcacacgcttcaagaggtctacattgagctgtttggaaggtgatgtctggcccaactcatcagctgaaatcac

SEQ ID NO: 689280 - DNA, 51 bp, Homo sapiens
ctctaacggggctttctacaaggtactccaaagattcaggtttactcacgt

SEQ ID NO: 689281 - DNA, 90 bp, Homo sapiens
ggcggctcaagcgcccagaaacccctactcatgatccggaccctgagactcccctaaaggccagaaagcctcctgacaaggtgatccggg

SEQ ID NO: 689282 - DNA, 98 bp, Homo sapiens
agagttgtgggccgccgtcggcagcaagaacagagagagaggtggacagatctgagagatactgaggccggatcacctcaacagtcacgtcagacaag

SEQ ID NO: 689283 - DNA, 90 bp, Homo sapiens
tcaagacaatggtagctgttatcctccatctactcaaagagcccagcagtggacattgaagtggacctaattcggttttccttttaaaag

SEQ ID NO: 689284 - DNA, 88 bp, Homo sapiens
ccgagcctcctcggccttggagagcagcggcggcggcggcaccccgggcgcgagacaggactccagcctgggtaacagaggaagacct

SEQ ID NO: 689285 - DNA, 51 bp, Homo sapiens
gcatgcctcaccaagtcacatgacaagcagatttacctaaccagttttatc

SEQ ID NO: 689286 - DNA, 87 bp, Homo sapiens
aagatggagagggacagggcccagttaatggcagagcaagagaagaccctcgctcttaaacttcagacaagggaacagcctggacat

SEQ ID NO: 689287 - DNA, 90 bp, Homo sapiens
cgtggtccttctccatattcgagagtttcattccagggctttatattacaagttggcagtggagcagctgcagagccatcccgaggcaca

SEQ ID NO: 689288 - DNA, 75 bp, Homo sapiens
ctgtccttctttgtggagagcaagctgaccacagtggccgagaagtcgcgcgtgctgcagctggaggaggagctc

SEQ ID NO: 689289 - DNA, 100 bp, Homo sapiens
gcactgtattctttacctgcttcccaatcccactgatgaggatcagcccatggcatcagtgtcattcaaggacgtgactatagaattcacccaggaggag

SEQ ID NO: 689290 - DNA, 90 bp, Homo sapiens
gattctccttcttctgtggttaacaaacagctcggatccatgtcacttgacgagcaacagggtaacatgtcaccttgccaaacttttcga

SEQ ID NO: 689291 - DNA, 83 bp, Homo sapiens
gacaagtccgggagctgggcggccatttaccagggtgagaaggactggcagaaatacgagactgctcggcggctgaaaaaatg

SEQ ID NO: 689292 - DNA, 74 bp, Homo sapiens
cgcagtggtcgcttcttctccttgacggtgatcgttggctcctacttgattgcacacggtttcttcagcgtcta

SEQ ID NO: 689293 - DNA, 90 bp, Homo sapiens
ctcaggttgtggtagaggcggaggctcaggcagcttgagcaggaagatgaagcacctcccaggcccccactccccgaactctacagccca

SEQ ID NO: 689294 - DNA, 100 bp, Homo sapiens
cgacgtggtggagcccctctacatcgagggctgacaaacgggctcatcataatgcactggaacgaaaacgtagggaccacatcaaagacagctttcacag

SEQ ID NO: 689295 - DNA, 50 bp, Homo sapiens
gctggagtactgcaagctcatcctgagtaagactttgaccccgacgcagg

SEQ ID NO: 689296 - DNA, 90 bp, Homo sapiens
acctcagacaaaaatttccacccaaatttgtgcaggtgggcaccatgtccttgaagcttcaggcaagcaatgtaaccaacaagaatgacc

SEQ ID NO: 689297 - DNA, 75 bp, Homo sapiens
cgcaggcccaggccgccccgttccccgagctgtgcaggctggcgcccatgcggctctacacgctctccaagcgcc

SEQ ID NO: 689298 - DNA, 132 bp, Homo sapiens
ccgaccccggcgtctccttctatgtgctgtgtccggacaacggctgcggcgacaattttaggatgtactgagtaaagatgctggggaatgtgcaatatgccttgaagaattgcagcagggagatactatagc

SEQ ID NO: 689299 - DNA, 85 bp, Homo sapiens
tgggacacaggggtctttcgaggcccggtactacccaaacgtcagtcgaatcacaggcaggagatccctggttaattagaaaaga

SEQ ID NO: 689300 - DNA, 96 bp, Homo sapiens
ttcttgtgaggacgcggcagcccgtggagtcggctgagggaaaagcgaggcaaggcaggcggcctggaatatgatgagaatacttccatcatcttt

SEQ ID NO: 689301 - DNA, 100 bp, Homo sapiens
ggaaaatttgaagatcttgaagttagtacctttgaaaagacagcgacagctgtggcgcactgcaaacgcggcaatggtctcatcaaggtgaacgggcggc

SEQ ID NO: 689302 - DNA, 82 bp, Homo sapiens
aaaagaaagacagaaaaatagagcctctattaatggacacttctataaccatgaagtcctgtacaatgggttcactggtcga

SEQ ID NO: 689303 - DNA, 83 bp, Homo sapiens
ctgtggaagaccagccccaaagaattgtgagaagctggagaataattttgatgacatcaagcacacgactcttggtgagcgag

SEQ ID NO: 689304 - DNA, 100 bp, Homo sapiens
atgggaagttaatgtttacggcgaagtctactcaacgtttccaagagtgtgaacatggctacgcctcttcattcccgtccatgccgagcccccgactgca

SEQ ID NO: 689305 - DNA, 101 bp, Homo sapiens
cgtgtttcaagaccaaaaaacacaataccaggcatacatttggcagaataaatgaaccaggaaaactaggtgtctgtgttcactccaggctgaagttacag

SEQ ID NO: 689306 - DNA, 90 bp, Homo sapiens
ggaggcagatattaaactcttccggaaatacttttgggatagagcctttcttgtcaaggaccctgatgctcccataagacagaaaatgcc

SEQ ID NO: 689307 - DNA, 101 bp, Homo sapiens
acttgacactcaccctgaccggttggacgtgataagtatgagcctgcagctgtttcagaacaaggtgataaaaagggcaaaaagggcaaaaaagacaggga

SEQ ID NO: 689308 - DNA, 100 bp, Homo sapiens
tctggctgcacgacagcttccccaagcccagacgcgggacttcaaaatgagcgtccctgactacatgcagtgtgctgaggaccaccagacgctgctcgtg

SEQ ID NO: 689309 - DNA, 141 bp, Homo sapiens
gacaccagctatgcccccgtggccaccgcctccagcttgccaccaaagacctgcgactttgctcaggccaagactaaggggctgcagagcggggtggacattggcgtcaagtactcggagaagcaggagcggaatttcgac

SEQ ID NO: 689310 - DNA, 100 bp, Homo sapiens
gattttggtgaatatggccagcttcccagaggccatcgaagacggcaatttggaggaaatggaagaggaagtacggcttaagaagcgaaaaagacgaaga

SEQ ID NO: 689311 - DNA, 100 bp, Homo sapiens
gcctgagtaaggacttctgcgcgcgggagttcgaggccctgcggagctgcttcgccgctgcgccctcacctaccactacgagacccagtgcctgcccacg

SEQ ID NO: 689312 - DNA, 98 bp, Homo sapiens
tctgggaatcttgaaaatctgtgacattgcaagggaaaaagtaaataaagctgctgtttttgaagaggaggaggaagccaagaatctggtgagcgaag

SEQ ID NO: 689313 - DNA, 75 bp, Homo sapiens
tgcaacggactcatggccgccttcttcgcgctggcggccttggtgcagggggttggcactgatgaagcctgcctg

SEQ ID NO: 689314 - DNA, 100 bp, Homo sapiens
tcctcggtccttcagcacccctcggcccgacgcacccacgcccctcaccccccgagagccgtttgcctgagaatacagatcaacccacagaacaaagcgg

SEQ ID NO: 689315 - DNA, 89 bp, Homo sapiens
gtcagcgggcccgggaccaccctccgggcatctgccggaacctcaagtccattgtggtccagattgggattgcggattatttcaaagag

SEQ ID NO: 689316 - DNA, 78 bp, Homo sapiens
tttaacccagttcccaccctcacagtcagtgagcaagaagaacccatcaggtgattgtcaggcctctgagcccaagct

SEQ ID NO: 689317 - DNA, 83 bp, Homo sapiens
tcccgggtcgtctttcgtgtggccgcgagaattgcctgaggttctgtccattgaggaggaagtggaagaaacagagtcttggg

SEQ ID NO: 689318 - DNA, 95 bp, Homo sapiens
tgaagctgaggaggggagtaaattgaaaatattggggccatttagtaacttctttgcaagccaaaacagagtggagtacgagaaaagggtccgag

SEQ ID NO: 689319 - DNA, 82 bp, Homo sapiens
attctcaatattctcacaaataaacatggtgcttggggagcagtttctcatagatgcctgtgaggagccaccaacatttgaa

SEQ ID NO: 689320 - DNA, 100 bp, Homo sapiens
ccttcccgccggccagaaggagtgcttctaccagcccatgcccctgaaggcctcgctggagatcgagtaccaaagaatgcaagatggagattgaagacaa

SEQ ID NO: 689321 - DNA, 78 bp, Homo sapiens
gtacgctgtgaaggcatcaacatttctggcaatttctacagaaacaagcttgaccactatgctatcatcaagtttccg

SEQ ID NO: 689322 - DNA, 75 bp, Homo sapiens
tggaactctggtgactcattcaaatcatctggaggtggtgaagctaatcaaatgccatgaccttgcctcctttcc

SEQ ID NO: 689323 - DNA, 96 bp, Homo sapiens
tgttttgggagaatttggaactattccacttgtgttatgtgcagatcttaattctttgccagactctggaattgaatgatctggcacgggaccctc

SEQ ID NO: 689324 - DNA, 90 bp, Homo sapiens
gaaggttcaattatgtggtcaaattggaatttggagctggagacctacaggggcctttgttcggtctcaagctgttccgtaatctcacac

SEQ ID NO: 689325 - DNA, 97 bp, Homo sapiens
cccttttgcaaggagaaaattttggtggagaattatccaacaagaaaaagacctgtggctattaagatagctaaaagatggcggcaaggcagcccag

SEQ ID NO: 689326 - DNA, 96 bp, Homo sapiens
agctgctcaagacagcatcaaacctcactgtctctgtcctggaagcagaaggagtctttgaaaaagcaaccatgtccaagggacctgcagttggta

SEQ ID NO: 689327 - DNA, 100 bp, Homo sapiens
cgcatcacaggccgcgtctttgacggaggcatacaccatacatggtacagccagagtaccgaatctatgagatgaacaagagactgcagtctcgcacaga

SEQ ID NO: 689328 - DNA, 82 bp, Homo sapiens
gggaacaaatactactacatcccgcagtacaagaactggagagatctgactgcagccatgagcagcaatgagtgcttcaagt

SEQ ID NO: 689329 - DNA, 50 bp, Homo sapiens
ggggccttttgacaactccaatgttgactcggggatctgatgagcttctt

SEQ ID NO: 689330 - DNA, 75 bp, Homo sapiens
gtcatcgaggtgttcacccccgtggtgcagcgaatcctcaagcataacatgattgacgagatgcctgaggctgcc

SEQ ID NO: 689331 - DNA, 75 bp, Homo sapiens
acagacagcagcgcagtaccaccttccagagatgtgtgtctgacttgctgctccagggatgtcatagttaaagtt

SEQ ID NO: 689332 - DNA, 100 bp, Homo sapiens
cgcactctggagggattctggcatcagggaggctttcagccggagaagcgagtttcagctggttcgatacaagaggctgttttcctagcgtggcttgctg

SEQ ID NO: 689333 - DNA, 89 bp, Homo sapiens
cgaggaagagtgagggcgcgacgcgcaccaacggtggaggttattcagcttctcaaggctggaaaagcgaaggaagtttcctacaatgc

SEQ ID NO: 689334 - DNA, 90 bp, Homo sapiens
gtccaagagcaaggcaacaacagattcaacatctgcaatgacaatgcagtttattagtcatcagttccctgattatcatgaccctactat

SEQ ID NO: 689335 - DNA, 98 bp, Homo sapiens
agatccagttcaaccggagttacctgagcccagaagcctagagtcctggggagcttctgtccacctgtcctgcagaggagtcgtttccagcccggctg

SEQ ID NO: 689336 - DNA, 100 bp, Homo sapiens
aggacaccgacatggaacagggactcactggggatgcagattttcttttacaatccagatgactttgacagctttcaaaccgcaatttctgagaacagaa

SEQ ID NO: 689337 - DNA, 51 bp, Homo sapiens
gaacgatgtgattggctgctttgcgatcaatgcttggaatctggaaactgc

SEQ ID NO: 689338 - DNA, 128 bp, Homo sapiens
gacgtttccgggcaagagaccgactggcggagcaccgccttccggcagaagctggtcagtcaaatgtaccccctgtaccggctgggtggcccacaacttcgggtgttccgaaccaacttcttcattca

SEQ ID NO: 689339 - DNA, 100 bp, Homo sapiens
ggagccagcggctgaggaggggccccagcagcccccgaaggccctatcaggacatggagtatgaaagacgattgctgctctctgaacactatagtcgtcg

SEQ ID NO: 689340 - DNA, 100 bp, Homo sapiens
tgattattttgcggaaatggccaaatctgatctgcagatgcagaaggtgctggtcgttatgtaccaggttctgcaagtatgggaactaccatggccggag

SEQ ID NO: 689341 - DNA, 75 bp, Homo sapiens
gctctcaacagcatcgactccgatgactttgcatactgctgggaaaactttgtgtgcaatgaaggtcagccattc

SEQ ID NO: 689342 - DNA, 98 bp, Homo sapiens
ggcgcgggctggcggtggctccacgaggtcctgctgtactagccaccaaagcagctgctggtactaagaaatatgatcttagtaaatggaaatatgca

SEQ ID NO: 689343 - DNA, 100 bp, Homo sapiens
atggattccaacatcctgctagacttgttaagacttacagccagctggcccaccccatccagcaggccaaggcactgggtctccagttccattctcgcat

SEQ ID NO: 689344 - DNA, 87 bp, Homo sapiens
ggacgaaccgccaatcgcaaggcacctctgagaacttcagagcaaaatatgctgtgaattccatcaagaagaaagtcaacgacaaga

SEQ ID NO: 689345 - DNA, 82 bp, Homo sapiens
tgctggccacttgcttgggatcctttatcctggtcatcttctatttccaaaaaggagctggcaaacagccctgactgtcccc

SEQ ID NO: 689346 - DNA, 75 bp, Homo sapiens
ggaacctgagatgttaatgatggcagtacagtcaggcaaccagataaactggtggtagtttggaccagaagaagc

SEQ ID NO: 689347 - DNA, 90 bp, Homo sapiens
ggggcgcgcggcggcgacgcgtccggcgaattttgaattgcccccctgggaagtttcggtaaagtaaaagatggctcaaccaaagaggac

SEQ ID NO: 689348 - DNA, 75 bp, Homo sapiens
gaatccaccggcgcagtttcatctagcgactgcttgcattgaaaggctctagttacagtggacttcttgaacgac

SEQ ID NO: 689349 - DNA, 100 bp, Homo sapiens
gtgattttttgcctttgttgattaactggacaaattcaggaaacctcgacctgtctcccagttggttgcacagcaggttactcagcagtttgtgcctcct

SEQ ID NO: 689350 - DNA, 101 bp, Homo sapiens
cagcaagaagtcagccaagagatgtgttaaagagcagcagaggtgagaactcagaagagaaatacagctggctatctactaccagaagggcttcaaagata

SEQ ID NO: 689351 - DNA, 96 bp, Homo sapiens
tcttgaatcatgaagctactaaccagagccggctctttctcggcaacacttccccagatcaaaaggagccaacacctttcatcatcgagtggatcc

SEQ ID NO: 689352 - DNA, 97 bp, Homo sapiens
gtctgacatggaggatgatttcatgtgcgatgatgaggaggactacgacctgaactatcgtaccatggaaagtattcagacagtgccttcatgaggt

SEQ ID NO: 689353 - DNA, 51 bp, Homo sapiens
cacacatcccagccggtgactgcagtgagatggaaaatggttgatcattat

SEQ ID NO: 689354 - DNA, 100 bp, Homo sapiens
cggaataggccttgccaagaaggatatattgggagctagacacagtgccaacataaacctacatcgtaaactgttgaccaaagaactcgatgacatgggc

SEQ ID NO: 689355 - DNA, 83 bp, Homo sapiens
agccttgtcactggaggcgagtcagacaatgcagatcttcgtgaagactctgactggtaagaccatcaccctcgaggttgagc

SEQ ID NO: 689356 - DNA, 51 bp, Homo sapiens
taacacactcagcatcactaaagatgtgaaaggaccacccacccaccgtct

SEQ ID NO: 689357 - DNA, 75 bp, Homo sapiens
ctcagttggaagcagccgatccagcctgcggagcctgtggggcagtatcagatgtagaaggtggtgatggactgc

SEQ ID NO: 689358 - DNA, 100 bp, Homo sapiens
ctgctggactacaaggacgagttctcgggcagaggcgacctccccgcgttccatgcgcacagggacagggggctcagtgctgtcagagagggactacgag

SEQ ID NO: 689359 - DNA, 50 bp, Homo sapiens
cagcctccctagtagctgggaccacagaaaccacaacaaaggtgcttgcc

SEQ ID NO: 689360 - DNA, 80 bp, Homo sapiens
cgccgccatccagccaccattccaagatttcccatcagatatcgctaacaagtctctctcagagaccactgcaacaatgc

SEQ ID NO: 689361 - DNA, 83 bp, Homo sapiens
ggaaagatctaccttctggaagctactactacgtggtgcttggaaaggtatgctatacctccggagcatggaaaacgacttga

SEQ ID NO: 689362 - DNA, 75 bp, Homo sapiens
atccagtacgagttgaatcattgttcaaataaggcacattgcaagcaacccgtgccttgatggtggttggcatcc

SEQ ID NO: 689363 - DNA, 82 bp, Homo sapiens
cttcaagtacttggcagatcactctcttagcagggtgtggatgaatggaacatagctcgcctcaatacagtcttggatgtgg

SEQ ID NO: 689364 - DNA, 88 bp, Homo sapiens
gcgccgccgcgcagcgccccagccacacgccggcgggcagaagccgcccgctctccgggtgatggcttggacaacagtgtagcttccc

SEQ ID NO: 689365 - DNA, 75 bp, Homo sapiens
agaaatggaaaaaggacggtgttcttggtcaactctggcaatgtgcagaatatacacaaggaagataaaccttta

SEQ ID NO: 689366 - DNA, 100 bp, Homo sapiens
cccacctgcccggtgcccgaggaggcagccaagctcgtagcctgccactccgtgctaaacggagttccctctcgaagtccaagattagttgcttctgggg

SEQ ID NO: 689367 - DNA, 98 bp, Homo sapiens
acttaataacgtgcacctttctcatcctgtttatgtccgacgtgcagctgccttggacaagattcgctatgagagcctgacagacccttcgaagttgg

SEQ ID NO: 689368 - DNA, 82 bp, Homo sapiens
tttgtccttctcaccgtgggagctctcctcatgctgacagttcattgactccacttgatgcgagagatatattgatgcaaat

SEQ ID NO: 689369 - DNA, 75 bp, Homo sapiens
ctttttgccagtgaaggccaacctggcaaggtccattcaactgcaattgaatattggagttgagcagattcgagt

SEQ ID NO: 689370 - DNA, 74 bp, Homo sapiens
atcatgaattcccaagaaggaggaagtcagcctcataccaaaccatccgtttttgtcatgaaaaatggaacaaa

SEQ ID NO: 689371 - DNA, 100 bp, Homo sapiens
cttactacatttgtgtgagtctcgggaccatgtggaactggctaaaaatgtcatttacagggattaatgaaaatcaagttccatcctcagacaagaggta

SEQ ID NO: 689372 - DNA, 98 bp, Homo sapiens
aatatattgttagtgcctggtacaatatgccccatggctgggggttatggagtgatgggtgacgatggttctattgattatactgttcacgaagcctg

SEQ ID NO: 689373 - DNA, 97 bp, Homo sapiens
cccgggcagcctgcgcgagctgcgggcgcgcgagttcagccgcctggcaggcggggcaagaagcacagcatcatcctaaggacgcagctgtctgtga

SEQ ID NO: 689374 - DNA, 75 bp, Homo sapiens
gctgatgcagaaactcttcggaaggctatgaaaggcttgggaagttattgccagcgccattttaaacaacaaaat

SEQ ID NO: 689375 - DNA, 75 bp, Homo sapiens
atcgccacagctgaaggctgcgagggactaagagcagagagaaattgtcgtaaatgaagtcaattttgtgagaaa

SEQ ID NO: 689376 - DNA, 100 bp, Homo sapiens
ctgcagtttcaaaagaattggccaaagaagttgagaaaatgggagcagttttcatggatgcccctgtttctggtggtgaatctggattgggaaagtcgac

SEQ ID NO: 689377 - DNA, 75 bp, Homo sapiens
acatgcagattatatcgcatcctatggctcaaagaaagatgattataaaacaacagttttgttggcatgtgaagc

SEQ ID NO: 689378 - DNA, 98 bp, Homo sapiens
cacccgactggacacggttctggaggagtttaagaagggagatagtcaacttcaactgtcggaaactggtggctacaatgcctttatttgctaatgcg

SEQ ID NO: 689379 - DNA, 75 bp, Homo sapiens
atgccaacacacctgcctcctctcgaaaaaacctggatgtgcaggctgatgtccaagtgcagttgatcagcaaag

SEQ ID NO: 689380 - DNA, 100 bp, Homo sapiens
ggcaactttgagctggcagaatacatcaagaaccacaaggaaacagacattggtggtgcggttgtgtcagaacccaaagctggcgctaaagaatagccca

SEQ ID NO: 689381 - DNA, 50 bp, Homo sapiens
gccggactgggaagatggacgcaggtatcgagaaccttccctgcgaactt

SEQ ID NO: 689382 - DNA, 75 bp, Homo sapiens
ttctggacaagatgaagtctttctgccagctgactcctgagttctcacaacgcttgaccaataagattcgggagc

SEQ ID NO: 689383 - DNA, 82 bp, Homo sapiens
ggacaccggccccgagcaggtcacgaggacggagggccatgtgttgggtcagcaccatcagacaatgcagatcttcgtgaag

SEQ ID NO: 689384 - DNA, 98 bp, Homo sapiens
ttctgctgaccgcgggccctgccctgggctggaacgaccctgtgctacacacgcagggccctgtcgatggcagcctttacgcgaaggtgaggaagaaa

SEQ ID NO: 689385 - DNA, 75 bp, Homo sapiens
cgccaggacaatggggacccgggacgacgagtacgactacctattcaaagttcagaatgaccgaagaagcatgcc

SEQ ID NO: 689386 - DNA, 100 bp, Homo sapiens
cgcaggcccacggtagcgcagccgctctgagaagatggcagtgaacgtatactcaacgtcagtgaccagtgataacctaagtcgacatgacatgctggcc

SEQ ID NO: 689387 - DNA, 100 bp, Homo sapiens
tgcggcccatgtacctgaaggactacgagaggaaggttatcttggagaaggcaggctatccgtggtcctgaaccagttatgtgtgttgcatgagaaaacg

SEQ ID NO: 689388 - DNA, 75 bp, Homo sapiens
tttgtcgcagagactatctgaggatcagctcagctactatttaataaaacaaaatctgtagaattcacgttttgt

SEQ ID NO: 689389 - DNA, 90 bp, Homo sapiens
ctccactgccgtctactcggccactccggtcccgacacctagcctgcggaggaggacctggttgatagaagaatttatctcgtagtctta

SEQ ID NO: 689390 - DNA, 50 bp, Homo sapiens
gcggatcctaataaggggaaaatggaaatttacctgatcctggtaaggct

SEQ ID NO: 689391 - DNA, 101 bp, Homo sapiens
gaatgatgaagagaaaggcccggagactgctgatttggagcaatataaaaaagctttaactgatgcaggatgcaaccttaatcctttacaatatatcaaac

SEQ ID NO: 689392 - DNA, 75 bp, Homo sapiens
acggagattgtcttctgtgctgtcacctcgaatgagcaggtcaaggtgaccaagaatatggcccaggtgaccaaa

SEQ ID NO: 689393 - DNA, 82 bp, Homo sapiens
aagatggcggacggggagctgaacgtggacagcctcatcacccggctgctggagggacttctgccatgggcaagtgatgtgg

SEQ ID NO: 689394 - DNA, 75 bp, Homo sapiens
tcagatcagttgaagaaacatggatttaaattgggtcctgcaccaaaaaatgttgcctgcaatgaactcgctgaa

SEQ ID NO: 689395 - DNA, 102 bp, Homo sapiens
gccggcgctggaggaggacgtcatttaccacgtgaaatacgacgaatgagcacaatgcctggactccccacccggccctgtttttatgatattgatttggac

SEQ ID NO: 689396 - DNA, 90 bp, Homo sapiens
gagaaatgcattcagcatgtgaagcgtcttcgagaaatgaggttcaacttgcctcgaaccctgtgctggatgcctggtacggtgctcgtg

SEQ ID NO: 689397 - DNA, 82 bp, Homo sapiens
tggaggagaatcaagagctccgaggtgtttcccattaaacactaccaggacaaaatcaggccttacatccagctgccatcgc

SEQ ID NO: 689398 - DNA, 90 bp, Homo sapiens
tctcataaagtatggggaattcctctatgacaatctcatcattttctccccttcggtagaaggtcatcatcagatttgaaatatttaaag

SEQ ID NO: 689399 - DNA, 110 bp, Homo sapiens
ggaccttcaagactgtctttgctgagcacatcagtgatgaatgcaagaggcgtttctataagaattggcccagtttgagatgccttatgtggtacggctgcacaacttcc

SEQ ID NO: 689400 - DNA, 90 bp, Homo sapiens
tcttaagctagagagtaacaggaagtatctgtatgtattcaagatgccctgtacagacttttggggaactgggtactgatgaacccgaac

SEQ ID NO: 689401 - DNA, 100 bp, Homo sapiens
gttaacttgggagaaagtttcatctgtggatggagtattggccagacggttttgctgtctcagcctactgtggtacaacttcaagcacctggagttctgc

SEQ ID NO: 689402 - DNA, 95 bp, Homo sapiens
gactgcacttcttttttgagaaaggaaggaatatatcctgactgattgttctgggttgacaaatatcaagacggaggagatctctgaagtgaaga

SEQ ID NO: 689403 - DNA, 50 bp, Homo sapiens
gccgaccatggagccccagagatattgagaaagtctgtgaaactgtctat

SEQ ID NO: 689404 - DNA, 90 bp, Homo sapiens
agcgagtacttcgttccaacatggacatcctgaagccaatcctgaataaaggttctcttcagtttgaagacaaatgggattttatgcgcc

SEQ ID NO: 689405 - DNA, 74 bp, Homo sapiens
gctttacttggcagcagcctccaaaaatcagcatttcagggaaaagcaacccctataccacccgacctaaccgt

SEQ ID NO: 689406 - DNA, 100 bp, Homo sapiens
aattccagccggcaaataaattcaacaagaagagaaaattccagccagatggtagaagcgatggccaacccatggccagcacagacatgatggaataaag

SEQ ID NO: 689407 - DNA, 90 bp, Homo sapiens
caggccatcgacccccagagcaacaaactggcgatggaatatgagaggagccctctggaaagaaaaggacagaccctgtgctttcatgaa

SEQ ID NO: 689408 - DNA, 75 bp, Homo sapiens
ctcaagaaggtgaagatgatacctttctaacagcccaagtttggagatcgtttccctgccatgtctgatgcctac

SEQ ID NO: 689409 - DNA, 82 bp, Homo sapiens
tgagaaggactttcaggatagaacatgccatcactggtgcaagctatatttaacggagatcctgatgaagttcgagcactaa

SEQ ID NO: 689410 - DNA, 75 bp, Homo sapiens
ggcgctgaagcgcgcgggcaaggaggtgctgctggagggtctggagcccccaactcccttgacagtgtacgctgg

SEQ ID NO: 689411 - DNA, 83 bp, Homo sapiens
ggaccggctgccatcttagtctagggactgaggagtcgccgccgccccgagtcccgtaatctcaggggcgatataatcaatga

SEQ ID NO: 689412 - DNA, 95 bp, Homo sapiens
ctctgaccagcatcgtctgtaaaggtaatgaggagtacctgatcaatctgatagactctccaggacacgtggacttttcctcagaagtatcaacc

SEQ ID NO: 689413 - DNA, 80 bp, Homo sapiens
gcttgtaactgccccagccggacaccccccctcccttgacctacccggtgggcaaacgcagaggcgggaacaaactagcc

SEQ ID NO: 689414 - DNA, 51 bp, Homo sapiens
ttctgatgtcgtgcccatgacagcaggctggctgaaggcggtgcaggtcct

SEQ ID NO: 689415 - DNA, 75 bp, Homo sapiens
gcatttctttttctggaatgtcattatcagacacaatgtccctggctatcttcttcagtgactgctccatccatg

SEQ ID NO: 689416 - DNA, 75 bp, Homo sapiens
gctattgccctgtattttgcaatccaggacttcaataaagttgtggcattcccatcaagagcaccatggacaacc

SEQ ID NO: 689417 - DNA, 100 bp, Homo sapiens
ttaaaatatgggttattttcaactttttatctgaggacaagtatccattaattattgtgtcagaagagaaactgtgtactgttcagagtgtcaactgcag

SEQ ID NO: 689418 - DNA, 100 bp, Homo sapiens
cctccagcatggattcctcctcatgaggagtggctgagcagtttgccatcgcggaagccaagctccgagcatggtcttcggtggatggcgaggactccac

SEQ ID NO: 689419 - DNA, 100 bp, Homo sapiens
aagggaccaaggtggaaatcaaacagccggggccatccagtcttggcagcatgctcatgcctgtccaggagactgcctgggaagagctcatccgcactgg

SEQ ID NO: 689420 - DNA, 82 bp, Homo sapiens
tgcgtcctgcactgaaaggaaatgacggattttttttgattacgaagatgcaggctaccagactgcagaacttgtaaaaatg

SEQ ID NO: 689421 - DNA, 100 bp, Homo sapiens
ggggagctgccctcagagaggtggaaccccacgcagaacgtcaggttctactgggacttcaccatgctgctgttcatggtgggaaacctcatcatcatcc

SEQ ID NO: 689422 - DNA, 101 bp, Homo sapiens
taggtgcttttatattcatctcaaaaacaaaattctgaactcaggacttggcaagatctagtgaaaagccatttgatgtatgcggtcagagaagaagtgga

SEQ ID NO: 689423 - DNA, 110 bp, Homo sapiens
aaactcatcgaacagctggagcaaggcgacgaaccttggagagaggagaacgaacatcttctggacctttgtccaggtcatacttacctggttgcttgcgcatctagtaa

SEQ ID NO: 689424 - DNA, 50 bp, Homo sapiens
tatagccttcactttccctcggcgagaaccactgtctctgatcaacgtgc

SEQ ID NO: 689425 - DNA, 90 bp, Homo sapiens
actgggtccccaaagtcttggaacagcgacgacaaggcttggaaacatacttacaggacgtcttgcatggctggtatacttagttgggac

SEQ ID NO: 689426 - DNA, 90 bp, Homo sapiens
tcctgaggcctccccagctatgctgaactatggctgccgcacgcctctgcctctccctgctgctcctgtccacctgcgtggctctgttac

SEQ ID NO: 689427 - DNA, 83 bp, Homo sapiens
ccttggttggggaagtgggggagctggcagaactcttgtgcagagcattgtagaccaaggagccatggataggagaagtatgg

SEQ ID NO: 689428 - DNA, 95 bp, Homo sapiens
gaggaagaggaaagcaaaggagtcggggatggctctttctcaggatcagttccatgacaagaccccttatacgattatgtttggtccagataaat

SEQ ID NO: 689429 - DNA, 100 bp, Homo sapiens
ctgcttttgatgtctgacaacgtggatcgttgttttgaaacatcatggaagggaagtggttgctgtgtatgttactggtgcttggaactgctattgttga

SEQ ID NO: 689430 - DNA, 75 bp, Homo sapiens
ggaacttatgctgtagacatttctttgtggtttatctaaaaaccaaagctgatcctacagttaaagacttaatcg

SEQ ID NO: 689431 - DNA, 98 bp, Homo sapiens
acagaggcaaccagaaggatgaatgatattctgaatcacaaggttatcaatactctggctgaccatcatcatcgtgggactgactttggtggaagtcc

SEQ ID NO: 689432 - DNA, 100 bp, Homo sapiens
tatcaccaaactggaggatgcctatgtattccctggggatggcgcatcacacaccaaaggtgattgagaactgtgttgctgctgctggattcagtgtggg

SEQ ID NO: 689433 - DNA, 90 bp, Homo sapiens
agttgagctaatggtggagccaaaatgctattgccctgtcttcatcaacatttaatcaatgtgcttttccagactgatccaactgcagag

SEQ ID NO: 689434 - DNA, 100 bp, Homo sapiens
cggactgctaaagatgcagctatttacagtggacagaaactgaaggggtgaaagaaaacccaaggtgttttattccaaacgtctatgctgctttgttcac

SEQ ID NO: 689435 - DNA, 90 bp, Homo sapiens
atttcagcaacaaggaaataaattagtggcagagtaagggtgacttgggtcaaggagctgagcccccacagtgggcccagtggagagcag

SEQ ID NO: 689436 - DNA, 78 bp, Homo sapiens
gacgttcagggcttggtctcagcattgtgggaggaaaagacacacccttggtgctgagcgccgtcctcaaggatctct

SEQ ID NO: 689437 - DNA, 100 bp, Homo sapiens
cggcggcggcggcggagtgtaggaagaggcactgctgagggggcgcgaggggaacggaggccagagctgcgacaggggcaagtgtccgagtggtgaatca

SEQ ID NO: 689438 - DNA, 75 bp, Homo sapiens
cctacatttagcgcatcatgtgatccgggttttgacctgtagcagagaaccaattctggagaacagcctcacttc

SEQ ID NO: 689439 - DNA, 100 bp, Homo sapiens
gtacccagcggagttagcgcctgctctacctcctcctgctttcacctatcccgcttcactgcatgcccagcattcgcaacgacaggcgcctcctctgcca

SEQ ID NO: 689440 - DNA, 100 bp, Homo sapiens
gtggctgctgccaagggctacattgaggtgatgagtattaaaggtggaagaaggtccatatctttttctgtgggtgcttcaagtgttgttggaagtggag

SEQ ID NO: 689441 - DNA, 97 bp, Homo sapiens
gcccctgttgcgatggcgcagaaaccccgttgacaaggcactgctttttcatgacggtaactaggatttctacctcaaccgcgagacctatgcaagg

SEQ ID NO: 689442 - DNA, 98 bp, Homo sapiens
gcaggaaagctaagaagaatcacacctcattgcagggaaagaatatggcaaagctgatgcaagatgggtttattttgatccaaccattgtgtctgtgg

SEQ ID NO: 689443 - DNA, 75 bp, Homo sapiens
gagaacaaagccaaagcagtcaggaaggatattcaggaatccagaaccctggctgaaattgcaaaagcagagctg

SEQ ID NO: 689444 - DNA, 100 bp, Homo sapiens
ggacgcggcgctctacggcctcgccacctggtacctggaagctgtgtgcccagatcctcccaagaaggtgaccacagtgattcaaaaccccatgccgatt

SEQ ID NO: 689445 - DNA, 75 bp, Homo sapiens
gttggaagcagccgatccagcctgcggagcctgtggggcaggacacaccagcccctcggataccacttggccact

SEQ ID NO: 689446 - DNA, 75 bp, Homo sapiens
cctaccaggccgcacattgcagattttcagctgaactctcatctctcaacactggcaaatattcataagatctac

SEQ ID NO: 689447 - DNA, 100 bp, Homo sapiens
tcctctctgggtgggagccacctgtgtgatgatgcctgagttcagccctcagcagcgcacgtaccgggtgccgaaggaggtccgcgtggagcctcagaag

SEQ ID NO: 689448 - DNA, 98 bp, Homo sapiens
ggggattctcgacctgctaacagaactggaccttttcggatgtgatggtggcaggtgggatggagagcatgtccaatgttccatatgtaatgaacaga

SEQ ID NO: 689449 - DNA, 98 bp, Homo sapiens
cgacctcgggcgccccgccggtcacctccgcgcggacaccaggcccagctgagagccagcctggaggttacccagcagcaggccacccaggccgaagg

SEQ ID NO: 689450 - DNA, 101 bp, Homo sapiens
ggtgaagctatggctctaaatgagaaaagaattctggagaaagtgcaaagtagattcgtactttgggacatccggaagaaagcagccatccagacatttca

SEQ ID NO: 689451 - DNA, 90 bp, Homo sapiens
taaggagcttgatttgtttttggcatactacgtgcaggagcaagggggcaccctcctgccagggaccgagcccacagtggacacggtgcc

SEQ ID NO: 689452 - DNA, 100 bp, Homo sapiens
gaagattccactaggaacagaaatattcatactgaccccaaagagtcaaacttctcagatgttaataccaaccgttccagatgacgtgtactactgtgga

SEQ ID NO: 689453 - DNA, 49 bp, Homo sapiens
cctctttggacatctaactaatggtgaactatgacaatgtagtggacac

SEQ ID NO: 689454 - DNA, 50 bp, Homo sapiens
gagcgttacaaggccttctacattaccggatcaatgtgactctaagaaca

SEQ ID NO: 689455 - DNA, 80 bp, Homo sapiens
aggtaccgcttgttcagacttcttgagtttcctgctctacgaaacgcactcttttgccttgaagcggcattggacagtgg

SEQ ID NO: 689456 - DNA, 75 bp, Homo sapiens
cagtgaccggacttctcacccccaggatgtcatcgaggatcaggagaacctcagtctgacgacattgaagctagc

SEQ ID NO: 689457 - DNA, 75 bp, Homo sapiens
ggagtcatcggacgccagaatctgcagggtttccaggcctgaggtgcccgccctggccccaggagaatgaaccag

SEQ ID NO: 689458 - DNA, 90 bp, Homo sapiens
ttcgcgattacaatgatgcagacatggcgcgtcttctggagcaatgggaggagcgtgaggatcatccccggagaggacgggaggatcggc

SEQ ID NO: 689459 - DNA, 76 bp, Homo sapiens
agtcggatgggggaggactgctttatggacttgcatcaggagtagcaagaaacctcgacctgtctcccagttggtt

SEQ ID NO: 689460 - DNA, 95 bp, Homo sapiens
tttgaccgagaggctgctggagctcgtgtttggacgcctccagatcctgtttgcgggggaagccacacatcgcacgttttactccacgacgcacg

SEQ ID NO: 689461 - DNA, 100 bp, Homo sapiens
tgaccgcgctaagatggcgactcccatgcatcggctaatagcccggagacaagctgatggaactgtacgagataggcggggccaagacgtccgactgtac

SEQ ID NO: 689462 - DNA, 125 bp, Homo sapiens
aaacttgcagagaatgaaatcactttgtgtcaaaaagaaataactcagctgaagcatcagggtggttctcttcccaaagtggaagccaaattcatcaattatgtgaagaattgcttccggatgac

SEQ ID NO: 689463 - DNA, 75 bp, Homo sapiens
ggcaaagcgaaattggtcattctcgctaacaactgcccagctttgaggaaactttgaaaagcaccccaaagaact

SEQ ID NO: 689464 - DNA, 83 bp, Homo sapiens
gtcctcaactttctgggcgttcatgatcctggccagcctgctcatcgcctactgcaatcccgactgggcctcctacactctgg

SEQ ID NO: 689465 - DNA, 76 bp, Homo sapiens
agtttttggaacctacacagatgtgacacctcggcagttcttcaatgttcagttccatgccattgcagtgtcaact

SEQ ID NO: 689466 - DNA, 75 bp, Homo sapiens
ctgacgccggagcagctcctaacccaggtcgcgtggggcaggcagtggcgctgcgggccaaggccttcggcttca

SEQ ID NO: 689467 - DNA, 83 bp, Homo sapiens
ctcatgaagacatatactgtgaacacactacagaccctcacaagtcagttactgaaaagggatgaaacgaggaggaagagata

SEQ ID NO: 689468 - DNA, 74 bp, Homo sapiens
tcccaatcccccactctttccgccctaatggaggtctccagtttcgaagtcccgggcccagagcccggccagca

SEQ ID NO: 689469 - DNA, 87 bp, Homo sapiens
ggtggattcagaggaggtcgtgggggccgggagtttgcggattttgaatatagggttgccaaggaaagtgtactgcagttttacccg

SEQ ID NO: 689470 - DNA, 100 bp, Homo sapiens
actccgcggcccgcaagcccggctcggcccggccctgctctgttctgcccggaggagccgcccccgagtcgtccggaaatccattgcccgtgttctcaca

SEQ ID NO: 689471 - DNA, 75 bp, Homo sapiens
ctctatgatatgctaagaaagaatcttgtcactttagccactgctactacaggcttcagggatgacttcttaggg

SEQ ID NO: 689472 - DNA, 75 bp, Homo sapiens
ctcaccgatgtcgggaaggtcactgaacctatgtacattgaagatgtcagtttctacatgtgggaagtagacatt

SEQ ID NO: 689473 - DNA, 100 bp, Homo sapiens
ctattgacagggttctggacatccaggaagaggagccgagcatctgggccgagaccattccgtatggagagccgggatcaaaatacttgctggatggtgg

SEQ ID NO: 689474 - DNA, 75 bp, Homo sapiens
gtggcaccttcatcttaaatctgtacaagcatgtttaggagaaattgtcgtaaatgaagtcaattttgtgagaaa

SEQ ID NO: 689475 - DNA, 100 bp, Homo sapiens
ttacagaaagagtcaacagcagtggcaacagggatttgtcttggctgttactatgacacgggaagcaattgatgaatttcggcgttttcagcgtgacaag

SEQ ID NO: 689476 - DNA, 75 bp, Homo sapiens
ttttagggtcctttatatagaagggagagtagcttaattggcttagtgtcgacttcaataattggaaagactggg

SEQ ID NO: 689477 - DNA, 100 bp, Homo sapiens
gctgtgacaatgatatggaaagaaaaaaagtcttggatgatctaaccaaggaagcctgtctagcagtccagaggagatgtctggagctgaagaggggagg

SEQ ID NO: 689478 - DNA, 82 bp, Homo sapiens
gatgtcgggacaccccggaagctgggaaatgagaagatggcgaattagaagatggtgaaatagacgatgcaggatttgaaga

SEQ ID NO: 689479 - DNA, 76 bp, Homo sapiens
gctcgatccagcaccatggggaagcgggacaatcgggtggtttccctaggacttctgcatgcccatgccacacata

SEQ ID NO: 689480 - DNA, 73 bp, Homo sapiens
gacattgacctctttggatctgatgatgaggagggaacagagttcagaggcagcagaaactggagttagtgaa

SEQ ID NO: 689481 - DNA, 87 bp, Homo sapiens
aatgcccaggaggaagcaggagcagcccaagcgccttccctcacgctggagtgcagtggcgagatctcgactcactgcaggctccga

SEQ ID NO: 689482 - DNA, 98 bp, Homo sapiens
cgctcatcagagggaagatctttttcctcaattggcgcatattaaatttcctattgactacccctattcaccacctaccttcagattcttgaccaaaa

SEQ ID NO: 689483 - DNA, 75 bp, Homo sapiens
agggattggtgaccaaccagaaggctcagacatctgattgctgacctgtgaaaattagttctgctgtgcttaaag

SEQ ID NO: 689484 - DNA, 82 bp, Homo sapiens
gacagcaacagctctgccggctggaaggttatgggaagctggctggaagcagcggtactacaagaacaaatttgatgtggat

SEQ ID NO: 689485 - DNA, 80 bp, Homo sapiens
gtgaaccttcgaccttggacttctcagcctccagaatgggcacagacagaagcttgatgactctaaacctagtttgttct

SEQ ID NO: 689486 - DNA, 100 bp, Homo sapiens
gtggagatcaatgagcaagaagcattggaagagaaattggaaaatgtgaaagccattctgcaggcatatcattttacagacccctgtaaaagagcccaac

SEQ ID NO: 689487 - DNA, 100 bp, Homo sapiens
ggagccgccggccgctagcgtcagcgccagccaggtagtaaacctattgatggcaattttgctgactgtggaagtgactcatccaaactccatgccagct

SEQ ID NO: 689488 - DNA, 98 bp, Homo sapiens
aattcttcagattctagttttgagaagaatgtggaaataacggagcaacttgctaatggcaggcattttacaaggtggtactttggaaaacttggccg

SEQ ID NO: 689489 - DNA, 80 bp, Homo sapiens
ctgtaaggtgcggccgccgccggtcatgatgatgggcagcgcccgagtggcggagctgctgctgctccacggcgcggagc

SEQ ID NO: 689490 - DNA, 51 bp, Homo sapiens
cgacgactgggcatacggcaatggttgttgatcattatgaaaatcctagaa

SEQ ID NO: 689491 - DNA, 50 bp, Homo sapiens
gggagccccgggagccgcacggtttctgcggcactgaaacaaggccaaat

SEQ ID NO: 689492 - DNA, 75 bp, Homo sapiens
gaggaggtcatgaaggacctgagcctgacgcgggccgcgcgggtctacgacgttcctccatcggtgagcaaggat

SEQ ID NO: 689493 - DNA, 75 bp, Homo sapiens
agttaaatgccctcaagtcgacaggggatgggaccctaggtgaccaagaatatggcccaggtgaccaaagccctg

SEQ ID NO: 689494 - DNA, 97 bp, Homo sapiens
gccacgctttctgtacagcctgcagaactgaagtggtaaggctatgtcgcctgtgccaaggtgtgctgggctcggtacggcaggccattgaggagct

SEQ ID NO: 689495 - DNA, 97 bp, Homo sapiens
ccagaggtggaagtccaagtcaaacgcagaaggactgcctcactgagcaaccaagagactcaagcacagagggttcggaaaccgcgttgctgcacgg

SEQ ID NO: 689496 - DNA, 83 bp, Homo sapiens
ctggtggaagacttgcagaaagaacctggaagacagaggctggagggccgcgatgggcctcttggaacattggtgtgttcatc

SEQ ID NO: 689497 - DNA, 100 bp, Homo sapiens
caacaagcggctggagcaccagggcatcaagatcgagttcatcgggcagatcgtattctaccttgtaaatactgttatttgtatatactgtaaatgatga

SEQ ID NO: 689498 - DNA, 100 bp, Homo sapiens
gcagagactctacctgccctaggcgttcgtgaagagaagcagctgttgctattggaggagagctccacgcaggagatcggtgaggagctgatcaacggag

SEQ ID NO: 689499 - DNA, 100 bp, Homo sapiens
cgagccccgtggaatcccgcggcccccagccagagccagcatgcagaacaccatcccaggcctcaggacctgagttctccgacgcccacatgacatggct

SEQ ID NO: 689500 - DNA, 104 bp, Homo sapiens
gcccggaggacgaggactccagcctggatgaatctgacctctatagcctggcccattcctacctcggatcatccagcagctcgtcaacggcatcatcacgcccg

SEQ ID NO: 689501 - DNA, 75 bp, Homo sapiens
acgtcatcaggcttgttcaagacacaccggaggcgacggccatggccacaggacctgaaggagaagaaggagaag

SEQ ID NO: 689502 - DNA, 74 bp, Homo sapiens
cagaagtccagagctgaggactgcctgtttgcaggttgaaatcacaaagattagacacctttttagataggtgt

SEQ ID NO: 689503 - DNA, 100 bp, Homo sapiens
aaacttccaagcctgtatcaactctggtatggacacagcttctagtgttgctttggatcttgtggaaagtcagagtgttgacttcaaaatcaaaactgta

SEQ ID NO: 689504 - DNA, 75 bp, Homo sapiens
aaagttcacgtggtcttcagcacagagcgctacaacccagaggacctggtggcaaatggggcccttgtcagcatc

SEQ ID NO: 689505 - DNA, 100 bp, Homo sapiens
accagagttacgggactcaactgcaccaccaatcaccccattaacccaaagggcctggaggctggaggctgtggacgggggccagagtggagtgccgcgc

SEQ ID NO: 689506 - DNA, 100 bp, Homo sapiens
aaattcgcctccatctgtaccatgttgctgggcatattggattttacccatcataggcgctgttctcttaggtttcctgtaccgctactacacatcggaa

SEQ ID NO: 689507 - DNA, 75 bp, Homo sapiens
ccatacaaatgttgccactgctgttttagaacatataaaggaaatgctggggctctctaaagtaccacttactca

SEQ ID NO: 689508 - DNA, 50 bp, Homo sapiens
agcgggatcatccagcacataggaatcagtgtcattcaaggacgtaactg

SEQ ID NO: 689509 - DNA, 100 bp, Homo sapiens
cttatgaccggctgagcccccatcattgggagaaatccccactcctccaagaaccaacccccaaattggctgggacagagtgttgcggagataggaacat

SEQ ID NO: 689510 - DNA, 82 bp, Homo sapiens
ctgcggtcatggagggagcaggagctggatccggcttccggaagtgcggcatcgtcctgggggcgctgctcttggtcttctg

SEQ ID NO: 689511 - DNA, 82 bp, Homo sapiens
gacaactttgtctttgacgggtcctccctgcctgccgatgtgcatcggtacatgaagatcctggtggagttgacagaagaga

SEQ ID NO: 689512 - DNA, 100 bp, Homo sapiens
aggatgatgacaacacgttgtttgatgccaatcatcctcgaaggtagtgggcagcagtcagtgacaggtgtaacctctgtggatgacagcaacagttact

SEQ ID NO: 689513 - DNA, 58 bp, Homo sapiens
gagaatgaggctaccatgtgccagaaaaatggctacaaacttcctagcacatgagaag

SEQ ID NO: 689514 - DNA, 119 bp, Homo sapiens
cgagacgaggagccgggccaaagatgatatcaagagggtcatggcggcgatcgagaaagtgcgcaaatggtgctggagaatctggtaaaagcaccattgtgaagcagatgaggatcctg

SEQ ID NO: 689515 - DNA, 101 bp, Homo sapiens
agaaatttcgttagtcatctaaatcagagacatcaatttgattatggagaatttgtgggatccacaaatgctaaagagctgtcttccaagggagtgaaaat

SEQ ID NO: 689516 - DNA, 50 bp, Homo sapiens
caggggctctgggagtggctgccaggttactggagttggctataatcaat

SEQ ID NO: 689517 - DNA, 100 bp, Homo sapiens
gaactttgggacaagtggattcttcagatgagaatttctctgcaaagaatgtccaaaaattcatattcacattgatcgtatcgacaaaaaagatgtccca

SEQ ID NO: 689518 - DNA, 83 bp, Homo sapiens
gacagagccgggcctagcccagagacatggagagttgctacaacccagaactgtggctgcaccatctgtcttcatcttcccgc

SEQ ID NO: 689519 - DNA, 97 bp, Homo sapiens
aacagtttggcgtgcaacatggggcttgagaaaggatgcccagacctggaggatccccagggtcttctcatggttgcagcaggaaggacacctctct

SEQ ID NO: 689520 - DNA, 75 bp, Homo sapiens
tccggatgctcatccataaaactgaagatgtgaatactctgtactcccctgccctcaacaagatgttttgccaac

SEQ ID NO: 689521 - DNA, 100 bp, Homo sapiens
cgcgcctgtagctcgcgggcctcgcaggtgaatggaagagaatccgaagaagaaaatctcaataaatctgaaataagtcaagtgtttgagattgcactta

SEQ ID NO: 689522 - DNA, 89 bp, Homo sapiens
ggaaaggagatcacagagaaagtgattacagacattgccgggttacaaggagaacatcatgcgcctctccagccttcacaaggaccgcc

SEQ ID NO: 689523 - DNA, 83 bp, Homo sapiens
gctttttccaggaactcacatgtcctgggaggattacaggccaagaagcttgagagaagaaaaatttcagaaaaattgtctca

SEQ ID NO: 689524 - DNA, 100 bp, Homo sapiens
aaaaataaagtgttgagtaaacagaccaagttgggttcccgtgtcagtggctatgatgacacctcaagttatcactccccagcaaatgcagcagatcctc

SEQ ID NO: 689525 - DNA, 97 bp, Homo sapiens
ggaagtgccccttagcgggtgggggaagctggtaggcacgggcggctccgcagtgaccggactcgggggaggtaaaataccatgaagattttgaaaa

SEQ ID NO: 689526 - DNA, 74 bp, Homo sapiens
tggtgttggaggaccctccctgcttcagcctccttctgaagaaataaaaacaggtgaggatgaagatgaggaag

SEQ ID NO: 689527 - DNA, 90 bp, Homo sapiens
caagaaaccccgatcacaaagatacgaatctcttaaggggagacgagttgtactgctgtcacaggaaatggacgctggattacaagcatg

SEQ ID NO: 689528 - DNA, 100 bp, Homo sapiens
cttgaatgttgaagatgtccttaccagctttgacaatacaggaaatgtttgttgtccatctgggactttcaaggccaaccaaggggatgaggcctgtacc

SEQ ID NO: 689529 - DNA, 75 bp, Homo sapiens
cggccagaagcgggcggcgcgggggagatgaatgagtctgcaggtcttaaacgacaaaaatgtcagcaatgaaaa

SEQ ID NO: 689530 - DNA, 75 bp, Homo sapiens
cccatctacacggatggcgaaggcgtcagcgtctccgctcctggaaaaacctgtgactgtggggatcatgttgtt

SEQ ID NO: 689531 - DNA, 138 bp, Homo sapiens
atcccagcacagctgagtgcccaaggatggtcagccgggtagggcaagaagcttctttcagggattctgatctcacggccactgcagaacaaattagacttgcacagatgatttcggaccataatgatgctgactttg

SEQ ID NO: 689532 - DNA, 83 bp, Homo sapiens
atatcgtatggaacgccccaaaatccaacagcagttctcagacctcaaggaactgtggctgcaccatctgtcttcatcttccc

SEQ ID NO: 689533 - DNA, 83 bp, Homo sapiens
tgcccaccctccaactttgcgacggaaatgtgtcatcgaaagccaggaccaacttggaggccttgcagaagaagctggaggag

SEQ ID NO: 689534 - DNA, 100 bp, Homo sapiens
gagccatggatgctgaccggggagtcaatgctgaggtccactactccctcctgaaagactgtgagtcgacacttcaggaacatacctgtgaatgaaaaag

SEQ ID NO: 689535 - DNA, 83 bp, Homo sapiens
cgagacatacaagtccaacctcaagatagcggagctgaagctgcgggaggcccccagccccgctcgggacgtgtacgaggagg

SEQ ID NO: 689536 - DNA, 98 bp, Homo sapiens
cttccccaaggagctgctgaagggcctggtggggcagagcccgtggcttcaggagcagctgtctcagctgctggtctcccacagtgacccagtcacgg

SEQ ID NO: 689537 - DNA, 75 bp, Homo sapiens
tgcatcgattctacatgattcagtccttcacacagttccctggaaattcatgatgctatggactcctactacgac

SEQ ID NO: 689538 - DNA, 100 bp, Homo sapiens
ctgagctggttggccctgtgatccctcaagactggtccacggagtgtatgaccacaaacagccatcaagagtaccaagttcgatccatagcaagtcatgt

SEQ ID NO: 689539 - DNA, 100 bp, Homo sapiens
gcattggggagcctggttagaactctgtaacctgatcacagacaaagagatggagtggagtcaacatatcaatggagcaagtcacagtcgtcgatgccag

SEQ ID NO: 689540 - DNA, 74 bp, Homo sapiens
cggcaagatgtccagtaatgtcccggcggatatggtgagaattatgaagatgatgacctagtaaattctgatga

SEQ ID NO: 689541 - DNA, 83 bp, Homo sapiens
catgatcaacctcgtcatgtcctacgcggtttttagaacttcagccataaaaatgggcagaattttccttgatcatatcggtg

SEQ ID NO: 689542 - DNA, 75 bp, Homo sapiens
cggggaccttgccttgcccgggggtgataaaagaaaatgtggctgaagttacccgaagttcagcttgcagtgtaa

SEQ ID NO: 689543 - DNA, 83 bp, Homo sapiens
cggcacgcgcacgcttgcgtgcgcgccccttttagcgtcacgcgctgagggacgcaggaaggaagctcttcgtgggcggtctt

SEQ ID NO: 689544 - DNA, 75 bp, Homo sapiens
cagagatgccaagaacaggaaacggaccaatgtctgtggctaccacccgatgccccatgaagtggagatcgcaca

SEQ ID NO: 689545 - DNA, 75 bp, Homo sapiens
cggagctgctggtttcattcgaggtttcgggccgagtggtggacatgacaacagagtcaactgcatacagtggca

SEQ ID NO: 689546 - DNA, 90 bp, Homo sapiens
ggtcagcacttaccggctgccccagatcgcgcgcctggacaacggtatggcctcacaagtcttggtctacccaccatatgtttatcaaac

SEQ ID NO: 689547 - DNA, 97 bp, Homo sapiens
actatgctaaggaaactccaaggcttgccttcaagaataactgcgaactacttccacttggagccagtgactatttggaactatcaaagaattttga

SEQ ID NO: 689548 - DNA, 50 bp, Homo sapiens
cgccgccgccgcccccgccgccaggtacggacattgctgcaggagaagag

SEQ ID NO: 689549 - DNA, 100 bp, Homo sapiens
cagctccttacccttgtctgccagttgtaccaggcagactggtgcgtgtggcctgctgcgcagttcgtgaacttcctcttcgtgcccccccaatttcgag

SEQ ID NO: 689550 - DNA, 100 bp, Homo sapiens
ggcggtccacggccggaatggcagcaagctcagggccgttgctccagggagaactgcaaatatcttcatccacccccacatttaaaaacgcagttggaga

SEQ ID NO: 689551 - DNA, 51 bp, Homo sapiens
gtgttgtttcagctgtattaggatctcaggaaacaggctcgacagctggaa

SEQ ID NO: 689552 - DNA, 100 bp, Homo sapiens
cagccatatcgcgctgggtgccgcttcgccagcgcccgaggcaagagggcacattgggagattcagcttgcaagagtcctgaatctgatctagaagactt

SEQ ID NO: 689553 - DNA, 83 bp, Homo sapiens
gacggcggcagcgctggactaggtggcaggtcagtcatatcatttggatcaaaaaatagaacaatcggagttgcagccaaaaa

SEQ ID NO: 689554 - DNA, 100 bp, Homo sapiens
gaaagtgttaattcccgtaaaacagttccctaagtgtaaacaggaacatcgataagtagtgtaaaaacttgcacaatgaaatccgaagccaaggatggag

SEQ ID NO: 689555 - DNA, 50 bp, Homo sapiens
accgctcctccaactaaccaattgttaaaggaaatgggctggcaggaaga

SEQ ID NO: 689556 - DNA, 136 bp, Homo sapiens
agcggtcgcgccggcaagagcagcgggagcggcgcggggaagggggcggtgtccgcagagcaggaggctgtaggagtgcaattggaacctgagcgcttggtcaagatcctagaggtgcttcgggaactccctgtcc

SEQ ID NO: 689557 - DNA, 76 bp, Homo sapiens
atggagctactagctgtgtaattaagaatccaacagacatcgctattgcggttccgaggcagtgggaagagatgcg

SEQ ID NO: 689558 - DNA, 75 bp, Homo sapiens
ggagccccagattcaacccgtgtacgtgcctgtgcctaaattacctgaccttaaagatgctgaagctgttcagaa

SEQ ID NO: 689559 - DNA, 75 bp, Homo sapiens
cggcgcgcggccgggctggcgatggaagatggaaggaaggagcgcagcggtcatcatcagatttgaaatatttaa

SEQ ID NO: 689560 - DNA, 75 bp, Homo sapiens
cggcagagacaccttctggcccggtgctacagctcgagagggcagagccacagtccctggacggcgtggactgag

SEQ ID NO: 689561 - DNA, 75 bp, Homo sapiens
gcactttactacaaagatggacttctctgtacagcacaaccagtgtctctgaagaagatgtctcaagtagatatt

SEQ ID NO: 689562 - DNA, 75 bp, Homo sapiens
ctgagatccagaggagtggaaggctcccccttgactaaagctgtggagattttcattttacctttatgtatttac

SEQ ID NO: 689563 - DNA, 75 bp, Homo sapiens
tcaactacagatactttgaagtagaagaagctgatggttatggattaaaaagtcacgtcagaactcatacaggag

SEQ ID NO: 689564 - DNA, 75 bp, Homo sapiens
gaaagacttgaaggcgtatacaggaacaatattgatgatgtagtaaggtatttcaggacagccaggagggggcgc

SEQ ID NO: 689565 - DNA, 95 bp, Homo sapiens
tggagctgtctggttgtgagcagggtctgcacgaaataaagctcctgggcaaggggacgtctgcagctgaacttgtgcaccatggacaattttgc

SEQ ID NO: 689566 - DNA, 75 bp, Homo sapiens
ctgtactgccggcacctcaaccagatgaggaagtacaactttgaggcttgtgacatcacgggaggactgtacctg

SEQ ID NO: 689567 - DNA, 75 bp, Homo sapiens
accacctgctccatttgcaagtagctacagcaagctgggtagcaggcagatccaaaggatatcatgaagtttcca

SEQ ID NO: 689568 - DNA, 75 bp, Homo sapiens
gcgtccaggcctgacagctctgcggctcgggccctgaggatgtacagttacccagcacgtgtacctcctcctcct

SEQ ID NO: 689569 - DNA, 98 bp, Homo sapiens
gggcgtctccgccggctactgccgcttcagttctcccggtgtggccacgagtcgggtcagactatgatgactggagaccgtctctggccagtttgctt

SEQ ID NO: 689570 - DNA, 90 bp, Homo sapiens
ggtcaaaggatgctgagtccggagcgcctagccctaccggactacgagtatctgggttttccaaggacacttccacaggcagaagcccta

SEQ ID NO: 689571 - DNA, 100 bp, Homo sapiens
gttacattgtcgctcactctgcccatcacgtgccacatttgcttggggaaggttatacattggctcttcaaagacgttcacctcatcagagaaatccctg

SEQ ID NO: 689572 - DNA, 75 bp, Homo sapiens
gctgatcccgagcagcgtcatgtacccctcaggatggcccaatggaatcagctacagcagcttgacacacggtac

SEQ ID NO: 689573 - DNA, 82 bp, Homo sapiens
tcagagttctctaaaaaaactggctgtgaataatatagctggtattgaagagtgccggtggtggtgtgcacattgagccccg

SEQ ID NO: 689574 - DNA, 97 bp, Homo sapiens
tcagaagaagatatcaacttcattttgaatgaagtgcgtaattacctgagttgtgatgttgaagggatgacttgtcaagctcgaacatcatatactg

SEQ ID NO: 689575 - DNA, 100 bp, Homo sapiens
ggacacccagcggtctgacatcgcgacgctgctcaaaacctcgctccggaaaggggacacctggttgtggcagcactgcctgaaggtatgagaccagatt

SEQ ID NO: 689576 - DNA, 74 bp, Homo sapiens
cagtgactacccctaacgcacaataatatggctccgatgggctcaaagagcacgaacttccaggagccggtgca

SEQ ID NO: 689577 - DNA, 99 bp, Homo sapiens
aacctggaggagaaggagaagcagatccgctccttcctgattgaaggtcctggtgcttgatggtcgaggccatctcctgggccgcctggcggccatcgt

SEQ ID NO: 689578 - DNA, 83 bp, Homo sapiens
acgtgaggatcaagaagccggactacaaggtcgcctacgtgcagctgacctgcctagagctggaacgttacctccagagcgag

SEQ ID NO: 689579 - DNA, 75 bp, Homo sapiens
agtagtgtgacatcgtctacctccttgtcagcctcgaaggagctccagcaagcccagacaaccagaccagaatcg

SEQ ID NO: 689580 - DNA, 51 bp, Homo sapiens
aaaattctgaactcaggacttggcaaactgtctcagctgctgccaagaatg

SEQ ID NO: 689581 - DNA, 100 bp, Homo sapiens
gccgtggtttttatcaccacacgactgggtatatttcctctctgatatgaagagaaggctactaaagacttggaacgatacaatagtcaaatgaagagag

SEQ ID NO: 689582 - DNA, 98 bp, Homo sapiens
gcagaggacgccggaacaccctggaagccgagaaatgaagtcctccagctctgcatcttccgaggcctcggaaacctgccagtccgttagcgagtgca

SEQ ID NO: 689583 - DNA, 101 bp, Homo sapiens
atggaagggcatggcaagactccacctcctggtgaagaaagcaaacacctctgaagagccaatccattcaggatgggaaaccacgcaggcaaacgagaatt

SEQ ID NO: 689584 - DNA, 50 bp, Homo sapiens
gtgaggagaccatagctgcacagccagagaatgccacgggtgacctggcc

SEQ ID NO: 689585 - DNA, 85 bp, Homo sapiens
aaaatcgtcttatagttgagaatttatcctcaagagtcagctggcaggagcatgatgtcaattttgatgaccatggaatgatggt

SEQ ID NO: 689586 - DNA, 100 bp, Homo sapiens
ctcatcttatgggagagaatcaaacttacagggttgccaccagacaatccatggacacaagggaccaatcactgcagtggcttttgctcctgatggaaga

SEQ ID NO: 689587 - DNA, 83 bp, Homo sapiens
ggcgcggtgcgcagtgggtggctccacctcgactgcgaattactgtttatgagcaggttacgggcaggacttgagtggcttcg

SEQ ID NO: 689588 - DNA, 80 bp, Homo sapiens
agcgagctgagtggttgtgtggtcgcgtctcggaaaccggtagcgcttgcagcatgaatgtccctcttccagtggaaagc

SEQ ID NO: 689589 - DNA, 82 bp, Homo sapiens
cgagaggagctgagcgagcgcggaaggtttgcatcgccagcttctatatattacggcctttttttttgctggatattatctt

SEQ ID NO: 689590 - DNA, 100 bp, Homo sapiens
cgcctggctcggagcagcagcctctgagagtctcactgtcgcccaggctgcagtgcagtggtgccatcacgcgtcactgcaacctctgcctcccggattc

SEQ ID NO: 689591 - DNA, 98 bp, Homo sapiens
gtggctctttggcatttggtgctgtggcaggcctgaattattggaacaactttggaaagccagagctgaaaaaaagaaactacgcaaaacgttgcggg

SEQ ID NO: 689592 - DNA, 98 bp, Homo sapiens
ccgcccagtgggcctggagcagctgcggcggctcggggtgctctactggaaggaccaagaatcgccttcagccctgtctggtgcatccttggcagaaa

SEQ ID NO: 689593 - DNA, 100 bp, Homo sapiens
gatttacactcggtatgtcctcagtcttctgctgcatgacagctatgactacgacctgcaggaacagcttcagtatcagacacagcacagcagccatctg

SEQ ID NO: 689594 - DNA, 101 bp, Homo sapiens
taaagaatttgtagaaacttatattaaagcttattacctaactgagaatgacatggaacggtggatcaaagagcacaggagtgttgcggagataggaacat

SEQ ID NO: 689595 - DNA, 100 bp, Homo sapiens
cttagaagtgggagctgaacggaatcctgggcattcccttgccccggaaacgccgtgtccaggccgacctaagccaggagccgcaggggcgggaagccgg

SEQ ID NO: 689596 - DNA, 90 bp, Homo sapiens
ggcctcatactctgttatagataaacaaggtttaagtttttgaaactgaagtaggcctacacagtaggaactcatgtcatttcttgtaag

SEQ ID NO: 689597 - DNA, 82 bp, Homo sapiens
aaacctggaccaggcacgggaagatgcccagaacattactactggatggaaatccattccgagttcctcgagcagccatatt

SEQ ID NO: 689598 - DNA, 90 bp, Homo sapiens
cgtcatctttctgaaatggtgatgaaattggaattgggtttacatgaggaagttggtgaaccatctaaagaagagaaggctgtggccaag

SEQ ID NO: 689599 - DNA, 100 bp, Homo sapiens
gcatattgtactggcctgctgctggcccgcaggaataaccgacggagcccgggcagggacatcaacgtgacgggtgtgtgggaacgcaatgtgactgggc

SEQ ID NO: 689600 - DNA, 100 bp, Homo sapiens
agcagagaatggagaagaaggttgattccaggtactagcaaaggccagacgtcttactcaacaacttccctgccaccacctccaccatcccatccggcca

SEQ ID NO: 689601 - DNA, 101 bp, Homo sapiens
gctccaggagcaagtactccaggaagcacagagctgtaccagtacacggcccacgttgccagtctattgaagacaatgaagtatatttgcctaatgatgaa

SEQ ID NO: 689602 - DNA, 74 bp, Homo sapiens
agacatggagagttgctacaacccagtatggacctgtctgccaatcaggacgaggagaccgaccaggagacctt

SEQ ID NO: 689603 - DNA, 75 bp, Homo sapiens
tcaagaagccgcggaattccaaaccctcacctgtagacaggtatgactacgtggaagtcttcgatggagaaaatg

SEQ ID NO: 689604 - DNA, 75 bp, Homo sapiens
tgcgccgcagcccgggcccaggccccggcagcgcctgggacaagggcttcataaacttcacttaccaaatacttc

SEQ ID NO: 689605 - DNA, 90 bp, Homo sapiens
cgggataccaagagaaccggaccagctgaataccacttgggtcgctcgaggaggaagagtgtcccaggggggaagcagtacagcatggag

SEQ ID NO: 689606 - DNA, 101 bp, Homo sapiens
cggccggcagcatccttggggagagcagcaccgaggccagcaagacgctgcccgccatcgagctccgggttgacaaatggtggggtaacagaaaggaactg

SEQ ID NO: 689607 - DNA, 87 bp, Homo sapiens
ctctttctggcctggaggctatccagcataaaataccatgaggagtttgagaagagccgcatgggccctagcgggggcgagggcatg

SEQ ID NO: 689608 - DNA, 75 bp, Homo sapiens
gtgaggccgaggccgggaggccgtgcccggaggtttacccaaggtccagcctagcccctaggcaccatgtcggac

SEQ ID NO: 689609 - DNA, 100 bp, Homo sapiens
agcagggcaccagagttgggacggcagccctcagtgcctgccatggactgggttctccaaaaaatgtggaatcctttgcatctatgctgagacattctcc

SEQ ID NO: 689610 - DNA, 108 bp, Homo sapiens
cttgagaacagaatacattgctgattatctcatgcaggaatcccgttctgcttccagaagtggaagtgctcacggatcggggaaatctgcaaggcatacccctgcaag

SEQ ID NO: 689611 - DNA, 75 bp, Homo sapiens
cagccgatccagcctgcggagcctgtggggcagtggacggaattgaccccaacttcaaaatggagcaccagaata

SEQ ID NO: 689612 - DNA, 98 bp, Homo sapiens
cagaggggcattatgcttcccagagctggaggctcccaggtgattttcacaaatcctttagaaatcgtcaagatccgtttgcaagtggcaggagaaat

SEQ ID NO: 689613 - DNA, 50 bp, Homo sapiens
atgctggcgacctatccagaatgatcaagagacggagtcttgctttgtca

SEQ ID NO: 689614 - DNA, 74 bp, Homo sapiens
cgagcgcctcgacctcggtctgagatcctatgaatgcactccagagcctgactggcggacctgctgcgggagcc

SEQ ID NO: 689615 - DNA, 50 bp, Homo sapiens
tcatgcacaaatttttatgtggaggtcatgctttcagaacgaaaaggcac

SEQ ID NO: 689616 - DNA, 95 bp, Homo sapiens
gggcagctgcggagcatgtcgaccccggcccggaggaggctcatgcgggatttcaagcgccagtaatgttaaagtagagactcagagtgatgaag

SEQ ID NO: 689617 - DNA, 83 bp, Homo sapiens
ggggctcagggccagtgctcactcttattggtaaaagtgctgtttgtacgcaaccttgccaatactgtaacagaagagatttt

SEQ ID NO: 689618 - DNA, 75 bp, Homo sapiens
atcagtgtggtcaccactgggctggaccgagagaatcctcactatggatgggctcattgaggacattaagcatcg

SEQ ID NO: 689619 - DNA, 83 bp, Homo sapiens
aaagtactttgtcggttacctaggagagagaacgcagagtttggctggtcgagtgaagcacattgttcaccaggccttctggg

SEQ ID NO: 689620 - DNA, 74 bp, Homo sapiens
cagagggctctgatctgtgcgacagaggtgaggtggctttgaccccgggttgcccggccagcacgaccgaggag

SEQ ID NO: 689621 - DNA, 75 bp, Homo sapiens
ctctgatttacagtttagaagatgagcagagggcggctacttccctgagaatgtcaaggccatgaccagcctgcg

SEQ ID NO: 689622 - DNA, 74 bp, Homo sapiens
ttgcagcgccagcagcttgcttatggcatctatgtcatccaccagattctgccatgtaaatgtcagcttgagtg

SEQ ID NO: 689623 - DNA, 73 bp, Homo sapiens
gcctccccaggaggcctgcgggagctgcagcttcgaagcctcacaggtgcacaagcttctcatcgtggtggag

SEQ ID NO: 689624 - DNA, 100 bp, Homo sapiens
tatagatccctctggaaagttgcacagccacagacttctcagcacagagtggggactgccttccattgtgaagtcttgagaaagatcagtctaaagaaaa

SEQ ID NO: 689625 - DNA, 100 bp, Homo sapiens
gactcaagttcgctgacaggtccagttgcagatacaaacttggattttttccagtctgatccttttgttggcaaaaacatcggttgtgaagagaaagcca

SEQ ID NO: 689626 - DNA, 100 bp, Homo sapiens
atctacctccatcaggaccccagatgtctgacagccctgtgtgacaccaagataagtaacgccaaccccttcaaggagcgaatctgcagggtcttctcca

SEQ ID NO: 689627 - DNA, 75 bp, Homo sapiens
gtcagagtgccggaccccagcacacagaagccgagacgacaaatttacatgtattggagaccagaccagaagccc

SEQ ID NO: 689628 - DNA, 80 bp, Homo sapiens
gctgtaaagccacccacaaacaaactacccattttcttttttggaactcatgagacaaaattacttttcccactgaaaca

SEQ ID NO: 689629 - DNA, 100 bp, Homo sapiens
ccgccaccgctgcccccgccgccgccgcccccgccgccagggggggccctcagcctcttggccttgaacgggctgttcatcttgattcacaaacacaacc

SEQ ID NO: 689630 - DNA, 100 bp, Homo sapiens
gtgtcaccgccgcccatcgagtcgaagcaccgcagcctggtgcagatcatctacgacgagaaccgggatgaatcaggcgccaaccgtgggctttgagcag

SEQ ID NO: 689631 - DNA, 100 bp, Homo sapiens
cccagaggtcatcagattgtttgcaaagaaacaaccaggtcagcttcggacaaggttagcagaggagtccccagagccaggcagggggatgaaccgcgag

SEQ ID NO: 689632 - DNA, 100 bp, Homo sapiens
gattgcaaagtgctatcaaggaaccacgctctcgtctggtttgatcacaagacgggcaagggtatttgaagtataccatacaactgttttgaaaatccag

SEQ ID NO: 689633 - DNA, 100 bp, Homo sapiens
ggcccacagtgggggtgtgcaaacccgagagaactggtggaagagaaagccaatacccacctcctcttgggcatgtgcttagacgcctgtgctcgctacc

SEQ ID NO: 689634 - DNA, 104 bp, Homo sapiens
gtgcctctccgacagcagatccaggctcggagctccagacgctgggacaggtgagaagccctaccactgcaactgggacggctgcggctggaagtttgcgcgct

SEQ ID NO: 689635 - DNA, 98 bp, Homo sapiens
acagcacgtaccagaggtggaagtccaagtcaaacgcagaaggactgcctcactgagcaaccaagagagctgacatggacccaaatcctcgggccgcc

SEQ ID NO: 689636 - DNA, 75 bp, Homo sapiens
ttccacatggcctacaacgtcatcacgccctttctcttgctcaagataatcttacagggacttaaacatttaaac

SEQ ID NO: 689637 - DNA, 83 bp, Homo sapiens
ttttatacttgcttttgcttcagcgttctgtggttgtcaacagcaggttcctgctccagcgtggctcctggactggcgccaga

SEQ ID NO: 689638 - DNA, 100 bp, Homo sapiens
aactcagatgggtttccaagcgttcattcaaaaacttgctgggtaatccccaggcctctatagctcagatacggactcagaggaagacgaagaattcctg

SEQ ID NO: 689639 - DNA, 108 bp, Homo sapiens
tgcgggctgagcggcgagtttccgatttaaagctgagctgcgaggaaaatggcggcgggaggtgtctgacttccagcaactgctggcctgtgccagggtgcaagctga

SEQ ID NO: 689640 - DNA, 100 bp, Homo sapiens
atggcaacaagtacaagcggcgggtgccccggctctggattaatcgaattacagctgctagccaggaacatggactgaagtatccagcgctcattgggaa

SEQ ID NO: 689641 - DNA, 75 bp, Homo sapiens
ctggaggtgcagagcgactactccagtgagaaagatcagtctaaagaaaaggagaagaaagtgaaaaaaacaatt

SEQ ID NO: 689642 - DNA, 75 bp, Homo sapiens
ggggaggacaacttcgcccgggacttcatggtaatggaactgctggtccatctgaataaacgtataaaaagccgc

SEQ ID NO: 689643 - DNA, 100 bp, Homo sapiens
caggccccggcagcgcctgggacaaggttgtggcagcactgcctgaaggtatgagaccagattctaatctttatggttttccatgggaattggtgatatg

SEQ ID NO: 689644 - DNA, 95 bp, Homo sapiens
ctaccaggtcacacactgttgcagcacagagaggagaaggaacgctggatacgggccaagtatgaacagaagctcttcctggccccactgccaag

SEQ ID NO: 689645 - DNA, 100 bp, Homo sapiens
gactcgccggccgagggtggccctaggggcagcgagcaagacagcaagcaggtggtctttgggaagaagcttcctgcctttgccaccatccccatccacc

SEQ ID NO: 689646 - DNA, 90 bp, Homo sapiens
cacaggcaggaggcatggccaaggctcccgtagggccattgaaatgtgaagaatccttcgtctatgaagtgtccccacatcaaaactgca

SEQ ID NO: 689647 - DNA, 98 bp, Homo sapiens
tgaggtttccggggaccacaatgaacaacttgctgtgctgcgcgctcgtgcatgggcattaaccatgacaatgaccacccatcgtgtgctgatggtct

SEQ ID NO: 689648 - DNA, 75 bp, Homo sapiens
tggagcgtgtcctgaaggagttccaccaggccgggaagcccatcgggcataatcaccagcaacacccgggacaat

SEQ ID NO: 689649 - DNA, 101 bp, Homo sapiens
agaccaacaacccagcagaaggaataaattccgcacacagcaatggtacaacagctccatgaacgtgatctgcacctggttgacggaccggatggacttac

SEQ ID NO: 689650 - DNA, 51 bp, Homo sapiens
taccgtgcatcgcacctatttaagagaagttgattcaagtcagttgagacg

SEQ ID NO: 689651 - DNA, 90 bp, Homo sapiens
ccgcggccggaccgagcgcctcgacctcggtctgagaacactcctatgccaccttcaccagctgtacaagtgcagggccagcctaacagt

SEQ ID NO: 689652 - DNA, 89 bp, Homo sapiens
ctataataatagcaaacatcgatggcctactggggataacattcatgcagaacatcaggtagagttggctttgtgggacacagctgggc

SEQ ID NO: 689653 - DNA, 53 bp, Homo sapiens
gccttctcctccgccggtcccatacggacctgatcttcaggtttgcatatcca

SEQ ID NO: 689654 - DNA, 75 bp, Homo sapiens
ccgcagcaaggacgtccgcagcagggagagatgacatgctggacgtggagaccgatgcctacatccactgcgtca

SEQ ID NO: 689655 - DNA, 100 bp, Homo sapiens
gcgggcagccttccaggtggacaggtgacaatctccaatagacttgtgtcttcaccttgctgcattgtgaccagcacctacggctggacagccaatatgg

SEQ ID NO: 689656 - DNA, 98 bp, Homo sapiens
attcctccaaagcaaaccaactgagaatgcagagcgatcgtcttctgatcaaaggaggtaaaattgttaatgatgaccagtcgttctatgcagacata

SEQ ID NO: 689657 - DNA, 100 bp, Homo sapiens
cttggcacttagaaccgcagcagggacgtcggtttgctatcgggactcggcgaggacggaatttatgcaaatattctcatgaggttctctcagaagagaa

SEQ ID NO: 689658 - DNA, 101 bp, Homo sapiens
tcatccgccacttccgcgagcccatccgtctcaagactgtgaaaccaggaatagccaggccagaagaaggaaggcctgtggtgagtgggacaggaaatgac

SEQ ID NO: 689659 - DNA, 98 bp, Homo sapiens
aacaccctgagtgcggatttctgctatgatgacagccctggaacagctgctgacagagttggatgacttcctcaagattcttgaccaggagaacctga

SEQ ID NO: 689660 - DNA, 75 bp, Homo sapiens
tgaggacatctctgcaaaggccccagcggcccagcctggaagctccgaccccaggagccagcccatcaacctgaa

SEQ ID NO: 689661 - DNA, 98 bp, Homo sapiens
gggcgctgacgccgcggacctccctgcgaccgtcgcggaccatgggcgacaaagggacccgagacacctatggctgccgatgaaggctcagcagagaa

SEQ ID NO: 689662 - DNA, 100 bp, Homo sapiens
tcctgcagcacgccgtggaggcggtatctcagatgaagacatcatcaacattactcttcctactggagtccccattcttctggaattggatgaaaacctg

SEQ ID NO: 689663 - DNA, 82 bp, Homo sapiens
ccctctgcccccccttccccacgcaaccccagatccatttacactttacagggtctgggaggacagctcatgagacaagcag

SEQ ID NO: 689664 - DNA, 99 bp, Homo sapiens
attgcgagaatgaggaggacaacagctacaaccgggggggttgatagttcttggggaggtacctcccccagagcatacaacagacttatttcttccact

SEQ ID NO: 689665 - DNA, 100 bp, Homo sapiens
acaagaaataagaatccttctaagggttcacagctgtaaagaacttgcctggagtctcagatgagactttggactttggacttttgagttgatgctggac

SEQ ID NO: 689666 - DNA, 145 bp, Homo sapiens
ggccgggccgccgccgctcaggaccgggcctcaaaatggccacacgcgtacccccgtagcggaaaaacgtactccaaagattcaggtttactcacgtcatccagcagagaatggaaagtcaaatttcctgaattgctatgtgtct

SEQ ID NO: 689667 - DNA, 99 bp, Homo sapiens
ccagccgctacaagacggagctgtgccgcccctttgaggaaaacggtgcctgtgtttgtaaaatgtatgaagaacatctgaaaagaatgaatcccaaca

SEQ ID NO: 689668 - DNA, 51 bp, Homo sapiens
cacttgaaataccggatgattttggaggagatatgtcagtattgaattctc

SEQ ID NO: 689669 - DNA, 100 bp, Homo sapiens
cccgccactccagaaatccaggagattgttgataagcattttgaaagcgaagcagaagccgtagaatcagcggcgagcctgttgaaagaacccacaggtg

SEQ ID NO: 689670 - DNA, 100 bp, Homo sapiens
cgcggctggtcggtcccaggtcccggcctccgtaatgagagcccggaaccactctttgtgccgcagcttcgcagctgataggaagatgtcttcaggaaat

SEQ ID NO: 689671 - DNA, 97 bp, Homo sapiens
tgcagcctcaacttcttgtcctcaagtgatcctcccaccttagcctcctaagtagctgggaccacagatactgggtcgtcaggatggagttttgcaa

SEQ ID NO: 689672 - DNA, 100 bp, Homo sapiens
agaaatagtgcagaagatagaggaagtactttctggggtcttagatacagaactacgatataagccagctatcatggtgaacttacttcagattgtgcgg

SEQ ID NO: 689673 - DNA, 109 bp, Homo sapiens
cggcgtgccccaccatgtcagacgcagccgtagacaccagctccgaaatcaccaccaaggatgatcggctgaatgtaacagaggaactaacgtccaacgacaagacgag

SEQ ID NO: 689674 - DNA, 76 bp, Homo sapiens
gatgcagcttttcagcaagctgtgaggactagtcatggcagaagacctccagaggaagaaggcacctacgatcaaa

SEQ ID NO: 689675 - DNA, 76 bp, Homo sapiens
agtcatcgagaggaccttccacgtggattctccagacgagagacccaggacccgcctgccacaatggagctggccg

SEQ ID NO: 689676 - DNA, 100 bp, Homo sapiens
agagcaatcgccgggacagctgcaagagcttggggcttccttggtcgcacccaccacctgcctgcccactggtcagccttcagggaccctgagcaccgcc

SEQ ID NO: 689677 - DNA, 75 bp, Homo sapiens
ctgctcaaagccctgggtcgcttggaagaagccaaggttcatgaaggattcctggagagtaaagtgtttatttca

SEQ ID NO: 689678 - DNA, 124 bp, Homo sapiens
gccgcggcccggaatcggggcgcttcgccccgggccccccagcatgaagaccccggcggacacagacaatgcagatcttcgtgaagactctgactggtaagaccatcaccctcgaggttgagcc

SEQ ID NO: 689679 - DNA, 75 bp, Homo sapiens
ctgggctgcaggctctcggctgcagcgctggcccacaagagtgaacagatactgaaagcggccagtctccaggtt

SEQ ID NO: 689680 - DNA, 100 bp, Homo sapiens
gggatcgaggggtgagggcgctatggcacccggctgcaaaaatgccagtatggacagaatagcttatgatgcttatccccacccaccacttccgaaacat

SEQ ID NO: 689681 - DNA, 74 bp, Homo sapiens
tccctactacaggactgcggacaagggctggcaggttttaaaatcaaagatgggaaaatcggagaaaattgccc

SEQ ID NO: 689682 - DNA, 97 bp, Homo sapiens
tagaactcagttgtgcgttgcggccagtcgccactgctaccatggcaaaagttataaccaccgtactgaagttccctgatgatcagactcagaaaat

SEQ ID NO: 689683 - DNA, 147 bp, Homo sapiens
acagagtgtagttgggaccatttatatgtttatgatggggactcaatttatgcaccgctagttgctgcatttaggttcctagaaggtgagcgcggacggtatgcaaagttgtgaatccagtggtgacagtgcggatgaccctctcag

SEQ ID NO: 689684 - DNA, 50 bp, Homo sapiens
gtggctgaaatcactccaaaaggcagagggagaagtctgttggaacttgg

SEQ ID NO: 689685 - DNA, 83 bp, Homo sapiens
gcaactgaggcagcggcaggctcaggtgcagccgctgacaactcgagagatgatcgctcgttctgctgctaccctcatcacac

SEQ ID NO: 689686 - DNA, 82 bp, Homo sapiens
cgtcttgcctgtgtcccacttgttcgcggcctatagataattcgtgtccagtccccggatggagtgaagcggatcacagcaa

SEQ ID NO: 689687 - DNA, 50 bp, Homo sapiens
tccacaatgactatgatgaattcaactgtagagatggggtttcgccatgt

SEQ ID NO: 689688 - DNA, 98 bp, Homo sapiens
caatgcctccactgactatgacctatctgacaagagcatcaaccctctgagagaccaggagcactacagagaatttccagaggcaaattttgaattga

SEQ ID NO: 689689 - DNA, 100 bp, Homo sapiens
caggctcgcctcgactccaaatggttgaaaacagatatacagaggaggaaggaagagacttgagctgttgtgtagcttctcttgttcaagtgatgctgga

SEQ ID NO: 689690 - DNA, 121 bp, Homo sapiens
ctcccttcgcctccaggatgcgctgagccctacaacacccccagcggccgccggctcccccacgaggaaaaccaattctgtgtcctcggaggaccacagcccagttgggccccaggcgaaa

SEQ ID NO: 689691 - DNA, 157 bp, Homo sapiens
ccccaacttattgctgtagaggctacctgagctcattgtccctggagatggaccaaatagaagaataagcagtgcctgtgtgcataagctgtggccatgactactgaagtaggctctgtgtctgaagtgaagaaggactctagccagttaggaacag

SEQ ID NO: 689692 - DNA, 96 bp, Homo sapiens
atttttacaaaaacttgttgtttgttggctattttactgaagacaacaaatagagcctctgagtcagtggatcggtggggaaaatgctgcttaccc

SEQ ID NO: 689693 - DNA, 82 bp, Homo sapiens
taagagcctggtgagacggagctatcggcgccgcggcaagagccagcaggatcctaaggcctttgtagtccttcagccactg

SEQ ID NO: 689694 - DNA, 88 bp, Homo sapiens
tcatctgttactataacacctaccagagccaactgggagccgggatgggaaactactaaagtttgatgcaccagactttggcctgatg

SEQ ID NO: 689695 - DNA, 100 bp, Homo sapiens
ctgcggcgcgctgctggacgaagagctctcctccttcttcctcaactatctcgctgacacgcagaccctgtattcagtggatcagctggcaccacccaaa

SEQ ID NO: 689696 - DNA, 100 bp, Homo sapiens
ccaggaactgtggccaaagaccttaggagagacgagcagccttcagggagcgtggagacaggtggattttgcaaatcgttttgttggaggtggtgtaacc

SEQ ID NO: 689697 - DNA, 75 bp, Homo sapiens
tttccaacacagatgtccaagctgccaatactatactggcaattgctggagaagattttgcaattgttgcttctg

SEQ ID NO: 689698 - DNA, 80 bp, Homo sapiens
tagaggctgaggaaggccgtgttgtttgtctacctgggactaggcaccatgggccggcactgccacgttttccaaggaac

SEQ ID NO: 689699 - DNA, 100 bp, Homo sapiens
caagaaggcggtggtactgcatgtgcttccagaggagcccaaaggccaagctataacatcagaaatggtgaatgaatacaagaaaattcttttgctgaaa

SEQ ID NO: 689700 - DNA, 90 bp, Homo sapiens
aggatgccgaggaaaaggatatcaggactggaatggctcttacagcaagatccgcccggattgcatttctacaaggcgaaagaaaaggtc

SEQ ID NO: 689701 - DNA, 98 bp, Homo sapiens
aactctatcccaggaatacagctttgcattaggatgaatttcacccattcatcgaggcacttcttccacatgtccgtgcaattgcctatacttggttc

SEQ ID NO: 689702 - DNA, 98 bp, Homo sapiens
gcaagagcccgcaggctaccttccccgggcaggggcgctcaacccaaccggctccagggcactgaattcagaaggaacttgcagaaatcacattggac

SEQ ID NO: 689703 - DNA, 51 bp, Homo sapiens
ccgggcctccaaggaacttaagcaaaggtacttgaagaaacagaagctcaa

SEQ ID NO: 689704 - DNA, 100 bp, Homo sapiens
ccgcagtatcatgctggccaagaagatcatcattaaggacggaggcacggatcttcaagatgaagttcaaagggagaatactaatctgcaaaaactacag

SEQ ID NO: 689705 - DNA, 102 bp, Homo sapiens
cgctgaggcgggcgttttcttggatgaattgcttgctttggaggttaaacccatccagagtaatggctgcggccttacccaggaccctgggggagttgcagc

SEQ ID NO: 689706 - DNA, 75 bp, Homo sapiens
cggaaatcagctctacagttcaggatatgaacgagactgccaaacaagaagatattttggaatccacaacagatg

SEQ ID NO: 689707 - DNA, 51 bp, Homo sapiens
attcattgaggaccagtcaattctaaactttcatcagagaagatatgaaat

SEQ ID NO: 689708 - DNA, 98 bp, Homo sapiens
cactggcgtctcacgggctatgaagacggaatgcctcttaatgccggaattccaagacggaatgcctcttaatgccgaaccacatccctgtgtttagt

SEQ ID NO: 689709 - DNA, 133 bp, Homo sapiens
tatggaacccaagcagtggcgaagggaatcgcaaggctcttccctgaccattttctactgtccctgcgcgaggaaatctggcattttttaaagtttgcgccccacaaagaggaaatattccaaaggtactcag

SEQ ID NO: 689710 - DNA, 100 bp, Homo sapiens
aggcgctccacaatgggacactgagctttgtggaagcatttggcggcataccaccctgcactgtgagcctagatgatgaactggattctttccatgattt

SEQ ID NO: 689711 - DNA, 75 bp, Homo sapiens
aatgggaattctcttcactagaatatggagactgttcaatcaccagggcctgattgttggcaaaggcatcataag

SEQ ID NO: 689712 - DNA, 74 bp, Homo sapiens
ggagaagctatagactacttctactccaccaggaaggagccctctggcacaaatggaagaagaaagaagggagc

SEQ ID NO: 689713 - DNA, 51 bp, Homo sapiens
aatcgaggagctgcggctctaccccccggaagttatggtgaatggttgcat

SEQ ID NO: 689714 - DNA, 100 bp, Homo sapiens
aagaaagcaaaccaagaacctctctgatggcgtttctcagacaaatgggactggtaacgttcaaggatgtggccgtatgcttttcccaggaccagtggag

SEQ ID NO: 689715 - DNA, 99 bp, Homo sapiens
tcgagccgcagcacgagctcaaattccgagagacggtaaagaacaggtccaagaaaagctcaaagaaagcaaataccagcagcagcagtagcaacagca

SEQ ID NO: 689716 - DNA, 74 bp, Homo sapiens
ggcaagctgggcttcctggccaaaccaccatcatgggttcgggtcccatagaccccaaagaacttctcaagggc

SEQ ID NO: 689717 - DNA, 58 bp, Homo sapiens
actctgtccagttttcaaaccacacagatggagtcatcagaacccactgtgaggaagt

SEQ ID NO: 689718 - DNA, 95 bp, Homo sapiens
acaagtattctgaagctttgaaggatgcccaggagaagctggaactggcagagaagaaggctgctgatgaaacatatctaccttacatgatccgc

SEQ ID NO: 689719 - DNA, 100 bp, Homo sapiens
ccccgaaggccctatcaggacatggagtatgaaagacggcttttgatgaagccattgctgaacttgatacattaagtgaagagtcatacaaagacagcac

SEQ ID NO: 689720 - DNA, 110 bp, Homo sapiens
ggaagccctgagggcagctgttcccactggctctgctgaccttgtgccttggtgctggagaatctggtaaaagcaccattgtgaagcagatgaggatcctgcatgttaat

SEQ ID NO: 689721 - DNA, 101 bp, Homo sapiens
gacggcaatcgcacctggggccgcctaacaggtacccatggccacatgaaatgcagctttgatgggaagctaaaatctcaagacacagtactgatgaacct

SEQ ID NO: 689722 - DNA, 74 bp, Homo sapiens
cgccctcggggtggcagttcccgttaaccttagccacaaagtcaaagtactatactggcaattgctggagaaga

SEQ ID NO: 689723 - DNA, 99 bp, Homo sapiens
ttacgggagcaagccaccccactgtgtgcagcccagaagttgagcctgagagatgcttgcacataccacccaggtgttccggtctttcacgatgcatta

SEQ ID NO: 689724 - DNA, 88 bp, Homo sapiens
cctcttgggacatgggctcgacgacacaatccccatcactggtgcagtatggtccccagtcccaagcggaagttggaagaaccagttc

SEQ ID NO: 689725 - DNA, 75 bp, Homo sapiens
ggcgttatgctgttgcccggttgcgacaggccgatgatgagcttttctgggagaagaggctacaaggacttagtg

SEQ ID NO: 689726 - DNA, 100 bp, Homo sapiens
cagaaggtcgcgaaggcagtaccgtttcctcagcggcggacaagttggatggcttgaggactggtactaaaaggaaacgtgactgggaggccattgccag

SEQ ID NO: 689727 - DNA, 100 bp, Homo sapiens
ccttcctaggagaaatcgaggagctgcggctctaccccccggatgctctctcagaggaggagaaaactactctgcgtgcagggctcatcaccaacttcaa

SEQ ID NO: 689728 - DNA, 75 bp, Homo sapiens
tcagaagatatagaacttgggggcccaagggatgcagacagtgatgaaaacgacaaaggtgaaaagaagaacaag

SEQ ID NO: 689729 - DNA, 83 bp, Homo sapiens
cctggctgtcatccgccacttccgcgagcccatccgtctcaagactgtgaaaccaggtgggaaggatacgagcaagataaagc

SEQ ID NO: 689730 - DNA, 100 bp, Homo sapiens
gtcatacgggaagagagagtaagagacctcagttggatgaacccattccactgtatgaggcaaaagtttccatggaagctgttcagaaaaatcaaggaag

SEQ ID NO: 689731 - DNA, 80 bp, Homo sapiens
caacaacctcaatgagaagatcaagaaggatgggaacccaccaagaccaacctggtcacattcttccataccgacctcag

SEQ ID NO: 689732 - DNA, 83 bp, Homo sapiens
tgaagttcgagcactaatatttaagaaagaagatgttaactttcaggtaaatataaatgtaggtgcataatatagactttttc

SEQ ID NO: 689733 - DNA, 75 bp, Homo sapiens
ctctaggccttttagaaaacatgcaccactgggagtctgagtgcgattcagaagatgacgcgggtacgagtggtg

SEQ ID NO: 689734 - DNA, 124 bp, Homo sapiens
aaacgggaaagatggcgacggctccgcgacgttgaggccgcgttgggcggttcagactcagggtggagtggtcacacgttacttgccttctggttttcccgccaagagggaaaactaaaccgac

SEQ ID NO: 689735 - DNA, 115 bp, Homo sapiens
gaagacaaagatgtgaagaccaagaaggatgattctcactcagcaggtcggatcatgctaaaaggagataatattactctgctacaaagtgtctccaactagaaatgatcaatga

SEQ ID NO: 689736 - DNA, 102 bp, Homo sapiens
aaaagtatgctttagaaaaagtgccaaaagtgggtagaaagtttcataggataggactccctcctaagacatggagattaagtagcttgcccaagatcaccc

SEQ ID NO: 689737 - DNA, 83 bp, Homo sapiens
ctccatgttgtcccctcagcgagtggcagcagctgcctcaagaggagcagacaatgcagatcttcgtgaagactctgactggt

SEQ ID NO: 689738 - DNA, 75 bp, Homo sapiens
gcacactttccagcagcatcacctgcacagaccaggtgctggagaatctggtaaaagcaccattgtgaagcagat

SEQ ID NO: 689739 - DNA, 100 bp, Homo sapiens
gacaggagttcatctacccggagaagcaggagccctactcggcaggttatgaagacagtatggagtttccagaccatagtagacatttgctacagtgtct

SEQ ID NO: 689740 - DNA, 100 bp, Homo sapiens
acgtggacgcctttttccggacaggtggctcccggctgcctctgctgcagttcagagcaacttcaggagcttcccagccgagagcttcaggacgcctttc

SEQ ID NO: 689741 - DNA, 50 bp, Homo sapiens
tcgagttcttcgtgctgctcaaggtttacccaaggtccagcctagcccct

SEQ ID NO: 689742 - DNA, 75 bp, Homo sapiens
ggaggagccaggtccctgtctgagccagcgcagtaacagtatctccaagtcccctggccccagctccccaaagga

SEQ ID NO: 689743 - DNA, 100 bp, Homo sapiens
atctgatgggtcattatgaccagagtattgccgcggtggaaatggagtggaaggactttgtgaaggaattggtgctggattagtggatgttgctatctgg

SEQ ID NO: 689744 - DNA, 74 bp, Homo sapiens
acaggccgaactgctgtatgggctcttgtctttctcgagaagcaggtggaaacatgagcattcagtttcttggt

SEQ ID NO: 689745 - DNA, 74 bp, Homo sapiens
tttgcctttgttgattaactggacaaattcagactgctgcagtaagaatgtcttttccacctcatttgaatcgc

SEQ ID NO: 689746 - DNA, 100 bp, Homo sapiens
gtaaacggggctgctggtgggccgcgtcgaagacatggaccagggctacggagcgtttgcctcagcatggagggcggggccgcggcagccacccccacag

SEQ ID NO: 689747 - DNA, 100 bp, Homo sapiens
ctgagctaaacttcaccaaataatagctgtttgtattttggctgctgcaggagccattttagggaaggtgaagaaggagctggaccctgacgacagccat

SEQ ID NO: 689748 - DNA, 100 bp, Homo sapiens
ggacctcctagccagttacattccagaggatgaggcgctgatgcttcgggatggacgggtacagccaaagaccggagctttggagagatgaagtttaaac

SEQ ID NO: 689749 - DNA, 99 bp, Homo sapiens
catggccatgtccgtgagcgccgaggacgacgactatgaatcggagccggaccaggtctcctctgagcctccggcctccataagacccaaaacagatga

SEQ ID NO: 689750 - DNA, 95 bp, Homo sapiens
atggagcgggcagaggatgcagtggaggccatcaggggccttgataacacagagtttcaaggtcatcatcagatttgaaatatttaaagtggata

SEQ ID NO: 689751 - DNA, 83 bp, Homo sapiens
gactgactggggttctgagactccctgtcccggaccgcaggtcaaaatgcagatcttcgtgaaaacccttaccggcaagacca

SEQ ID NO: 689752 - DNA, 75 bp, Homo sapiens
gttttggcgagagtttgtggaagatggcgcctgttgtgacaggcaatcagaaacggagactgttcatctgtttat

SEQ ID NO: 689753 - DNA, 101 bp, Homo sapiens
actatgctgaccgagaggcacgagaactctggtcccggctacagacagtggagatgcaccctgcctacaccgaggaagagctgaggcgctttgaagaggag

SEQ ID NO: 689754 - DNA, 80 bp, Homo sapiens
agggtgtacaaatacccctttgaattaattatggctatgctgggctcttgcactgtttggtggaaatggtgagacaggat

SEQ ID NO: 689755 - DNA, 114 bp, Homo sapiens
aagaaagggaaggggaaaaagaagcagtatctatgcccatcgcttatcaacactgcaagctgtgctggattctgctgctgaaaagaaatggcaagtgactgctatcaatgtggg

SEQ ID NO: 689756 - DNA, 90 bp, Homo sapiens
gctgctgaatgactacctgaaccgcatcttttcctcttctgaacatgcacccccagcagccaccagcagcttgtctttaaccgaactgtc

SEQ ID NO: 689757 - DNA, 100 bp, Homo sapiens
ggaacatgcgctttgccaagaagcacaacaaaaagggcctaaagaagatgcaggaatggacttggctctgtaaaggatggggaacctcacttcgtggtgg

SEQ ID NO: 689758 - DNA, 87 bp, Homo sapiens
tcaacaaggcttcgattaacatgctgaggattgtagagccatatattgcatggggggtggttctcttcccaaagtggaagccaaatt

SEQ ID NO: 689759 - DNA, 75 bp, Homo sapiens
ggaaggtactgcaccatctgaaaatggtgaaactaaagctgaagagataatgtgcactttcaaaactcagcacag

SEQ ID NO: 689760 - DNA, 100 bp, Homo sapiens
cctcagtcatctgctccgacaagacgggcacgctcaccaccaatcagatgtctgtctgccggcttcaagaatccagaggctttaggaagaagataaaacg

SEQ ID NO: 689761 - DNA, 97 bp, Homo sapiens
tagctcacaggttacagccagcacatcgaggatgtccggcttccagatcaacctcaacccgctcaaggagccactcggcttcatcaaggtcctcgag

SEQ ID NO: 689762 - DNA, 100 bp, Homo sapiens
ccatcagcccactccagatagctgcatcatcagcatggttgtgggccagcttaaggatcaagaattggttaaaatagttggaatacgatatgaagttggg

SEQ ID NO: 689763 - DNA, 51 bp, Homo sapiens
ttggaaagcagtttttaagacaacaaaagctgatgaagcattgaaagccaa

SEQ ID NO: 689764 - DNA, 75 bp, Homo sapiens
atcgattgcaccatgctcacccctgagccagttttaaaatgtggacgagtgctcactagcagaaaaaacctgtgt

SEQ ID NO: 689765 - DNA, 100 bp, Homo sapiens
ggcgcatgcctgtaattccagctaattgggaggctgaggcaggagaatcgcttaaacctggaagatggaggttgcgtttgcattgagactccttgcattc

SEQ ID NO: 689766 - DNA, 100 bp, Homo sapiens
cggccttcccatcaccatcacagagagcgatcttcgacaaaatttggatgccctcctgaaccagctgaaaagcttccctgcccggttgcgacagtatgcg

SEQ ID NO: 689767 - DNA, 85 bp, Homo sapiens
tgatctgtgccggctacagggaaggagggaaggacgcttgcaagggatggtcttttagtaagaacaaaaactgaagatatggtat

SEQ ID NO: 689768 - DNA, 90 bp, Homo sapiens
agatgtgtgcacactgatgatgtgcctccaggacaaaggactggatatcaatgcttacaattgtgaagagcccacagaaaagttaccttt

SEQ ID NO: 689769 - DNA, 75 bp, Homo sapiens
gccctggctgcctcagccctaccagcactggtcatgtctaaaggtgatctcaggcaatgaggaccctgagggagt

SEQ ID NO: 689770 - DNA, 129 bp, Homo sapiens
gtccagcagatggcggatgccctgcagtacctgcagaaggtctctggagacatcttcagcaggatttttagactctgaggagcagttggagctaatccacattatggaaatggaaaccaccgaacctga

SEQ ID NO: 689771 - DNA, 100 bp, Homo sapiens
gacggcatcagcttccaggcaggcctgaaggtcgaggtcctctggatgtcagcatggcagccacaaacctggagaaccagctgcacagcgcacagaagaa

SEQ ID NO: 689772 - DNA, 90 bp, Homo sapiens
gtctgaaaaacctgctggaagagacacagtagatttgtttacctacaaaatgcttcggtatccatatttttgtagaatgtataaagaatg

SEQ ID NO: 689773 - DNA, 100 bp, Homo sapiens
ctcctgcactgggctcctgtagaggaggctggagattccacccaaatcctcttctccaagaagaattggcagagggggtcgatttgggaggaaaggtgtg

SEQ ID NO: 689774 - DNA, 104 bp, Homo sapiens
agagagcgagctgagtggttgtgtggtcgcgtctcggaaaccggtagcgcttgcagcatgcatgacgtatcccagactttactcaaggcaacactggacagtgt

SEQ ID NO: 689775 - DNA, 100 bp, Homo sapiens
ccacaacctcaaccatggcacctccatccgcgaagacatcctgagccgtgtaaagccagtggaatatagtcagatgtacagttatagctacaaccagtat

SEQ ID NO: 689776 - DNA, 75 bp, Homo sapiens
tctctcgcccacattttccccaagcactctcaggaacctggcaacagcatccttcggaaagctctggacaagatc

SEQ ID NO: 689777 - DNA, 101 bp, Homo sapiens
ggctccatgttgtcccctcagcgagtggcagcagctgcctcaagaggagcaggacatgaaagatcagatgtcaacttcatctgtgcaggcattagctgaaa

SEQ ID NO: 689778 - DNA, 83 bp, Homo sapiens
tattcattgtttgcaacctgctactggacgctggagaagtgacttaagagattaaaattaatttggttgctgttggttctgaa

SEQ ID NO: 689779 - DNA, 90 bp, Homo sapiens
aggacccccggaatccgcacaatgaccgctttgtgctctccaaggccaaccccttcaaggagcgaatctgcagggtcttctccacatccc

SEQ ID NO: 689780 - DNA, 98 bp, Homo sapiens
ttatccatgttttcaggcccgatatctctccctattttggcctattctatgagattattcctgattctaagataaatgtgccagagttacccactcct

SEQ ID NO: 689781 - DNA, 100 bp, Homo sapiens
cttagctggacccgtctgggagctatcatggtgaacttacttcagattgtgcgggaccactgggttcatgttcttgtccctatgggatttgtcattggat

SEQ ID NO: 689782 - DNA, 78 bp, Homo sapiens
gatgatgatgaagatgatgatgatgatgaggagtctgatgaggaagctgtgaagaaaaccaacaaatgtgtactagtc

SEQ ID NO: 689783 - DNA, 100 bp, Homo sapiens
agatggaagtgatgtaccatcatgggtagcctttgataaacaggacactggggttgggaaatcaagcatcgtgtgtcgatttgtccaggatcactttgac

SEQ ID NO: 689784 - DNA, 99 bp, Homo sapiens
caggcattccccgcgcccctccagccctcgccgccctcgccaccgctcccggccgccgcgctccggtacacacaggcttaatgccagaccgggagttgg

SEQ ID NO: 689785 - DNA, 73 bp, Homo sapiens
agttggaataaacctcttttccatcatgtatactggagcaccgtgctttccatctgatggtcccctggtgtgt

SEQ ID NO: 689786 - DNA, 100 bp, Homo sapiens
atgctgagaaaacagacagatttgtcatgaagaaactcaatgatcgtgtcatgagaggaattgcaacccagtgaagaagttacctggaagtaaagactgg

SEQ ID NO: 689787 - DNA, 100 bp, Homo sapiens
tccagaaaatcttgtggacaaatccaggggaaggccaagtcctgtatctgccatgtctgtggcgtccacctcaacaggctgcattcctgcctctactgtg

SEQ ID NO: 689788 - DNA, 80 bp, Homo sapiens
aaccacccttctacaagaacatgatgatataagtttgagaagctttctaaaaccaatttttccaacaacaacgatttccg

SEQ ID NO: 689789 - DNA, 82 bp, Homo sapiens
gcctctcagaagaagatttctccatttattcaagtttggtgccctggttgtcagatgttggaaagcagtaggacggaacata

SEQ ID NO: 689790 - DNA, 100 bp, Homo sapiens
gaggctcagagatgcctgtaccgtgatgtgacgctggagaacctggcacttatgtcctccctggttatggaaattcttgaagcccaatactccactggaa

SEQ ID NO: 689791 - DNA, 50 bp, Homo sapiens
gtctggatcacggatgtaggaagtgccagagtcctggtggaggacgatga

SEQ ID NO: 689792 - DNA, 75 bp, Homo sapiens
tcagcatcacaactaatcaggctgatcgtctggtagaatcaacttccttgagaaaagccatagaaacagtgtatg

SEQ ID NO: 689793 - DNA, 100 bp, Homo sapiens
ggcactttccatgaatactgagaatgccaaagtaaccagatctaacatgagtggccgtaacatcccgtcctgactgctactggggccgtaactgccgcac

SEQ ID NO: 689794 - DNA, 100 bp, Homo sapiens
tgcctcgaccacactcacctctctctgctcatgcagaacattctagtatgccagtagaaaaaaatatcactttagaaaggccttctaatgtaaatctcac

SEQ ID NO: 689795 - DNA, 51 bp, Homo sapiens
agtcaactgcgtggaagagaagatcaatgaactgagccatgttcaaatccc

SEQ ID NO: 689796 - DNA, 100 bp, Homo sapiens
ggaacagttggccaaggaagtcagcttctcagagctcaagagtaggcctggaaaatccccagagaggagtcacgtctcttcggagccctacgagcccatc

SEQ ID NO: 689797 - DNA, 84 bp, Homo sapiens
cataacggggttcgggtgtctcgtgtgtgaacatcacagggggatatgagactttctactcggaatatcctgagtgttgcgtgg

SEQ ID NO: 689798 - DNA, 50 bp, Homo sapiens
cagccttcccagtagctggaactacagatacatttgctgcaattccatgg

SEQ ID NO: 689799 - DNA, 115 bp, Homo sapiens
agaccctggagcctcagttggaagcagccgatccagcctgcggagcctgtggggcaggatggatagaatgacagaagatgctcttcgcttgaatctgttgaagcggagcttggac

SEQ ID NO: 689800 - DNA, 50 bp, Homo sapiens
ccgagagcaccagcgacaaacagatttctgctcatggcagatcttcttcc

SEQ ID NO: 689801 - DNA, 100 bp, Homo sapiens
ttaaatgttgatacaaacacattagaatcaccatttagtgacttgaacaacctaccaagtgatgtggaaacagtactgctggagcaccctttcagtgctg

SEQ ID NO: 689802 - DNA, 75 bp, Homo sapiens
catccctcgtgaccacccctacatccagtacaatgacgagttccagttattacagagaaatttcatggacaagta

SEQ ID NO: 689803 - DNA, 50 bp, Homo sapiens
gaatttccatgtcaacatagtccaggggatggccaggtggattttgatga

SEQ ID NO: 689804 - DNA, 95 bp, Homo sapiens
tacaacctgccagcctatgctccatacctgccctgcgagggagctgtgattggtatagacgatgaggacgacagcaccttcacaataactgttga

SEQ ID NO: 689805 - DNA, 82 bp, Homo sapiens
cgcgggcgagcggctgtgtggatgtcggcgaagccgcgggcgaggtcgcaatggaagaagagatcgccgcgctggtcattga

SEQ ID NO: 689806 - DNA, 82 bp, Homo sapiens
cctggagtacaacgaggtcaacgtcaccctggacctgggccagataacgaaggaggcccaacttcattcaataaggagcctg

SEQ ID NO: 689807 - DNA, 98 bp, Homo sapiens
gaaaatggaacagcaacaattagagggcatacataatcttgctgctatgcttcgaagctgtagtctgaatcaacctaagttttaaacagaaggtgaac

SEQ ID NO: 689808 - DNA, 83 bp, Homo sapiens
aggagacgctggaggacagcccgcaggtctccaattgagaaacatggcactgtttttcctgcactctacccacctattgctgg

SEQ ID NO: 689809 - DNA, 75 bp, Homo sapiens
gggccctccccagagtccaatggatcaacacagccaaggcacccagtcagtcagagtcagagccagagaaggctc

SEQ ID NO: 689810 - DNA, 75 bp, Homo sapiens
gtcttccaggccatcaagggtttccgcaatgcccctgttatataaagatgaagcgcagctgtataaagaagagca

SEQ ID NO: 689811 - DNA, 75 bp, Homo sapiens
gcacccagtgctcatggtcaccggcttcgtcttcatccagggcatcggtggtgttcccactgatgaagagcaggc

SEQ ID NO: 689812 - DNA, 100 bp, Homo sapiens
agaggagccgccttctgcctcagaacggcgtgactcggaggttctttggcatggacacaagttcagtgggaggattagaattgactgatcagactcctgt

SEQ ID NO: 689813 - DNA, 75 bp, Homo sapiens
gcgtttccacttcagagatctgtttaatcccatggaatcaatcaaattaaatcatcatgactacattgattcccc

SEQ ID NO: 689814 - DNA, 90 bp, Homo sapiens
gcactgttgacaacaaaatgcttgatgatctctatgaagatattcactggcttattttagttacagtcatggctccgatcttcatcttga

SEQ ID NO: 689815 - DNA, 113 bp, Homo sapiens
ctcatttcacacgacatgatttctttgaatctttgcatagaggtcaagaaattatggatccggatgagcaattggaaacccttcatgaagcactgaaactactgccacctgct

SEQ ID NO: 689816 - DNA, 100 bp, Homo sapiens
tgtggaagatgatgggtcaaaaatcattggttgtgggagacaagtagccaacagtatcataactggcaacaaaattgtgaatggaaaaagctccctggag

SEQ ID NO: 689817 - DNA, 82 bp, Homo sapiens
caggacttccgggaggaccaggatgctgccttcttcaaggggtctgttgcaaataaattctatgttcacaatgatatcttca

SEQ ID NO: 689818 - DNA, 90 bp, Homo sapiens
gccgcctgccccggtgcgcagacagagctattccagcaccagcagaggtcgcctgcgaggccgctggccaggcctgagcctctgccacca

SEQ ID NO: 689819 - DNA, 100 bp, Homo sapiens
cctctacaaacagggctttgccatccccggctccagcttcctgggaacctcagaacctgttctggatccacagcaaatccaagcatttgatcagctttgc

SEQ ID NO: 689820 - DNA, 76 bp, Homo sapiens
ttgtaacagctgaagtgtcttcaatgcctgcttcaaggagctgtacctccaaccagttcagttcctcctgttgccg

SEQ ID NO: 689821 - DNA, 82 bp, Homo sapiens
catctctggagttgatcgttactatgtgtcaaagcttgccaattctgtaactccttgggatatcttgctgagcttaattgca

SEQ ID NO: 689822 - DNA, 100 bp, Homo sapiens
tgtgaggggatccgacttgccggcagaacttacgctgcgggaccccgggcactgttgctgctgcgggaggttccatgcctctgcagcggtgcctcatgtt

SEQ ID NO: 689823 - DNA, 71 bp, Homo sapiens
cagggatgataattgggcctccaagagctcttgtcaggatggtgaagctgttcatcggaaacctgccccgg

SEQ ID NO: 689824 - DNA, 116 bp, Homo sapiens
aacgtgctggagagaccccgcggctgggcgttcatctaccacgctttcgttaccttaaggcaggttctatgaaagatcctctgctagatgaccatggtgattttattagaatgtgc

SEQ ID NO: 689825 - DNA, 80 bp, Homo sapiens
ccagcctgcggagcctgtggggcagatggtcatccagactcagagctctctctacagagaggaaattctccactgtgcac

SEQ ID NO: 689826 - DNA, 100 bp, Homo sapiens
ctacaacacatggtggaatgtatccgggaggtcaacgaggtcatccagggccacccgttcatcgtgcagttcaatgatggaaatgccgccgtggtgtcca

SEQ ID NO: 689827 - DNA, 101 bp, Homo sapiens
aagaagctcattaagagcttggaggcggcccgcggtactatactggcaattgctggagaagattttgcaattgttgcttctgatactcgattgagtgaagg

SEQ ID NO: 689828 - DNA, 100 bp, Homo sapiens
aattcccaacatcaagattgattgaaacatattcaatgggatgatcacggacgtgcagctcgccatcttcgccaacatgctgggcgtgtcgctcttcttg

SEQ ID NO: 689829 - DNA, 82 bp, Homo sapiens
cacacttccgtgcacactctcaacttcgagtacgccgtggagcgcgtcctcgcaggttttaaaatcaaagatgggaaaatcg

SEQ ID NO: 689830 - DNA, 75 bp, Homo sapiens
gttgggaatccctgccccatctgtcgagatcacaagttgcatgttgactttaggcctcagagagttgtgatcaca

SEQ ID NO: 689831 - DNA, 90 bp, Homo sapiens
catgatggagcaaaagaagagggtgtccatgattctgcaaagccctactgtggcacgtttcaggcaggattcctccttcattcaaactgc

SEQ ID NO: 689832 - DNA, 100 bp, Homo sapiens
tatggtgcagatattaatgggagcatatatgatgagatcctgctcacactaaaatatgaaccacaaacacacagagaaacaacctgttcaccactcctgg

SEQ ID NO: 689833 - DNA, 100 bp, Homo sapiens
tcttgcctcaggccagtcgcctccaggccaagagggatccttcacccgtgtctgatctgtctcgtaactgtgtaatcaaggaactagcaccacaacagga

SEQ ID NO: 689834 - DNA, 74 bp, Homo sapiens
atcagtttctttgtcatgtagccaagactggagaaacaataagttgagaggattctattttgcaaagctgtatt

SEQ ID NO: 689835 - DNA, 51 bp, Homo sapiens
ccccagtaacccctactgtgcagataagtatgctgtgcgcttcatccctcg

SEQ ID NO: 689836 - DNA, 88 bp, Homo sapiens
gcgtcgcgaggcgagcgtcctccttttgtgcgagcgccggcggctcggcttctcgaaggaatacttggacctcagccaacctctcgaa

SEQ ID NO: 689837 - DNA, 75 bp, Homo sapiens
ggactcatgatctttgggatagcagattgtttgcctactccagatatgaaaaacagtagctccgtatcgaataca

SEQ ID NO: 689838 - DNA, 90 bp, Homo sapiens
ccatttaggagctctgctcaaagccagacgactataatgtaactgcaaactccaagctggtcattatcacggctggggcacgtcagcaag

SEQ ID NO: 689839 - DNA, 50 bp, Homo sapiens
gagcgcctggaggctcgagcggaggatttgcctgaagacctggataatct

SEQ ID NO: 689840 - DNA, 75 bp, Homo sapiens
cacttttggaccaaaggcctgtgtgctgcagaacccccagaccatcatgagcatcagatccatgctgctgctgac

SEQ ID NO: 689841 - DNA, 50 bp, Homo sapiens
cctcccaaagagctgggattacaggtgcaccgggtataatttcttcacca

SEQ ID NO: 689842 - DNA, 82 bp, Homo sapiens
cacgagcatgcgaaggcgaagcggcacaacctggcagggcactgtgacctttgaagatgtggctgtgaacttttcccaggag

SEQ ID NO: 689843 - DNA, 74 bp, Homo sapiens
cagatgggaagttcctctccaatgacacggtgcagctgaacgtgaagctcaccaggagactaaagtccatcaaa

SEQ ID NO: 689844 - DNA, 88 bp, Homo sapiens
gcccagaataaagccaagctcatctctgagacccggaggaggttcgaagctgagtatgtgacagatttggagcaagaggtggtggtgg

SEQ ID NO: 689845 - DNA, 80 bp, Homo sapiens
gtggcgatggtcttcctgctggggctcatgtttgagttaattggccttggtcctcacagctccaaaaagaaacaggatct

SEQ ID NO: 689846 - DNA, 98 bp, Homo sapiens
ggccttacttctttccatgaggaggaggagagcagcacactgcgatggaaagaaatgtgtagcccatcagtgttatcatggtttcatgaaggctgtcc

SEQ ID NO: 689847 - DNA, 50 bp, Homo sapiens
aaagccaaggccctgagaggcaggatactttctgctgacccctctgtcac

SEQ ID NO: 689848 - DNA, 50 bp, Homo sapiens
caggggcaagtacagttactctggggagaaatgcactcggtgatggaaag

SEQ ID NO: 689849 - DNA, 100 bp, Homo sapiens
accagctggacctgcccaaggccaacctcctcttcaaagatggctattcatatgaaaaggaagcaatggaaaattggatcagcaaaaagaaacgtacaag

SEQ ID NO: 689850 - DNA, 50 bp, Homo sapiens
ctgggcctggcttacttcactgagaccagtatgatgtctgtgccatttgc

SEQ ID NO: 689851 - DNA, 83 bp, Homo sapiens
ggcggacggccggcgggggcggcgtgcggcctagcgtctcaggccgccatggcatcagatgaaggcaaactttttgttggagg

SEQ ID NO: 689852 - DNA, 125 bp, Homo sapiens
cgcctgggagacgctgcctcggcccggacgcgcccgcgcccccgcggctggagggtggcatgggcaagaaggacgaccccaagctgatgcaggagtggttcaagctagtgcaggagaagaacgcc

SEQ ID NO: 689853 - DNA, 80 bp, Homo sapiens
gtgatgtggaatatactaaagcctagaacgcacctcctctggtcacagtaatgaaaggcagtaatagaaataaggatcat

SEQ ID NO: 689854 - DNA, 100 bp, Homo sapiens
actggatacttataataaaattaaagcagaagaacgaaacagtactgatgcagaggagaaactaatctggattcactccctctggttgatacccactcaa

SEQ ID NO: 689855 - DNA, 137 bp, Homo sapiens
ggctggaggaaagggaactgaacgcggttctgggagcagcaagcccacgggtagcagccgaggccccagaatggtactccaaagattcaggtttactcacgtcatccagcagagaatggaaagtcaaatttcctgaa

SEQ ID NO: 689856 - DNA, 100 bp, Homo sapiens
cctccttaaattgatgtttgtgaatccacctgagttgccagagcagactactaaagctttacctgtgagattgtcactgctgttccaagggcacacgcag

SEQ ID NO: 689857 - DNA, 58 bp, Homo sapiens
aatacaactggcaaacaactttttgaccagagactaaggtgtcagtatgttcttcaag

SEQ ID NO: 689858 - DNA, 74 bp, Homo sapiens
acatgagatggtggatgaacccccagcggacaaggcaaaatctcagcaagttcggacctctagtacaataaggc

SEQ ID NO: 689859 - DNA, 100 bp, Homo sapiens
ctgtctcaatgatggcgagtgctttgtgatcgaaaccctgaccggatcccataaacactgtcggtcactggaaggactgagcgcattcaggagcctggag

SEQ ID NO: 689860 - DNA, 80 bp, Homo sapiens
caccaacctgaggctgccccggccgcctgcgcacccggcagcaccatgacagcttcccatcgacggtcagtgcgcacgtt

SEQ ID NO: 689861 - DNA, 101 bp, Homo sapiens
tgtctgcatgacttgtcctgggactgaggaaaatttaccagctcctgaattcagaccacagatccacagccacagtccagatatgtagcggttctgtaaac

SEQ ID NO: 689862 - DNA, 83 bp, Homo sapiens
atggccgtgccctggggctgagccctcagactaatagggatgccaaaggaaaaatatgatcctccagatcctcgcagaattta

SEQ ID NO: 689863 - DNA, 100 bp, Homo sapiens
tcaaccgcttcgtgcaactctccgggcggccgcacctgccagatggcttgttcaatcagtatatcagtcaacaggaatataagccacgatggagtcaaat

SEQ ID NO: 689864 - DNA, 51 bp, Homo sapiens
acttcatgcttgacaatctcgcagatcactgtcgtcttcctgaaagatgag

SEQ ID NO: 689865 - DNA, 100 bp, Homo sapiens
tttgaggcatcaaccggaaagccgttaggtgatggaaagtttctttctcataaggtagttagaaacaaacctgtggcaaggcaggctcctggcaaacgga

SEQ ID NO: 689866 - DNA, 90 bp, Homo sapiens
cggacttttgaagaatgattcgtgaatccggaatgggtgacagcgtcatcacggcattttattgctctctccttcctgcttcctccttgc

SEQ ID NO: 689867 - DNA, 75 bp, Homo sapiens
gcaaggaagcctggttcagcaggtggccctaaggttggaggacacagcattgttggttttgccatgtactatttt

SEQ ID NO: 689868 - DNA, 50 bp, Homo sapiens
gcagttgcagtgttggagctaaagcatgtactggcattgaaaacattgac

SEQ ID NO: 689869 - DNA, 88 bp, Homo sapiens
agcgcccagtcgagcccggggcagcggctgccgggccgggactggtgcgcgaggggttcccgggaacctgagtgcagctcaggtggcc

SEQ ID NO: 689870 - DNA, 100 bp, Homo sapiens
tttactggatatggaaaatgtgttctatccacagagatttcttcaagttatgagttggggtagaagagcagaggatggctctgtcattgattatgaactg

SEQ ID NO: 689871 - DNA, 100 bp, Homo sapiens
agaaagtgaaaatgattgggaagaggttgaagggaaggatcgaatcatatttgtaaccaaagaagatcatgaaactccaagcagtgcagaattggtggct

SEQ ID NO: 689872 - DNA, 75 bp, Homo sapiens
ctccagccgaaggagaaggggggagagggctgaacccccctcatcgtgtcaagtcaatctccatgacaactttca

SEQ ID NO: 689873 - DNA, 100 bp, Homo sapiens
gccgatccctgtcctccccaccgtgcattataacatgggcggcattcccaccaactacaaggggcaggtgaaatgcaacgagcagcccaaccgagtagag

SEQ ID NO: 689874 - DNA, 83 bp, Homo sapiens
atgttatctggtggatgttatagatgtgtatatctcatgattgatatggagaaactagtcatgggccaaaggtcaagatactt

SEQ ID NO: 689875 - DNA, 79 bp, Homo sapiens
atccctggggatgactccacctgcaatcagagaacaaagataaaagcaacagtgtttgatgactgcaagaaagaaggcg

SEQ ID NO: 689876 - DNA, 100 bp, Homo sapiens
cagtctacgtgcaaccaccattagaattgacttgtgatcagttcacctttgaatttatgagtatggaaaagttgaggccactcgcatattgttagagaaa

SEQ ID NO: 689877 - DNA, 83 bp, Homo sapiens
gcaaacgcagagacaaaagaaacgggccccgactgaaatatggctacacacacctttctgcaggagagctgcttcgtgatgaa

SEQ ID NO: 689878 - DNA, 74 bp, Homo sapiens
atcatgggaatttccaaggggattcaaacttcaacagaatgtggcaaccagtctgcagatctccaggggagccc

SEQ ID NO: 689879 - DNA, 100 bp, Homo sapiens
ctggcctacatgcaagcattaatgtgcatttgagtgcaagatatcttttacaagctatcagttgagggatttgcagttgataaaatggctggagaggtta

SEQ ID NO: 689880 - DNA, 83 bp, Homo sapiens
ggacaagctggaatgcatccaagagaatccctcaacatgctgttctttatagctccaagctctacagattcttcaaatatatt

SEQ ID NO: 689881 - DNA, 74 bp, Homo sapiens
ttatgggaagcattgtcactgagattgcttgtggacgtgtgtactgtaagcacggtcacctgtgtcccatcgac

SEQ ID NO: 689882 - DNA, 75 bp, Homo sapiens
ttcaattatgaatctcaggaacaccaccttctgtcaggaggatttgttggtattgaggaaaacggtgaaatcctt

SEQ ID NO: 689883 - DNA, 75 bp, Homo sapiens
tggagttcttacaacatggcagacattgacaaagttcctgagttggaggtagaagaagaaacccaagttcaagag

SEQ ID NO: 689884 - DNA, 89 bp, Homo sapiens
gacaaatactccaagtttgatgaaaatggaaaagtgttttaggcttccagagtagaaatctgatattacttcgtttgattcttcgacca

SEQ ID NO: 689885 - DNA, 83 bp, Homo sapiens
cccgcccgccgcgctccagatgaagtgtgagcactgcacgcgcaagaatgttgtaccatctttgggtaggcagacttccctga

SEQ ID NO: 689886 - DNA, 82 bp, Homo sapiens
gcgacctggaagtccaactacttccttaagatcatcgacctatttcccattttcctgctcttgcctgaaccagttattggct

SEQ ID NO: 689887 - DNA, 78 bp, Homo sapiens
tggactctaatttcacggacactgaaagcagagaccatggagcttcttgcggtttccaacctagatgaggaaagccga

SEQ ID NO: 689888 - DNA, 75 bp, Homo sapiens
cagtaggagcccctccacgctcctgcccaagaagcccactgatgtatcggcaagcagtgtaaacggaggacttgg

SEQ ID NO: 689889 - DNA, 134 bp, Homo sapiens
agcggcagctccgcggcggcgtctgcccagggcagggctcctaaggaaggacccgcctttaggaatgggaagtggtagtgctggaaaagaaggggggccctttaaagctcttttaagacaacagactcaatcag

SEQ ID NO: 689890 - DNA, 90 bp, Homo sapiens
gagtggatttcagcctgcacggatggtcttgaaacacaaatggtttttggactttgtgttttatgccccacgtctgagaatcaacaagcg

SEQ ID NO: 689891 - DNA, 134 bp, Homo sapiens
tggagagaaaattgtggtccagggagagcctggggacgacttttacatcatcacggaggaggcagcacccagggtcattcctggagcataaacgatccctgcagaacatgggctagaagaccccacagtggggc

SEQ ID NO: 689892 - DNA, 100 bp, Homo sapiens
caggagcagcggccgggagcccttagggaggcagtttgaataccagcaggctcagctggaggctgagatcgaaaacctctcatggaaagtggagcgtgca

SEQ ID NO: 689893 - DNA, 75 bp, Homo sapiens
ggccggcagaagggaggcacttgagttggctggagttgtcttccttggagtcgggctgtgggcatggagcgaaaa

SEQ ID NO: 689894 - DNA, 104 bp, Homo sapiens
ccgcgcctgccgctgccctacggcttctccgccatgcaaggctggcgcgtctccatggagctcgcaaaggatctccttcatccctctccagaagaggagaagag

SEQ ID NO: 689895 - DNA, 74 bp, Homo sapiens
cctgagcagctttcagcactggaggcatcaagcatgatggaaccatgtgtgatacctgccgccagcaaccaatc

SEQ ID NO: 689896 - DNA, 75 bp, Homo sapiens
caagcgaagccttgaaaaagctgccctgagacggtgtcccgccgaaagcacttttccagccattaactccaggct

SEQ ID NO: 689897 - DNA, 75 bp, Homo sapiens
agcggctgtgccgaggcgcccaactcaggtttctgcataaagaccaactcctcggaagggaaggttttcatcaac

SEQ ID NO: 689898 - DNA, 90 bp, Homo sapiens
gaatccacatagagaaagtgatgggagctgtaggtaaaacttgcctactgatcagttacacaaccaatgcatttcctggagaatatatcc

SEQ ID NO: 689899 - DNA, 75 bp, Homo sapiens
ggtggagaagatgcggcacgtgcccagcgggcagatcatggcagtgaaggtgtgctgatgtatcgggactacccc

SEQ ID NO: 689900 - DNA, 100 bp, Homo sapiens
ctgatctgcgccgggtcgccacatactgtatttcaggggctgccaagctgctctcctgtttcctcttccttggggctgattgcatcccatgatgtgccca

SEQ ID NO: 689901 - DNA, 75 bp, Homo sapiens
gctaaggatgcagccagagacatgaatggaaagactgccactggagacaccattgtctcatccaagtccagtgca

SEQ ID NO: 689902 - DNA, 100 bp, Homo sapiens
atggccgcagccgctctggggcagatgaagatgtgtgtgtctttaagtgctcagtgtcccgagagacagagtgcagccgtgtgggcaagcagtccttcat

SEQ ID NO: 689903 - DNA, 74 bp, Homo sapiens
ttgtgaatatggtggaaaaaggaatcattgacccaacaaagatattgaagcacagattcgagaaattcaaggca

SEQ ID NO: 689904 - DNA, 75 bp, Homo sapiens
ggcctctcggcctctgccggagaaacagccagatgaaaactcgctggatttttcctcctgtatgttacggcctgg

SEQ ID NO: 689905 - DNA, 100 bp, Homo sapiens
ttcacaagttcctcatctgggacactgctggtcaggaacggctaagggagaacattgagcaattcttcaccaaatttgtagatgaggggaaagccactgt

SEQ ID NO: 689906 - DNA, 101 bp, Homo sapiens
acctgtggctcctgggtatttggggcctctgtgggctgctcctgtgtgccgcggatcccagcacagaattccaaccaggagtgccatggaaaggtatccaa

SEQ ID NO: 689907 - DNA, 83 bp, Homo sapiens
ggcgcattgggagtcccatgattgatttacagtgtccaacaagcacccatttgtggacagcaatcttctctaccagttcagaa

SEQ ID NO: 689908 - DNA, 74 bp, Homo sapiens
ttggccatgctctcattacgcttgattgccattgacagcttgatgtaagtcagacggagtttcgctcttgttgc

SEQ ID NO: 689909 - DNA, 75 bp, Homo sapiens
tggggtgaggatgccacggctacccggctgttcaaaatcaaaggaagcccagaagggaggtcatttttacagtgc

SEQ ID NO: 689910 - DNA, 75 bp, Homo sapiens
gattccacccaaacttgctggtcactgggaggtgacagagttagtccttgataattgcctgtgtgtcaatgggga

SEQ ID NO: 689911 - DNA, 100 bp, Homo sapiens
ccggagcacccgacccctgacaggtagttccaatttgccagcagaatgagtacagaaagagactcagaaacgacatttgacgaggattctcagcctaatg

SEQ ID NO: 689912 - DNA, 83 bp, Homo sapiens
gaaaaggcaaaaatcccatctaccgcaactctcagttcgagagtaaagattattttcgaaataccagtatttcgactccaggg

SEQ ID NO: 689913 - DNA, 96 bp, Homo sapiens
gtttctctgatgtatttgaagaagagatcacttcaggtggcttttgtggaggttgaagatgacagcgatgcagagacctatggagaagagaatgat

SEQ ID NO: 689914 - DNA, 73 bp, Homo sapiens
acccggaaggcttcaaaggctgtcgcaaggaggaaggagcaggttgccgtccggttgtttgaccaggagagtt

SEQ ID NO: 689915 - DNA, 82 bp, Homo sapiens
gaaccgggaccgccagcgcaggagggggggccctcagcctcttggccttgaacgggctgttcatcttgattcacaaacacaa

SEQ ID NO: 689916 - DNA, 90 bp, Homo sapiens
cagggcgcaccttccccaagcgcggccagacctgcgtggtgcactacaccgtttgaagaaaacaggtctgaaacaaggtcttacccccag

SEQ ID NO: 689917 - DNA, 74 bp, Homo sapiens
ttataaagttattgctaagtgtgggaattttagctaagtttgtgttgctagttaagctagcttgtattgttgtg

SEQ ID NO: 689918 - DNA, 100 bp, Homo sapiens
agatcagctccggagaggggaaaaccacgctcctcggaccaagcctcgggagctaaggtcctcagaatggttggaatgaccctccagctttgaacagagt

SEQ ID NO: 689919 - DNA, 112 bp, Homo sapiens
gcatcatcaagcacctctttactggtcctgtcctctccaaacaccaggatgtcttcaatcagatgaccatgctgactgtcatagagcagccagtacctccaacaccagctac

SEQ ID NO: 689920 - DNA, 82 bp, Homo sapiens
tcgaggtcgtggtggaccacgtggtggcaaatcctccatcagttctggaggatctccttatatagcagccaaaatcaatgaa

SEQ ID NO: 689921 - DNA, 74 bp, Homo sapiens
ggcattttgaggcggtcctcctagcggcctggaagaaatgttggctatttggcgatgagaggtggtgaacagtg

SEQ ID NO: 689922 - DNA, 74 bp, Homo sapiens
cttattagtgaacttagagaacggagttttgagagcaaaatgacaacacccagaaattcagtaaatgggacttt

SEQ ID NO: 689923 - DNA, 88 bp, Homo sapiens
cccccaaggccgaggtccgcggccaggtgctggcgccgctgcccctccacggagatgaagtgtttagaggacatgagccaggtcaagc

SEQ ID NO: 689924 - DNA, 122 bp, Homo sapiens
gcggccggccgacccttcctgtcgctgacggcgactgcgggaggccagaatgattacggacctgaagccaaagaacaagatgcgctagtggacagattgctgaccaggggcttgagagctgg

SEQ ID NO: 689925 - DNA, 75 bp, Homo sapiens
ccttcaatgatgtgtgcaataatgaatcattagtatcggacacagaaacaaagatgtgccggatggggtgaaaga

SEQ ID NO: 689926 - DNA, 100 bp, Homo sapiens
ttgctatgggaagagaagtttcctgaaagaacaactgttactgaattacctcagactgcaataaggtcactgatcagtgcctgtccttcttcaaacgctg

SEQ ID NO: 689927 - DNA, 100 bp, Homo sapiens
aggggacgtcacatgtcattataccttcacccagcatttcatccctcgtcgaaaggattggattggcatctttagagtgaataagtctgatgacacagca

SEQ ID NO: 689928 - DNA, 83 bp, Homo sapiens
agcctttaaatgcagcatctgcgatgtgaggaaaggcacctccaccagcatttaaatcaaacggtattgagatggattgggtt

SEQ ID NO: 689929 - DNA, 75 bp, Homo sapiens
caagaacgagaagagccgcagtgagttgggcaggttcttggccaagcagatgccagaggaacaagcattctgtgt

SEQ ID NO: 689930 - DNA, 98 bp, Homo sapiens
cttttttcagagaccttggcgataaagaggggaggtatggtgtcaagaaaacatagtcaccattattacgaaaagtaaaatatggaagagatgatccc

SEQ ID NO: 689931 - DNA, 88 bp, Homo sapiens
tctacgtcatcttcgacagagcccagaagagggtgggcttcgcagcgagcccctgtgcaggaaagaaccggaggctgaagcaggccaa

SEQ ID NO: 689932 - DNA, 90 bp, Homo sapiens
tggacaccctggccatgctgactgcccaccgtgcaggcaagaaacatctgtccacaacaaggcgtgcaggtattttgatgaaggacgtgg

SEQ ID NO: 689933 - DNA, 76 bp, Homo sapiens
gaaaaagctgccctgagacggtgtcccgccgaaagaaacatgattcccgtgacagaattccggcagttctctgagc

SEQ ID NO: 689934 - DNA, 75 bp, Homo sapiens
catcaacgaggcctacgtggagacgctgaagggtgtccgcaatgttgccagtgtctgtctgcagattggctaccc

SEQ ID NO: 689935 - DNA, 80 bp, Homo sapiens
gtcagacttccggggcattcagagacctgtcggccatggagcctaatgatagtaccagtaccgctgtggaggagcctgac

SEQ ID NO: 689936 - DNA, 83 bp, Homo sapiens
gcttgtcctggctcttgccctcatcctggttctggaatcctcagttcaagaagtgaagctggacaaggtttcatgctgttgct

SEQ ID NO: 689937 - DNA, 95 bp, Homo sapiens
aagagggttatgtccccacttcatatgtcgaagtctgtttggacaaaaatgccaaagataggaaccaaggctttagccttctcaactcattgact

SEQ ID NO: 689938 - DNA, 96 bp, Homo sapiens
cgcacctcgtcaccaaggccaaggacactcaatcacttgtcggaagtccctcaacccgtatagcacctcatattattggagcagaagatgatgatt

SEQ ID NO: 689939 - DNA, 101 bp, Homo sapiens
cctcccgagtagctgagattacagatctgaattctacaaacacattgtgctttctggagggtctactatgtatcctggcctgccatcacggttggaacgag

SEQ ID NO: 689940 - DNA, 82 bp, Homo sapiens
aacaaggagaagaaccatggagactggaggaagaattcccaagccagagctttccaggccataaaattttgagtagaaaaat

SEQ ID NO: 689941 - DNA, 100 bp, Homo sapiens
ctcggcaggctcttcgggaaggtttttgaatcagagccgacaggcacttgaattgaaaatggaaaaccctactgctggtggtgctgcggtgatgaggcct

SEQ ID NO: 689942 - DNA, 82 bp, Homo sapiens
gtcatgtagccaagactggagaaacaatatccaaaaagttggcagctcttgcagaagccttaaaggaagtctcccttacaaa

SEQ ID NO: 689943 - DNA, 50 bp, Homo sapiens
ccgagagcacgtacggcctctaccggttggagaaggaggagcagatacac

SEQ ID NO: 689944 - DNA, 51 bp, Homo sapiens
caatgttcctgatagttttaatgaaggtcatgtgaaactaacagactttgg

SEQ ID NO: 689945 - DNA, 92 bp, Homo sapiens
gagggaatgatattcagtggtgtttttctcaggtgaaaggagcagtagatgatgatgtagcagaaggatttaagtgccctgtatgctcaaaa

SEQ ID NO: 689946 - DNA, 83 bp, Homo sapiens
aaaaagcagggaggttatgaggcttaataaagaaggatattagaaatggctactccccagtcaattttcatctttgcaatctg

SEQ ID NO: 689947 - DNA, 100 bp, Homo sapiens
ccctctggaccctggagtacaccccgcagcacagccgcgacttcaagctgtccctttccccccaacacatcgcttgacatctgaagaagtatttgatttg

SEQ ID NO: 689948 - DNA, 75 bp, Homo sapiens
cgtcttccacttgcacgaaagctttcctaggccaaaaagaggatgtacagttacccagcacgtgtacctcctcct

SEQ ID NO: 689949 - DNA, 74 bp, Homo sapiens
cgagctgcagctgcgatctctgtggtaggcccagaccaagatcactccatggatgaaatgacagctgtggtgaa

SEQ ID NO: 689950 - DNA, 50 bp, Homo sapiens
gcggctccttcggagacatctatctcgcattgtcccagatatagccgttg

SEQ ID NO: 689951 - DNA, 97 bp, Homo sapiens
agcaagaaatgatcagtagcaccagtgtttatggtttggtgcacctcgatttggaggaagtagggcagggcccttatctggaaagaagtttggaaac

SEQ ID NO: 689952 - DNA, 83 bp, Homo sapiens
cgtgtctggagcagtggagcccaaagacccctggagacatgaagtttccaagggtcacttgtgtctcgtccgtgggaagaccg

SEQ ID NO: 689953 - DNA, 75 bp, Homo sapiens
acctgcatccaccgctccaatgtgagtgacctgcaggaagaaggcaagaatgccatcaactcaccgatgtccccc

SEQ ID NO: 689954 - DNA, 83 bp, Homo sapiens
aagtgagccagatttcacctctgcaaatatgagagattctgcagaaggtaatgctggaggatggaagaagcaaagggtttggc

SEQ ID NO: 689955 - DNA, 101 bp, Homo sapiens
gctttcagagcagtgtttttatttggtaccaggattactgacaatcatgactactgggaaaggtgctccatacttgcttgcagtgcctacgtggctctggc

SEQ ID NO: 689956 - DNA, 87 bp, Homo sapiens
gaggccggccgcctggtcatggcgcagccgggcccggcttcccagcctgacgggccccacggttcccctgatagacctggagcacgt

SEQ ID NO: 689957 - DNA, 75 bp, Homo sapiens
ggcaccgacgtcatcatgctgaccaccaatcagatccgtaaggtgagtggcatcaaggcgctgtacgagtcggag

SEQ ID NO: 689958 - DNA, 110 bp, Homo sapiens
ggcctcagctgtgacatgaaacaagttcctgccttaactcctctttacttgctgtcagctgcggagaaatgcactcggtgatggaaagagagccactattctgaagaaca

SEQ ID NO: 689959 - DNA, 83 bp, Homo sapiens
cttggcccttgttcccccaaatgtctgactctgactctcggactgagaaacgcaaggatggagaacctgttcatcaaccgctt

SEQ ID NO: 689960 - DNA, 90 bp, Homo sapiens
gtttttcggatgatgccttcaatactacctttatttccaccataggttctctacttaaaagacaatgactactgatgaaggtgccaagaa

SEQ ID NO: 689961 - DNA, 100 bp, Homo sapiens
gatcgacgcctatgtcgacgagcaggaagagagaagggcacagttacctaagtatcaacgtaatcttcctcggccaggacaggcccccatcggtaatcca

SEQ ID NO: 689962 - DNA, 74 bp, Homo sapiens
gagggcccgaaaatggtttcagcacctgtgtcagaaactggcgatggaatatgagaggagccctctggaaagaa

SEQ ID NO: 689963 - DNA, 100 bp, Homo sapiens
cacttcattttactccaagatacaccccttagaaaatggagaggtaatatttgaagctgaagtctcaggagggagaagtggttatattgccattgatgac

SEQ ID NO: 689964 - DNA, 100 bp, Homo sapiens
ctatgatgtggatattaagcctgaaaaacggcctcgtagagtcaacaggagccggtgaaacctgaagaaggcagagatatggcaaacaggattggcgctt

SEQ ID NO: 689965 - DNA, 82 bp, Homo sapiens
cgacgtcttgcctgtgtcccacttgttcgcggcctataggtggaacacctgcagcaggagactgctgctctgaaaaagcaaa

SEQ ID NO: 689966 - DNA, 74 bp, Homo sapiens
gggcgcagtttctcacgacgggccgagcctgccactttcctctgtgacgagggtgcaggtatctctggggacta

SEQ ID NO: 689967 - DNA, 82 bp, Homo sapiens
gtggctgctgggtttgaacggaatgctggagtcagtggaagacggagctggtcggcccgaagcttcgagagctgtgcccagg

SEQ ID NO: 689968 - DNA, 83 bp, Homo sapiens
ttctctcgggcttcatctcttgtgtggggagtttcatcctagcgggtttactcctggcttgggggcattaggaagcactggag

SEQ ID NO: 689969 - DNA, 100 bp, Homo sapiens
catgtgaggacgtgcttcctgcttcatagataagagaaggacagaataacgggctcccagattcacaagccccaccaagaggatcaccccaggaacgctt

SEQ ID NO: 689970 - DNA, 100 bp, Homo sapiens
aaacagagcttcctgctgctattgcagaatttttgactggagactatagtagtagacccaaatgatttgtacattgtagaacccctcaagttttctccag

SEQ ID NO: 689971 - DNA, 75 bp, Homo sapiens
agttctgatgttccactgaaatcacaatggaaagtcttgacttgactggctctttggtgtaacgggaaactgcgc

SEQ ID NO: 689972 - DNA, 75 bp, Homo sapiens
tgcaaatcggaggaggaaattttatatcacacaactgaaaacagattctgagaccattaaaaatctcaagtgacg

SEQ ID NO: 689973 - DNA, 75 bp, Homo sapiens
tgtaagaggtcagacgaacgtggggcaggatggacggcaagatgacagtgatgggattccgtggtcagaagaacg

SEQ ID NO: 689974 - DNA, 73 bp, Homo sapiens
tagacggattgaggagctcaacaaggttttgatggtacagtccaggtctatgatgccacatcttgggatggaa

SEQ ID NO: 689975 - DNA, 98 bp, Homo sapiens
gagaatactgtgtggctgacttcaaaagagtagtggattttctgaaagagaaagcatgtgaccatctgcgttgtatagcctgtgatttcttggtagtc

SEQ ID NO: 689976 - DNA, 100 bp, Homo sapiens
ccatgctgtctctagactttttggacgatgtgcggcggatgaacaagcggcagggcagggtgccatttgccgtgcctgacaaagtgctgtggccacagct

SEQ ID NO: 689977 - DNA, 90 bp, Homo sapiens
ggagctaagtagccaaggattctggaaaactggcatccgttctgatgtctgtcagagcttccttctcctacatctgcttgctgctgggat

SEQ ID NO: 689978 - DNA, 75 bp, Homo sapiens
caagcaagcatgcagcttactgcttgaaagaacaacgcttcttcggtgaagttcttttgtacttccaaatgtcgc

SEQ ID NO: 689979 - DNA, 75 bp, Homo sapiens
agaagccagtgaaagaaggacagccgagtccagcagatgagaagggtgaggagttaacaaggctttggaatcttt

SEQ ID NO: 689980 - DNA, 82 bp, Homo sapiens
aagaagctggtgtgcggagatgaaggtttccaatacttatctacaggaatcgccatgaccccagctctgagggaggcaacag

SEQ ID NO: 689981 - DNA, 96 bp, Homo sapiens
gtcaaccgtccccagttcacagcatctaaaggagctaggaatgcatgggatgcttatggaatgtgcgagaacacggagacaaggtctcactgtgtt

SEQ ID NO: 689982 - DNA, 100 bp, Homo sapiens
atgaaacgcatgtcaaccaaacatcagaggaataatgtggggaggccagccagtcggtctaatttgaaaggatgttggttcctgcaaacaagaactgacc

SEQ ID NO: 689983 - DNA, 98 bp, Homo sapiens
gaggcttcacttccctcggtctgggcttctctgaggcggcgagagatggtcaggtctggagctcgaccgggccagacgcccagcggcagcaggatgag

SEQ ID NO: 689984 - DNA, 75 bp, Homo sapiens
gggctcctggacttcgcctttcccgagccctggaggtggggagaaaaggtgtctttcctgaagactatcttcccg

SEQ ID NO: 689985 - DNA, 83 bp, Homo sapiens
gcccgcaggacgccccagccagaggcacagttgaatgctgttgatgctttgattgactccatgagcttggcaaagaaagatga

SEQ ID NO: 689986 - DNA, 87 bp, Homo sapiens
aagacaaaggcacagctggatgaatggaaagcaaagaagaaagcttctaatggggtgcgttccatggatgaactgaatcatgatttt

SEQ ID NO: 689987 - DNA, 90 bp, Homo sapiens
ctaacgtactactgctgcaagaaggacctgtgtaactttaacgaacagcttgaaaatggtctctaattaacagaagatggcaaagcccag

SEQ ID NO: 689988 - DNA, 88 bp, Homo sapiens
cgcgagcgggaacgcgagaaagagcgcgagcgcgagaaggagcgcgagcttgaacgcagcgtgagaacttctctgggatctactgcag

SEQ ID NO: 689989 - DNA, 120 bp, Homo sapiens
agagaagaaggagtttttgcagaaggagcaggatctgaaagctgaaattgagaagctttgtgagaagggcagaagatgagccttcccagcgtccccgtcttcctagaggtttctggccag

SEQ ID NO: 689990 - DNA, 90 bp, Homo sapiens
gcacatcctctcggtgttcccgctggcggcgggcatcttcttcgtgaggctgctcttcgagcggtggcagatatctacctagcatctcag

SEQ ID NO: 689991 - DNA, 50 bp, Homo sapiens
ctggcatactttgaagatcgtcatggggaagcgttgttgacgaccatgga

SEQ ID NO: 689992 - DNA, 75 bp, Homo sapiens
aggacacttataggctttttaagaagcattgatcaatttggacgtgatgcctgggccacggcaggagctgctctg

SEQ ID NO: 689993 - DNA, 51 bp, Homo sapiens
tggaaaaggagttccctggatttttggaagggtttgttaaagttgttaaga

SEQ ID NO: 689994 - DNA, 111 bp, Homo sapiens
aggtctctgtcgagcagcggacgccggtctctgttccgcaggatggcttcacaggctgctcaagaagccgagatcaatgccagaaaagccaaaaactctgttactagcctc

SEQ ID NO: 689995 - DNA, 100 bp, Homo sapiens
cggtgctgtttgcaagggaatcaaagaagtaggagatgatacttcctcttcttgacagccttatggttaagaataccctctaccatctgctttggtcagg

SEQ ID NO: 689996 - DNA, 82 bp, Homo sapiens
gagggcccgcgccgcatggaggccggctgaggagcgccgctgcctcgcctcggctccctggggaagggaatgcagggttgct

SEQ ID NO: 689997 - DNA, 98 bp, Homo sapiens
gagagtccgccgccaacgcgcaggtgctagcggccccttcgccctgcagaaaatgtcactgaaattcacaaatgcaaaacggattgaaggacttgata

SEQ ID NO: 689998 - DNA, 80 bp, Homo sapiens
agtgtgagcggaaaggggcccggcgtctgcctcgagactgaagaccgtgtctttggtgcaacactaacaaggcttgtctg

SEQ ID NO: 689999 - DNA, 83 bp, Homo sapiens
tgaccctgaaaatagaacagcgggaacgctacaagagcgtggctgcacttcgtgacgctgagatacagaaggacgtgcaggtg

SEQ ID NO: 690000 - DNA, 101 bp, Homo sapiens
agccccgaagacgccgacctcttccactccgaggaaatcaagggccaagaccagcttcaagtctccatggtaccagaaaacaacaacctcacagcacctga

SEQ ID NO: 690001 - DNA, 100 bp, Homo sapiens
cagaatgaagagatgttacccagtatcttggtgttgctgaagaggtaatgaatattcgaacagtactgaacaaactggaaaaaccacaaggcctttatcc

SEQ ID NO: 690002 - DNA, 97 bp, Homo sapiens
ctgagaactaccgccgctccgcagccacaacgtgctggccaaagcgctctatgacaatgtggccgagtccccggatgagctctccttccgcaagggt

SEQ ID NO: 690003 - DNA, 100 bp, Homo sapiens
cagaaagtttactcatatttcagctctgttacagttgcttttgaaatcagaaagtcagtgcagggttgtagtgttgatgggctctacttctgatcttggt

SEQ ID NO: 690004 - DNA, 75 bp, Homo sapiens
cccagacatggggaacagggtcacagctctcacccagataaaccgagaaaactggtgtacaatagagccatgccc

SEQ ID NO: 690005 - DNA, 91 bp, Homo sapiens
tagaattggaccatatcagcccaatgttcctgttggtctgtccagggttttggtggctggcgaagctgagggcgtgtcagcaggcctttcg

SEQ ID NO: 690006 - DNA, 100 bp, Homo sapiens
ctggccccggcctttgccccaatcttgtgtgggcactgaagggggactacaggttcgagagtcactgcagccagaggggtccagaagagagaggaggcac

SEQ ID NO: 690007 - DNA, 100 bp, Homo sapiens
gctcggggtgactcttctcaaatgccttctcatccccacatacctcgtggcaatacagcttcactgatagctgtacccgctgtgcttcccagtttcactc

SEQ ID NO: 690008 - DNA, 90 bp, Homo sapiens
aaaacctgaaagagctatatttggtgtcctgtaaaatcacagattatgagaagcatgccatagggacattgtgaatttgcaagtggagat

SEQ ID NO: 690009 - DNA, 90 bp, Homo sapiens
cgaggccgccctcagttgctgctccgacgcggaccccagtaccaaggtgcctgtgtcggtggccatgatgtcgccgcagatgcttacccc

SEQ ID NO: 690010 - DNA, 83 bp, Homo sapiens
ctctgcaggcttgccgaagaagggagcctgggccgagccagtggcccccagaggatgagaaggaggtgatccgccgggccatc

SEQ ID NO: 690011 - DNA, 98 bp, Homo sapiens
ggcttggcagtatcggtttgtcattgagttggaccttagcccatctactggcattgtggtccactctagaacagtcgatggagagagccaggagagag

SEQ ID NO: 690012 - DNA, 100 bp, Homo sapiens
tgcagcttcaagcttaggaccacccaccatgcctatccaggagccaaaaacctgtatatcatctccgtgaaggggatcaagggacggctgaacagacttc

SEQ ID NO: 690013 - DNA, 100 bp, Homo sapiens
aaaattgctatcctgagtggagactttcttctagcaaatgcctgcaatggactagctctgctacagaacaccaagccaaggccacctttgatgccatttc

SEQ ID NO: 690014 - DNA, 76 bp, Homo sapiens
aagggagatgctgacagcacagaatcgctgaagacctaactgcagcatgtctgtatttggagatggggcctctaca

SEQ ID NO: 690015 - DNA, 50 bp, Homo sapiens
acctggccagcggtccagagctgatgcagtttaaggaagaaatctctaaa

SEQ ID NO: 690016 - DNA, 74 bp, Homo sapiens
cacaacctcaaggagcgttactactcagggctcatctacggtatcaaaaagccattcacagaggtcatccgagc

SEQ ID NO: 690017 - DNA, 83 bp, Homo sapiens
ctggtcactagcggactcttcttcgccttcgaaaatgaagctgttgtcatttctggaaggaaactggcccagcagatcaagca

SEQ ID NO: 690018 - DNA, 75 bp, Homo sapiens
gggatacgctcttcgaagtccgcaggaaataatgaagatgtttcattttcaagaccagcagatcttgaccttatt

SEQ ID NO: 690019 - DNA, 90 bp, Homo sapiens
ctttgcagctcagggtgagcccaagaaacctcaaatatttgttgttaagtgatcttcctggagtaagagaaaaagaaaatcttgtccaag

SEQ ID NO: 690020 - DNA, 82 bp, Homo sapiens
gacgacagggtcaaagatgttcattctgggtgacacagcctacggcaggctttatcctgtggataaacgcagagtgaacgag

SEQ ID NO: 690021 - DNA, 90 bp, Homo sapiens
gatgtccccaaggactaggccacgcagccgattacacctcaacaagaaggcaactgacaaacagccttatagcaagctcccaggtgtctc

SEQ ID NO: 690022 - DNA, 90 bp, Homo sapiens
gttgccaaagaagccaaagatcttgcacatgaagctacaaaactggtggaagaacacaatggtcacatctttaaagccacccaatatagc

SEQ ID NO: 690023 - DNA, 128 bp, Homo sapiens
aaagtctcagcagacccttcctgagggccgagcaacagtgtagtggcgtattccacatagcaaacaggttatccggtgttggctcctgctgcttactatgaccaaactggtgcccttgtagtgaatgc

SEQ ID NO: 690024 - DNA, 98 bp, Homo sapiens
aaaaatttggcagataatcattgggcaaaaacttgtgagggcgaaggtcgtattgaatggtgttgtagccaacaaatggaattttcttgagcatgttt

SEQ ID NO: 690025 - DNA, 90 bp, Homo sapiens
gggagaggttgaaggaacagaaaaatgagaagacaactcactggacagtcattttgtttactcattcagccctgttgcaggtcccaataa

SEQ ID NO: 690026 - DNA, 100 bp, Homo sapiens
ccggagcgggcggctgagacaaaggcgacgcgcggtgtggaggaaactgcagctgagtgccgaaaactaggcgtcactgcgcatgcgtatgtggtagact

SEQ ID NO: 690027 - DNA, 97 bp, Homo sapiens
ctatcgccgagctcgttggagcttgaacccattgtcacccctccggtggcgggacaggcttcattgggacagccctaacccagctgctgaatgccag

SEQ ID NO: 690028 - DNA, 109 bp, Homo sapiens
cgcacgcggcgatatggaagaggagggcaagaagggcaagaaggtgaccaagaatatggcccaggtgaccaaagccctggacaaggccctgagcaccatggacctgcag

SEQ ID NO: 690029 - DNA, 88 bp, Homo sapiens
aaattgtcgccattaagaaaacaccaactctacaacattacctgtcatatactgaagaatctcttcttccagttatgcagcacctggc

SEQ ID NO: 690030 - DNA, 100 bp, Homo sapiens
cccagagcaaattgagacgtcccggctgttcgctgctatgaatctctaatcttaaaagctgaaggaaaagtggagtctgatttcttttgtcaattaggtc

SEQ ID NO: 690031 - DNA, 95 bp, Homo sapiens
gtgggatcattggctatgtaaaagcaggctgcagggcattccagccaagggcacagcaggggacagtgcagggaggtgtggggtaagggagggaa

SEQ ID NO: 690032 - DNA, 100 bp, Homo sapiens
aaaaataaaaaacatatccgagggtgtcctgttacttccaagtcatcaccagaaaggttccttgcattgactccatggagagtatatcacctgatttccg

SEQ ID NO: 690033 - DNA, 90 bp, Homo sapiens
gtttgagaagctgctgccgcggcacctggagataatctatgccatcaaccagcggcacctggacatctcagagccgccagcaacatcatc

SEQ ID NO: 690034 - DNA, 87 bp, Homo sapiens
ggtattgggagatccacagctaagacgccaggacccactggaagcctagaaatgattgagaggatccagaatccagatctctggaat

SEQ ID NO: 690035 - DNA, 90 bp, Homo sapiens
cgcactgtgcatacaggacgggtccatccatcgcataagagcaaagaatactattgttgccacagggtgccaggaccattgacaccagaa

SEQ ID NO: 690036 - DNA, 74 bp, Homo sapiens
cgagaacaccagccacaagtcctaccggccgctctgcgtcctcaccttcaaggcatggatttcattggtcgcga

SEQ ID NO: 690037 - DNA, 50 bp, Homo sapiens
agcgactgagtccgcgatggaggctggagtgcatagcacgtgatgctgag

SEQ ID NO: 690038 - DNA, 75 bp, Homo sapiens
tccgcgtcggcaagaagatcggctgcggcaacttcggggagctccgcctaggcatccgtgtcattctggacctta

SEQ ID NO: 690039 - DNA, 82 bp, Homo sapiens
aatgaagccacggaccctcgcgagacggtctcgccacattgcccagactggtctgaaagtcttgggctcaagagatcctccc

SEQ ID NO: 690040 - DNA, 50 bp, Homo sapiens
atggagacgccgccgctgcctcccgcagtaatcaagtcagaggattatat

SEQ ID NO: 690041 - DNA, 75 bp, Homo sapiens
ctcattgccatgaaggaactcaacttcatcacgtttcgctcctgtgcctacctggacaagaagcataccatcttt

SEQ ID NO: 690042 - DNA, 76 bp, Homo sapiens
tattgataccacagctgaactttcttctaagtgccacagtgaaggtgataaaagaaaatgtggctgaagttacccg

SEQ ID NO: 690043 - DNA, 100 bp, Homo sapiens
cggctgcgctgttcgtgctgctgggattcgcgctgctgggcacccacggagcctccggggctgagtctacttcagaagcggaggcactgggagtccggtt

SEQ ID NO: 690044 - DNA, 75 bp, Homo sapiens
tccaacctcagagccctgacttcctggacatcaccaaccccaaagccgtcctccgcctggtgctctaccagcact

SEQ ID NO: 690045 - DNA, 82 bp, Homo sapiens
gtcgccgccgccaccatgcccaagagaaaggagaactacgatgacccgcacaaaacccctgcctccccagttgtccacatca

SEQ ID NO: 690046 - DNA, 98 bp, Homo sapiens
ggtcctcagaccagcccaaggaacatctcaccaatttcaaatcgggctcagggtttggagcggccaccaaggccatgtgcatcggcctgcggtactgg

SEQ ID NO: 690047 - DNA, 100 bp, Homo sapiens
ctggagtctgcgaaggccgggacccggttccccggcccacagtgggggtgtgcaaacccgagagaactggacagccgctcaggaagcaatcttgcatgcg

SEQ ID NO: 690048 - DNA, 98 bp, Homo sapiens
acaacgatgcgtctcctggatggaggcggatgccccaaaccttccgtgacccagcaactgctcccctgagaaaactttctgttgacttgatcaaaaca

SEQ ID NO: 690049 - DNA, 74 bp, Homo sapiens
atgggatgtagagacaaaaacagttgtgacagaacatgcactccatcaggttggaagtgtatcctcccttctta

SEQ ID NO: 690050 - DNA, 83 bp, Homo sapiens
cacacagaccaaggccacttcttgcaaaccacatacacagcacaaagaatgtcagacaggcttgaagtagaaaatgccatgat

SEQ ID NO: 690051 - DNA, 74 bp, Homo sapiens
gcgagtgaggaaaggaggtactgtagcttgtcagctcatttgcagcttacatttttggtttcttccacaaaaat

SEQ ID NO: 690052 - DNA, 96 bp, Homo sapiens
ggcaggtggcctggagcaagaccgctgacaagatcgagggcttctggccatgtttatgagtggactaagtgaaagcaaacaaacccatgtacacct

SEQ ID NO: 690053 - DNA, 82 bp, Homo sapiens
caacccactggagtgagcattgctgcatttggagagtcagatgccattttggtttttagaacttcagccataaaaatgggca

SEQ ID NO: 690054 - DNA, 98 bp, Homo sapiens
ttcatctacccggagaagcaggagccctactcggcaggtttcacgtggcaggatgactatactcagtatgtgatggaccaggaacttgcagacctccc

SEQ ID NO: 690055 - DNA, 75 bp, Homo sapiens
ctgagcaaggaaaatctgaggggtctttttggagttcctgagctgagtgccccagaaggatttcatattgcacaa

SEQ ID NO: 690056 - DNA, 75 bp, Homo sapiens
cgcccaccagttcgcccgtccccctgccccgttcacaatcactgtgacttctgccgtgttcaccgtgggagacaa

SEQ ID NO: 690057 - DNA, 101 bp, Homo sapiens
cggcggaggcggcgggactggtccctggcttacggagttcctatgctagtcagcatagtcagcttgggcaagaccttcgttctgccgtgtctcccgacttg

SEQ ID NO: 690058 - DNA, 80 bp, Homo sapiens
cctggagcctcagttggaagcagccgatccagcctgcggagcctgtggggcaggtgcaagcggtcttctctgtcttcttt

SEQ ID NO: 690059 - DNA, 100 bp, Homo sapiens
gattttggcaacatcacatctctcagggtcccttctgagatgatctggatccccgacattgttctctacaacaagctcagcagggagctgctggatgaga

SEQ ID NO: 690060 - DNA, 101 bp, Homo sapiens
cacagttcctgggaaggtggagccaccagcctctccttggtgtggtcactcacctgtctaccactcccgtgaaatggcagctcgtgccttggtcccatttg

SEQ ID NO: 690061 - DNA, 83 bp, Homo sapiens
tgtgaggcgatccgctggcgctagtctgaccctccgccaggcaaaaggaagactgattcttgctattccaaatcctcttccac

SEQ ID NO: 690062 - DNA, 99 bp, Homo sapiens
gactagcgagatggcaaggctgaggacgggaggctgattgagaggcgaaggatattagaaatggctactccccagtcaattttcatctttgcaatctgc

SEQ ID NO: 690063 - DNA, 100 bp, Homo sapiens
gcaaggctggcctggctccgctggaagtgagggttctgggcccacgaggaatagcgggttttgcagcaattgttgcatatggattatataaactgaagag

SEQ ID NO: 690064 - DNA, 100 bp, Homo sapiens
aggcagaaaacgagaggctcaccgcagtcgtgcaggatctgaaggaggtagcagaaggtcaagaaatttgtgtgattgaagccatgaaaatgcagaatag

SEQ ID NO: 690065 - DNA, 100 bp, Homo sapiens
gcaggctgctaccgcccctccgcttccagacattctcagctgtcagaaaaatggctacaaacttcctagcacatgagaagatctggttcgacaagttcaa

SEQ ID NO: 690066 - DNA, 83 bp, Homo sapiens
ctgactcttgcgccgccgccttccacccggagcaaaagactgttgaagtagagagcattttgcccagctcactcggattcttt

SEQ ID NO: 690067 - DNA, 96 bp, Homo sapiens
agagaccatcacgggaggaggcagctgcggcggggccggtgggggaagaaactgatcatcgttgcctcccaggccatgcggtacagggccttgata

SEQ ID NO: 690068 - DNA, 74 bp, Homo sapiens
tgtgatacaggaaggccgaggagagctcccggactttcaagatgggaccaagaatttcgctaaggagtttgtga

SEQ ID NO: 690069 - DNA, 75 bp, Homo sapiens
tagaacatttcttttatcacatttgcctgagaatacagatcaacccacagaacaaagcggatttccaaggcatct

SEQ ID NO: 690070 - DNA, 96 bp, Homo sapiens
agaaaatggacctgctgacagagcagatggcctggagattcatgacaaaatcatggaggacgaatgccttagtttccactttccagcctggatccc

SEQ ID NO: 690071 - DNA, 102 bp, Homo sapiens
ttgaaattgacagcactgattatgtttcatcaggaccatctgttcggaaccccagagcacgagtagtagtcttaagagcatagaatgtcaagctaaccaggc

SEQ ID NO: 690072 - DNA, 75 bp, Homo sapiens
ggcagtacggcaaatatggcggaggagagaagcctcatcagtgccaagtctgtgggaagaccttctctcagagtg

SEQ ID NO: 690073 - DNA, 98 bp, Homo sapiens
aaaggagccccgcgagtggcgcgccggggattgcggcaccttcccgtctgatgctggcgttgtgcgtatggtgccctgacgtctgtccacgtgggcgc

SEQ ID NO: 690074 - DNA, 75 bp, Homo sapiens
gcgaaggggcaggcctgaaatgtgagtgctccagttgtaacatctaccactcaggaaaagccgaaggatagcgat

SEQ ID NO: 690075 - DNA, 101 bp, Homo sapiens
aaatggatttttgcagtacgatggggatgctggtgagcaggccatcagacagatcttagatgaagctggaaaagttggtgaactctgtgcaggcaaagaac

SEQ ID NO: 690076 - DNA, 74 bp, Homo sapiens
aaaccccccaacccggccctcggcaaaacggccacggactctgacgaaagcgtcaagggttccacactgttggg

SEQ ID NO: 690077 - DNA, 75 bp, Homo sapiens
tacaccaatggaaagtgcgtcatcctaaggaacatcgacacctgcctagagctggaacgttacctccagagcgag

SEQ ID NO: 690078 - DNA, 131 bp, Homo sapiens
catgtcctagaattgatactcagcagctggaccggcaaattaaagcaattatgaaagaagtcattccttttttgaagtctatacagtaacccaagtgggatgtctccttatgcttctcagggttttccatt

SEQ ID NO: 690079 - DNA, 138 bp, Homo sapiens
cagtactcggtgctgctcatcattactgatggggtcatctcggacatggcgcagaccaaggaggccattgtcaacgagaccagtatgatgtctgtgccatttgcctggatgaatatgaggatggggacaagctgcggg

SEQ ID NO: 690080 - DNA, 50 bp, Homo sapiens
tgtactactataatgggaaagcggcaaaggaaggatgaactggagcagag

SEQ ID NO: 690081 - DNA, 98 bp, Homo sapiens
gctcctcagagtgcactgagatcccaggaggatggccacatccccccgggctacatctcacagccttttccccacgactctgaaagaggacagcgttc

SEQ ID NO: 690082 - DNA, 100 bp, Homo sapiens
catgggtcctcgacctgcagggagcagaggggacagaggcaccaaggacctccaagacagagagttggaaactcaactattggaacaatgtactgttgac

SEQ ID NO: 690083 - DNA, 100 bp, Homo sapiens
cttacgtgcggcagggctgtgaggcccgccgctcgcatgagcacctcatacggctgcttctggagaaggaccctgatgctcccataagacagaaaatgcc

SEQ ID NO: 690084 - DNA, 75 bp, Homo sapiens
ccacccgcgccaggaggccgaacgcggactcgccacccggagtatctgactgtcttctctcagatgattgcattt

SEQ ID NO: 690085 - DNA, 75 bp, Homo sapiens
aaaaactttgaagtagtggatctggtggatgtcaatacccctgatttaatgcttcatgccctcaccgctggactg

SEQ ID NO: 690086 - DNA, 100 bp, Homo sapiens
tctatttcaacacggtcctgtcactggcccgctccctggcggtgcagagaccagcatccttggagaaggtttattttcttgaaaaggctccaggcttcgg

SEQ ID NO: 690087 - DNA, 74 bp, Homo sapiens
tctgtgcctcaacaaccatttctaagtgctgtgcctttggctgcaacaagtatgttgattactcaaggattaat

SEQ ID NO: 690088 - DNA, 74 bp, Homo sapiens
gccccatgagatttcatcaagatcaacttcagatcccagatgcagtgactggttactacctgaaccgtgctggc

SEQ ID NO: 690089 - DNA, 100 bp, Homo sapiens
gaacccttgccgctgctgtcctgcgaccccaagcagatcgcccaggaccacaccgcagcgtaactgcaggcctctcagcgaaaaagggggaaagcaaaga

SEQ ID NO: 690090 - DNA, 101 bp, Homo sapiens
gactattttggcctcgagtttcctgatcacaaaaagatcacgccaaaagaatgcaatggtgtaaagattccagttgatgccagtaaacctaatccaaatga

SEQ ID NO: 690091 - DNA, 98 bp, Homo sapiens
ttagtggattaaaatctcccaagaggaatgacaaacaaccagctcttcagggagtgcatccgccccaacccttttccccctcgtctcctgtgagaatt

SEQ ID NO: 690092 - DNA, 99 bp, Homo sapiens
aaacagttcaacatcttctgtcatatgctggagtcagccctcactcagttgaggagctcaagcttgggaaaatggtgtgcattccttgtatcgtcattc

SEQ ID NO: 690093 - DNA, 90 bp, Homo sapiens
agccgcaccatgccgctcctaagcctgcacagccgcggcggcagcagcagtgagagatccacctccgacccttaagccagagactcaggt

SEQ ID NO: 690094 - DNA, 83 bp, Homo sapiens
ggacattcagtcagaagaaggctgctattgaaagagagtatgcacaggaatactcccccagttgcaagaggcgcaggaccgtg

SEQ ID NO: 690095 - DNA, 90 bp, Homo sapiens
cgcggctcacgctgagagggacacgcagtgacgagcggccgaagcagctttgcgataccggggagaccacgacgctgcctcctgggcgcc

SEQ ID NO: 690096 - DNA, 100 bp, Homo sapiens
gtagctggaaatagtcctaagaaacaagcttctagaccacctatccaaaatgcatgtgttgcagataagcacaggcccaggaagtacacgagaagctccg

SEQ ID NO: 690097 - DNA, 74 bp, Homo sapiens
ttgtcctggctcttgccctcatcctggttctggaatcctcagttcaagagagcagaatgtgtgtgtgatgaatc

SEQ ID NO: 690098 - DNA, 74 bp, Homo sapiens
tggagcctcagttggaagcagccgatccagcctgcggagcctgtggggcaggacttttcttggtagagatggaa

SEQ ID NO: 690099 - DNA, 75 bp, Homo sapiens
ttggcttctcccagcatagccccagaaaaagcttgtggtgaaggggggcaaaaaaaagaagcaagttctgaagtt

SEQ ID NO: 690100 - DNA, 97 bp, Homo sapiens
tcaaactgaatcctctaaaggccccatacaatgaagtagacattggtggaaacatttagaccctaaagtaaattggttgaagaaattagatcccaaa

SEQ ID NO: 690101 - DNA, 74 bp, Homo sapiens
atgttcttcttcgagtatttgtagaaggtttttcagaagaagtgaagtcaagatgaagaaccatttgcttttct

SEQ ID NO: 690102 - DNA, 87 bp, Homo sapiens
ggcgtgcccagcaagagattaaagatgcagtacgccacggggccgctgctcaagttccagatttgccacacattacttcttcaaatg

SEQ ID NO: 690103 - DNA, 100 bp, Homo sapiens
gcggcctcggctacctggtgcaggtgaagcccatggcagatgaccgcacctcgagcaggagtggggatgccacgtctgcccccagcgcccggccctctgt

SEQ ID NO: 690104 - DNA, 82 bp, Homo sapiens
cagaaacgtccacatgtgggtactgcattcctaccggtgtgacagggaagcccgtcagcctgagctacagatgcccatgccg

SEQ ID NO: 690105 - DNA, 75 bp, Homo sapiens
cataagcctgtcacctcgtaccagggttaaagcacgaattgggagctctcagcgacatcaccagtcagcagccaa

SEQ ID NO: 690106 - DNA, 100 bp, Homo sapiens
tatttgatagaccaatgcacgtcaagatggaaggctttgtgatacctgatgaagggggcccacaggaggagcaagaagagtattaacagcctggaccagc

SEQ ID NO: 690107 - DNA, 75 bp, Homo sapiens
agccatgtgagcactgggggtggtgccagtttggagctcctggaagttaatcagctgtgttcagcgaatacttat

SEQ ID NO: 690108 - DNA, 96 bp, Homo sapiens
tttgaactgagcaatttgaaccagaaattagaggagaagagatcaactttgggaaacttatcacaaagccttcagaaggaacaactttaagggtag

SEQ ID NO: 690109 - DNA, 75 bp, Homo sapiens
gggcagttcgggccggctgtcctggcgcgtgccctgaaactctaatctcattgcctggccagaaaaggaagtaat

SEQ ID NO: 690110 - DNA, 89 bp, Homo sapiens
cgctctgctgcttcctcgtcctagtgatccacgcgcagttcctcaaagaaggaaaaccaattctgtgtcctcggaggaccacagcccag

SEQ ID NO: 690111 - DNA, 120 bp, Homo sapiens
gtttgccagggccgggcgggaccgcggggaccatggcggagccgcctcggtagaacttcatggaggaacacggagtgacccaaaccgaacatatggctaccatagaagcacatgcagtgg

SEQ ID NO: 690112 - DNA, 100 bp, Homo sapiens
attacttgctaagagcaaacttgaaggagatctctttgctgccactttcctcattaagaatggggcctttgtcaacgctgctacactgggtgcccaggag

SEQ ID NO: 690113 - DNA, 75 bp, Homo sapiens
cgcgagccccgtcctccttcgccgccgcgcacaaccgcacgtgcaggagtctgcactatggaaacaacctgtcaa

SEQ ID NO: 690114 - DNA, 100 bp, Homo sapiens
catccagtaccaagagttggtgggagacgggtgaggtacaggctcagtctgcggccaagactccgtcctgcaagtccattgaagacttgaacaagtgggc

SEQ ID NO: 690115 - DNA, 76 bp, Homo sapiens
gccaatgcaacagccacggaagattaagcaggacaaggaagatggggagccaaagaccaagcatctcagagaagag

SEQ ID NO: 690116 - DNA, 98 bp, Homo sapiens
gaggccggctgaggagcgccgctgcctcgcctcgtggacatcctcatcatggatgatgacgacgtccccagctggcctcccaccaagctgtccccgcc

SEQ ID NO: 690117 - DNA, 97 bp, Homo sapiens
aactgccacatgaaaaacaccacaatcaaccttattgtggcattgcgccgtacattcgagagtttgagacagtgatctgacacaaacacagctgaag

SEQ ID NO: 690118 - DNA, 115 bp, Homo sapiens
accagctgaagagcgacaagccgctggcagccgcggatctcaccgccgctcaggacctgcctagagctggaacgttacctccagagcgagccctgctatgtttcagcctcagaaa

SEQ ID NO: 690119 - DNA, 98 bp, Homo sapiens
gcatcccaggacctaccagaatctggtctcagtggcccttagcagcagctccattcgtgtggccatgctggaggaaaatggggagcgcgtcctcatgg

SEQ ID NO: 690120 - DNA, 83 bp, Homo sapiens
caagccgctggcagccgcggatctcaccgccgctcaggtggaagcatcagttcacagcagtaatgcacactgtacagataaga

SEQ ID NO: 690121 - DNA, 89 bp, Homo sapiens
ccacctcctgacacaacaccactcatccctacagatgaagaagatgaaatggaggagtccacaaatcgaccaagaaagaaacagaagac

SEQ ID NO: 690122 - DNA, 74 bp, Homo sapiens
tcatggggctgtttggaaagacccaggagaagccgcccaaagaactgaaccatccgggtatggctgaaaagaga

SEQ ID NO: 690123 - DNA, 95 bp, Homo sapiens
gaaactgtccaaacatggatagagctactcactgggtcctcactgagcagcgagtcgtcccccgtgtcctctccggccaccaaccacagctcccc

SEQ ID NO: 690124 - DNA, 49 bp, Homo sapiens
taccagcagcatgtcaagtttggcaaggcagcaaagcacctgctctgag

SEQ ID NO: 690125 - DNA, 83 bp, Homo sapiens
cagcagatgaatggacaccttgaagcagaggagcagcaggaccagggagaaaactggttgtcctggatgtttgaaaagttggt

SEQ ID NO: 690126 - DNA, 50 bp, Homo sapiens
gtgaagtgctccgtcgcccttgcctccagatacccagaaagcggtactct

SEQ ID NO: 690127 - DNA, 80 bp, Homo sapiens
ttagaaccccaagtgaaaattagaggaataattccggaaacagctacactgtttaaaaaacgatggaaagaactttctaa

SEQ ID NO: 690128 - DNA, 101 bp, Homo sapiens
ggggcctcgctaaggaattcccggcccctcagggccacggctttagcggtgtcttttgcgtgccaggtcatgctggccgactggtgtttgggttcctgaat

SEQ ID NO: 690129 - DNA, 75 bp, Homo sapiens
tgaaggaagaaaacacaggagccggagcagaagcaaagaggacttggatgttgtgggtgatggtatgcagtgtcc

SEQ ID NO: 690130 - DNA, 83 bp, Homo sapiens
ctttgataaatgaaatcttcctaagtataggagtatgcgaccagtggttggaacctgaatgtgatgccagtgctagatcagtc

SEQ ID NO: 690131 - DNA, 100 bp, Homo sapiens
tccgcggcggctgcgaaggcggcggctcctgccctctcgctttccctctcgcgtctctggctgcaggctttacaggaagtatggtgctggcatctgcttg

SEQ ID NO: 690132 - DNA, 100 bp, Homo sapiens
cggcagcggggtaggatggcgctaaagcggatccagaaggtggtgatctttgtgaagtctgtgcagcggtgcattgccttggcccagctactagtggagc

SEQ ID NO: 690133 - DNA, 75 bp, Homo sapiens
gatggtgaaaatctgagaccaatagttattgatggcagcaatgtggcaatgaggattttctgccgtctcttggca

SEQ ID NO: 690134 - DNA, 90 bp, Homo sapiens
agttgttgctcccgcctgagcccagcccccagaaaggattgtgacatatcgttggacccagaattgagatctttaaatggatgagatggc

SEQ ID NO: 690135 - DNA, 75 bp, Homo sapiens
ggaaccatgatgcattgtcagaccctaaaggatcaaccctctgcatacagtaaactcctgagaatgttacctgca

SEQ ID NO: 690136 - DNA, 89 bp, Homo sapiens
cagcagcttgccagcatcgttgcagagcggcaacacccttctcagactcgtggtactacccgtcctatcctccctcctaccctggcacg

SEQ ID NO: 690137 - DNA, 100 bp, Homo sapiens
ccgaacgatacacacgttggatcaaccagctgacgccggagcagctcctaacccagggcgccaatgcttcggcattagagaaagagattggtccagaaca

SEQ ID NO: 690138 - DNA, 100 bp, Homo sapiens
ccagttcctccgccaagcgcggccgccgcccccgcctcaggagatggtaacctgcacctcaatgtgacggcggaggccttcagcccctcgctcctggctg

SEQ ID NO: 690139 - DNA, 75 bp, Homo sapiens
ggaattttgccgatttcatgactaaccagtctgccactgcagagccccgccatggaagacacgccgttggtgata

SEQ ID NO: 690140 - DNA, 75 bp, Homo sapiens
gcaaccaccgccctggccatctaccatgtggcttgggcactgtttaaaggaaagttccgagaaggcatcgacaag

SEQ ID NO: 690141 - DNA, 51 bp, Homo sapiens
gactgcgggtcgcgtcctggccgccgaggttatgaagacagtatggagttt

SEQ ID NO: 690142 - DNA, 74 bp, Homo sapiens
caccagcagcacccgctcaccctcaagtgggtggacagcgaaggcttgggcactgtttaaaggaaagttccgag

SEQ ID NO: 690143 - DNA, 88 bp, Homo sapiens
ttcgcagtggtcgcttcttctccttggtcccgctccccgaggcgcaggtcccccgtgcgccggagatcacggtccccgggccgccgcc

SEQ ID NO: 690144 - DNA, 100 bp, Homo sapiens
tggtggattttgccaaaaagttgcctatgttttgtgaggatctagtgaaaagccatttgatgtatgcggtcagagaagaagtggaggtcctcaaagagca

SEQ ID NO: 690145 - DNA, 75 bp, Homo sapiens
atgggaattctcttcactagaatatggagactgttcaatcaccaggttttcggctttgtgagaaaccttaccatc

SEQ ID NO: 690146 - DNA, 76 bp, Homo sapiens
gtgcatgaaccaaacccacttcgttcaagacaggtgtttaagcatggtggatgcttccaaaagcatcgaagctgtc

SEQ ID NO: 690147 - DNA, 75 bp, Homo sapiens
gcagccagtactctatatgaacaatccgtctggatcacggatgtaggaagtgcttttatcaaaatacaactcaaa

SEQ ID NO: 690148 - DNA, 74 bp, Homo sapiens
catgcttccagcctggataatgattgagccacctgtccagggcgtctctggccgagcctctttttgtggaaaac

SEQ ID NO: 690149 - DNA, 74 bp, Homo sapiens
tgaccatgtgacatctgatgctgtggaacttgcaaatcgaagggtggttggagagagcatatggaagactctgg

SEQ ID NO: 690150 - DNA, 82 bp, Homo sapiens
caggagactcgcaggagcaacacgtgatgtgtctacttatcagggcttgttagcagtggcacaagatcttacagaggatgaa

SEQ ID NO: 690151 - DNA, 120 bp, Homo sapiens
ctcgactgggccagcatcaacggcttctgcgagcagctcaacgaggactttgagggcggagctggagtttgttcagatcatcatcatcgtggtggtgatgatggtgatggtggtggtgat

SEQ ID NO: 690152 - DNA, 90 bp, Homo sapiens
atctcctgctattccttgggctgcctttcctgcagatgacaacggcaacacgacaagaagtccttggcctctaccgcagcattttcaggc

SEQ ID NO: 690153 - DNA, 100 bp, Homo sapiens
atttatccgactgcattttgggcataaccggaagaagcatcttaactacacagaattcacgcagtttctccagtttgctaatccagactttacacaacct

SEQ ID NO: 690154 - DNA, 123 bp, Homo sapiens
ggactccctcagctcggcaagagactgcctcagtttgatgacgatgcggacactgtgtgtgaatgagcttaaccagtggctgtctgcgctgcggaaggtgagcatcaacaacaccggactgct

SEQ ID NO: 690155 - DNA, 75 bp, Homo sapiens
ggccgacttcgatgatcgtgtgtcggatgaggagaagataaaataccatgaggagtttgagaagagccgcatggg

SEQ ID NO: 690156 - DNA, 80 bp, Homo sapiens
gtcccgagggccaccccctcccgtgggccccgctggcagtggctacagtggaggtttggtgcacctcgatttggaggaag

SEQ ID NO: 690157 - DNA, 98 bp, Homo sapiens
cggcaccaaggcccccaagccctccttcgtgtcgtacgtacgccctgagcactattcctgatcagagaactccagttgcttcaacacacagtatcagt

SEQ ID NO: 690158 - DNA, 75 bp, Homo sapiens
cgaaggaaaaggaggaattcgccgtgcccgagaatagctccgtccagcaggctttagtgtatgaacatcctggac

SEQ ID NO: 690159 - DNA, 82 bp, Homo sapiens
acttagccacaatctccttgtttcagaagtgtacaaccagttgaaatttccagtaaagaggttttaaaagactacatcaagc

SEQ ID NO: 690160 - DNA, 100 bp, Homo sapiens
ggtggcagtggctccatgtactctctgcaagggatccacggggacatgaatgtcattctctggccaattcaggttttgagaacagagtgctgttttagag

SEQ ID NO: 690161 - DNA, 100 bp, Homo sapiens
ttcaagtctgcaggtgtcacgctgcggagccaacggggacattggagctccccacaccactcattgctgcccaccagctatacaactacgtggctgatca

SEQ ID NO: 690162 - DNA, 75 bp, Homo sapiens
gagaccaacctgaagcggcggcaggtggtccgcggcttctcggagcttggatcgcttacacctgagacgaactac

SEQ ID NO: 690163 - DNA, 90 bp, Homo sapiens
gtttagccacaccaggctggagaatatggtgcagaggccctccacgaggcggggtttcaccatgttgcccagactggtcttgaactcctg

SEQ ID NO: 690164 - DNA, 76 bp, Homo sapiens
tctcaactgaatggaatgaacgacagcctgcaccagattagaaaaagtggatcttttccaatgccagagcttaagc

SEQ ID NO: 690165 - DNA, 98 bp, Homo sapiens
gccgcgccgccaccgtctgaactaggatgtcccgacatgaagaataatccagaatggctactctgatctatgttgataaggaaaatggagaaccaggc

SEQ ID NO: 690166 - DNA, 100 bp, Homo sapiens
ggaagtggttggaaatggcacctatggacaagtctataaggtcatttgattgcccgcctcagaacgatggatctgcatctcttcgactactcagagccag

SEQ ID NO: 690167 - DNA, 74 bp, Homo sapiens
agctcttctcacagaaggaagataaactccacatatttctgtttggtgcacctcgatttggaggaagtagggca

SEQ ID NO: 690168 - DNA, 96 bp, Homo sapiens
ccgggatatggccttctccaaggaccacgagcaactctacatcatgtcagagaggcaggtcaaagctcagattcacagttgcataagccgtcacct

SEQ ID NO: 690169 - DNA, 100 bp, Homo sapiens
gggaggctatgagcgagtgcaccggctgccacaaggtcaactactgctccaccttctgccaacgcaagatgtggactttcaccctctccctaaaaagatc

SEQ ID NO: 690170 - DNA, 75 bp, Homo sapiens
cacagacacagccggggtcgggagccgcccggggcagggctcgggagagcggaagcgtaaaagatgtgttgtttt

SEQ ID NO: 690171 - DNA, 49 bp, Homo sapiens
gagccctatgagcagtggaacctaggaaatgcactcggtgatggaaaga

SEQ ID NO: 690172 - DNA, 90 bp, Homo sapiens
aaaactgaattaaggaagacttcagatgctatgacttcacacctatggattcttctgcagtttatgtgttaagtagtatggctcgccagc

SEQ ID NO: 690173 - DNA, 132 bp, Homo sapiens
cggcgcggctgccggctgccctgtgaatgggaagttacgcgaagtccacccagcgtttctgagacactggagagcagcgtcctgtgccaggagaaaggcttgggcgcgcgggacctggcccaggacgctcag

SEQ ID NO: 690174 - DNA, 90 bp, Homo sapiens
cttccacttcgggcttcctttccacagggtgctgacacctttacggcaaaagttaatattgaagtacagttggcttcagaactagctatt

SEQ ID NO: 690175 - DNA, 100 bp, Homo sapiens
ggtggaagaacacctttgatgaaagctgcaagagctggtcatttgtgcactgtgcagtttcttattagcaaagtagacccaaatgatttgtacattgtag

SEQ ID NO: 690176 - DNA, 100 bp, Homo sapiens
ccgcactcgccgctccctgggcaggccggggcacccgggcacgcagggcgcgcctggcgagcgccccgggaggtgtggacactgccagcggctgcagccg

SEQ ID NO: 690177 - DNA, 73 bp, Homo sapiens
ccccagtcggtgctccggggaggtcacctgacgaggagataagaccatcatcatgtggaaactgaccagggat

SEQ ID NO: 690178 - DNA, 75 bp, Homo sapiens
catcatgtaatagccagacatgagtatacattcagtatcatggatgaatttcagaatcccaaggactgcagcaaa

SEQ ID NO: 690179 - DNA, 100 bp, Homo sapiens
cgggctgctgctggccatccacctgtgcctcttcaccatgttcggaatgctgctgttcgctggtgggaagtgtctttggtgcaacactaacaaggcttgt

SEQ ID NO: 690180 - DNA, 50 bp, Homo sapiens
agcatggagttggcaccccaaaagaaagcaggaacgaatttcatatacac

SEQ ID NO: 690181 - DNA, 80 bp, Homo sapiens
gcgagtcagtgactgaagcgcccgtccattccaagggcaattcaagctgctggaacaagaccgagatataaaggagccag

SEQ ID NO: 690182 - DNA, 88 bp, Homo sapiens
caacgtcaccagcagtaaaactgcatgatgaaacgcttacttatttgaaccaagcatgccaatgaagatgtggaaagaatgttactag

SEQ ID NO: 690183 - DNA, 50 bp, Homo sapiens
ccagagtattgccgcggtggaaatggaggggtcctactgggcaatagaca

SEQ ID NO: 690184 - DNA, 100 bp, Homo sapiens
gggtctcgggggccgctctgggatcccggccaccagcaattgtccgaagagaagctgaatttggacgacagccagtgggaggacatccacgttgtcaccg

SEQ ID NO: 690185 - DNA, 100 bp, Homo sapiens
ggatttccaagtgatttcttccaaagcacaggaatctcactctgttaaagctggtctgttctaactgagtacaaggcgagtggataattccaacacaaga

SEQ ID NO: 690186 - DNA, 74 bp, Homo sapiens
tcgaatctcttctccctccccttcttgactgaaactgttgaggagcccatggaggaagaagaagcagccaaaga

SEQ ID NO: 690187 - DNA, 101 bp, Homo sapiens
agatcccagccagtctctactcagcctggagcaagtgagggagactctgatgtggactcggagctggaggaccgtgttgacggggtcaagtcctggttgtc

SEQ ID NO: 690188 - DNA, 90 bp, Homo sapiens
catgcatccaacaaaaccttcccaacacattggaacagccttccttgaatccagaagctggcaaacagcatcagccatgcagacctattg

SEQ ID NO: 690189 - DNA, 96 bp, Homo sapiens
ccggccggcgtcacagcgaatgtggaggatagactacagtgccgctggacactgcccatctctaagataagaacctggaaaggggactctgttggc

SEQ ID NO: 690190 - DNA, 75 bp, Homo sapiens
gaagacctccgaaggaccatagacatgggaaagcggaaccaccaaaaggagtgatgatcaacgatctcatgataa

SEQ ID NO: 690191 - DNA, 83 bp, Homo sapiens
cgaccctggccgccccgagcggagcctggagggtggctttgtccactatggtgaagtgaccaatgactttgtcatgctgaaag

SEQ ID NO: 690192 - DNA, 96 bp, Homo sapiens
cctgcgtcctttttcgtttttcggatgatgccttcaatactacctttatttccaccataggccatactggagatgttactattcaaacacagatgc

SEQ ID NO: 690193 - DNA, 50 bp, Homo sapiens
gagaattaaagtctaactctccaaatggtaaatgggaagttggtagctct

SEQ ID NO: 690194 - DNA, 75 bp, Homo sapiens
gccttccagcacggcatctgctttgaggccaaggcatcaccaactctgaatttcatactggtcaagcagagaaga

SEQ ID NO: 690195 - DNA, 97 bp, Homo sapiens
cctacagaaacaaaatgtcaacaaattgatggatcttgctgacgtcttgactgtgaacccggactcaccggcgtcggaccctacggttttccacaag

SEQ ID NO: 690196 - DNA, 73 bp, Homo sapiens
gatcatggagtttcaagcctgagtgtgaagattagcttcatagcaagtgaagtactcaagttgttcagtctta

SEQ ID NO: 690197 - DNA, 100 bp, Homo sapiens
tcatgactattgcaccacgcccggggggacgctcttctccaccacaccgggaggtatcactggacaggccatggctccacggtcccggcgacgaaggcac

SEQ ID NO: 690198 - DNA, 100 bp, Homo sapiens
aagaggcactgctgagggggcgcgaggggaacggaggccagagctgcggctacttcacccccctcaacaccccacagagctatgaaaccctggaggagct

SEQ ID NO: 690199 - DNA, 124 bp, Homo sapiens
aagtgaagctgtgggacacgcggttcttctccagcgccctggcctccctcaccttggacacctcgcttggttacagaatgtctgaaggggacagtgtgggagaatccgtccatgggaaaccttc

SEQ ID NO: 690200 - DNA, 100 bp, Homo sapiens
aggctgcttactggaaactggatgcagcaaggaaataggatttaaccgctctctgcctcccagatcctgaggaggatgaaggggctggccctggaggccg

SEQ ID NO: 690201 - DNA, 80 bp, Homo sapiens
atggagagagactgcatggggagcttctccatatgggtgattttggaagcattcatagacccggaattgttgttgactat

SEQ ID NO: 690202 - DNA, 50 bp, Homo sapiens
gggaagtcgacggcgccggcggctcctgctcatgatggagcagtccaaga

SEQ ID NO: 690203 - DNA, 90 bp, Homo sapiens
ccctaatgatgatgctcagtttgatgcgtcacactacgacagtgagaaaggaggaatagccaggccagaagaaggaaggcctgtggtgag

SEQ ID NO: 690204 - DNA, 100 bp, Homo sapiens
gctggtgcaactttcagaagtggtcccagaaagtggaatctcaagaacgagaagatgttctggctggaatgtctggaaaagcaattaaaggtaaagttgg

SEQ ID NO: 690205 - DNA, 75 bp, Homo sapiens
tcctggatgaggctactagtgccctagatgtgcagtgcgagcaggccgccttggacaagattcgctatgagagcc

SEQ ID NO: 690206 - DNA, 87 bp, Homo sapiens
atctttaaactacacaaaagtggaacagctttgttcagtggccataaaatgcagtaaaaacaaatccagttcccaagaagctgtaca

SEQ ID NO: 690207 - DNA, 104 bp, Homo sapiens
gctgcaggatatgatcaatgaggtggatgcagatgggctcgggccatcaagtaccggcaggagaaccaggaggcagtgggcggcttcttctcacagataggaga

SEQ ID NO: 690208 - DNA, 75 bp, Homo sapiens
gaggccgaggggtagtgggcagggcttattctgtgtatgatgaagagattggttattgccagggccagtcatttc

SEQ ID NO: 690209 - DNA, 98 bp, Homo sapiens
ggagcccacgactcccgatagtgagagacctgctcaagctctcttaagagattatgctggaaggggtctgtgtacatcagcaactttcaaacccattt

SEQ ID NO: 690210 - DNA, 100 bp, Homo sapiens
catctttgtggctgtgcttgccaggcctggctccaggccgcctgggcagaatgtcacgatggacgagggcggcacgcccctgctccccgacagcctggtc

SEQ ID NO: 690211 - DNA, 100 bp, Homo sapiens
ccacgcacctggacgacgcccggcgccagcacatcgcagatgccatccggcagagcaaccagattctgcgggagcgctgcgaggagcttctgcatttcca

SEQ ID NO: 690212 - DNA, 101 bp, Homo sapiens
cagaagaagggaaggcgcgagtgaggaaaggaggtactgtagtgaacacctacctcttcatgatgcaagcccaaggcattctgatccgggacaacgtgaga

SEQ ID NO: 690213 - DNA, 94 bp, Homo sapiens
gtaaataccaagccttgaaagggaccatggtgcggcctgtgagacttaattcagtgcacaaatgagatgaatgtgaacatcccacagttggcag

SEQ ID NO: 690214 - DNA, 74 bp, Homo sapiens
cttagcttggagtttttatgatgatgtcacagtaccagatgagagtagtgaagaagaggaagaatatgaaacta

SEQ ID NO: 690215 - DNA, 75 bp, Homo sapiens
ggctgtccaagtgcctgggatgcagagatggtgaattgtctttgagtcggtcacttgtcaatagctctgataaaa

SEQ ID NO: 690216 - DNA, 75 bp, Homo sapiens
ggaagcttaatatggattccaaagagcgtttggatcaggacggacgcttgaattaaacaaccaccatgtcgagca

SEQ ID NO: 690217 - DNA, 100 bp, Homo sapiens
ccaagggccctgctggaacccctggagcaggaggaagcggtgattctccaggccttggatcctggccaatttggagcaaggcttagcagaagacggcggc

SEQ ID NO: 690218 - DNA, 100 bp, Homo sapiens
accaggactcggaggcaatgaaacgacttcaggccaccccccaaggtgaagaactgaagttcagcgctgtcaggattgcgagagatgtgtgttgatactg

SEQ ID NO: 690219 - DNA, 90 bp, Homo sapiens
ctggattgctgacggcagccctctcagctgtcctgagagcacgtctctacatctctacctgcattctggaaaccgggagaaagccaaaac

SEQ ID NO: 690220 - DNA, 83 bp, Homo sapiens
aataaccaggtgcttggcaaaatcgagcgggccattgggctgggttacgacccctacaaccctgagctgcccaagccccccgc

SEQ ID NO: 690221 - DNA, 75 bp, Homo sapiens
ggtgaagcctcctgcgccggccttgcctcggtttctgtagaaaatgtttcctgactgcaatgagggaaagcggag

SEQ ID NO: 690222 - DNA, 75 bp, Homo sapiens
atttacctgtgagatgtttcatcccaacactctacaagtttcacgctgtttaagtcatgaacctacaaaagcctg

SEQ ID NO: 690223 - DNA, 82 bp, Homo sapiens
agaagagcaccgacgcagacctggccatggacctggctcaggcaggcagcacagtggaatctaagatctacgacacactcca

SEQ ID NO: 690224 - DNA, 100 bp, Homo sapiens
aaaataagcaacttggccacgaagaagaggtggagcacagtgaaagaattcaagatgccacctaatataaactggaaagaaataatgaaagttgacccag

SEQ ID NO: 690225 - DNA, 75 bp, Homo sapiens
ttaggagaaagttgctgaaggcaggagggaacattaaccaggtggtatttgttggaaatttcttgagaattaata

SEQ ID NO: 690226 - DNA, 90 bp, Homo sapiens
ccgatatcctcgtgactgagtttgggggtatcagctctgtgataacagcgtgggggtgctcttcaatgactcaacacgcctcatcctcta

SEQ ID NO: 690227 - DNA, 95 bp, Homo sapiens
accatgacgctctgaacatcatcgacatggccctgagtgaatacccagaaaatttcatcaaatgcagccctgaggatttggctactgcatataac

SEQ ID NO: 690228 - DNA, 80 bp, Homo sapiens
attatttgcgcatttcaagaagaacaacctaactccagatatctacctaattgattgggtgtttctgtggcctgggactg

SEQ ID NO: 690229 - DNA, 58 bp, Homo sapiens
tgaagccattcatgcaatcttgagatcagaggacacaatgtttgcacgaggactgaag

SEQ ID NO: 690230 - DNA, 98 bp, Homo sapiens
cctaaatgcactctttcgaaagaaagtttgtcagaggaatggctgtgaatggatgcctggaaggaccatcctctaattttctcagttgcctgttcatt

SEQ ID NO: 690231 - DNA, 83 bp, Homo sapiens
gtcagagagagagcttggttaacttgggagaaagtttcatctgtggatggagtattggctgcctgctgtttcccggggagatc

SEQ ID NO: 690232 - DNA, 75 bp, Homo sapiens
cctgaagtgtctttggtccaacgttgttccagctgagtcagtgctgattctctcaaatagagcttgaaggataaa

SEQ ID NO: 690233 - DNA, 100 bp, Homo sapiens
gtcctgagctggaccagagccctcctccagaaacccctgcgtccgccacggcccagcttcagaatggcagaagatgatccatatttgggaaggcctgaac

SEQ ID NO: 690234 - DNA, 80 bp, Homo sapiens
acgaaggtgaagccacggaagataagaccggagagcaatggtgtgatctccgcacactgcaacctctgcctccagggttc

SEQ ID NO: 690235 - DNA, 95 bp, Homo sapiens
ccagaatggaccaggtcacatgtgctgcttaaaattcagggctaagcattttgggtgattttaaactaggctgatcttataaatgagctatatca

SEQ ID NO: 690236 - DNA, 75 bp, Homo sapiens
gacagaatggatagaaattttaaagactgttgtgaacagggatgtacctaatgaggttgaaacggaacagtatta

SEQ ID NO: 690237 - DNA, 74 bp, Homo sapiens
ccgcgctccagatgaagtgtgagcactgcacgcgcaaggtatggtgctgggtgcagatgcagtgtggctctgga

SEQ ID NO: 690238 - DNA, 97 bp, Homo sapiens
ctgaggcgctgggagccgcaccacctaacgctggccgacaacagcctggcgtccgccacgtcaggatggctaaaggtgaccccaagaaaccaaaggg

SEQ ID NO: 690239 - DNA, 117 bp, Homo sapiens
gtcaggaggaacctcagaacatgggtccgtggtcgtttgtttctccaaggtttgaaaagcagctggcctgcaaggatgactcactggttgtgtggaaggaagtcgatttgacccggc

SEQ ID NO: 690240 - DNA, 154 bp, Homo sapiens
ctctcgtggcattatccttcagtggggctattggactgacttttcttatgctgggatgtgccttagaggattatggaccgaccaagaccatcactatgaccgatggagactatgattatctgatcaaactcctggccctcggggattcaggggt

SEQ ID NO: 690241 - DNA, 90 bp, Homo sapiens
atttactgtatgtggcactatcaaatctagatgcagctacttatcagccggccaagctcgctgaggccttcaagtacttcgtgcagggca

SEQ ID NO: 690242 - DNA, 75 bp, Homo sapiens
ctgagtggttgtgtggtcgcgtctcggaaaccggtagcgcttgcagcatgatgttgtgaacacaaagatgtttga

SEQ ID NO: 690243 - DNA, 48 bp, Homo sapiens
tccgactctcccacctgctaaggaagatgaagtcctcagtacattctg

SEQ ID NO: 690244 - DNA, 90 bp, Homo sapiens
cttccgccaggcggtgatgaagaatccccccgaaaggaccccccagctgcaggtggagctggagcaagaataccaagacaaattcaaaag

SEQ ID NO: 690245 - DNA, 88 bp, Homo sapiens
taaccttagccacaaagtcaaaggtgcaatgattctggactgagacgcgcttgggcagaggctatgtaatcgtgtctgtgttgaggac

SEQ ID NO: 690246 - DNA, 100 bp, Homo sapiens
ccgagagcgcgaatatcgtcatcgttagaagagtaatcaagtcagaggattatatgacttttatctgcctagagaagaactatggatctacaacatggag

SEQ ID NO: 690247 - DNA, 83 bp, Homo sapiens
agcaagctctataagattcttcaaggtggggttggcatcccccacatacgtatgacaacattttgatggaagaggctgctcag

SEQ ID NO: 690248 - DNA, 93 bp, Homo sapiens
gttgctggtgttctatactggaagaggcatgccagaggtagagcagctgagcgggctttggacaccatgaactttgatgtgattaagggaaag

SEQ ID NO: 690249 - DNA, 100 bp, Homo sapiens
ccggagtccgccccgtgaggagaatggtggagctcatgaaggacttcagcatttgggtccttttggcaacatccccaacatcgtggcagagttgactgga

SEQ ID NO: 690250 - DNA, 75 bp, Homo sapiens
gtccacccaccgccgccgcctcccaggctgtcctggaggaccacagtcagatgaggcagatggagctcgaaatca

SEQ ID NO: 690251 - DNA, 100 bp, Homo sapiens
taaaagatacctgctttcttcagcctatgtagacagccacaaatgggaagcaagagaaaaagaacattactgtcttgttgcatccaagaattgatgcccg

SEQ ID NO: 690252 - DNA, 98 bp, Homo sapiens
cttggagcacttcctattccactggattgggaaagaccatggcaggagatgttgcagtaaagatcctaaaggttgtcgacccaaccccagagcaattc

SEQ ID NO: 690253 - DNA, 134 bp, Homo sapiens
cccagacccccgatgtcgtgttcgcaagcatcctagcagccttctccaaagccacatatcgtaaaaaggaccttgtaaaactacaggcaggggaatatgtttctcttgggaaagtagaggcagctttgaagaat

SEQ ID NO: 690254 - DNA, 90 bp, Homo sapiens
gctgcccgcgtccgaggctcgcgggcggcgggcccggtgtttggccagcgcttggatgagactgtggcctatgaacagaaattcggcccc

SEQ ID NO: 690255 - DNA, 88 bp, Homo sapiens
ttgtggctgattacactctagaaaagaagatctatgaccgtcagatttccaagcagggcatgtcagcctattccaagcctaaacgggg

SEQ ID NO: 690256 - DNA, 88 bp, Homo sapiens
gccagtttgagaaagtctctacagaccttgttaacaagcacaagccctggctggagcccacctaccacggcatagtcacagagaacga

SEQ ID NO: 690257 - DNA, 75 bp, Homo sapiens
cgactgggaaacctctccatttcaaaggatgcccttttcatcgaatatgattcatccagccttccagctctgtta

SEQ ID NO: 690258 - DNA, 100 bp, Homo sapiens
ggctgacttcagctcctggacacccttagaattcctagttgagaaggatttgatgccctggatccctttattcccatcctggtttccaactataacccaa

SEQ ID NO: 690259 - DNA, 82 bp, Homo sapiens
aataggcagctcaatgacagtcaagtggaaacaactgtctgagtccagatattgtctatggttgatgaaataagaaacagag

SEQ ID NO: 690260 - DNA, 82 bp, Homo sapiens
ccgggagcggcagaagttacggcgacagctcctcgcgcagcaggtagttagaaacaaacctgtggcaaggcaggctcctggc

SEQ ID NO: 690261 - DNA, 97 bp, Homo sapiens
tgaaggagtgcagaggcatcacctgaaagatctacggaatccagaggcagcattgtctccaaccttccgtagtgacagcccagtgcctactgcaccc

SEQ ID NO: 690262 - DNA, 83 bp, Homo sapiens
gttgaggctgaggactgactggggttctgagactccctgtcccggaccgcaggtagcctttccagtaaatatatgactcaggg

SEQ ID NO: 690263 - DNA, 100 bp, Homo sapiens
atggcatttggctttgattactgctactggtcagtcaacccagaggatccccagtatgcatctcaagatgtgcggctcagcacgtcactttggactgtcg

SEQ ID NO: 690264 - DNA, 83 bp, Homo sapiens
ctggcctcagcccgccacatcaccctgacctgcttacgcccagttttcggctttgtgagaaaccttaccatcaaacacgatgg

SEQ ID NO: 690265 - DNA, 111 bp, Homo sapiens
ctgaggtccagatgaaagagaagtttctggtcactccccaggattatgcgcgggtgaagttgaacaaattgctatgatgaaaccaaaaggccagactgaacacgatgaggg

SEQ ID NO: 690266 - DNA, 50 bp, Homo sapiens
tggaaagctttaggagttcacagtgcagagtggcatgattccgactggat

SEQ ID NO: 690267 - DNA, 74 bp, Homo sapiens
agcgcggcgagatctacgtgccaggtcaaaatgcagatcttcgtgaaaacccttaccggcaagaccatcaccct

SEQ ID NO: 690268 - DNA, 75 bp, Homo sapiens
ctgtcctcctagccaaagaaagatgtgtatatctcatgattgatatggagaaactagtcatgggccaaaggtcaa

SEQ ID NO: 690269 - DNA, 98 bp, Homo sapiens
gttcgagaggaagattcttacctctttgatctcgacaataagcaaacggggattcagcgtccgatcctttggaacagggactcacgtgaagcttccag

SEQ ID NO: 690270 - DNA, 83 bp, Homo sapiens
aaataccaggctaccatggtctacaagactctcttcgctctttgcatcttaactgcagtttccccctttctagggtgaggatg

SEQ ID NO: 690271 - DNA, 50 bp, Homo sapiens
cttggaccagacctacttggatgatggctactgcagcactggggtgtcag

SEQ ID NO: 690272 - DNA, 75 bp, Homo sapiens
tggcatggccccgcaggtcttcacccaggccctggagtgcatgcgcaggagaagttgccccagtgcaaggcactg

SEQ ID NO: 690273 - DNA, 83 bp, Homo sapiens
cagaagacaaagtcaattccatggtgaaatcgctccgttttcttgggcagccctacatggtaaattcaggtctctgcttacaa

SEQ ID NO: 690274 - DNA, 90 bp, Homo sapiens
acagaagtcaacccaaagatctggccttcctccggatgctcttccccgagaagctggatggagacaagaaggggcgccccagcaccgccg

SEQ ID NO: 690275 - DNA, 75 bp, Homo sapiens
gcccagcgcgcctcgtcgccatgccatccagactgaggaagacccggaaacttaggggccacgtgagccacggcc

SEQ ID NO: 690276 - DNA, 90 bp, Homo sapiens
agccgcggcggcagcagcagtgagaggtctgactcccagcaccgcttctggaagcccagcgaggtggaggaggaagtggtcaatgccgac

SEQ ID NO: 690277 - DNA, 80 bp, Homo sapiens
gtcgtgttctgatcactactgacttgttggtgatttgaagatattaaagctagaaattggaactagaaaatcaaaagaat

SEQ ID NO: 690278 - DNA, 90 bp, Homo sapiens
agctgaggcagagggtggcccatgagccggttgcgccacccgaggacaaggcctctccttccgatgaaaagagaaaggaagaatggacta

SEQ ID NO: 690279 - DNA, 100 bp, Homo sapiens
gcactgttaaaaaaccaaagacgggcgcaaagattgcttgaagaaatccatgccatgaagagcctggagaaagttcttgtggaattcagtcacaaggagt

SEQ ID NO: 690280 - DNA, 87 bp, Homo sapiens
agcttcaagaacaagggccgcgatgtggaacttcgatgtttttgaagcaggcatttgaaggagaataccctaaattattacgtcttt

SEQ ID NO: 690281 - DNA, 74 bp, Homo sapiens
tggaaacaatggcatttacagaaagagtcaacagcagtggcaacaggaaaatgttggggcttttcaggaagcat

SEQ ID NO: 690282 - DNA, 100 bp, Homo sapiens
aagtcaagagacagcgattggacagaatttgtgaaggaccggaagctcaccaagctggagcggcagcggttcaaggaagaggctgagatgctgaaaggcc

SEQ ID NO: 690283 - DNA, 83 bp, Homo sapiens
tgtctgctcctgtcgccttcgcctcctaatccctagccactatggggcactatggcagacaaagttaggaggcagaggccgag

SEQ ID NO: 690284 - DNA, 100 bp, Homo sapiens
gccgggagcgctgactggcccggctgggcagggtctgtgacaagcagggaacaaggcaacggacggcgcaacccagccccggctgacggacgctggcgac

SEQ ID NO: 690285 - DNA, 98 bp, Homo sapiens
gctttggttggaagacctattatcagatcaaccaccaaagtgggaaacattgaaatcaaggaggtgaagatcgagaacttattcagagaaggaaagag

SEQ ID NO: 690286 - DNA, 89 bp, Homo sapiens
gcggttgacgttgcctctcggcggcgcggcggcggtggacgagtacctggagtaccggagggttggattgagattgttggatgtgctga

SEQ ID NO: 690287 - DNA, 75 bp, Homo sapiens
cagttttgccaggtgtttgttaccttgggtgaaggttgccgaactgtccccctggctggacatgtggggtttgac

SEQ ID NO: 690288 - DNA, 50 bp, Homo sapiens
gcggcttctggttctcacttgtcgagactctccaacatgtgccttctgac

SEQ ID NO: 690289 - DNA, 90 bp, Homo sapiens
cgagagtgggcgagaacgtccactgcgggccggcgaaagctgagaatctcgatgctggcctggagcagaaactgagctggaccactggag

SEQ ID NO: 690290 - DNA, 75 bp, Homo sapiens
cgagcccgccttctccgaggcgcagaagtggattgagagccaaggattgtcaccagtgaagaggtcattattcga

SEQ ID NO: 690291 - DNA, 83 bp, Homo sapiens
ttattcgagtgaccgagaccgcggccgggaccgagggtagaagaagaaaggtgccactccggcatgaagacagactcgcttag

SEQ ID NO: 690292 - DNA, 83 bp, Homo sapiens
cttggtgactggtctattcaagttcaagtgaatatggagtcccctgtttccacaccagcagtgctgccaatacaccttttggt

SEQ ID NO: 690293 - DNA, 83 bp, Homo sapiens
ctcacaatgaggctccctgctcagctcctggggctgctaatgctctgggtctctgggccgcgatgggcctcttggaacattgg

SEQ ID NO: 690294 - DNA, 80 bp, Homo sapiens
cctggttgctgaagaggaggcggaagccaaggacacattcagctaacgtattttagcaggtggagtgaggttgaagattc

SEQ ID NO: 690295 - DNA, 100 bp, Homo sapiens
gggaagttcaagatcaaagtgccagcagattcagtgtcatgtgaggacgtgcttcctgcttcatagataagagtgcacagccagagaacaacacatcaca

SEQ ID NO: 690296 - DNA, 50 bp, Homo sapiens
ctcccgtccagatctccaccgtacagagtcaggatctcattctgttgccc

SEQ ID NO: 690297 - DNA, 75 bp, Homo sapiens
gtgatctttgataagaatgattcagattttgaagctaaagttaagcaggaatgatgagaagacagcagctgatta

SEQ ID NO: 690298 - DNA, 100 bp, Homo sapiens
taatctcaaacactatcattcatatgtgcctcattgagcaaatctttaatgaggatctatatgccagagtttcactctgtcacccaggctcgagtgcagt

SEQ ID NO: 690299 - DNA, 50 bp, Homo sapiens
tgggcacccacggagcctccggggctgcattgtcccagatatagccgttg

SEQ ID NO: 690300 - DNA, 100 bp, Homo sapiens
tcggcgatggagctgttatttttagatacttttaaacacccgagcgctgagagacaaagcatggaggacacaagaatgggaggaaaggcggactctcagg

SEQ ID NO: 690301 - DNA, 100 bp, Homo sapiens
caccgaggcgaaggggccaaccatgggaaaggagagtggatgggactcaggctgtccgttccttgctggagaatttggccacaaagagttgccaagatag

SEQ ID NO: 690302 - DNA, 100 bp, Homo sapiens
ctgctgatgaagatgatgacgatgatgatgaagaggatgatgatgaagataaattcaagatggaggcgctttcctactgattatgcttccacctcagaag

SEQ ID NO: 690303 - DNA, 50 bp, Homo sapiens
gctgccgctgctcgccgccgtggaagcttcctgcctgacacagctcactt

SEQ ID NO: 690304 - DNA, 138 bp, Homo sapiens
cttgagcagaggaacctatacaaagaagtgatgctggaaaatctcaggaatctggtctcattggctggcaaacttccccagactctgcgaggaaacggaaaggattgttgctaaccacattcgtgagcgagaagggaa

SEQ ID NO: 690305 - DNA, 96 bp, Homo sapiens
ttctggaaggaaacccagacacgagtgtgacatgttggcgagccaagtttatggaggcctttttttcccatgttctacgtgggaccattgatgtgt

SEQ ID NO: 690306 - DNA, 85 bp, Homo sapiens
ggatggaacctgagctgggtctctgactcacttctgactttagaaaagcagcatctgttatagcaaaatacccacacaaaataaa

SEQ ID NO: 690307 - DNA, 95 bp, Homo sapiens
tggtactgcagtggcaactaacaaagctccagggttccttgaaaagaaaacaggtagttaacctatctcctgccaacagcaagcgacccaatggc

SEQ ID NO: 690308 - DNA, 100 bp, Homo sapiens
gtgtcttcagtgcctctgcctgcggagaatgtgacaatcactgctggtcagagggttaaagcacgaattgggagctctcagcgacatcaccagtcagcag

SEQ ID NO: 690309 - DNA, 100 bp, Homo sapiens
aatcgagtaccagttttttgaagacagacacaggaacccaagccagaccgtctccttgtattgaaagtactatggaatgatttcctgatgtgctactcct

SEQ ID NO: 690310 - DNA, 83 bp, Homo sapiens
ccacctttgagcctcttgagcctgtgaaggacactgacattcagaactgccattggatgtccagaatcccctgtagttgataa

SEQ ID NO: 690311 - DNA, 74 bp, Homo sapiens
tgcagcatccttgatgataaaccagtaaatgttaattatagaaaatgccaagtaggaaatttgccgatggtgaa

SEQ ID NO: 690312 - DNA, 98 bp, Homo sapiens
ggcgttcttccgctggctcagccgcaagtacccgtccatcatagtcaactgcgtggaagagaagagcggttccgccaccccagccgcagatgtttggt

SEQ ID NO: 690313 - DNA, 101 bp, Homo sapiens
tacctggatcctgctcctctgggttgaaacccgggcgccgccaagatgccgggcagctgcaatgactctccgcacggtattattgtcattgcaagcactat

SEQ ID NO: 690314 - DNA, 100 bp, Homo sapiens
agccgggctgtggtcactaatgtacaggcagaaaacgagaggctcaccgcagtcgtgcaggatctgaaggagctcattatcaaattatagtgatttgaag

SEQ ID NO: 690315 - DNA, 75 bp, Homo sapiens
aacttttaagtggagtggtggatcagaccaaagatggttttctggatatgccgcagaaggatccgtgccagaagc

SEQ ID NO: 690316 - DNA, 101 bp, Homo sapiens
ttaggcgtggtgaggctgccgggtctcctgttccaactccacctaggggactcgggcaagggtgccgaagatagacaagaggcacacagagacagaccaac

SEQ ID NO: 690317 - DNA, 101 bp, Homo sapiens
cagccatgatctccttaacggacacgcagataactctcaggagccttctccgcagttggcttcctcggtagcttccacacggagcatgcccgagagcctgg

SEQ ID NO: 690318 - DNA, 75 bp, Homo sapiens
gatgcgcgccgctgccgctgcgtgggggtgaggggatcaggcttgcacagaaatctggaggcagtatcacctaac

SEQ ID NO: 690319 - DNA, 100 bp, Homo sapiens
tatcacccaccacactagaatggagcactacagagtcttacttctcgtttgccaaaaactggagaaaccatccatggacataagttttttattggctttg

SEQ ID NO: 690320 - DNA, 101 bp, Homo sapiens
agaacttccgctttggaaaccctctgcacattgcccagaagcttttccgagggaactctaatgatccaggacaaagaagttaccctggagtatgtatcaag

SEQ ID NO: 690321 - DNA, 88 bp, Homo sapiens
tcagctgcctgctaacatagctgtttgcagttctaagactcagattgatggacaacttttcttaattaagcaccttttgatacttcgt

SEQ ID NO: 690322 - DNA, 51 bp, Homo sapiens
ccagatatagccgttggtacaaaggtgtccctggccagtgtccttccacct

SEQ ID NO: 690323 - DNA, 82 bp, Homo sapiens
taaactgtggaccttgaagttagcagggctccagcggggccccacagacgagcaggatgcctgtccccatgagtgccaagaa

SEQ ID NO: 690324 - DNA, 74 bp, Homo sapiens
cctgaaatctggagtgaagaacgccgccatccagccaccattccaagaatgctgaccccctgaaggtgtacccg

SEQ ID NO: 690325 - DNA, 90 bp, Homo sapiens
gaaagaaatgttgcagtatatgtatggaagagaagagagcgactggacaattgtgctatcctgaatggaaaatagaggatacaatggaaa

SEQ ID NO: 690326 - DNA, 75 bp, Homo sapiens
actacctcctgaccctaatgaacattttaagggaagaaagtcggaggctggctttggctgcgaaaagagaaaaaa

SEQ ID NO: 690327 - DNA, 75 bp, Homo sapiens
gagtcatttccttcgtacccacagtgcttcatgagagccactgaagatcctggtgtcgccatgggccgccgcccc

SEQ ID NO: 690328 - DNA, 98 bp, Homo sapiens
cgcctgtgtggcaagagtagaaggagcatcgatgcaggtggccagcatcgaaatgttcagccttttagtgatgaagatgcatcaattgaaacaatgag

SEQ ID NO: 690329 - DNA, 83 bp, Homo sapiens
cgcggatctcaccgccgctcagggccgggctctcgccatgggtcactgtcgcctctgccacgggaagttttcctcgagaagcc

SEQ ID NO: 690330 - DNA, 98 bp, Homo sapiens
agagctgcagtatgtggccctgcgcaacatcaatctcatcgtgcagaaaaggatgcttaaatggcagaggccaagcccagactccagacggacatgcg

SEQ ID NO: 690331 - DNA, 90 bp, Homo sapiens
ctggaacttctgcccagctctccttgatgatccagatcctgatgatggatttaactataaacagatgatggttagagatgagcggaggtt

SEQ ID NO: 690332 - DNA, 75 bp, Homo sapiens
gaggacaccggagaggggcgccacgccgccgtggccgcaggcatgagccatgagcccaagtccccttcgctaggg

SEQ ID NO: 690333 - DNA, 51 bp, Homo sapiens
caataatgaaatgctgactaaggaacaagaggaggctgcggaggaggagga

SEQ ID NO: 690334 - DNA, 82 bp, Homo sapiens
gaggagccgccgcgcgcccgcgccctccgcgcgacgccagcaccagaaatgtcagcagcccaggacacccagccccttggtc

SEQ ID NO: 690335 - DNA, 100 bp, Homo sapiens
catccgaagcttgccctgcagggaggccgcagcccagatcgttcaatctcatccctcccagcagctccccttccaccccccggggaactgaagattgtcc

SEQ ID NO: 690336 - DNA, 100 bp, Homo sapiens
gatgacagcagagagtggcagggctgaggacccaaagtcatttcccaggctggcggagacgtcaagggttccacactgttgggagtcgctgcaagaatcg

SEQ ID NO: 690337 - DNA, 100 bp, Homo sapiens
cgacaagccgctggcagccgcggatctcaccgccgctcagggtatggcctcacaagtcttggtctacccaccatatgtttatcaaactcagtcaagtgcc

SEQ ID NO: 690338 - DNA, 78 bp, Homo sapiens
ttcgtcaagaccgtgacggagggtggtgcggcccatcgggatggcaggacctcagcagccatgtcgaagccccatagt

SEQ ID NO: 690339 - DNA, 74 bp, Homo sapiens
catattcgagctcaacggtttaccctcggagaccaacccctatcacggatgataccatcggggaccttaagaag

SEQ ID NO: 690340 - DNA, 74 bp, Homo sapiens
tggacttaagtctgaatttcggcagaatttagtgcatcacagcctcgtggagtttcacttgaaggaactgagaa

SEQ ID NO: 690341 - DNA, 87 bp, Homo sapiens
aacaaggagataaatcaaaggaaaataccagaaagatttttagtggccccaaacggggagattctatacaagcaggtgaggaatcac

SEQ ID NO: 690342 - DNA, 95 bp, Homo sapiens
ccgactcttcctggtgaagcatctgatgcacgttccatccggcgctcagctgggcttgagaggaatgcaggcagtagttcagatggaaccgaaga

SEQ ID NO: 690343 - DNA, 46 bp, Homo sapiens
atgcttataagacaactcttagctgaatatgaaaatgttcgtcagg

SEQ ID NO: 690344 - DNA, 75 bp, Homo sapiens
gagaaaattaacaaaattataatggaagccacgaagctgggatagatgggcagcagaagatcatgtgcttcgtga

SEQ ID NO: 690345 - DNA, 80 bp, Homo sapiens
cctgagaccctccagcgctgcctggaggagaatcaagagctccgaggctcaggtggccttccttcagggagagaggaaag

SEQ ID NO: 690346 - DNA, 49 bp, Homo sapiens
cagcctgcggagcctgtggggcaggggaagacggaatctatcactgtgg

SEQ ID NO: 690347 - DNA, 100 bp, Homo sapiens
ctcgcttcgtcctacacttgcgcaaatgtctccggtttcaggcacagaactgtatatccaataatagtgaaatggatcccactaattatgacagaaatga

SEQ ID NO: 690348 - DNA, 100 bp, Homo sapiens
caacttctcacccacactttcaacagagaattcagccaggtgcacggcagcgtcagtgactgtaaggctattcaggcagctatcagccaggcctttaaaa

SEQ ID NO: 690349 - DNA, 125 bp, Homo sapiens
atccagagctgtgcctcccagcaccacagtccttctgcagtccctcgtccagccacccccagacgagggaactgagctgtcaaaactaagtgacttgattgaggccatgcagctggcgaggggag

SEQ ID NO: 690350 - DNA, 100 bp, Homo sapiens
cggttcaaggctcagctgaaggacccgcagggccccgggccaggaagactatgaccgtctgaggcctttatcttacccaatgaccgatgtcttccttata

SEQ ID NO: 690351 - DNA, 98 bp, Homo sapiens
gcatcctcgccagttatggcaatgtcatcgtcatcaccctcaactatcgggttggagtgctaggtgtgaatgaggcaggatgaactggacaggtttgt

SEQ ID NO: 690352 - DNA, 87 bp, Homo sapiens
ggtctgggataaaagtgaaagtggtgattggcattgtactgctagctggaaggctgaaaactgttctggccaagcgaactgggcggt

SEQ ID NO: 690353 - DNA, 100 bp, Homo sapiens
cttctgtggcttcagtagtttcaaaaggtggcctttccactggagttgcttcacttagctctacaatcaacccatgtgtttggaaattttagcattcagg

SEQ ID NO: 690354 - DNA, 87 bp, Homo sapiens
ctcacctcgatgcagccagtagcttggatccttgtgggcatgatccataatcggtttcaaggtgtggagccggagccttttgaagtt

SEQ ID NO: 690355 - DNA, 61 bp, Homo sapiens
tgagctgaaagcgaaaaactatgctgaccagaggttaatgcgagatgatacaatatacgag

SEQ ID NO: 690356 - DNA, 100 bp, Homo sapiens
cagatgcccctggtgtgactacagtactatactggcaattgctggagaagattttgcaattgttgcttctgatactcgattgagtgaagggttttcaatt

SEQ ID NO: 690357 - DNA, 74 bp, Homo sapiens
tcgctcagaggagatgcaccggctcacggaaaatgtctataaggggaacgcccttttgcttgtgactggcaggg

SEQ ID NO: 690358 - DNA, 100 bp, Homo sapiens
tgatgggcggggggtgctcatcgcagtcctggacacgggggtcgacccgggggctccgggcatgcagaataatccagaatggctactctgatctatgttg

SEQ ID NO: 690359 - DNA, 110 bp, Homo sapiens
ccttagctgtgctcgcgctactctctctttctggcctggaggctatccagcatgatatcatcaagttgaatcgaaaggaagggaagaagcagaattttccaagactaaat

SEQ ID NO: 690360 - DNA, 90 bp, Homo sapiens
gcctacctcatcatggaacatctcaagtgaactcaacaaaggagggaggtgtagaaagaggtacatggagaacaagtttgtcaatccgtc

SEQ ID NO: 690361 - DNA, 100 bp, Homo sapiens
gtcgcgctccaagagctccagcctgagccggctcgagggtttcatcaccttaaatggttttgaaccaatgaaggtgtattcccttaaaaagacggacagc

SEQ ID NO: 690362 - DNA, 74 bp, Homo sapiens
tgataggctgcgctaccggaatgtcatccagcgagtgattaggtttatgaaaaccccagatgaaatcatgagtg

SEQ ID NO: 690363 - DNA, 100 bp, Homo sapiens
ggaagctgatgctgctggacgccactttccggggtgcacagcaagtgtgttatagttttgccgctggactcttccctcccttcccccaccccatcaggat

SEQ ID NO: 690364 - DNA, 50 bp, Homo sapiens
ctgcaataagccgccttccaaggtggtctgactgacagcttgggtaactt

SEQ ID NO: 690365 - DNA, 80 bp, Homo sapiens
atccacagccaggaggaagccttgcgggttatggaaacaaaggacatgctttacatcgtcactgaatttgctaaaaatgg

SEQ ID NO: 690366 - DNA, 90 bp, Homo sapiens
ggaaacgtgatagtgtgggatctggcaagaggagtcaaaatacgatcttatttcaatatgtcaaggagaaattgactgctgaccctgaca

SEQ ID NO: 690367 - DNA, 100 bp, Homo sapiens
catatctttctctatgtggtacagccgcgtgatttcccagaagaactgccattggatgtccagaatcccctgtagttgataatgttgggaataagctctg

SEQ ID NO: 690368 - DNA, 82 bp, Homo sapiens
cgtctccgtgggtgtggcggagcgcgcggtgcatgaacctaaaggcagacccagaagagctttttacaaaactagagaaaat

SEQ ID NO: 690369 - DNA, 74 bp, Homo sapiens
gaaaagtgcaagcaagatgttcttaaggagcatcagatccatgctgctgctgactcggagccccacagcttggc

SEQ ID NO: 690370 - DNA, 98 bp, Homo sapiens
tctggctctcattcgagatgtcttacttccccaatatcagttttagagaatgtggcgtggagaaattctcaaggaaagagtaaaatgctggtgatgtg

SEQ ID NO: 690371 - DNA, 82 bp, Homo sapiens
aactacttcctcggtggctgcgccggaggcctgactctgggagcacgcagaagctcttcgtgggcggtcttgactggagcac

SEQ ID NO: 690372 - DNA, 75 bp, Homo sapiens
cgtgctcccaacgtcgccccggtttgacgcacacggcaccaaactgtacaggtttgcagattccgccagcagcac

SEQ ID NO: 690373 - DNA, 83 bp, Homo sapiens
cgccgagctcgttggagcttgaacccattgtcacccctccgacctgcctagagctggaacgttacctccagagcgagccctgc

SEQ ID NO: 690374 - DNA, 75 bp, Homo sapiens
agacagcatatttgagtcatttccttcgtacccacagtgcttcatgagaggtgatttgatgaaggctgctgcagg

SEQ ID NO: 690375 - DNA, 75 bp, Homo sapiens
tggaatggagacattaaagggggaaacgaagaagctagactcagatcaggtagttaaaccagagagcaatgacaa

SEQ ID NO: 690376 - DNA, 83 bp, Homo sapiens
gtgcattgcctttggaaacgagatgtgttcagagcaacattgttttgttgacacaagcatttagaagaaagtttgtgattcct

SEQ ID NO: 690377 - DNA, 100 bp, Homo sapiens
gaccctactgcggtctcggatattgccggttgtaatttagattcgagaagtggtttatcctttgactggaaaagaaaagtagctgcagtattcccccagc

SEQ ID NO: 690378 - DNA, 74 bp, Homo sapiens
gaagacctccagtctataagcccaggaagccgtcttcgaactcaggagaagaaattacagaagacatccccgtg

SEQ ID NO: 690379 - DNA, 51 bp, Homo sapiens
ggtggagccaccagcctctccctgatgccttcaattaagttgcagagttct

SEQ ID NO: 690380 - DNA, 100 bp, Homo sapiens
tatggcattagcccacaggccaaggatgggttgacaccacttcactgtgctgcacgaagtgggcatgaccaagtggtggaacttctgttggaacggggtg

SEQ ID NO: 690381 - DNA, 49 bp, Homo sapiens
ggctcgcgggcggcgggcccggatattgatgatgttaagaagttcaaac

SEQ ID NO: 690382 - DNA, 75 bp, Homo sapiens
agaagaggaggttgcccagaagaaaaaggttgggagccacgtgtaccagtgtgtgttgatcttggcttgattcag

SEQ ID NO: 690383 - DNA, 83 bp, Homo sapiens
ggtggattatggatcagatccaaatcagtcagcagcacagtggccatggaaaaagaaaaactctacagcatatttccgaggat

SEQ ID NO: 690384 - DNA, 90 bp, Homo sapiens
gtcctggcggccgaccgagaacgcagcatccacgatgtatatgccatgaagccactgtcaccatcaacatgcagaacacttccatcgccc

SEQ ID NO: 690385 - DNA, 100 bp, Homo sapiens
gtctccttcgccttctgtctttctgcgtcctactagcagcttttaggacaactggaaaacacaggccctcccccagctgacaaggaaaagatcacatctc

SEQ ID NO: 690386 - DNA, 75 bp, Homo sapiens
aaggacttggatggtgctgggaagaggagaaagaccagtcaatcagaggaggtgcgtgctctggaggaggccaac

SEQ ID NO: 690387 - DNA, 98 bp, Homo sapiens
acgatctgcacttcgcattttggcattgacatttaattttagggtcctttatatagaagggagagtaggtgattgtgtccaggggggggcgctttctg

SEQ ID NO: 690388 - DNA, 50 bp, Homo sapiens
agggcctggcactggccaaggagattggccccttcccagctgcctgcctg

SEQ ID NO: 690389 - DNA, 100 bp, Homo sapiens
ctcgatgccaatctctgcttgaaaggagaagacttggattctcagggtctcacttgtcacccaggctggagtgcagtggcacaaacatgggtcactgcag

SEQ ID NO: 690390 - DNA, 75 bp, Homo sapiens
ttcttgactgccatttttggctacttgacattctatggttggtgaaaattgcccctcaatattatgacatgagca

SEQ ID NO: 690391 - DNA, 100 bp, Homo sapiens
caggcagggagcctccagagtagacaagccctcaaggatgcccggtccccatcaccggcacacattgtcgcagcggaggaggagaaagagatggacctcc

SEQ ID NO: 690392 - DNA, 75 bp, Homo sapiens
atatcctccaggaatactggccaggacttatcaaactggtttcaaagcacagagctcaagtaatttacaccagaa

SEQ ID NO: 690393 - DNA, 75 bp, Homo sapiens
acacctgctctcccggcaaggaaacttcgcaggctgtccaagtggtaagaagttcagaagcaagcctcagttggc

SEQ ID NO: 690394 - DNA, 100 bp, Homo sapiens
gagaccgggggaggcgacgctaagttgctgatcgtggcggtactccaaagattcaggtttactcacgtcatccagcagagaatggaaagtcaaatttcct

SEQ ID NO: 690395 - DNA, 98 bp, Homo sapiens
gctgttttagagctggcagcagcatctcagcccaagagaagggaacgtgctcagtcactttcaatgggcaccaggagaaaggttttggttcttggatc

SEQ ID NO: 690396 - DNA, 96 bp, Homo sapiens
aaaagataaaaagaaagaagagaaagaagatgaaatttcattagaagatctaattgagagagagatcttagaaaccaaccatacagacgagccgat

SEQ ID NO: 690397 - DNA, 85 bp, Homo sapiens
gcgtcaccgccgcccccccagacaagatggacaccgcggaggaagtgccggtggtggtgtgcacattgagccccggtatagacag

SEQ ID NO: 690398 - DNA, 100 bp, Homo sapiens
actcagagaagtccctccaccggctctgtgttcgatatctcaatgcctatactggaatagtgctacttcgatgcagaaaagaattctatcagcttgtgtg

SEQ ID NO: 690399 - DNA, 98 bp, Homo sapiens
catgcacagcctggcgacggctgcggtttactggactcatgcgggtggtagacacgcatgtgtgtgggagtcacgttttctgaaggacctacaggctg

SEQ ID NO: 690400 - DNA, 99 bp, Homo sapiens
aggagagacacttgtgaacattcaagtgaagcaaaagcctttcatgattatcctctacggcagacacatgcaggccaacccagaaccaccgaagaagaa

SEQ ID NO: 690401 - DNA, 50 bp, Homo sapiens
cagacatctaacacaaagggagatgagatgggatttcaccatgctactca

SEQ ID NO: 690402 - DNA, 100 bp, Homo sapiens
tgaattgtgctgccttggccaaaagaggtatattttcctggagtacgcgtcccctgcccacgctgtggatgctgtgaagaacgccgacggctacaagctt

SEQ ID NO: 690403 - DNA, 80 bp, Homo sapiens
gggtacctgcggccaattcggtggaacgaggacgcggactgcgaaggcaggaatataaatagtttctggaaaggacactg

SEQ ID NO: 690404 - DNA, 51 bp, Homo sapiens
ctcagctgtgaggagaaggaaaaggcatctgggaacaaagtcagtcgccag

SEQ ID NO: 690405 - DNA, 50 bp, Homo sapiens
accggaatgtcatccagcgagtgattagcttagcagtgtctgcaaaaacg

SEQ ID NO: 690406 - DNA, 75 bp, Homo sapiens
agctggactctctgccacatcgttcggttcccacaacagcctggttccatcttagcccacatccagaagcaaaag

SEQ ID NO: 690407 - DNA, 100 bp, Homo sapiens
ctcgcatctgtggtttcttcaaaaacacagcagcccacagtgatctctcattcttccatttctatcacattcagggtcagtttgaaaaggaggatcgagc

SEQ ID NO: 690408 - DNA, 74 bp, Homo sapiens
ctgaaagttcatcctgaacaggaaaagactgggcatttagctatggagacattattatcccttacttctaaacg

SEQ ID NO: 690409 - DNA, 98 bp, Homo sapiens
caaaatttgctacttaaatcgtacttctctgaagaaggccgcctgatcttcgacaacctaaagaagtccattgcctacaccctgaccagcaatatccc

SEQ ID NO: 690410 - DNA, 87 bp, Homo sapiens
agctccaggagttcgtctcttacgtctgcggaagtgcagctgcctcagttcttagcgcagggttcttttcctatgactccatcaatt

SEQ ID NO: 690411 - DNA, 75 bp, Homo sapiens
cggcctgcgggcgatcgggccgaggtatggacctgtctgccaatcaggacgaggagaccgaccaggagaccttcc

SEQ ID NO: 690412 - DNA, 88 bp, Homo sapiens
ctccttgggcctgcggctctctacgtccctgcggagcagccgaaatacatgctacaggatttaactatcagaatgaagatgaaaaagt

SEQ ID NO: 690413 - DNA, 76 bp, Homo sapiens
gaggaggggctccggctggtctgtggtgaggtgtacagtgccaccaacgtggagctggtgacacgcacacgcacgg

SEQ ID NO: 690414 - DNA, 83 bp, Homo sapiens
agtgcttgctgctttttctaactatttcaagatgatatttattcaccaaacaagccatcactggtgcaagctatatttaacgg

SEQ ID NO: 690415 - DNA, 75 bp, Homo sapiens
ctggcactgcgcttcttcaaagctttgcagttcctgaccccttaatgcctgacccttccaagcaaccaaagaacc

SEQ ID NO: 690416 - DNA, 60 bp, Homo sapiens
agccgacgcgcagatagcagagccatccttgggggatagctgggagtatggccaccctgc

SEQ ID NO: 690417 - DNA, 98 bp, Homo sapiens
ttcatgcgccaattgtttaaagactatgagatgtgactggagtgatttgcacccggatgcctagactcgccatctgctcaaagactgctcagaaagcc

SEQ ID NO: 690418 - DNA, 97 bp, Homo sapiens
cgccagcccttccagcattcgtagcctgaagtgtcatcttgcattacaacatataagaagacaccacctccagtcccacccagaactaccacgaaac

SEQ ID NO: 690419 - DNA, 87 bp, Homo sapiens
cgcagacgcggggacgctggctcgctccctccctccctccctccgacgctagagaagaagaaggaggttcctgctgtgccagaaacc

SEQ ID NO: 690420 - DNA, 75 bp, Homo sapiens
ctcttctcccctgattcaagactcctctgctttggactgaagccacccaggctactttgggaaagttggtatgaa

SEQ ID NO: 690421 - DNA, 100 bp, Homo sapiens
cagcaatatctctgggctttcacagatatgccaagagtttaacagtacctgggcatgggagatggagaagaagggctatcttgaaatgagtgttgaatgc

SEQ ID NO: 690422 - DNA, 98 bp, Homo sapiens
gtatagctgaactcatggacaaggaatttcttcacatggctcctggagaagtgaccatcacagttcgcctcatccgttcctttgaacatcgcaatttc

SEQ ID NO: 690423 - DNA, 98 bp, Homo sapiens
tcgggatgagcgatggcatcggtcaaggtggccgtgagggtccggcccatgaatcgcaggtctctaattaacagaagatggcaaagcccagccacagc

SEQ ID NO: 690424 - DNA, 100 bp, Homo sapiens
cagggtcatccttgcccttgtcctcccctttcatccctatgtggaaaacggtgttggtgaaaatttgactgacccatctgtgataaaagcagaagaaaag

SEQ ID NO: 690425 - DNA, 50 bp, Homo sapiens
gagaccatcacagctgatgtcaatcacaaacggagtctcgctctgtcacc

SEQ ID NO: 690426 - DNA, 100 bp, Homo sapiens
gtggagtccggggtcctggtcggggtggtctgtctgctcctggcatgccctgccacagccactgcttcctggacaagatcgacgtgatcaagcaggctga

SEQ ID NO: 690427 - DNA, 90 bp, Homo sapiens
ggaggacagttcgctacacagcaatgcatcgaggtgtctcccagtctgctaaagccctaaggccatcaccatggacttccagcatcgccc

SEQ ID NO: 690428 - DNA, 100 bp, Homo sapiens
tttaccagaagagatggctctgttccacttccagcagaagttcttgctggaggctgtgctcatcagattcaagagatgtttccccaggttccataccatc

SEQ ID NO: 690429 - DNA, 100 bp, Homo sapiens
agattacaaccttgtggtggaggacaaaggagagggagacagatagaaattacaacccagcatgagaggctggagtgagacagctctacgtacagattga

SEQ ID NO: 690430 - DNA, 99 bp, Homo sapiens
ctcccgagtacctgggactacagagccagtcttggtgctctgtgttcacctggttcatctgaggagctgcatctaccctgcccatgccatagatcctgc

SEQ ID NO: 690431 - DNA, 98 bp, Homo sapiens
aaagccgctccacctcccatgtcggcacaggctattcagcttgaccctgaagaaactcgtcatgctaaaagaaatggacaaagatcttaactcagtgg

SEQ ID NO: 690432 - DNA, 90 bp, Homo sapiens
ctggagctggcttccatgatccccgccctgcgggagctgggcaggagatgttgcagtaaagatcctaaaggttgtcgacccaaccccaga

SEQ ID NO: 690433 - DNA, 101 bp, Homo sapiens
ctcctctcaaacccaaactcaacccgaagaaagccagggcctatggcagaggggctggttcacttctggttcttccacagccttacctggcccaaatccta

SEQ ID NO: 690434 - DNA, 100 bp, Homo sapiens
cagcggccgggagcccttagggaggcagtgactgcagatgagctgtggaaaggcgctttagcagagactggtgctggagcaaaaaaaggaagaggcaaaa

SEQ ID NO: 690435 - DNA, 107 bp, Homo sapiens
ccggcagttgcaggagcggatggagttgctgcaggcagagggagccacagatggtcatcatgggccagtgctactacaacgagaccatcggcttcttctataacaac

SEQ ID NO: 690436 - DNA, 101 bp, Homo sapiens
gtcttggttacaaatggagccaatgtcaatgcacaatctcagggtctaaaattcccaggactccacagctttgcaccagataagcctggaggaatactaat

SEQ ID NO: 690437 - DNA, 100 bp, Homo sapiens
gaggaggcggccgccgcagccggggcccccgccgccgccggagcggtatctatgccagcagctcatgcaacatcatctgctcccaccgtaactctagtac

SEQ ID NO: 690438 - DNA, 100 bp, Homo sapiens
gtattcaccatggtggtttacttcctattttgaaagaaactatagaaattctcttttctgaaggattgataaaggtgactattatatggttaaaaagatt

SEQ ID NO: 690439 - DNA, 100 bp, Homo sapiens
tttctctctggactgtgcatagcagtagctgttgtttgggctgtgtttcgaaatgaagacagatccacacaacttaaagatctgctgccgagtgaatggg

SEQ ID NO: 690440 - DNA, 50 bp, Homo sapiens
ctctggatgctgacagaaacaagggaattgaatgatctggcacgggaccc

SEQ ID NO: 690441 - DNA, 49 bp, Homo sapiens
aactggaggagtcccgctcgaagctagaattgtgagaagctggagaata

SEQ ID NO: 690442 - DNA, 100 bp, Homo sapiens
tggctgctgctggggacagtgaccgtggggttcctcgcccagagcgtcttggcgagttgcatgctgagaatttgaaaaatgaagatgatgtagacactgg

SEQ ID NO: 690443 - DNA, 103 bp, Homo sapiens
ccacagcggcctccagggcaggccccggctcagaccacaagggcagaaccgcgagggcggcactgctcacaggacggctacccatccgcaatggcttctacac

SEQ ID NO: 690444 - DNA, 113 bp, Homo sapiens
ctggacaggcagagtgctgatgtgaaaaataccacgacaaaaccaccctagaagccctcctatgacactgaaacagatcctagtgagggattgatgaatgttctaaagaaaat

SEQ ID NO: 690445 - DNA, 105 bp, Homo sapiens
cagaatggagtggaaaacatgatgttgtttgaagttgttaaaatgggcaagagtgctatgcagaaataaactatcaatcttgcccagactggagaaaggactgca

SEQ ID NO: 690446 - DNA, 89 bp, Homo sapiens
gcccgaagcctgacccgactgcctctctcagtgagtgctgggcctaaaggagataacatttatgaatggagatcaactatacttggtcc

SEQ ID NO: 690447 - DNA, 100 bp, Homo sapiens
tcttaaaagaaactgtgaagcaaattcgtcagatcaaagaacaaggtatagacacgtgtggccgtttacgctgtaggatcctcattcccactggctttga

SEQ ID NO: 690448 - DNA, 51 bp, Homo sapiens
aagatcctcatcacctactatgtcaaggagtccaagattgatctccttgat

SEQ ID NO: 690449 - DNA, 100 bp, Homo sapiens
atccgtattgaggctgcgtcactgagattgacactcagcactttgcgccaccttactctaaccagattccagttctttgatgaaagtctctattccaccc

SEQ ID NO: 690450 - DNA, 100 bp, Homo sapiens
gcagcaacgtgactctggtctgcatggccaatggccgtcctgaacctgttatcacctggagacaccttacaccaactgagaaccatggagtctggcagta

SEQ ID NO: 690451 - DNA, 75 bp, Homo sapiens
gcgtcgctggcagccgctgtacttgacacatagtggatctgtatggcgtgtgacatgggcccatcctgaatttgg

SEQ ID NO: 690452 - DNA, 96 bp, Homo sapiens
agcagatatactattgtactatggacttcatcgctttatattagtaacaggagtatgggaaggcaaatacaacttcttctgtcagggcacacgcac

SEQ ID NO: 690453 - DNA, 90 bp, Homo sapiens
ggcgccggggcctagcgctatgcctgcggcggagactgcatcaggctctcggctgcctgctgtttcccggggagatcatgaaacgaggtc

SEQ ID NO: 690454 - DNA, 100 bp, Homo sapiens
caattaccatcctttaccaggaaaaatatgtcgtaactgcaagtgtggccaagaagagcatgatgtcctcttgagcaatgaagaggatcgaaaagtggga

SEQ ID NO: 690455 - DNA, 98 bp, Homo sapiens
aatctccttagtgaggctcagagatgcctgtaccgtgatgtgacgctggagaacctggcacttatatcctccctgggactcctagaagtaccccaccc

SEQ ID NO: 690456 - DNA, 100 bp, Homo sapiens
gccggacgcgccgcgccctggcggctctagggaccccccccgcgcctgcacttagccccgcgcccgaggtgaaaggtgtagcagtcactcggcctacacc

SEQ ID NO: 690457 - DNA, 75 bp, Homo sapiens
aattttggcatcaaggacaaacccaccttcatcaaagggacggggtttcaccatgttgctctggctggtctcgaa

SEQ ID NO: 690458 - DNA, 100 bp, Homo sapiens
ccagcctcaagtttcacctatcctcactgatccgtggacttctgtatgatcagcattcacctggaaggtccaggccaacaaccgtgcctacaacgggcag

SEQ ID NO: 690459 - DNA, 98 bp, Homo sapiens
tgccgatcttccagaatatttcaagcgactgacatgtgagatctccacaaggggtacatcagagataaaagcaacagtgtttgatgactgcaagaaag

SEQ ID NO: 690460 - DNA, 100 bp, Homo sapiens
tacaggagcaaattgccaattctgctccagtgggagaaaacaaggtatgtgaaacaagaagttctgggtcctttcatcataagggagaagcttcagaaag

SEQ ID NO: 690461 - DNA, 100 bp, Homo sapiens
gacgggcagccccggactctcaatcatttggggaagaatctacagttgctgatggacagagtggatgaaatgagccaagatatagttaaatacaacacat

SEQ ID NO: 690462 - DNA, 83 bp, Homo sapiens
tctgtcttcacatctccaagcatttgtgttccagacaatgcagatcttcgtgaagactctgactggtaagaccatcaccctcg

SEQ ID NO: 690463 - DNA, 75 bp, Homo sapiens
gcagcttggacccagacatcagcattccaggcatcgttggcttcacagtatgactgatgatcctccaacaacaaa

SEQ ID NO: 690464 - DNA, 100 bp, Homo sapiens
cacttctgcagaatccagtggtcgtgagatggagaataaagaaactctcaaagggttgcacaagatggatgatcgtccagaggaacgaatgatcagggag

SEQ ID NO: 690465 - DNA, 83 bp, Homo sapiens
tgcagggacccggtgacagcgtgagagagacctcatccttcaacagctgaatcaaaggctccaacaccaaagtttgacttatt

SEQ ID NO: 690466 - DNA, 100 bp, Homo sapiens
gcatcgtggaaaagccagaaggaggtggagctgtttttggaaggaagaaagatggaaagcggtgcagttctgctggaatccaaatcctccccatttaacc

SEQ ID NO: 690467 - DNA, 100 bp, Homo sapiens
ctcccaacgtgtggcggctcgcgacccccggcaacccggagaaggtctacagagcggcctgcgccagcgacagaagatggctgtgccacccacgtatgcc

SEQ ID NO: 690468 - DNA, 50 bp, Homo sapiens
ctcacctgtgcgggatggaacaaaagggcattcttagcagggttacagaa

SEQ ID NO: 690469 - DNA, 51 bp, Homo sapiens
agaactatagcaatctggttttcttggtttacggagaactgtggaagacag

SEQ ID NO: 690470 - DNA, 100 bp, Homo sapiens
gggaagacgagtgggggcagagctgctcaggaccatggctgaggccatcacctatgcagatctgagcgcgtgaagatcctgttcaataagaaggagaacg

SEQ ID NO: 690471 - DNA, 74 bp, Homo sapiens
gctgtaaaaagattgaaagctggggcaatggcggcttcctgtgttctactgcacactgggcagaagatgcctct

SEQ ID NO: 690472 - DNA, 83 bp, Homo sapiens
tgtactcagcccacatgcccgctcacctgcgctgtgatgcctgcagagctgtggcttaccagaacacaccacagccatcagca

SEQ ID NO: 690473 - DNA, 75 bp, Homo sapiens
aatttttggatgatgatggatccatttctcctattgaggagtcaacgcatgaagtcatcaatatcaacctgaaaa

SEQ ID NO: 690474 - DNA, 87 bp, Homo sapiens
gaggcgccgctctagcggccgggactctgaactatggcggtatttgacaccgaaatctcagtttgggtcagcctcacactctgaagc

SEQ ID NO: 690475 - DNA, 90 bp, Homo sapiens
ggagagtgagagaaaggctggaagacgagttttttcaagggggaacatggcaaaggtgttcagtttcatccttgttaccaccgctctgac

SEQ ID NO: 690476 - DNA, 82 bp, Homo sapiens
acggggcgggggcggggcggcagtgagctcggccggcaaccgagggacccgcgtccaggccaagactaaggggctgcagagc

SEQ ID NO: 690477 - DNA, 101 bp, Homo sapiens
ccgccttttcagaagcggctgcgcacggactgctggagatggtggagtccgtcagatatggctttagttgcccctgaagctccttcagaacaagccagaag

SEQ ID NO: 690478 - DNA, 75 bp, Homo sapiens
aaacaaatgtttttctggtcttcacttttttgaggcaggaagtactatactggcaattgctggagaagattttgc

SEQ ID NO: 690479 - DNA, 82 bp, Homo sapiens
gcaaacccaaagatccccgttcctggagattctgattgagaacactctgctccagccaaggtggtgagggcagctgttccta

SEQ ID NO: 690480 - DNA, 75 bp, Homo sapiens
ctctcagctgccacctgcctttgacctttttgaagcctttgcaaaaagggagcactatgtctgcggaagtccccg

SEQ ID NO: 690481 - DNA, 75 bp, Homo sapiens
atgactgacacgatggcccccagtgcggatagccggggtttgtaccagttgctggagccccgaatgattgttcgt

SEQ ID NO: 690482 - DNA, 101 bp, Homo sapiens
cacaaagacaccaggaggaattccaggctggctcagcacgcagggggtgtcataaccgaagaggacttcagcaattacagcgcccttgtggagaagcctgt

SEQ ID NO: 690483 - DNA, 97 bp, Homo sapiens
cgggagttcaagaagaacactccagaggatttaggtcctgaatatgaaggtatatttaacacttcattgcagtggatcttagaaaatggaaaagatg

SEQ ID NO: 690484 - DNA, 50 bp, Homo sapiens
agccaatctacatgagtctagcaggtggtttgtgatgaaaatggttccaa

SEQ ID NO: 690485 - DNA, 75 bp, Homo sapiens
cgacggcccggacttcctctcagaagaggaccgcggagaacttaagagatttgagaacttcataaaatctcgtcc

SEQ ID NO: 690486 - DNA, 76 bp, Homo sapiens
agtcctgcgcttggggatcctctgtacgcccgttcactggtgctcagctttaagggctactgggaaaaactgaact

SEQ ID NO: 690487 - DNA, 90 bp, Homo sapiens
gatgaaatgtgcttgctcctcagctctgctgttttgcctaccccttgctcaggttcaagaagacagtgaagaggctcattccgcatcttc

SEQ ID NO: 690488 - DNA, 100 bp, Homo sapiens
gattttcattttacctttatgtatttacctacggagtcagattcctgaaaaagggtgtttgccagcttcccagtaaaaatgatgaaaaagaatatccaca

SEQ ID NO: 690489 - DNA, 100 bp, Homo sapiens
gaaaatcagttgtcttcattcaagaattgggtgatgctattgctgagattagagccatttgtattgaagaaattggagtatggatgaaaatgtatagtga

SEQ ID NO: 690490 - DNA, 100 bp, Homo sapiens
gagcaggagcttcaggttgtccgagcatctgggaaacagagtgggaagctttggagctgacggatcaccagtgggcactagatgatgtcgaagaagagct

SEQ ID NO: 690491 - DNA, 100 bp, Homo sapiens
ctgcggaagtgcagctgcctcagttcttagcgcagaggagttgaagccaaacagccaaattctgccattaggaagtgtgtaagggtccagctgatcaaga

SEQ ID NO: 690492 - DNA, 96 bp, Homo sapiens
cagatatccaggcattcttcatgagcatagacagtctgtgtaagaagtactccagggaaacctcccaggttttgggatttgagattgacgcggtga

SEQ ID NO: 690493 - DNA, 100 bp, Homo sapiens
cacagcccgacgaaaggatgccaaatgtacaactccaaaaggagacattggagaagaaccaagctgggtctataaggaattgcacatgagatggcacaca

SEQ ID NO: 690494 - DNA, 50 bp, Homo sapiens
cgttggttcccctctttgacctggtatgggctacgtgagttcgtggtgat

SEQ ID NO: 690495 - DNA, 98 bp, Homo sapiens
gcatcaacaagatgttgtcctgtgctggggctgacaggaatgggtaccacagaccatgtcatcgtcctggcgtccacgaaccgagctgacattttgga

SEQ ID NO: 690496 - DNA, 100 bp, Homo sapiens
caaatatgctgcaagatttggggaatctatagttaatcttggcgacattgacaatgatggctttgaaggtgcgggcggcacccagagactcacccgtgct

SEQ ID NO: 690497 - DNA, 140 bp, Homo sapiens
ctggactctgtatctggaactggtggcgtcggcccaggtcggcgggaaccccctgaaccggacccaatcaattgagcagagactgatgaaaatggatcacactgcaatccacccacatctacttgatatgaaaattggtc

SEQ ID NO: 690498 - DNA, 100 bp, Homo sapiens
cgagccggagctgcagcccgagcgcggtggtgccctcagccccgtcctcttgtcctcctcagcctcggtgcaaattgagcatgacccagaattagaaaaa

SEQ ID NO: 690499 - DNA, 98 bp, Homo sapiens
tctggagcaaggaaaaaaacccttcactgtgaagagacatgagatgattgccaaatccccaggttatcaatagtctggctgtctatcgtcatcgtgag

SEQ ID NO: 690500 - DNA, 75 bp, Homo sapiens
ctggcgtcctcttgttctcttccagatgtgggaagaatatcctgatgtttatggggtcaggcggtcaaaccgaag

SEQ ID NO: 690501 - DNA, 73 bp, Homo sapiens
ttcctgcattagctgcctcaactccaatgggaaagaatttcagctcctgaaagggaaatctactgtcattatt

SEQ ID NO: 690502 - DNA, 98 bp, Homo sapiens
tggtgcggctcatcttcgagaggaggaatgccagctcctgagcaggcctcattggtggaggaggggcaaccacagacccgccaggaagctgcctccac

SEQ ID NO: 690503 - DNA, 97 bp, Homo sapiens
tggaccttccggagcttctcagaagacagagggttttcttttgaggcccgccacgatgactatcatggtggaggacatcatgaagctgctgtgctcc

SEQ ID NO: 690504 - DNA, 90 bp, Homo sapiens
cttatgtaatgctgccctgtaccctgcctgtggaatctgccattgcgattgtccagagattgccatcacgaaagccaaagtggatttctc

SEQ ID NO: 690505 - DNA, 75 bp, Homo sapiens
aatacattcctgattacctgccacccattgtgtcttctcaagaagccaaaccaaacaggaagcttacttttctct

SEQ ID NO: 690506 - DNA, 89 bp, Homo sapiens
tttatattcatctcaaaaacaaaattctgaactcaggacttggcaacttctgtgccttattggagaatcttttgatgactacagtgatg

SEQ ID NO: 690507 - DNA, 95 bp, Homo sapiens
acgagtttgccagatatgccaggctggaaagaaagatcaacaagatgacggataagctcaaaacccatgcttgcctacatgtagcctgtgttgta

SEQ ID NO: 690508 - DNA, 83 bp, Homo sapiens
ccaagatgtcggagacacggtggaaacgcttatgagtcatgtgctgttcctggggcttggatgatgtaggggaagcaaggtga

SEQ ID NO: 690509 - DNA, 98 bp, Homo sapiens
agcgagcggaggagcaggcgccggagtgatccgtatgtgaaactttcattgtacgtagcggatgagaatagagaacttgctttggtccagacaaaaac

SEQ ID NO: 690510 - DNA, 80 bp, Homo sapiens
tggagcctcagttggaagcagccgatccagcctgcggagcctgtggggcagcaaaaaagggagacgctgtccccgctgtg

SEQ ID NO: 690511 - DNA, 90 bp, Homo sapiens
gctagagcgtcctcccgcgctcagtcgcgctgcaggtctcctctgagcctccggcctccataagacccaaaacagatgacacctcttccc

SEQ ID NO: 690512 - DNA, 82 bp, Homo sapiens
atctttttgtgtgaggatctgcaggaagtatactgaagatgcaagtttttttcatctggagttctgcctgaccaagaattaa

SEQ ID NO: 690513 - DNA, 97 bp, Homo sapiens
tatttctctagctattgccttattttttctcatggatgttcttcttcgagtatttgtagaaggcccagtggcacccgactcgctctcctctccctca

SEQ ID NO: 690514 - DNA, 90 bp, Homo sapiens
ctaacttctactgacgaagcttggaagttgcagaagaataacatagctgatccagaagaactgttcacaaaattagagcgcattgggaaa

SEQ ID NO: 690515 - DNA, 82 bp, Homo sapiens
ccatcctagaggtcaagatcagctctggctagggaactactggagaccacgtgccgcctggccaacacgctgaagaggcatg

SEQ ID NO: 690516 - DNA, 74 bp, Homo sapiens
accagtcatgaccactagacccacagctgttaaagcaacagcaattttccagattattcaaagtatcaggatgg

SEQ ID NO: 690517 - DNA, 100 bp, Homo sapiens
acatggatagccgcttgcaggagatccgggagcggcagaagttacggcgacagctcctcgcgcagcaggtgtttcaccaaaaccaacagcactttcagca

SEQ ID NO: 690518 - DNA, 98 bp, Homo sapiens
ctggttagaagatgcccgccagcattccaattccaacatggtcattatgcttattggaaataaaaggtccttttggaataaatcatgggattgagctt

SEQ ID NO: 690519 - DNA, 83 bp, Homo sapiens
ggaggagctgtgcagccgcgaggaggcgcgggaggtgttcgagaacgaccccgagacgccccatggctgggggttatggagtg

SEQ ID NO: 690520 - DNA, 90 bp, Homo sapiens
accacgataacatttagcctggaacagagcggcactcggcctgagcgggatgactttgacaacgatgtggatgctctgctggaagaaggc

SEQ ID NO: 690521 - DNA, 100 bp, Homo sapiens
caaaaatttttcaaattcagtttcccttatatactgcttacaagcataatactcaccctactattgaggtcagtaacagatccaagagatggaaagagag

SEQ ID NO: 690522 - DNA, 74 bp, Homo sapiens
ggagaatgtatttactcctatgttctgccatagtgatgaggtaaaagtgctgtttgtacgcaaccttgccaata

SEQ ID NO: 690523 - DNA, 100 bp, Homo sapiens
cagatttttgttatcttctggataaatctaagcaactgttcaatgggttaagtgaatggtagtgtctagaaagggtatgtcccttcaagagagaggtgcc

SEQ ID NO: 690524 - DNA, 82 bp, Homo sapiens
cggttgtgcgatcagatcgatctaagatggcgactgtcgaaccgacaatgcagatcttcgtgaagactctgactggtaagac

SEQ ID NO: 690525 - DNA, 76 bp, Homo sapiens
ggcgctcggcgatggtaggcgtccctggagcggccgccttccagcgatgtacagttacccagcacgtgtacctcct

SEQ ID NO: 690526 - DNA, 98 bp, Homo sapiens
caacaacttcaaggaaattggatcgagaacagcaggcagaacattttctggagcctacttctgcttcctcctggccgctctgggtgtgacagctggtg

SEQ ID NO: 690527 - DNA, 75 bp, Homo sapiens
atcaaggttccgacgcagatcatctgggggaaacaagaccaggcagaggaggtggacacggtggacgtctccggc

SEQ ID NO: 690528 - DNA, 125 bp, Homo sapiens
tcccgcaagtcggaacccggcggatcggatcccgcagatcggagacggggcctggaggcccctgaggtgttcatgcactgatcctggaccttggattaaacccttgcagtgctggaagaagagga

SEQ ID NO: 690529 - DNA, 75 bp, Homo sapiens
ctgggcaggtgtcttcctcgagaggcaggcaggggatcccggacatggaggagatgtataagaaagctcatgctg

SEQ ID NO: 690530 - DNA, 145 bp, Homo sapiens
cgcccggcggcggcgggagcccaggagcctgccccgccctggggacgaagagctgcagctcctcctgtgcgggacccagatgatgtggtaccagttggccaaagaagagcctggtgttggtgcatgtgctttggactagcattta

SEQ ID NO: 690531 - DNA, 90 bp, Homo sapiens
cacagtctagccaagaaggcacaggatgaaggactcctttctgatgtggtacccttcaaagtaccagacagtgatctgacacaaacacag

SEQ ID NO: 690532 - DNA, 100 bp, Homo sapiens
tctgagccccggggcatctatgccagtgagaggcccaagtccctaggaggacttccggaataaagtggatgactacatcaaacgttatgccagatgataa

SEQ ID NO: 690533 - DNA, 101 bp, Homo sapiens
taaggtcctacagaccctgagggaaatgatgaccaaagatagaggctatggagaaaaggtgaatacttgtaatgaagtttatgaattaaagaagaaagtca

SEQ ID NO: 690534 - DNA, 122 bp, Homo sapiens
gcacaggtcacagtaaggccaaaaatgtgcatactcacagagttagagagagggatggtggatgcatcatctgcagacatcagaaaagcatatcgtaagctttcactaactttacatccaga

SEQ ID NO: 690535 - DNA, 50 bp, Homo sapiens
gttcctgctgacttacgcttgtttgaggaactgaccaacactggatgaat

SEQ ID NO: 690536 - DNA, 100 bp, Homo sapiens
cgactggaaggagcccggggccctcattccttctcctccactgggaactgagctccctgcagctcgatctcaaccgcatgcccaagccagccaagacagc

SEQ ID NO: 690537 - DNA, 95 bp, Homo sapiens
cagctattggatttcccacccagaatctttaggtaaatgagaattctggggagacattgccaaggaattttactggaagactccatgccctggcc

SEQ ID NO: 690538 - DNA, 100 bp, Homo sapiens
gggccgctctggagggactctccttctcaccgttccgggaacaaatgctagatacgaactcaccttcgaggcttggaaaccacagccacgtatgaccctg

SEQ ID NO: 690539 - DNA, 100 bp, Homo sapiens
agagatgtgatgttggagaactacagaaacctggtctccctagttggccagtcagtgctgaaagatgtaagcaaagtgaagaagctgaagcaatctggag

SEQ ID NO: 690540 - DNA, 76 bp, Homo sapiens
caccatcagaaatctctggccaactccgggggctgggtccccatcaaaggaaagaccacagcaagattctttcatt

SEQ ID NO: 690541 - DNA, 50 bp, Homo sapiens
gatccatatttgggaaggcctgaacaatcccattgttaggcatgcggcaa

SEQ ID NO: 690542 - DNA, 100 bp, Homo sapiens
cagctctgttctggagttcatgtcgatgaagtcctatcccgacgtttctgtggatatctccatgctcagctctctgggatgatttgagacaacatttaga

SEQ ID NO: 690543 - DNA, 80 bp, Homo sapiens
gcccgcccgcttgccgggctcccgcggccgcggcgccccgaagcctgacatttaccccggtaactgctgggcatttaaag

SEQ ID NO: 690544 - DNA, 75 bp, Homo sapiens
gtaccaacaagagaaggcacgcatgggctcagcgggactcagagagatcccagaagacccacttgtggctgaaga

SEQ ID NO: 690545 - DNA, 83 bp, Homo sapiens
cggagacatctaccaccagacctgggccagatactttgtgaactcaaatcccagccttctatatggacacaagtcatttattc

SEQ ID NO: 690546 - DNA, 82 bp, Homo sapiens
cactcttctctggttccgagatgggaaaaaggtggaagaagagcccgaagaagaacctgaagagacagcagaagacacaaca

SEQ ID NO: 690547 - DNA, 127 bp, Homo sapiens
tgaagggaggaaatagtggcaggtgacagtctgcatgtgcagttttcagattcatgatgttgctatcaaaagttgagaaattgtcagaagaaatcatggagataatgcaaaatttaagtagtataca

SEQ ID NO: 690548 - DNA, 71 bp, Homo sapiens
agaaacaagccgtggaataggtgtatcaagtaatggtgcaaagcctgaaggacaagaaaagtacattccac

SEQ ID NO: 690549 - DNA, 100 bp, Homo sapiens
tgggtgaagatccaagatgttctacagagaatggatcttggagaatgtctgaaagtccatgacctggctttaagagcggattatgaaattgcatccaaag

SEQ ID NO: 690550 - DNA, 100 bp, Homo sapiens
tggacttgaaagaagctgcagcggaggaaggcgaggcggccttctgatctgtttaccacgtgagcaagcagctcggttctgtgcagagataaagtccccc

SEQ ID NO: 690551 - DNA, 105 bp, Homo sapiens
gccagagtcacacacggtcctaagagctgggcaccaggaagcgaaggctgacccaacatgagtgaagtttcctgcaagaaacgggacgactatttggaatggcca

SEQ ID NO: 690552 - DNA, 89 bp, Homo sapiens
tacaatgtgggtgaacataacctatttcctggcccaatagacaactctgggctattttcaggtccaggtgcaggtacagcagtctccgc

SEQ ID NO: 690553 - DNA, 75 bp, Homo sapiens
agatgatccaagtcaccaagaaattactgtctcaagtgatacggggtctaaattatggataataatggaatacct

SEQ ID NO: 690554 - DNA, 90 bp, Homo sapiens
agaaaatcaaaagaaacttttgcccttatcagtaacacctgaggtacactgaggaggggacggctccgtcttcacattgtgcacagatct

SEQ ID NO: 690555 - DNA, 90 bp, Homo sapiens
caggaagtggctccccccacacccctcacccctacctcacacacggcgtccggggtgccgcagctggtggagccggtgctctgggactac

SEQ ID NO: 690556 - DNA, 83 bp, Homo sapiens
agcggaggcgcgcggaacagtcgccgaggcgattcccgcccaggtttggtgcacctcgatttggaggaagtagggcagggccc

SEQ ID NO: 690557 - DNA, 101 bp, Homo sapiens
ctggatccccaaactgaagctgactgcatcaacaacatcaatgacttcctgaaaggatgtgcaaccctccaagtggaatgtgctggagaagagaaacgagt

SEQ ID NO: 690558 - DNA, 150 bp, Homo sapiens
gtgtcactttatctcctttaccttgtggaaatgatttcctcaggactccagattatctacaacactgatgagccctttggagtgaatcaacctggaccttatatcatgtatacaactgtagatgcaaatgggtatctgaaaaatggatca

SEQ ID NO: 690559 - DNA, 100 bp, Homo sapiens
cgcctcccgcggaggggtggccgccgccgaccgagctccttcccttaacagagctgagagaggcatctggagctgcagcatggaccagcgagagcccctg

SEQ ID NO: 690560 - DNA, 75 bp, Homo sapiens
cgacggcgtcgggagagcgcgcctagccggctcgcgagttggttgaagactttcaatgactactttagagacaag

SEQ ID NO: 690561 - DNA, 100 bp, Homo sapiens
ccacttggtgaatggagatgcagctcagcagatttgaagaccttgcttctcatcacccactggattatgccccaggcttccctacccaatgatcctcttg

SEQ ID NO: 690562 - DNA, 100 bp, Homo sapiens
aagcatgtggctcctggtcagtgtaattctaatctcacggatatcctctgttgggggagaaggttgaggaacaggttagcaccactgagagagtgtttca

SEQ ID NO: 690563 - DNA, 101 bp, Homo sapiens
ggaacctctacaacgaaggtgaagccacggaagataagcacgtcagctaactgttcagatgatgcaaaatcctcagattcttgcagcccttcaagaaagac

SEQ ID NO: 690564 - DNA, 100 bp, Homo sapiens
caacattgctacacatgctaaaagatgacagacttggacaacatgtcccaacattacatcccagtactgatgctttgggttggaaaaaattgtacacaga

SEQ ID NO: 690565 - DNA, 100 bp, Homo sapiens
gattttgaagacaatcgtcacttatacaggtttgggcctgacacccagcacttggtcctgaatgagaactgtgcctcagttcacaaccttcgcagccaca

SEQ ID NO: 690566 - DNA, 50 bp, Homo sapiens
ttttcgagggcgcagagaagaaagggagtgcatccgccccaacccttttc

SEQ ID NO: 690567 - DNA, 75 bp, Homo sapiens
attacattgaatctctgctctggaaagttcttgtcaataccaagggctacttctacaagtccgaacagccagtcc

SEQ ID NO: 690568 - DNA, 100 bp, Homo sapiens
cactgaaagaacttctgatatgttctggagatactttgcttttaattgaaggacaacttcctcctctgactcagcctgcctgcacccaggtgaaataaac

SEQ ID NO: 690569 - DNA, 100 bp, Homo sapiens
caaggatattgcagttattgccgtgtgcagtataataacctggaacagggcctgctttcttccccgggcgatgtgcagagatctttgccaggggtcaaag

SEQ ID NO: 690570 - DNA, 87 bp, Homo sapiens
aggaagaatttttacagtatctcaaagacttcacttgacttcttgatcctgcataaaaccaagagccccccaagatgaacccagtgg

SEQ ID NO: 690571 - DNA, 100 bp, Homo sapiens
gtcgtcaccgagaccatcaggtcgcatccctgaatgatcgatttgagaaactcaagtgcctccggagccagcgtggtggccatagacaacaagatcgaac

SEQ ID NO: 690572 - DNA, 80 bp, Homo sapiens
ggacataggcacaaactaattaaaggagtcgagagacttatctccggacaacaagatgtgttcagagcaacattgttttg

SEQ ID NO: 690573 - DNA, 100 bp, Homo sapiens
gacggccggtcaggctcgccgccgagctggttaaacccatccagagtaatggctgcggccttacccaggaccctgggggagttgcagctgtatagaatat

SEQ ID NO: 690574 - DNA, 90 bp, Homo sapiens
ctccagcctttcaaggacaaactagaggagttcttccaaaaagcactcctgtaggaggcctgctgatggcatttcagaagtactctggtg

SEQ ID NO: 690575 - DNA, 87 bp, Homo sapiens
gaaaccacagacatgactgagtcctccatgaagagacgagcctgtggagtgggagacacctgacctttctcaagctgagattgagca

SEQ ID NO: 690576 - DNA, 100 bp, Homo sapiens
tatatcctcaagttaaattatactactgaagaatgtgacatgaaaaaaatgcattatgtggaccctgaccatgtaaagggccatgaaatgacaagcattg

SEQ ID NO: 690577 - DNA, 100 bp, Homo sapiens
tcaccatgccgggcctcaggttcgacaacatccagttgagtggtgattttatgcaatggcttcaagccacagttcttcaccagtgcctcaaggaagcagc

SEQ ID NO: 690578 - DNA, 100 bp, Homo sapiens
gcggcggcgggtgttgtgagcgggaagcgagtaaccagctcataaatcacatcgaacagtttttggatactaatgaaacaccgtattttatgaagagcat

SEQ ID NO: 690579 - DNA, 51 bp, Homo sapiens
ggtggtgtccagctccagactgtggaactgccattggatgtccagaatccc

SEQ ID NO: 690580 - DNA, 82 bp, Homo sapiens
tctctggagacatcttcagcagatcttgatgtggaagaaatggaggactcagaaccaaggatttccaagtgatttcttccaa

SEQ ID NO: 690581 - DNA, 100 bp, Homo sapiens
aaccagcagaatttttgaacaggtgtcatggagaaactccagctgggcccagagattctgcagcgggaaaatccaaggcttatttatgccaggctgagtg

SEQ ID NO: 690582 - DNA, 75 bp, Homo sapiens
agagaccatatatgtcattgggcagggatcaggtacaggtttgcagattccgccagcagcacagcaagctctaca

SEQ ID NO: 690583 - DNA, 100 bp, Homo sapiens
atggatgttaaaaatcaacaccaggactacagtaaggctgaaatcattgaagtgcttggagtgcagaactgaaagaggaaagaccacagcaagattcttt

SEQ ID NO: 690584 - DNA, 90 bp, Homo sapiens
gctgggctccgttctctatcaccacaccaagaacagcgagcaggcgcgcagccacctggagaaggcggagtacgaccccagcaaagcgac

SEQ ID NO: 690585 - DNA, 100 bp, Homo sapiens
gccattgcacccaatgttacagtcatggttggggaattagttggagcacggcttattgctcatgcagtcaccaggagactaaagtccatcaaaaacatcc

SEQ ID NO: 690586 - DNA, 76 bp, Homo sapiens
tggctgactgagaagatgcatgccagagacttcacagtttctgctctgacaattgtggcaattaataaagacccag

SEQ ID NO: 690587 - DNA, 74 bp, Homo sapiens
cgagcagtgggaggagcaatgagaggcaatcctagacaagaggagcagcagcggcaccgcccctcaccctggag

SEQ ID NO: 690588 - DNA, 90 bp, Homo sapiens
agaagtcatctgcacgtccaggctgacgcaccatgtcggtcagtgtccatgagacccgcaagtcgcggagcagcacggggtccatgaacg

SEQ ID NO: 690589 - DNA, 71 bp, Homo sapiens
gatcctgacctctctgatgagatggatcggtttcaggcacagaactgtatatccaataatagtgaaatgga

SEQ ID NO: 690590 - DNA, 88 bp, Homo sapiens
agcgcgggcccggccagcggaagcccctgcgcccgcgccatggaagttcatcagcagaggaaatggtcactctcttggttcaggcggg

SEQ ID NO: 690591 - DNA, 74 bp, Homo sapiens
ccgcccccgtggatctagagctgaagaagagataattgacgaccttgccaacctagtggagaacacagatgaaa

SEQ ID NO: 690592 - DNA, 100 bp, Homo sapiens
cacaagctggctgaaaacaacatccagcccatcttcgcggtgaccagtaggatggtgaagacctacgagcgggctgacgcacgaggcacacaggaaggag

SEQ ID NO: 690593 - DNA, 99 bp, Homo sapiens
attggaagtttcactaagtagtttgaacctggctgttcctccaccaagatttaattatatccagatcgagagacagaagattctgaaagggttcaatga

SEQ ID NO: 690594 - DNA, 100 bp, Homo sapiens
ttatagcctcaaactcccaggctcaagcaatcctaccatgtcagccttcccagtagctggaactacagtctaacttctccctggccatcctgaatgtggg

SEQ ID NO: 690595 - DNA, 82 bp, Homo sapiens
ctcttctctcacctaccccagtacagcagacaaaactctctgacccagtttatgaggaactgtggctgcaccatctgtcttc

SEQ ID NO: 690596 - DNA, 80 bp, Homo sapiens
gctcggtgctggagaacttcgtgggccggggaacgcccttttgcttgtgactggcagggctgcgacaagaagttcgcccg

SEQ ID NO: 690597 - DNA, 74 bp, Homo sapiens
ctacttccacatggcctacaacgtcatcacgccctttctcttgctcaagctgaatgccaagggaacagaagcac

SEQ ID NO: 690598 - DNA, 75 bp, Homo sapiens
cttagaagtggtgatgcaagaagtttctaggaaaggccggacaccaggctgctctttggcgtaaattgcaatcga

SEQ ID NO: 690599 - DNA, 75 bp, Homo sapiens
aacagccgcgacacggcgggcaggaaatccaccccgctgcacttcgccgcaggccaaacgtaccaagaaagtcgg

SEQ ID NO: 690600 - DNA, 97 bp, Homo sapiens
cgaggcagctgtactaggactgggaacgggctgtgggtgagcgtggaggatgctcagatgcacaccgtcaccatctggctcacagtgcgccctgata

SEQ ID NO: 690601 - DNA, 98 bp, Homo sapiens
ccgtcccggctcacctggcggtgcccgaggagtagtcgctggagtccgcgcctccctggacagcaaatcacccaccttgaggtcataaaggagctgga

SEQ ID NO: 690602 - DNA, 100 bp, Homo sapiens
tggctgatccaggacctgtaaacttcatggttcggctttttgtggtgattgtgatgtttgcctggtctatagttggggccagtgtcattcaaagatgtgg

SEQ ID NO: 690603 - DNA, 101 bp, Homo sapiens
ccggcgggcggggcgcagagccaggcagcgcagctcaccatggatgatgatatcgccgcgctcgtcgtcgacaacggctccggcatgtgcaaggccggctt

SEQ ID NO: 690604 - DNA, 100 bp, Homo sapiens
gaaggtgaaagtggagaaatcagatatgagggaaggcaccattggagatatggctatcctgggtataacagaaagttttcaagtgaagcgacaggttctt

SEQ ID NO: 690605 - DNA, 100 bp, Homo sapiens
gcacatccccaggctcctggagccagaagggttgtcgttttggaaagtaggccaacagaaaatcctactgcacacagcaatctctacatcttggctggac

SEQ ID NO: 690606 - DNA, 75 bp, Homo sapiens
ctcacacccctctgagatgagacttgagaaagatcagtctaaagaaaaggagaagaaagtgaaaaaaacaattcc

SEQ ID NO: 690607 - DNA, 97 bp, Homo sapiens
cattgccctttccaattacagacttcacatcaagttcaaggagtctcttgttaataaaccatcaatagatgtctcacaaaacatctggaacaactga

SEQ ID NO: 690608 - DNA, 75 bp, Homo sapiens
aggattttattactggcagcatgtatatcttttgtagatcgacacttgagaaagctggatcaggaactggctaag

SEQ ID NO: 690609 - DNA, 151 bp, Homo sapiens
tcaggcggcgctggcggcggccctgggacccgcggaagccggcatgctggagaagctggagttcgaggacgaaggaagtgaactgatgctggcttctctttgtcttattccaagttgggcatgagattttccctgcattagaaggttgttg

SEQ ID NO: 690610 - DNA, 100 bp, Homo sapiens
tctttcctcacctgcgggaggagatcctcagcggcgccttgcggagggaccccagttatcttggaagatgttgcaatgttgcatatcaaaccagatcaat

SEQ ID NO: 690611 - DNA, 114 bp, Homo sapiens
tgagggtcttgtaaagagtctgccttctggatctcaccagttgcgacaaccaccagttaagcgtttgagacttcgtggtgattggtcagatactggacccagagcaaggccgga

SEQ ID NO: 690612 - DNA, 82 bp, Homo sapiens
gatatcagacaccgagcttcagcaagctctctccaacgaggctgggaggcggcagaatgcagccagaggagggcacaggctg

SEQ ID NO: 690613 - DNA, 75 bp, Homo sapiens
ctgcctgagagatctccaagaattacagtgccctgtactctgtggggatgacggcagtgggcctggccatcctgt

SEQ ID NO: 690614 - DNA, 90 bp, Homo sapiens
ctcagtgagatcttttttgttaaagattgcccaccaaatgagcttgatatttgatcctgatgacctttattcaggggtcaatttctccaa

SEQ ID NO: 690615 - DNA, 80 bp, Homo sapiens
cgatccagcctgcggagcctgtggggcagtgacgagtagcacagcccctctatggtttagatggcagtgctgcaaaggag

SEQ ID NO: 690616 - DNA, 100 bp, Homo sapiens
caacatcaccgtactgcatgtgaagctcaccgagacggcgatccgggcgctcgagacttaccagagccacaaggagtcttttagtcctgctatacagctg

SEQ ID NO: 690617 - DNA, 82 bp, Homo sapiens
tggaggaggagaaagagttttatggtgtgctttaagagccctgcagaaaaaccatcactggtgcaagctatatttaacggag

SEQ ID NO: 690618 - DNA, 100 bp, Homo sapiens
gttttgtgaaaggccaatttcatgaatttcaagagagtaccattggggggcaagtgtccagagaatggctgggatgaaagtacacttgaactctttttac

SEQ ID NO: 690619 - DNA, 75 bp, Homo sapiens
tagcaccccgagaaccgtcagtttgagccagatgtgagagaaccaccaccaatttgccttgatgttagacaaaaa

SEQ ID NO: 690620 - DNA, 83 bp, Homo sapiens
gagaaccagatgggaaactttttgtcccgtgagaacaaagtacaagttatatcagagtctggcagttgcagtggtgcagaatg

SEQ ID NO: 690621 - DNA, 66 bp, Homo sapiens
agatgaagatactggaacattcagaatctacggagaggtacttggatgcattttacaggttagcct

SEQ ID NO: 690622 - DNA, 82 bp, Homo sapiens
tccgtagggaggacaccgtgacttcccggacgctgggaaatgttcaggacctcaaggggctcggctatgagaaggggaagcc

SEQ ID NO: 690623 - DNA, 103 bp, Homo sapiens
ggatcctgaggaggcagctgcggtggcagctgctgagttctcggtgaaggtgctggagaatctggtaaaagcaccattgtgaagcagatgaggatcctgcatg

SEQ ID NO: 690624 - DNA, 99 bp, Homo sapiens
cctgcgtccgagtctccgccgctgcgggcccgctccgacgcggaagggggatatgagactttctactcggaatatcctgagtgttgcgtggatgtaaaa

SEQ ID NO: 690625 - DNA, 83 bp, Homo sapiens
gttcacgcacgggatccagagcgccgcgcacttcgtcatgttcttcgcgccctggtcaaaatgcagatcttcgtgaaaaccct

SEQ ID NO: 690626 - DNA, 100 bp, Homo sapiens
ccgagaacgtgcgggaagagaagatcatcgagcatttcaaacgcgggatctcttcggtcccccaggacctccaggtgcagaagtgaccgcggagactctg

SEQ ID NO: 690627 - DNA, 100 bp, Homo sapiens
ggctgtccttgggagttttccatatgtgaccatggatataaaatcacaggaccaaaatccacacccttatcacagcccagtgccaatggagtccagacgg

SEQ ID NO: 690628 - DNA, 100 bp, Homo sapiens
cgggcgggggcaccgagggctaccacgttctgcgggtatactgcaacatccagatggcacagttttgaaacagttacaaccacctccaaggggcccaaga

SEQ ID NO: 690629 - DNA, 75 bp, Homo sapiens
gtaaagtcgagtatctggtgaagtggaaaggatggcccccaaagtacacggtcctcttctcgcacggcaatgccg

SEQ ID NO: 690630 - DNA, 98 bp, Homo sapiens
ccgcggcgggaggagcctgttcccctgaggaacatcaggagagcattctgggtaataccatgcaaagtgtgattgcattactcagcaatctagttgcc

SEQ ID NO: 690631 - DNA, 98 bp, Homo sapiens
ctcagcctcacaagtagctgggattacaggtgcccagggtggctccgtggcccgcacactcctggaagatgggacattcaaggttcgagtggtgaccc

SEQ ID NO: 690632 - DNA, 100 bp, Homo sapiens
aaaatatgggaaggatttcacggacattcagcaagattttggtctactgacattcagggatgtggccatagaattctctcaggaggagtggaaatgcctg

SEQ ID NO: 690633 - DNA, 75 bp, Homo sapiens
ttacttgaagcatgtctttcagagcccggcaccacccatcttgagtatctgtgacctagagtcccgcagggatgt

SEQ ID NO: 690634 - DNA, 74 bp, Homo sapiens
tgggaactcaagtctgcagtttgtaatcgaaattcacggaacaggtgtaccatacctgagagcaccaggaagtc

SEQ ID NO: 690635 - DNA, 85 bp, Homo sapiens
catcagctcctggttcaacgaggccattgacttcatagagcactacaaacaccactggtttcccgaaaagccgtccaagggctcc

SEQ ID NO: 690636 - DNA, 101 bp, Homo sapiens
tgagttggaaggcttccaggatgacgccgggaaaattccagttttcttctttgtgtgcagtttcctggaaccctgggcatctgcagctgtcaagcgtcgcc

SEQ ID NO: 690637 - DNA, 98 bp, Homo sapiens
agacggacctgtttaagaggcagcaggcgatgccctccacaggtatggcagctgtctgtgatcctggaaacatacgtgtgactgaagctcccaaacac

SEQ ID NO: 690638 - DNA, 50 bp, Homo sapiens
gctcacccgaaggctgattactttggaatagccaggccagaagaaggaag

SEQ ID NO: 690639 - DNA, 83 bp, Homo sapiens
cgctgctcaaggacacggtctacaccgacttcgacggctggtccagggaccctcatcatggccacaggagtccaggactttaa

SEQ ID NO: 690640 - DNA, 75 bp, Homo sapiens
tctcgctcggctgcgggaaatcgggctgaagcgactgagtccgcgatggaggtacatggtgcgggtccgagctgt

SEQ ID NO: 690641 - DNA, 100 bp, Homo sapiens
gccaaaactacaaacaagacttcgcaggtgacttaagagattaaaattaatttggttgctgttggttctgaacaaataatgagttcttttatttgaggta

SEQ ID NO: 690642 - DNA, 101 bp, Homo sapiens
acctggagggcatgactacatctgtcatgagtgatcagcagctggactgtgccttggacctaatgaggcgcctgcctccccagcaaatcgagaaaaacctc

SEQ ID NO: 690643 - DNA, 50 bp, Homo sapiens
atccaggcctgtctgaaggcaatagcaggcaggtcaggctgagctctttc

SEQ ID NO: 690644 - DNA, 98 bp, Homo sapiens
ggaaatcaagcctccccgagtgaggaagttaacaagacagtatagtttttcacacaaaagatgttggacaatttctacaattttgcttcatcatttgc

SEQ ID NO: 690645 - DNA, 96 bp, Homo sapiens
cttttatatttggctaacatgaaaaggggaaagtacactttttctgtcacaccgcatgagaagtgggagattttgataagatctggcgagaacact

SEQ ID NO: 690646 - DNA, 98 bp, Homo sapiens
tgtagaagttgatgaatcaagaggaatgcacatctgtgaagatgctgtaaaaagattgaaagctcacaggagaaaacgacgctccacacctttaactt

SEQ ID NO: 690647 - DNA, 90 bp, Homo sapiens
cagctgtttgtctgttcgacacaggcttggggccgacgggggagacggagccccaggggtacttcggtccttggtggaagcatctagctc

SEQ ID NO: 690648 - DNA, 90 bp, Homo sapiens
gcattgctgctaagtacatgctggattgtagaacttctctctctggatcgcctccggaccaccaccaacgtactgggagactccctggga

SEQ ID NO: 690649 - DNA, 90 bp, Homo sapiens
caccagcagtcagccagcgcatctggatatgggccctcacattttccaaacctgtccatctgctaactattttgactgcagagccatgtc

SEQ ID NO: 690650 - DNA, 83 bp, Homo sapiens
tggaggatgcggacgcggaggccgcctggggtagcggcggcgggagtcctggcgctctgcagagcataatggcagcgtctgag

SEQ ID NO: 690651 - DNA, 100 bp, Homo sapiens
cgccgaagcactcgttccgggggtgaagcctcctgcgccggccttgcctcgggtactggctgtgatcgaacttctcaaccctcagagacttagatcttcc

SEQ ID NO: 690652 - DNA, 90 bp, Homo sapiens
gcgctctggacagtcctgcagctcaacgactcctacgacctggaggagcacctggatatcaaccagaagctgctctttgccggctcccgc

SEQ ID NO: 690653 - DNA, 100 bp, Homo sapiens
cggcaccctggccaggaagcggagggcgcgcgagggtcatcatcagatttgaaatatttaaagtggatacaaaactatttcagcaatgcagacaattaag

SEQ ID NO: 690654 - DNA, 83 bp, Homo sapiens
gccaaaatcagagctggaacctgaggagagaggcctggcctcgccctgtggatgatgatggccttgcccccgtgagctacaac

SEQ ID NO: 690655 - DNA, 85 bp, Homo sapiens
tcagacctgagcaggctgcaaaccaaagcaggtgaccattgtgaggtagatattttgttctaattttccagatgaggaagctgag

SEQ ID NO: 690656 - DNA, 115 bp, Homo sapiens
ggggagaagaggattggaggtgtcagtgttaaaggaacctctacaacgaaggtgaagccacggaagataaggctgaagccgacgtagcttctctgaacagacgcatccagctggt

SEQ ID NO: 690657 - DNA, 82 bp, Homo sapiens
gacctgaagacaaaaatccagaagtacaagcagtctgacacacgatagtaaggagcatttagcaatgatggaaaggattctt

SEQ ID NO: 690658 - DNA, 99 bp, Homo sapiens
agagtggcagaggagctggcggagagcggcctgcgggcgatcgggccgaggaatttcagggaagagccaggtcctgtttgctgtggtgttcactgcccg

SEQ ID NO: 690659 - DNA, 83 bp, Homo sapiens
atcccggaaactccagcgtgtctccagccgtgatttcctcctctgatgctcctcttcagcctttggtatcctctccttctctg

SEQ ID NO: 690660 - DNA, 90 bp, Homo sapiens
ccagcgaagtcttcatcaaccgggaccgtggcttcggcttcatccgcttgattccacagtggtgtgtggagtacatgcgatcattaccag

SEQ ID NO: 690661 - DNA, 143 bp, Homo sapiens
ggcctgttgcctgggggcacacaggtgctggatggtacctcggggttctctcctgcccccaagctggaccatgctcgacagctgaccaaggccatgatgcgaaaggccacggccagccgcctggtcacgcagcgcgatgcgga

SEQ ID NO: 690662 - DNA, 75 bp, Homo sapiens
acggtgtgcaaggggagtcgtggcgtcgtctgcgaccgctgccttctcgggattcagtgtcatttgaagatgtgg

SEQ ID NO: 690663 - DNA, 101 bp, Homo sapiens
tgcccggtgctgggcgcgcaccgtggccaccctgtgggcctggcgctggaggcagcggtgcacgtgcagggtgagttctgcagtcagggtgtccgtgaggg

SEQ ID NO: 690664 - DNA, 75 bp, Homo sapiens
agacgcagtggcctccaaggtgcagacagctgtgactatgaagggggttcgagtgactgtgtttccctcaaagac

SEQ ID NO: 690665 - DNA, 100 bp, Homo sapiens
ctaggacttgtcgcccgtttgcgctctcgccgaggcacaggctgctcgcggaccaccctgctccgaaaactaaggtgctggagaatctggtaaaagcacc

SEQ ID NO: 690666 - DNA, 90 bp, Homo sapiens
caggcccaggccgccccgttccccgagctgtgcagcaccagcaggcagctggctccggttttggggtatctgggctccaggcagaagcac

SEQ ID NO: 690667 - DNA, 75 bp, Homo sapiens
tttttgaagagattcggaaaattgaggataatgaatttcattaccaagaacagtttagaagaagaatgtgaatcc

SEQ ID NO: 690668 - DNA, 90 bp, Homo sapiens
caaactcctcgaagagactgataaaattcatgatgagatttcagtgtcaagcatggatgcttctagacaactaatgttgaatgaagaaca

SEQ ID NO: 690669 - DNA, 95 bp, Homo sapiens
aaaccttcacatcttggtcaagatatgattctataacagactcttccagaaatgatatgaagaggaaatttgccctgacaatggaatttgttgaa

SEQ ID NO: 690670 - DNA, 98 bp, Homo sapiens
acaaactcgaagaacagctgtggaaagaagttgcaaaacactgggtgtctgacttccagcaactgctggcctgtgccagggtgcaagctgagcactgg

SEQ ID NO: 690671 - DNA, 74 bp, Homo sapiens
ctggtcgccatcaagaaagtattgcaggacaagagatttaaggagtggagtcaacatatcaatggagcaagtca

SEQ ID NO: 690672 - DNA, 75 bp, Homo sapiens
ccctgcattgttggtattgaaagtttatgtctgggaaagaaataaagaagaagaagcatttgtttgggttgcgaa

SEQ ID NO: 690673 - DNA, 82 bp, Homo sapiens
gaccaggattctattactggtggttttatgacttacctagtggagcctttatttacagaatgggccaggttttccaatacaa

SEQ ID NO: 690674 - DNA, 100 bp, Homo sapiens
cagagggcctgaggcaggagatgagcaaggatctggaggaggtcgtcatacctcagaagaaaggcaagaaggctgctgcaacctcagcaaagaaggtggt

SEQ ID NO: 690675 - DNA, 75 bp, Homo sapiens
tatagttcctggaggattagcagatcgatttctgaacttctggaacaaacaggacacattggagctggagagccc

SEQ ID NO: 690676 - DNA, 98 bp, Homo sapiens
tcttcaattaaaaaatttattaaaggaagcacacctaagataatgttaattcaagactctcgaagagaagcttcagtgcagatggatttgagatgcta

SEQ ID NO: 690677 - DNA, 83 bp, Homo sapiens
agcagctgtcgccgccgctctcaggaacgaatgcaggaatttgggaactgagctgtgcaagtgctgaagaaggagatttgttt

SEQ ID NO: 690678 - DNA, 75 bp, Homo sapiens
ccgcgcgctgcccgaggcgcgcagtcacccgcagggccaaggtggctcccgctgagaggatgagcaagttcttaa

SEQ ID NO: 690679 - DNA, 96 bp, Homo sapiens
ctggacgacgtgaaggagaaattcgactatggcaacaagtacaagcggcgggtgccccgggatgataatgaagataattcaaatgatgggacccag

SEQ ID NO: 690680 - DNA, 100 bp, Homo sapiens
gcgtcctcatcgggcttatgttcgagggcaactccaacaacattgccaccgtggacatctccgcaggcttcgtgggcttagacacctacgtggaaatccc

SEQ ID NO: 690681 - DNA, 90 bp, Homo sapiens
cagaaacggcccctggcatccattatcaaggaagtttgtgatgggttgttcctcaaagtcattcaagctgtactcgccgaaggagccccc

SEQ ID NO: 690682 - DNA, 99 bp, Homo sapiens
acatggacttcagagaaattctcatgatagcttccaagggacaaggtgtcaacaatgtgccggatcccattgaagataccacgctgcatgtgtccttag

SEQ ID NO: 690683 - DNA, 75 bp, Homo sapiens
gcgccggcgagaagcggccgagccagcagcagccacctacaacaagcacaccaaggtggcagtgaagacgatgaa

SEQ ID NO: 690684 - DNA, 100 bp, Homo sapiens
gaagccaaggacccgactcagaaacccagcccaaatgtctgtgcccttcaacagattttgggcaccaaaaagaaatacttcagcacttgtaagaactggt

SEQ ID NO: 690685 - DNA, 97 bp, Homo sapiens
tatggacttcatcgctttatatcttactactttgaccgcgatgatgtggctttgaagaactttgccaaatactttcttcaccaatctcatgaggaga

SEQ ID NO: 690686 - DNA, 98 bp, Homo sapiens
agttggctgcagatttgtggtgcgttctgagccgtctgtcctgcgccaagaacctgctaaggctgcctcagacctgactgcctggttcagcctcttcg

SEQ ID NO: 690687 - DNA, 50 bp, Homo sapiens
gtttggtcccgggagcctcgccgggagttgtaagacgttcatcgccgtgt

SEQ ID NO: 690688 - DNA, 100 bp, Homo sapiens
tagacatcctctgcagccagaagaacaagaagtaggcattgaccccttgtccagttactctaacaagtctggaggtcccgggactgttgacagccaagga

SEQ ID NO: 690689 - DNA, 74 bp, Homo sapiens
tgaaacctggagtcataccttctatctttgattctccatatcacctacagatcctaattatctcatggctaatg

SEQ ID NO: 690690 - DNA, 139 bp, Homo sapiens
tgagttcctggacggcacccgcaagaccaacaacatcttctgctccaaccccaaccaccgcacccctacgctgaccagtcctctttgatacgcaacctacggctctctgagtccttgaaaaagaaccaactctggaacg

SEQ ID NO: 690691 - DNA, 74 bp, Homo sapiens
cttcgtggaagccatccacacagacaccgacaattttccgcagatttccagtggccccactgatcccttatcca

SEQ ID NO: 690692 - DNA, 100 bp, Homo sapiens
cgacactgttcctgctgagtctgctcttcctggtccaagtttaagtgctgtggggctgctaactacacagattgggagaaaatcccttccatgtcgaaga

SEQ ID NO: 690693 - DNA, 50 bp, Homo sapiens
aattgctggtcctgagcctgaggaaacttggatttaactggccagaagca

SEQ ID NO: 690694 - DNA, 90 bp, Homo sapiens
gcgggcggtgtagaggcggcggacgggccggagggaggatgttaaagccccgcggggcatggtctagtggcccagtcaggacgcggaaac

SEQ ID NO: 690695 - DNA, 98 bp, Homo sapiens
tttccaagtcaggatatgtgcctttcagctttaaagagaattgaagctaaaccaggtggacaggtgaaatgtcagtatatctctgctgtggataaagt

SEQ ID NO: 690696 - DNA, 75 bp, Homo sapiens
ccaggccacttttcacttctgctgcactgctttcagcatgcaaggagaaaactggttgtcctggatgtttgaaaa

SEQ ID NO: 690697 - DNA, 87 bp, Homo sapiens
tcagttcgtcatggggctgtttggaaagacccaggagaagccgcccaaagaactgactgggccagtgccattcgcgtcgcagctctg

SEQ ID NO: 690698 - DNA, 90 bp, Homo sapiens
cttgaattaaaactgaatgaactgataacggagaatggaactgtatgccagcagcttgttgtacaatggagtctcattctgtcgctcaag

SEQ ID NO: 690699 - DNA, 83 bp, Homo sapiens
cctactacaggactgcggacaagggctggcagatgacgaagatgatcctgcagaagctgaaaaggagggaaatgaaatggagg

SEQ ID NO: 690700 - DNA, 75 bp, Homo sapiens
gtcggccttgatcctagcaacaacatgacactggcgacttggacagaatgctttagggttgactttgggaactac

SEQ ID NO: 690701 - DNA, 100 bp, Homo sapiens
tcacggaccttggtcacggccgcaggtgaccccttagcccagctccagtgggcgggtggcaggatggcactggatctttaaaacgcagtggttcctttag

SEQ ID NO: 690702 - DNA, 120 bp, Homo sapiens
ctgaagccagcccgctaccgccgtggcttcatccacaatggcatcatgtgttcctaaacccaaaggaaagaaaaccaaagatatgaaaaaacctgtcagagtacctgctgaaccacaaac

SEQ ID NO: 690703 - DNA, 83 bp, Homo sapiens
gtgcccccagcccagagcccgggggatatgagactttctactcggaatatcctgagtgttgcgtggatgtaaaacccatttca

SEQ ID NO: 690704 - DNA, 75 bp, Homo sapiens
cagacggctcgcactgcgacccgaaggaatatcagaagctctttcctgacattcccatagggtattctgggcatg

SEQ ID NO: 690705 - DNA, 100 bp, Homo sapiens
ccaaagtcacagatgctatagtctggtatcaaaagaagacagtacaatgtagattataaactggagacttacttgaagattgctaggctatatctggagg

SEQ ID NO: 690706 - DNA, 95 bp, Homo sapiens
attactctgacaaggagtccctgtcgttcatgatagacacaatgaaatccaccctcaaagaggggcatatgggggcctctcagaccgcccctcgg

SEQ ID NO: 690707 - DNA, 110 bp, Homo sapiens
caacctggatcttcgaacttttgacacggctttggaaacgacgtcatgtgttagacaatgcagatcttcgtgaagactctgactggtaagaccatcaccctcgaggttga

SEQ ID NO: 690708 - DNA, 100 bp, Homo sapiens
aaacgctaaatcaagcttggaatgatcatcaaacagctatggtgatgattagagacatactaatgtacatggtctacgaccccttccgctttgacccaga

SEQ ID NO: 690709 - DNA, 88 bp, Homo sapiens
tcctgagtagctgagattacagaccaccgagattaatgggagaaggttttgtggtgatgcagtcaaatgatgttgacatctactacta
